United States Patent Application Publication US 2018/0305689 A1 - sequence listing, part 79

SEQ ID NO: 1143933 - RNA, 19 nt, Artificial Sequence
  Description of Artificial Sequence: Synthetic oligonucleotide
  Antisense strand to SEQ ID NO: 1143932
guauaagaaacaguccacg

SEQ ID NO: 1143934 - RNA, 19 nt, Artificial Sequence
  Description of Artificial Sequence: Synthetic oligonucleotide
  Sense strand starting at position 2422 of SEQ ID NO: 916276
guggacuguuucuuauaca

SEQ ID NO: 1143935 - RNA, 19 nt, Artificial Sequence
  Description of Artificial Sequence: Synthetic oligonucleotide
  Antisense strand to SEQ ID NO: 1143934
uguauaagaaacaguccac

SEQ ID NO: 1143936 - RNA, 19 nt, Artificial Sequence
  Description of Artificial Sequence: Synthetic oligonucleotide
  Sense strand starting at position 2423 of SEQ ID NO: 916276
uggacuguuucuuauacaa

SEQ ID NO: 1143937 - RNA, 19 nt, Artificial Sequence
  Description of Artificial Sequence: Synthetic oligonucleotide
  Antisense strand to SEQ ID NO: 1143936
uuguauaagaaacagucca

SEQ ID NO: 1143938 - RNA, 19 nt, Artificial Sequence
  Description of Artificial Sequence: Synthetic oligonucleotide
  Sense strand starting at position 2550 of SEQ ID NO: 916276
gagugaugaccagacguga

SEQ ID NO: 1143939 - RNA, 19 nt, Artificial Sequence
  Description of Artificial Sequence: Synthetic oligonucleotide
  Antisense strand to SEQ ID NO: 1143938
ucacgucuggucaucacuc

SEQ ID NO: 1143940 - RNA, 19 nt, Artificial Sequence
  Description of Artificial Sequence: Synthetic oligonucleotide
  Sense strand starting at position 2564 of SEQ ID NO: 916276
cgugaaugcuuccugugcu

SEQ ID NO: 1143941 - RNA, 19 nt, Artificial Sequence
  Description of Artificial Sequence: Synthetic oligonucleotide
  Antisense strand to SEQ ID NO: 1143940
agcacaggaagcauucacg

SEQ ID NO: 1143942 - RNA, 19 nt, Artificial Sequence
  Description of Artificial Sequence: Synthetic oligonucleotide
  Sense strand starting at position 2757 of SEQ ID NO: 916276
ccgggucucuuuguaaaug

SEQ ID NO: 1143943 - RNA, 19 nt, Artificial Sequence
  Description of Artificial Sequence: Synthetic oligonucleotide
  Antisense strand to SEQ ID NO: 1143942
cauuuacaaagagacccgg

SEQ ID NO: 1143944 - RNA, 19 nt, Artificial Sequence
  Description of Artificial Sequence: Synthetic oligonucleotide
  Sense strand starting at position 2765 of SEQ ID NO: 916276
cuuuguaaaugaguccaga

SEQ ID NO: 1143945 - RNA, 19 nt, Artificial Sequence
  Description of Artificial Sequence: Synthetic oligonucleotide
  Antisense strand to SEQ ID NO: 1143944
ucuggacucauuuacaaag

SEQ ID NO: 1143946 - RNA, 19 nt, Artificial Sequence
  Description of Artificial Sequence: Synthetic oligonucleotide
  Sense strand starting at position 2797 of SEQ ID NO: 916276
auggcagcuuauucuuaua

SEQ ID NO: 1143947 - RNA, 19 nt, Artificial Sequence
  Description of Artificial Sequence: Synthetic oligonucleotide
  Antisense strand to SEQ ID NO: 1143946
uauaagaauaagcugccau

SEQ ID NO: 1143948 - RNA, 19 nt, Artificial Sequence
  Description of Artificial Sequence: Synthetic oligonucleotide
  Sense strand starting at position 2799 of SEQ ID NO: 916276
ggcagcuuauucuuauaua

SEQ ID NO: 1143949 - RNA, 19 nt, Artificial Sequence
  Description of Artificial Sequence: Synthetic oligonucleotide
  Antisense strand to SEQ ID NO: 1143948
uauauaagaauaagcugcc

SEQ ID NO: 1143950 - RNA, 19 nt, Artificial Sequence
  Description of Artificial Sequence: Synthetic oligonucleotide
  Sense strand starting at position 2942 of SEQ ID NO: 916276
acaguuaacaccgauacgu

SEQ ID NO: 1143951 - RNA, 19 nt, Artificial Sequence
  Description of Artificial Sequence: Synthetic oligonucleotide
  Antisense strand to SEQ ID NO: 1143950
acguaucgguguuaacugu

SEQ ID NO: 1143952 - RNA, 19 nt, Artificial Sequence
  Description of Artificial Sequence: Synthetic oligonucleotide
  Sense strand starting at position 2944 of SEQ ID NO: 916276
aguuaacaccgauacguga

SEQ ID NO: 1143953 - RNA, 19 nt, Artificial Sequence
  Description of Artificial Sequence: Synthetic oligonucleotide
  Antisense strand to SEQ ID NO: 1143952
ucacguaucgguguuaacu

SEQ ID NO: 1143954 - RNA, 19 nt, Artificial Sequence
  Description of Artificial Sequence: Synthetic oligonucleotide
  Sense strand starting at position 2948 of SEQ ID NO: 916276
aacaccgauacgugaugua

SEQ ID NO: 1143955 - RNA, 19 nt, Artificial Sequence
  Description of Artificial Sequence: Synthetic oligonucleotide
  Antisense strand to SEQ ID NO: 1143954
uacaucacguaucgguguu

SEQ ID NO: 1143956 - RNA, 19 nt, Artificial Sequence
  Description of Artificial Sequence: Synthetic oligonucleotide
  Sense strand starting at position 2953 of SEQ ID NO: 916276
cgauacgugauguaauguu

SEQ ID NO: 1143957 - RNA, 19 nt, Artificial Sequence
  Description of Artificial Sequence: Synthetic oligonucleotide
  Antisense strand to SEQ ID NO: 1143956
aacauuacaucacguaucg

SEQ ID NO: 1143958 - RNA, 19 nt, Artificial Sequence
  Description of Artificial Sequence: Synthetic oligonucleotide
  Sense strand starting at position 3102 of SEQ ID NO: 916276
ugucauuacugccuagaac

SEQ ID NO: 1143959 - RNA, 19 nt, Artificial Sequence
  Description of Artificial Sequence: Synthetic oligonucleotide
  Antisense strand to SEQ ID NO: 1143958
guucuaggcaguaaugaca

SEQ ID NO: 1143960 - RNA, 19 nt, Artificial Sequence
  Description of Artificial Sequence: Synthetic oligonucleotide
  Sense strand starting at position 3103 of SEQ ID NO: 916276
gucauuacugccuagaaca

SEQ ID NO: 1143961 - RNA, 19 nt, Artificial Sequence
  Description of Artificial Sequence: Synthetic oligonucleotide
  Antisense strand to SEQ ID NO: 1143960
uguucuaggcaguaaugac

SEQ ID NO: 1143962 - RNA, 19 nt, Artificial Sequence
  Description of Artificial Sequence: Synthetic oligonucleotide
  Sense strand starting at position 3111 of SEQ ID NO: 916276
ugccuagaacaaugaugaa

SEQ ID NO: 1143963 - RNA, 19 nt, Artificial Sequence
  Description of Artificial Sequence: Synthetic oligonucleotide
  Antisense strand to SEQ ID NO: 1143962
uucaucauuguucuaggca

SEQ ID NO: 1143964 - RNA, 19 nt, Artificial Sequence
  Description of Artificial Sequence: Synthetic oligonucleotide
  Sense strand starting at position 3161 of SEQ ID NO: 916276
agcuauugucaugguuuag

SEQ ID NO: 1143965 - RNA, 19 nt, Artificial Sequence
  Description of Artificial Sequence: Synthetic oligonucleotide
  Antisense strand to SEQ ID NO: 1143964
cuaaaccaugacaauagcu

SEQ ID NO: 1143966 - RNA, 19 nt, Artificial Sequence
  Description of Artificial Sequence: Synthetic oligonucleotide
  Sense strand starting at position 3181 of SEQ ID NO: 916276
cggucuuuccggagccagu

SEQ ID NO: 1143967 - RNA, 19 nt, Artificial Sequence
  Description of Artificial Sequence: Synthetic oligonucleotide
  Antisense strand to SEQ ID NO: 1143966
acuggcuccggaaagaccg

SEQ ID NO: 1143968 - RNA, 19 nt, Artificial Sequence
  Description of Artificial Sequence: Synthetic oligonucleotide
  Sense strand starting at position 3207 of SEQ ID NO: 916276
agccuaaauccuggcuuua

SEQ ID NO: 1143969 - RNA, 19 nt, Artificial Sequence
  Description of Artificial Sequence: Synthetic oligonucleotide
  Antisense strand to SEQ ID NO: 1143968
uaaagccaggauuuaggcu

SEQ ID NO: 1143970 - RNA, 19 nt, Artificial Sequence
  Description of Artificial Sequence: Synthetic oligonucleotide
  Sense strand starting at position 3219 of SEQ ID NO: 916276
ggcuuuaccacugagcagu

SEQ ID NO: 1143971 - RNA, 19 nt, Artificial Sequence
  Description of Artificial Sequence: Synthetic oligonucleotide
  Antisense strand to SEQ ID NO: 1143970
acugcucagugguaaagcc

SEQ ID NO: 1143972 - RNA, 19 nt, Artificial Sequence
  Description of Artificial Sequence: Synthetic oligonucleotide
  Sense strand starting at position 3232 of SEQ ID NO: 916276
agcagugaccuuugauaag

SEQ ID NO: 1143973 - RNA, 19 nt, Artificial Sequence
  Description of Artificial Sequence: Synthetic oligonucleotide
  Antisense strand to SEQ ID NO: 1143972
cuuaucaaaggucacugcu

SEQ ID NO: 1143974 - RNA, 19 nt, Artificial Sequence
  Description of Artificial Sequence: Synthetic oligonucleotide
  Sense strand starting at position 3235 of SEQ ID NO: 916276
agugaccuuugauaaguua

SEQ ID NO: 1143975 - RNA, 19 nt, Artificial Sequence
  Description of Artificial Sequence: Synthetic oligonucleotide
  Antisense strand to SEQ ID NO: 1143974
uaacuuaucaaaggucacu

SEQ ID NO: 1143976 - RNA, 19 nt, Artificial Sequence
  Description of Artificial Sequence: Synthetic oligonucleotide
  Sense strand starting at position 3368 of SEQ ID NO: 916276
acgagauguuccuggaaug

SEQ ID NO: 1143977 - RNA, 19 nt, Artificial Sequence
  Description of Artificial Sequence: Synthetic oligonucleotide
  Antisense strand to SEQ ID NO: 1143976
cauuccaggaacaucucgu

SEQ ID NO: 1143978 - RNA, 19 nt, Artificial Sequence
  Description of Artificial Sequence: Synthetic oligonucleotide
  Sense strand starting at position 3369 of SEQ ID NO: 916276
cgagauguuccuggaauga

SEQ ID NO: 1143979 - RNA, 19 nt, Artificial Sequence
  Description of Artificial Sequence: Synthetic oligonucleotide
  Antisense strand to SEQ ID NO: 1143978
ucauuccaggaacaucucg

SEQ ID NO: 1143980 - RNA, 19 nt, Artificial Sequence
  Description of Artificial Sequence: Synthetic oligonucleotide
  Sense strand starting at position 3380 of SEQ ID NO: 916276
uggaaugaguucuguaaac

SEQ ID NO: 1143981 - RNA, 19 nt, Artificial Sequence
  Description of Artificial Sequence: Synthetic oligonucleotide
  Antisense strand to SEQ ID NO: 1143980
guuuacagaacucauucca

SEQ ID NO: 1143982 - RNA, 19 nt, Artificial Sequence
  Description of Artificial Sequence: Synthetic oligonucleotide
  Sense strand starting at position 3925 of SEQ ID NO: 916276
uccucuucccucugaguca

SEQ ID NO: 1143983 - RNA, 19 nt, Artificial Sequence
  Description of Artificial Sequence: Synthetic oligonucleotide
  Antisense strand to SEQ ID NO: 1143982
ugacucagagggaagagga

SEQ ID NO: 1143984 - RNA, 19 nt, Artificial Sequence
  Description of Artificial Sequence: Synthetic oligonucleotide
  Sense strand starting at position 3956 of SEQ ID NO: 916276
augagugaaguucgaccau

SEQ ID NO: 1143985 - RNA, 19 nt, Artificial Sequence
  Description of Artificial Sequence: Synthetic oligonucleotide
  Antisense strand to SEQ ID NO: 1143984
auggucgaacuucacucau

SEQ ID NO: 1143986 - RNA, 19 nt, Artificial Sequence
  Description of Artificial Sequence: Synthetic oligonucleotide
  Sense strand starting at position 94 of SEQ ID NO: 916277
gugcuaguucuguacuaac

SEQ ID NO: 1143987 - RNA, 19 nt, Artificial Sequence
  Description of Artificial Sequence: Synthetic oligonucleotide
  Antisense strand to SEQ ID NO: 1143986
guuaguacagaacuagcac

SEQ ID NO: 1143988 - RNA, 19 nt, Artificial Sequence
  Description of Artificial Sequence: Synthetic oligonucleotide
  Sense strand starting at position 137 of SEQ ID NO: 916277
gcuagucaguucucaaauu

SEQ ID NO: 1143989 - RNA, 19 nt, Artificial Sequence
  Description of Artificial Sequence: Synthetic oligonucleotide
  Antisense strand to SEQ ID NO: 1143988
aauuugagaacugacuagc

SEQ ID NO: 1143990 - RNA, 19 nt, Artificial Sequence
  Description of Artificial Sequence: Synthetic oligonucleotide
  Sense strand starting at position 138 of SEQ ID NO: 916277
cuagucaguucucaaauuu

SEQ ID NO: 1143991 - RNA, 19 nt, Artificial Sequence
  Description of Artificial Sequence: Synthetic oligonucleotide
  Antisense strand to SEQ ID NO: 1143990
aaauuugagaacugacuag

SEQ ID NO: 1143992 - RNA, 19 nt, Artificial Sequence
  Description of Artificial Sequence: Synthetic oligonucleotide
  Sense strand starting at position 224 of SEQ ID NO: 916277
ggcccuacaucccuaaagu

SEQ ID NO: 1143993 - RNA, 19 nt, Artificial Sequence
  Description of Artificial Sequence: Synthetic oligonucleotide
  Antisense strand to SEQ ID NO: 1143992
acuuuagggauguagggcc

SEQ ID NO: 1143994 - RNA, 19 nt, Artificial Sequence
  Description of Artificial Sequence: Synthetic oligonucleotide
  Sense strand starting at position 253 of SEQ ID NO: 916277
gcguaaauacuacacuuga

SEQ ID NO: 1143995 - RNA, 19 nt, Artificial Sequence
  Description of Artificial Sequence: Synthetic oligonucleotide
  Antisense strand to SEQ ID NO: 1143994
ucaaguguaguauuuacgc

SEQ ID NO: 1143996 - RNA, 19 nt, Artificial Sequence
  Description of Artificial Sequence: Synthetic oligonucleotide
  Sense strand starting at position 612 of SEQ ID NO: 916277
ucaguacuguuuccucuua

SEQ ID NO: 1143997 - RNA, 19 nt, Artificial Sequence
  Description of Artificial Sequence: Synthetic oligonucleotide
  Antisense strand to SEQ ID NO: 1143996
uaagaggaaacaguacuga

SEQ ID NO: 1143998 - RNA, 19 nt, Artificial Sequence
  Description of Artificial Sequence: Synthetic oligonucleotide
  Sense strand starting at position 624 of SEQ ID NO: 916277
ccucuuagcagaggagaaa

SEQ ID NO: 1143999 - RNA, 19 nt, Artificial Sequence
  Description of Artificial Sequence: Synthetic oligonucleotide
  Antisense strand to SEQ ID NO: 1143998
uuucuccucugcuaagagg

SEQ ID NO: 1144000 - RNA, 19 nt, Artificial Sequence
  Description of Artificial Sequence: Synthetic oligonucleotide
  Sense strand starting at position 722 of SEQ ID NO: 916277
uggugugaauaacucauau

SEQ ID NO: 1144001 - RNA, 19 nt, Artificial Sequence
  Description of Artificial Sequence: Synthetic oligonucleotide
  Antisense strand to SEQ ID NO: 1144000
auaugaguuauucacacca

SEQ ID NO: 1144002 - RNA, 19 nt, Artificial Sequence
  Description of Artificial Sequence: Synthetic oligonucleotide
  Sense strand starting at position 773 of SEQ ID NO: 916277
caguuaguguuuccauuau

SEQ ID NO: 1144003 - RNA, 19 nt, Artificial Sequence
  Description of Artificial Sequence: Synthetic oligonucleotide
  Antisense strand to SEQ ID NO: 1144002
auaauggaaacacuaacug

SEQ ID NO: 1144004 - RNA, 19 nt, Artificial Sequence
  Description of Artificial Sequence: Synthetic oligonucleotide
  Sense strand starting at position 779 of SEQ ID NO: 916277
guguuuccauuaucagcua

SEQ ID NO: 1144005 - RNA, 19 nt, Artificial Sequence
  Description of Artificial Sequence: Synthetic oligonucleotide
  Antisense strand to SEQ ID NO: 1144004
uagcugauaauggaaacac

SEQ ID NO: 1144006 - RNA, 19 nt, Artificial Sequence
  Description of Artificial Sequence: Synthetic oligonucleotide
  Sense strand starting at position 792 of SEQ ID NO: 916277
cagcuagaggguuaguuaa

SEQ ID NO: 1144007 - RNA, 19 nt, Artificial Sequence
  Description of Artificial Sequence: Synthetic oligonucleotide
  Antisense strand to SEQ ID NO: 1144006
uuaacuaacccucuagcug

SEQ ID NO: 1144008 - RNA, 19 nt, Artificial Sequence
  Description of Artificial Sequence: Synthetic oligonucleotide
  Sense strand starting at position 794 of SEQ ID NO: 916277
gcuagaggguuaguuaaca

SEQ ID NO: 1144009 - RNA, 19 nt, Artificial Sequence
  Description of Artificial Sequence: Synthetic oligonucleotide
  Antisense strand to SEQ ID NO: 1144008
uguuaacuaacccucuagc

SEQ ID NO: 1144010 - RNA, 19 nt, Artificial Sequence
  Description of Artificial Sequence: Synthetic oligonucleotide
  Sense strand starting at position 803 of SEQ ID NO: 916277
uuaguuaacaugugguaga

SEQ ID NO: 1144011 - RNA, 19 nt, Artificial Sequence
  Description of Artificial Sequence: Synthetic oligonucleotide
  Antisense strand to SEQ ID NO: 1144010
ucuaccacauguuaacuaa

SEQ ID NO: 1144012 - RNA, 19 nt, Artificial Sequence
  Description of Artificial Sequence: Synthetic oligonucleotide
  Sense strand starting at position 814 of SEQ ID NO: 916277
gugguagaaugaggauuua

SEQ ID NO: 1144013 - RNA, 19 nt, Artificial Sequence
  Description of Artificial Sequence: Synthetic oligonucleotide
  Antisense strand to SEQ ID NO: 1144012
uaaauccucauucuaccac

SEQ ID NO: 1144014 - RNA, 19 nt, Artificial Sequence
  Description of Artificial Sequence: Synthetic oligonucleotide
  Sense strand starting at position 838 of SEQ ID NO: 916277
gguauaaaugcacauagca

SEQ ID NO: 1144015 - RNA, 19 nt, Artificial Sequence
  Description of Artificial Sequence: Synthetic oligonucleotide
  Antisense strand to SEQ ID NO: 1144014
ugcuaugugcauuuauacc

SEQ ID NO: 1144016 - RNA, 19 nt, Artificial Sequence
  Description of Artificial Sequence: Synthetic oligonucleotide
  Sense strand starting at position 1078 of SEQ ID NO: 916277
ugguuaagguuuguaucuu

SEQ ID NO: 1144017 - RNA, 19 nt, Artificial Sequence
  Description of Artificial Sequence: Synthetic oligonucleotide
  Antisense strand to SEQ ID NO: 1144016
aagauacaaaccuuaacca

SEQ ID NO: 1144018 - RNA, 19 nt, Artificial Sequence
  Description of Artificial Sequence: Synthetic oligonucleotide
  Sense strand starting at position 1290 of SEQ ID NO: 916277
agaaauaucacgcauccgu

SEQ ID NO: 1144019 - RNA, 19 nt, Artificial Sequence
  Description of Artificial Sequence: Synthetic oligonucleotide
  Antisense strand to SEQ ID NO: 1144018
acggaugcgugauauuucu

SEQ ID NO: 1144020 - RNA, 19 nt, Artificial Sequence
  Description of Artificial Sequence: Synthetic oligonucleotide
  Sense strand starting at position 1352 of SEQ ID NO: 916277
aucacugaggucuguaaac

SEQ ID NO: 1144021 - RNA, 19 nt, Artificial Sequence
  Description of Artificial Sequence: Synthetic oligonucleotide
  Antisense strand to SEQ ID NO: 1144020
guuuacagaccucagugau

SEQ ID NO: 1144022 - RNA, 19 nt, Artificial Sequence
  Description of Artificial Sequence: Synthetic oligonucleotide
  Sense strand starting at position 1598 of SEQ ID NO: 916277
acagguuaguaucuuccaa

SEQ ID NO: 1144023 - RNA, 19 nt, Artificial Sequence
  Description of Artificial Sequence: Synthetic oligonucleotide
  Antisense strand to SEQ ID NO: 1144022
uuggaagauacuaaccugu

SEQ ID NO: 1144024 - RNA, 19 nt, Artificial Sequence
  Description of Artificial Sequence: Synthetic oligonucleotide
  Sense strand starting at position 1600 of SEQ ID NO: 916277
agguuaguaucuuccaaca

SEQ ID NO: 1144025 - RNA, 19 nt, Artificial Sequence
  Description of Artificial Sequence: Synthetic oligonucleotide
  Antisense strand to SEQ ID NO: 1144024
uguuggaagauacuaaccu

SEQ ID NO: 1144026 - RNA, 19 nt, Artificial Sequence
  Description of Artificial Sequence: Synthetic oligonucleotide
  Sense strand starting at position 1676 of SEQ ID NO: 916277
accucaggucaguguugaa

SEQ ID NO: 1144027 - RNA, 19 nt, Artificial Sequence
  Description of Artificial Sequence: Synthetic oligonucleotide
  Antisense strand to SEQ ID NO: 1144026
uucaacacugaccugaggu

SEQ ID NO: 1144028 - RNA, 19 nt, Artificial Sequence
  Description of Artificial Sequence: Synthetic oligonucleotide
  Sense strand starting at position 1688 of SEQ ID NO: 916277
uguugaaauccugcgcgau

SEQ ID NO: 1144029 - RNA, 19 nt, Artificial Sequence
  Description of Artificial Sequence: Synthetic oligonucleotide
  Antisense strand to SEQ ID NO: 1144028
aucgcgcaggauuucaaca

SEQ ID NO: 1144030 - RNA, 19 nt, Artificial Sequence
  Description of Artificial Sequence: Synthetic oligonucleotide
  Sense strand starting at position 2648 of SEQ ID NO: 916277
uguggaaucacaugugaua

SEQ ID NO: 1144031 - RNA, 19 nt, Artificial Sequence
  Description of Artificial Sequence: Synthetic oligonucleotide
  Antisense strand to SEQ ID NO: 1144030
uaucacaugugauuccaca

SEQ ID NO: 1144032 - RNA, 19 nt, Artificial Sequence
  Description of Artificial Sequence: Synthetic oligonucleotide
  Sense strand starting at position 2651 of SEQ ID NO: 916277
ggaaucacaugugauaaac

SEQ ID NO: 1144033 - RNA, 19 nt, Artificial Sequence
  Description of Artificial Sequence: Synthetic oligonucleotide
  Antisense strand to SEQ ID NO: 1144032
guuuaucacaugugauucc

SEQ ID NO: 1144034 - RNA, 19 nt, Artificial Sequence
  Description of Artificial Sequence: Synthetic oligonucleotide
  Sense strand starting at position 2673 of SEQ ID NO: 916277
cacacaaguuggcugaaua

SEQ ID NO: 1144035 - RNA, 19 nt, Artificial Sequence
  Description of Artificial Sequence: Synthetic oligonucleotide
  Antisense strand to SEQ ID NO: 1144034
uauucagccaacuugugug

SEQ ID NO: 1144036 - RNA, 19 nt, Artificial Sequence
  Description of Artificial Sequence: Synthetic oligonucleotide
  Sense strand starting at position 2674 of SEQ ID NO: 916277
acacaaguuggcugaauau

SEQ ID NO: 1144037 - RNA, 19 nt, Artificial Sequence
  Description of Artificial Sequence: Synthetic oligonucleotide
  Antisense strand to SEQ ID NO: 1144036
auauucagccaacuugugu

SEQ ID NO: 1144038 - RNA, 19 nt, Artificial Sequence
  Description of Artificial Sequence: Synthetic oligonucleotide
  Sense strand starting at position 2683 of SEQ ID NO: 916277
ggcugaauaucuguuacuc

SEQ ID NO: 1144039 - RNA, 19 nt, Artificial Sequence
  Description of Artificial Sequence: Synthetic oligonucleotide
  Antisense strand to SEQ ID NO: 1144038
gaguaacagauauucagcc

SEQ ID NO: 1144040 - RNA, 19 nt, Artificial Sequence
  Description of Artificial Sequence: Synthetic oligonucleotide
  Sense strand starting at position 2726 of SEQ ID NO: 916277
gucaucugccaagagguau

SEQ ID NO: 1144041 - RNA, 19 nt, Artificial Sequence
  Description of Artificial Sequence: Synthetic oligonucleotide
  Antisense strand to SEQ ID NO: 1144040
auaccucuuggcagaugac

SEQ ID NO: 1144042 - RNA, 19 nt, Artificial Sequence
  Description of Artificial Sequence: Synthetic oligonucleotide
  Sense strand starting at position 2783 of SEQ ID NO: 916277
guuacaguucuauaugaua

SEQ ID NO: 1144043 - RNA, 19 nt, Artificial Sequence
  Description of Artificial Sequence: Synthetic oligonucleotide
  Antisense strand to SEQ ID NO: 1144042
uaucauauagaacuguaac

SEQ ID NO: 1144044 - RNA, 19 nt, Artificial Sequence
  Description of Artificial Sequence: Synthetic oligonucleotide
  Sense strand starting at position 2797 of SEQ ID NO: 916277
ugauauuuguuccauggag

SEQ ID NO: 1144045 - RNA, 19 nt, Artificial Sequence
  Description of Artificial Sequence: Synthetic oligonucleotide
  Antisense strand to SEQ ID NO: 1144044
cuccauggaacaaauauca

SEQ ID NO: 1144046 - RNA, 19 nt, Artificial Sequence
  Description of Artificial Sequence: Synthetic oligonucleotide
  Sense strand starting at position 2804 of SEQ ID NO: 916277
uguuccauggaguaaauca

SEQ ID NO: 1144047 - RNA, 19 nt, Artificial Sequence
  Description of Artificial Sequence: Synthetic oligonucleotide
  Antisense strand to SEQ ID NO: 1144046
ugauuuacuccauggaaca

SEQ ID NO: 1144048 - RNA, 19 nt, Artificial Sequence
  Description of Artificial Sequence: Synthetic oligonucleotide
  Sense strand starting at position 2918 of SEQ ID NO: 916277
cgaucucgucucgcugaaa

SEQ ID NO: 1144049 - RNA, 19 nt, Artificial Sequence
  Description of Artificial Sequence: Synthetic oligonucleotide
  Antisense strand to SEQ ID NO: 1144048
uuucagcgagacgagaucg

SEQ ID NO: 1144050 - RNA, 19 nt, Artificial Sequence
  Description of Artificial Sequence: Synthetic oligonucleotide
  Sense strand starting at position 3524 of SEQ ID NO: 916277
uggauugaccauugauacu

SEQ ID NO: 1144051 - RNA, 19 nt, Artificial Sequence
  Description of Artificial Sequence: Synthetic oligonucleotide
  Antisense strand to SEQ ID NO: 1144050
aguaucaauggucaaucca

SEQ ID NO: 1144052 - RNA, 19 nt, Artificial Sequence
  Description of Artificial Sequence: Synthetic oligonucleotide
  Sense strand starting at position 3694 of SEQ ID NO: 916277
uguugagugccugaaucca

SEQ ID NO: 1144053 - RNA, 19 nt, Artificial Sequence
  Description of Artificial Sequence: Synthetic oligonucleotide
  Antisense strand to SEQ ID NO: 1144052
uggauucaggcacucaaca

SEQ ID NO: 1144054 - RNA, 19 nt, Artificial Sequence
  Description of Artificial Sequence: Synthetic oligonucleotide
  Sense strand starting at position 3738 of SEQ ID NO: 916277
cccauaaucucugugcaga

SEQ ID NO: 1144055 - RNA, 19 nt, Artificial Sequence
  Description of Artificial Sequence: Synthetic oligonucleotide
  Antisense strand to SEQ ID NO: 1144054
ucugcacagagauuauggg

SEQ ID NO: 1144056 - RNA, 19 nt, Artificial Sequence
  Description of Artificial Sequence: Synthetic oligonucleotide
  Sense strand starting at position 3739 of SEQ ID NO: 916277
ccauaaucucugugcagac

SEQ ID NO: 1144057 - RNA, 19 nt, Artificial Sequence
  Description of Artificial Sequence: Synthetic oligonucleotide
  Antisense strand to SEQ ID NO: 1144056
gucugcacagagauuaugg

SEQ ID NO: 1144058 - RNA, 19 nt, Artificial Sequence
  Description of Artificial Sequence: Synthetic oligonucleotide
  Sense strand starting at position 3770 of SEQ ID NO: 916277
cccagaugccuuuggaguu

SEQ ID NO: 1144059 - RNA, 19 nt, Artificial Sequence
  Description of Artificial Sequence: Synthetic oligonucleotide
  Antisense strand to SEQ ID NO: 1144058
aacuccaaaggcaucuggg

SEQ ID NO: 1144060 - RNA, 19 nt, Artificial Sequence
  Description of Artificial Sequence: Synthetic oligonucleotide
  Sense strand starting at position 3805 of SEQ ID NO: 916277
agcaauugauaguuucuca

SEQ ID NO: 1144061 - RNA, 19 nt, Artificial Sequence
  Description of Artificial Sequence: Synthetic oligonucleotide
  Antisense strand to SEQ ID NO: 1144060
ugagaaacuaucaauugcu

SEQ ID NO: 1144062 - RNA, 19 nt, Artificial Sequence
  Description of Artificial Sequence: Synthetic oligonucleotide
  Sense strand starting at position 3809 of SEQ ID NO: 916277
auugauaguuucucagacu

SEQ ID NO: 1144063 - RNA, 19 nt, Artificial Sequence
  Description of Artificial Sequence: Synthetic oligonucleotide
  Antisense strand to SEQ ID NO: 1144062
agucugagaaacuaucaau

SEQ ID NO: 1144064 - RNA, 19 nt, Artificial Sequence
  Description of Artificial Sequence: Synthetic oligonucleotide
  Sense strand starting at position 3829 of SEQ ID NO: 916277
uuauauacagcguaaagaa

SEQ ID NO: 1144065 - RNA, 19 nt, Artificial Sequence
  Description of Artificial Sequence: Synthetic oligonucleotide
  Antisense strand to SEQ ID NO: 1144064
uucuuuacgcuguauauaa

SEQ ID NO: 1144066 - RNA, 19 nt, Artificial Sequence
  Description of Artificial Sequence: Synthetic oligonucleotide
  Sense strand starting at position 320 of SEQ ID NO: 916278
cggccagcccuguucuaau

SEQ ID NO: 1144067 - RNA, 19 nt, Artificial Sequence
  Description of Artificial Sequence: Synthetic oligonucleotide
  Antisense strand to SEQ ID NO: 1144066
auuagaacagggcuggccg

SEQ ID NO: 1144068 - RNA, 19 nt, Artificial Sequence
  Description of Artificial Sequence: Synthetic oligonucleotide
  Sense strand starting at position 411 of SEQ ID NO: 916278
aagaaagugguuugaagcu

SEQ ID NO: 1144069 - RNA, 19 nt, Artificial Sequence
  Description of Artificial Sequence: Synthetic oligonucleotide
  Antisense strand to SEQ ID NO: 1144068
agcuucaaaccacuuucuu

SEQ ID NO: 1144070 - RNA, 19 nt, Artificial Sequence
  Description of Artificial Sequence: Synthetic oligonucleotide
  Sense strand starting at position 456 of SEQ ID NO: 916278
uguaucuguauccagguaa

SEQ ID NO: 1144071 - RNA, 19 nt, Artificial Sequence
  Description of Artificial Sequence: Synthetic oligonucleotide
  Antisense strand to SEQ ID NO: 1144070
uuaccuggauacagauaca

SEQ ID NO: 1144072 - RNA, 19 nt, Artificial Sequence
  Description of Artificial Sequence: Synthetic oligonucleotide
  Sense strand starting at position 573 of SEQ ID NO: 916278
aacuccuucugguugagau

SEQ ID NO: 1144073 - RNA, 19 nt, Artificial Sequence
  Description of Artificial Sequence: Synthetic oligonucleotide
  Antisense strand to SEQ ID NO: 1144072
aucucaaccagaaggaguu

SEQ ID NO: 1144074 - RNA, 19 nt, Artificial Sequence
  Description of Artificial Sequence: Synthetic oligonucleotide
  Sense strand starting at position 574 of SEQ ID NO: 916278
acuccuucugguugagaug

SEQ ID NO: 1144075 - RNA, 19 nt, Artificial Sequence
  Description of Artificial Sequence: Synthetic oligonucleotide
  Antisense strand to SEQ ID NO: 1144074
caucucaaccagaaggagu

SEQ ID NO: 1144076 - RNA, 19 nt, Artificial Sequence
  Description of Artificial Sequence: Synthetic oligonucleotide
  Sense strand starting at position 580 of SEQ ID NO: 916278
ucugguugagauggaauga

SEQ ID NO: 1144077 - RNA, 19 nt, Artificial Sequence
  Description of Artificial Sequence: Synthetic oligonucleotide
  Antisense strand to SEQ ID NO: 1144076
ucauuccaucucaaccaga

SEQ ID NO: 1144078 - RNA, 19 nt, Artificial Sequence
  Description of Artificial Sequence: Synthetic oligonucleotide
  Sense strand starting at position 641 of SEQ ID NO: 916278
acgggagacucguuacaga

SEQ ID NO: 1144079 - RNA, 19 nt, Artificial Sequence
  Description of Artificial Sequence: Synthetic oligonucleotide
  Antisense strand to SEQ ID NO: 1144078
ucuguaacgagucucccgu

SEQ ID NO: 1144080 - RNA, 19 nt, Artificial Sequence
  Description of Artificial Sequence: Synthetic oligonucleotide
  Sense strand starting at position 693 of SEQ ID NO: 916278
caaggaacggcccaucauu

SEQ ID NO: 1144081 - RNA, 19 nt, Artificial Sequence
  Description of Artificial Sequence: Synthetic oligonucleotide
  Antisense strand to SEQ ID NO: 1144080
aaugaugggccguuccuug

SEQ ID NO: 1144082 - RNA, 19 nt, Artificial Sequence
  Description of Artificial Sequence: Synthetic oligonucleotide
  Sense strand starting at position 704 of SEQ ID NO: 916278
ccaucauuggcccaugaau

SEQ ID NO: 1144083 - RNA, 19 nt, Artificial Sequence
  Description of Artificial Sequence: Synthetic oligonucleotide
  Antisense strand to SEQ ID NO: 1144082
auucaugggccaaugaugg

SEQ ID NO: 1144084 - RNA, 19 nt, Artificial Sequence
  Description of Artificial Sequence: Synthetic oligonucleotide
  Sense strand starting at position 706 of SEQ ID NO: 916278
aucauuggcccaugaauuc

SEQ ID NO: 1144085 - RNA, 19 nt, Artificial Sequence
  Description of Artificial Sequence: Synthetic oligonucleotide
  Antisense strand to SEQ ID NO: 1144084
gaauucaugggccaaugau

SEQ ID NO: 1144086 - RNA, 19 nt, Artificial Sequence
  Description of Artificial Sequence: Synthetic oligonucleotide
  Sense strand starting at position 1106 of SEQ ID NO: 916278
ggagaauccuacccaucuc

SEQ ID NO: 1144087 - RNA, 19 nt, Artificial Sequence
  Description of Artificial Sequence: Synthetic oligonucleotide
  Antisense strand to SEQ ID NO: 1144086
gagauggguaggauucucc

SEQ ID NO: 1144088 - RNA, 19 nt, Artificial Sequence
  Description of Artificial Sequence: Synthetic oligonucleotide
  Sense strand starting at position 1426 of SEQ ID NO: 916278
gggcuuauucuugauauag

SEQ ID NO: 1144089 - RNA, 19 nt, Artificial Sequence
  Description of Artificial Sequence: Synthetic oligonucleotide
  Antisense strand to SEQ ID NO: 1144088
cuauaucaagaauaagccc

SEQ ID NO: 1144090 - RNA, 19 nt, Artificial Sequence
  Description of Artificial Sequence: Synthetic oligonucleotide
  Sense strand starting at position 1588 of SEQ ID NO: 916278
gagagcuuuaugcaggagu

SEQ ID NO: 1144091 - RNA, 19 nt, Artificial Sequence
  Description of Artificial Sequence: Synthetic oligonucleotide
  Antisense strand to SEQ ID NO: 1144090
acuccugcauaaagcucuc

SEQ ID NO: 1144092 - RNA, 19 nt, Artificial Sequence
  Description of Artificial Sequence: Synthetic oligonucleotide
  Sense strand starting at position 2034 of SEQ ID NO: 916278
uggcaaucgucacucauuu

SEQ ID NO: 1144093 - RNA, 19 nt, Artificial Sequence
  Description of Artificial Sequence: Synthetic oligonucleotide
  Antisense strand to SEQ ID NO: 1144092
aaaugagugacgauugcca

SEQ ID NO: 1144094 - RNA, 19 nt, Artificial Sequence
  Description of Artificial Sequence: Synthetic oligonucleotide
  Sense strand starting at position 2041 of SEQ ID NO: 916278
cgucacucauuuguuuauu

SEQ ID NO: 1144095 - RNA, 19 nt, Artificial Sequence
  Description of Artificial Sequence: Synthetic oligonucleotide
  Antisense strand to SEQ ID NO: 1144094
aauaaacaaaugagugacg

SEQ ID NO: 1144096 - RNA, 19 nt, Artificial Sequence
  Description of Artificial Sequence: Synthetic oligonucleotide
  Sense strand starting at position 2169 of SEQ ID NO: 916278
ucgucaucugggcaaauga

SEQ ID NO: 1144097 - RNA, 19 nt, Artificial Sequence
  Description of Artificial Sequence: Synthetic oligonucleotide
  Antisense strand to SEQ ID NO: 1144096
ucauuugcccagaugacga

SEQ ID NO: 1144098 - RNA, 19 nt, Artificial Sequence
  Description of Artificial Sequence: Synthetic oligonucleotide
  Sense strand starting at position 2189 of SEQ ID NO: 916278
ccacucugacuuggagauu

SEQ ID NO: 1144099 - RNA, 19 nt, Artificial Sequence
  Description of Artificial Sequence: Synthetic oligonucleotide
  Antisense strand to SEQ ID NO: 1144098
aaucuccaagucagagugg

SEQ ID NO: 1144100 - RNA, 19 nt, Artificial Sequence
  Description of Artificial Sequence: Synthetic oligonucleotide
  Sense strand starting at position 2256 of SEQ ID NO: 916278
ccuugauuaggugaguauu

SEQ ID NO: 1144101 - RNA, 19 nt, Artificial Sequence
  Description of Artificial Sequence: Synthetic oligonucleotide
  Antisense strand to SEQ ID NO: 1144100
aauacucaccuaaucaagg

SEQ ID NO: 1144102 - RNA, 19 nt, Artificial Sequence
  Description of Artificial Sequence: Synthetic oligonucleotide
  Sense strand starting at position 2333 of SEQ ID NO: 916278
ggauuuaccugugaucaaa

SEQ ID NO: 1144103 - RNA, 19 nt, Artificial Sequence
  Description of Artificial Sequence: Synthetic oligonucleotide
  Antisense strand to SEQ ID NO: 1144102
uuugaucacagguaaaucc

SEQ ID NO: 1144104 - RNA, 19 nt, Artificial Sequence
  Description of Artificial Sequence: Synthetic oligonucleotide
  Sense strand starting at position 2378 of SEQ ID NO: 916278
augacuugugggcaaguga

SEQ ID NO: 1144105 - RNA, 19 nt, Artificial Sequence
  Description of Artificial Sequence: Synthetic oligonucleotide
  Antisense strand to SEQ ID NO: 1144104
ucacuugcccacaagucau

SEQ ID NO: 1144106 - RNA, 19 nt, Artificial Sequence
  Description of Artificial Sequence: Synthetic oligonucleotide
  Sense strand starting at position 2454 of SEQ ID NO: 916278
gauaguauauaugucaaag

SEQ ID NO: 1144107 - RNA, 19 nt, Artificial Sequence
  Description of Artificial Sequence: Synthetic oligonucleotide
  Antisense strand to SEQ ID NO: 1144106
cuuugacauauauacuauc

SEQ ID NO: 1144108 - RNA, 19 nt, Artificial Sequence
  Description of Artificial Sequence: Synthetic oligonucleotide
  Sense strand starting at position 2525 of SEQ ID NO: 916278
ccuggcauaguggaaauau

SEQ ID NO: 1144109 - RNA, 19 nt, Artificial Sequence
  Description of Artificial Sequence: Synthetic oligonucleotide
  Antisense strand to SEQ ID NO: 1144108
auauuuccacuaugccagg

SEQ ID NO: 1144110 - RNA, 19 nt, Artificial Sequence
  Description of Artificial Sequence: Synthetic oligonucleotide
  Sense strand starting at position 2559 of SEQ ID NO: 916278
gauuacuaguaucuggaca

SEQ ID NO: 1144111 - RNA, 19 nt, Artificial Sequence
  Description of Artificial Sequence: Synthetic oligonucleotide
  Antisense strand to SEQ ID NO: 1144110
uguccagauacuaguaauc

SEQ ID NO: 1144112 - RNA, 19 nt, Artificial Sequence
  Description of Artificial Sequence: Synthetic oligonucleotide
  Sense strand starting at position 2760 of SEQ ID NO: 916278
gcaugauuacggcaucaaa

SEQ ID NO: 1144113 - RNA, 19 nt, Artificial Sequence
  Description of Artificial Sequence: Synthetic oligonucleotide
  Antisense strand to SEQ ID NO: 1144112
uuugaugccguaaucaugc

SEQ ID NO: 1144114 - RNA, 19 nt, Artificial Sequence
  Description of Artificial Sequence: Synthetic oligonucleotide
  Sense strand starting at position 2763 of SEQ ID NO: 916278
ugauuacggcaucaaagau

SEQ ID NO: 1144115 - RNA, 19 nt, Artificial Sequence
  Description of Artificial Sequence: Synthetic oligonucleotide
  Antisense strand to SEQ ID NO: 1144114
aucuuugaugccguaauca

SEQ ID NO: 1144116 - RNA, 19 nt, Artificial Sequence
  Description of Artificial Sequence: Synthetic oligonucleotide
  Sense strand starting at position 2868 of SEQ ID NO: 916278
gucuguuuccacuaaauca

SEQ ID NO: 1144117 - RNA, 19 nt, Artificial Sequence
  Description of Artificial Sequence: Synthetic oligonucleotide
  Antisense strand to SEQ ID NO: 1144116
ugauuuaguggaaacagac

SEQ ID NO: 1144118 - RNA, 19 nt, Artificial Sequence
  Description of Artificial Sequence: Synthetic oligonucleotide
  Sense strand starting at position 2902 of SEQ ID NO: 916278
gagagacaugguugcucaa

SEQ ID NO: 1144119 - RNA, 19 nt, Artificial Sequence
  Description of Artificial Sequence: Synthetic oligonucleotide
  Antisense strand to SEQ ID NO: 1144118
uugagcaaccaugucucuc

SEQ ID NO: 1144120 - RNA, 19 nt, Artificial Sequence
  Description of Artificial Sequence: Synthetic oligonucleotide
  Sense strand starting at position 2904 of SEQ ID NO: 916278
gagacaugguugcucaaga

SEQ ID NO: 1144121 - RNA, 19 nt, Artificial Sequence
  Description of Artificial Sequence: Synthetic oligonucleotide
  Antisense strand to SEQ ID NO: 1144120
ucuugagcaaccaugucuc

SEQ ID NO: 1144122 - RNA, 19 nt, Artificial Sequence
  Description of Artificial Sequence: Synthetic oligonucleotide
  Sense strand starting at position 2905 of SEQ ID NO: 916278
agacaugguugcucaagaa

SEQ ID NO: 1144123 - RNA, 19 nt, Artificial Sequence
  Description of Artificial Sequence: Synthetic oligonucleotide
  Antisense strand to SEQ ID NO: 1144122
uucuugagcaaccaugucu

SEQ ID NO: 1144124 - RNA, 19 nt, Artificial Sequence
  Description of Artificial Sequence: Synthetic oligonucleotide
  Sense strand starting at position 2997 of SEQ ID NO: 916278
uuccuugagccuuauugaa

SEQ ID NO: 1144125 - RNA, 19 nt, Artificial Sequence
  Description of Artificial Sequence: Synthetic oligonucleotide
  Antisense strand to SEQ ID NO: 1144124
uucaauaaggcucaaggaa

SEQ ID NO: 1144126 - RNA, 19 nt, Artificial Sequence
  Description of Artificial Sequence: Synthetic oligonucleotide
  Sense strand starting at position 2999 of SEQ ID NO: 916278
ccuugagccuuauugaaac

SEQ ID NO: 1144127 - RNA, 19 nt, Artificial Sequence
  Description of Artificial Sequence: Synthetic oligonucleotide
  Antisense strand to SEQ ID NO: 1144126
guuucaauaaggcucaagg

SEQ ID NO: 1144128 - RNA, 19 nt, Artificial Sequence
  Description of Artificial Sequence: Synthetic oligonucleotide
  Sense strand starting at position 3040 of SEQ ID NO: 916278
augacugcacccuggaauu

SEQ ID NO: 1144129 - RNA, 19 nt, Artificial Sequence
  Description of Artificial Sequence: Synthetic oligonucleotide
  Antisense strand to SEQ ID NO: 1144128
aauuccagggugcagucau

SEQ ID NO: 1144130 - RNA, 19 nt, Artificial Sequence
  Description of Artificial Sequence: Synthetic oligonucleotide
  Sense strand starting at position 3098 of SEQ ID NO: 916278
ggaaucugucacgaccuga

SEQ ID NO: 1144131 - RNA, 19 nt, Artificial Sequence
  Description of Artificial Sequence: Synthetic oligonucleotide
  Antisense strand to SEQ ID NO: 1144130
ucaggucgugacagauucc

SEQ ID NO: 1144132 - RNA, 19 nt, Artificial Sequence
  Description of Artificial Sequence: Synthetic oligonucleotide
  Sense strand starting at position 3311 of SEQ ID NO: 916278
ucuuaagcacucugagauu

SEQ ID NO: 1144133 - RNA, 19 nt, Artificial Sequence
  Description of Artificial Sequence: Synthetic oligonucleotide
  Antisense strand to SEQ ID NO: 1144132
aaucucagagugcuuaaga

SEQ ID NO: 1144134 - RNA, 19 nt, Artificial Sequence
  Description of Artificial Sequence: Synthetic oligonucleotide
  Sense strand starting at position 3349 of SEQ ID NO: 916278
augucuacacuuggaauaa

SEQ ID NO: 1144135 - RNA, 19 nt, Artificial Sequence
  Description of Artificial Sequence: Synthetic oligonucleotide
  Antisense strand to SEQ ID NO: 1144134
uuauuccaaguguagacau

SEQ ID NO: 1144136 - RNA, 19 nt, Artificial Sequence
  Description of Artificial Sequence: Synthetic oligonucleotide
  Sense strand starting at position 3396 of SEQ ID NO: 916278
cagccaucucuuggaagga

SEQ ID NO: 1144137 - RNA, 19 nt, Artificial Sequence
  Description of Artificial Sequence: Synthetic oligonucleotide
  Antisense strand to SEQ ID NO: 1144136
uccuuccaagagauggcug

SEQ ID NO: 1144138 - RNA, 19 nt, Artificial Sequence
  Description of Artificial Sequence: Synthetic oligonucleotide
  Sense strand starting at position 3536 of SEQ ID NO: 916278
agaagacacugauagagaa

SEQ ID NO: 1144139 - RNA, 19 nt, Artificial Sequence
  Description of Artificial Sequence: Synthetic oligonucleotide
  Antisense strand to SEQ ID NO: 1144138
uucucuaucagugucuucu

SEQ ID NO: 1144140 - RNA, 19 nt, Artificial Sequence
  Description of Artificial Sequence: Synthetic oligonucleotide
  Sense strand starting at position 3550 of SEQ ID NO: 916278
gagaaaguccugugaucac

SEQ ID NO: 1144141 - RNA, 19 nt, Artificial Sequence
  Description of Artificial Sequence: Synthetic oligonucleotide
  Antisense strand to SEQ ID NO: 1144140
gugaucacaggacuuucuc

SEQ ID NO: 1144142 - RNA, 19 nt, Artificial Sequence
  Description of Artificial Sequence: Synthetic oligonucleotide
  Sense strand starting at position 3685 of SEQ ID NO: 916278
cuuccuacaucugugagaa

SEQ ID NO: 1144143 - RNA, 19 nt, Artificial Sequence
  Description of Artificial Sequence: Synthetic oligonucleotide
  Antisense strand to SEQ ID NO: 1144142
uucucacagauguaggaag

SEQ ID NO: 1144144 - RNA, 19 nt, Artificial Sequence
  Description of Artificial Sequence: Synthetic oligonucleotide
  Sense strand starting at position 3872 of SEQ ID NO: 916278
cugucuggugauggauaaa

SEQ ID NO: 1144145 - RNA, 19 nt, Artificial Sequence
  Description of Artificial Sequence: Synthetic oligonucleotide
  Antisense strand to SEQ ID NO: 1144144
uuuauccaucaccagacag

SEQ ID NO: 1144146 - RNA, 19 nt, Artificial Sequence
  Description of Artificial Sequence: Synthetic oligonucleotide
  Sense strand starting at position 481 of SEQ ID NO: 916279
cugccauugugaucagaua

SEQ ID NO: 1144147 - RNA, 19 nt, Artificial Sequence
  Description of Artificial Sequence: Synthetic oligonucleotide
  Antisense strand to SEQ ID NO: 1144146
uaucugaucacaauggcag

SEQ ID NO: 1144148 - RNA, 19 nt, Artificial Sequence
  Description of Artificial Sequence: Synthetic oligonucleotide
  Sense strand starting at position 482 of SEQ ID NO: 916279
ugccauugugaucagauaa

SEQ ID NO: 1144149 - RNA, 19 nt, Artificial Sequence
  Description of Artificial Sequence: Synthetic oligonucleotide
  Antisense strand to SEQ ID NO: 1144148
uuaucugaucacaauggca

SEQ ID NO: 1144150 - RNA, 19 nt, Artificial Sequence
  Description of Artificial Sequence: Synthetic oligonucleotide
  Sense strand starting at position 546 of SEQ ID NO: 916279
gguauaguugugugaauuu

SEQ ID NO: 1144151 - RNA, 19 nt, Artificial Sequence
  Description of Artificial Sequence: Synthetic oligonucleotide
  Antisense strand to SEQ ID NO: 1144150
aaauucacacaacuauacc

SEQ ID NO: 1144152 - RNA, 19 nt, Artificial Sequence
  Description of Artificial Sequence: Synthetic oligonucleotide
  Sense strand starting at position 576 of SEQ ID NO: 916279
gaaugagaaggaugcaguu

SEQ ID NO: 1144153 - RNA, 19 nt, Artificial Sequence
  Description of Artificial Sequence: Synthetic oligonucleotide
  Antisense strand to SEQ ID NO: 1144152
aacugcauccuucucauuc

SEQ ID NO: 1144154 - RNA, 19 nt, Artificial Sequence
  Description of Artificial Sequence: Synthetic oligonucleotide
  Sense strand starting at position 600 of SEQ ID NO: 916279
gcgagaagccgucuugcaa

SEQ ID NO: 1144155 - RNA, 19 nt, Artificial Sequence
  Description of Artificial Sequence: Synthetic oligonucleotide
  Antisense strand to SEQ ID NO: 1144154
uugcaagacggcuucucgc

SEQ ID NO: 1144156 - RNA, 19 nt, Artificial Sequence
  Description of Artificial Sequence: Synthetic oligonucleotide
  Sense strand starting at position 607 of SEQ ID NO: 916279
gccgucuugcaauaagaaa

SEQ ID NO: 1144157 - RNA, 19 nt, Artificial Sequence
  Description of Artificial Sequence: Synthetic oligonucleotide
  Antisense strand to SEQ ID NO: 1144156
uuucuuauugcaagacggc

SEQ ID NO: 1144158 - RNA, 19 nt, Artificial Sequence
  Description of Artificial Sequence: Synthetic oligonucleotide
  Sense strand starting at position 665 of SEQ ID NO: 916279
aguuaauucuaagucacca

SEQ ID NO: 1144159 - RNA, 19 nt, Artificial Sequence
  Description of Artificial Sequence: Synthetic oligonucleotide
  Antisense strand to SEQ ID NO: 1144158
uggugacuuagaauuaacu

SEQ ID NO: 1144160 - RNA, 19 nt, Artificial Sequence
  Description of Artificial Sequence: Synthetic oligonucleotide
  Sense strand starting at position 860 of SEQ ID NO: 916279
uggguuucagacugcagau

SEQ ID NO: 1144161 - RNA, 19 nt, Artificial Sequence
  Description of Artificial Sequence: Synthetic oligonucleotide
  Antisense strand to SEQ ID NO: 1144160
aucugcagucugaaaccca

SEQ ID NO: 1144162 - RNA, 19 nt, Artificial Sequence
  Description of Artificial Sequence: Synthetic oligonucleotide
  Sense strand starting at position 890 of SEQ ID NO: 916279
uguagaauuugggaaagga

SEQ ID NO: 1144163 - RNA, 19 nt, Artificial Sequence
  Description of Artificial Sequence: Synthetic oligonucleotide
  Antisense strand to SEQ ID NO: 1144162
uccuuucccaaauucuaca

SEQ ID NO: 1144164 - RNA, 19 nt, Artificial Sequence
  Description of Artificial Sequence: Synthetic oligonucleotide
  Sense strand starting at position 1059 of SEQ ID NO: 916279
guagcaugugaugaacaca

SEQ ID NO: 1144165 - RNA, 19 nt, Artificial Sequence
  Description of Artificial Sequence: Synthetic oligonucleotide
  Antisense strand to SEQ ID NO: 1144164
uguguucaucacaugcuac

SEQ ID NO: 1144166 - RNA, 19 nt, Artificial Sequence
  Description of Artificial Sequence: Synthetic oligonucleotide
  Sense strand starting at position 1062 of SEQ ID NO: 916279
gcaugugaugaacacaauu

SEQ ID NO: 1144167 - RNA, 19 nt, Artificial Sequence
  Description of Artificial Sequence: Synthetic oligonucleotide
  Antisense strand to SEQ ID NO: 1144166
aauuguguucaucacaugc

SEQ ID NO: 1144168 - RNA, 19 nt, Artificial Sequence
  Description of Artificial Sequence: Synthetic oligonucleotide
  Sense strand starting at position 1239 of SEQ ID NO: 916279
ggccgacuccaugaugaag

SEQ ID NO: 1144169 - RNA, 19 nt, Artificial Sequence
  Description of Artificial Sequence: Synthetic oligonucleotide
  Antisense strand to SEQ ID NO: 1144168
cuucaucauggagucggcc

SEQ ID NO: 1144170 - RNA, 19 nt, Artificial Sequence
  Description of Artificial Sequence: Synthetic oligonucleotide
  Sense strand starting at position 1288 of SEQ ID NO: 916279
cagagaugguucuccagca

SEQ ID NO: 1144171 - RNA, 19 nt, Artificial Sequence
  Description of Artificial Sequence: Synthetic oligonucleotide
  Antisense strand to SEQ ID NO: 1144170
ugcuggagaaccaucucug

SEQ ID NO: 1144172 - RNA, 19 nt, Artificial Sequence
  Description of Artificial Sequence: Synthetic oligonucleotide
  Sense strand starting at position 1289 of SEQ ID NO: 916279
agagaugguucuccagcaa

SEQ ID NO: 1144173 - RNA, 19 nt, Artificial Sequence
  Description of Artificial Sequence: Synthetic oligonucleotide
  Antisense strand to SEQ ID NO: 1144172
uugcuggagaaccaucucu

SEQ ID NO: 1144174 - RNA, 19 nt, Artificial Sequence
  Description of Artificial Sequence: Synthetic oligonucleotide
  Sense strand starting at position 1310 of SEQ ID NO: 916279
gauacacuguucccaggau

SEQ ID NO: 1144175 - RNA, 19 nt, Artificial Sequence
  Description of Artificial Sequence: Synthetic oligonucleotide
  Antisense strand to SEQ ID NO: 1144174
auccugggaacaguguauc

SEQ ID NO: 1144176 - RNA, 19 nt, Artificial Sequence
  Description of Artificial Sequence: Synthetic oligonucleotide
  Sense strand starting at position 1400 of SEQ ID NO: 916279
gguggaccacuuugaaaua

SEQ ID NO: 1144177 - RNA, 19 nt, Artificial Sequence
  Description of Artificial Sequence: Synthetic oligonucleotide
  Antisense strand to SEQ ID NO: 1144176
uauuucaaagugguccacc

SEQ ID NO: 1144178 - RNA, 19 nt, Artificial Sequence
  Description of Artificial Sequence: Synthetic oligonucleotide
  Sense strand starting at position 1522 of SEQ ID NO: 916279
cuacgucugagguaauagu

SEQ ID NO: 1144179 - RNA, 19 nt, Artificial Sequence
  Description of Artificial Sequence: Synthetic oligonucleotide
  Antisense strand to SEQ ID NO: 1144178
acuauuaccucagacguag

SEQ ID NO: 1144180 - RNA, 19 nt, Artificial Sequence
  Description of Artificial Sequence: Synthetic oligonucleotide
  Sense strand starting at position 1770 of SEQ ID NO: 916279
gcaaguguccgggugcaga

SEQ ID NO: 1144181 - RNA, 19 nt, Artificial Sequence
  Description of Artificial Sequence: Synthetic oligonucleotide
  Antisense strand to SEQ ID NO: 1144180
ucugcacccggacacuugc

SEQ ID NO: 1144182 - RNA, 19 nt, Artificial Sequence
  Description of Artificial Sequence: Synthetic oligonucleotide
  Sense strand starting at position 1812 of SEQ ID NO: 916279
ggcacagaugcuuaucuga

SEQ ID NO: 1144183 - RNA, 19 nt, Artificial Sequence
  Description of Artificial Sequence: Synthetic oligonucleotide
  Antisense strand to SEQ ID NO: 1144182
ucagauaagcaucugugcc

SEQ ID NO: 1144184 - RNA, 19 nt, Artificial Sequence
  Description of Artificial Sequence: Synthetic oligonucleotide
  Sense strand starting at position 1821 of SEQ ID NO: 916279
gcuuaucugagcguuagca

SEQ ID NO: 1144185 - RNA, 19 nt, Artificial Sequence
  Description of Artificial Sequence: Synthetic oligonucleotide
  Antisense strand to SEQ ID NO: 1144184
ugcuaacgcucagauaagc

SEQ ID NO: 1144186 - RNA, 19 nt, Artificial Sequence
  Description of Artificial Sequence: Synthetic oligonucleotide
  Sense strand starting at position 2021 of SEQ ID NO: 916279
ccggaugaagcuuggaaau

SEQ ID NO: 1144187 - RNA, 19 nt, Artificial Sequence
  Description of Artificial Sequence: Synthetic oligonucleotide
  Antisense strand to SEQ ID NO: 1144186
auuuccaagcuucauccgg

SEQ ID NO: 1144188 - RNA, 19 nt, Artificial Sequence
  Description of Artificial Sequence: Synthetic oligonucleotide
  Sense strand starting at position 2031 of SEQ ID NO: 916279
cuuggaaaugcaugcaauu

SEQ ID NO: 1144189 - RNA, 19 nt, Artificial Sequence
  Description of Artificial Sequence: Synthetic oligonucleotide
  Antisense strand to SEQ ID NO: 1144188
aauugcaugcauuuccaag

SEQ ID NO: 1144190 - RNA, 19 nt, Artificial Sequence
  Description of Artificial Sequence: Synthetic oligonucleotide
  Sense strand starting at position 2062 of SEQ ID NO: 916279
ucauuucugagaggcggua

SEQ ID NO: 1144191 - RNA, 19 nt, Artificial Sequence
  Description of Artificial Sequence: Synthetic oligonucleotide
  Antisense strand to SEQ ID NO: 1144190
uaccgccucucagaaauga

SEQ ID NO: 1144192 - RNA, 19 nt, Artificial Sequence
  Description of Artificial Sequence: Synthetic oligonucleotide
  Sense strand starting at position 2397 of SEQ ID NO: 916279
ggccauuuccugugccgaa

SEQ ID NO: 1144193 - RNA, 19 nt, Artificial Sequence
  Description of Artificial Sequence: Synthetic oligonucleotide
  Antisense strand to SEQ ID NO: 1144192
uucggcacaggaaauggcc

SEQ ID NO: 1144194 - RNA, 19 nt, Artificial Sequence
  Description of Artificial Sequence: Synthetic oligonucleotide
  Sense strand starting at position 2398 of SEQ ID NO: 916279
gccauuuccugugccgaaa

SEQ ID NO: 1144195 - RNA, 19 nt, Artificial Sequence
  Description of Artificial Sequence: Synthetic oligonucleotide
  Antisense strand to SEQ ID NO: 1144194
uuucggcacaggaaauggc

SEQ ID NO: 1144196 - RNA, 19 nt, Artificial Sequence
  Description of Artificial Sequence: Synthetic oligonucleotide
  Sense strand starting at position 2457 of SEQ ID NO: 916279
aguucuaaucacgauacuu

SEQ ID NO: 1144197 - RNA, 19 nt, Artificial Sequence
  Description of Artificial Sequence: Synthetic oligonucleotide
  Antisense strand to SEQ ID NO: 1144196
aaguaucgugauuagaacu

SEQ ID NO: 1144198 - RNA, 19 nt, Artificial Sequence
  Description of Artificial Sequence: Synthetic oligonucleotide
  Sense strand starting at position 2467 of SEQ ID NO: 916279
acgauacuugauggauguu

SEQ ID NO: 1144199 - RNA, 19 nt, Artificial Sequence
  Description of Artificial Sequence: Synthetic oligonucleotide
  Antisense strand to SEQ ID NO: 1144198
aacauccaucaaguaucgu

SEQ ID NO: 1144200 - RNA, 19 nt, Artificial Sequence
  Description of Artificial Sequence: Synthetic oligonucleotide
  Sense strand starting at position 2468 of SEQ ID NO: 916279
cgauacuugauggauguua

SEQ ID NO: 1144201 - RNA, 19 nt, Artificial Sequence
  Description of Artificial Sequence: Synthetic oligonucleotide
  Antisense strand to SEQ ID NO: 1144200
uaacauccaucaaguaucg

SEQ ID NO: 1144202 - RNA, 19 nt, Artificial Sequence
  Description of Artificial Sequence: Synthetic oligonucleotide
  Sense strand starting at position 2470 of SEQ ID NO: 916279
auacuugauggauguuaga

SEQ ID NO: 1144203 - RNA, 19 nt, Artificial Sequence
  Description of Artificial Sequence: Synthetic oligonucleotide
  Antisense strand to SEQ ID NO: 1144202
ucuaacauccaucaaguau

SEQ ID NO: 1144204 - RNA, 19 nt, Artificial Sequence
  Description of Artificial Sequence: Synthetic oligonucleotide
  Sense strand starting at position 2546 of SEQ ID NO: 916279
acauccuuccgugaaccaa

SEQ ID NO: 1144205 - RNA, 19 nt, Artificial Sequence
  Description of Artificial Sequence: Synthetic oligonucleotide
  Antisense strand to SEQ ID NO: 1144204
uugguucacggaaggaugu

SEQ ID NO: 1144206 - RNA, 19 nt, Artificial Sequence
  Description of Artificial Sequence: Synthetic oligonucleotide
  Sense strand starting at position 2620 of SEQ ID NO: 916279
auaugucugucuccacaaa

SEQ ID NO: 1144207 - RNA, 19 nt, Artificial Sequence
  Description of Artificial Sequence: Synthetic oligonucleotide
  Antisense strand to SEQ ID NO: 1144206
uuuguggagacagacauau

SEQ ID NO: 1144208 - RNA, 19 nt, Artificial Sequence
  Description of Artificial Sequence: Synthetic oligonucleotide
  Sense strand starting at position 2773 of SEQ ID NO: 916279
augugcugagcccaucaau

SEQ ID NO: 1144209 - RNA, 19 nt, Artificial Sequence
  Description of Artificial Sequence: Synthetic oligonucleotide
  Antisense strand to SEQ ID NO: 1144208
auugaugggcucagcacau

SEQ ID NO: 1144210 - RNA, 19 nt, Artificial Sequence
  Description of Artificial Sequence: Synthetic oligonucleotide
  Sense strand starting at position 2776 of SEQ ID NO: 916279
ugcugagcccaucaauuaa

SEQ ID NO: 1144211 - RNA, 19 nt, Artificial Sequence
  Description of Artificial Sequence: Synthetic oligonucleotide
  Antisense strand to SEQ ID NO: 1144210
uuaauugaugggcucagca

SEQ ID NO: 1144212 - RNA, 19 nt, Artificial Sequence
  Description of Artificial Sequence: Synthetic oligonucleotide
  Sense strand starting at position 2838 of SEQ ID NO: 916279
ggaguccaucucuaaagca

SEQ ID NO: 1144213 - RNA, 19 nt, Artificial Sequence
  Description of Artificial Sequence: Synthetic oligonucleotide
  Antisense strand to SEQ ID NO: 1144212
ugcuuuagagauggacucc

SEQ ID NO: 1144214 - RNA, 19 nt, Artificial Sequence
  Description of Artificial Sequence: Synthetic oligonucleotide
  Sense strand starting at position 2853 of SEQ ID NO: 916279
agcaaucaugaguaacauu

SEQ ID NO: 1144215 - RNA, 19 nt, Artificial Sequence
  Description of Artificial Sequence: Synthetic oligonucleotide
  Antisense strand to SEQ ID NO: 1144214
aauguuacucaugauugcu

SEQ ID NO: 1144216 - RNA, 19 nt, Artificial Sequence
  Description of Artificial Sequence: Synthetic oligonucleotide
  Sense strand starting at position 2864 of SEQ ID NO: 916279
guaacauuagacugcacaa

SEQ ID NO: 1144217 - RNA, 19 nt, Artificial Sequence
  Description of Artificial Sequence: Synthetic oligonucleotide
  Antisense strand to SEQ ID NO: 1144216
uugugcagucuaauguuac

SEQ ID NO: 1144218 - RNA, 19 nt, Artificial Sequence
  Description of Artificial Sequence: Synthetic oligonucleotide
  Sense strand starting at position 2911 of SEQ ID NO: 916279
guccuuuggcuuuaaggau

SEQ ID NO: 1144219 - RNA, 19 nt, Artificial Sequence
  Description of Artificial Sequence: Synthetic oligonucleotide
  Antisense strand to SEQ ID NO: 1144218
auccuuaaagccaaaggac

SEQ ID NO: 1144220 - RNA, 19 nt, Artificial Sequence
  Description of Artificial Sequence: Synthetic oligonucleotide
  Sense strand starting at position 3658 of SEQ ID NO: 916279
auugaaagaaugugucugu

SEQ ID NO: 1144221 - RNA, 19 nt, Artificial Sequence
  Description of Artificial Sequence: Synthetic oligonucleotide
  Antisense strand to SEQ ID NO: 1144220
acagacacauucuuucaau

SEQ ID NO: 1144222 - RNA, 19 nt, Artificial Sequence
  Description of Artificial Sequence: Synthetic oligonucleotide
  Sense strand starting at position 3661 of SEQ ID NO: 916279
gaaagaaugugucugucuu

SEQ ID NO: 1144223 - RNA, 19 nt, Artificial Sequence
  Description of Artificial Sequence: Synthetic oligonucleotide
  Antisense strand to SEQ ID NO: 1144222
aagacagacacauucuuuc

SEQ ID NO: 1144224 - RNA, 19 nt, Artificial Sequence
  Description of Artificial Sequence: Synthetic oligonucleotide
  Sense strand starting at position 3964 of SEQ ID NO: 916279
guggaccauaucugguuua

SEQ ID NO: 1144225 - RNA, 19 nt, Artificial Sequence
  Description of Artificial Sequence: Synthetic oligonucleotide
  Antisense strand to SEQ ID NO: 1144224
uaaaccagauaugguccac

SEQ ID NO: 1144226 - RNA, 19 nt, Artificial Sequence
  Description of Artificial Sequence: Synthetic oligonucleotide
  Sense strand starting at position 275 of SEQ ID NO: 916280
gugugagucucuucccuga

SEQ ID NO: 1144227 - RNA, 19 nt, Artificial Sequence
  Description of Artificial Sequence: Synthetic oligonucleotide
  Antisense strand to SEQ ID NO: 1144226
ucagggaagagacucacac

SEQ ID NO: 1144228 - RNA, 19 nt, Artificial Sequence
  Description of Artificial Sequence: Synthetic oligonucleotide
  Sense strand starting at position 294 of SEQ ID NO: 916280
guccauuucugcuaaagcu

SEQ ID NO: 1144229 - RNA, 19 nt, Artificial Sequence
  Description of Artificial Sequence: Synthetic oligonucleotide
  Antisense strand to SEQ ID NO: 1144228
agcuuuagcagaaauggac

SEQ ID NO: 1144230 - RNA, 19 nt, Artificial Sequence
  Description of Artificial Sequence: Synthetic oligonucleotide
  Sense strand starting at position 301 of SEQ ID NO: 916280
ucugcuaaagcuugucuga

SEQ ID NO: 1144231 - RNA, 19 nt, Artificial Sequence
  Description of Artificial Sequence: Synthetic oligonucleotide
  Antisense strand to SEQ ID NO: 1144230
ucagacaagcuuuagcaga

SEQ ID NO: 1144232 - RNA, 19 nt, Artificial Sequence
  Description of Artificial Sequence: Synthetic oligonucleotide
  Sense strand starting at position 303 of SEQ ID NO: 916280
ugcuaaagcuugucugaaa

SEQ ID NO: 1144233 - RNA, 19 nt, Artificial Sequence
  Description of Artificial Sequence: Synthetic oligonucleotide
  Antisense strand to SEQ ID NO: 1144232
uuucagacaagcuuuagca

SEQ ID NO: 1144234 - RNA, 19 nt, Artificial Sequence
  Description of Artificial Sequence: Synthetic oligonucleotide
  Sense strand starting at position 304 of SEQ ID NO: 916280
gcuaaagcuugucugaaag

SEQ ID NO: 1144235 - RNA, 19 nt, Artificial Sequence
  Description of Artificial Sequence: Synthetic oligonucleotide
  Antisense strand to SEQ ID NO: 1144234
cuuucagacaagcuuuagc

SEQ ID NO: 1144236 - RNA, 19 nt, Artificial Sequence
  Description of Artificial Sequence: Synthetic oligonucleotide
  Sense strand starting at position 306 of SEQ ID NO: 916280
uaaagcuugucugaaagau

SEQ ID NO: 1144237 - RNA, 19 nt, Artificial Sequence
  Description of Artificial Sequence: Synthetic oligonucleotide
  Antisense strand to SEQ ID NO: 1144236
aucuuucagacaagcuuua

SEQ ID NO: 1144238 - RNA, 19 nt, Artificial Sequence
  Description of Artificial Sequence: Synthetic oligonucleotide
  Sense strand starting at position 310 of SEQ ID NO: 916280
gcuugucugaaagaugaau

SEQ ID NO: 1144239 - RNA, 19 nt, Artificial Sequence
  Description of Artificial Sequence: Synthetic oligonucleotide
  Antisense strand to SEQ ID NO: 1144238
auucaucuuucagacaagc

SEQ ID NO: 1144240 - RNA, 19 nt, Artificial Sequence
  Description of Artificial Sequence: Synthetic oligonucleotide
  Sense strand starting at position 546 of SEQ ID NO: 916280
agcagaaaugccuacaauu

SEQ ID NO: 1144241 - RNA, 19 nt, Artificial Sequence
  Description of Artificial Sequence: Synthetic oligonucleotide
  Antisense strand to SEQ ID NO: 1144240
aauuguaggcauuucugcu

SEQ ID NO: 1144242 - RNA, 19 nt, Artificial Sequence
  Description of Artificial Sequence: Synthetic oligonucleotide
  Sense strand starting at position 786 of SEQ ID NO: 916280
uccagagauccugguucuu

SEQ ID NO: 1144243 - RNA, 19 nt, Artificial Sequence
  Description of Artificial Sequence: Synthetic oligonucleotide
  Antisense strand to SEQ ID NO: 1144242
aagaaccaggaucucugga

SEQ ID NO: 1144244 - RNA, 19 nt, Artificial Sequence
  Description of Artificial Sequence: Synthetic oligonucleotide
  Sense strand starting at position 795 of SEQ ID NO: 916280
ccugguucuuggugacaau

SEQ ID NO: 1144245 - RNA, 19 nt, Artificial Sequence
  Description of Artificial Sequence: Synthetic oligonucleotide
  Antisense strand to SEQ ID NO: 1144244
auugucaccaagaaccagg

SEQ ID NO: 1144246 - RNA, 19 nt, Artificial Sequence
  Description of Artificial Sequence: Synthetic oligonucleotide
  Sense strand starting at position 816 of SEQ ID NO: 916280
cccuucuuggcaugguuau

SEQ ID NO: 1144247 - RNA, 19 nt, Artificial Sequence
  Description of Artificial Sequence: Synthetic oligonucleotide
  Antisense strand to SEQ ID NO: 1144246
auaaccaugccaagaaggg

SEQ ID NO: 1144248 - RNA, 19 nt, Artificial Sequence
  Description of Artificial Sequence: Synthetic oligonucleotide
  Sense strand starting at position 817 of SEQ ID NO: 916280
ccuucuuggcaugguuauu

SEQ ID NO: 1144249 - RNA, 19 nt, Artificial Sequence
  Description of Artificial Sequence: Synthetic oligonucleotide
  Antisense strand to SEQ ID NO: 1144248
aauaaccaugccaagaagg

SEQ ID NO: 1144250 - RNA, 19 nt, Artificial Sequence
  Description of Artificial Sequence: Synthetic oligonucleotide
  Sense strand starting at position 1593 of SEQ ID NO: 916280
ggcgguucauagccaacau

SEQ ID NO: 1144251 - RNA, 19 nt, Artificial Sequence
  Description of Artificial Sequence: Synthetic oligonucleotide
  Antisense strand to SEQ ID NO: 1144250
auguuggcuaugaaccgcc

SEQ ID NO: 1144252 - RNA, 19 nt, Artificial Sequence
  Description of Artificial Sequence: Synthetic oligonucleotide
  Sense strand starting at position 1661 of SEQ ID NO: 916280
cucacauaguuguccauca

SEQ ID NO: 1144253 - RNA, 19 nt, Artificial Sequence
  Description of Artificial Sequence: Synthetic oligonucleotide
  Antisense strand to SEQ ID NO: 1144252
ugauggacaacuaugugag

SEQ ID NO: 1144254 - RNA, 19 nt, Artificial Sequence
  Description of Artificial Sequence: Synthetic oligonucleotide
  Sense strand starting at position 1833 of SEQ ID NO: 916280
gcggcaacaccuugacaau

SEQ ID NO: 1144255 - RNA, 19 nt, Artificial Sequence
  Description of Artificial Sequence: Synthetic oligonucleotide
  Antisense strand to SEQ ID NO: 1144254
auugucaagguguugccgc

SEQ ID NO: 1144256 - RNA, 19 nt, Artificial Sequence
  Description of Artificial Sequence: Synthetic oligonucleotide
  Sense strand starting at position 1836 of SEQ ID NO: 916280
gcaacaccuugacaaugaa

SEQ ID NO: 1144257 - RNA, 19 nt, Artificial Sequence
  Description of Artificial Sequence: Synthetic oligonucleotide
  Antisense strand to SEQ ID NO: 1144256
uucauugucaagguguugc

SEQ ID NO: 1144258 - RNA, 19 nt, Artificial Sequence
  Description of Artificial Sequence: Synthetic oligonucleotide
  Sense strand starting at position 1962 of SEQ ID NO: 916280
uagugaaugcuccagcaag

SEQ ID NO: 1144259 - RNA, 19 nt, Artificial Sequence
  Description of Artificial Sequence: Synthetic oligonucleotide
  Antisense strand to SEQ ID NO: 1144258
cuugcuggagcauucacua

SEQ ID NO: 1144260 - RNA, 19 nt, Artificial Sequence
  Description of Artificial Sequence: Synthetic oligonucleotide
  Sense strand starting at position 1985 of SEQ ID NO: 916280
ugugugucuguguggugaa

SEQ ID NO: 1144261 - RNA, 19 nt, Artificial Sequence
  Description of Artificial Sequence: Synthetic oligonucleotide
  Antisense strand to SEQ ID NO: 1144260
uucaccacacagacacaca

SEQ ID NO: 1144262 - RNA, 19 nt, Artificial Sequence
  Description of Artificial Sequence: Synthetic oligonucleotide
  Sense strand starting at position 1988 of SEQ ID NO: 916280
gugucuguguggugaacgu

SEQ ID NO: 1144263 - RNA, 19 nt, Artificial Sequence
  Description of Artificial Sequence: Synthetic oligonucleotide
  Antisense strand to SEQ ID NO: 1144262
acguucaccacacagacac

SEQ ID NO: 1144264 - RNA, 19 nt, Artificial Sequence
  Description of Artificial Sequence: Synthetic oligonucleotide
  Sense strand starting at position 2056 of SEQ ID NO: 916280
cugaaugguuaccaggaaa

SEQ ID NO: 1144265 - RNA, 19 nt, Artificial Sequence
  Description of Artificial Sequence: Synthetic oligonucleotide
  Antisense strand to SEQ ID NO: 1144264
uuuccugguaaccauucag

SEQ ID NO: 1144266 - RNA, 19 nt, Artificial Sequence
  Description of Artificial Sequence: Synthetic oligonucleotide
  Sense strand starting at position 2067 of SEQ ID NO: 916280
ccaggaaacuacgaaaucu

SEQ ID NO: 1144267 - RNA, 19 nt, Artificial Sequence
  Description of Artificial Sequence: Synthetic oligonucleotide
  Antisense strand to SEQ ID NO: 1144266
agauuucguaguuuccugg

SEQ ID NO: 1144268 - RNA, 19 nt, Artificial Sequence
  Description of Artificial Sequence: Synthetic oligonucleotide
  Sense strand starting at position 2214 of SEQ ID NO: 916280
aggcaagccgacugucauu

SEQ ID NO: 1144269 - RNA, 19 nt, Artificial Sequence
  Description of Artificial Sequence: Synthetic oligonucleotide
  Antisense strand to SEQ ID NO: 1144268
aaugacagucggcuugccu

SEQ ID NO: 1144270 - RNA, 19 nt, Artificial Sequence
  Description of Artificial Sequence: Synthetic oligonucleotide
  Sense strand starting at position 2219 of SEQ ID NO: 916280
agccgacugucauucgaaa

SEQ ID NO: 1144271 - RNA, 19 nt, Artificial Sequence
  Description of Artificial Sequence: Synthetic oligonucleotide
  Antisense strand to SEQ ID NO: 1144270
uuucgaaugacagucggcu

SEQ ID NO: 1144272 - RNA, 19 nt, Artificial Sequence
  Description of Artificial Sequence: Synthetic oligonucleotide
  Sense strand starting at position 2682 of SEQ ID NO: 916280
guggcauguuaacauaagu

SEQ ID NO: 1144273 - RNA, 19 nt, Artificial Sequence
  Description of Artificial Sequence: Synthetic oligonucleotide
  Antisense strand to SEQ ID NO: 1144272
acuuauguuaacaugccac

SEQ ID NO: 1144274 - RNA, 19 nt, Artificial Sequence
  Description of Artificial Sequence: Synthetic oligonucleotide
  Sense strand starting at position 2814 of SEQ ID NO: 916280
ucaugaggcuagucguaag

SEQ ID NO: 1144275 - RNA, 19 nt, Artificial Sequence
  Description of Artificial Sequence: Synthetic oligonucleotide
  Antisense strand to SEQ ID NO: 1144274
cuuacgacuagccucauga

SEQ ID NO: 1144276 - RNA, 19 nt, Artificial Sequence
  Description of Artificial Sequence: Synthetic oligonucleotide
  Sense strand starting at position 3664 of SEQ ID NO: 916280
gcaggagguuucuaaauug

SEQ ID NO: 1144277 - RNA, 19 nt, Artificial Sequence
  Description of Artificial Sequence: Synthetic oligonucleotide
  Antisense strand to SEQ ID NO: 1144276
caauuuagaaaccuccugc

SEQ ID NO: 1144278 - RNA, 19 nt, Artificial Sequence
  Description of Artificial Sequence: Synthetic oligonucleotide
  Sense strand starting at position 3683 of SEQ ID NO: 916280
uguuccuucuacuuugagu

SEQ ID NO: 1144279 - RNA, 19 nt, Artificial Sequence
  Description of Artificial Sequence: Synthetic oligonucleotide
  Antisense strand to SEQ ID NO: 1144278
acucaaaguagaaggaaca

SEQ ID NO: 1144280 - RNA, 19 nt, Artificial Sequence
  Description of Artificial Sequence: Synthetic oligonucleotide
  Sense strand starting at position 3685 of SEQ ID NO: 916280
uuccuucuacuuugaguua

SEQ ID NO: 1144281 - RNA, 19 nt, Artificial Sequence
  Description of Artificial Sequence: Synthetic oligonucleotide
  Antisense strand to SEQ ID NO: 1144280
uaacucaaaguagaaggaa

SEQ ID NO: 1144282 - RNA, 19 nt, Artificial Sequence
  Description of Artificial Sequence: Synthetic oligonucleotide
  Sense strand starting at position 3686 of SEQ ID NO: 916280
uccuucuacuuugaguuau

SEQ ID NO: 1144283 - RNA, 19 nt, Artificial Sequence
  Description of Artificial Sequence: Synthetic oligonucleotide
  Antisense strand to SEQ ID NO: 1144282
auaacucaaaguagaagga

SEQ ID NO: 1144284 - RNA, 19 nt, Artificial Sequence
  Description of Artificial Sequence: Synthetic oligonucleotide
  Sense strand starting at position 201 of SEQ ID NO: 916281
augugagucucuucccuga

SEQ ID NO: 1144285 - RNA, 19 nt, Artificial Sequence
  Description of Artificial Sequence: Synthetic oligonucleotide
  Antisense strand to SEQ ID NO: 1144284
ucagggaagagacucacau

SEQ ID NO: 1144286 - RNA, 19 nt, Artificial Sequence
  Description of Artificial Sequence: Synthetic oligonucleotide
  Sense strand starting at position 220 of SEQ ID NO: 916281
guccauuucugcuaaagau

SEQ ID NO: 1144287 - RNA, 19 nt, Artificial Sequence
  Description of Artificial Sequence: Synthetic oligonucleotide
  Antisense strand to SEQ ID NO: 1144286
aucuuuagcagaaauggac

SEQ ID NO: 1144288 - RNA, 19 nt, Artificial Sequence
  Description of Artificial Sequence: Synthetic oligonucleotide
  Sense strand starting at position 227 of SEQ ID NO: 916281
ucugcuaaagauugucuga

SEQ ID NO: 1144289 - RNA, 19 nt, Artificial Sequence
  Description of Artificial Sequence: Synthetic oligonucleotide
  Antisense strand to SEQ ID NO: 1144288
ucagacaaucuuuagcaga

SEQ ID NO: 1144290 - RNA, 19 nt, Artificial Sequence
  Description of Artificial Sequence: Synthetic oligonucleotide
  Sense strand starting at position 229 of SEQ ID NO: 916281
ugcuaaagauugucugaaa

SEQ ID NO: 1144291 - RNA, 19 nt, Artificial Sequence
  Description of Artificial Sequence: Synthetic oligonucleotide
  Antisense strand to SEQ ID NO: 1144290
uuucagacaaucuuuagca

SEQ ID NO: 1144292 - RNA, 19 nt, Artificial Sequence
  Description of Artificial Sequence: Synthetic oligonucleotide
  Sense strand starting at position 230 of SEQ ID NO: 916281
gcuaaagauugucugaaag

SEQ ID NO: 1144293 - RNA, 19 nt, Artificial Sequence
  Description of Artificial Sequence: Synthetic oligonucleotide
  Antisense strand to SEQ ID NO: 1144292
cuuucagacaaucuuuagc

SEQ ID NO: 1144294 - RNA, 19 nt, Artificial Sequence
  Description of Artificial Sequence: Synthetic oligonucleotide
  Sense strand starting at position 232 of SEQ ID NO: 916281
uaaagauugucugaaagau

SEQ ID NO: 1144295 - RNA, 19 nt, Artificial Sequence
  Description of Artificial Sequence: Synthetic oligonucleotide
  Antisense strand to SEQ ID NO: 1144294
aucuuucagacaaucuuua

SEQ ID NO: 1144296 - RNA, 19 nt, Artificial Sequence
  Description of Artificial Sequence: Synthetic oligonucleotide
  Sense strand starting at position 301 of SEQ ID NO: 916281
gggcuuccuccaggaacaa

SEQ ID NO: 1144297 - RNA, 19 nt, Artificial Sequence
  Description of Artificial Sequence: Synthetic oligonucleotide
  Antisense strand to SEQ ID NO: 1144296
uuguuccuggaggaagccc

SEQ ID NO: 1144298 - RNA, 19 nt, Artificial Sequence
  Description of Artificial Sequence: Synthetic oligonucleotide
  Sense strand starting at position 472 of SEQ ID NO: 916281
agcagaaacgccuacaauu

SEQ ID NO: 1144299 - RNA, 19 nt, Artificial Sequence
  Description of Artificial Sequence: Synthetic oligonucleotide
  Antisense strand to SEQ ID NO: 1144298
aauuguaggcguuucugcu

SEQ ID NO: 1144300 - RNA, 19 nt, Artificial Sequence
  Description of Artificial Sequence: Synthetic oligonucleotide
  Sense strand starting at position 627 of SEQ ID NO: 916281
aucagauucucugaaucug

SEQ ID NO: 1144301 - RNA, 19 nt, Artificial Sequence
  Description of Artificial Sequence: Synthetic oligonucleotide
  Antisense strand to SEQ ID NO: 1144300
cagauucagagaaucugau

SEQ ID NO: 1144302 - RNA, 19 nt, Artificial Sequence
  Description of Artificial Sequence: Synthetic oligonucleotide
  Sense strand starting at position 643 of SEQ ID NO: 916281
cuggaaguuccaggaaauc

SEQ ID NO: 1144303 - RNA, 19 nt, Artificial Sequence
  Description of Artificial Sequence: Synthetic oligonucleotide
  Antisense strand to SEQ ID NO: 1144302
gauuuccuggaacuuccag

SEQ ID NO: 1144304 - RNA, 19 nt, Artificial Sequence
  Description of Artificial Sequence: Synthetic oligonucleotide
  Sense strand starting at position 654 of SEQ ID NO: 916281
aggaaaucuuaggccgagu

SEQ ID NO: 1144305 - RNA, 19 nt, Artificial Sequence
  Description of Artificial Sequence: Synthetic oligonucleotide
  Antisense strand to SEQ ID NO: 1144304
acucggccuaagauuuccu

SEQ ID NO: 1144306 - RNA, 19 nt, Artificial Sequence
  Description of Artificial Sequence: Synthetic oligonucleotide
  Sense strand starting at position 710 of SEQ ID NO: 916281
uccagagaugcugguucuu

SEQ ID NO: 1144307 - RNA, 19 nt, Artificial Sequence
  Description of Artificial Sequence: Synthetic oligonucleotide
  Antisense strand to SEQ ID NO: 1144306
aagaaccagcaucucugga

SEQ ID NO: 1144308 - RNA, 19 nt, Artificial Sequence
  Description of Artificial Sequence: Synthetic oligonucleotide
  Sense strand starting at position 740 of SEQ ID NO: 916281
cccuucuuggaaugguuau

SEQ ID NO: 1144309 - RNA, 19 nt, Artificial Sequence
  Description of Artificial Sequence: Synthetic oligonucleotide
  Antisense strand to SEQ ID NO: 1144308
auaaccauuccaagaaggg

SEQ ID NO: 1144310 - RNA, 19 nt, Artificial Sequence
  Description of Artificial Sequence: Synthetic oligonucleotide
  Sense strand starting at position 760 of SEQ ID NO: 916281
ugagguugggcccagauaa

SEQ ID NO: 1144311 - RNA, 19 nt, Artificial Sequence
  Description of Artificial Sequence: Synthetic oligonucleotide
  Antisense strand to SEQ ID NO: 1144310
uuaucugggcccaaccuca

SEQ ID NO: 1144312 - RNA, 19 nt, Artificial Sequence
  Description of Artificial Sequence: Synthetic oligonucleotide
  Sense strand starting at position 890 of SEQ ID NO: 916281
ccuguuaucuuccucugga

SEQ ID NO: 1144313 - RNA, 19 nt, Artificial Sequence
  Description of Artificial Sequence: Synthetic oligonucleotide
  Antisense strand to SEQ ID NO: 1144312
uccagaggaagauaacagg

SEQ ID NO: 1144314 - RNA, 19 nt, Artificial Sequence
  Description of Artificial Sequence: Synthetic oligonucleotide
  Sense strand starting at position 891 of SEQ ID NO: 916281
cuguuaucuuccucuggag

SEQ ID NO: 1144315 - RNA, 19 nt, Artificial Sequence
  Description of Artificial Sequence: Synthetic oligonucleotide
  Antisense strand to SEQ ID NO: 1144314
cuccagaggaagauaacag

SEQ ID NO: 1144316 - RNA, 19 nt, Artificial Sequence
  Description of Artificial Sequence: Synthetic oligonucleotide
  Sense strand starting at position 1317 of SEQ ID NO: 916281
acacauuugcagugccauu

SEQ ID NO: 1144317 - RNA, 19 nt, Artificial Sequence
  Description of Artificial Sequence: Synthetic oligonucleotide
  Antisense strand to SEQ ID NO: 1144316
aauggcacugcaaaugugu

SEQ ID NO: 1144318 - RNA, 19 nt, Artificial Sequence
  Description of Artificial Sequence: Synthetic oligonucleotide
  Sense strand starting at position 1368 of SEQ ID NO: 916281
cuguuaggccaacagugau

SEQ ID NO: 1144319 - RNA, 19 nt, Artificial Sequence
  Description of Artificial Sequence: Synthetic oligonucleotide
  Antisense strand to SEQ ID NO: 1144318
aucacuguuggccuaacag

SEQ ID NO: 1144320 - RNA, 19 nt, Artificial Sequence
  Description of Artificial Sequence: Synthetic oligonucleotide
  Sense strand starting at position 1405 of SEQ ID NO: 916281
gaugauggcugcuguccaa

SEQ ID NO: 1144321 - RNA, 19 nt, Artificial Sequence
  Description of Artificial Sequence: Synthetic oligonucleotide
  Antisense strand to SEQ ID NO: 1144320
uuggacagcagccaucauc

SEQ ID NO: 1144322 - RNA, 19 nt, Artificial Sequence
  Description of Artificial Sequence: Synthetic oligonucleotide
  Sense strand starting at position 1512 of SEQ ID NO: 916281
ggcgguucauggcaaacau

SEQ ID NO: 1144323 - RNA, 19 nt, Artificial Sequence
  Description of Artificial Sequence: Synthetic oligonucleotide
  Antisense strand to SEQ ID NO: 1144322
auguuugccaugaaccgcc

SEQ ID NO: 1144324 - RNA, 19 nt, Artificial Sequence
  Description of Artificial Sequence: Synthetic oligonucleotide
  Sense strand starting at position 1585 of SEQ ID NO: 916281
auaguaguccaucacgaac

SEQ ID NO: 1144325 - RNA, 19 nt, Artificial Sequence
  Description of Artificial Sequence: Synthetic oligonucleotide
  Antisense strand to SEQ ID NO: 1144324
guucgugauggacuacuau

SEQ ID NO: 1144326 - RNA, 19 nt, Artificial Sequence
  Description of Artificial Sequence: Synthetic oligonucleotide
  Sense strand starting at position 1881 of SEQ ID NO: 916281
uagugaaugcuccagcaaa

SEQ ID NO: 1144327 - RNA, 19 nt, Artificial Sequence
  Description of Artificial Sequence: Synthetic oligonucleotide
  Antisense strand to SEQ ID NO: 1144326
uuugcuggagcauucacua

SEQ ID NO: 1144328 - RNA, 19 nt, Artificial Sequence
  Description of Artificial Sequence: Synthetic oligonucleotide
  Sense strand starting at position 1903 of SEQ ID NO: 916281
gcgugugucuguaugguga

SEQ ID NO: 1144329 - RNA, 19 nt, Artificial Sequence
  Description of Artificial Sequence: Synthetic oligonucleotide
  Antisense strand to SEQ ID NO: 1144328
ucaccauacagacacacgc

SEQ ID NO: 1144330 - RNA, 19 nt, Artificial Sequence
  Description of Artificial Sequence: Synthetic oligonucleotide
  Sense strand starting at position 1904 of SEQ ID NO: 916281
cgugugucuguauggugaa

SEQ ID NO: 1144331 - RNA, 19 nt, Artificial Sequence
  Description of Artificial Sequence: Synthetic oligonucleotide
  Antisense strand to SEQ ID NO: 1144330
uucaccauacagacacacg

SEQ ID NO: 1144332 - RNA, 19 nt, Artificial Sequence
  Description of Artificial Sequence: Synthetic oligonucleotide
  Sense strand starting at position 1909 of SEQ ID NO: 916281
gucuguauggugaacgugu

SEQ ID NO: 1144333 - RNA, 19 nt, Artificial Sequence
  Description of Artificial Sequence: Synthetic oligonucleotide
  Antisense strand to SEQ ID NO: 1144332
acacguucaccauacagac

SEQ ID NO: 1144334 - RNA, 19 nt, Artificial Sequence
  Description of Artificial Sequence: Synthetic oligonucleotide
  Sense strand starting at position 1986 of SEQ ID NO: 916281
ucaggaaacuacgaaaucu

SEQ ID NO: 1144335 - RNA, 19 nt, Artificial Sequence
  Description of Artificial Sequence: Synthetic oligonucleotide
  Antisense strand to SEQ ID NO: 1144334
agauuucguaguuuccuga

SEQ ID NO: 1144336 - RNA, 19 nt, Artificial Sequence
  Description of Artificial Sequence: Synthetic oligonucleotide
  Sense strand starting at position 2119 of SEQ ID NO: 916281
ggauaaguuuaggcaagcu

SEQ ID NO: 1144337 - RNA, 19 nt, Artificial Sequence
  Description of Artificial Sequence: Synthetic oligonucleotide
  Antisense strand to SEQ ID NO: 1144336
agcuugccuaaacuuaucc

SEQ ID NO: 1144338 - RNA, 19 nt, Artificial Sequence
  Description of Artificial Sequence: Synthetic oligonucleotide
  Sense strand starting at position 2129 of SEQ ID NO: 916281
aggcaagcugacugucauu

SEQ ID NO: 1144339 - RNA, 19 nt, Artificial Sequence
  Description of Artificial Sequence: Synthetic oligonucleotide
  Antisense strand to SEQ ID NO: 1144338
aaugacagucagcuugccu

SEQ ID NO: 1144340 - RNA, 19 nt, Artificial Sequence
  Description of Artificial Sequence: Synthetic oligonucleotide
  Sense strand starting at position 2134 of SEQ ID NO: 916281
agcugacugucauucgaaa

SEQ ID NO: 1144341 - RNA, 19 nt, Artificial Sequence
  Description of Artificial Sequence: Synthetic oligonucleotide
  Antisense strand to SEQ ID NO: 1144340
uuucgaaugacagucagcu

SEQ ID NO: 1144342 - RNA, 19 nt, Artificial Sequence
  Description of Artificial Sequence: Synthetic oligonucleotide
  Sense strand starting at position 2371 of SEQ ID NO: 916281
gcaggcauaugauuucuuu

SEQ ID NO: 1144343 - RNA, 19 nt, Artificial Sequence
  Description of Artificial Sequence: Synthetic oligonucleotide
  Antisense strand to SEQ ID NO: 1144342
aaagaaaucauaugccugc

SEQ ID NO: 1144344 - RNA, 19 nt, Artificial Sequence
  Description of Artificial Sequence: Synthetic oligonucleotide
  Sense strand starting at position 2657 of SEQ ID NO: 916281
gugcucaagugauuuaagu

SEQ ID NO: 1144345 - RNA, 19 nt, Artificial Sequence
  Description of Artificial Sequence: Synthetic oligonucleotide
  Antisense strand to SEQ ID NO: 1144344
acuuaaaucacuugagcac

SEQ ID NO: 1144346 - RNA, 19 nt, Artificial Sequence
  Description of Artificial Sequence: Synthetic oligonucleotide
  Sense strand starting at position 2722 of SEQ ID NO: 916281
ucaugaggcuaguuguaag

SEQ ID NO: 1144347 - RNA, 19 nt, Artificial Sequence
  Description of Artificial Sequence: Synthetic oligonucleotide
  Antisense strand to SEQ ID NO: 1144346
cuuacaacuagccucauga

SEQ ID NO: 1144348 - RNA, 19 nt, Artificial Sequence
  Description of Artificial Sequence: Synthetic oligonucleotide
  Sense strand starting at position 2730 of SEQ ID NO: 916281
cuaguuguaagcuguagca

SEQ ID NO: 1144349 - RNA, 19 nt, Artificial Sequence
  Description of Artificial Sequence: Synthetic oligonucleotide
  Antisense strand to SEQ ID NO: 1144348
ugcuacagcuuacaacuag

SEQ ID NO: 1144350 - RNA, 19 nt, Artificial Sequence
  Description of Artificial Sequence: Synthetic oligonucleotide
  Sense strand starting at position 2732 of SEQ ID NO: 916281
aguuguaagcuguagcaaa

SEQ ID NO: 1144351 - RNA, 19 nt, Artificial Sequence
  Description of Artificial Sequence: Synthetic oligonucleotide
  Antisense strand to SEQ ID NO: 1144350
uuugcuacagcuuacaacu

SEQ ID NO: 1144352 - RNA, 19 nt, Artificial Sequence
  Description of Artificial Sequence: Synthetic oligonucleotide
  Sense strand starting at position 3576 of SEQ ID NO: 916281
gcaggagacuucuaaacua

SEQ ID NO: 1144353 - RNA, 19 nt, Artificial Sequence
  Description of Artificial Sequence: Synthetic oligonucleotide
  Antisense strand to SEQ ID NO: 1144352
uaguuuagaagucuccugc

SEQ ID NO: 1144354 - RNA, 19 nt, Artificial Sequence
  Description of Artificial Sequence: Synthetic oligonucleotide
  Sense strand starting at position 3595 of SEQ ID NO: 916281
uguugcuucuacuuugagu

SEQ ID NO: 1144355 - RNA, 19 nt, Artificial Sequence
  Description of Artificial Sequence: Synthetic oligonucleotide
  Antisense strand to SEQ ID NO: 1144354
acucaaaguagaagcaaca

SEQ ID NO: 1144356 - RNA, 19 nt, Artificial Sequence
  Description of Artificial Sequence: Synthetic oligonucleotide
  Sense strand starting at position 3597 of SEQ ID NO: 916281
uugcuucuacuuugaguua

SEQ ID NO: 1144357 - RNA, 19 nt, Artificial Sequence
  Description of Artificial Sequence: Synthetic oligonucleotide
  Antisense strand to SEQ ID NO: 1144356
uaacucaaaguagaagcaa

SEQ ID NO: 1144358 - RNA, 19 nt, Artificial Sequence
  Description of Artificial Sequence: Synthetic oligonucleotide
  Sense strand starting at position 3600 of SEQ ID NO: 916281
cuucuacuuugaguuauau

SEQ ID NO: 1144359 - RNA, 19 nt, Artificial Sequence
  Description of Artificial Sequence: Synthetic oligonucleotide
  Antisense strand to SEQ ID NO: 1144358
auauaacucaaaguagaag

SEQ ID NO: 1144360 - RNA, 19 nt, Artificial Sequence
  Description of Artificial Sequence: Synthetic oligonucleotide
  Sense strand starting at position 3920 of SEQ ID NO: 916281
ccggccauaagaugucaau

SEQ ID NO: 1144361 - RNA, 19 nt, Artificial Sequence
  Description of Artificial Sequence: Synthetic oligonucleotide
  Antisense strand to SEQ ID NO: 1144360
auugacaucuuauggccgg

SEQ ID NO: 1144362 - RNA, 19 nt, Artificial Sequence
  Description of Artificial Sequence: Synthetic oligonucleotide
  Sense strand starting at position 3923 of SEQ ID NO: 916281
gccauaagaugucaauuua

SEQ ID NO: 1144363 - RNA, 19 nt, Artificial Sequence
  Description of Artificial Sequence: Synthetic oligonucleotide
  Antisense strand to SEQ ID NO: 1144362
uaaauugacaucuuauggc

SEQ ID NO: 1144364 - RNA, 19 nt, Artificial Sequence
  Description of Artificial Sequence: Synthetic oligonucleotide
  Sense strand starting at position 47 of SEQ ID NO: 916282
uguguuaaacaauguuagu

SEQ ID NO: 1144365 - RNA, 19 nt, Artificial Sequence
  Description of Artificial Sequence: Synthetic oligonucleotide
  Antisense strand to SEQ ID NO: 1144364
acuaacauuguuuaacaca

SEQ ID NO: 1144366 - RNA, 19 nt, Artificial Sequence
  Description of Artificial Sequence: Synthetic oligonucleotide
  Sense strand starting at position 105 of SEQ ID NO: 916282
auuaaagccucagaaugaa

SEQ ID NO: 1144367 - RNA, 19 nt, Artificial Sequence
  Description of Artificial Sequence: Synthetic oligonucleotide
  Antisense strand to SEQ ID NO: 1144366
uucauucugaggcuuuaau

SEQ ID NO: 1144368 - RNA, 19 nt, Artificial Sequence
  Description of Artificial Sequence: Synthetic oligonucleotide
  Sense strand starting at position 365 of SEQ ID NO: 916282
caucaauaucagugggucu

SEQ ID NO: 1144369 - RNA, 19 nt, Artificial Sequence
  Description of Artificial Sequence: Synthetic oligonucleotide
  Antisense strand to SEQ ID NO: 1144368
agacccacugauauugaug

SEQ ID NO: 1144370 - RNA, 19 nt, Artificial Sequence
  Description of Artificial Sequence: Synthetic oligonucleotide
  Sense strand starting at position 368 of SEQ ID NO: 916282
caauaucagugggucucaa

SEQ ID NO: 1144371 - RNA, 19 nt, Artificial Sequence
  Description of Artificial Sequence: Synthetic oligonucleotide
  Antisense strand to SEQ ID NO: 1144370
uugagacccacugauauug

SEQ ID NO: 1144372 - RNA, 19 nt, Artificial Sequence
  Description of Artificial Sequence: Synthetic oligonucleotide
  Sense strand starting at position 634 of SEQ ID NO: 916282
ccugcugggugaguauaaa

SEQ ID NO: 1144373 - RNA, 19 nt, Artificial Sequence
  Description of Artificial Sequence: Synthetic oligonucleotide
  Antisense strand to SEQ ID NO: 1144372
uuuauacucacccagcagg

SEQ ID NO: 1144374 - RNA, 19 nt, Artificial Sequence
  Description of Artificial Sequence: Synthetic oligonucleotide
  Sense strand starting at position 785 of SEQ ID NO: 916282
accaaagugucaguaacuu

SEQ ID NO: 1144375 - RNA, 19 nt, Artificial Sequence
  Description of Artificial Sequence: Synthetic oligonucleotide
  Antisense strand to SEQ ID NO: 1144374
aaguuacugacacuuuggu

SEQ ID NO: 1144376 - RNA, 19 nt, Artificial Sequence
  Description of Artificial Sequence: Synthetic oligonucleotide
  Sense strand starting at position 891 of SEQ ID NO: 916282
uuauuccugugauuaaguu

SEQ ID NO: 1144377 - RNA, 19 nt, Artificial Sequence
  Description of Artificial Sequence: Synthetic oligonucleotide
  Antisense strand to SEQ ID NO: 1144376
aacuuaaucacaggaauaa

SEQ ID NO: 1144378 - RNA, 19 nt, Artificial Sequence
  Description of Artificial Sequence: Synthetic oligonucleotide
  Sense strand starting at position 895 of SEQ ID NO: 916282
uccugugauuaaguuguuu

SEQ ID NO: 1144379 - RNA, 19 nt, Artificial Sequence
  Description of Artificial Sequence: Synthetic oligonucleotide
  Antisense strand to SEQ ID NO: 1144378
aaacaacuuaaucacagga

SEQ ID NO: 1144380 - RNA, 19 nt, Artificial Sequence
  Description of Artificial Sequence: Synthetic oligonucleotide
  Sense strand starting at position 897 of SEQ ID NO: 916282
cugugauuaaguuguuuga

SEQ ID NO: 1144381 - RNA, 19 nt, Artificial Sequence
  Description of Artificial Sequence: Synthetic oligonucleotide
  Antisense strand to SEQ ID NO: 1144380
ucaaacaacuuaaucacag

SEQ ID NO: 1144382 - RNA, 19 nt, Artificial Sequence
  Description of Artificial Sequence: Synthetic oligonucleotide
  Sense strand starting at position 899 of SEQ ID NO: 916282
gugauuaaguuguuugauc

SEQ ID NO: 1144383 - RNA, 19 nt, Artificial Sequence
  Description of Artificial Sequence: Synthetic oligonucleotide
  Antisense strand to SEQ ID NO: 1144382
gaucaaacaacuuaaucac

SEQ ID NO: 1144384 - RNA, 19 nt, Artificial Sequence
  Description of Artificial Sequence: Synthetic oligonucleotide
  Sense strand starting at position 900 of SEQ ID NO: 916282
ugauuaaguuguuugauca

SEQ ID NO: 1144385 - RNA, 19 nt, Artificial Sequence
  Description of Artificial Sequence: Synthetic oligonucleotide
  Antisense strand to SEQ ID NO: 1144384
ugaucaaacaacuuaauca

SEQ ID NO: 1144386 - RNA, 19 nt, Artificial Sequence
  Description of Artificial Sequence: Synthetic oligonucleotide
  Sense strand starting at position 901 of SEQ ID NO: 916282
gauuaaguuguuugaucaa

SEQ ID NO: 1144387 - RNA, 19 nt, Artificial Sequence
  Description of Artificial Sequence: Synthetic oligonucleotide
  Antisense strand to SEQ ID NO: 1144386
uugaucaaacaacuuaauc

SEQ ID NO: 1144388 - RNA, 19 nt, Artificial Sequence
  Description of Artificial Sequence: Synthetic oligonucleotide
  Sense strand starting at position 904 of SEQ ID NO: 916282
uaaguuguuugaucaaaga

SEQ ID NO: 1144389 - RNA, 19 nt, Artificial Sequence
  Description of Artificial Sequence: Synthetic oligonucleotide
  Antisense strand to SEQ ID NO: 1144388
ucuuugaucaaacaacuua

SEQ ID NO: 1144390 - RNA, 19 nt, Artificial Sequence
  Description of Artificial Sequence: Synthetic oligonucleotide
  Sense strand starting at position 923 of SEQ ID NO: 916282
aaaguuaucggucaugaag

SEQ ID NO: 1144391 - RNA, 19 nt, Artificial Sequence
  Description of Artificial Sequence: Synthetic oligonucleotide
  Antisense strand to SEQ ID NO: 1144390
cuucaugaccgauaacuuu

SEQ ID NO: 1144392 - RNA, 19 nt, Artificial Sequence
  Description of Artificial Sequence: Synthetic oligonucleotide
  Sense strand starting at position 976 of SEQ ID NO: 916282
acagauuucuugugacagc

SEQ ID NO: 1144393 - RNA, 19 nt, Artificial Sequence
  Description of Artificial Sequence: Synthetic oligonucleotide
  Antisense strand to SEQ ID NO: 1144392
gcugucacaagaaaucugu

SEQ ID NO: 1144394 - RNA, 19 nt, Artificial Sequence
  Description of Artificial Sequence: Synthetic oligonucleotide
  Sense strand starting at position 985 of SEQ ID NO: 916282
uugugacagccugagcauu

SEQ ID NO: 1144395 - RNA, 19 nt, Artificial Sequence
  Description of Artificial Sequence: Synthetic oligonucleotide
  Antisense strand to SEQ ID NO: 1144394
aaugcucaggcugucacaa

SEQ ID NO: 1144396 - RNA, 19 nt, Artificial Sequence
  Description of Artificial Sequence: Synthetic oligonucleotide
  Sense strand starting at position 987 of SEQ ID NO: 916282
gugacagccugagcauuua

SEQ ID NO: 1144397 - RNA, 19 nt, Artificial Sequence
  Description of Artificial Sequence: Synthetic oligonucleotide
  Antisense strand to SEQ ID NO: 1144396
uaaaugcucaggcugucac

SEQ ID NO: 1144398 - RNA, 19 nt, Artificial Sequence
  Description of Artificial Sequence: Synthetic oligonucleotide
  Sense strand starting at position 1036 of SEQ ID NO: 916282
cuuucuauuccacagaggu

SEQ ID NO: 1144399 - RNA, 19 nt, Artificial Sequence
  Description of Artificial Sequence: Synthetic oligonucleotide
  Antisense strand to SEQ ID NO: 1144398
accucuguggaauagaaag

SEQ ID NO: 1144400 - RNA, 19 nt, Artificial Sequence
  Description of Artificial Sequence: Synthetic oligonucleotide
  Sense strand starting at position 1084 of SEQ ID NO: 916282
gcacuugugaucugcagug

SEQ ID NO: 1144401 - RNA, 19 nt, Artificial Sequence
  Description of Artificial Sequence: Synthetic oligonucleotide
  Antisense strand to SEQ ID NO: 1144400
cacugcagaucacaagugc

SEQ ID NO: 1144402 - RNA, 19 nt, Artificial Sequence
  Description of Artificial Sequence: Synthetic oligonucleotide
  Sense strand starting at position 1096 of SEQ ID NO: 916282
ugcaguggugcucaaguua

SEQ ID NO: 1144403 - RNA, 19 nt, Artificial Sequence
  Description of Artificial Sequence: Synthetic oligonucleotide
  Antisense strand to SEQ ID NO: 1144402
uaacuugagcaccacugca

SEQ ID NO: 1144404 - RNA, 19 nt, Artificial Sequence
  Description of Artificial Sequence: Synthetic oligonucleotide
  Sense strand starting at position 1101 of SEQ ID NO: 916282
uggugcucaaguuaugaca

SEQ ID NO: 1144405 - RNA, 19 nt, Artificial Sequence
  Description of Artificial Sequence: Synthetic oligonucleotide
  Antisense strand to SEQ ID NO: 1144404
ugucauaacuugagcacca

SEQ ID NO: 1144406 - RNA, 19 nt, Artificial Sequence
  Description of Artificial Sequence: Synthetic oligonucleotide
  Sense strand starting at position 1254 of SEQ ID NO: 916282
uuguauuugaggcgagagu

SEQ ID NO: 1144407 - RNA, 19 nt, Artificial Sequence
  Description of Artificial Sequence: Synthetic oligonucleotide
  Antisense strand to SEQ ID NO: 1144406
acucucgccucaaauacaa

SEQ ID NO: 1144408 - RNA, 19 nt, Artificial Sequence
  Description of Artificial Sequence: Synthetic oligonucleotide
  Sense strand starting at position 1729 of SEQ ID NO: 916282
cgccuacccguguuguaga

SEQ ID NO: 1144409 - RNA, 19 nt, Artificial Sequence
  Description of Artificial Sequence: Synthetic oligonucleotide
  Antisense strand to SEQ ID NO: 1144408
ucuacaacacggguaggcg

SEQ ID NO: 1144410 - RNA, 19 nt, Artificial Sequence
  Description of Artificial Sequence: Synthetic oligonucleotide
  Sense strand starting at position 2227 of SEQ ID NO: 916282
uuacguccacuuuaauuga

SEQ ID NO: 1144411 - RNA, 19 nt, Artificial Sequence
  Description of Artificial Sequence: Synthetic oligonucleotide
  Antisense strand to SEQ ID NO: 1144410
ucaauuaaaguggacguaa

SEQ ID NO: 1144412 - RNA, 19 nt, Artificial Sequence
  Description of Artificial Sequence: Synthetic oligonucleotide
  Sense strand starting at position 2419 of SEQ ID NO: 916282
cagggaaggucgcuacaaa

SEQ ID NO: 1144413 - RNA, 19 nt, Artificial Sequence
  Description of Artificial Sequence: Synthetic oligonucleotide
  Antisense strand to SEQ ID NO: 1144412
uuuguagcgaccuucccug

SEQ ID NO: 1144414 - RNA, 19 nt, Artificial Sequence
  Description of Artificial Sequence: Synthetic oligonucleotide
  Sense strand starting at position 2520 of SEQ ID NO: 916282
guuuguuuggcuuaagcag

SEQ ID NO: 1144415 - RNA, 19 nt, Artificial Sequence
  Description of Artificial Sequence: Synthetic oligonucleotide
  Antisense strand to SEQ ID NO: 1144414
cugcuuaagccaaacaaac

SEQ ID NO: 1144416 - RNA, 19 nt, Artificial Sequence
  Description of Artificial Sequence: Synthetic oligonucleotide
  Sense strand starting at position 2615 of SEQ ID NO: 916282
agugccucauguguauuaa

SEQ ID NO: 1144417 - RNA, 19 nt, Artificial Sequence
  Description of Artificial Sequence: Synthetic oligonucleotide
  Antisense strand to SEQ ID NO: 1144416
uuaauacacaugaggcacu

SEQ ID NO: 1144418 - RNA, 19 nt, Artificial Sequence
  Description of Artificial Sequence: Synthetic oligonucleotide
  Sense strand starting at position 2616 of SEQ ID NO: 916282
gugccucauguguauuaac

SEQ ID NO: 1144419 - RNA, 19 nt, Artificial Sequence
  Description of Artificial Sequence: Synthetic oligonucleotide
  Antisense strand to SEQ ID NO: 1144418
guuaauacacaugaggcac

SEQ ID NO: 1144420 - RNA, 19 nt, Artificial Sequence
  Description of Artificial Sequence: Synthetic oligonucleotide
  Sense strand starting at position 2783 of SEQ ID NO: 916282
cagggcuucugauuccaga

SEQ ID NO: 1144421 - RNA, 19 nt, Artificial Sequence
  Description of Artificial Sequence: Synthetic oligonucleotide
  Antisense strand to SEQ ID NO: 1144420
ucuggaaucagaagcccug

SEQ ID NO: 1144422 - RNA, 19 nt, Artificial Sequence
  Description of Artificial Sequence: Synthetic oligonucleotide
  Sense strand starting at position 3092 of SEQ ID NO: 916282
gugauuugguccuacacau

SEQ ID NO: 1144423 - RNA, 19 nt, Artificial Sequence
  Description of Artificial Sequence: Synthetic oligonucleotide
  Antisense strand to SEQ ID NO: 1144422
auguguaggaccaaaucac

SEQ ID NO: 1144424 - RNA, 19 nt, Artificial Sequence
  Description of Artificial Sequence: Synthetic oligonucleotide
  Sense strand starting at position 3117 of SEQ ID NO: 916282
acaaguccauuaggaauaa

SEQ ID NO: 1144425 - RNA, 19 nt, Artificial Sequence
  Description of Artificial Sequence: Synthetic oligonucleotide
  Antisense strand to SEQ ID NO: 1144424
uuauuccuaauggacuugu

SEQ ID NO: 1144426 - RNA, 19 nt, Artificial Sequence
  Description of Artificial Sequence: Synthetic oligonucleotide
  Sense strand starting at position 3157 of SEQ ID NO: 916282
caugccaaaugaguagauu

SEQ ID NO: 1144427 - RNA, 19 nt, Artificial Sequence
  Description of Artificial Sequence: Synthetic oligonucleotide
  Antisense strand to SEQ ID NO: 1144426
aaucuacucauuuggcaug

SEQ ID NO: 1144428 - RNA, 19 nt, Artificial Sequence
  Description of Artificial Sequence: Synthetic oligonucleotide
  Sense strand starting at position 3208 of SEQ ID NO: 916282
guuggugguaacuauauga

SEQ ID NO: 1144429 - RNA, 19 nt, Artificial Sequence
  Description of Artificial Sequence: Synthetic oligonucleotide
  Antisense strand to SEQ ID NO: 1144428
ucauauaguuaccaccaac

SEQ ID NO: 1144430 - RNA, 19 nt, Artificial Sequence
  Description of Artificial Sequence: Synthetic oligonucleotide
  Sense strand starting at position 3212 of SEQ ID NO: 916282
gugguaacuauaugagaug

SEQ ID NO: 1144431 - RNA, 19 nt, Artificial Sequence
  Description of Artificial Sequence: Synthetic oligonucleotide
  Antisense strand to SEQ ID NO: 1144430
caucucauauaguuaccac

SEQ ID NO: 1144432 - RNA, 19 nt, Artificial Sequence
  Description of Artificial Sequence: Synthetic oligonucleotide
  Sense strand starting at position 3358 of SEQ ID NO: 916282
gugguauggacuuggcaag

SEQ ID NO: 1144433 - RNA, 19 nt, Artificial Sequence
  Description of Artificial Sequence: Synthetic oligonucleotide
  Antisense strand to SEQ ID NO: 1144432
cuugccaaguccauaccac

SEQ ID NO: 1144434 - RNA, 19 nt, Artificial Sequence
  Description of Artificial Sequence: Synthetic oligonucleotide
  Sense strand starting at position 3430 of SEQ ID NO: 916282
auaagauucucauagggag

SEQ ID NO: 1144435 - RNA, 19 nt, Artificial Sequence
  Description of Artificial Sequence: Synthetic oligonucleotide
  Antisense strand to SEQ ID NO: 1144434
cucccuaugagaaucuuau

SEQ ID NO: 1144436 - RNA, 19 nt, Artificial Sequence
  Description of Artificial Sequence: Synthetic oligonucleotide
  Sense strand starting at position 3505 of SEQ ID NO: 916282
gaaucuaaugcgcgguuga

SEQ ID NO: 1144437 - RNA, 19 nt, Artificial Sequence
  Description of Artificial Sequence: Synthetic oligonucleotide
  Antisense strand to SEQ ID NO: 1144436
ucaaccgcgcauuagauuc

SEQ ID NO: 1144438 - RNA, 19 nt, Artificial Sequence
  Description of Artificial Sequence: Synthetic oligonucleotide
  Sense strand starting at position 3507 of SEQ ID NO: 916282
aucuaaugcgcgguugauc

SEQ ID NO: 1144439 - RNA, 19 nt, Artificial Sequence
  Description of Artificial Sequence: Synthetic oligonucleotide
  Antisense strand to SEQ ID NO: 1144438
gaucaaccgcgcauuagau

SEQ ID NO: 1144440 - RNA, 19 nt, Artificial Sequence
  Description of Artificial Sequence: Synthetic oligonucleotide
  Sense strand starting at position 3603 of SEQ ID NO: 916282
uggucuauaugauaucaac

SEQ ID NO: 1144441 - RNA, 19 nt, Artificial Sequence
  Description of Artificial Sequence: Synthetic oligonucleotide
  Antisense strand to SEQ ID NO: 1144440
guugauaucauauagacca

SEQ ID NO: 1144442 - RNA, 19 nt, Artificial Sequence
  Description of Artificial Sequence: Synthetic oligonucleotide
  Sense strand starting at position 3830 of SEQ ID NO: 916282
auacaaguccaguggaaga

SEQ ID NO: 1144443 - RNA, 19 nt, Artificial Sequence
  Description of Artificial Sequence: Synthetic oligonucleotide
  Antisense strand to SEQ ID NO: 1144442
ucuuccacuggacuuguau

SEQ ID NO: 1144444 - RNA, 19 nt, Artificial Sequence
  Description of Artificial Sequence: Synthetic oligonucleotide
  Sense strand starting at position 60 of SEQ ID NO: 916283
ugcucugagaagugugcuu

SEQ ID NO: 1144445 - RNA, 19 nt, Artificial Sequence
  Description of Artificial Sequence: Synthetic oligonucleotide
  Antisense strand to SEQ ID NO: 1144444
aagcacacuucucagagca

SEQ ID NO: 1144446 - RNA, 19 nt, Artificial Sequence
  Description of Artificial Sequence: Synthetic oligonucleotide
  Sense strand starting at position 65 of SEQ ID NO: 916283
ugagaagugugcuuggaau

SEQ ID NO: 1144447 - RNA, 19 nt, Artificial Sequence
  Description of Artificial Sequence: Synthetic oligonucleotide
  Antisense strand to SEQ ID NO: 1144446
auuccaagcacacuucuca

SEQ ID NO: 1144448 - RNA, 19 nt, Artificial Sequence
  Description of Artificial Sequence: Synthetic oligonucleotide
  Sense strand starting at position 410 of SEQ ID NO: 916283
gggacuacucugugccuua

SEQ ID NO: 1144449 - RNA, 19 nt, Artificial Sequence
  Description of Artificial Sequence: Synthetic oligonucleotide
  Antisense strand to SEQ ID NO: 1144448
uaaggcacagaguaguccc

SEQ ID NO: 1144450 - RNA, 19 nt, Artificial Sequence
  Description of Artificial Sequence: Synthetic oligonucleotide
  Sense strand starting at position 423 of SEQ ID NO: 916283
gccuuaguuucccucagaa

SEQ ID NO: 1144451 - RNA, 19 nt, Artificial Sequence
  Description of Artificial Sequence: Synthetic oligonucleotide
  Antisense strand to SEQ ID NO: 1144450
uucugagggaaacuaaggc

SEQ ID NO: 1144452 - RNA, 19 nt, Artificial Sequence
  Description of Artificial Sequence: Synthetic oligonucleotide
  Sense strand starting at position 527 of SEQ ID NO: 916283
gccgccaaagcgucucauu

SEQ ID NO: 1144453 - RNA, 19 nt, Artificial Sequence
  Description of Artificial Sequence: Synthetic oligonucleotide
  Antisense strand to SEQ ID NO: 1144452
aaugagacgcuuuggcggc

SEQ ID NO: 1144454 - RNA, 19 nt, Artificial Sequence
  Description of Artificial Sequence: Synthetic oligonucleotide
  Sense strand starting at position 530 of SEQ ID NO: 916283
gccaaagcgucucauugga

SEQ ID NO: 1144455 - RNA, 19 nt, Artificial Sequence
  Description of Artificial Sequence: Synthetic oligonucleotide
  Antisense strand to SEQ ID NO: 1144454
uccaaugagacgcuuuggc

SEQ ID NO: 1144456 - RNA, 19 nt, Artificial Sequence
  Description of Artificial Sequence: Synthetic oligonucleotide
  Sense strand starting at position 646 of SEQ ID NO: 916283
cugagaaguugaucuugag

SEQ ID NO: 1144457 - RNA, 19 nt, Artificial Sequence
  Description of Artificial Sequence: Synthetic oligonucleotide
  Antisense strand to SEQ ID NO: 1144456
cucaagaucaacuucucag

SEQ ID NO: 1144458 - RNA, 19 nt, Artificial Sequence
  Description of Artificial Sequence: Synthetic oligonucleotide
  Sense strand starting at position 765 of SEQ ID NO: 916283
gagcguuggcagcgagaca

SEQ ID NO: 1144459 - RNA, 19 nt, Artificial Sequence
  Description of Artificial Sequence: Synthetic oligonucleotide
  Antisense strand to SEQ ID NO: 1144458
ugucucgcugccaacgcuc

SEQ ID NO: 1144460 - RNA, 19 nt, Artificial Sequence
  Description of Artificial Sequence: Synthetic oligonucleotide
  Sense strand starting at position 1185 of SEQ ID NO: 916283
gggcaaugcucagagaaac

SEQ ID NO: 1144461 - RNA, 19 nt, Artificial Sequence
  Description of Artificial Sequence: Synthetic oligonucleotide
  Antisense strand to SEQ ID NO: 1144460
guuucucugagcauugccc

SEQ ID NO: 1144462 - RNA, 19 nt, Artificial Sequence
  Description of Artificial Sequence: Synthetic oligonucleotide
  Sense strand starting at position 1986 of SEQ ID NO: 916283
ggaaaugcuuuaucugagu

SEQ ID NO: 1144463 - RNA, 19 nt, Artificial Sequence
  Description of Artificial Sequence: Synthetic oligonucleotide
  Antisense strand to SEQ ID NO: 1144462
acucagauaaagcauuucc

SEQ ID NO: 1144464 - RNA, 19 nt, Artificial Sequence
  Description of Artificial Sequence: Synthetic oligonucleotide
  Sense strand starting at position 2493 of SEQ ID NO: 916283
cacgacuugccucaggaaa

SEQ ID NO: 1144465 - RNA, 19 nt, Artificial Sequence
  Description of Artificial Sequence: Synthetic oligonucleotide
  Antisense strand to SEQ ID NO: 1144464
uuuccugaggcaagucgug

SEQ ID NO: 1144466 - RNA, 19 nt, Artificial Sequence
  Description of Artificial Sequence: Synthetic oligonucleotide
  Sense strand starting at position 2495 of SEQ ID NO: 916283
cgacuugccucaggaaagu

SEQ ID NO: 1144467 - RNA, 19 nt, Artificial Sequence
  Description of Artificial Sequence: Synthetic oligonucleotide
  Antisense strand to SEQ ID NO: 1144466
acuuuccugaggcaagucg

SEQ ID NO: 1144468 - RNA, 19 nt, Artificial Sequence
  Description of Artificial Sequence: Synthetic oligonucleotide
  Sense strand starting at position 2512 of SEQ ID NO: 916283
guuccaggaucugauuuga

SEQ ID NO: 1144469 - RNA, 19 nt, Artificial Sequence
  Description of Artificial Sequence: Synthetic oligonucleotide
  Antisense strand to SEQ ID NO: 1144468
ucaaaucagauccuggaac

SEQ ID NO: 1144470 - RNA, 19 nt, Artificial Sequence
  Description of Artificial Sequence: Synthetic oligonucleotide
  Sense strand starting at position 2598 of SEQ ID NO: 916283
gguccagccuguuccuauu

SEQ ID NO: 1144471 - RNA, 19 nt, Artificial Sequence
  Description of Artificial Sequence: Synthetic oligonucleotide
  Antisense strand to SEQ ID NO: 1144470
aauaggaacaggcuggacc

SEQ ID NO: 1144472 - RNA, 19 nt, Artificial Sequence
  Description of Artificial Sequence: Synthetic oligonucleotide
  Sense strand starting at position 2822 of SEQ ID NO: 916283
acagaaauguuccagucug

SEQ ID NO: 1144473 - RNA, 19 nt, Artificial Sequence
  Description of Artificial Sequence: Synthetic oligonucleotide
  Antisense strand to SEQ ID NO: 1144472
cagacuggaacauuucugu

SEQ ID NO: 1144474 - RNA, 19 nt, Artificial Sequence
  Description of Artificial Sequence: Synthetic oligonucleotide
  Sense strand starting at position 2827 of SEQ ID NO: 916283
aauguuccagucugugagu

SEQ ID NO: 1144475 - RNA, 19 nt, Artificial Sequence
  Description of Artificial Sequence: Synthetic oligonucleotide
  Antisense strand to SEQ ID NO: 1144474
acucacagacuggaacauu

SEQ ID NO: 1144476 - RNA, 19 nt, Artificial Sequence
  Description of Artificial Sequence: Synthetic oligonucleotide
  Sense strand starting at position 3016 of SEQ ID NO: 916283
cgugucugccuccagcaau

SEQ ID NO: 1144477 - RNA, 19 nt, Artificial Sequence
  Description of Artificial Sequence: Synthetic oligonucleotide
  Antisense strand to SEQ ID NO: 1144476
auugcuggaggcagacacg

SEQ ID NO: 1144478 - RNA, 19 nt, Artificial Sequence
  Description of Artificial Sequence: Synthetic oligonucleotide
  Sense strand starting at position 3212 of SEQ ID NO: 916283
ggagucaugucugauugga

SEQ ID NO: 1144479 - RNA, 19 nt, Artificial Sequence
  Description of Artificial Sequence: Synthetic oligonucleotide
  Antisense strand to SEQ ID NO: 1144478
uccaaucagacaugacucc

SEQ ID NO: 1144480 - RNA, 19 nt, Artificial Sequence
  Description of Artificial Sequence: Synthetic oligonucleotide
  Sense strand starting at position 3214 of SEQ ID NO: 916283
agucaugucugauuggaag

SEQ ID NO: 1144481 - RNA, 19 nt, Artificial Sequence
  Description of Artificial Sequence: Synthetic oligonucleotide
  Antisense strand to SEQ ID NO: 1144480
cuuccaaucagacaugacu

SEQ ID NO: 1144482 - RNA, 19 nt, Artificial Sequence
  Description of Artificial Sequence: Synthetic oligonucleotide
  Sense strand starting at position 3216 of SEQ ID NO: 916283
ucaugucugauuggaagca

SEQ ID NO: 1144483 - RNA, 19 nt, Artificial Sequence
  Description of Artificial Sequence: Synthetic oligonucleotide
  Antisense strand to SEQ ID NO: 1144482
ugcuuccaaucagacauga

SEQ ID NO: 1144484 - RNA, 19 nt, Artificial Sequence
  Description of Artificial Sequence: Synthetic oligonucleotide
  Sense strand starting at position 3217 of SEQ ID NO: 916283
caugucugauuggaagcaa

SEQ ID NO: 1144485 - RNA, 19 nt, Artificial Sequence
  Description of Artificial Sequence: Synthetic oligonucleotide
  Antisense strand to SEQ ID NO: 1144484
uugcuuccaaucagacaug

SEQ ID NO: 1144486 - RNA, 19 nt, Artificial Sequence
  Description of Artificial Sequence: Synthetic oligonucleotide
  Sense strand starting at position 3344 of SEQ ID NO: 916283
cggcauauucagcguggga

SEQ ID NO: 1144487 - RNA, 19 nt, Artificial Sequence
  Description of Artificial Sequence: Synthetic oligonucleotide
  Antisense strand to SEQ ID NO: 1144486
ucccacgcugaauaugccg

SEQ ID NO: 1144488 - RNA, 19 nt, Artificial Sequence
  Description of Artificial Sequence: Synthetic oligonucleotide
  Sense strand starting at position 3346 of SEQ ID NO: 916283
gcauauucagcgugggacu

SEQ ID NO: 1144489 - RNA, 19 nt, Artificial Sequence
  Description of Artificial Sequence: Synthetic oligonucleotide
  Antisense strand to SEQ ID NO: 1144488
agucccacgcugaauaugc

SEQ ID NO: 1144490 - RNA, 19 nt, Artificial Sequence
  Description of Artificial Sequence: Synthetic oligonucleotide
  Sense strand starting at position 3524 of SEQ ID NO: 916283
guacuuagggcucaguagu

SEQ ID NO: 1144491 - RNA, 19 nt, Artificial Sequence
  Description of Artificial Sequence: Synthetic oligonucleotide
  Antisense strand to SEQ ID NO: 1144490
acuacugagcccuaaguac

SEQ ID NO: 1144492 - RNA, 19 nt, Artificial Sequence
  Description of Artificial Sequence: Synthetic oligonucleotide
  Sense strand starting at position 3535 of SEQ ID NO: 916283
ucaguaguguuagucacua

SEQ ID NO: 1144493 - RNA, 19 nt, Artificial Sequence
  Description of Artificial Sequence: Synthetic oligonucleotide
  Antisense strand to SEQ ID NO: 1144492
uagugacuaacacuacuga

SEQ ID NO: 1144494 - RNA, 19 nt, Artificial Sequence
  Description of Artificial Sequence: Synthetic oligonucleotide
  Sense strand starting at position 3537 of SEQ ID NO: 916283
aguaguguuagucacuauu

SEQ ID NO: 1144495 - RNA, 19 nt, Artificial Sequence
  Description of Artificial Sequence: Synthetic oligonucleotide
  Antisense strand to SEQ ID NO: 1144494
aauagugacuaacacuacu

SEQ ID NO: 1144496 - RNA, 19 nt, Artificial Sequence
  Description of Artificial Sequence: Synthetic oligonucleotide
  Sense strand starting at position 3539 of SEQ ID NO: 916283
uaguguuagucacuauuau

SEQ ID NO: 1144497 - RNA, 19 nt, Artificial Sequence
  Description of Artificial Sequence: Synthetic oligonucleotide
  Antisense strand to SEQ ID NO: 1144496
auaauagugacuaacacua

SEQ ID NO: 1144498 - RNA, 19 nt, Artificial Sequence
  Description of Artificial Sequence: Synthetic oligonucleotide
  Sense strand starting at position 3540 of SEQ ID NO: 916283
aguguuagucacuauuauu

SEQ ID NO: 1144499 - RNA, 19 nt, Artificial Sequence
  Description of Artificial Sequence: Synthetic oligonucleotide
  Antisense strand to SEQ ID NO: 1144498
aauaauagugacuaacacu

SEQ ID NO: 1144500 - RNA, 19 nt, Artificial Sequence
  Description of Artificial Sequence: Synthetic oligonucleotide
  Sense strand starting at position 3543 of SEQ ID NO: 916283
guuagucacuauuauuacu

SEQ ID NO: 1144501 - RNA, 19 nt, Artificial Sequence
  Description of Artificial Sequence: Synthetic oligonucleotide
  Antisense strand to SEQ ID NO: 1144500
aguaauaauagugacuaac

SEQ ID NO: 1144502 - RNA, 19 nt, Artificial Sequence
  Description of Artificial Sequence: Synthetic oligonucleotide
  Sense strand starting at position 3819 of SEQ ID NO: 916283
cccggauucccauagccaa

SEQ ID NO: 1144503 - RNA, 19 nt, Artificial Sequence
  Description of Artificial Sequence: Synthetic oligonucleotide
  Antisense strand to SEQ ID NO: 1144502
uuggcuaugggaauccggg

SEQ ID NO: 1144504 - RNA, 19 nt, Artificial Sequence
  Description of Artificial Sequence: Synthetic oligonucleotide
  Sense strand starting at position 3839 of SEQ ID NO: 916283
aggaauucuucccugaacu

SEQ ID NO: 1144505 - RNA, 19 nt, Artificial Sequence
  Description of Artificial Sequence: Synthetic oligonucleotide
  Antisense strand to SEQ ID NO: 1144504
aguucagggaagaauuccu

SEQ ID NO: 1144506 - RNA, 19 nt, Artificial Sequence
  Description of Artificial Sequence: Synthetic oligonucleotide
  Sense strand starting at position 3840 of SEQ ID NO: 916283
ggaauucuucccugaacug

SEQ ID NO: 1144507 - RNA, 19 nt, Artificial Sequence
  Description of Artificial Sequence: Synthetic oligonucleotide
  Antisense strand to SEQ ID NO: 1144506
caguucagggaagaauucc

SEQ ID NO: 1144508 - RNA, 19 nt, Artificial Sequence
  Description of Artificial Sequence: Synthetic oligonucleotide
  Sense strand starting at position 3849 of SEQ ID NO: 916283
cccugaacuguguggucuu

SEQ ID NO: 1144509 - RNA, 19 nt, Artificial Sequence
  Description of Artificial Sequence: Synthetic oligonucleotide
  Antisense strand to SEQ ID NO: 1144508
aagaccacacaguucaggg

SEQ ID NO: 1144510 - RNA, 19 nt, Artificial Sequence
  Description of Artificial Sequence: Synthetic oligonucleotide
  Sense strand starting at position 3852 of SEQ ID NO: 916283
ugaacuguguggucuuuau

SEQ ID NO: 1144511 - RNA, 19 nt, Artificial Sequence
  Description of Artificial Sequence: Synthetic oligonucleotide
  Antisense strand to SEQ ID NO: 1144510
auaaagaccacacaguuca

SEQ ID NO: 1144512 - RNA, 19 nt, Artificial Sequence
  Description of Artificial Sequence: Synthetic oligonucleotide
  Sense strand starting at position 3856 of SEQ ID NO: 916283
cuguguggucuuuauacau

SEQ ID NO: 1144513 - RNA, 19 nt, Artificial Sequence
  Description of Artificial Sequence: Synthetic oligonucleotide
  Antisense strand to SEQ ID NO: 1144512
auguauaaagaccacacag

SEQ ID NO: 1144514 - RNA, 19 nt, Artificial Sequence
  Description of Artificial Sequence: Synthetic oligonucleotide
  Sense strand starting at position 3863 of SEQ ID NO: 916283
gucuuuauacauugaccuu

SEQ ID NO: 1144515 - RNA, 19 nt, Artificial Sequence
  Description of Artificial Sequence: Synthetic oligonucleotide
  Antisense strand to SEQ ID NO: 1144514
aaggucaauguauaaagac

SEQ ID NO: 1144516 - RNA, 19 nt, Artificial Sequence
  Description of Artificial Sequence: Synthetic oligonucleotide
  Sense strand starting at position 3889 of SEQ ID NO: 916283
cuagucuacuugucucaac

SEQ ID NO: 1144517 - RNA, 19 nt, Artificial Sequence
  Description of Artificial Sequence: Synthetic oligonucleotide
  Antisense strand to SEQ ID NO: 1144516
guugagacaaguagacuag

SEQ ID NO: 1144518 - RNA, 19 nt, Artificial Sequence
  Description of Artificial Sequence: Synthetic oligonucleotide
  Sense strand starting at position 3892 of SEQ ID NO: 916283
gucuacuugucucaacucu

SEQ ID NO: 1144519 - RNA, 19 nt, Artificial Sequence
  Description of Artificial Sequence: Synthetic oligonucleotide
  Antisense strand to SEQ ID NO: 1144518
agaguugagacaaguagac

SEQ ID NO: 1144520 - RNA, 19 nt, Artificial Sequence
  Description of Artificial Sequence: Synthetic oligonucleotide
  Sense strand starting at position 3951 of SEQ ID NO: 916283
cagcuacugccuuggucau

SEQ ID NO: 1144521 - RNA, 19 nt, Artificial Sequence
  Description of Artificial Sequence: Synthetic oligonucleotide
  Antisense strand to SEQ ID NO: 1144520
augaccaaggcaguagcug

SEQ ID NO: 1144522 - RNA, 19 nt, Artificial Sequence
  Description of Artificial Sequence: Synthetic oligonucleotide
  Sense strand starting at position 3982 of SEQ ID NO: 916283
uguagugucuugcacagaa

SEQ ID NO: 1144523 - RNA, 19 nt, Artificial Sequence
  Description of Artificial Sequence: Synthetic oligonucleotide
  Antisense strand to SEQ ID NO: 1144522
uucugugcaagacacuaca

SEQ ID NO: 1144524 - RNA, 19 nt, Artificial Sequence
  Description of Artificial Sequence: Synthetic oligonucleotide
  Sense strand starting at position 26 of SEQ ID NO: 916284
ugauuucgcuaagaaucug

SEQ ID NO: 1144525 - RNA, 19 nt, Artificial Sequence
  Description of Artificial Sequence: Synthetic oligonucleotide
  Antisense strand to SEQ ID NO: 1144524
cagauucuuagcgaaauca

SEQ ID NO: 1144526 - RNA, 19 nt, Artificial Sequence
  Description of Artificial Sequence: Synthetic oligonucleotide
  Sense strand starting at position 31 of SEQ ID NO: 916284
ucgcuaagaaucuggaugu

SEQ ID NO: 1144527 - RNA, 19 nt, Artificial Sequence
  Description of Artificial Sequence: Synthetic oligonucleotide
  Antisense strand to SEQ ID NO: 1144526
acauccagauucuuagcga

SEQ ID NO: 1144528 - RNA, 19 nt, Artificial Sequence
  Description of Artificial Sequence: Synthetic oligonucleotide
  Sense strand starting at position 58 of SEQ ID NO: 916284
ccuuaagaauuuggcaaca

SEQ ID NO: 1144529 - RNA, 19 nt, Artificial Sequence
  Description of Artificial Sequence: Synthetic oligonucleotide
  Antisense strand to SEQ ID NO: 1144528
uguugccaaauucuuaagg

SEQ ID NO: 1144530 - RNA, 19 nt, Artificial Sequence
  Description of Artificial Sequence: Synthetic oligonucleotide
  Sense strand starting at position 60 of SEQ ID NO: 916284
uuaagaauuuggcaacacu

SEQ ID NO: 1144531 - RNA, 19 nt, Artificial Sequence
  Description of Artificial Sequence: Synthetic oligonucleotide
  Antisense strand to SEQ ID NO: 1144530
aguguugccaaauucuuaa

SEQ ID NO: 1144532 - RNA, 19 nt, Artificial Sequence
  Description of Artificial Sequence: Synthetic oligonucleotide
  Sense strand starting at position 112 of SEQ ID NO: 916284
ggaacugccguuuagagau

SEQ ID NO: 1144533 - RNA, 19 nt, Artificial Sequence
  Description of Artificial Sequence: Synthetic oligonucleotide
  Antisense strand to SEQ ID NO: 1144532
aucucuaaacggcaguucc

SEQ ID NO: 1144534 - RNA, 19 nt, Artificial Sequence
  Description of Artificial Sequence: Synthetic oligonucleotide
  Sense strand starting at position 248 of SEQ ID NO: 916284
accucugaucagggcuaaa

SEQ ID NO: 1144535 - RNA, 19 nt, Artificial Sequence
  Description of Artificial Sequence: Synthetic oligonucleotide
  Antisense strand to SEQ ID NO: 1144534
uuuagcccugaucagaggu

SEQ ID NO: 1144536 - RNA, 19 nt, Artificial Sequence
  Description of Artificial Sequence: Synthetic oligonucleotide
  Sense strand starting at position 309 of SEQ ID NO: 916284
ggugaaaggucuuugguug

SEQ ID NO: 1144537 - RNA, 19 nt, Artificial Sequence
  Description of Artificial Sequence: Synthetic oligonucleotide
  Antisense strand to SEQ ID NO: 1144536
caaccaaagaccuuucacc

SEQ ID NO: 1144538 - RNA, 19 nt, Artificial Sequence
  Description of Artificial Sequence: Synthetic oligonucleotide
  Sense strand starting at position 310 of SEQ ID NO: 916284
gugaaaggucuuugguugu

SEQ ID NO: 1144539 - RNA, 19 nt, Artificial Sequence
  Description of Artificial Sequence: Synthetic oligonucleotide
  Antisense strand to SEQ ID NO: 1144538
acaaccaaagaccuuucac

SEQ ID NO: 1144540 - RNA, 19 nt, Artificial Sequence
  Description of Artificial Sequence: Synthetic oligonucleotide
  Sense strand starting at position 313 of SEQ ID NO: 916284
aaaggucuuugguugucaa

SEQ ID NO: 1144541 - RNA, 19 nt, Artificial Sequence
  Description of Artificial Sequence: Synthetic oligonucleotide
  Antisense strand to SEQ ID NO: 1144540
uugacaaccaaagaccuuu

SEQ ID NO: 1144542 - RNA, 19 nt, Artificial Sequence
  Description of Artificial Sequence: Synthetic oligonucleotide
  Sense strand starting at position 314 of SEQ ID NO: 916284
aaggucuuugguugucaaa

SEQ ID NO: 1144543 - RNA, 19 nt, Artificial Sequence
  Description of Artificial Sequence: Synthetic oligonucleotide
  Antisense strand to SEQ ID NO: 1144542
uuugacaaccaaagaccuu

SEQ ID NO: 1144544 - RNA, 19 nt, Artificial Sequence
  Description of Artificial Sequence: Synthetic oligonucleotide
  Sense strand starting at position 316 of SEQ ID NO: 916284
ggucuuugguugucaaaga

SEQ ID NO: 1144545 - RNA, 19 nt, Artificial Sequence
  Description of Artificial Sequence: Synthetic oligonucleotide
  Antisense strand to SEQ ID NO: 1144544
ucuuugacaaccaaagacc

SEQ ID NO: 1144546 - RNA, 19 nt, Artificial Sequence
  Description of Artificial Sequence: Synthetic oligonucleotide
  Sense strand starting at position 355 of SEQ ID NO: 916284
gagggcuuucgugauauga

SEQ ID NO: 1144547 - RNA, 19 nt, Artificial Sequence
  Description of Artificial Sequence: Synthetic oligonucleotide
  Antisense strand to SEQ ID NO: 1144546
ucauaucacgaaagcccuc

SEQ ID NO: 1144548 - RNA, 19 nt, Artificial Sequence
  Description of Artificial Sequence: Synthetic oligonucleotide
  Sense strand starting at position 359 of SEQ ID NO: 916284
gcuuucgugauaugaagau

SEQ ID NO: 1144549 - RNA, 19 nt, Artificial Sequence
  Description of Artificial Sequence: Synthetic oligonucleotide
  Antisense strand to SEQ ID NO: 1144548
aucuucauaucacgaaagc

SEQ ID NO: 1144550 - RNA, 19 nt, Artificial Sequence
  Description of Artificial Sequence: Synthetic oligonucleotide
  Sense strand starting at position 363 of SEQ ID NO: 916284
ucgugauaugaagaucauu

SEQ ID NO: 1144551 - RNA, 19 nt, Artificial Sequence
  Description of Artificial Sequence: Synthetic oligonucleotide
  Antisense strand to SEQ ID NO: 1144550
aaugaucuucauaucacga

SEQ ID NO: 1144552 - RNA, 19 nt, Artificial Sequence
  Description of Artificial Sequence: Synthetic oligonucleotide
  Sense strand starting at position 368 of SEQ ID NO: 916284
auaugaagaucauuguacu

SEQ ID NO: 1144553 - RNA, 19 nt, Artificial Sequence
  Description of Artificial Sequence: Synthetic oligonucleotide
  Antisense strand to SEQ ID NO: 1144552
aguacaaugaucuucauau

SEQ ID NO: 1144554 - RNA, 19 nt, Artificial Sequence
  Description of Artificial Sequence: Synthetic oligonucleotide
  Sense strand starting at position 376 of SEQ ID NO: 916284
aucauuguacuagguauca

SEQ ID NO: 1144555 - RNA, 19 nt, Artificial Sequence
  Description of Artificial Sequence: Synthetic oligonucleotide
  Antisense strand to SEQ ID NO: 1144554
ugauaccuaguacaaugau

SEQ ID NO: 1144556 - RNA, 19 nt, Artificial Sequence
  Description of Artificial Sequence: Synthetic oligonucleotide
  Sense strand starting at position 424 of SEQ ID NO: 916284
ucacaaaugaggcaucgua

SEQ ID NO: 1144557 - RNA, 19 nt, Artificial Sequence
  Description of Artificial Sequence: Synthetic oligonucleotide
  Antisense strand to SEQ ID NO: 1144556
uacgaugccucauuuguga

SEQ ID NO: 1144558 - RNA, 19 nt, Artificial Sequence
  Description of Artificial Sequence: Synthetic oligonucleotide
  Sense strand starting at position 460 of SEQ ID NO: 916284
agcugcacuguuuaaacua

SEQ ID NO: 1144559 - RNA, 19 nt, Artificial Sequence
  Description of Artificial Sequence: Synthetic oligonucleotide
  Antisense strand to SEQ ID NO: 1144558
uaguuuaaacagugcagcu

SEQ ID NO: 1144560 - RNA, 19 nt, Artificial Sequence
  Description of Artificial Sequence: Synthetic oligonucleotide
  Sense strand starting at position 478 of SEQ ID NO: 916284
accuguccaccaggagauu

SEQ ID NO: 1144561 - RNA, 19 nt, Artificial Sequence
  Description of Artificial Sequence: Synthetic oligonucleotide
  Antisense strand to SEQ ID NO: 1144560
aaucuccugguggacaggu

SEQ ID NO: 1144562 - RNA, 19 nt, Artificial Sequence
  Description of Artificial Sequence: Synthetic oligonucleotide
  Sense strand starting at position 545 of SEQ ID NO: 916284
ccauguuagcacugauaua

SEQ ID NO: 1144563 - RNA, 19 nt, Artificial Sequence
  Description of Artificial Sequence: Synthetic oligonucleotide
  Antisense strand to SEQ ID NO: 1144562
uauaucagugcuaacaugg

SEQ ID NO: 1144564 - RNA, 19 nt, Artificial Sequence
  Description of Artificial Sequence: Synthetic oligonucleotide
  Sense strand starting at position 603 of SEQ ID NO: 916284
ucuguauucuagguaccca

SEQ ID NO: 1144565 - RNA, 19 nt, Artificial Sequence
  Description of Artificial Sequence: Synthetic oligonucleotide
  Antisense strand to SEQ ID NO: 1144564
uggguaccuagaauacaga

SEQ ID NO: 1144566 - RNA, 19 nt, Artificial Sequence
  Description of Artificial Sequence: Synthetic oligonucleotide
  Sense strand starting at position 761 of SEQ ID NO: 916284
ggcagaauugacugccucu

SEQ ID NO: 1144567 - RNA, 19 nt, Artificial Sequence
  Description of Artificial Sequence: Synthetic oligonucleotide
  Antisense strand to SEQ ID NO: 1144566
agaggcagucaauucugcc

SEQ ID NO: 1144568 - RNA, 19 nt, Artificial Sequence
  Description of Artificial Sequence: Synthetic oligonucleotide
  Sense strand starting at position 794 of SEQ ID NO: 916284
gcgcauuuauaucuauucu

SEQ ID NO: 1144569 - RNA, 19 nt, Artificial Sequence
  Description of Artificial Sequence: Synthetic oligonucleotide
  Antisense strand to SEQ ID NO: 1144568
agaauagauauaaaugcgc

SEQ ID NO: 1144570 - RNA, 19 nt, Artificial Sequence
  Description of Artificial Sequence: Synthetic oligonucleotide
  Sense strand starting at position 885 of SEQ ID NO: 916284
accugaaacgguggacaaa

SEQ ID NO: 1144571 - RNA, 19 nt, Artificial Sequence
  Description of Artificial Sequence: Synthetic oligonucleotide
  Antisense strand to SEQ ID NO: 1144570
uuuguccaccguuucaggu

SEQ ID NO: 1144572 - RNA, 19 nt, Artificial Sequence
  Description of Artificial Sequence: Synthetic oligonucleotide
  Sense strand starting at position 1137 of SEQ ID NO: 916284
gcggcuacuagagauagga

SEQ ID NO: 1144573 - RNA, 19 nt, Artificial Sequence
  Description of Artificial Sequence: Synthetic oligonucleotide
  Antisense strand to SEQ ID NO: 1144572
uccuaucucuaguagccgc

SEQ ID NO: 1144574 - RNA, 19 nt, Artificial Sequence
  Description of Artificial Sequence: Synthetic oligonucleotide
  Sense strand starting at position 1154 of SEQ ID NO: 916284
gaggcugaccuuggacaaa

SEQ ID NO: 1144575 - RNA, 19 nt, Artificial Sequence
  Description of Artificial Sequence: Synthetic oligonucleotide
  Antisense strand to SEQ ID NO: 1144574
uuuguccaaggucagccuc

SEQ ID NO: 1144576 - RNA, 19 nt, Artificial Sequence
  Description of Artificial Sequence: Synthetic oligonucleotide
  Sense strand starting at position 1214 of SEQ ID NO: 916284
gcagaauggccggaaacuu

SEQ ID NO: 1144577 - RNA, 19 nt, Artificial Sequence
  Description of Artificial Sequence: Synthetic oligonucleotide
  Antisense strand to SEQ ID NO: 1144576
aaguuuccggccauucugc

SEQ ID NO: 1144578 - RNA, 19 nt, Artificial Sequence
  Description of Artificial Sequence: Synthetic oligonucleotide
  Sense strand starting at position 1245 of SEQ ID NO: 916284
uucuguauuucuggaauuu

SEQ ID NO: 1144579 - RNA, 19 nt, Artificial Sequence
  Description of Artificial Sequence: Synthetic oligonucleotide
  Antisense strand to SEQ ID NO: 1144578
aaauuccagaaauacagaa

SEQ ID NO: 1144580 - RNA, 19 nt, Artificial Sequence
  Description of Artificial Sequence: Synthetic oligonucleotide
  Sense strand starting at position 1301 of SEQ ID NO: 916284
aacugaaaucgcggauaaa

SEQ ID NO: 1144581 - RNA, 19 nt, Artificial Sequence
  Description of Artificial Sequence: Synthetic oligonucleotide
  Antisense strand to SEQ ID NO: 1144580
uuuauccgcgauuucaguu

SEQ ID NO: 1144582 - RNA, 19 nt, Artificial Sequence
  Description of Artificial Sequence: Synthetic oligonucleotide
  Sense strand starting at position 1302 of SEQ ID NO: 916284
acugaaaucgcggauaaag

SEQ ID NO: 1144583 - RNA, 19 nt, Artificial Sequence
  Description of Artificial Sequence: Synthetic oligonucleotide
  Antisense strand to SEQ ID NO: 1144582
cuuuauccgcgauuucagu

SEQ ID NO: 1144584 - RNA, 19 nt, Artificial Sequence
  Description of Artificial Sequence: Synthetic oligonucleotide
  Sense strand starting at position 1338 of SEQ ID NO: 916284
uucucuaguacuugggagu

SEQ ID NO: 1144585 - RNA, 19 nt, Artificial Sequence
  Description of Artificial Sequence: Synthetic oligonucleotide
  Antisense strand to SEQ ID NO: 1144584
acucccaaguacuagagaa

SEQ ID NO: 1144586 - RNA, 19 nt, Artificial Sequence
  Description of Artificial Sequence: Synthetic oligonucleotide
  Sense strand starting at position 1339 of SEQ ID NO: 916284
ucucuaguacuugggaguu

SEQ ID NO: 1144587 - RNA, 19 nt, Artificial Sequence
  Description of Artificial Sequence: Synthetic oligonucleotide
  Antisense strand to SEQ ID NO: 1144586
aacucccaaguacuagaga

SEQ ID NO: 1144588 - RNA, 19 nt, Artificial Sequence
  Description of Artificial Sequence: Synthetic oligonucleotide
  Sense strand starting at position 1354 of SEQ ID NO: 916284
aguuucuugcgacacucau

SEQ ID NO: 1144589 - RNA, 19 nt, Artificial Sequence
  Description of Artificial Sequence: Synthetic oligonucleotide
  Antisense strand to SEQ ID NO: 1144588
augagugucgcaagaaacu

SEQ ID NO: 1144590 - RNA, 19 nt, Artificial Sequence
  Description of Artificial Sequence: Synthetic oligonucleotide
  Sense strand starting at position 1379 of SEQ ID NO: 916284
aaccgagugucucucaaca

SEQ ID NO: 1144591 - RNA, 19 nt, Artificial Sequence
  Description of Artificial Sequence: Synthetic oligonucleotide
  Antisense strand to SEQ ID NO: 1144590
uguugagagacacucgguu

SEQ ID NO: 1144592 - RNA, 19 nt, Artificial Sequence
  Description of Artificial Sequence: Synthetic oligonucleotide
  Sense strand starting at position 1384 of SEQ ID NO: 916284
agugucucucaacaaauca

SEQ ID NO: 1144593 - RNA, 19 nt, Artificial Sequence
  Description of Artificial Sequence: Synthetic oligonucleotide
  Antisense strand to SEQ ID NO: 1144592
ugauuuguugagagacacu

SEQ ID NO: 1144594 - RNA, 19 nt, Artificial Sequence
  Description of Artificial Sequence: Synthetic oligonucleotide
  Sense strand starting at position 1473 of SEQ ID NO: 916284
uugggauucucuccuugga

SEQ ID NO: 1144595 - RNA, 19 nt, Artificial Sequence
  Description of Artificial Sequence: Synthetic oligonucleotide
  Antisense strand to SEQ ID NO: 1144594
uccaaggagagaaucccaa

SEQ ID NO: 1144596 - RNA, 19 nt, Artificial Sequence
  Description of Artificial Sequence: Synthetic oligonucleotide
  Sense strand starting at position 1475 of SEQ ID NO: 916284
gggauucucuccuuggauc

SEQ ID NO: 1144597 - RNA, 19 nt, Artificial Sequence
  Description of Artificial Sequence: Synthetic oligonucleotide
  Antisense strand to SEQ ID NO: 1144596
gauccaaggagagaauccc

SEQ ID NO: 1144598 - RNA, 19 nt, Artificial Sequence
  Description of Artificial Sequence: Synthetic oligonucleotide
  Sense strand starting at position 1476 of SEQ ID NO: 916284
ggauucucuccuuggauca

SEQ ID NO: 1144599 - RNA, 19 nt, Artificial Sequence
  Description of Artificial Sequence: Synthetic oligonucleotide
  Antisense strand to SEQ ID NO: 1144598
ugauccaaggagagaaucc

SEQ ID NO: 1144600 - RNA, 19 nt, Artificial Sequence
  Description of Artificial Sequence: Synthetic oligonucleotide
  Sense strand starting at position 1489 of SEQ ID NO: 916284
ggaucagucucuccuguuu

SEQ ID NO: 1144601 - RNA, 19 nt, Artificial Sequence
  Description of Artificial Sequence: Synthetic oligonucleotide
  Antisense strand to SEQ ID NO: 1144600
aaacaggagagacugaucc

SEQ ID NO: 1144602 - RNA, 19 nt, Artificial Sequence
  Description of Artificial Sequence: Synthetic oligonucleotide
  Sense strand starting at position 1777 of SEQ ID NO: 916284
aacagcgaguucuugauca

SEQ ID NO: 1144603 - RNA, 19 nt, Artificial Sequence
  Description of Artificial Sequence: Synthetic oligonucleotide
  Antisense strand to SEQ ID NO: 1144602
ugaucaagaacucgcuguu

SEQ ID NO: 1144604 - RNA, 19 nt, Artificial Sequence
  Description of Artificial Sequence: Synthetic oligonucleotide
  Sense strand starting at position 34 of SEQ ID NO: 916285
gugaacuuggauuagucuu

SEQ ID NO: 1144605 - RNA, 19 nt, Artificial Sequence
  Description of Artificial Sequence: Synthetic oligonucleotide
  Antisense strand to SEQ ID NO: 1144604
aagacuaauccaaguucac

SEQ ID NO: 1144606 - RNA, 19 nt, Artificial Sequence
  Description of Artificial Sequence: Synthetic oligonucleotide
  Sense strand starting at position 36 of SEQ ID NO: 916285
gaacuuggauuagucuuua

SEQ ID NO: 1144607 - RNA, 19 nt, Artificial Sequence
  Description of Artificial Sequence: Synthetic oligonucleotide
  Antisense strand to SEQ ID NO: 1144606
uaaagacuaauccaaguuc

SEQ ID NO: 1144608 - RNA, 19 nt, Artificial Sequence
  Description of Artificial Sequence: Synthetic oligonucleotide
  Sense strand starting at position 40 of SEQ ID NO: 916285
uuggauuagucuuuaagaa

SEQ ID NO: 1144609 - RNA, 19 nt, Artificial Sequence
  Description of Artificial Sequence: Synthetic oligonucleotide
  Antisense strand to SEQ ID NO: 1144608
uucuuaaagacuaauccaa

SEQ ID NO: 1144610 - RNA, 19 nt, Artificial Sequence
  Description of Artificial Sequence: Synthetic oligonucleotide
  Sense strand starting at position 489 of SEQ ID NO: 916285
acacaccuugcuuguuaua

SEQ ID NO: 1144611 - RNA, 19 nt, Artificial Sequence
  Description of Artificial Sequence: Synthetic oligonucleotide
  Antisense strand to SEQ ID NO: 1144610
uauaacaagcaaggugugu

SEQ ID NO: 1144612 - RNA, 19 nt, Artificial Sequence
  Description of Artificial Sequence: Synthetic oligonucleotide
  Sense strand starting at position 491 of SEQ ID NO: 916285
acaccuugcuuguuauaga

SEQ ID NO: 1144613 - RNA, 19 nt, Artificial Sequence
  Description of Artificial Sequence: Synthetic oligonucleotide
  Antisense strand to SEQ ID NO: 1144612
ucuauaacaagcaaggugu

SEQ ID NO: 1144614 - RNA, 19 nt, Artificial Sequence
  Description of Artificial Sequence: Synthetic oligonucleotide
  Sense strand starting at position 673 of SEQ ID NO: 916285
cguauucgcaucucaagca

SEQ ID NO: 1144615 - RNA, 19 nt, Artificial Sequence
  Description of Artificial Sequence: Synthetic oligonucleotide
  Antisense strand to SEQ ID NO: 1144614
ugcuugagaugcgaauacg

SEQ ID NO: 1144616 - RNA, 19 nt, Artificial Sequence
  Description of Artificial Sequence: Synthetic oligonucleotide
  Sense strand starting at position 695 of SEQ ID NO: 916285
ccaaaugucucggccaaug

SEQ ID NO: 1144617 - RNA, 19 nt, Artificial Sequence
  Description of Artificial Sequence: Synthetic oligonucleotide
  Antisense strand to SEQ ID NO: 1144616
cauuggccgagacauuugg

SEQ ID NO: 1144618 - RNA, 19 nt, Artificial Sequence
  Description of Artificial Sequence: Synthetic oligonucleotide
  Sense strand starting at position 837 of SEQ ID NO: 916285
gccguuuauagccagaaga

SEQ ID NO: 1144619 - RNA, 19 nt, Artificial Sequence
  Description of Artificial Sequence: Synthetic oligonucleotide
  Antisense strand to SEQ ID NO: 1144618
ucuucuggcuauaaacggc

SEQ ID NO: 1144620 - RNA, 19 nt, Artificial Sequence
  Description of Artificial Sequence: Synthetic oligonucleotide
  Sense strand starting at position 839 of SEQ ID NO: 916285
cguuuauagccagaagaua

SEQ ID NO: 1144621 - RNA, 19 nt, Artificial Sequence
  Description of Artificial Sequence: Synthetic oligonucleotide
  Antisense strand to SEQ ID NO: 1144620
uaucuucuggcuauaaacg

SEQ ID NO: 1144622 - RNA, 19 nt, Artificial Sequence
  Description of Artificial Sequence: Synthetic oligonucleotide
  Sense strand starting at position 884 of SEQ ID NO: 916285
gaaagcucuccuuacggca

SEQ ID NO: 1144623 - RNA, 19 nt, Artificial Sequence
  Description of Artificial Sequence: Synthetic oligonucleotide
  Antisense strand to SEQ ID NO: 1144622
ugccguaaggagagcuuuc

SEQ ID NO: 1144624 - RNA, 19 nt, Artificial Sequence
  Description of Artificial Sequence: Synthetic oligonucleotide
  Sense strand starting at position 981 of SEQ ID NO: 916285
uccguuggccuccaugaaa

SEQ ID NO: 1144625 - RNA, 19 nt, Artificial Sequence
  Description of Artificial Sequence: Synthetic oligonucleotide
  Antisense strand to SEQ ID NO: 1144624
uuucauggaggccaacgga

SEQ ID NO: 1144626 - RNA, 19 nt, Artificial Sequence
  Description of Artificial Sequence: Synthetic oligonucleotide
  Sense strand starting at position 1039 of SEQ ID NO: 916285
ccaagugaagucgauggaa

SEQ ID NO: 1144627 - RNA, 19 nt, Artificial Sequence
  Description of Artificial Sequence: Synthetic oligonucleotide
  Antisense strand to SEQ ID NO: 1144626
uuccaucgacuucacuugg

SEQ ID NO: 1144628 - RNA, 19 nt, Artificial Sequence
  Description of Artificial Sequence: Synthetic oligonucleotide
  Sense strand starting at position 1041 of SEQ ID NO: 916285
aagugaagucgauggaaag

SEQ ID NO: 1144629 - RNA, 19 nt, Artificial Sequence
  Description of Artificial Sequence: Synthetic oligonucleotide
  Antisense strand to SEQ ID NO: 1144628
cuuuccaucgacuucacuu

SEQ ID NO: 1144630 - RNA, 19 nt, Artificial Sequence
  Description of Artificial Sequence: Synthetic oligonucleotide
  Sense strand starting at position 1042 of SEQ ID NO: 916285
agugaagucgauggaaagu

SEQ ID NO: 1144631 - RNA, 19 nt, Artificial Sequence
  Description of Artificial Sequence: Synthetic oligonucleotide
  Antisense strand to SEQ ID NO: 1144630
acuuuccaucgacuucacu

SEQ ID NO: 1144632 - RNA, 19 nt, Artificial Sequence
  Description of Artificial Sequence: Synthetic oligonucleotide
  Sense strand starting at position 1051 of SEQ ID NO: 916285
gauggaaaguucccaccaa

SEQ ID NO: 1144633 - RNA, 19 nt, Artificial Sequence
  Description of Artificial Sequence: Synthetic oligonucleotide
  Antisense strand to SEQ ID NO: 1144632
uuggugggaacuuuccauc

SEQ ID NO: 1144634 - RNA, 19 nt, Artificial Sequence
  Description of Artificial Sequence: Synthetic oligonucleotide
  Sense strand starting at position 1115 of SEQ ID NO: 916285
acugaugagaucugcuguu

SEQ ID NO: 1144635 - RNA, 19 nt, Artificial Sequence
  Description of Artificial Sequence: Synthetic oligonucleotide
  Antisense strand to SEQ ID NO: 1144634
aacagcagaucucaucagu

SEQ ID NO: 1144636 - RNA, 19 nt, Artificial Sequence
  Description of Artificial Sequence: Synthetic oligonucleotide
  Sense strand starting at position 1433 of SEQ ID NO: 916285
gaggguacacagcgugaaa

SEQ ID NO: 1144637 - RNA, 19 nt, Artificial Sequence
  Description of Artificial Sequence: Synthetic oligonucleotide
  Antisense strand to SEQ ID NO: 1144636
uuucacgcuguguacccuc

SEQ ID NO: 1144638 - RNA, 19 nt, Artificial Sequence
  Description of Artificial Sequence: Synthetic oligonucleotide
  Sense strand starting at position 1949 of SEQ ID NO: 916285
ggaagauggucucuuccuu

SEQ ID NO: 1144639 - RNA, 19 nt, Artificial Sequence
  Description of Artificial Sequence: Synthetic oligonucleotide
  Antisense strand to SEQ ID NO: 1144638
aaggaagagaccaucuucc

SEQ ID NO: 1144640 - RNA, 19 nt, Artificial Sequence
  Description of Artificial Sequence: Synthetic oligonucleotide
  Sense strand starting at position 2804 of SEQ ID NO: 916285
ugcucaaugcccgacacuu

SEQ ID NO: 1144641 - RNA, 19 nt, Artificial Sequence
  Description of Artificial Sequence: Synthetic oligonucleotide
  Antisense strand to SEQ ID NO: 1144640
aagugucgggcauugagca

SEQ ID NO: 1144642 - RNA, 19 nt, Artificial Sequence
  Description of Artificial Sequence: Synthetic oligonucleotide
  Sense strand starting at position 2806 of SEQ ID NO: 916285
cucaaugcccgacacuuaa

SEQ ID NO: 1144643 - RNA, 19 nt, Artificial Sequence
  Description of Artificial Sequence: Synthetic oligonucleotide
  Antisense strand to SEQ ID NO: 1144642
uuaagugucgggcauugag

SEQ ID NO: 1144644 - RNA, 19 nt, Artificial Sequence
  Description of Artificial Sequence: Synthetic oligonucleotide
  Sense strand starting at position 2820 of SEQ ID NO: 916285
cuuaauaugugcuccauga

SEQ ID NO: 1144645 - RNA, 19 nt, Artificial Sequence
  Description of Artificial Sequence: Synthetic oligonucleotide
  Antisense strand to SEQ ID NO: 1144644
ucauggagcacauauuaag

SEQ ID NO: 1144646 - RNA, 19 nt, Artificial Sequence
  Description of Artificial Sequence: Synthetic oligonucleotide
  Sense strand starting at position 2822 of SEQ ID NO: 916285
uaauaugugcuccaugagu

SEQ ID NO: 1144647 - RNA, 19 nt, Artificial Sequence
  Description of Artificial Sequence: Synthetic oligonucleotide
  Antisense strand to SEQ ID NO: 1144646
acucauggagcacauauua

SEQ ID NO: 1144648 - RNA, 19 nt, Artificial Sequence
  Description of Artificial Sequence: Synthetic oligonucleotide
  Sense strand starting at position 3297 of SEQ ID NO: 916285
agauguuuaaggugaguug

SEQ ID NO: 1144649 - RNA, 19 nt, Artificial Sequence
  Description of Artificial Sequence: Synthetic oligonucleotide
  Antisense strand to SEQ ID NO: 1144648
caacucaccuuaaacaucu

SEQ ID NO: 1144650 - RNA, 19 nt, Artificial Sequence
  Description of Artificial Sequence: Synthetic oligonucleotide
  Sense strand starting at position 3338 of SEQ ID NO: 916285
uggaacuacugagaugaga

SEQ ID NO: 1144651 - RNA, 19 nt, Artificial Sequence
  Description of Artificial Sequence: Synthetic oligonucleotide
  Antisense strand to SEQ ID NO: 1144650
ucucaucucaguaguucca

SEQ ID NO: 1144652 - RNA, 19 nt, Artificial Sequence
  Description of Artificial Sequence: Synthetic oligonucleotide
  Sense strand starting at position 3349 of SEQ ID NO: 916285
agaugagauuguucucuau

SEQ ID NO: 1144653 - RNA, 19 nt, Artificial Sequence
  Description of Artificial Sequence: Synthetic oligonucleotide
  Antisense strand to SEQ ID NO: 1144652
auagagaacaaucucaucu

SEQ ID NO: 1144654 - RNA, 19 nt, Artificial Sequence
  Description of Artificial Sequence: Synthetic oligonucleotide
  Sense strand starting at position 3351 of SEQ ID NO: 916285
augagauuguucucuauua

SEQ ID NO: 1144655 - RNA, 19 nt, Artificial Sequence
  Description of Artificial Sequence: Synthetic oligonucleotide
  Antisense strand to SEQ ID NO: 1144654
uaauagagaacaaucucau

SEQ ID NO: 1144656 - RNA, 19 nt, Artificial Sequence
  Description of Artificial Sequence: Synthetic oligonucleotide
  Sense strand starting at position 3352 of SEQ ID NO: 916285
ugagauuguucucuauuac

SEQ ID NO: 1144657 - RNA, 19 nt, Artificial Sequence
  Description of Artificial Sequence: Synthetic oligonucleotide
  Antisense strand to SEQ ID NO: 1144656
guaauagagaacaaucuca

SEQ ID NO: 1144658 - RNA, 19 nt, Artificial Sequence
  Description of Artificial Sequence: Synthetic oligonucleotide
  Sense strand starting at position 3359 of SEQ ID NO: 916285
guucucuauuacuuguaua

SEQ ID NO: 1144659 - RNA, 19 nt, Artificial Sequence
  Description of Artificial Sequence: Synthetic oligonucleotide
  Antisense strand to SEQ ID NO: 1144658
uauacaaguaauagagaac

SEQ ID NO: 1144660 - RNA, 19 nt, Artificial Sequence
  Description of Artificial Sequence: Synthetic oligonucleotide
  Sense strand starting at position 3744 of SEQ ID NO: 916285
gugcauacccuuugaucca

SEQ ID NO: 1144661 - RNA, 19 nt, Artificial Sequence
  Description of Artificial Sequence: Synthetic oligonucleotide
  Antisense strand to SEQ ID NO: 1144660
uggaucaaaggguaugcac

SEQ ID NO: 1144662 - RNA, 19 nt, Artificial Sequence
  Description of Artificial Sequence: Synthetic oligonucleotide
  Sense strand starting at position 3772 of SEQ ID NO: 916285
cuuugaggaaguugucuga

SEQ ID NO: 1144663 - RNA, 19 nt, Artificial Sequence
  Description of Artificial Sequence: Synthetic oligonucleotide
  Antisense strand to SEQ ID NO: 1144662
ucagacaacuuccucaaag

SEQ ID NO: 1144664 - RNA, 19 nt, Artificial Sequence
  Description of Artificial Sequence: Synthetic oligonucleotide
  Sense strand starting at position 3776 of SEQ ID NO: 916285
gaggaaguugucugaagga

SEQ ID NO: 1144665 - RNA, 19 nt, Artificial Sequence
  Description of Artificial Sequence: Synthetic oligonucleotide
  Antisense strand to SEQ ID NO: 1144664
uccuucagacaacuuccuc

SEQ ID NO: 1144666 - RNA, 19 nt, Artificial Sequence
  Description of Artificial Sequence: Synthetic oligonucleotide
  Sense strand starting at position 3801 of SEQ ID NO: 916285
cagacucguagucaaggau

SEQ ID NO: 1144667 - RNA, 19 nt, Artificial Sequence
  Description of Artificial Sequence: Synthetic oligonucleotide
  Antisense strand to SEQ ID NO: 1144666
auccuugacuacgagucug

SEQ ID NO: 1144668 - RNA, 19 nt, Artificial Sequence
  Description of Artificial Sequence: Synthetic oligonucleotide
  Sense strand starting at position 3804 of SEQ ID NO: 916285
acucguagucaaggaugga

SEQ ID NO: 1144669 - RNA, 19 nt, Artificial Sequence
  Description of Artificial Sequence: Synthetic oligonucleotide
  Antisense strand to SEQ ID NO: 1144668
uccauccuugacuacgagu

SEQ ID NO: 1144670 - RNA, 19 nt, Artificial Sequence
  Description of Artificial Sequence: Synthetic oligonucleotide
  Sense strand starting at position 3805 of SEQ ID NO: 916285
cucguagucaaggauggau

SEQ ID NO: 1144671 - RNA, 19 nt, Artificial Sequence
  Description of Artificial Sequence: Synthetic oligonucleotide
  Antisense strand to SEQ ID NO: 1144670
auccauccuugacuacgag

SEQ ID NO: 1144672 - RNA, 19 nt, Artificial Sequence
  Description of Artificial Sequence: Synthetic oligonucleotide
  Sense strand starting at position 3807 of SEQ ID NO: 916285
cguagucaaggauggauau

SEQ ID NO: 1144673 - RNA, 19 nt, Artificial Sequence
  Description of Artificial Sequence: Synthetic oligonucleotide
  Antisense strand to SEQ ID NO: 1144672
auauccauccuugacuacg

SEQ ID NO: 1144674 - RNA, 19 nt, Artificial Sequence
  Description of Artificial Sequence: Synthetic oligonucleotide
  Sense strand starting at position 3808 of SEQ ID NO: 916285
guagucaaggauggauaua

SEQ ID NO: 1144675 - RNA, 19 nt, Artificial Sequence
  Description of Artificial Sequence: Synthetic oligonucleotide
  Antisense strand to SEQ ID NO: 1144674
uauauccauccuugacuac

SEQ ID NO: 1144676 - RNA, 19 nt, Artificial Sequence
  Description of Artificial Sequence: Synthetic oligonucleotide
  Sense strand starting at position 3828 of SEQ ID NO: 916285
aggguuguguagcucaaua

SEQ ID NO: 1144677 - RNA, 19 nt, Artificial Sequence
  Description of Artificial Sequence: Synthetic oligonucleotide
  Antisense strand to SEQ ID NO: 1144676
uauugagcuacacaacccu

SEQ ID NO: 1144678 - RNA, 19 nt, Artificial Sequence
  Description of Artificial Sequence: Synthetic oligonucleotide
  Sense strand starting at position 3830 of SEQ ID NO: 916285
gguuguguagcucaauauu

SEQ ID NO: 1144679 - RNA, 19 nt, Artificial Sequence
  Description of Artificial Sequence: Synthetic oligonucleotide
  Antisense strand to SEQ ID NO: 1144678
aauauugagcuacacaacc

SEQ ID NO: 1144680 - RNA, 19 nt, Artificial Sequence
  Description of Artificial Sequence: Synthetic oligonucleotide
  Sense strand starting at position 3833 of SEQ ID NO: 916285
uguguagcucaauauuguu

SEQ ID NO: 1144681 - RNA, 19 nt, Artificial Sequence
  Description of Artificial Sequence: Synthetic oligonucleotide
  Antisense strand to SEQ ID NO: 1144680
aacaauauugagcuacaca

SEQ ID NO: 1144682 - RNA, 19 nt, Artificial Sequence
  Description of Artificial Sequence: Synthetic oligonucleotide
  Sense strand starting at position 3915 of SEQ ID NO: 916285
auauauccauaagauggaa

SEQ ID NO: 1144683 - RNA, 19 nt, Artificial Sequence
  Description of Artificial Sequence: Synthetic oligonucleotide
  Antisense strand to SEQ ID NO: 1144682
uuccaucuuauggauauau

SEQ ID NO: 1144684 - RNA, 19 nt, Artificial Sequence
  Description of Artificial Sequence: Synthetic oligonucleotide
  Sense strand starting at position 348 of SEQ ID NO: 916286
auaguuacuucugugauua

SEQ ID NO: 1144685 - RNA, 19 nt, Artificial Sequence
  Description of Artificial Sequence: Synthetic oligonucleotide
  Antisense strand to SEQ ID NO: 1144684
uaaucacagaaguaacuau

SEQ ID NO: 1144686 - RNA, 19 nt, Artificial Sequence
  Description of Artificial Sequence: Synthetic oligonucleotide
  Sense strand starting at position 352 of SEQ ID NO: 916286
uuacuucugugauuaaaga

SEQ ID NO: 1144687 - RNA, 19 nt, Artificial Sequence
  Description of Artificial Sequence: Synthetic oligonucleotide
  Antisense strand to SEQ ID NO: 1144686
ucuuuaaucacagaaguaa

SEQ ID NO: 1144688 - RNA, 19 nt, Artificial Sequence
  Description of Artificial Sequence: Synthetic oligonucleotide
  Sense strand starting at position 360 of SEQ ID NO: 916286
gugauuaaagaauguuugu

SEQ ID NO: 1144689 - RNA, 19 nt, Artificial Sequence
  Description of Artificial Sequence: Synthetic oligonucleotide
  Antisense strand to SEQ ID NO: 1144688
acaaacauucuuuaaucac

SEQ ID NO: 1144690 - RNA, 19 nt, Artificial Sequence
  Description of Artificial Sequence: Synthetic oligonucleotide
  Sense strand starting at position 465 of SEQ ID NO: 916286
aguugaugauacuuuagaa

SEQ ID NO: 1144691 - RNA, 19 nt, Artificial Sequence
  Description of Artificial Sequence: Synthetic oligonucleotide
  Antisense strand to SEQ ID NO: 1144690
uucuaaaguaucaucaacu

SEQ ID NO: 1144692 - RNA, 19 nt, Artificial Sequence
  Description of Artificial Sequence: Synthetic oligonucleotide
  Sense strand starting at position 633 of SEQ ID NO: 916286
auggcuaguggcuauuaua

SEQ ID NO: 1144693 - RNA, 19 nt, Artificial Sequence
  Description of Artificial Sequence: Synthetic oligonucleotide
  Antisense strand to SEQ ID NO: 1144692
uauaauagccacuagccau

SEQ ID NO: 1144694 - RNA, 19 nt, Artificial Sequence
  Description of Artificial Sequence: Synthetic oligonucleotide
  Sense strand starting at position 643 of SEQ ID NO: 916286
gcuauuauaccagacagug

SEQ ID NO: 1144695 - RNA, 19 nt, Artificial Sequence
  Description of Artificial Sequence: Synthetic oligonucleotide
  Antisense strand to SEQ ID NO: 1144694
cacugucugguauaauagc

SEQ ID NO: 1144696 - RNA, 19 nt, Artificial Sequence
  Description of Artificial Sequence: Synthetic oligonucleotide
  Sense strand starting at position 676 of SEQ ID NO: 916286
ugccaugaucauggaaagu

SEQ ID NO: 1144697 - RNA, 19 nt, Artificial Sequence
  Description of Artificial Sequence: Synthetic oligonucleotide
  Antisense strand to SEQ ID NO: 1144696
acuuuccaugaucauggca

SEQ ID NO: 1144698 - RNA, 19 nt, Artificial Sequence
  Description of Artificial Sequence: Synthetic oligonucleotide
  Sense strand starting at position 852 of SEQ ID NO: 916286
acaaucaucugugcacuga

SEQ ID NO: 1144699 - RNA, 19 nt, Artificial Sequence
  Description of Artificial Sequence: Synthetic oligonucleotide
  Antisense strand to SEQ ID NO: 1144698
ucagugcacagaugauugu

SEQ ID NO: 1144700 - RNA, 19 nt, Artificial Sequence
  Description of Artificial Sequence: Synthetic oligonucleotide
  Sense strand starting at position 1334 of SEQ ID NO: 916286
uuccgauucuggguggaaa

SEQ ID NO: 1144701 - RNA, 19 nt, Artificial Sequence
  Description of Artificial Sequence: Synthetic oligonucleotide
  Antisense strand to SEQ ID NO: 1144700
uuuccacccagaaucggaa

SEQ ID NO: 1144702 - RNA, 19 nt, Artificial Sequence
  Description of Artificial Sequence: Synthetic oligonucleotide
  Sense strand starting at position 1335 of SEQ ID NO: 916286
uccgauucuggguggaaau

SEQ ID NO: 1144703 - RNA, 19 nt, Artificial Sequence
  Description of Artificial Sequence: Synthetic oligonucleotide
  Antisense strand to SEQ ID NO: 1144702
auuuccacccagaaucgga

SEQ ID NO: 1144704 - RNA, 19 nt, Artificial Sequence
  Description of Artificial Sequence: Synthetic oligonucleotide
  Sense strand starting at position 1336 of SEQ ID NO: 916286
ccgauucuggguggaaaua

SEQ ID NO: 1144705 - RNA, 19 nt, Artificial Sequence
  Description of Artificial Sequence: Synthetic oligonucleotide
  Antisense strand to SEQ ID NO: 1144704
uauuuccacccagaaucgg

SEQ ID NO: 1144706 - RNA, 19 nt, Artificial Sequence
  Description of Artificial Sequence: Synthetic oligonucleotide
  Sense strand starting at position 1575 of SEQ ID NO: 916286
auaguauguguccaguuaa

SEQ ID NO: 1144707 - RNA, 19 nt, Artificial Sequence
  Description of Artificial Sequence: Synthetic oligonucleotide
  Antisense strand to SEQ ID NO: 1144706
uuaacuggacacauacuau

SEQ ID NO: 1144708 - RNA, 19 nt, Artificial Sequence
  Description of Artificial Sequence: Synthetic oligonucleotide
  Sense strand starting at position 1995 of SEQ ID NO: 916286
cuaacugcauggucaugau

SEQ ID NO: 1144709 - RNA, 19 nt, Artificial Sequence
  Description of Artificial Sequence: Synthetic oligonucleotide
  Antisense strand to SEQ ID NO: 1144708
aucaugaccaugcaguuag

SEQ ID NO: 1144710 - RNA, 19 nt, Artificial Sequence
  Description of Artificial Sequence: Synthetic oligonucleotide
  Sense strand starting at position 2361 of SEQ ID NO: 916286
uucugcugagcuugaagaa

SEQ ID NO: 1144711 - RNA, 19 nt, Artificial Sequence
  Description of Artificial Sequence: Synthetic oligonucleotide
  Antisense strand to SEQ ID NO: 1144710
uucuucaagcucagcagaa

SEQ ID NO: 1144712 - RNA, 19 nt, Artificial Sequence
  Description of Artificial Sequence: Synthetic oligonucleotide
  Sense strand starting at position 2646 of SEQ ID NO: 916286
cuuugcagcccagaguaua

SEQ ID NO: 1144713 - RNA, 19 nt, Artificial Sequence
  Description of Artificial Sequence: Synthetic oligonucleotide
  Antisense strand to SEQ ID NO: 1144712
uauacucugggcugcaaag

SEQ ID NO: 1144714 - RNA, 19 nt, Artificial Sequence
  Description of Artificial Sequence: Synthetic oligonucleotide
  Sense strand starting at position 2724 of SEQ ID NO: 916286
gggcuaugauucucuuacu

SEQ ID NO: 1144715 - RNA, 19 nt, Artificial Sequence
  Description of Artificial Sequence: Synthetic oligonucleotide
  Antisense strand to SEQ ID NO: 1144714
aguaagagaaucauagccc

SEQ ID NO: 1144716 - RNA, 19 nt, Artificial Sequence
  Description of Artificial Sequence: Synthetic oligonucleotide
  Sense strand starting at position 2730 of SEQ ID NO: 916286
ugauucucuuacuugauga

SEQ ID NO: 1144717 - RNA, 19 nt, Artificial Sequence
  Description of Artificial Sequence: Synthetic oligonucleotide
  Antisense strand to SEQ ID NO: 1144716
ucaucaaguaagagaauca

SEQ ID NO: 1144718 - RNA, 19 nt, Artificial Sequence
  Description of Artificial Sequence: Synthetic oligonucleotide
  Sense strand starting at position 2747 of SEQ ID NO: 916286
gaggaugguacuugaaagu

SEQ ID NO: 1144719 - RNA, 19 nt, Artificial Sequence
  Description of Artificial Sequence: Synthetic oligonucleotide
  Antisense strand to SEQ ID NO: 1144718
acuuucaaguaccauccuc

SEQ ID NO: 1144720 - RNA, 19 nt, Artificial Sequence
  Description of Artificial Sequence: Synthetic oligonucleotide
  Sense strand starting at position 2757 of SEQ ID NO: 916286
cuugaaagucuugguacua

SEQ ID NO: 1144721 - RNA, 19 nt, Artificial Sequence
  Description of Artificial Sequence: Synthetic oligonucleotide
  Antisense strand to SEQ ID NO: 1144720
uaguaccaagacuuucaag

SEQ ID NO: 1144722 - RNA, 19 nt, Artificial Sequence
  Description of Artificial Sequence: Synthetic oligonucleotide
  Sense strand starting at position 2758 of SEQ ID NO: 916286
uugaaagucuugguacuau

SEQ ID NO: 1144723 - RNA, 19 nt, Artificial Sequence
  Description of Artificial Sequence: Synthetic oligonucleotide
  Antisense strand to SEQ ID NO: 1144722
auaguaccaagacuuucaa

SEQ ID NO: 1144724 - RNA, 19 nt, Artificial Sequence
  Description of Artificial Sequence: Synthetic oligonucleotide
  Sense strand starting at position 2769 of SEQ ID NO: 916286
gguacuauuuaagaaauac

SEQ ID NO: 1144725 - RNA, 19 nt, Artificial Sequence
  Description of Artificial Sequence: Synthetic oligonucleotide
  Antisense strand to SEQ ID NO: 1144724
guauuucuuaaauaguacc

SEQ ID NO: 1144726 - RNA, 19 nt, Artificial Sequence
  Description of Artificial Sequence: Synthetic oligonucleotide
  Sense strand starting at position 2829 of SEQ ID NO: 916286
uugggauuauuccugaaau

SEQ ID NO: 1144727 - RNA, 19 nt, Artificial Sequence
  Description of Artificial Sequence: Synthetic oligonucleotide
  Antisense strand to SEQ ID NO: 1144726
auuucaggaauaaucccaa

SEQ ID NO: 1144728 - RNA, 19 nt, Artificial Sequence
  Description of Artificial Sequence: Synthetic oligonucleotide
  Sense strand starting at position 3044 of SEQ ID NO: 916286
acaccaguguuuccaagga

SEQ ID NO: 1144729 - RNA, 19 nt, Artificial Sequence
  Description of Artificial Sequence: Synthetic oligonucleotide
  Antisense strand to SEQ ID NO: 1144728
uccuuggaaacacuggugu

SEQ ID NO: 1144730 - RNA, 19 nt, Artificial Sequence
  Description of Artificial Sequence: Synthetic oligonucleotide
  Sense strand starting at position 3054 of SEQ ID NO: 916286
uuccaaggauuggcuauau

SEQ ID NO: 1144731 - RNA, 19 nt, Artificial Sequence
  Description of Artificial Sequence: Synthetic oligonucleotide
  Antisense strand to SEQ ID NO: 1144730
auauagccaauccuuggaa

SEQ ID NO: 1144732 - RNA, 19 nt, Artificial Sequence
  Description of Artificial Sequence: Synthetic oligonucleotide
  Sense strand starting at position 3066 of SEQ ID NO: 916286
gcuauaugagguugaauuc

SEQ ID NO: 1144733 - RNA, 19 nt, Artificial Sequence
  Description of Artificial Sequence: Synthetic oligonucleotide
  Antisense strand to SEQ ID NO: 1144732
gaauucaaccucauauagc

SEQ ID NO: 1144734 - RNA, 19 nt, Artificial Sequence
  Description of Artificial Sequence: Synthetic oligonucleotide
  Sense strand starting at position 3076 of SEQ ID NO: 916286
guugaauuccuuugacauu

SEQ ID NO: 1144735 - RNA, 19 nt, Artificial Sequence
  Description of Artificial Sequence: Synthetic oligonucleotide
  Antisense strand to SEQ ID NO: 1144734
aaugucaaaggaauucaac

SEQ ID NO: 1144736 - RNA, 19 nt, Artificial Sequence
  Description of Artificial Sequence: Synthetic oligonucleotide
  Sense strand starting at position 3203 of SEQ ID NO: 916286
cugaccucucagcaguauu

SEQ ID NO: 1144737 - RNA, 19 nt, Artificial Sequence
  Description of Artificial Sequence: Synthetic oligonucleotide
  Antisense strand to SEQ ID NO: 1144736
aauacugcugagaggucag

SEQ ID NO: 1144738 - RNA, 19 nt, Artificial Sequence
  Description of Artificial Sequence: Synthetic oligonucleotide
  Sense strand starting at position 3216 of SEQ ID NO: 916286
aguauuugauacugauaag

SEQ ID NO: 1144739 - RNA, 19 nt, Artificial Sequence
  Description of Artificial Sequence: Synthetic oligonucleotide
  Antisense strand to SEQ ID NO: 1144738
cuuaucaguaucaaauacu

SEQ ID NO: 1144740 - RNA, 19 nt, Artificial Sequence
  Description of Artificial Sequence: Synthetic oligonucleotide
  Sense strand starting at position 3326 of SEQ ID NO: 916286
cucugcuugccuguaagua

SEQ ID NO: 1144741 - RNA, 19 nt, Artificial Sequence
  Description of Artificial Sequence: Synthetic oligonucleotide
  Antisense strand to SEQ ID NO: 1144740
uacuuacaggcaagcagag

SEQ ID NO: 1144742 - RNA, 19 nt, Artificial Sequence
  Description of Artificial Sequence: Synthetic oligonucleotide
  Sense strand starting at position 3420 of SEQ ID NO: 916286
gcuaaugacucagccuaau

SEQ ID NO: 1144743 - RNA, 19 nt, Artificial Sequence
  Description of Artificial Sequence: Synthetic oligonucleotide
  Antisense strand to SEQ ID NO: 1144742
auuaggcugagucauuagc

SEQ ID NO: 1144744 - RNA, 19 nt, Artificial Sequence
  Description of Artificial Sequence: Synthetic oligonucleotide
  Sense strand starting at position 3546 of SEQ ID NO: 916286
ucccaaaucugggucacuu

SEQ ID NO: 1144745 - RNA, 19 nt, Artificial Sequence
  Description of Artificial Sequence: Synthetic oligonucleotide
  Antisense strand to SEQ ID NO: 1144744
aagugacccagauuuggga

SEQ ID NO: 1144746 - RNA, 19 nt, Artificial Sequence
  Description of Artificial Sequence: Synthetic oligonucleotide
  Sense strand starting at position 3548 of SEQ ID NO: 916286
ccaaaucugggucacuuau

SEQ ID NO: 1144747 - RNA, 19 nt, Artificial Sequence
  Description of Artificial Sequence: Synthetic oligonucleotide
  Antisense strand to SEQ ID NO: 1144746
auaagugacccagauuugg

SEQ ID NO: 1144748 - RNA, 19 nt, Artificial Sequence
  Description of Artificial Sequence: Synthetic oligonucleotide
  Sense strand starting at position 3550 of SEQ ID NO: 916286
aaaucugggucacuuauga

SEQ ID NO: 1144749 - RNA, 19 nt, Artificial Sequence
  Description of Artificial Sequence: Synthetic oligonucleotide
  Antisense strand to SEQ ID NO: 1144748
ucauaagugacccagauuu

SEQ ID NO: 1144750 - RNA, 19 nt, Artificial Sequence
  Description of Artificial Sequence: Synthetic oligonucleotide
  Sense strand starting at position 3557 of SEQ ID NO: 916286
ggucacuuaugaguauaua

SEQ ID NO: 1144751 - RNA, 19 nt, Artificial Sequence
  Description of Artificial Sequence: Synthetic oligonucleotide
  Antisense strand to SEQ ID NO: 1144750
uauauacucauaagugacc

SEQ ID NO: 1144752 - RNA, 19 nt, Artificial Sequence
  Description of Artificial Sequence: Synthetic oligonucleotide
  Sense strand starting at position 3558 of SEQ ID NO: 916286
gucacuuaugaguauauac

SEQ ID NO: 1144753 - RNA, 19 nt, Artificial Sequence
  Description of Artificial Sequence: Synthetic oligonucleotide
  Antisense strand to SEQ ID NO: 1144752
guauauacucauaagugac

SEQ ID NO: 1144754 - RNA, 19 nt, Artificial Sequence
  Description of Artificial Sequence: Synthetic oligonucleotide
  Sense strand starting at position 3579 of SEQ ID NO: 916286
gggauauucuuguuaccaa

SEQ ID NO: 1144755 - RNA, 19 nt, Artificial Sequence
  Description of Artificial Sequence: Synthetic oligonucleotide
  Antisense strand to SEQ ID NO: 1144754
uugguaacaagaauauccc

SEQ ID NO: 1144756 - RNA, 19 nt, Artificial Sequence
  Description of Artificial Sequence: Synthetic oligonucleotide
  Sense strand starting at position 3586 of SEQ ID NO: 916286
ucuuguuaccaacaugaug

SEQ ID NO: 1144757 - RNA, 19 nt, Artificial Sequence
  Description of Artificial Sequence: Synthetic oligonucleotide
  Antisense strand to SEQ ID NO: 1144756
caucauguugguaacaaga

SEQ ID NO: 1144758 - RNA, 19 nt, Artificial Sequence
  Description of Artificial Sequence: Synthetic oligonucleotide
  Sense strand starting at position 3597 of SEQ ID NO: 916286
acaugaugacuugggcaca

SEQ ID NO: 1144759 - RNA, 19 nt, Artificial Sequence
  Description of Artificial Sequence: Synthetic oligonucleotide
  Antisense strand to SEQ ID NO: 1144758
ugugcccaagucaucaugu

SEQ ID NO: 1144760 - RNA, 19 nt, Artificial Sequence
  Description of Artificial Sequence: Synthetic oligonucleotide
  Sense strand starting at position 3623 of SEQ ID NO: 916286
acucuagaucucuagaugu

SEQ ID NO: 1144761 - RNA, 19 nt, Artificial Sequence
  Description of Artificial Sequence: Synthetic oligonucleotide
  Antisense strand to SEQ ID NO: 1144760
acaucuagagaucuagagu

SEQ ID NO: 1144762 - RNA, 19 nt, Artificial Sequence
  Description of Artificial Sequence: Synthetic oligonucleotide
  Sense strand starting at position 3625 of SEQ ID NO: 916286
ucuagaucucuagauguua

SEQ ID NO: 1144763 - RNA, 19 nt, Artificial Sequence
  Description of Artificial Sequence: Synthetic oligonucleotide
  Antisense strand to SEQ ID NO: 1144762
uaacaucuagagaucuaga

SEQ ID NO: 1144764 - RNA, 19 nt, Artificial Sequence
  Description of Artificial Sequence: Synthetic oligonucleotide
  Sense strand starting at position 91 of SEQ ID NO: 916287
uccuaaaugucucuggaaa

SEQ ID NO: 1144765 - RNA, 19 nt, Artificial Sequence
  Description of Artificial Sequence: Synthetic oligonucleotide
  Antisense strand to SEQ ID NO: 1144764
uuuccagagacauuuagga

SEQ ID NO: 1144766 - RNA, 19 nt, Artificial Sequence
  Description of Artificial Sequence: Synthetic oligonucleotide
  Sense strand starting at position 180 of SEQ ID NO: 916287
ucauuauagugaucuguuc

SEQ ID NO: 1144767 - RNA, 19 nt, Artificial Sequence
  Description of Artificial Sequence: Synthetic oligonucleotide
  Antisense strand to SEQ ID NO: 1144766
gaacagaucacuauaauga

SEQ ID NO: 1144768 - RNA, 19 nt, Artificial Sequence
  Description of Artificial Sequence: Synthetic oligonucleotide
  Sense strand starting at position 276 of SEQ ID NO: 916287
auuucuuaugggugcuauu

SEQ ID NO: 1144769 - RNA, 19 nt, Artificial Sequence
  Description of Artificial Sequence: Synthetic oligonucleotide
  Antisense strand to SEQ ID NO: 1144768
aauagcacccauaagaaau

SEQ ID NO: 1144770 - RNA, 19 nt, Artificial Sequence
  Description of Artificial Sequence: Synthetic oligonucleotide
  Sense strand starting at position 287 of SEQ ID NO: 916287
gugcuauuauaagucuuaa

SEQ ID NO: 1144771 - RNA, 19 nt, Artificial Sequence
  Description of Artificial Sequence: Synthetic oligonucleotide
  Antisense strand to SEQ ID NO: 1144770
uuaagacuuauaauagcac

SEQ ID NO: 1144772 - RNA, 19 nt, Artificial Sequence
  Description of Artificial Sequence: Synthetic oligonucleotide
  Sense strand starting at position 341 of SEQ ID NO: 916287
ugauucuuucuugauaugu

SEQ ID NO: 1144773 - RNA, 19 nt, Artificial Sequence
  Description of Artificial Sequence: Synthetic oligonucleotide
  Antisense strand to SEQ ID NO: 1144772
acauaucaagaaagaauca

SEQ ID NO: 1144774 - RNA, 19 nt, Artificial Sequence
  Description of Artificial Sequence: Synthetic oligonucleotide
  Sense strand starting at position 346 of SEQ ID NO: 916287
cuuucuugauaugugaaua

SEQ ID NO: 1144775 - RNA, 19 nt, Artificial Sequence
  Description of Artificial Sequence: Synthetic oligonucleotide
  Antisense strand to SEQ ID NO: 1144774
uauucacauaucaagaaag

SEQ ID NO: 1144776 - RNA, 19 nt, Artificial Sequence
  Description of Artificial Sequence: Synthetic oligonucleotide
  Sense strand starting at position 378 of SEQ ID NO: 916287
aguugcuagagucagagua

SEQ ID NO: 1144777 - RNA, 19 nt, Artificial Sequence
  Description of Artificial Sequence: Synthetic oligonucleotide
  Antisense strand to SEQ ID NO: 1144776
uacucugacucuagcaacu

SEQ ID NO: 1144778 - RNA, 19 nt, Artificial Sequence
  Description of Artificial Sequence: Synthetic oligonucleotide
  Sense strand starting at position 525 of SEQ ID NO: 916287
caggcauggcugcaguaua

SEQ ID NO: 1144779 - RNA, 19 nt, Artificial Sequence
  Description of Artificial Sequence: Synthetic oligonucleotide
  Antisense strand to SEQ ID NO: 1144778
uauacugcagccaugccug

SEQ ID NO: 1144780 - RNA, 19 nt, Artificial Sequence
  Description of Artificial Sequence: Synthetic oligonucleotide
  Sense strand starting at position 536 of SEQ ID NO: 916287
gcaguauacauccauggag

SEQ ID NO: 1144781 - RNA, 19 nt, Artificial Sequence
  Description of Artificial Sequence: Synthetic oligonucleotide
  Antisense strand to SEQ ID NO: 1144780
cuccauggauguauacugc

SEQ ID NO: 1144782 - RNA, 19 nt, Artificial Sequence
  Description of Artificial Sequence: Synthetic oligonucleotide
  Sense strand starting at position 697 of SEQ ID NO: 916287
ccagauuauuaggugaucu

SEQ ID NO: 1144783 - RNA, 19 nt, Artificial Sequence
  Description of Artificial Sequence: Synthetic oligonucleotide
  Antisense strand to SEQ ID NO: 1144782
agaucaccuaauaaucugg

SEQ ID NO: 1144784 - RNA, 19 nt, Artificial Sequence
  Description of Artificial Sequence: Synthetic oligonucleotide
  Sense strand starting at position 999 of SEQ ID NO: 916287
guaucacuucuuuagucca

SEQ ID NO: 1144785 - RNA, 19 nt, Artificial Sequence
  Description of Artificial Sequence: Synthetic oligonucleotide
  Antisense strand to SEQ ID NO: 1144784
uggacuaaagaagugauac

SEQ ID NO: 1144786 - RNA, 19 nt, Artificial Sequence
  Description of Artificial Sequence: Synthetic oligonucleotide
  Sense strand starting at position 1146 of SEQ ID NO: 916287
cucagagcuuuccucugaa

SEQ ID NO: 1144787 - RNA, 19 nt, Artificial Sequence
  Description of Artificial Sequence: Synthetic oligonucleotide
  Antisense strand to SEQ ID NO: 1144786
uucagaggaaagcucugag

SEQ ID NO: 1144788 - RNA, 19 nt, Artificial Sequence
  Description of Artificial Sequence: Synthetic oligonucleotide
  Sense strand starting at position 1149 of SEQ ID NO: 916287
agagcuuuccucugaauug

SEQ ID NO: 1144789 - RNA, 19 nt, Artificial Sequence
  Description of Artificial Sequence: Synthetic oligonucleotide
  Antisense strand to SEQ ID NO: 1144788
caauucagaggaaagcucu

SEQ ID NO: 1144790 - RNA, 19 nt, Artificial Sequence
  Description of Artificial Sequence: Synthetic oligonucleotide
  Sense strand starting at position 1161 of SEQ ID NO: 916287
ugaauugacccacaguucu

SEQ ID NO: 1144791 - RNA, 19 nt, Artificial Sequence
  Description of Artificial Sequence: Synthetic oligonucleotide
  Antisense strand to SEQ ID NO: 1144790
agaacugugggucaauuca

SEQ ID NO: 1144792 - RNA, 19 nt, Artificial Sequence
  Description of Artificial Sequence: Synthetic oligonucleotide
  Sense strand starting at position 1204 of SEQ ID NO: 916287
ggugcuacagagcauuaaa

SEQ ID NO: 1144793 - RNA, 19 nt, Artificial Sequence
  Description of Artificial Sequence: Synthetic oligonucleotide
  Antisense strand to SEQ ID NO: 1144792
uuuaaugcucuguagcacc

SEQ ID NO: 1144794 - RNA, 19 nt, Artificial Sequence
  Description of Artificial Sequence: Synthetic oligonucleotide
  Sense strand starting at position 1224 of SEQ ID NO: 916287
acauuagaugcagaaguuu

SEQ ID NO: 1144795 - RNA, 19 nt, Artificial Sequence
  Description of Artificial Sequence: Synthetic oligonucleotide
  Antisense strand to SEQ ID NO: 1144794
aaacuucugcaucuaaugu

SEQ ID NO: 1144796 - RNA, 19 nt, Artificial Sequence
  Description of Artificial Sequence: Synthetic oligonucleotide
  Sense strand starting at position 1418 of SEQ ID NO: 916287
ggccuagaagcagaaguuu

SEQ ID NO: 1144797 - RNA, 19 nt, Artificial Sequence
  Description of Artificial Sequence: Synthetic oligonucleotide
  Antisense strand to SEQ ID NO: 1144796
aaacuucugcuucuaggcc

SEQ ID NO: 1144798 - RNA, 19 nt, Artificial Sequence
  Description of Artificial Sequence: Synthetic oligonucleotide
  Sense strand starting at position 1438 of SEQ ID NO: 916287
uaaugugcccaauaguaag

SEQ ID NO: 1144799 - RNA, 19 nt, Artificial Sequence
  Description of Artificial Sequence: Synthetic oligonucleotide
  Antisense strand to SEQ ID NO: 1144798
cuuacuauugggcacauua

SEQ ID NO: 1144800 - RNA, 19 nt, Artificial Sequence
  Description of Artificial Sequence: Synthetic oligonucleotide
  Sense strand starting at position 1500 of SEQ ID NO: 916287
aguuuagauuacuuacaag

SEQ ID NO: 1144801 - RNA, 19 nt, Artificial Sequence
  Description of Artificial Sequence: Synthetic oligonucleotide
  Antisense strand to SEQ ID NO: 1144800
cuuguaaguaaucuaaacu

SEQ ID NO: 1144802 - RNA, 19 nt, Artificial Sequence
  Description of Artificial Sequence: Synthetic oligonucleotide
  Sense strand starting at position 1583 of SEQ ID NO: 916287
guugaugguccugaguuau

SEQ ID NO: 1144803 - RNA, 19 nt, Artificial Sequence
  Description of Artificial Sequence: Synthetic oligonucleotide
  Antisense strand to SEQ ID NO: 1144802
auaacucaggaccaucaac

SEQ ID NO: 1144804 - RNA, 19 nt, Artificial Sequence
  Description of Artificial Sequence: Synthetic oligonucleotide
  Sense strand starting at position 1587 of SEQ ID NO: 916287
augguccugaguuaugacu

SEQ ID NO: 1144805 - RNA, 19 nt, Artificial Sequence
  Description of Artificial Sequence: Synthetic oligonucleotide
  Antisense strand to SEQ ID NO: 1144804
agucauaacucaggaccau

SEQ ID NO: 1144806 - RNA, 19 nt, Artificial Sequence
  Description of Artificial Sequence: Synthetic oligonucleotide
  Sense strand starting at position 1593 of SEQ ID NO: 916287
cugaguuaugacugaaaug

SEQ ID NO: 1144807 - RNA, 19 nt, Artificial Sequence
  Description of Artificial Sequence: Synthetic oligonucleotide
  Antisense strand to SEQ ID NO: 1144806
cauuucagucauaacucag

SEQ ID NO: 1144808 - RNA, 19 nt, Artificial Sequence
  Description of Artificial Sequence: Synthetic oligonucleotide
  Sense strand starting at position 1782 of SEQ ID NO: 916287
agaggagguuagcuucaau

SEQ ID NO: 1144809 - RNA, 19 nt, Artificial Sequence
  Description of Artificial Sequence: Synthetic oligonucleotide
  Antisense strand to SEQ ID NO: 1144808
auugaagcuaaccuccucu

SEQ ID NO: 1144810 - RNA, 19 nt, Artificial Sequence
  Description of Artificial Sequence: Synthetic oligonucleotide
  Sense strand starting at position 1855 of SEQ ID NO: 916287
aggcaucauuguguuauua

SEQ ID NO: 1144811 - RNA, 19 nt, Artificial Sequence
  Description of Artificial Sequence: Synthetic oligonucleotide
  Antisense strand to SEQ ID NO: 1144810
uaauaacacaaugaugccu

SEQ ID NO: 1144812 - RNA, 19 nt, Artificial Sequence
  Description of Artificial Sequence: Synthetic oligonucleotide
  Sense strand starting at position 1859 of SEQ ID NO: 916287
aucauuguguuauuacagu

SEQ ID NO: 1144813 - RNA, 19 nt, Artificial Sequence
  Description of Artificial Sequence: Synthetic oligonucleotide
  Antisense strand to SEQ ID NO: 1144812
acuguaauaacacaaugau

SEQ ID NO: 1144814 - RNA, 19 nt, Artificial Sequence
  Description of Artificial Sequence: Synthetic oligonucleotide
  Sense strand starting at position 2019 of SEQ ID NO: 916287
auaggauauaaaugugguu

SEQ ID NO: 1144815 - RNA, 19 nt, Artificial Sequence
  Description of Artificial Sequence: Synthetic oligonucleotide
  Antisense strand to SEQ ID NO: 1144814
aaccacauuuauauccuau

SEQ ID NO: 1144816 - RNA, 19 nt, Artificial Sequence
  Description of Artificial Sequence: Synthetic oligonucleotide
  Sense strand starting at position 2035 of SEQ ID NO: 916287
guugccgugaaucauuaaa

SEQ ID NO: 1144817 - RNA, 19 nt, Artificial Sequence
  Description of Artificial Sequence: Synthetic oligonucleotide
  Antisense strand to SEQ ID NO: 1144816
uuuaaugauucacggcaac

SEQ ID NO: 1144818 - RNA, 19 nt, Artificial Sequence
  Description of Artificial Sequence: Synthetic oligonucleotide
  Sense strand starting at position 2121 of SEQ ID NO: 916287
agccuaucugcucaacuga

SEQ ID NO: 1144819 - RNA, 19 nt, Artificial Sequence
  Description of Artificial Sequence: Synthetic oligonucleotide
  Antisense strand to SEQ ID NO: 1144818
ucaguugagcagauaggcu

SEQ ID NO: 1144820 - RNA, 19 nt, Artificial Sequence
  Description of Artificial Sequence: Synthetic oligonucleotide
  Sense strand starting at position 2298 of SEQ ID NO: 916287
cucagcauuugagaucacu

SEQ ID NO: 1144821 - RNA, 19 nt, Artificial Sequence
  Description of Artificial Sequence: Synthetic oligonucleotide
  Antisense strand to SEQ ID NO: 1144820
agugaucucaaaugcugag

SEQ ID NO: 1144822 - RNA, 19 nt, Artificial Sequence
  Description of Artificial Sequence: Synthetic oligonucleotide
  Sense strand starting at position 2327 of SEQ ID NO: 916287
ggacuucuuccacaagcac

SEQ ID NO: 1144823 - RNA, 19 nt, Artificial Sequence
  Description of Artificial Sequence: Synthetic oligonucleotide
  Antisense strand to SEQ ID NO: 1144822
gugcuuguggaagaagucc

SEQ ID NO: 1144824 - RNA, 19 nt, Artificial Sequence
  Description of Artificial Sequence: Synthetic oligonucleotide
  Sense strand starting at position 2421 of SEQ ID NO: 916287
cuuccagauuuacagguau

SEQ ID NO: 1144825 - RNA, 19 nt, Artificial Sequence
  Description of Artificial Sequence: Synthetic oligonucleotide
  Antisense strand to SEQ ID NO: 1144824
auaccuguaaaucuggaag

SEQ ID NO: 1144826 - RNA, 19 nt, Artificial Sequence
  Description of Artificial Sequence: Synthetic oligonucleotide
  Sense strand starting at position 2467 of SEQ ID NO: 916287
gaaugugcagggcauuaua

SEQ ID NO: 1144827 - RNA, 19 nt, Artificial Sequence
  Description of Artificial Sequence: Synthetic oligonucleotide
  Antisense strand to SEQ ID NO: 1144826
uauaaugcccugcacauuc

SEQ ID NO: 1144828 - RNA, 19 nt, Artificial Sequence
  Description of Artificial Sequence: Synthetic oligonucleotide
  Sense strand starting at position 2525 of SEQ ID NO: 916287
guugcuaugcuagacaaug

SEQ ID NO: 1144829 - RNA, 19 nt, Artificial Sequence
  Description of Artificial Sequence: Synthetic oligonucleotide
  Antisense strand to SEQ ID NO: 1144828
cauugucuagcauagcaac

SEQ ID NO: 1144830 - RNA, 19 nt, Artificial Sequence
  Description of Artificial Sequence: Synthetic oligonucleotide
  Sense strand starting at position 2559 of SEQ ID NO: 916287
cuggcuugucuacauagga

SEQ ID NO: 1144831 - RNA, 19 nt, Artificial Sequence
  Description of Artificial Sequence: Synthetic oligonucleotide
  Antisense strand to SEQ ID NO: 1144830
uccuauguagacaagccag

SEQ ID NO: 1144832 - RNA, 19 nt, Artificial Sequence
  Description of Artificial Sequence: Synthetic oligonucleotide
  Sense strand starting at position 2688 of SEQ ID NO: 916287
ucauccuaugaaugagacu

SEQ ID NO: 1144833 - RNA, 19 nt, Artificial Sequence
  Description of Artificial Sequence: Synthetic oligonucleotide
  Antisense strand to SEQ ID NO: 1144832
agucucauucauaggauga

SEQ ID NO: 1144834 - RNA, 19 nt, Artificial Sequence
  Description of Artificial Sequence: Synthetic oligonucleotide
  Sense strand starting at position 2732 of SEQ ID NO: 916287
gcacaauaccuguggcaca

SEQ ID NO: 1144835 - RNA, 19 nt, Artificial Sequence
  Description of Artificial Sequence: Synthetic oligonucleotide
  Antisense strand to SEQ ID NO: 1144834
ugugccacagguauugugc

SEQ ID NO: 1144836 - RNA, 19 nt, Artificial Sequence
  Description of Artificial Sequence: Synthetic oligonucleotide
  Sense strand starting at position 2908 of SEQ ID NO: 916287
gcugguauuggccaagauu

SEQ ID NO: 1144837 - RNA, 19 nt, Artificial Sequence
  Description of Artificial Sequence: Synthetic oligonucleotide
  Antisense strand to SEQ ID NO: 1144836
aaucuuggccaauaccagc

SEQ ID NO: 1144838 - RNA, 19 nt, Artificial Sequence
  Description of Artificial Sequence: Synthetic oligonucleotide
  Sense strand starting at position 3059 of SEQ ID NO: 916287
cugacuucccucugugacu

SEQ ID NO: 1144839 - RNA, 19 nt, Artificial Sequence
  Description of Artificial Sequence: Synthetic oligonucleotide
  Antisense strand to SEQ ID NO: 1144838
agucacagagggaagucag

SEQ ID NO: 1144840 - RNA, 19 nt, Artificial Sequence
  Description of Artificial Sequence: Synthetic oligonucleotide
  Sense strand starting at position 3183 of SEQ ID NO: 916287
ccaggauucuugccauccu

SEQ ID NO: 1144841 - RNA, 19 nt, Artificial Sequence
  Description of Artificial Sequence: Synthetic oligonucleotide
  Antisense strand to SEQ ID NO: 1144840
aggauggcaagaauccugg

SEQ ID NO: 1144842 - RNA, 19 nt, Artificial Sequence
  Description of Artificial Sequence: Synthetic oligonucleotide
  Sense strand starting at position 3739 of SEQ ID NO: 916287
cugacaguagcagacuuau

SEQ ID NO: 1144843 - RNA, 19 nt, Artificial Sequence
  Description of Artificial Sequence: Synthetic oligonucleotide
  Antisense strand to SEQ ID NO: 1144842
auaagucugcuacugucag

SEQ ID NO: 1144844 - RNA, 19 nt, Artificial Sequence
  Description of Artificial Sequence: Synthetic oligonucleotide
  Sense strand starting at position 176 of SEQ ID NO: 916288
ccaccuucuuguguaucaa

SEQ ID NO: 1144845 - RNA, 19 nt, Artificial Sequence
  Description of Artificial Sequence: Synthetic oligonucleotide
  Antisense strand to SEQ ID NO: 1144844
uugauacacaagaaggugg

SEQ ID NO: 1144846 - RNA, 19 nt, Artificial Sequence
  Description of Artificial Sequence: Synthetic oligonucleotide
  Sense strand starting at position 249 of SEQ ID NO: 916288
gaagguugcccuugacuuc

SEQ ID NO: 1144847 - RNA, 19 nt, Artificial Sequence
  Description of Artificial Sequence: Synthetic oligonucleotide
  Antisense strand to SEQ ID NO: 1144846
gaagucaagggcaaccuuc

SEQ ID NO: 1144848 - RNA, 19 nt, Artificial Sequence
  Description of Artificial Sequence: Synthetic oligonucleotide
  Sense strand starting at position 267 of SEQ ID NO: 916288
cuuaucauuuaagaguaag

SEQ ID NO: 1144849 - RNA, 19 nt, Artificial Sequence
  Description of Artificial Sequence: Synthetic oligonucleotide
  Antisense strand to SEQ ID NO: 1144848
cuuacucuuaaaugauaag

SEQ ID NO: 1144850 - RNA, 19 nt, Artificial Sequence
  Description of Artificial Sequence: Synthetic oligonucleotide
  Sense strand starting at position 279 of SEQ ID NO: 916288
gaguaagaucaaugaaguu

SEQ ID NO: 1144851 - RNA, 19 nt, Artificial Sequence
  Description of Artificial Sequence: Synthetic oligonucleotide
  Antisense strand to SEQ ID NO: 1144850
aacuucauugaucuuacuc

SEQ ID NO: 1144852 - RNA, 19 nt, Artificial Sequence
  Description of Artificial Sequence: Synthetic oligonucleotide
  Sense strand starting at position 330 of SEQ ID NO: 916288
aucagaccucuuuauacgu

SEQ ID NO: 1144853 - RNA, 19 nt, Artificial Sequence
  Description of Artificial Sequence: Synthetic oligonucleotide
  Antisense strand to SEQ ID NO: 1144852
acguauaaagaggucugau

SEQ ID NO: 1144854 - RNA, 19 nt, Artificial Sequence
  Description of Artificial Sequence: Synthetic oligonucleotide
  Sense strand starting at position 400 of SEQ ID NO: 916288
uccagauaugucugccaau

SEQ ID NO: 1144855 - RNA, 19 nt, Artificial Sequence
  Description of Artificial Sequence: Synthetic oligonucleotide
  Antisense strand to SEQ ID NO: 1144854
auuggcagacauaucugga

SEQ ID NO: 1144856 - RNA, 19 nt, Artificial Sequence
  Description of Artificial Sequence: Synthetic oligonucleotide
  Sense strand starting at position 401 of SEQ ID NO: 916288
ccagauaugucugccaauu

SEQ ID NO: 1144857 - RNA, 19 nt, Artificial Sequence
  Description of Artificial Sequence: Synthetic oligonucleotide
  Antisense strand to SEQ ID NO: 1144856
aauuggcagacauaucugg

SEQ ID NO: 1144858 - RNA, 19 nt, Artificial Sequence
  Description of Artificial Sequence: Synthetic oligonucleotide
  Sense strand starting at position 439 of SEQ ID NO: 916288
cuacaaguucuuggcacaa

SEQ ID NO: 1144859 - RNA, 19 nt, Artificial Sequence
  Description of Artificial Sequence: Synthetic oligonucleotide
  Antisense strand to SEQ ID NO: 1144858
uugugccaagaacuuguag

SEQ ID NO: 1144860 - RNA, 19 nt, Artificial Sequence
  Description of Artificial Sequence: Synthetic oligonucleotide
  Sense strand starting at position 460 of SEQ ID NO: 916288
aauuauguauuggugacuu

SEQ ID NO: 1144861 - RNA, 19 nt, Artificial Sequence
  Description of Artificial Sequence: Synthetic oligonucleotide
  Antisense strand to SEQ ID NO: 1144860
aagucaccaauacauaauu

SEQ ID NO: 1144862 - RNA, 19 nt, Artificial Sequence
  Description of Artificial Sequence: Synthetic oligonucleotide
  Sense strand starting at position 462 of SEQ ID NO: 916288
uuauguauuggugacuuua

SEQ ID NO: 1144863 - RNA, 19 nt, Artificial Sequence
  Description of Artificial Sequence: Synthetic oligonucleotide
  Antisense strand to SEQ ID NO: 1144862
uaaagucaccaauacauaa

SEQ ID NO: 1144864 - RNA, 19 nt, Artificial Sequence
  Description of Artificial Sequence: Synthetic oligonucleotide
  Sense strand starting at position 464 of SEQ ID NO: 916288
auguauuggugacuuuaaa

SEQ ID NO: 1144865 - RNA, 19 nt, Artificial Sequence
  Description of Artificial Sequence: Synthetic oligonucleotide
  Antisense strand to SEQ ID NO: 1144864
uuuaaagucaccaauacau

SEQ ID NO: 1144866 - RNA, 19 nt, Artificial Sequence
  Description of Artificial Sequence: Synthetic oligonucleotide
  Sense strand starting at position 508 of SEQ ID NO: 916288
ggcugaaccaguugauggu

SEQ ID NO: 1144867 - RNA, 19 nt, Artificial Sequence
  Description of Artificial Sequence: Synthetic oligonucleotide
  Antisense strand to SEQ ID NO: 1144866
accaucaacugguucagcc

SEQ ID NO: 1144868 - RNA, 19 nt, Artificial Sequence
  Description of Artificial Sequence: Synthetic oligonucleotide
  Sense strand starting at position 597 of SEQ ID NO: 916288
uugauauccucaggauuua

SEQ ID NO: 1144869 - RNA, 19 nt, Artificial Sequence
  Description of Artificial Sequence: Synthetic oligonucleotide
  Antisense strand to SEQ ID NO: 1144868
uaaauccugaggauaucaa

SEQ ID NO: 1144870 - RNA, 19 nt, Artificial Sequence
  Description of Artificial Sequence: Synthetic oligonucleotide
  Sense strand starting at position 607 of SEQ ID NO: 916288
caggauuuauuaucgcuuu

SEQ ID NO: 1144871 - RNA, 19 nt, Artificial Sequence
  Description of Artificial Sequence: Synthetic oligonucleotide
  Antisense strand to SEQ ID NO: 1144870
aaagcgauaauaaauccug

SEQ ID NO: 1144872 - RNA, 19 nt, Artificial Sequence
  Description of Artificial Sequence: Synthetic oligonucleotide
  Sense strand starting at position 610 of SEQ ID NO: 916288
gauuuauuaucgcuuucug

SEQ ID NO: 1144873 - RNA, 19 nt, Artificial Sequence
  Description of Artificial Sequence: Synthetic oligonucleotide
  Antisense strand to SEQ ID NO: 1144872
cagaaagcgauaauaaauc

SEQ ID NO: 1144874 - RNA, 19 nt, Artificial Sequence
  Description of Artificial Sequence: Synthetic oligonucleotide
  Sense strand starting at position 696 of SEQ ID NO: 916288
uguagagugcgugugcuaa

SEQ ID NO: 1144875 - RNA, 19 nt, Artificial Sequence
  Description of Artificial Sequence: Synthetic oligonucleotide
  Antisense strand to SEQ ID NO: 1144874
uuagcacacgcacucuaca

SEQ ID NO: 1144876 - RNA, 19 nt, Artificial Sequence
  Description of Artificial Sequence: Synthetic oligonucleotide
  Sense strand starting at position 706 of SEQ ID NO: 916288
gugugcuaacuagauguga

SEQ ID NO: 1144877 - RNA, 19 nt, Artificial Sequence
  Description of Artificial Sequence: Synthetic oligonucleotide
  Antisense strand to SEQ ID NO: 1144876
ucacaucuaguuagcacac

SEQ ID NO: 1144878 - RNA, 19 nt, Artificial Sequence
  Description of Artificial Sequence: Synthetic oligonucleotide
  Sense strand starting at position 708 of SEQ ID NO: 916288
gugcuaacuagaugugaag

SEQ ID NO: 1144879 - RNA, 19 nt, Artificial Sequence
  Description of Artificial Sequence: Synthetic oligonucleotide
  Antisense strand to SEQ ID NO: 1144878
cuucacaucuaguuagcac

SEQ ID NO: 1144880 - RNA, 19 nt, Artificial Sequence
  Description of Artificial Sequence: Synthetic oligonucleotide
  Sense strand starting at position 843 of SEQ ID NO: 916288
cuuccuuuaucucuagagu

SEQ ID NO: 1144881 - RNA, 19 nt, Artificial Sequence
  Description of Artificial Sequence: Synthetic oligonucleotide
  Antisense strand to SEQ ID NO: 1144880
acucuagagauaaaggaag

SEQ ID NO: 1144882 - RNA, 19 nt, Artificial Sequence
  Description of Artificial Sequence: Synthetic oligonucleotide
  Sense strand starting at position 844 of SEQ ID NO: 916288
uuccuuuaucucuagagua

SEQ ID NO: 1144883 - RNA, 19 nt, Artificial Sequence
  Description of Artificial Sequence: Synthetic oligonucleotide
  Antisense strand to SEQ ID NO: 1144882
uacucuagagauaaaggaa

SEQ ID NO: 1144884 - RNA, 19 nt, Artificial Sequence
  Description of Artificial Sequence: Synthetic oligonucleotide
  Sense strand starting at position 1088 of SEQ ID NO: 916288
auaggcaucaucuggaaga

SEQ ID NO: 1144885 - RNA, 19 nt, Artificial Sequence
  Description of Artificial Sequence: Synthetic oligonucleotide
  Antisense strand to SEQ ID NO: 1144884
ucuuccagaugaugccuau

SEQ ID NO: 1144886 - RNA, 19 nt, Artificial Sequence
  Description of Artificial Sequence: Synthetic oligonucleotide
  Sense strand starting at position 1307 of SEQ ID NO: 916288
cugggaguuuaaggaauuu

SEQ ID NO: 1144887 - RNA, 19 nt, Artificial Sequence
  Description of Artificial Sequence: Synthetic oligonucleotide
  Antisense strand to SEQ ID NO: 1144886
aaauuccuuaaacucccag

SEQ ID NO: 1144888 - RNA, 19 nt, Artificial Sequence
  Description of Artificial Sequence: Synthetic oligonucleotide
  Sense strand starting at position 2507 of SEQ ID NO: 916288
gcaagaucugguuaauugg

SEQ ID NO: 1144889 - RNA, 19 nt, Artificial Sequence
  Description of Artificial Sequence: Synthetic oligonucleotide
  Antisense strand to SEQ ID NO: 1144888
ccaauuaaccagaucuugc

SEQ ID NO: 1144890 - RNA, 19 nt, Artificial Sequence
  Description of Artificial Sequence: Synthetic oligonucleotide
  Sense strand starting at position 2529 of SEQ ID NO: 916288
aaaucuggccuccaugagu

SEQ ID NO: 1144891 - RNA, 19 nt, Artificial Sequence
  Description of Artificial Sequence: Synthetic oligonucleotide
  Antisense strand to SEQ ID NO: 1144890
acucauggaggccagauuu

SEQ ID NO: 1144892 - RNA, 19 nt, Artificial Sequence
  Description of Artificial Sequence: Synthetic oligonucleotide
  Sense strand starting at position 2590 of SEQ ID NO: 916288
gucuuaauguaugugucaa

SEQ ID NO: 1144893 - RNA, 19 nt, Artificial Sequence
  Description of Artificial Sequence: Synthetic oligonucleotide
  Antisense strand to SEQ ID NO: 1144892
uugacacauacauuaagac

SEQ ID NO: 1144894 - RNA, 19 nt, Artificial Sequence
  Description of Artificial Sequence: Synthetic oligonucleotide
  Sense strand starting at position 2787 of SEQ ID NO: 916288
ggcggaucugaacagcaaa

SEQ ID NO: 1144895 - RNA, 19 nt, Artificial Sequence
  Description of Artificial Sequence: Synthetic oligonucleotide
  Antisense strand to SEQ ID NO: 1144894
uuugcuguucagauccgcc

SEQ ID NO: 1144896 - RNA, 19 nt, Artificial Sequence
  Description of Artificial Sequence: Synthetic oligonucleotide
  Sense strand starting at position 2915 of SEQ ID NO: 916288
agcccagaguccucucuaa

SEQ ID NO: 1144897 - RNA, 19 nt, Artificial Sequence
  Description of Artificial Sequence: Synthetic oligonucleotide
  Antisense strand to SEQ ID NO: 1144896
uuagagaggacucugggcu

SEQ ID NO: 1144898 - RNA, 19 nt, Artificial Sequence
  Description of Artificial Sequence: Synthetic oligonucleotide
  Sense strand starting at position 2919 of SEQ ID NO: 916288
cagaguccucucuaagcgu

SEQ ID NO: 1144899 - RNA, 19 nt, Artificial Sequence
  Description of Artificial Sequence: Synthetic oligonucleotide
  Antisense strand to SEQ ID NO: 1144898
acgcuuagagaggacucug

SEQ ID NO: 1144900 - RNA, 19 nt, Artificial Sequence
  Description of Artificial Sequence: Synthetic oligonucleotide
  Sense strand starting at position 2936 of SEQ ID NO: 916288
guagcucucagauggguau

SEQ ID NO: 1144901 - RNA, 19 nt, Artificial Sequence
  Description of Artificial Sequence: Synthetic oligonucleotide
  Antisense strand to SEQ ID NO: 1144900
auacccaucugagagcuac

SEQ ID NO: 1144902 - RNA, 19 nt, Artificial Sequence
  Description of Artificial Sequence: Synthetic oligonucleotide
  Sense strand starting at position 2937 of SEQ ID NO: 916288
uagcucucagauggguauu

SEQ ID NO: 1144903 - RNA, 19 nt, Artificial Sequence
  Description of Artificial Sequence: Synthetic oligonucleotide
  Antisense strand to SEQ ID NO: 1144902
aauacccaucugagagcua

SEQ ID NO: 1144904 - RNA, 19 nt, Artificial Sequence
  Description of Artificial Sequence: Synthetic oligonucleotide
  Sense strand starting at position 2975 of SEQ ID NO: 916288
uuccuaucggaaugcagau

SEQ ID NO: 1144905 - RNA, 19 nt, Artificial Sequence
  Description of Artificial Sequence: Synthetic oligonucleotide
  Antisense strand to SEQ ID NO: 1144904
aucugcauuccgauaggaa

SEQ ID NO: 1144906 - RNA, 19 nt, Artificial Sequence
  Description of Artificial Sequence: Synthetic oligonucleotide
  Sense strand starting at position 2981 of SEQ ID NO: 916288
ucggaaugcagauguggaa

SEQ ID NO: 1144907 - RNA, 19 nt, Artificial Sequence
  Description of Artificial Sequence: Synthetic oligonucleotide
  Antisense strand to SEQ ID NO: 1144906
uuccacaucugcauuccga

SEQ ID NO: 1144908 - RNA, 19 nt, Artificial Sequence
  Description of Artificial Sequence: Synthetic oligonucleotide
  Sense strand starting at position 3067 of SEQ ID NO: 916288
ccacguaauccugacccuu

SEQ ID NO: 1144909 - RNA, 19 nt, Artificial Sequence
  Description of Artificial Sequence: Synthetic oligonucleotide
  Antisense strand to SEQ ID NO: 1144908
aagggucaggauuacgugg

SEQ ID NO: 1144910 - RNA, 19 nt, Artificial Sequence
  Description of Artificial Sequence: Synthetic oligonucleotide
  Sense strand starting at position 3080 of SEQ ID NO: 916288
acccuugucucccuaguga

SEQ ID NO: 1144911 - RNA, 19 nt, Artificial Sequence
  Description of Artificial Sequence: Synthetic oligonucleotide
  Antisense strand to SEQ ID NO: 1144910
ucacuagggagacaagggu

SEQ ID NO: 1144912 - RNA, 19 nt, Artificial Sequence
  Description of Artificial Sequence: Synthetic oligonucleotide
  Sense strand starting at position 3656 of SEQ ID NO: 916288
aggagaaauuaauccuguu

SEQ ID NO: 1144913 - RNA, 19 nt, Artificial Sequence
  Description of Artificial Sequence: Synthetic oligonucleotide
  Antisense strand to SEQ ID NO: 1144912
aacaggauuaauuucuccu

SEQ ID NO: 1144914 - RNA, 19 nt, Artificial Sequence
  Description of Artificial Sequence: Synthetic oligonucleotide
  Sense strand starting at position 3702 of SEQ ID NO: 916288
ucuuuaucagaauaacggu

SEQ ID NO: 1144915 - RNA, 19 nt, Artificial Sequence
  Description of Artificial Sequence: Synthetic oligonucleotide
  Antisense strand to SEQ ID NO: 1144914
accguuauucugauaaaga

SEQ ID NO: 1144916 - RNA, 19 nt, Artificial Sequence
  Description of Artificial Sequence: Synthetic oligonucleotide
  Sense strand starting at position 3750 of SEQ ID NO: 916288
gcuuauuauuuggcaggca

SEQ ID NO: 1144917 - RNA, 19 nt, Artificial Sequence
  Description of Artificial Sequence: Synthetic oligonucleotide
  Antisense strand to SEQ ID NO: 1144916
ugccugccaaauaauaagc

SEQ ID NO: 1144918 - RNA, 19 nt, Artificial Sequence
  Description of Artificial Sequence: Synthetic oligonucleotide
  Sense strand starting at position 3785 of SEQ ID NO: 916288
auauguaacuuagucaacu

SEQ ID NO: 1144919 - RNA, 19 nt, Artificial Sequence
  Description of Artificial Sequence: Synthetic oligonucleotide
  Antisense strand to SEQ ID NO: 1144918
aguugacuaaguuacauau

SEQ ID NO: 1144920 - RNA, 19 nt, Artificial Sequence
  Description of Artificial Sequence: Synthetic oligonucleotide
  Sense strand starting at position 3794 of SEQ ID NO: 916288
uuagucaacuuaguugaua

SEQ ID NO: 1144921 - RNA, 19 nt, Artificial Sequence
  Description of Artificial Sequence: Synthetic oligonucleotide
  Antisense strand to SEQ ID NO: 1144920
uaucaacuaaguugacuaa

SEQ ID NO: 1144922 - RNA, 19 nt, Artificial Sequence
  Description of Artificial Sequence: Synthetic oligonucleotide
  Sense strand starting at position 3810 of SEQ ID NO: 916288
auagcugugcucuaauaaa

SEQ ID NO: 1144923 - RNA, 19 nt, Artificial Sequence
  Description of Artificial Sequence: Synthetic oligonucleotide
  Antisense strand to SEQ ID NO: 1144922
uuuauuagagcacagcuau

SEQ ID NO: 1144924 - RNA, 19 nt, Artificial Sequence
  Description of Artificial Sequence: Synthetic oligonucleotide
  Sense strand starting at position 642 of SEQ ID NO: 916289
uugguaaucccacagcugu

SEQ ID NO: 1144925 - RNA, 19 nt, Artificial Sequence
  Description of Artificial Sequence: Synthetic oligonucleotide
  Antisense strand to SEQ ID NO: 1144924
acagcugugggauuaccaa

SEQ ID NO: 1144926 - RNA, 19 nt, Artificial Sequence
  Description of Artificial Sequence: Synthetic oligonucleotide
  Sense strand starting at position 776 of SEQ ID NO: 916289
cugcgauaggguuauuugu

SEQ ID NO: 1144927 - RNA, 19 nt, Artificial Sequence
  Description of Artificial Sequence: Synthetic oligonucleotide
  Antisense strand to SEQ ID NO: 1144926
acaaauaacccuaucgcag

SEQ ID NO: 1144928 - RNA, 19 nt, Artificial Sequence
  Description of Artificial Sequence: Synthetic oligonucleotide
  Sense strand starting at position 778 of SEQ ID NO: 916289
gcgauaggguuauuuguga

SEQ ID NO: 1144929 - RNA, 19 nt, Artificial Sequence
  Description of Artificial Sequence: Synthetic oligonucleotide
  Antisense strand to SEQ ID NO: 1144928
ucacaaauaacccuaucgc

SEQ ID NO: 1144930 - RNA, 19 nt, Artificial Sequence
  Description of Artificial Sequence: Synthetic oligonucleotide
  Sense strand starting at position 791 of SEQ ID NO: 916289
uugugaugggcaugacacu

SEQ ID NO: 1144931 - RNA, 19 nt, Artificial Sequence
  Description of Artificial Sequence: Synthetic oligonucleotide
  Antisense strand to SEQ ID NO: 1144930
agugucaugcccaucacaa

SEQ ID NO: 1144932 - RNA, 19 nt, Artificial Sequence
  Description of Artificial Sequence: Synthetic oligonucleotide
  Sense strand starting at position 1046 of SEQ ID NO: 916289
aacgucagcgauuaaguaa

SEQ ID NO: 1144933 - RNA, 19 nt, Artificial Sequence
  Description of Artificial Sequence: Synthetic oligonucleotide
  Antisense strand to SEQ ID NO: 1144932
uuacuuaaucgcugacguu

SEQ ID NO: 1144934 - RNA, 19 nt, Artificial Sequence
  Description of Artificial Sequence: Synthetic oligonucleotide
  Sense strand starting at position 1144 of SEQ ID NO: 916289
ucccauuuccugcgacuua

SEQ ID NO: 1144935 - RNA, 19 nt, Artificial Sequence
  Description of Artificial Sequence: Synthetic oligonucleotide
  Antisense strand to SEQ ID NO: 1144934
uaagucgcaggaaauggga

SEQ ID NO: 1144936 - RNA, 19 nt, Artificial Sequence
  Description of Artificial Sequence: Synthetic oligonucleotide
  Sense strand starting at position 1236 of SEQ ID NO: 916289
agcccugauuuacauggaa

SEQ ID NO: 1144937 - RNA, 19 nt, Artificial Sequence
  Description of Artificial Sequence: Synthetic oligonucleotide
  Antisense strand to SEQ ID NO: 1144936
uuccauguaaaucagggcu

SEQ ID NO: 1144938 - RNA, 19 nt, Artificial Sequence
  Description of Artificial Sequence: Synthetic oligonucleotide
  Sense strand starting at position 1317 of SEQ ID NO: 916289
acacuagggcuuuguacaa

SEQ ID NO: 1144939 - RNA, 19 nt, Artificial Sequence
  Description of Artificial Sequence: Synthetic oligonucleotide
  Antisense strand to SEQ ID NO: 1144938
uuguacaaagcccuagugu

SEQ ID NO: 1144940 - RNA, 19 nt, Artificial Sequence
  Description of Artificial Sequence: Synthetic oligonucleotide
  Sense strand starting at position 1465 of SEQ ID NO: 916289
aagucuaaucccgagcaga

SEQ ID NO: 1144941 - RNA, 19 nt, Artificial Sequence
  Description of Artificial Sequence: Synthetic oligonucleotide
  Antisense strand to SEQ ID NO: 1144940
ucugcucgggauuagacuu

SEQ ID NO: 1144942 - RNA, 19 nt, Artificial Sequence
  Description of Artificial Sequence: Synthetic oligonucleotide
  Sense strand starting at position 1515 of SEQ ID NO: 916289
uccggaaggcgacaucaaa

SEQ ID NO: 1144943 - RNA, 19 nt, Artificial Sequence
  Description of Artificial Sequence: Synthetic oligonucleotide
  Antisense strand to SEQ ID NO: 1144942
uuugaugucgccuuccgga

SEQ ID NO: 1144944 - RNA, 19 nt, Artificial Sequence
  Description of Artificial Sequence: Synthetic oligonucleotide
  Sense strand starting at position 1523 of SEQ ID NO: 916289
gcgacaucaaaggguugau

SEQ ID NO: 1144945 - RNA, 19 nt, Artificial Sequence
  Description of Artificial Sequence: Synthetic oligonucleotide
  Antisense strand to SEQ ID NO: 1144944
aucaacccuuugaugucgc

SEQ ID NO: 1144946 - RNA, 19 nt, Artificial Sequence
  Description of Artificial Sequence: Synthetic oligonucleotide
  Sense strand starting at position 1535 of SEQ ID NO: 916289
gguugauauuuacccguua

SEQ ID NO: 1144947 - RNA, 19 nt, Artificial Sequence
  Description of Artificial Sequence: Synthetic oligonucleotide
  Antisense strand to SEQ ID NO: 1144946
uaacggguaaauaucaacc

SEQ ID NO: 1144948 - RNA, 19 nt, Artificial Sequence
  Description of Artificial Sequence: Synthetic oligonucleotide
  Sense strand starting at position 1536 of SEQ ID NO: 916289
guugauauuuacccguuau

SEQ ID NO: 1144949 - RNA, 19 nt, Artificial Sequence
  Description of Artificial Sequence: Synthetic oligonucleotide
  Antisense strand to SEQ ID NO: 1144948
auaacggguaaauaucaac

SEQ ID NO: 1144950 - RNA, 19 nt, Artificial Sequence
  Description of Artificial Sequence: Synthetic oligonucleotide
  Sense strand starting at position 1755 of SEQ ID NO: 916289
ucacguucuccaggaagac

SEQ ID NO: 1144951 - RNA, 19 nt, Artificial Sequence
  Description of Artificial Sequence: Synthetic oligonucleotide
  Antisense strand to SEQ ID NO: 1144950
gucuuccuggagaacguga

SEQ ID NO: 1144952 - RNA, 19 nt, Artificial Sequence
  Description of Artificial Sequence: Synthetic oligonucleotide
  Sense strand starting at position 1756 of SEQ ID NO: 916289
cacguucuccaggaagacu

SEQ ID NO: 1144953 - RNA, 19 nt, Artificial Sequence
  Description of Artificial Sequence: Synthetic oligonucleotide
  Antisense strand to SEQ ID NO: 1144952
agucuuccuggagaacgug

SEQ ID NO: 1144954 - RNA, 19 nt, Artificial Sequence
  Description of Artificial Sequence: Synthetic oligonucleotide
  Sense strand starting at position 1789 of SEQ ID NO: 916289
ggucuccucguagaugaga

SEQ ID NO: 1144955 - RNA, 19 nt, Artificial Sequence
  Description of Artificial Sequence: Synthetic oligonucleotide
  Antisense strand to SEQ ID NO: 1144954
ucucaucuacgaggagacc

SEQ ID NO: 1144956 - RNA, 19 nt, Artificial Sequence
  Description of Artificial Sequence: Synthetic oligonucleotide
  Sense strand starting at position 1846 of SEQ ID NO: 916289
gcgaaucgccggcuuugua

SEQ ID NO: 1144957 - RNA, 19 nt, Artificial Sequence
  Description of Artificial Sequence: Synthetic oligonucleotide
  Antisense strand to SEQ ID NO: 1144956
uacaaagccggcgauucgc

SEQ ID NO: 1144958 - RNA, 19 nt, Artificial Sequence
  Description of Artificial Sequence: Synthetic oligonucleotide
  Sense strand starting at position 1847 of SEQ ID NO: 916289
cgaaucgccggcuuuguaa

SEQ ID NO: 1144959 - RNA, 19 nt, Artificial Sequence
  Description of Artificial Sequence: Synthetic oligonucleotide
  Antisense strand to SEQ ID NO: 1144958
uuacaaagccggcgauucg

SEQ ID NO: 1144960 - RNA, 19 nt, Artificial Sequence
  Description of Artificial Sequence: Synthetic oligonucleotide
  Sense strand starting at position 2093 of SEQ ID NO: 916289
ggagacaugcuauaguugu

SEQ ID NO: 1144961 - RNA, 19 nt, Artificial Sequence
  Description of Artificial Sequence: Synthetic oligonucleotide
  Antisense strand to SEQ ID NO: 1144960
acaacuauagcaugucucc

SEQ ID NO: 1144962 - RNA, 19 nt, Artificial Sequence
  Description of Artificial Sequence: Synthetic oligonucleotide
  Sense strand starting at position 2106 of SEQ ID NO: 916289
aguuguuaaguccaggaag

SEQ ID NO: 1144963 - RNA, 19 nt, Artificial Sequence
  Description of Artificial Sequence: Synthetic oligonucleotide
  Antisense strand to SEQ ID NO: 1144962
cuuccuggacuuaacaacu

SEQ ID NO: 1144964 - RNA, 19 nt, Artificial Sequence
  Description of Artificial Sequence: Synthetic oligonucleotide
  Sense strand starting at position 2108 of SEQ ID NO: 916289
uuguuaaguccaggaagca

SEQ ID NO: 1144965 - RNA, 19 nt, Artificial Sequence
  Description of Artificial Sequence: Synthetic oligonucleotide
  Antisense strand to SEQ ID NO: 1144964
ugcuuccuggacuuaacaa

SEQ ID NO: 1144966 - RNA, 19 nt, Artificial Sequence
  Description of Artificial Sequence: Synthetic oligonucleotide
  Sense strand starting at position 2337 of SEQ ID NO: 916289
cggaauuccugacuuacua

SEQ ID NO: 1144967 - RNA, 19 nt, Artificial Sequence
  Description of Artificial Sequence: Synthetic oligonucleotide
  Antisense strand to SEQ ID NO: 1144966
uaguaagucaggaauuccg

SEQ ID NO: 1144968 - RNA, 19 nt, Artificial Sequence
  Description of Artificial Sequence: Synthetic oligonucleotide
  Sense strand starting at position 2676 of SEQ ID NO: 916289
guugaaauauugucaaugu

SEQ ID NO: 1144969 - RNA, 19 nt, Artificial Sequence
  Description of Artificial Sequence: Synthetic oligonucleotide
  Antisense strand to SEQ ID NO: 1144968
acauugacaauauuucaac

SEQ ID NO: 1144970 - RNA, 19 nt, Artificial Sequence
  Description of Artificial Sequence: Synthetic oligonucleotide
  Sense strand starting at position 2862 of SEQ ID NO: 916289
aaacgaaaguuucuguaag

SEQ ID NO: 1144971 - RNA, 19 nt, Artificial Sequence
  Description of Artificial Sequence: Synthetic oligonucleotide
  Antisense strand to SEQ ID NO: 1144970
cuuacagaaacuuucguuu

SEQ ID NO: 1144972 - RNA, 19 nt, Artificial Sequence
  Description of Artificial Sequence: Synthetic oligonucleotide
  Sense strand starting at position 2909 of SEQ ID NO: 916289
cccugucuucucuaaaggu

SEQ ID NO: 1144973 - RNA, 19 nt, Artificial Sequence
  Description of Artificial Sequence: Synthetic oligonucleotide
  Antisense strand to SEQ ID NO: 1144972
accuuuagagaagacaggg

SEQ ID NO: 1144974 - RNA, 19 nt, Artificial Sequence
  Description of Artificial Sequence: Synthetic oligonucleotide
  Sense strand starting at position 2973 of SEQ ID NO: 916289
gucuuucccagguaguuaa

SEQ ID NO: 1144975 - RNA, 19 nt, Artificial Sequence
  Description of Artificial Sequence: Synthetic oligonucleotide
  Antisense strand to SEQ ID NO: 1144974
uuaacuaccugggaaagac

SEQ ID NO: 1144976 - RNA, 19 nt, Artificial Sequence
  Description of Artificial Sequence: Synthetic oligonucleotide
  Sense strand starting at position 2976 of SEQ ID NO: 916289
uuucccagguaguuaauua

SEQ ID NO: 1144977 - RNA, 19 nt, Artificial Sequence
  Description of Artificial Sequence: Synthetic oligonucleotide
  Antisense strand to SEQ ID NO: 1144976
uaauuaacuaccugggaaa

SEQ ID NO: 1144978 - RNA, 19 nt, Artificial Sequence
  Description of Artificial Sequence: Synthetic oligonucleotide
  Sense strand starting at position 2980 of SEQ ID NO: 916289
ccagguaguuaauuaggau

SEQ ID NO: 1144979 - RNA, 19 nt, Artificial Sequence
  Description of Artificial Sequence: Synthetic oligonucleotide
  Antisense strand to SEQ ID NO: 1144978
auccuaauuaacuaccugg

SEQ ID NO: 1144980 - RNA, 19 nt, Artificial Sequence
  Description of Artificial Sequence: Synthetic oligonucleotide
  Sense strand starting at position 2992 of SEQ ID NO: 916289
uuaggauucugagcaauga

SEQ ID NO: 1144981 - RNA, 19 nt, Artificial Sequence
  Description of Artificial Sequence: Synthetic oligonucleotide
  Antisense strand to SEQ ID NO: 1144980
ucauugcucagaauccuaa

SEQ ID NO: 1144982 - RNA, 19 nt, Artificial Sequence
  Description of Artificial Sequence: Synthetic oligonucleotide
  Sense strand starting at position 3034 of SEQ ID NO: 916289
gucccuggucuugaagaua

SEQ ID NO: 1144983 - RNA, 19 nt, Artificial Sequence
  Description of Artificial Sequence: Synthetic oligonucleotide
  Antisense strand to SEQ ID NO: 1144982
uaucuucaagaccagggac

SEQ ID NO: 1144984 - RNA, 19 nt, Artificial Sequence
  Description of Artificial Sequence: Synthetic oligonucleotide
  Sense strand starting at position 3195 of SEQ ID NO: 916289
uuggaacacugucuugaau

SEQ ID NO: 1144985 - RNA, 19 nt, Artificial Sequence
  Description of Artificial Sequence: Synthetic oligonucleotide
  Antisense strand to SEQ ID NO: 1144984
auucaagacaguguuccaa

SEQ ID NO: 1144986 - RNA, 19 nt, Artificial Sequence
  Description of Artificial Sequence: Synthetic oligonucleotide
  Sense strand starting at position 3224 of SEQ ID NO: 916289
aguccugaauggucgaacu

SEQ ID NO: 1144987 - RNA, 19 nt, Artificial Sequence
  Description of Artificial Sequence: Synthetic oligonucleotide
  Antisense strand to SEQ ID NO: 1144986
aguucgaccauucaggacu

SEQ ID NO: 1144988 - RNA, 19 nt, Artificial Sequence
  Description of Artificial Sequence: Synthetic oligonucleotide
  Sense strand starting at position 3701 of SEQ ID NO: 916289
agaaaucucuugcuuauug

SEQ ID NO: 1144989 - RNA, 19 nt, Artificial Sequence
  Description of Artificial Sequence: Synthetic oligonucleotide
  Antisense strand to SEQ ID NO: 1144988
caauaagcaagagauuucu

SEQ ID NO: 1144990 - RNA, 19 nt, Artificial Sequence
  Description of Artificial Sequence: Synthetic oligonucleotide
  Sense strand starting at position 3705 of SEQ ID NO: 916289
aucucuugcuuauuggaau

SEQ ID NO: 1144991 - RNA, 19 nt, Artificial Sequence
  Description of Artificial Sequence: Synthetic oligonucleotide
  Antisense strand to SEQ ID NO: 1144990
auuccaauaagcaagagau

SEQ ID NO: 1144992 - RNA, 19 nt, Artificial Sequence
  Description of Artificial Sequence: Synthetic oligonucleotide
  Sense strand starting at position 3864 of SEQ ID NO: 916289
gcccauuuauuugguauau

SEQ ID NO: 1144993 - RNA, 19 nt, Artificial Sequence
  Description of Artificial Sequence: Synthetic oligonucleotide
  Antisense strand to SEQ ID NO: 1144992
auauaccaaauaaaugggc

SEQ ID NO: 1144994 - RNA, 19 nt, Artificial Sequence
  Description of Artificial Sequence: Synthetic oligonucleotide
  Sense strand starting at position 3866 of SEQ ID NO: 916289
ccauuuauuugguauaucu

SEQ ID NO: 1144995 - RNA, 19 nt, Artificial Sequence
  Description of Artificial Sequence: Synthetic oligonucleotide
  Antisense strand to SEQ ID NO: 1144994
agauauaccaaauaaaugg

SEQ ID NO: 1144996 - RNA, 19 nt, Artificial Sequence
  Description of Artificial Sequence: Synthetic oligonucleotide
  Sense strand starting at position 3881 of SEQ ID NO: 916289
aucuaagaguuauuggaug

SEQ ID NO: 1144997 - RNA, 19 nt, Artificial Sequence
  Description of Artificial Sequence: Synthetic oligonucleotide
  Antisense strand to SEQ ID NO: 1144996
cauccaauaacucuuagau

SEQ ID NO: 1144998 - RNA, 19 nt, Artificial Sequence
  Description of Artificial Sequence: Synthetic oligonucleotide
  Sense strand starting at position 3883 of SEQ ID NO: 916289
cuaagaguuauuggaugcu

SEQ ID NO: 1144999 - RNA, 19 nt, Artificial Sequence
  Description of Artificial Sequence: Synthetic oligonucleotide
  Antisense strand to SEQ ID NO: 1144998
agcauccaauaacucuuag

SEQ ID NO: 1145000 - RNA, 19 nt, Artificial Sequence
  Description of Artificial Sequence: Synthetic oligonucleotide
  Sense strand starting at position 3886 of SEQ ID NO: 916289
agaguuauuggaugcuuac

SEQ ID NO: 1145001 - RNA, 19 nt, Artificial Sequence
  Description of Artificial Sequence: Synthetic oligonucleotide
  Antisense strand to SEQ ID NO: 1145000
guaagcauccaauaacucu

SEQ ID NO: 1145002 - RNA, 19 nt, Artificial Sequence
  Description of Artificial Sequence: Synthetic oligonucleotide
  Sense strand starting at position 3889 of SEQ ID NO: 916289
guuauuggaugcuuacuaa

SEQ ID NO: 1145003 - RNA, 19 nt, Artificial Sequence
  Description of Artificial Sequence: Synthetic oligonucleotide
  Antisense strand to SEQ ID NO: 1145002
uuaguaagcauccaauaac

SEQ ID NO: 1145004 - RNA, 19 nt, Artificial Sequence
  Description of Artificial Sequence: Synthetic oligonucleotide
  Sense strand starting at position 24 of SEQ ID NO: 916290
gaaaguggaguuuaaaugu

SEQ ID NO: 1145005 - RNA, 19 nt, Artificial Sequence
  Description of Artificial Sequence: Synthetic oligonucleotide
  Antisense strand to SEQ ID NO: 1145004
acauuuaaacuccacuuuc

SEQ ID NO: 1145006 - RNA, 19 nt, Artificial Sequence
  Description of Artificial Sequence: Synthetic oligonucleotide
  Sense strand starting at position 33 of SEQ ID NO: 916290
guuuaaauguucucaauag

SEQ ID NO: 1145007 - RNA, 19 nt, Artificial Sequence
  Description of Artificial Sequence: Synthetic oligonucleotide
  Antisense strand to SEQ ID NO: 1145006
cuauugagaacauuuaaac

SEQ ID NO: 1145008 - RNA, 19 nt, Artificial Sequence
  Description of Artificial Sequence: Synthetic oligonucleotide
  Sense strand starting at position 85 of SEQ ID NO: 916290
uggaaauuacagcgaacaa

SEQ ID NO: 1145009 - RNA, 19 nt, Artificial Sequence
  Description of Artificial Sequence: Synthetic oligonucleotide
  Antisense strand to SEQ ID NO: 1145008
uuguucgcuguaauuucca

SEQ ID NO: 1145010 - RNA, 19 nt, Artificial Sequence
  Description of Artificial Sequence: Synthetic oligonucleotide
  Sense strand starting at position 372 of SEQ ID NO: 916290
cccuuagcugggcgaguua

SEQ ID NO: 1145011 - RNA, 19 nt, Artificial Sequence
  Description of Artificial Sequence: Synthetic oligonucleotide
  Antisense strand to SEQ ID NO: 1145010
uaacucgcccagcuaaggg

SEQ ID NO: 1145012 - RNA, 19 nt, Artificial Sequence
  Description of Artificial Sequence: Synthetic oligonucleotide
  Sense strand starting at position 1993 of SEQ ID NO: 916290
agauucaagugggaugagu

SEQ ID NO: 1145013 - RNA, 19 nt, Artificial Sequence
  Description of Artificial Sequence: Synthetic oligonucleotide
  Antisense strand to SEQ ID NO: 1145012
acucaucccacuugaaucu

SEQ ID NO: 1145014 - RNA, 19 nt, Artificial Sequence
  Description of Artificial Sequence: Synthetic oligonucleotide
  Sense strand starting at position 2104 of SEQ ID NO: 916290
ccucuaaucgugggcggau

SEQ ID NO: 1145015 - RNA, 19 nt, Artificial Sequence
  Description of Artificial Sequence: Synthetic oligonucleotide
  Antisense strand to SEQ ID NO: 1145014
auccgcccacgauuagagg

SEQ ID NO: 1145016 - RNA, 19 nt, Artificial Sequence
  Description of Artificial Sequence: Synthetic oligonucleotide
  Sense strand starting at position 2105 of SEQ ID NO: 916290
cucuaaucgugggcggaua

SEQ ID NO: 1145017 - RNA, 19 nt, Artificial Sequence
  Description of Artificial Sequence: Synthetic oligonucleotide
  Antisense strand to SEQ ID NO: 1145016
uauccgcccacgauuagag

SEQ ID NO: 1145018 - RNA, 19 nt, Artificial Sequence
  Description of Artificial Sequence: Synthetic oligonucleotide
  Sense strand starting at position 2106 of SEQ ID NO: 916290
ucuaaucgugggcggauaa

SEQ ID NO: 1145019 - RNA, 19 nt, Artificial Sequence
  Description of Artificial Sequence: Synthetic oligonucleotide
  Antisense strand to SEQ ID NO: 1145018
uuauccgcccacgauuaga

SEQ ID NO: 1145020 - RNA, 19 nt, Artificial Sequence
  Description of Artificial Sequence: Synthetic oligonucleotide
  Sense strand starting at position 2107 of SEQ ID NO: 916290
cuaaucgugggcggauaaa

SEQ ID NO: 1145021 - RNA, 19 nt, Artificial Sequence
  Description of Artificial Sequence: Synthetic oligonucleotide
  Antisense strand to SEQ ID NO: 1145020
uuuauccgcccacgauuag

SEQ ID NO: 1145022 - RNA, 19 nt, Artificial Sequence
  Description of Artificial Sequence: Synthetic oligonucleotide
  Sense strand starting at position 2209 of SEQ ID NO: 916290
agaggcagcguucgaaaua

SEQ ID NO: 1145023 - RNA, 19 nt, Artificial Sequence
  Description of Artificial Sequence: Synthetic oligonucleotide
  Antisense strand to SEQ ID NO: 1145022
uauuucgaacgcugccucu

SEQ ID NO: 1145024 - RNA, 19 nt, Artificial Sequence
  Description of Artificial Sequence: Synthetic oligonucleotide
  Sense strand starting at position 2376 of SEQ ID NO: 916290
ggcaguuguccugggaagg

SEQ ID NO: 1145025 - RNA, 19 nt, Artificial Sequence
  Description of Artificial Sequence: Synthetic oligonucleotide
  Antisense strand to SEQ ID NO: 1145024
ccuucccaggacaacugcc

SEQ ID NO: 1145026 - RNA, 19 nt, Artificial Sequence
  Description of Artificial Sequence: Synthetic oligonucleotide
  Sense strand starting at position 2512 of SEQ ID NO: 916290
gguucacugugagugggaa

SEQ ID NO: 1145027 - RNA, 19 nt, Artificial Sequence
  Description of Artificial Sequence: Synthetic oligonucleotide
  Antisense strand to SEQ ID NO: 1145026
uucccacucacagugaacc

SEQ ID NO: 1145028 - RNA, 19 nt, Artificial Sequence
  Description of Artificial Sequence: Synthetic oligonucleotide
  Sense strand starting at position 2628 of SEQ ID NO: 916290
cggagacaugcaugcagau

SEQ ID NO: 1145029 - RNA, 19 nt, Artificial Sequence
  Description of Artificial Sequence: Synthetic oligonucleotide
  Antisense strand to SEQ ID NO: 1145028
aucugcaugcaugucuccg

SEQ ID NO: 1145030 - RNA, 19 nt, Artificial Sequence
  Description of Artificial Sequence: Synthetic oligonucleotide
  Sense strand starting at position 2697 of SEQ ID NO: 916290
gggcauucaugcgcuggua

SEQ ID NO: 1145031 - RNA, 19 nt, Artificial Sequence
  Description of Artificial Sequence: Synthetic oligonucleotide
  Antisense strand to SEQ ID NO: 1145030
uaccagcgcaugaaugccc

SEQ ID NO: 1145032 - RNA, 19 nt, Artificial Sequence
  Description of Artificial Sequence: Synthetic oligonucleotide
  Sense strand starting at position 2698 of SEQ ID NO: 916290
ggcauucaugcgcugguaa

SEQ ID NO: 1145033 - RNA, 19 nt, Artificial Sequence
  Description of Artificial Sequence: Synthetic oligonucleotide
  Antisense strand to SEQ ID NO: 1145032
uuaccagcgcaugaaugcc

SEQ ID NO: 1145034 - RNA, 19 nt, Artificial Sequence
  Description of Artificial Sequence: Synthetic oligonucleotide
  Sense strand starting at position 2699 of SEQ ID NO: 916290
gcauucaugcgcugguaaa

SEQ ID NO: 1145035 - RNA, 19 nt, Artificial Sequence
  Description of Artificial Sequence: Synthetic oligonucleotide
  Antisense strand to SEQ ID NO: 1145034
uuuaccagcgcaugaaugc

SEQ ID NO: 1145036 - RNA, 19 nt, Artificial Sequence
  Description of Artificial Sequence: Synthetic oligonucleotide
  Sense strand starting at position 2754 of SEQ ID NO: 916290
cgcagauagacaugcacau

SEQ ID NO: 1145037 - RNA, 19 nt, Artificial Sequence
  Description of Artificial Sequence: Synthetic oligonucleotide
  Antisense strand to SEQ ID NO: 1145036
augugcaugucuaucugcg

SEQ ID NO: 1145038 - RNA, 19 nt, Artificial Sequence
  Description of Artificial Sequence: Synthetic oligonucleotide
  Sense strand starting at position 2766 of SEQ ID NO: 916290
ugcacauucgcagacacau

SEQ ID NO: 1145039 - RNA, 19 nt, Artificial Sequence
  Description of Artificial Sequence: Synthetic oligonucleotide
  Antisense strand to SEQ ID NO: 1145038
augugucugcgaaugugca

SEQ ID NO: 1145040 - RNA, 19 nt, Artificial Sequence
  Description of Artificial Sequence: Synthetic oligonucleotide
  Sense strand starting at position 2893 of SEQ ID NO: 916290
cgauguucccaggguaaag

SEQ ID NO: 1145041 - RNA, 19 nt, Artificial Sequence
  Description of Artificial Sequence: Synthetic oligonucleotide
  Antisense strand to SEQ ID NO: 1145040
cuuuacccugggaacaucg

SEQ ID NO: 1145042 - RNA, 19 nt, Artificial Sequence
  Description of Artificial Sequence: Synthetic oligonucleotide
  Sense strand starting at position 2980 of SEQ ID NO: 916290
uuaaccuucugccugagaa

SEQ ID NO: 1145043 - RNA, 19 nt, Artificial Sequence
  Description of Artificial Sequence: Synthetic oligonucleotide
  Antisense strand to SEQ ID NO: 1145042
uucucaggcagaagguuaa

SEQ ID NO: 1145044 - RNA, 19 nt, Artificial Sequence
  Description of Artificial Sequence: Synthetic oligonucleotide
  Sense strand starting at position 3034 of SEQ ID NO: 916290
gcuguucugaguuauguga

SEQ ID NO: 1145045 - RNA, 19 nt, Artificial Sequence
  Description of Artificial Sequence: Synthetic oligonucleotide
  Antisense strand to SEQ ID NO: 1145044
ucacauaacucagaacagc

SEQ ID NO: 1145046 - RNA, 19 nt, Artificial Sequence
  Description of Artificial Sequence: Synthetic oligonucleotide
  Sense strand starting at position 3242 of SEQ ID NO: 916290
uacagaccaccguggaaua

SEQ ID NO: 1145047 - RNA, 19 nt, Artificial Sequence
  Description of Artificial Sequence: Synthetic oligonucleotide
  Antisense strand to SEQ ID NO: 1145046
uauuccacgguggucugua

SEQ ID NO: 1145048 - RNA, 19 nt, Artificial Sequence
  Description of Artificial Sequence: Synthetic oligonucleotide
  Sense strand starting at position 3322 of SEQ ID NO: 916290
ggaggaggcgcguguaaau

SEQ ID NO: 1145049 - RNA, 19 nt, Artificial Sequence
  Description of Artificial Sequence: Synthetic oligonucleotide
  Antisense strand to SEQ ID NO: 1145048
auuuacacgcgccuccucc

SEQ ID NO: 1145050 - RNA, 19 nt, Artificial Sequence
  Description of Artificial Sequence: Synthetic oligonucleotide
  Sense strand starting at position 3331 of SEQ ID NO: 916290
gcguguaaaugucugcuuu

SEQ ID NO: 1145051 - RNA, 19 nt, Artificial Sequence
  Description of Artificial Sequence: Synthetic oligonucleotide
  Antisense strand to SEQ ID NO: 1145050
aaagcagacauuuacacgc

SEQ ID NO: 1145052 - RNA, 19 nt, Artificial Sequence
  Description of Artificial Sequence: Synthetic oligonucleotide
  Sense strand starting at position 3332 of SEQ ID NO: 916290
cguguaaaugucugcuuug

SEQ ID NO: 1145053 - RNA, 19 nt, Artificial Sequence
  Description of Artificial Sequence: Synthetic oligonucleotide
  Antisense strand to SEQ ID NO: 1145052
caaagcagacauuuacacg

SEQ ID NO: 1145054 - RNA, 19 nt, Artificial Sequence
  Description of Artificial Sequence: Synthetic oligonucleotide
  Sense strand starting at position 3433 of SEQ ID NO: 916290
cguugagugcucugcagga

SEQ ID NO: 1145055 - RNA, 19 nt, Artificial Sequence
  Description of Artificial Sequence: Synthetic oligonucleotide
  Antisense strand to SEQ ID NO: 1145054
uccugcagagcacucaacg

SEQ ID NO: 1145056 - RNA, 19 nt, Artificial Sequence
  Description of Artificial Sequence: Synthetic oligonucleotide
  Sense strand starting at position 3473 of SEQ ID NO: 916290
ugggaacgcuuagcuguaa

SEQ ID NO: 1145057 - RNA, 19 nt, Artificial Sequence
  Description of Artificial Sequence: Synthetic oligonucleotide
  Antisense strand to SEQ ID NO: 1145056
uuacagcuaagcguuccca

SEQ ID NO: 1145058 - RNA, 19 nt, Artificial Sequence
  Description of Artificial Sequence: Synthetic oligonucleotide
  Sense strand starting at position 3474 of SEQ ID NO: 916290
gggaacgcuuagcuguaau

SEQ ID NO: 1145059 - RNA, 19 nt, Artificial Sequence
  Description of Artificial Sequence: Synthetic oligonucleotide
  Antisense strand to SEQ ID NO: 1145058
auuacagcuaagcguuccc

SEQ ID NO: 1145060 - RNA, 19 nt, Artificial Sequence
  Description of Artificial Sequence: Synthetic oligonucleotide
  Sense strand starting at position 3477 of SEQ ID NO: 916290
aacgcuuagcuguaaugga

SEQ ID NO: 1145061 - RNA, 19 nt, Artificial Sequence
  Description of Artificial Sequence: Synthetic oligonucleotide
  Antisense strand to SEQ ID NO: 1145060
uccauuacagcuaagcguu

SEQ ID NO: 1145062 - RNA, 19 nt, Artificial Sequence
  Description of Artificial Sequence: Synthetic oligonucleotide
  Sense strand starting at position 3481 of SEQ ID NO: 916290
cuuagcuguaauggagaga

SEQ ID NO: 1145063 - RNA, 19 nt, Artificial Sequence
  Description of Artificial Sequence: Synthetic oligonucleotide
  Antisense strand to SEQ ID NO: 1145062
ucucuccauuacagcuaag

SEQ ID NO: 1145064 - RNA, 19 nt, Artificial Sequence
  Description of Artificial Sequence: Synthetic oligonucleotide
  Sense strand starting at position 3579 of SEQ ID NO: 916290
cagggcuuggcucaaagau

SEQ ID NO: 1145065 - RNA, 19 nt, Artificial Sequence
  Description of Artificial Sequence: Synthetic oligonucleotide
  Antisense strand to SEQ ID NO: 1145064
aucuuugagccaagcccug

SEQ ID NO: 1145066 - RNA, 19 nt, Artificial Sequence
  Description of Artificial Sequence: Synthetic oligonucleotide
  Sense strand starting at position 3630 of SEQ ID NO: 916290
uaacgauuacagugacauu

SEQ ID NO: 1145067 - RNA, 19 nt, Artificial Sequence
  Description of Artificial Sequence: Synthetic oligonucleotide
  Antisense strand to SEQ ID NO: 1145066
aaugucacuguaaucguua

SEQ ID NO: 1145068 - RNA, 19 nt, Artificial Sequence
  Description of Artificial Sequence: Synthetic oligonucleotide
  Sense strand starting at position 3655 of SEQ ID NO: 916290
cugccaaucgugcacauuu

SEQ ID NO: 1145069 - RNA, 19 nt, Artificial Sequence
  Description of Artificial Sequence: Synthetic oligonucleotide
  Antisense strand to SEQ ID NO: 1145068
aaaugugcacgauuggcag

SEQ ID NO: 1145070 - RNA, 19 nt, Artificial Sequence
  Description of Artificial Sequence: Synthetic oligonucleotide
  Sense strand starting at position 3657 of SEQ ID NO: 916290
gccaaucgugcacauuuaa

SEQ ID NO: 1145071 - RNA, 19 nt, Artificial Sequence
  Description of Artificial Sequence: Synthetic oligonucleotide
  Antisense strand to SEQ ID NO: 1145070
uuaaaugugcacgauuggc

SEQ ID NO: 1145072 - RNA, 19 nt, Artificial Sequence
  Description of Artificial Sequence: Synthetic oligonucleotide
  Sense strand starting at position 3743 of SEQ ID NO: 916290
uguguuguuugcucacuuu

SEQ ID NO: 1145073 - RNA, 19 nt, Artificial Sequence
  Description of Artificial Sequence: Synthetic oligonucleotide
  Antisense strand to SEQ ID NO: 1145072
aaagugagcaaacaacaca

SEQ ID NO: 1145074 - RNA, 19 nt, Artificial Sequence
  Description of Artificial Sequence: Synthetic oligonucleotide
  Sense strand starting at position 3774 of SEQ ID NO: 916290
gagagaaauucugaaggug

SEQ ID NO: 1145075 - RNA, 19 nt, Artificial Sequence
  Description of Artificial Sequence: Synthetic oligonucleotide
  Antisense strand to SEQ ID NO: 1145074
caccuucagaauuucucuc

SEQ ID NO: 1145076 - RNA, 19 nt, Artificial Sequence
  Description of Artificial Sequence: Synthetic oligonucleotide
  Sense strand starting at position 3832 of SEQ ID NO: 916290
ugugcuguauaccucauua

SEQ ID NO: 1145077 - RNA, 19 nt, Artificial Sequence
  Description of Artificial Sequence: Synthetic oligonucleotide
  Antisense strand to SEQ ID NO: 1145076
uaaugagguauacagcaca

SEQ ID NO: 1145078 - RNA, 19 nt, Artificial Sequence
  Description of Artificial Sequence: Synthetic oligonucleotide
  Sense strand starting at position 3834 of SEQ ID NO: 916290
ugcuguauaccucauuaua

SEQ ID NO: 1145079 - RNA, 19 nt, Artificial Sequence
  Description of Artificial Sequence: Synthetic oligonucleotide
  Antisense strand to SEQ ID NO: 1145078
uauaaugagguauacagca

SEQ ID NO: 1145080 - RNA, 19 nt, Artificial Sequence
  Description of Artificial Sequence: Synthetic oligonucleotide
  Sense strand starting at position 3922 of SEQ ID NO: 916290
uugcguuaaucuuugaaua

SEQ ID NO: 1145081 - RNA, 19 nt, Artificial Sequence
  Description of Artificial Sequence: Synthetic oligonucleotide
  Antisense strand to SEQ ID NO: 1145080
uauucaaagauuaacgcaa

SEQ ID NO: 1145082 - RNA, 19 nt, Artificial Sequence
  Description of Artificial Sequence: Synthetic oligonucleotide
  Sense strand starting at position 3923 of SEQ ID NO: 916290
ugcguuaaucuuugaauau

SEQ ID NO: 1145083 - RNA, 19 nt, Artificial Sequence
  Description of Artificial Sequence: Synthetic oligonucleotide
  Antisense strand to SEQ ID NO: 1145082
auauucaaagauuaacgca

SEQ ID NO: 1145084 - RNA, 19 nt, Artificial Sequence
  Description of Artificial Sequence: Synthetic oligonucleotide
  Sense strand starting at position 333 of SEQ ID NO: 916291
cccugaggccucugggaaa

SEQ ID NO: 1145085 - RNA, 19 nt, Artificial Sequence
  Description of Artificial Sequence: Synthetic oligonucleotide
  Antisense strand to SEQ ID NO: 1145084
uuucccagaggccucaggg

SEQ ID NO: 1145086 - RNA, 19 nt, Artificial Sequence
  Description of Artificial Sequence: Synthetic oligonucleotide
  Sense strand starting at position 538 of SEQ ID NO: 916291
uggugaacuuagucuagcu

SEQ ID NO: 1145087 - RNA, 19 nt, Artificial Sequence
  Description of Artificial Sequence: Synthetic oligonucleotide
  Antisense strand to SEQ ID NO: 1145086
agcuagacuaaguucacca

SEQ ID NO: 1145088 - RNA, 19 nt, Artificial Sequence
  Description of Artificial Sequence: Synthetic oligonucleotide
  Sense strand starting at position 638 of SEQ ID NO: 916291
gggaaauuauuccugugaa

SEQ ID NO: 1145089 - RNA, 19 nt, Artificial Sequence
  Description of Artificial Sequence: Synthetic oligonucleotide
  Antisense strand to SEQ ID NO: 1145088
uucacaggaauaauuuccc

SEQ ID NO: 1145090 - RNA, 19 nt, Artificial Sequence
  Description of Artificial Sequence: Synthetic oligonucleotide
  Sense strand starting at position 639 of SEQ ID NO: 916291
ggaaauuauuccugugaaa

SEQ ID NO: 1145091 - RNA, 19 nt, Artificial Sequence
  Description of Artificial Sequence: Synthetic oligonucleotide
  Antisense strand to SEQ ID NO: 1145090
uuucacaggaauaauuucc

SEQ ID NO: 1145092 - RNA, 19 nt, Artificial Sequence
  Description of Artificial Sequence: Synthetic oligonucleotide
  Sense strand starting at position 812 of SEQ ID NO: 916291
uggguuggcccagaucuuu

SEQ ID NO: 1145093 - RNA, 19 nt, Artificial Sequence
  Description of Artificial Sequence: Synthetic oligonucleotide
  Antisense strand to SEQ ID NO: 1145092
aaagaucugggccaaccca

SEQ ID NO: 1145094 - RNA, 19 nt, Artificial Sequence
  Description of Artificial Sequence: Synthetic oligonucleotide
  Sense strand starting at position 850 of SEQ ID NO: 916291
aguuaaugaucacagaccu

SEQ ID NO: 1145095 - RNA, 19 nt, Artificial Sequence
  Description of Artificial Sequence: Synthetic oligonucleotide
  Antisense strand to SEQ ID NO: 1145094
aggucugugaucauuaacu

SEQ ID NO: 1145096 - RNA, 19 nt, Artificial Sequence
  Description of Artificial Sequence: Synthetic oligonucleotide
  Sense strand starting at position 922 of SEQ ID NO: 916291
gcacauggguaauuaguaa

SEQ ID NO: 1145097 - RNA, 19 nt, Artificial Sequence
  Description of Artificial Sequence: Synthetic oligonucleotide
  Antisense strand to SEQ ID NO: 1145096
uuacuaauuacccaugugc

SEQ ID NO: 1145098 - RNA, 19 nt, Artificial Sequence
  Description of Artificial Sequence: Synthetic oligonucleotide
  Sense strand starting at position 945 of SEQ ID NO: 916291
gucagcucugcugaggaga

SEQ ID NO: 1145099 - RNA, 19 nt, Artificial Sequence
  Description of Artificial Sequence: Synthetic oligonucleotide
  Antisense strand to SEQ ID NO: 1145098
ucuccucagcagagcugac

SEQ ID NO: 1145100 - RNA, 19 nt, Artificial Sequence
  Description of Artificial Sequence: Synthetic oligonucleotide
  Sense strand starting at position 1119 of SEQ ID NO: 916291
cucugucugccucagguaa

SEQ ID NO: 1145101 - RNA, 19 nt, Artificial Sequence
  Description of Artificial Sequence: Synthetic oligonucleotide
  Antisense strand to SEQ ID NO: 1145100
uuaccugaggcagacagag

SEQ ID NO: 1145102 - RNA, 19 nt, Artificial Sequence
  Description of Artificial Sequence: Synthetic oligonucleotide
  Sense strand starting at position 1123 of SEQ ID NO: 916291
gucugccucagguaagaaa

SEQ ID NO: 1145103 - RNA, 19 nt, Artificial Sequence
  Description of Artificial Sequence: Synthetic oligonucleotide
  Antisense strand to SEQ ID NO: 1145102
uuucuuaccugaggcagac

SEQ ID NO: 1145104 - RNA, 19 nt, Artificial Sequence
  Description of Artificial Sequence: Synthetic oligonucleotide
  Sense strand starting at position 1134 of SEQ ID NO: 916291
guaagaaagaccugggcuu

SEQ ID NO: 1145105 - RNA, 19 nt, Artificial Sequence
  Description of Artificial Sequence: Synthetic oligonucleotide
  Antisense strand to SEQ ID NO: 1145104
aagcccaggucuuucuuac

SEQ ID NO: 1145106 - RNA, 19 nt, Artificial Sequence
  Description of Artificial Sequence: Synthetic oligonucleotide
  Sense strand starting at position 1145 of SEQ ID NO: 916291
cugggcuucccuggcuaaa

SEQ ID NO: 1145107 - RNA, 19 nt, Artificial Sequence
  Description of Artificial Sequence: Synthetic oligonucleotide
  Antisense strand to SEQ ID NO: 1145106
uuuagccagggaagcccag

SEQ ID NO: 1145108 - RNA, 19 nt, Artificial Sequence
  Description of Artificial Sequence: Synthetic oligonucleotide
  Sense strand starting at position 1260 of SEQ ID NO: 916291
ggacucagugcaggaguua

SEQ ID NO: 1145109 - RNA, 19 nt, Artificial Sequence
  Description of Artificial Sequence: Synthetic oligonucleotide
  Antisense strand to SEQ ID NO: 1145108
uaacuccugcacugagucc

SEQ ID NO: 1145110 - RNA, 19 nt, Artificial Sequence
  Description of Artificial Sequence: Synthetic oligonucleotide
  Sense strand starting at position 1273 of SEQ ID NO: 916291
gaguuagggucuggagagu

SEQ ID NO: 1145111 - RNA, 19 nt, Artificial Sequence
  Description of Artificial Sequence: Synthetic oligonucleotide
  Antisense strand to SEQ ID NO: 1145110
acucuccagacccuaacuc

SEQ ID NO: 1145112 - RNA, 19 nt, Artificial Sequence
  Description of Artificial Sequence: Synthetic oligonucleotide
  Sense strand starting at position 1288 of SEQ ID NO: 916291
gaguauaaaugaucagagu

SEQ ID NO: 1145113 - RNA, 19 nt, Artificial Sequence
  Description of Artificial Sequence: Synthetic oligonucleotide
  Antisense strand to SEQ ID NO: 1145112
acucugaucauuuauacuc

SEQ ID NO: 1145114 - RNA, 19 nt, Artificial Sequence
  Description of Artificial Sequence: Synthetic oligonucleotide
  Sense strand starting at position 1294 of SEQ ID NO: 916291
aaaugaucagaguggcuaa

SEQ ID NO: 1145115 - RNA, 19 nt, Artificial Sequence
  Description of Artificial Sequence: Synthetic oligonucleotide
  Antisense strand to SEQ ID NO: 1145114
uuagccacucugaucauuu

SEQ ID NO: 1145116 - RNA, 19 nt, Artificial Sequence
  Description of Artificial Sequence: Synthetic oligonucleotide
  Sense strand starting at position 1326 of SEQ ID NO: 916291
cucccaguucuccaggcau

SEQ ID NO: 1145117 - RNA, 19 nt, Artificial Sequence
  Description of Artificial Sequence: Synthetic oligonucleotide
  Antisense strand to SEQ ID NO: 1145116
augccuggagaacugggag

SEQ ID NO: 1145118 - RNA, 19 nt, Artificial Sequence
  Description of Artificial Sequence: Synthetic oligonucleotide
  Sense strand starting at position 1328 of SEQ ID NO: 916291
cccaguucuccaggcauuu

SEQ ID NO: 1145119 - RNA, 19 nt, Artificial Sequence
  Description of Artificial Sequence: Synthetic oligonucleotide
  Antisense strand to SEQ ID NO: 1145118
aaaugccuggagaacuggg

SEQ ID NO: 1145120 - RNA, 19 nt, Artificial Sequence
  Description of Artificial Sequence: Synthetic oligonucleotide
  Sense strand starting at position 1341 of SEQ ID NO: 916291
gcauuugaguugugaacuc

SEQ ID NO: 1145121 - RNA, 19 nt, Artificial Sequence
  Description of Artificial Sequence: Synthetic oligonucleotide
  Antisense strand to SEQ ID NO: 1145120
gaguucacaacucaaaugc

SEQ ID NO: 1145122 - RNA, 19 nt, Artificial Sequence
  Description of Artificial Sequence: Synthetic oligonucleotide
  Sense strand starting at position 2178 of SEQ ID NO: 916291
ccugccuguucuguuuaca

SEQ ID NO: 1145123 - RNA, 19 nt, Artificial Sequence
  Description of Artificial Sequence: Synthetic oligonucleotide
  Antisense strand to SEQ ID NO: 1145122
uguaaacagaacaggcagg

SEQ ID NO: 1145124 - RNA, 19 nt, Artificial Sequence
  Description of Artificial Sequence: Synthetic oligonucleotide
  Sense strand starting at position 2220 of SEQ ID NO: 916291
gguucauauuuauccgugu

SEQ ID NO: 1145125 - RNA, 19 nt, Artificial Sequence
  Description of Artificial Sequence: Synthetic oligonucleotide
  Antisense strand to SEQ ID NO: 1145124
acacggauaaauaugaacc

SEQ ID NO: 1145126 - RNA, 19 nt, Artificial Sequence
  Description of Artificial Sequence: Synthetic oligonucleotide
  Sense strand starting at position 2223 of SEQ ID NO: 916291
ucauauuuauccgugugcu

SEQ ID NO: 1145127 - RNA, 19 nt, Artificial Sequence
  Description of Artificial Sequence: Synthetic oligonucleotide
  Antisense strand to SEQ ID NO: 1145126
agcacacggauaaauauga

SEQ ID NO: 1145128 - RNA, 19 nt, Artificial Sequence
  Description of Artificial Sequence: Synthetic oligonucleotide
  Sense strand starting at position 2224 of SEQ ID NO: 916291
cauauuuauccgugugcuu

SEQ ID NO: 1145129 - RNA, 19 nt, Artificial Sequence
  Description of Artificial Sequence: Synthetic oligonucleotide
  Antisense strand to SEQ ID NO: 1145128
aagcacacggauaaauaug

SEQ ID NO: 1145130 - RNA, 19 nt, Artificial Sequence
  Description of Artificial Sequence: Synthetic oligonucleotide
  Sense strand starting at position 2226 of SEQ ID NO: 916291
uauuuauccgugugcuuag

SEQ ID NO: 1145131 - RNA, 19 nt, Artificial Sequence
  Description of Artificial Sequence: Synthetic oligonucleotide
  Antisense strand to SEQ ID NO: 1145130
cuaagcacacggauaaaua

SEQ ID NO: 1145132 - RNA, 19 nt, Artificial Sequence
  Description of Artificial Sequence: Synthetic oligonucleotide
  Sense strand starting at position 2462 of SEQ ID NO: 916291
gcaucaugcugagacagga

SEQ ID NO: 1145133 - RNA, 19 nt, Artificial Sequence
  Description of Artificial Sequence: Synthetic oligonucleotide
  Antisense strand to SEQ ID NO: 1145132
uccugucucagcaugaugc

SEQ ID NO: 1145134 - RNA, 19 nt, Artificial Sequence
  Description of Artificial Sequence: Synthetic oligonucleotide
  Sense strand starting at position 2490 of SEQ ID NO: 916291
augcuugcugcuuacgaga

SEQ ID NO: 1145135 - RNA, 19 nt, Artificial Sequence
  Description of Artificial Sequence: Synthetic oligonucleotide
  Antisense strand to SEQ ID NO: 1145134
ucucguaagcagcaagcau

SEQ ID NO: 1145136 - RNA, 19 nt, Artificial Sequence
  Description of Artificial Sequence: Synthetic oligonucleotide
  Sense strand starting at position 2543 of SEQ ID NO: 916291
agcucuucucaagggcaga

SEQ ID NO: 1145137 - RNA, 19 nt, Artificial Sequence
  Description of Artificial Sequence: Synthetic oligonucleotide
  Antisense strand to SEQ ID NO: 1145136
ucugcccuugagaagagcu

SEQ ID NO: 1145138 - RNA, 19 nt, Artificial Sequence
  Description of Artificial Sequence: Synthetic oligonucleotide
  Sense strand starting at position 2633 of SEQ ID NO: 916291
caggccucccuguaggaaa

SEQ ID NO: 1145139 - RNA, 19 nt, Artificial Sequence
  Description of Artificial Sequence: Synthetic oligonucleotide
  Antisense strand to SEQ ID NO: 1145138
uuuccuacagggaggccug

SEQ ID NO: 1145140 - RNA, 19 nt, Artificial Sequence
  Description of Artificial Sequence: Synthetic oligonucleotide
  Sense strand starting at position 2659 of SEQ ID NO: 916291
uuaagauuaccaugugcca

SEQ ID NO: 1145141 - RNA, 19 nt, Artificial Sequence
  Description of Artificial Sequence: Synthetic oligonucleotide
  Antisense strand to SEQ ID NO: 1145140
uggcacaugguaaucuuaa

SEQ ID NO: 1145142 - RNA, 19 nt, Artificial Sequence
  Description of Artificial Sequence: Synthetic oligonucleotide
  Sense strand starting at position 2778 of SEQ ID NO: 916291
cgaggcucugagcgguuaa

SEQ ID NO: 1145143 - RNA, 19 nt, Artificial Sequence
  Description of Artificial Sequence: Synthetic oligonucleotide
  Antisense strand to SEQ ID NO: 1145142
uuaaccgcucagagccucg

SEQ ID NO: 1145144 - RNA, 19 nt, Artificial Sequence
  Description of Artificial Sequence: Synthetic oligonucleotide
  Sense strand starting at position 2855 of SEQ ID NO: 916291
uugggaugagugugacacu

SEQ ID NO: 1145145 - RNA, 19 nt, Artificial Sequence
  Description of Artificial Sequence: Synthetic oligonucleotide
  Antisense strand to SEQ ID NO: 1145144
agugucacacucaucccaa

SEQ ID NO: 1145146 - RNA, 19 nt, Artificial Sequence
  Description of Artificial Sequence: Synthetic oligonucleotide
  Sense strand starting at position 2856 of SEQ ID NO: 916291
ugggaugagugugacacuu

SEQ ID NO: 1145147 - RNA, 19 nt, Artificial Sequence
  Description of Artificial Sequence: Synthetic oligonucleotide
  Antisense strand to SEQ ID NO: 1145146
aagugucacacucauccca

SEQ ID NO: 1145148 - RNA, 19 nt, Artificial Sequence
  Description of Artificial Sequence: Synthetic oligonucleotide
  Sense strand starting at position 2906 of SEQ ID NO: 916291
ugagcuauguucucacuuu

SEQ ID NO: 1145149 - RNA, 19 nt, Artificial Sequence
  Description of Artificial Sequence: Synthetic oligonucleotide
  Antisense strand to SEQ ID NO: 1145148
aaagugagaacauagcuca

SEQ ID NO: 1145150 - RNA, 19 nt, Artificial Sequence
  Description of Artificial Sequence: Synthetic oligonucleotide
  Sense strand starting at position 2907 of SEQ ID NO: 916291
gagcuauguucucacuuug

SEQ ID NO: 1145151 - RNA, 19 nt, Artificial Sequence
  Description of Artificial Sequence: Synthetic oligonucleotide
  Antisense strand to SEQ ID NO: 1145150
caaagugagaacauagcuc

SEQ ID NO: 1145152 - RNA, 19 nt, Artificial Sequence
  Description of Artificial Sequence: Synthetic oligonucleotide
  Sense strand starting at position 3270 of SEQ ID NO: 916291
uguauucuuuauugaguug

SEQ ID NO: 1145153 - RNA, 19 nt, Artificial Sequence
  Description of Artificial Sequence: Synthetic oligonucleotide
  Antisense strand to SEQ ID NO: 1145152
caacucaauaaagaauaca

SEQ ID NO: 1145154 - RNA, 19 nt, Artificial Sequence
  Description of Artificial Sequence: Synthetic oligonucleotide
  Sense strand starting at position 3569 of SEQ ID NO: 916291
cccagucaucaagguaaau

SEQ ID NO: 1145155 - RNA, 19 nt, Artificial Sequence
  Description of Artificial Sequence: Synthetic oligonucleotide
  Antisense strand to SEQ ID NO: 1145154
auuuaccuugaugacuggg

SEQ ID NO: 1145156 - RNA, 19 nt, Artificial Sequence
  Description of Artificial Sequence: Synthetic oligonucleotide
  Sense strand starting at position 3665 of SEQ ID NO: 916291
aaacuugugcgugaaugcu

SEQ ID NO: 1145157 - RNA, 19 nt, Artificial Sequence
  Description of Artificial Sequence: Synthetic oligonucleotide
  Antisense strand to SEQ ID NO: 1145156
agcauucacgcacaaguuu

SEQ ID NO: 1145158 - RNA, 19 nt, Artificial Sequence
  Description of Artificial Sequence: Synthetic oligonucleotide
  Sense strand starting at position 3669 of SEQ ID NO: 916291
uugugcgugaaugcucaua

SEQ ID NO: 1145159 - RNA, 19 nt, Artificial Sequence
  Description of Artificial Sequence: Synthetic oligonucleotide
  Antisense strand to SEQ ID NO: 1145158
uaugagcauucacgcacaa

SEQ ID NO: 1145160 - RNA, 19 nt, Artificial Sequence
  Description of Artificial Sequence: Synthetic oligonucleotide
  Sense strand starting at position 3767 of SEQ ID NO: 916291
uugaccaugcaaugguaua

SEQ ID NO: 1145161 - RNA, 19 nt, Artificial Sequence
  Description of Artificial Sequence: Synthetic oligonucleotide
  Antisense strand to SEQ ID NO: 1145160
uauaccauugcauggucaa

SEQ ID NO: 1145162 - RNA, 19 nt, Artificial Sequence
  Description of Artificial Sequence: Synthetic oligonucleotide
  Sense strand starting at position 3772 of SEQ ID NO: 916291
caugcaaugguauagacau

SEQ ID NO: 1145163 - RNA, 19 nt, Artificial Sequence
  Description of Artificial Sequence: Synthetic oligonucleotide
  Antisense strand to SEQ ID NO: 1145162
augucuauaccauugcaug

SEQ ID NO: 1145164 - RNA, 19 nt, Artificial Sequence
  Description of Artificial Sequence: Synthetic oligonucleotide
  Sense strand starting at position 343 of SEQ ID NO: 916292
caggguuuagaaugccaua

SEQ ID NO: 1145165 - RNA, 19 nt, Artificial Sequence
  Description of Artificial Sequence: Synthetic oligonucleotide
  Antisense strand to SEQ ID NO: 1145164
uauggcauucuaaacccug

SEQ ID NO: 1145166 - RNA, 19 nt, Artificial Sequence
  Description of Artificial Sequence: Synthetic oligonucleotide
  Sense strand starting at position 355 of SEQ ID NO: 916292
ugccauacagauuguggaa

SEQ ID NO: 1145167 - RNA, 19 nt, Artificial Sequence
  Description of Artificial Sequence: Synthetic oligonucleotide
  Antisense strand to SEQ ID NO: 1145166
uuccacaaucuguauggca

SEQ ID NO: 1145168 - RNA, 19 nt, Artificial Sequence
  Description of Artificial Sequence: Synthetic oligonucleotide
  Sense strand starting at position 368 of SEQ ID NO: 916292
guggaacccuuacuaaaug

SEQ ID NO: 1145169 - RNA, 19 nt, Artificial Sequence
  Description of Artificial Sequence: Synthetic oligonucleotide
  Antisense strand to SEQ ID NO: 1145168
cauuuaguaaggguuccac

SEQ ID NO: 1145170 - RNA, 19 nt, Artificial Sequence
  Description of Artificial Sequence: Synthetic oligonucleotide
  Sense strand starting at position 608 of SEQ ID NO: 916292
ugagaauccuaauaggaga

SEQ ID NO: 1145171 - RNA, 19 nt, Artificial Sequence
  Description of Artificial Sequence: Synthetic oligonucleotide
  Antisense strand to SEQ ID NO: 1145170
ucuccuauuaggauucuca

SEQ ID NO: 1145172 - RNA, 19 nt, Artificial Sequence
  Description of Artificial Sequence: Synthetic oligonucleotide
  Sense strand starting at position 693 of SEQ ID NO: 916292
cccgaaucuuaaguccaua

SEQ ID NO: 1145173 - RNA, 19 nt, Artificial Sequence
  Description of Artificial Sequence: Synthetic oligonucleotide
  Antisense strand to SEQ ID NO: 1145172
uauggacuuaagauucggg

SEQ ID NO: 1145174 - RNA, 19 nt, Artificial Sequence
  Description of Artificial Sequence: Synthetic oligonucleotide
  Sense strand starting at position 756 of SEQ ID NO: 916292
ccacucacuucucuggaga

SEQ ID NO: 1145175 - RNA, 19 nt, Artificial Sequence
  Description of Artificial Sequence: Synthetic oligonucleotide
  Antisense strand to SEQ ID NO: 1145174
ucuccagagaagugagugg

SEQ ID NO: 1145176 - RNA, 19 nt, Artificial Sequence
  Description of Artificial Sequence: Synthetic oligonucleotide
  Sense strand starting at position 909 of SEQ ID NO: 916292
accugagaacaguguuaau

SEQ ID NO: 1145177 - RNA, 19 nt, Artificial Sequence
  Description of Artificial Sequence: Synthetic oligonucleotide
  Antisense strand to SEQ ID NO: 1145176
auuaacacuguucucaggu

SEQ ID NO: 1145178 - RNA, 19 nt, Artificial Sequence
  Description of Artificial Sequence: Synthetic oligonucleotide
  Sense strand starting at position 936 of SEQ ID NO: 916292
cacaaagucugaccgcaaa

SEQ ID NO: 1145179 - RNA, 19 nt, Artificial Sequence
  Description of Artificial Sequence: Synthetic oligonucleotide
  Antisense strand to SEQ ID NO: 1145178
uuugcggucagacuuugug

SEQ ID NO: 1145180 - RNA, 19 nt, Artificial Sequence
  Description of Artificial Sequence: Synthetic oligonucleotide
  Sense strand starting at position 1337 of SEQ ID NO: 916292
ggaaguguuaaaugggcua

SEQ ID NO: 1145181 - RNA, 19 nt, Artificial Sequence
  Description of Artificial Sequence: Synthetic oligonucleotide
  Antisense strand to SEQ ID NO: 1145180
uagcccauuuaacacuucc

SEQ ID NO: 1145182 - RNA, 19 nt, Artificial Sequence
  Description of Artificial Sequence: Synthetic oligonucleotide
  Sense strand starting at position 1340 of SEQ ID NO: 916292
aguguuaaaugggcuacaa

SEQ ID NO: 1145183 - RNA, 19 nt, Artificial Sequence
  Description of Artificial Sequence: Synthetic oligonucleotide
  Antisense strand to SEQ ID NO: 1145182
uuguagcccauuuaacacu

SEQ ID NO: 1145184 - RNA, 19 nt, Artificial Sequence
  Description of Artificial Sequence: Synthetic oligonucleotide
  Sense strand starting at position 1342 of SEQ ID NO: 916292
uguuaaaugggcuacaaca

SEQ ID NO: 1145185 - RNA, 19 nt, Artificial Sequence
  Description of Artificial Sequence: Synthetic oligonucleotide
  Antisense strand to SEQ ID NO: 1145184
uguuguagcccauuuaaca

SEQ ID NO: 1145186 - RNA, 19 nt, Artificial Sequence
  Description of Artificial Sequence: Synthetic oligonucleotide
  Sense strand starting at position 1476 of SEQ ID NO: 916292
gcuggaguugggagugcua

SEQ ID NO: 1145187 - RNA, 19 nt, Artificial Sequence
  Description of Artificial Sequence: Synthetic oligonucleotide
  Antisense strand to SEQ ID NO: 1145186
uagcacucccaacuccagc

SEQ ID NO: 1145188 - RNA, 19 nt, Artificial Sequence
  Description of Artificial Sequence: Synthetic oligonucleotide
  Sense strand starting at position 1483 of SEQ ID NO: 916292
uugggagugcuaggaaauc

SEQ ID NO: 1145189 - RNA, 19 nt, Artificial Sequence
  Description of Artificial Sequence: Synthetic oligonucleotide
  Antisense strand to SEQ ID NO: 1145188
gauuuccuagcacucccaa

SEQ ID NO: 1145190 - RNA, 19 nt, Artificial Sequence
  Description of Artificial Sequence: Synthetic oligonucleotide
  Sense strand starting at position 1578 of SEQ ID NO: 916292
ugggacuaaucgcucuuua

SEQ ID NO: 1145191 - RNA, 19 nt, Artificial Sequence
  Description of Artificial Sequence: Synthetic oligonucleotide
  Antisense strand to SEQ ID NO: 1145190
uaaagagcgauuaguccca

SEQ ID NO: 1145192 - RNA, 19 nt, Artificial Sequence
  Description of Artificial Sequence: Synthetic oligonucleotide
  Sense strand starting at position 1582 of SEQ ID NO: 916292
acuaaucgcucuuuagaaa

SEQ ID NO: 1145193 - RNA, 19 nt, Artificial Sequence
  Description of Artificial Sequence: Synthetic oligonucleotide
  Antisense strand to SEQ ID NO: 1145192
uuucuaaagagcgauuagu

SEQ ID NO: 1145194 - RNA, 19 nt, Artificial Sequence
  Description of Artificial Sequence: Synthetic oligonucleotide
  Sense strand starting at position 1634 of SEQ ID NO: 916292
aaagauccugugugccuaa

SEQ ID NO: 1145195 - RNA, 19 nt, Artificial Sequence
  Description of Artificial Sequence: Synthetic oligonucleotide
  Antisense strand to SEQ ID NO: 1145194
uuaggcacacaggaucuuu

SEQ ID NO: 1145196 - RNA, 19 nt, Artificial Sequence
  Description of Artificial Sequence: Synthetic oligonucleotide
  Sense strand starting at position 1668 of SEQ ID NO: 916292
uaacgagucccgcaugaua

SEQ ID NO: 1145197 - RNA, 19 nt, Artificial Sequence
  Description of Artificial Sequence: Synthetic oligonucleotide
  Antisense strand to SEQ ID NO: 1145196
uaucaugcgggacucguua

SEQ ID NO: 1145198 - RNA, 19 nt, Artificial Sequence
  Description of Artificial Sequence: Synthetic oligonucleotide
  Sense strand starting at position 2236 of SEQ ID NO: 916292
uaccuuggguguuuaacau

SEQ ID NO: 1145199 - RNA, 19 nt, Artificial Sequence
  Description of Artificial Sequence: Synthetic oligonucleotide
  Antisense strand to SEQ ID NO: 1145198
auguuaaacacccaaggua

SEQ ID NO: 1145200 - RNA, 19 nt, Artificial Sequence
  Description of Artificial Sequence: Synthetic oligonucleotide
  Sense strand starting at position 2294 of SEQ ID NO: 916292
cuuggcaaagcaugauuaa

SEQ ID NO: 1145201 - RNA, 19 nt, Artificial Sequence
  Description of Artificial Sequence: Synthetic oligonucleotide
  Antisense strand to SEQ ID NO: 1145200
uuaaucaugcuuugccaag

SEQ ID NO: 1145202 - RNA, 19 nt, Artificial Sequence
  Description of Artificial Sequence: Synthetic oligonucleotide
  Sense strand starting at position 2665 of SEQ ID NO: 916292
gacguuagcgugagugauc

SEQ ID NO: 1145203 - RNA, 19 nt, Artificial Sequence
  Description of Artificial Sequence: Synthetic oligonucleotide
  Antisense strand to SEQ ID NO: 1145202
gaucacucacgcuaacguc

SEQ ID NO: 1145204 - RNA, 19 nt, Artificial Sequence
  Description of Artificial Sequence: Synthetic oligonucleotide
  Sense strand starting at position 2711 of SEQ ID NO: 916292
agucuuaucuacccauagu

SEQ ID NO: 1145205 - RNA, 19 nt, Artificial Sequence
  Description of Artificial Sequence: Synthetic oligonucleotide
  Antisense strand to SEQ ID NO: 1145204
acuauggguagauaagacu

SEQ ID NO: 1145206 - RNA, 19 nt, Artificial Sequence
  Description of Artificial Sequence: Synthetic oligonucleotide
  Sense strand starting at position 2745 of SEQ ID NO: 916292
uccauuugggcccguuauu

SEQ ID NO: 1145207 - RNA, 19 nt, Artificial Sequence
  Description of Artificial Sequence: Synthetic oligonucleotide
  Antisense strand to SEQ ID NO: 1145206
aauaacgggcccaaaugga

SEQ ID NO: 1145208 - RNA, 19 nt, Artificial Sequence
  Description of Artificial Sequence: Synthetic oligonucleotide
  Sense strand starting at position 2887 of SEQ ID NO: 916292
cgaagacuuugacuggcuu

SEQ ID NO: 1145209 - RNA, 19 nt, Artificial Sequence
  Description of Artificial Sequence: Synthetic oligonucleotide
  Antisense strand to SEQ ID NO: 1145208
aagccagucaaagucuucg

SEQ ID NO: 1145210 - RNA, 19 nt, Artificial Sequence
  Description of Artificial Sequence: Synthetic oligonucleotide
  Sense strand starting at position 2928 of SEQ ID NO: 916292
ccuugagcugccgacugau

SEQ ID NO: 1145211 - RNA, 19 nt, Artificial Sequence
  Description of Artificial Sequence: Synthetic oligonucleotide
  Antisense strand to SEQ ID NO: 1145210
aucagucggcagcucaagg

SEQ ID NO: 1145212 - RNA, 19 nt, Artificial Sequence
  Description of Artificial Sequence: Synthetic oligonucleotide
  Sense strand starting at position 3088 of SEQ ID NO: 916292
ggcgguuaaacggauggaa

SEQ ID NO: 1145213 - RNA, 19 nt, Artificial Sequence
  Description of Artificial Sequence: Synthetic oligonucleotide
  Antisense strand to SEQ ID NO: 1145212
uuccauccguuuaaccgcc

SEQ ID NO: 1145214 - RNA, 19 nt, Artificial Sequence
  Description of Artificial Sequence: Synthetic oligonucleotide
  Sense strand starting at position 3257 of SEQ ID NO: 916292
cgaugacuucucuaacgaa

SEQ ID NO: 1145215 - RNA, 19 nt, Artificial Sequence
  Description of Artificial Sequence: Synthetic oligonucleotide
  Antisense strand to SEQ ID NO: 1145214
uucguuagagaagucaucg

SEQ ID NO: 1145216 - RNA, 19 nt, Artificial Sequence
  Description of Artificial Sequence: Synthetic oligonucleotide
  Sense strand starting at position 3324 of SEQ ID NO: 916292
ccuguauuccucgacuuga

SEQ ID NO: 1145217 - RNA, 19 nt, Artificial Sequence
  Description of Artificial Sequence: Synthetic oligonucleotide
  Antisense strand to SEQ ID NO: 1145216
ucaagucgaggaauacagg

SEQ ID NO: 1145218 - RNA, 19 nt, Artificial Sequence
  Description of Artificial Sequence: Synthetic oligonucleotide
  Sense strand starting at position 3429 of SEQ ID NO: 916292
agaagucgcuucuuuagga

SEQ ID NO: 1145219 - RNA, 19 nt, Artificial Sequence
  Description of Artificial Sequence: Synthetic oligonucleotide
  Antisense strand to SEQ ID NO: 1145218
uccuaaagaagcgacuucu

SEQ ID NO: 1145220 - RNA, 19 nt, Artificial Sequence
  Description of Artificial Sequence: Synthetic oligonucleotide
  Sense strand starting at position 3430 of SEQ ID NO: 916292
gaagucgcuucuuuaggaa

SEQ ID NO: 1145221 - RNA, 19 nt, Artificial Sequence
  Description of Artificial Sequence: Synthetic oligonucleotide
  Antisense strand to SEQ ID NO: 1145220
uuccuaaagaagcgacuuc

SEQ ID NO: 1145222 - RNA, 19 nt, Artificial Sequence
  Description of Artificial Sequence: Synthetic oligonucleotide
  Sense strand starting at position 3475 of SEQ ID NO: 916292
gagaaaucucuauguacug

SEQ ID NO: 1145223 - RNA, 19 nt, Artificial Sequence
  Description of Artificial Sequence: Synthetic oligonucleotide
  Antisense strand to SEQ ID NO: 1145222
caguacauagagauuucuc

SEQ ID NO: 1145224 - RNA, 19 nt, Artificial Sequence
  Description of Artificial Sequence: Synthetic oligonucleotide
  Sense strand starting at position 3476 of SEQ ID NO: 916292
agaaaucucuauguacugu

SEQ ID NO: 1145225 - RNA, 19 nt, Artificial Sequence
  Description of Artificial Sequence: Synthetic oligonucleotide
  Antisense strand to SEQ ID NO: 1145224
acaguacauagagauuucu

SEQ ID NO: 1145226 - RNA, 19 nt, Artificial Sequence
  Description of Artificial Sequence: Synthetic oligonucleotide
  Sense strand starting at position 3544 of SEQ ID NO: 916292
acugacaaauauguuugua

SEQ ID NO: 1145227 - RNA, 19 nt, Artificial Sequence
  Description of Artificial Sequence: Synthetic oligonucleotide
  Antisense strand to SEQ ID NO: 1145226
uacaaacauauuugucagu

SEQ ID NO: 1145228 - RNA, 19 nt, Artificial Sequence
  Description of Artificial Sequence: Synthetic oligonucleotide
  Sense strand starting at position 3547 of SEQ ID NO: 916292
gacaaauauguuuguaggu

SEQ ID NO: 1145229 - RNA, 19 nt, Artificial Sequence
  Description of Artificial Sequence: Synthetic oligonucleotide
  Antisense strand to SEQ ID NO: 1145228
accuacaaacauauuuguc

SEQ ID NO: 1145230 - RNA, 19 nt, Artificial Sequence
  Description of Artificial Sequence: Synthetic oligonucleotide
  Sense strand starting at position 3552 of SEQ ID NO: 916292
auauguuuguagguccaca

SEQ ID NO: 1145231 - RNA, 19 nt, Artificial Sequence
  Description of Artificial Sequence: Synthetic oligonucleotide
  Antisense strand to SEQ ID NO: 1145230
uguggaccuacaaacauau

SEQ ID NO: 1145232 - RNA, 19 nt, Artificial Sequence
  Description of Artificial Sequence: Synthetic oligonucleotide
  Sense strand starting at position 3599 of SEQ ID NO: 916292
gugucaauccuagggacac

SEQ ID NO: 1145233 - RNA, 19 nt, Artificial Sequence
  Description of Artificial Sequence: Synthetic oligonucleotide
  Antisense strand to SEQ ID NO: 1145232
gugucccuaggauugacac

SEQ ID NO: 1145234 - RNA, 19 nt, Artificial Sequence
  Description of Artificial Sequence: Synthetic oligonucleotide
  Sense strand starting at position 3619 of SEQ ID NO: 916292
guaggaucgaggcagauua

SEQ ID NO: 1145235 - RNA, 19 nt, Artificial Sequence
  Description of Artificial Sequence: Synthetic oligonucleotide
  Antisense strand to SEQ ID NO: 1145234
uaaucugccucgauccuac

SEQ ID NO: 1145236 - RNA, 19 nt, Artificial Sequence
  Description of Artificial Sequence: Synthetic oligonucleotide
  Sense strand starting at position 3792 of SEQ ID NO: 916292
ucucuuucucccgggaacu

SEQ ID NO: 1145237 - RNA, 19 nt, Artificial Sequence
  Description of Artificial Sequence: Synthetic oligonucleotide
  Antisense strand to SEQ ID NO: 1145236
aguucccgggagaaagaga

SEQ ID NO: 1145238 - RNA, 19 nt, Artificial Sequence
  Description of Artificial Sequence: Synthetic oligonucleotide
  Sense strand starting at position 3793 of SEQ ID NO: 916292
cucuuucucccgggaacuu

SEQ ID NO: 1145239 - RNA, 19 nt, Artificial Sequence
  Description of Artificial Sequence: Synthetic oligonucleotide
  Antisense strand to SEQ ID NO: 1145238
aaguucccgggagaaagag

SEQ ID NO: 1145240 - RNA, 19 nt, Artificial Sequence
  Description of Artificial Sequence: Synthetic oligonucleotide
  Sense strand starting at position 3794 of SEQ ID NO: 916292
ucuuucucccgggaacuuu

SEQ ID NO: 1145241 - RNA, 19 nt, Artificial Sequence
  Description of Artificial Sequence: Synthetic oligonucleotide
  Antisense strand to SEQ ID NO: 1145240
aaaguucccgggagaaaga

SEQ ID NO: 1145242 - RNA, 19 nt, Artificial Sequence
  Description of Artificial Sequence: Synthetic oligonucleotide
  Sense strand starting at position 3872 of SEQ ID NO: 916292
cuuugaggauaucugacuu

SEQ ID NO: 1145243 - RNA, 19 nt, Artificial Sequence
  Description of Artificial Sequence: Synthetic oligonucleotide
  Antisense strand to SEQ ID NO: 1145242
aagucagauauccucaaag

SEQ ID NO: 1145244 - RNA, 19 nt, Artificial Sequence
  Description of Artificial Sequence: Synthetic oligonucleotide
  Sense strand starting at position 46 of SEQ ID NO: 916293
cuuauauacugucaccagu

SEQ ID NO: 1145245 - RNA, 19 nt, Artificial Sequence
  Description of Artificial Sequence: Synthetic oligonucleotide
  Antisense strand to SEQ ID NO: 1145244
acuggugacaguauauaag

SEQ ID NO: 1145246 - RNA, 19 nt, Artificial Sequence
  Description of Artificial Sequence: Synthetic oligonucleotide
  Sense strand starting at position 179 of SEQ ID NO: 916293
ccguuuccuccacauucuu

SEQ ID NO: 1145247 - RNA, 19 nt, Artificial Sequence
  Description of Artificial Sequence: Synthetic oligonucleotide
  Antisense strand to SEQ ID NO: 1145246
aagaauguggaggaaacgg

SEQ ID NO: 1145248 - RNA, 19 nt, Artificial Sequence
  Description of Artificial Sequence: Synthetic oligonucleotide
  Sense strand starting at position 234 of SEQ ID NO: 916293
gcuccuacagcagaaauga

SEQ ID NO: 1145249 - RNA, 19 nt, Artificial Sequence
  Description of Artificial Sequence: Synthetic oligonucleotide
  Antisense strand to SEQ ID NO: 1145248
ucauuucugcuguaggagc

SEQ ID NO: 1145250 - RNA, 19 nt, Artificial Sequence
  Description of Artificial Sequence: Synthetic oligonucleotide
  Sense strand starting at position 281 of SEQ ID NO: 916293
ugggcuuucucucaaccaa

SEQ ID NO: 1145251 - RNA, 19 nt, Artificial Sequence
  Description of Artificial Sequence: Synthetic oligonucleotide
  Antisense strand to SEQ ID NO: 1145250
uugguugagagaaagccca

SEQ ID NO: 1145252 - RNA, 19 nt, Artificial Sequence
  Description of Artificial Sequence: Synthetic oligonucleotide
  Sense strand starting at position 652 of SEQ ID NO: 916293
caacaaaucgcguuucgca

SEQ ID NO: 1145253 - RNA, 19 nt, Artificial Sequence
  Description of Artificial Sequence: Synthetic oligonucleotide
  Antisense strand to SEQ ID NO: 1145252
ugcgaaacgcgauuuguug

SEQ ID NO: 1145254 - RNA, 19 nt, Artificial Sequence
  Description of Artificial Sequence: Synthetic oligonucleotide
  Sense strand starting at position 659 of SEQ ID NO: 916293
ucgcguuucgcaggaaaca

SEQ ID NO: 1145255 - RNA, 19 nt, Artificial Sequence
  Description of Artificial Sequence: Synthetic oligonucleotide
  Antisense strand to SEQ ID NO: 1145254
uguuuccugcgaaacgcga

SEQ ID NO: 1145256 - RNA, 19 nt, Artificial Sequence
  Description of Artificial Sequence: Synthetic oligonucleotide
  Sense strand starting at position 660 of SEQ ID NO: 916293
cgcguuucgcaggaaacaa

SEQ ID NO: 1145257 - RNA, 19 nt, Artificial Sequence
  Description of Artificial Sequence: Synthetic oligonucleotide
  Antisense strand to SEQ ID NO: 1145256
uuguuuccugcgaaacgcg

SEQ ID NO: 1145258 - RNA, 19 nt, Artificial Sequence
  Description of Artificial Sequence: Synthetic oligonucleotide
  Sense strand starting at position 1148 of SEQ ID NO: 916293
cuuaccuuucgcuucguua

SEQ ID NO: 1145259 - RNA, 19 nt, Artificial Sequence
  Description of Artificial Sequence: Synthetic oligonucleotide
  Antisense strand to SEQ ID NO: 1145258
uaacgaagcgaaagguaag

SEQ ID NO: 1145260 - RNA, 19 nt, Artificial Sequence
  Description of Artificial Sequence: Synthetic oligonucleotide
  Sense strand starting at position 1149 of SEQ ID NO: 916293
uuaccuuucgcuucguuau

SEQ ID NO: 1145261 - RNA, 19 nt, Artificial Sequence
  Description of Artificial Sequence: Synthetic oligonucleotide
  Antisense strand to SEQ ID NO: 1145260
auaacgaagcgaaagguaa

SEQ ID NO: 1145262 - RNA, 19 nt, Artificial Sequence
  Description of Artificial Sequence: Synthetic oligonucleotide
  Sense strand starting at position 2028 of SEQ ID NO: 916293
auaucagcuccguaauuau

SEQ ID NO: 1145263 - RNA, 19 nt, Artificial Sequence
  Description of Artificial Sequence: Synthetic oligonucleotide
  Antisense strand to SEQ ID NO: 1145262
auaauuacggagcugauau

SEQ ID NO: 1145264 - RNA, 19 nt, Artificial Sequence
  Description of Artificial Sequence: Synthetic oligonucleotide
  Sense strand starting at position 2036 of SEQ ID NO: 916293
uccguaauuauccgcgcau

SEQ ID NO: 1145265 - RNA, 19 nt, Artificial Sequence
  Description of Artificial Sequence: Synthetic oligonucleotide
  Antisense strand to SEQ ID NO: 1145264
augcgcggauaauuacgga

SEQ ID NO: 1145266 - RNA, 19 nt, Artificial Sequence
  Description of Artificial Sequence: Synthetic oligonucleotide
  Sense strand starting at position 2037 of SEQ ID NO: 916293
ccguaauuauccgcgcauu

SEQ ID NO: 1145267 - RNA, 19 nt, Artificial Sequence
  Description of Artificial Sequence: Synthetic oligonucleotide
  Antisense strand to SEQ ID NO: 1145266
aaugcgcggauaauuacgg

SEQ ID NO: 1145268 - RNA, 19 nt, Artificial Sequence
  Description of Artificial Sequence: Synthetic oligonucleotide
  Sense strand starting at position 2038 of SEQ ID NO: 916293
cguaauuauccgcgcauuc

SEQ ID NO: 1145269 - RNA, 19 nt, Artificial Sequence
  Description of Artificial Sequence: Synthetic oligonucleotide
  Antisense strand to SEQ ID NO: 1145268
gaaugcgcggauaauuacg

SEQ ID NO: 1145270 - RNA, 19 nt, Artificial Sequence
  Description of Artificial Sequence: Synthetic oligonucleotide
  Sense strand starting at position 2054 of SEQ ID NO: 916293
uucgguucucaccauguga

SEQ ID NO: 1145271 - RNA, 19 nt, Artificial Sequence
  Description of Artificial Sequence: Synthetic oligonucleotide
  Antisense strand to SEQ ID NO: 1145270
ucacauggugagaaccgaa

SEQ ID NO: 1145272 - RNA, 19 nt, Artificial Sequence
  Description of Artificial Sequence: Synthetic oligonucleotide
  Sense strand starting at position 2073 of SEQ ID NO: 916293
cggcuagaccaaugggauu

SEQ ID NO: 1145273 - RNA, 19 nt, Artificial Sequence
  Description of Artificial Sequence: Synthetic oligonucleotide
  Antisense strand to SEQ ID NO: 1145272
aaucccauuggucuagccg

SEQ ID NO: 1145274 - RNA, 19 nt, Artificial Sequence
  Description of Artificial Sequence: Synthetic oligonucleotide
  Sense strand starting at position 2311 of SEQ ID NO: 916293
ggguuuguuuauccaguaa

SEQ ID NO: 1145275 - RNA, 19 nt, Artificial Sequence
  Description of Artificial Sequence: Synthetic oligonucleotide
  Antisense strand to SEQ ID NO: 1145274
uuacuggauaaacaaaccc

SEQ ID NO: 1145276 - RNA, 19 nt, Artificial Sequence
  Description of Artificial Sequence: Synthetic oligonucleotide
  Sense strand starting at position 2315 of SEQ ID NO: 916293
uuguuuauccaguaaccag

SEQ ID NO: 1145277 - RNA, 19 nt, Artificial Sequence
  Description of Artificial Sequence: Synthetic oligonucleotide
  Antisense strand to SEQ ID NO: 1145276
cugguuacuggauaaacaa

SEQ ID NO: 1145278 - RNA, 19 nt, Artificial Sequence
  Description of Artificial Sequence: Synthetic oligonucleotide
  Sense strand starting at position 2612 of SEQ ID NO: 916293
ggacuaaaguuucugcucu

SEQ ID NO: 1145279 - RNA, 19 nt, Artificial Sequence
  Description of Artificial Sequence: Synthetic oligonucleotide
  Antisense strand to SEQ ID NO: 1145278
agagcagaaacuuuagucc

SEQ ID NO: 1145280 - RNA, 19 nt, Artificial Sequence
  Description of Artificial Sequence: Synthetic oligonucleotide
  Sense strand starting at position 2785 of SEQ ID NO: 916293
aaaggagguuccgaaugga

SEQ ID NO: 1145281 - RNA, 19 nt, Artificial Sequence
  Description of Artificial Sequence: Synthetic oligonucleotide
  Antisense strand to SEQ ID NO: 1145280
uccauucggaaccuccuuu

SEQ ID NO: 1145282 - RNA, 19 nt, Artificial Sequence
  Description of Artificial Sequence: Synthetic oligonucleotide
  Sense strand starting at position 3007 of SEQ ID NO: 916293
agggaauauuccgggaaag

SEQ ID NO: 1145283 - RNA, 19 nt, Artificial Sequence
  Description of Artificial Sequence: Synthetic oligonucleotide
  Antisense strand to SEQ ID NO: 1145282
cuuucccggaauauucccu

SEQ ID NO: 1145284 - RNA, 19 nt, Artificial Sequence
  Description of Artificial Sequence: Synthetic oligonucleotide
  Sense strand starting at position 3058 of SEQ ID NO: 916293
ggaggagucacguaucaca

SEQ ID NO: 1145285 - RNA, 19 nt, Artificial Sequence
  Description of Artificial Sequence: Synthetic oligonucleotide
  Antisense strand to SEQ ID NO: 1145284
ugugauacgugacuccucc

SEQ ID NO: 1145286 - RNA, 19 nt, Artificial Sequence
  Description of Artificial Sequence: Synthetic oligonucleotide
  Sense strand starting at position 3065 of SEQ ID NO: 916293
ucacguaucacacgggaaa

SEQ ID NO: 1145287 - RNA, 19 nt, Artificial Sequence
  Description of Artificial Sequence: Synthetic oligonucleotide
  Antisense strand to SEQ ID NO: 1145286
uuucccgugugauacguga

SEQ ID NO: 1145288 - RNA, 19 nt, Artificial Sequence
  Description of Artificial Sequence: Synthetic oligonucleotide
  Sense strand starting at position 3115 of SEQ ID NO: 916293
agagaagcguccuuuacag

SEQ ID NO: 1145289 - RNA, 19 nt, Artificial Sequence
  Description of Artificial Sequence: Synthetic oligonucleotide
  Antisense strand to SEQ ID NO: 1145288
cuguaaaggacgcuucucu

SEQ ID NO: 1145290 - RNA, 19 nt, Artificial Sequence
  Description of Artificial Sequence: Synthetic oligonucleotide
  Sense strand starting at position 3146 of SEQ ID NO: 916293
gggagcauguuugaaagaa

SEQ ID NO: 1145291 - RNA, 19 nt, Artificial Sequence
  Description of Artificial Sequence: Synthetic oligonucleotide
  Antisense strand to SEQ ID NO: 1145290
uucuuucaaacaugcuccc

SEQ ID NO: 1145292 - RNA, 19 nt, Artificial Sequence
  Description of Artificial Sequence: Synthetic oligonucleotide
  Sense strand starting at position 3443 of SEQ ID NO: 916293
gcuagaccguuucuaagga

SEQ ID NO: 1145293 - RNA, 19 nt, Artificial Sequence
  Description of Artificial Sequence: Synthetic oligonucleotide
  Antisense strand to SEQ ID NO: 1145292
uccuuagaaacggucuagc

SEQ ID NO: 1145294 - RNA, 19 nt, Artificial Sequence
  Description of Artificial Sequence: Synthetic oligonucleotide
  Sense strand starting at position 3572 of SEQ ID NO: 916293
ggaaauguggaguguauga

SEQ ID NO: 1145295 - RNA, 19 nt, Artificial Sequence
  Description of Artificial Sequence: Synthetic oligonucleotide
  Antisense strand to SEQ ID NO: 1145294
ucauacacuccacauuucc

SEQ ID NO: 1145296 - RNA, 19 nt, Artificial Sequence
  Description of Artificial Sequence: Synthetic oligonucleotide
  Sense strand starting at position 3574 of SEQ ID NO: 916293
aaauguggaguguaugauu

SEQ ID NO: 1145297 - RNA, 19 nt, Artificial Sequence
  Description of Artificial Sequence: Synthetic oligonucleotide
  Antisense strand to SEQ ID NO: 1145296
aaucauacacuccacauuu

SEQ ID NO: 1145298 - RNA, 19 nt, Artificial Sequence
  Description of Artificial Sequence: Synthetic oligonucleotide
  Sense strand starting at position 3579 of SEQ ID NO: 916293
uggaguguaugauuugcuu

SEQ ID NO: 1145299 - RNA, 19 nt, Artificial Sequence
  Description of Artificial Sequence: Synthetic oligonucleotide
  Antisense strand to SEQ ID NO: 1145298
aagcaaaucauacacucca

SEQ ID NO: 1145300 - RNA, 19 nt, Artificial Sequence
  Description of Artificial Sequence: Synthetic oligonucleotide
  Sense strand starting at position 3585 of SEQ ID NO: 916293
guaugauuugcuugcagga

SEQ ID NO: 1145301 - RNA, 19 nt, Artificial Sequence
  Description of Artificial Sequence: Synthetic oligonucleotide
  Antisense strand to SEQ ID NO: 1145300
uccugcaagcaaaucauac

SEQ ID NO: 1145302 - RNA, 19 nt, Artificial Sequence
  Description of Artificial Sequence: Synthetic oligonucleotide
  Sense strand starting at position 3789 of SEQ ID NO: 916293
uggccacucuguuuguauu

SEQ ID NO: 1145303 - RNA, 19 nt, Artificial Sequence
  Description of Artificial Sequence: Synthetic oligonucleotide
  Antisense strand to SEQ ID NO: 1145302
aauacaaacagaguggcca

SEQ ID NO: 1145304 - RNA, 19 nt, Artificial Sequence
  Description of Artificial Sequence: Synthetic oligonucleotide
  Sense strand starting at position 3790 of SEQ ID NO: 916293
ggccacucuguuuguauua

SEQ ID NO: 1145305 - RNA, 19 nt, Artificial Sequence
  Description of Artificial Sequence: Synthetic oligonucleotide
  Antisense strand to SEQ ID NO: 1145304
uaauacaaacagaguggcc

SEQ ID NO: 1145306 - RNA, 19 nt, Artificial Sequence
  Description of Artificial Sequence: Synthetic oligonucleotide
  Sense strand starting at position 3791 of SEQ ID NO: 916293
gccacucuguuuguauuau

SEQ ID NO: 1145307 - RNA, 19 nt, Artificial Sequence
  Description of Artificial Sequence: Synthetic oligonucleotide
  Antisense strand to SEQ ID NO: 1145306
auaauacaaacagaguggc

SEQ ID NO: 1145308 - RNA, 19 nt, Artificial Sequence
  Description of Artificial Sequence: Synthetic oligonucleotide
  Sense strand starting at position 3797 of SEQ ID NO: 916293
cuguuuguauuaucugcau

SEQ ID NO: 1145309 - RNA, 19 nt, Artificial Sequence
  Description of Artificial Sequence: Synthetic oligonucleotide
  Antisense strand to SEQ ID NO: 1145308
augcagauaauacaaacag

SEQ ID NO: 1145310 - RNA, 19 nt, Artificial Sequence
  Description of Artificial Sequence: Synthetic oligonucleotide
  Sense strand starting at position 3800 of SEQ ID NO: 916293
uuuguauuaucugcauuag

SEQ ID NO: 1145311 - RNA, 19 nt, Artificial Sequence
  Description of Artificial Sequence: Synthetic oligonucleotide
  Antisense strand to SEQ ID NO: 1145310
cuaaugcagauaauacaaa

SEQ ID NO: 1145312 - RNA, 19 nt, Artificial Sequence
  Description of Artificial Sequence: Synthetic oligonucleotide
  Sense strand starting at position 3801 of SEQ ID NO: 916293
uuguauuaucugcauuagu

SEQ ID NO: 1145313 - RNA, 19 nt, Artificial Sequence
  Description of Artificial Sequence: Synthetic oligonucleotide
  Antisense strand to SEQ ID NO: 1145312
acuaaugcagauaauacaa

SEQ ID NO: 1145314 - RNA, 19 nt, Artificial Sequence
  Description of Artificial Sequence: Synthetic oligonucleotide
  Sense strand starting at position 3826 of SEQ ID NO: 916293
ccaccaguuugaucgaaac

SEQ ID NO: 1145315 - RNA, 19 nt, Artificial Sequence
  Description of Artificial Sequence: Synthetic oligonucleotide
  Antisense strand to SEQ ID NO: 1145314
guuucgaucaaacuggugg

SEQ ID NO: 1145316 - RNA, 19 nt, Artificial Sequence
  Description of Artificial Sequence: Synthetic oligonucleotide
  Sense strand starting at position 3878 of SEQ ID NO: 916293
ccgucauauuuaucagcca

SEQ ID NO: 1145317 - RNA, 19 nt, Artificial Sequence
  Description of Artificial Sequence: Synthetic oligonucleotide
  Antisense strand to SEQ ID NO: 1145316
uggcugauaaauaugacgg

SEQ ID NO: 1145318 - RNA, 19 nt, Artificial Sequence
  Description of Artificial Sequence: Synthetic oligonucleotide
  Sense strand starting at position 3886 of SEQ ID NO: 916293
uuuaucagccagggauaaa

SEQ ID NO: 1145319 - RNA, 19 nt, Artificial Sequence
  Description of Artificial Sequence: Synthetic oligonucleotide
  Antisense strand to SEQ ID NO: 1145318
uuuaucccuggcugauaaa

SEQ ID NO: 1145320 - RNA, 19 nt, Artificial Sequence
  Description of Artificial Sequence: Synthetic oligonucleotide
  Sense strand starting at position 3905 of SEQ ID NO: 916293
aauuuaguaugggaacuga

SEQ ID NO: 1145321 - RNA, 19 nt, Artificial Sequence
  Description of Artificial Sequence: Synthetic oligonucleotide
  Antisense strand to SEQ ID NO: 1145320
ucaguucccauacuaaauu

SEQ ID NO: 1145322 - RNA, 19 nt, Artificial Sequence
  Description of Artificial Sequence: Synthetic oligonucleotide
  Sense strand starting at position 3929 of SEQ ID NO: 916293
ccucauuuaugggacgaug

SEQ ID NO: 1145323 - RNA, 19 nt, Artificial Sequence
  Description of Artificial Sequence: Synthetic oligonucleotide
  Antisense strand to SEQ ID NO: 1145322
caucgucccauaaaugagg

SEQ ID NO: 1145324 - RNA, 19 nt, Artificial Sequence
  Description of Artificial Sequence: Synthetic oligonucleotide
  Sense strand starting at position 297 of SEQ ID NO: 916294
cuccuagugguucggaaag

SEQ ID NO: 1145325 - RNA, 19 nt, Artificial Sequence
  Description of Artificial Sequence: Synthetic oligonucleotide
  Antisense strand to SEQ ID NO: 1145324
cuuuccgaaccacuaggag

SEQ ID NO: 1145326 - RNA, 19 nt, Artificial Sequence
  Description of Artificial Sequence: Synthetic oligonucleotide
  Sense strand starting at position 369 of SEQ ID NO: 916294
gugaaaucuggcgagagca

SEQ ID NO: 1145327 - RNA, 19 nt, Artificial Sequence
  Description of Artificial Sequence: Synthetic oligonucleotide
  Antisense strand to SEQ ID NO: 1145326
ugcucucgccagauuucac

SEQ ID NO: 1145328 - RNA, 19 nt, Artificial Sequence
  Description of Artificial Sequence: Synthetic oligonucleotide
  Sense strand starting at position 371 of SEQ ID NO: 916294
gaaaucuggcgagagcagu

SEQ ID NO: 1145329 - RNA, 19 nt, Artificial Sequence
  Description of Artificial Sequence: Synthetic oligonucleotide
  Antisense strand to SEQ ID NO: 1145328
acugcucucgccagauuuc

SEQ ID NO: 1145330 - RNA, 19 nt, Artificial Sequence
  Description of Artificial Sequence: Synthetic oligonucleotide
  Sense strand starting at position 615 of SEQ ID NO: 916294
uuggguuucugcucgagga

SEQ ID NO: 1145331 - RNA, 19 nt, Artificial Sequence
  Description of Artificial Sequence: Synthetic oligonucleotide
  Antisense strand to SEQ ID NO: 1145330
uccucgagcagaaacccaa

SEQ ID NO: 1145332 - RNA, 19 nt, Artificial Sequence
  Description of Artificial Sequence: Synthetic oligonucleotide
  Sense strand starting at position 1026 of SEQ ID NO: 916294
gagagagggcuuuguaggu

SEQ ID NO: 1145333 - RNA, 19 nt, Artificial Sequence
  Description of Artificial Sequence: Synthetic oligonucleotide
  Antisense strand to SEQ ID NO: 1145332
accuacaaagcccucucuc

SEQ ID NO: 1145334 - RNA, 19 nt, Artificial Sequence
  Description of Artificial Sequence: Synthetic oligonucleotide
  Sense strand starting at position 1030 of SEQ ID NO: 916294
gagggcuuuguagguuaua

SEQ ID NO: 1145335 - RNA, 19 nt, Artificial Sequence
  Description of Artificial Sequence: Synthetic oligonucleotide
  Antisense strand to SEQ ID NO: 1145334
uauaaccuacaaagcccuc

SEQ ID NO: 1145336 - RNA, 19 nt, Artificial Sequence
  Description of Artificial Sequence: Synthetic oligonucleotide
  Sense strand starting at position 1031 of SEQ ID NO: 916294
agggcuuuguagguuauaa

SEQ ID NO: 1145337 - RNA, 19 nt, Artificial Sequence
  Description of Artificial Sequence: Synthetic oligonucleotide
  Antisense strand to SEQ ID NO: 1145336
uuauaaccuacaaagcccu

SEQ ID NO: 1145338 - RNA, 19 nt, Artificial Sequence
  Description of Artificial Sequence: Synthetic oligonucleotide
  Sense strand starting at position 1033 of SEQ ID NO: 916294
ggcuuuguagguuauaaua

SEQ ID NO: 1145339 - RNA, 19 nt, Artificial Sequence
  Description of Artificial Sequence: Synthetic oligonucleotide
  Antisense strand to SEQ ID NO: 1145338
uauuauaaccuacaaagcc

SEQ ID NO: 1145340 - RNA, 19 nt, Artificial Sequence
  Description of Artificial Sequence: Synthetic oligonucleotide
  Sense strand starting at position 1996 of SEQ ID NO: 916294
gagcacgugauccaaagua

SEQ ID NO: 1145341 - RNA, 19 nt, Artificial Sequence
  Description of Artificial Sequence: Synthetic oligonucleotide
  Antisense strand to SEQ ID NO: 1145340
uacuuuggaucacgugcuc

SEQ ID NO: 1145342 - RNA, 19 nt, Artificial Sequence
  Description of Artificial Sequence: Synthetic oligonucleotide
  Sense strand starting at position 2001 of SEQ ID NO: 916294
cgugauccaaaguagauau

SEQ ID NO: 1145343 - RNA, 19 nt, Artificial Sequence
  Description of Artificial Sequence: Synthetic oligonucleotide
  Antisense strand to SEQ ID NO: 1145342
auaucuacuuuggaucacg

SEQ ID NO: 1145344 - RNA, 19 nt, Artificial Sequence
  Description of Artificial Sequence: Synthetic oligonucleotide
  Sense strand starting at position 2020 of SEQ ID NO: 916294
ugucauauaucaguucgga

SEQ ID NO: 1145345 - RNA, 19 nt, Artificial Sequence
  Description of Artificial Sequence: Synthetic oligonucleotide
  Antisense strand to SEQ ID NO: 1145344
uccgaacugauauaugaca

SEQ ID NO: 1145346 - RNA, 19 nt, Artificial Sequence
  Description of Artificial Sequence: Synthetic oligonucleotide
  Sense strand starting at position 2023 of SEQ ID NO: 916294
cauauaucaguucggagca

SEQ ID NO: 1145347 - RNA, 19 nt, Artificial Sequence
  Description of Artificial Sequence: Synthetic oligonucleotide
  Antisense strand to SEQ ID NO: 1145346
ugcuccgaacugauauaug

SEQ ID NO: 1145348 - RNA, 19 nt, Artificial Sequence
  Description of Artificial Sequence: Synthetic oligonucleotide
  Sense strand starting at position 2036 of SEQ ID NO: 916294
ggagcacuucgcagacgua

SEQ ID NO: 1145349 - RNA, 19 nt, Artificial Sequence
  Description of Artificial Sequence: Synthetic oligonucleotide
  Antisense strand to SEQ ID NO: 1145348
uacgucugcgaagugcucc

SEQ ID NO: 1145350 - RNA, 19 nt, Artificial Sequence
  Description of Artificial Sequence: Synthetic oligonucleotide
  Sense strand starting at position 2061 of SEQ ID NO: 916294
guucucucuuagguaagau

SEQ ID NO: 1145351 - RNA, 19 nt, Artificial Sequence
  Description of Artificial Sequence: Synthetic oligonucleotide
  Antisense strand to SEQ ID NO: 1145350
aucuuaccuaagagagaac

SEQ ID NO: 1145352 - RNA, 19 nt, Artificial Sequence
  Description of Artificial Sequence: Synthetic oligonucleotide
  Sense strand starting at position 2091 of SEQ ID NO: 916294
aggcgauugguuugcaaac

SEQ ID NO: 1145353 - RNA, 19 nt, Artificial Sequence
  Description of Artificial Sequence: Synthetic oligonucleotide
  Antisense strand to SEQ ID NO: 1145352
guuugcaaaccaaucgccu

SEQ ID NO: 1145354 - RNA, 19 nt, Artificial Sequence
  Description of Artificial Sequence: Synthetic oligonucleotide
  Sense strand starting at position 2092 of SEQ ID NO: 916294
ggcgauugguuugcaaaca

SEQ ID NO: 1145355 - RNA, 19 nt, Artificial Sequence
  Description of Artificial Sequence: Synthetic oligonucleotide
  Antisense strand to SEQ ID NO: 1145354
uguuugcaaaccaaucgcc

SEQ ID NO: 1145356 - RNA, 19 nt, Artificial Sequence
  Description of Artificial Sequence: Synthetic oligonucleotide
  Sense strand starting at position 2416 of SEQ ID NO: 916294
agaagugaauccuuucccu

SEQ ID NO: 1145357 - RNA, 19 nt, Artificial Sequence
  Description of Artificial Sequence: Synthetic oligonucleotide
  Antisense strand to SEQ ID NO: 1145356
agggaaaggauucacuucu

SEQ ID NO: 1145358 - RNA, 19 nt, Artificial Sequence
  Description of Artificial Sequence: Synthetic oligonucleotide
  Sense strand starting at position 2433 of SEQ ID NO: 916294
cuuaaaucucagggacucu

SEQ ID NO: 1145359 - RNA, 19 nt, Artificial Sequence
  Description of Artificial Sequence: Synthetic oligonucleotide
  Antisense strand to SEQ ID NO: 1145358
agagucccugagauuuaag

SEQ ID NO: 1145360 - RNA, 19 nt, Artificial Sequence
  Description of Artificial Sequence: Synthetic oligonucleotide
  Sense strand starting at position 2483 of SEQ ID NO: 916294
ucacaagaguuugaagaag

SEQ ID NO: 1145361 - RNA, 19 nt, Artificial Sequence
  Description of Artificial Sequence: Synthetic oligonucleotide
  Antisense strand to SEQ ID NO: 1145360
cuucuucaaacucuuguga

SEQ ID NO: 1145362 - RNA, 19 nt, Artificial Sequence
  Description of Artificial Sequence: Synthetic oligonucleotide
  Sense strand starting at position 2526 of SEQ ID NO: 916294
gggugucaagacuaccuuu

SEQ ID NO: 1145363 - RNA, 19 nt, Artificial Sequence
  Description of Artificial Sequence: Synthetic oligonucleotide
  Antisense strand to SEQ ID NO: 1145362
aaagguagucuugacaccc

SEQ ID NO: 1145364 - RNA, 19 nt, Artificial Sequence
  Description of Artificial Sequence: Synthetic oligonucleotide
  Sense strand starting at position 2566 of SEQ ID NO: 916294
ccggaagaguaucugaagu

SEQ ID NO: 1145365 - RNA, 19 nt, Artificial Sequence
  Description of Artificial Sequence: Synthetic oligonucleotide
  Antisense strand to SEQ ID NO: 1145364
acuucagauacucuuccgg

SEQ ID NO: 1145366 - RNA, 19 nt, Artificial Sequence
  Description of Artificial Sequence: Synthetic oligonucleotide
  Sense strand starting at position 2653 of SEQ ID NO: 916294
uggcuagggagucagauua

SEQ ID NO: 1145367 - RNA, 19 nt, Artificial Sequence
  Description of Artificial Sequence: Synthetic oligonucleotide
  Antisense strand to SEQ ID NO: 1145366
uaaucugacucccuagcca

SEQ ID NO: 1145368 - RNA, 19 nt, Artificial Sequence
  Description of Artificial Sequence: Synthetic oligonucleotide
  Sense strand starting at position 2660 of SEQ ID NO: 916294
ggagucagauuagucauaa

SEQ ID NO: 1145369 - RNA, 19 nt, Artificial Sequence
  Description of Artificial Sequence: Synthetic oligonucleotide
  Antisense strand to SEQ ID NO: 1145368
uuaugacuaaucugacucc

SEQ ID NO: 1145370 - RNA, 19 nt, Artificial Sequence
  Description of Artificial Sequence: Synthetic oligonucleotide
  Sense strand starting at position 2661 of SEQ ID NO: 916294
gagucagauuagucauaaa

SEQ ID NO: 1145371 - RNA, 19 nt, Artificial Sequence
  Description of Artificial Sequence: Synthetic oligonucleotide
  Antisense strand to SEQ ID NO: 1145370
uuuaugacuaaucugacuc

SEQ ID NO: 1145372 - RNA, 19 nt, Artificial Sequence
  Description of Artificial Sequence: Synthetic oligonucleotide
  Sense strand starting at position 2741 of SEQ ID NO: 916294
cucuaauguuguguuaaau

SEQ ID NO: 1145373 - RNA, 19 nt, Artificial Sequence
  Description of Artificial Sequence: Synthetic oligonucleotide
  Antisense strand to SEQ ID NO: 1145372
auuuaacacaacauuagag

SEQ ID NO: 1145374 - RNA, 19 nt, Artificial Sequence
  Description of Artificial Sequence: Synthetic oligonucleotide
  Sense strand starting at position 2880 of SEQ ID NO: 916294
gaaugagagccauguaucu

SEQ ID NO: 1145375 - RNA, 19 nt, Artificial Sequence
  Description of Artificial Sequence: Synthetic oligonucleotide
  Antisense strand to SEQ ID NO: 1145374
agauacauggcucucauuc

SEQ ID NO: 1145376 - RNA, 19 nt, Artificial Sequence
  Description of Artificial Sequence: Synthetic oligonucleotide
  Sense strand starting at position 2885 of SEQ ID NO: 916294
agagccauguaucuucuau

SEQ ID NO: 1145377 - RNA, 19 nt, Artificial Sequence
  Description of Artificial Sequence: Synthetic oligonucleotide
  Antisense strand to SEQ ID NO: 1145376
auagaagauacauggcucu

SEQ ID NO: 1145378 - RNA, 19 nt, Artificial Sequence
  Description of Artificial Sequence: Synthetic oligonucleotide
  Sense strand starting at position 2887 of SEQ ID NO: 916294
agccauguaucuucuaugu

SEQ ID NO: 1145379 - RNA, 19 nt, Artificial Sequence
  Description of Artificial Sequence: Synthetic oligonucleotide
  Antisense strand to SEQ ID NO: 1145378
acauagaagauacauggcu

SEQ ID NO: 1145380 - RNA, 19 nt, Artificial Sequence
  Description of Artificial Sequence: Synthetic oligonucleotide
  Sense strand starting at position 3004 of SEQ ID NO: 916294
ggguucuuauccuuggaug

SEQ ID NO: 1145381 - RNA, 19 nt, Artificial Sequence
  Description of Artificial Sequence: Synthetic oligonucleotide
  Antisense strand to SEQ ID NO: 1145380
cauccaaggauaagaaccc

SEQ ID NO: 1145382 - RNA, 19 nt, Artificial Sequence
  Description of Artificial Sequence: Synthetic oligonucleotide
  Sense strand starting at position 3005 of SEQ ID NO: 916294
gguucuuauccuuggauga

SEQ ID NO: 1145383 - RNA, 19 nt, Artificial Sequence
  Description of Artificial Sequence: Synthetic oligonucleotide
  Antisense strand to SEQ ID NO: 1145382
ucauccaaggauaagaacc

SEQ ID NO: 1145384 - RNA, 19 nt, Artificial Sequence
  Description of Artificial Sequence: Synthetic oligonucleotide
  Sense strand starting at position 3006 of SEQ ID NO: 916294
guucuuauccuuggaugau

SEQ ID NO: 1145385 - RNA, 19 nt, Artificial Sequence
  Description of Artificial Sequence: Synthetic oligonucleotide
  Antisense strand to SEQ ID NO: 1145384
aucauccaaggauaagaac

SEQ ID NO: 1145386 - RNA, 19 nt, Artificial Sequence
  Description of Artificial Sequence: Synthetic oligonucleotide
  Sense strand starting at position 3055 of SEQ ID NO: 916294
agguaugggucuccagaag

SEQ ID NO: 1145387 - RNA, 19 nt, Artificial Sequence
  Description of Artificial Sequence: Synthetic oligonucleotide
  Antisense strand to SEQ ID NO: 1145386
cuucuggagacccauaccu

SEQ ID NO: 1145388 - RNA, 19 nt, Artificial Sequence
  Description of Artificial Sequence: Synthetic oligonucleotide
  Sense strand starting at position 3264 of SEQ ID NO: 916294
gaaguaggcucagucauuc

SEQ ID NO: 1145389 - RNA, 19 nt, Artificial Sequence
  Description of Artificial Sequence: Synthetic oligonucleotide
  Antisense strand to SEQ ID NO: 1145388
gaaugacugagccuacuuc

SEQ ID NO: 1145390 - RNA, 19 nt, Artificial Sequence
  Description of Artificial Sequence: Synthetic oligonucleotide
  Sense strand starting at position 3444 of SEQ ID NO: 916294
acaauuuguuugggaagga

SEQ ID NO: 1145391 - RNA, 19 nt, Artificial Sequence
  Description of Artificial Sequence: Synthetic oligonucleotide
  Antisense strand to SEQ ID NO: 1145390
uccuucccaaacaaauugu

SEQ ID NO: 1145392 - RNA, 19 nt, Artificial Sequence
  Description of Artificial Sequence: Synthetic oligonucleotide
  Sense strand starting at position 3445 of SEQ ID NO: 916294
caauuuguuugggaaggag

SEQ ID NO: 1145393 - RNA, 19 nt, Artificial Sequence
  Description of Artificial Sequence: Synthetic oligonucleotide
  Antisense strand to SEQ ID NO: 1145392
cuccuucccaaacaaauug

SEQ ID NO: 1145394 - RNA, 19 nt, Artificial Sequence
  Description of Artificial Sequence: Synthetic oligonucleotide
  Sense strand starting at position 3588 of SEQ ID NO: 916294
auggauuugucuugaugaa

SEQ ID NO: 1145395 - RNA, 19 nt, Artificial Sequence
  Description of Artificial Sequence: Synthetic oligonucleotide
  Antisense strand to SEQ ID NO: 1145394
uucaucaagacaaauccau

SEQ ID NO: 1145396 - RNA, 19 nt, Artificial Sequence
  Description of Artificial Sequence: Synthetic oligonucleotide
  Sense strand starting at position 3656 of SEQ ID NO: 916294
auuguagcuugucuccaua

SEQ ID NO: 1145397 - RNA, 19 nt, Artificial Sequence
  Description of Artificial Sequence: Synthetic oligonucleotide
  Antisense strand to SEQ ID NO: 1145396
uauggagacaagcuacaau

SEQ ID NO: 1145398 - RNA, 19 nt, Artificial Sequence
  Description of Artificial Sequence: Synthetic oligonucleotide
  Sense strand starting at position 3659 of SEQ ID NO: 916294
guagcuugucuccauaugu

SEQ ID NO: 1145399 - RNA, 19 nt, Artificial Sequence
  Description of Artificial Sequence: Synthetic oligonucleotide
  Antisense strand to SEQ ID NO: 1145398
acauauggagacaagcuac

SEQ ID NO: 1145400 - RNA, 19 nt, Artificial Sequence
  Description of Artificial Sequence: Synthetic oligonucleotide
  Sense strand starting at position 3730 of SEQ ID NO: 916294
gcauuuaagugacaccuga

SEQ ID NO: 1145401 - RNA, 19 nt, Artificial Sequence
  Description of Artificial Sequence: Synthetic oligonucleotide
  Antisense strand to SEQ ID NO: 1145400
ucaggugucacuuaaaugc

SEQ ID NO: 1145402 - RNA, 19 nt, Artificial Sequence
  Description of Artificial Sequence: Synthetic oligonucleotide
  Sense strand starting at position 3853 of SEQ ID NO: 916294
uuuaguucuggucagaucu

SEQ ID NO: 1145403 - RNA, 19 nt, Artificial Sequence
  Description of Artificial Sequence: Synthetic oligonucleotide
  Antisense strand to SEQ ID NO: 1145402
agaucugaccagaacuaaa

SEQ ID NO: 1145404 - RNA, 19 nt, Artificial Sequence
  Description of Artificial Sequence: Synthetic oligonucleotide
  Sense strand starting at position 735 of SEQ ID NO: 916295
ugccgccagucaucugaau

SEQ ID NO: 1145405 - RNA, 19 nt, Artificial Sequence
  Description of Artificial Sequence: Synthetic oligonucleotide
  Antisense strand to SEQ ID NO: 1145404
auucagaugacuggcggca

SEQ ID NO: 1145406 - RNA, 19 nt, Artificial Sequence
  Description of Artificial Sequence: Synthetic oligonucleotide
  Sense strand starting at position 973 of SEQ ID NO: 916295
ccggaucaguuacaacaga

SEQ ID NO: 1145407 - RNA, 19 nt, Artificial Sequence
  Description of Artificial Sequence: Synthetic oligonucleotide
  Antisense strand to SEQ ID NO: 1145406
ucuguuguaacugauccgg

SEQ ID NO: 1145408 - RNA, 19 nt, Artificial Sequence
  Description of Artificial Sequence: Synthetic oligonucleotide
  Sense strand starting at position 984 of SEQ ID NO: 916295
acaacagauaugggcgaau

SEQ ID NO: 1145409 - RNA, 19 nt, Artificial Sequence
  Description of Artificial Sequence: Synthetic oligonucleotide
  Antisense strand to SEQ ID NO: 1145408
auucgcccauaucuguugu

SEQ ID NO: 1145410 - RNA, 19 nt, Artificial Sequence
  Description of Artificial Sequence: Synthetic oligonucleotide
  Sense strand starting at position 995 of SEQ ID NO: 916295
gggcgaauggcagaguaaa

SEQ ID NO: 1145411 - RNA, 19 nt, Artificial Sequence
  Description of Artificial Sequence: Synthetic oligonucleotide
  Antisense strand to SEQ ID NO: 1145410
uuuacucugccauucgccc

SEQ ID NO: 1145412 - RNA, 19 nt, Artificial Sequence
  Description of Artificial Sequence: Synthetic oligonucleotide
  Sense strand starting at position 1023 of SEQ ID NO: 916295
uggcauuucuuucgaaaug

SEQ ID NO: 1145413 - RNA, 19 nt, Artificial Sequence
  Description of Artificial Sequence: Synthetic oligonucleotide
  Antisense strand to SEQ ID NO: 1145412
cauuucgaaagaaaugcca

SEQ ID NO: 1145414 - RNA, 19 nt, Artificial Sequence
  Description of Artificial Sequence: Synthetic oligonucleotide
  Sense strand starting at position 1024 of SEQ ID NO: 916295
ggcauuucuuucgaaaugu

SEQ ID NO: 1145415 - RNA, 19 nt, Artificial Sequence
  Description of Artificial Sequence: Synthetic oligonucleotide
  Antisense strand to SEQ ID NO: 1145414
acauuucgaaagaaaugcc

SEQ ID NO: 1145416 - RNA, 19 nt, Artificial Sequence
  Description of Artificial Sequence: Synthetic oligonucleotide
  Sense strand starting at position 1343 of SEQ ID NO: 916295
gguaagaggucggguuuga

SEQ ID NO: 1145417 - RNA, 19 nt, Artificial Sequence
  Description of Artificial Sequence: Synthetic oligonucleotide
  Antisense strand to SEQ ID NO: 1145416
ucaaacccgaccucuuacc

SEQ ID NO: 1145418 - RNA, 19 nt, Artificial Sequence
  Description of Artificial Sequence: Synthetic oligonucleotide
  Sense strand starting at position 1356 of SEQ ID NO: 916295
guuugaauccgccgcuuga

SEQ ID NO: 1145419 - RNA, 19 nt, Artificial Sequence
  Description of Artificial Sequence: Synthetic oligonucleotide
  Antisense strand to SEQ ID NO: 1145418
ucaagcggcggauucaaac

SEQ ID NO: 1145420 - RNA, 19 nt, Artificial Sequence
  Description of Artificial Sequence: Synthetic oligonucleotide
  Sense strand starting at position 1985 of SEQ ID NO: 916295
agauuaugcucgcccauuu

SEQ ID NO: 1145421 - RNA, 19 nt, Artificial Sequence
  Description of Artificial Sequence: Synthetic oligonucleotide
  Antisense strand to SEQ ID NO: 1145420
aaaugggcgagcauaaucu

SEQ ID NO: 1145422 - RNA, 19 nt, Artificial Sequence
  Description of Artificial Sequence: Synthetic oligonucleotide
  Sense strand starting at position 2219 of SEQ ID NO: 916295
gcagguuuauuugcugaac

SEQ ID NO: 1145423 - RNA, 19 nt, Artificial Sequence
  Description of Artificial Sequence: Synthetic oligonucleotide
  Antisense strand to SEQ ID NO: 1145422
guucagcaaauaaaccugc

SEQ ID NO: 1145424 - RNA, 19 nt, Artificial Sequence
  Description of Artificial Sequence: Synthetic oligonucleotide
  Sense strand starting at position 2221 of SEQ ID NO: 916295
agguuuauuugcugaacug

SEQ ID NO: 1145425 - RNA, 19 nt, Artificial Sequence
  Description of Artificial Sequence: Synthetic oligonucleotide
  Antisense strand to SEQ ID NO: 1145424
caguucagcaaauaaaccu

SEQ ID NO: 1145426 - RNA, 19 nt, Artificial Sequence
  Description of Artificial Sequence: Synthetic oligonucleotide
  Sense strand starting at position 2260 of SEQ ID NO: 916295
uaaccuaacgcagagagua

SEQ ID NO: 1145427 - RNA, 19 nt, Artificial Sequence
  Description of Artificial Sequence: Synthetic oligonucleotide
  Antisense strand to SEQ ID NO: 1145426
uacucucugcguuagguua

SEQ ID NO: 1145428 - RNA, 19 nt, Artificial Sequence
  Description of Artificial Sequence: Synthetic oligonucleotide
  Sense strand starting at position 2475 of SEQ ID NO: 916295
acuauuagauauuguguca

SEQ ID NO: 1145429 - RNA, 19 nt, Artificial Sequence
  Description of Artificial Sequence: Synthetic oligonucleotide
  Antisense strand to SEQ ID NO: 1145428
ugacacaauaucuaauagu

SEQ ID NO: 1145430 - RNA, 19 nt, Artificial Sequence
  Description of Artificial Sequence: Synthetic oligonucleotide
  Sense strand starting at position 2482 of SEQ ID NO: 916295
gauauugugucauauaaag

SEQ ID NO: 1145431 - RNA, 19 nt, Artificial Sequence
  Description of Artificial Sequence: Synthetic oligonucleotide
  Antisense strand to SEQ ID NO: 1145430
cuuuauaugacacaauauc

SEQ ID NO: 1145432 - RNA, 19 nt, Artificial Sequence
  Description of Artificial Sequence: Synthetic oligonucleotide
  Sense strand starting at position 2501 of SEQ ID NO: 916295
uuuacugacuguuuaagga

SEQ ID NO: 1145433 - RNA, 19 nt, Artificial Sequence
  Description of Artificial Sequence: Synthetic oligonucleotide
  Antisense strand to SEQ ID NO: 1145432
uccuuaaacagucaguaaa

SEQ ID NO: 1145434 - RNA, 19 nt, Artificial Sequence
  Description of Artificial Sequence: Synthetic oligonucleotide
  Sense strand starting at position 2579 of SEQ ID NO: 916295
cagguuucccugccguuau

SEQ ID NO: 1145435 - RNA, 19 nt, Artificial Sequence
  Description of Artificial Sequence: Synthetic oligonucleotide
  Antisense strand to SEQ ID NO: 1145434
auaacggcagggaaaccug

SEQ ID NO: 1145436 - RNA, 19 nt, Artificial Sequence
  Description of Artificial Sequence: Synthetic oligonucleotide
  Sense strand starting at position 2636 of SEQ ID NO: 916295
agcucuuuauccucaggaa

SEQ ID NO: 1145437 - RNA, 19 nt, Artificial Sequence
  Description of Artificial Sequence: Synthetic oligonucleotide
  Antisense strand to SEQ ID NO: 1145436
uuccugaggauaaagagcu

SEQ ID NO: 1145438 - RNA, 19 nt, Artificial Sequence
  Description of Artificial Sequence: Synthetic oligonucleotide
  Sense strand starting at position 2637 of SEQ ID NO: 916295
gcucuuuauccucaggaau

SEQ ID NO: 1145439 - RNA, 19 nt, Artificial Sequence
  Description of Artificial Sequence: Synthetic oligonucleotide
  Antisense strand to SEQ ID NO: 1145438
auuccugaggauaaagagc

SEQ ID NO: 1145440 - RNA, 19 nt, Artificial Sequence
  Description of Artificial Sequence: Synthetic oligonucleotide
  Sense strand starting at position 2698 of SEQ ID NO: 916295
aauugauaaugccggguuu

SEQ ID NO: 1145441 - RNA, 19 nt, Artificial Sequence
  Description of Artificial Sequence: Synthetic oligonucleotide
  Antisense strand to SEQ ID NO: 1145440
aaacccggcauuaucaauu

SEQ ID NO: 1145442 - RNA, 19 nt, Artificial Sequence
  Description of Artificial Sequence: Synthetic oligonucleotide
  Sense strand starting at position 2912 of SEQ ID NO: 916295
uggagucuuugcaguggga

SEQ ID NO: 1145443 - RNA, 19 nt, Artificial Sequence
  Description of Artificial Sequence: Synthetic oligonucleotide
  Antisense strand to SEQ ID NO: 1145442
ucccacugcaaagacucca

SEQ ID NO: 1145444 - RNA, 19 nt, Artificial Sequence
  Description of Artificial Sequence: Synthetic oligonucleotide
  Sense strand starting at position 2914 of SEQ ID NO: 916295
gagucuuugcagugggaag

SEQ ID NO: 1145445 - RNA, 19 nt, Artificial Sequence
  Description of Artificial Sequence: Synthetic oligonucleotide
  Antisense strand to SEQ ID NO: 1145444
cuucccacugcaaagacuc

SEQ ID NO: 1145446 - RNA, 19 nt, Artificial Sequence
  Description of Artificial Sequence: Synthetic oligonucleotide
  Sense strand starting at position 2971 of SEQ ID NO: 916295
gccuaauucucacugcgga

SEQ ID NO: 1145447 - RNA, 19 nt, Artificial Sequence
  Description of Artificial Sequence: Synthetic oligonucleotide
  Antisense strand to SEQ ID NO: 1145446
uccgcagugagaauuaggc

SEQ ID NO: 1145448 - RNA, 19 nt, Artificial Sequence
  Description of Artificial Sequence: Synthetic oligonucleotide
  Sense strand starting at position 3079 of SEQ ID NO: 916295
gggcuaggauugagggaaa

SEQ ID NO: 1145449 - RNA, 19 nt, Artificial Sequence
  Description of Artificial Sequence: Synthetic oligonucleotide
  Antisense strand to SEQ ID NO: 1145448
uuucccucaauccuagccc

SEQ ID NO: 1145450 - RNA, 19 nt, Artificial Sequence
  Description of Artificial Sequence: Synthetic oligonucleotide
  Sense strand starting at position 3106 of SEQ ID NO: 916295
gaagaauuaucuuauuggg

SEQ ID NO: 1145451 - RNA, 19 nt, Artificial Sequence
  Description of Artificial Sequence: Synthetic oligonucleotide
  Antisense strand to SEQ ID NO: 1145450
cccaauaagauaauucuuc

SEQ ID NO: 1145452 - RNA, 19 nt, Artificial Sequence
  Description of Artificial Sequence: Synthetic oligonucleotide
  Sense strand starting at position 3187 of SEQ ID NO: 916295
gcuggccauuggugagaua

SEQ ID NO: 1145453 - RNA, 19 nt, Artificial Sequence
  Description of Artificial Sequence: Synthetic oligonucleotide
  Antisense strand to SEQ ID NO: 1145452
uaucucaccaauggccagc

SEQ ID NO: 1145454 - RNA, 19 nt, Artificial Sequence
  Description of Artificial Sequence: Synthetic oligonucleotide
  Sense strand starting at position 3188 of SEQ ID NO: 916295
cuggccauuggugagauaa

SEQ ID NO: 1145455 - RNA, 19 nt, Artificial Sequence
  Description of Artificial Sequence: Synthetic oligonucleotide
  Antisense strand to SEQ ID NO: 1145454
uuaucucaccaauggccag

SEQ ID NO: 1145456 - RNA, 19 nt, Artificial Sequence
  Description of Artificial Sequence: Synthetic oligonucleotide
  Sense strand starting at position 3190 of SEQ ID NO: 916295
ggccauuggugagauaauc

SEQ ID NO: 1145457 - RNA, 19 nt, Artificial Sequence
  Description of Artificial Sequence: Synthetic oligonucleotide
  Antisense strand to SEQ ID NO: 1145456
gauuaucucaccaauggcc

SEQ ID NO: 1145458 - RNA, 19 nt, Artificial Sequence
  Description of Artificial Sequence: Synthetic oligonucleotide
  Sense strand starting at position 3347 of SEQ ID NO: 916295
augugauuauuucgagcuu

SEQ ID NO: 1145459 - RNA, 19 nt, Artificial Sequence
  Description of Artificial Sequence: Synthetic oligonucleotide
  Antisense strand to SEQ ID NO: 1145458
aagcucgaaauaaucacau

SEQ ID NO: 1145460 - RNA, 19 nt, Artificial Sequence
  Description of Artificial Sequence: Synthetic oligonucleotide
  Sense strand starting at position 3380 of SEQ ID NO: 916295
gcuuaaguaauacaggguu

SEQ ID NO: 1145461 - RNA, 19 nt, Artificial Sequence
  Description of Artificial Sequence: Synthetic oligonucleotide
  Antisense strand to SEQ ID NO: 1145460
aacccuguauuacuuaagc

SEQ ID NO: 1145462 - RNA, 19 nt, Artificial Sequence
  Description of Artificial Sequence: Synthetic oligonucleotide
  Sense strand starting at position 3383 of SEQ ID NO: 916295
uaaguaauacaggguugga

SEQ ID NO: 1145463 - RNA, 19 nt, Artificial Sequence
  Description of Artificial Sequence: Synthetic oligonucleotide
  Antisense strand to SEQ ID NO: 1145462
uccaacccuguauuacuua

SEQ ID NO: 1145464 - RNA, 19 nt, Artificial Sequence
  Description of Artificial Sequence: Synthetic oligonucleotide
  Sense strand starting at position 3386 of SEQ ID NO: 916295
guaauacaggguuggauaa

SEQ ID NO: 1145465 - RNA, 19 nt, Artificial Sequence
  Description of Artificial Sequence: Synthetic oligonucleotide
  Antisense strand to SEQ ID NO: 1145464
uuauccaacccuguauuac

SEQ ID NO: 1145466 - RNA, 19 nt, Artificial Sequence
  Description of Artificial Sequence: Synthetic oligonucleotide
  Sense strand starting at position 3388 of SEQ ID NO: 916295
aauacaggguuggauaaau

SEQ ID NO: 1145467 - RNA, 19 nt, Artificial Sequence
  Description of Artificial Sequence: Synthetic oligonucleotide
  Antisense strand to SEQ ID NO: 1145466
auuuauccaacccuguauu

SEQ ID NO: 1145468 - RNA, 19 nt, Artificial Sequence
  Description of Artificial Sequence: Synthetic oligonucleotide
  Sense strand starting at position 3410 of SEQ ID NO: 916295
ucaguaaacgucuaaauac

SEQ ID NO: 1145469 - RNA, 19 nt, Artificial Sequence
  Description of Artificial Sequence: Synthetic oligonucleotide
  Antisense strand to SEQ ID NO: 1145468
guauuuagacguuuacuga

SEQ ID NO: 1145470 - RNA, 19 nt, Artificial Sequence
  Description of Artificial Sequence: Synthetic oligonucleotide
  Sense strand starting at position 3462 of SEQ ID NO: 916295
gacagagauucggagagaa

SEQ ID NO: 1145471 - RNA, 19 nt, Artificial Sequence
  Description of Artificial Sequence: Synthetic oligonucleotide
  Antisense strand to SEQ ID NO: 1145470
uucucuccgaaucucuguc

SEQ ID NO: 1145472 - RNA, 19 nt, Artificial Sequence
  Description of Artificial Sequence: Synthetic oligonucleotide
  Sense strand starting at position 3488 of SEQ ID NO: 916295
gaaacccauuuaggugaaa

SEQ ID NO: 1145473 - RNA, 19 nt, Artificial Sequence
  Description of Artificial Sequence: Synthetic oligonucleotide
  Antisense strand to SEQ ID NO: 1145472
uuucaccuaaauggguuuc

SEQ ID NO: 1145474 - RNA, 19 nt, Artificial Sequence
  Description of Artificial Sequence: Synthetic oligonucleotide
  Sense strand starting at position 3506 of SEQ ID NO: 916295
aguuaaauaucagagaaag

SEQ ID NO: 1145475 - RNA, 19 nt, Artificial Sequence
  Description of Artificial Sequence: Synthetic oligonucleotide
  Antisense strand to SEQ ID NO: 1145474
cuuucucugauauuuaacu

SEQ ID NO: 1145476 - RNA, 19 nt, Artificial Sequence
  Description of Artificial Sequence: Synthetic oligonucleotide
  Sense strand starting at position 3518 of SEQ ID NO: 916295
gagaaagccugagaauaag

SEQ ID NO: 1145477 - RNA, 19 nt, Artificial Sequence
  Description of Artificial Sequence: Synthetic oligonucleotide
  Antisense strand to SEQ ID NO: 1145476
cuuauucucaggcuuucuc

SEQ ID NO: 1145478 - RNA, 19 nt, Artificial Sequence
  Description of Artificial Sequence: Synthetic oligonucleotide
  Sense strand starting at position 3683 of SEQ ID NO: 916295
gcugcucacuccgacagaa

SEQ ID NO: 1145479 - RNA, 19 nt, Artificial Sequence
  Description of Artificial Sequence: Synthetic oligonucleotide
  Antisense strand to SEQ ID NO: 1145478
uucugucggagugagcagc

SEQ ID NO: 1145480 - RNA, 19 nt, Artificial Sequence
  Description of Artificial Sequence: Synthetic oligonucleotide
  Sense strand starting at position 3685 of SEQ ID NO: 916295
ugcucacuccgacagaaau

SEQ ID NO: 1145481 - RNA, 19 nt, Artificial Sequence
  Description of Artificial Sequence: Synthetic oligonucleotide
  Antisense strand to SEQ ID NO: 1145480
auuucugucggagugagca

SEQ ID NO: 1145482 - RNA, 19 nt, Artificial Sequence
  Description of Artificial Sequence: Synthetic oligonucleotide
  Sense strand starting at position 3862 of SEQ ID NO: 916295
ggcgcacuugucggaacuu

SEQ ID NO: 1145483 - RNA, 19 nt, Artificial Sequence
  Description of Artificial Sequence: Synthetic oligonucleotide
  Antisense strand to SEQ ID NO: 1145482
aaguuccgacaagugcgcc

SEQ ID NO: 1145484 - RNA, 19 nt, Artificial Sequence
  Description of Artificial Sequence: Synthetic oligonucleotide
  Sense strand starting at position 19 of SEQ ID NO: 916296
caaagaccucuguagguau

SEQ ID NO: 1145485 - RNA, 19 nt, Artificial Sequence
  Description of Artificial Sequence: Synthetic oligonucleotide
  Antisense strand to SEQ ID NO: 1145484
auaccuacagaggucuuug

SEQ ID NO: 1145486 - RNA, 19 nt, Artificial Sequence
  Description of Artificial Sequence: Synthetic oligonucleotide
  Sense strand starting at position 190 of SEQ ID NO: 916296
caaggagagcggugggauu

SEQ ID NO: 1145487 - RNA, 19 nt, Artificial Sequence
  Description of Artificial Sequence: Synthetic oligonucleotide
  Antisense strand to SEQ ID NO: 1145486
aaucccaccgcucuccuug

SEQ ID NO: 1145488 - RNA, 19 nt, Artificial Sequence
  Description of Artificial Sequence: Synthetic oligonucleotide
  Sense strand starting at position 433 of SEQ ID NO: 916296
gggaguuggcaguggaaau

SEQ ID NO: 1145489 - RNA, 19 nt, Artificial Sequence
  Description of Artificial Sequence: Synthetic oligonucleotide
  Antisense strand to SEQ ID NO: 1145488
auuuccacugccaacuccc

SEQ ID NO: 1145490 - RNA, 19 nt, Artificial Sequence
  Description of Artificial Sequence: Synthetic oligonucleotide
  Sense strand starting at position 443 of SEQ ID NO: 916296
aguggaaaugucuauaggu

SEQ ID NO: 1145491 - RNA, 19 nt, Artificial Sequence
  Description of Artificial Sequence: Synthetic oligonucleotide
  Antisense strand to SEQ ID NO: 1145490
accuauagacauuuccacu

SEQ ID NO: 1145492 - RNA, 19 nt, Artificial Sequence
  Description of Artificial Sequence: Synthetic oligonucleotide
  Sense strand starting at position 445 of SEQ ID NO: 916296
uggaaaugucuauagguuu

SEQ ID NO: 1145493 - RNA, 19 nt, Artificial Sequence
  Description of Artificial Sequence: Synthetic oligonucleotide
  Antisense strand to SEQ ID NO: 1145492
aaaccuauagacauuucca

SEQ ID NO: 1145494 - RNA, 19 nt, Artificial Sequence
  Description of Artificial Sequence: Synthetic oligonucleotide
  Sense strand starting at position 457 of SEQ ID NO: 916296
uagguuugagcucaauaua

SEQ ID NO: 1145495 - RNA, 19 nt, Artificial Sequence
  Description of Artificial Sequence: Synthetic oligonucleotide
  Antisense strand to SEQ ID NO: 1145494
uauauugagcucaaaccua

SEQ ID NO: 1145496 - RNA, 19 nt, Artificial Sequence
  Description of Artificial Sequence: Synthetic oligonucleotide
  Sense strand starting at position 460 of SEQ ID NO: 916296
guuugagcucaauauacca

SEQ ID NO: 1145497 - RNA, 19 nt, Artificial Sequence
  Description of Artificial Sequence: Synthetic oligonucleotide
  Antisense strand to SEQ ID NO: 1145496
ugguauauugagcucaaac

SEQ ID NO: 1145498 - RNA, 19 nt, Artificial Sequence
  Description of Artificial Sequence: Synthetic oligonucleotide
  Sense strand starting at position 574 of SEQ ID NO: 916296
caggaaauucguggccaga

SEQ ID NO: 1145499 - RNA, 19 nt, Artificial Sequence
  Description of Artificial Sequence: Synthetic oligonucleotide
  Antisense strand to SEQ ID NO: 1145498
ucuggccacgaauuuccug

SEQ ID NO: 1145500 - RNA, 19 nt, Artificial Sequence
  Description of Artificial Sequence: Synthetic oligonucleotide
  Sense strand starting at position 576 of SEQ ID NO: 916296
ggaaauucguggccagauu

SEQ ID NO: 1145501 - RNA, 19 nt, Artificial Sequence
  Description of Artificial Sequence: Synthetic oligonucleotide
  Antisense strand to SEQ ID NO: 1145500
aaucuggccacgaauuucc

SEQ ID NO: 1145502 - RNA, 19 nt, Artificial Sequence
  Description of Artificial Sequence: Synthetic oligonucleotide
  Sense strand starting at position 677 of SEQ ID NO: 916296
ugucuagugccugaacgau

SEQ ID NO: 1145503 - RNA, 19 nt, Artificial Sequence
  Description of Artificial Sequence: Synthetic oligonucleotide
  Antisense strand to SEQ ID NO: 1145502
aucguucaggcacuagaca

SEQ ID NO: 1145504 - RNA, 19 nt, Artificial Sequence
  Description of Artificial Sequence: Synthetic oligonucleotide
  Sense strand starting at position 773 of SEQ ID NO: 916296
ccuggauuccaaggcacua

SEQ ID NO: 1145505 - RNA, 19 nt, Artificial Sequence
  Description of Artificial Sequence: Synthetic oligonucleotide
  Antisense strand to SEQ ID NO: 1145504
uagugccuuggaauccagg

SEQ ID NO: 1145506 - RNA, 19 nt, Artificial Sequence
  Description of Artificial Sequence: Synthetic oligonucleotide
  Sense strand starting at position 2345 of SEQ ID NO: 916296
ggaggagagcgcuguaacu

SEQ ID NO: 1145507 - RNA, 19 nt, Artificial Sequence
  Description of Artificial Sequence: Synthetic oligonucleotide
  Antisense strand to SEQ ID NO: 1145506
aguuacagcgcucuccucc

SEQ ID NO: 1145508 - RNA, 19 nt, Artificial Sequence
  Description of Artificial Sequence: Synthetic oligonucleotide
  Sense strand starting at position 2424 of SEQ ID NO: 916296
gaucacugugacugcugaa

SEQ ID NO: 1145509 - RNA, 19 nt, Artificial Sequence
  Description of Artificial Sequence: Synthetic oligonucleotide
  Antisense strand to SEQ ID NO: 1145508
uucagcagucacagugauc

SEQ ID NO: 1145510 - RNA, 19 nt, Artificial Sequence
  Description of Artificial Sequence: Synthetic oligonucleotide
  Sense strand starting at position 2436 of SEQ ID NO: 916296
ugcugaagucucuggauug

SEQ ID NO: 1145511 - RNA, 19 nt, Artificial Sequence
  Description of Artificial Sequence: Synthetic oligonucleotide
  Antisense strand to SEQ ID NO: 1145510
caauccagagacuucagca

SEQ ID NO: 1145512 - RNA, 19 nt, Artificial Sequence
  Description of Artificial Sequence: Synthetic oligonucleotide
  Sense strand starting at position 2583 of SEQ ID NO: 916296
ugcguagcgagccuuugau

SEQ ID NO: 1145513 - RNA, 19 nt, Artificial Sequence
  Description of Artificial Sequence: Synthetic oligonucleotide
  Antisense strand to SEQ ID NO: 1145512
aucaaaggcucgcuacgca

SEQ ID NO: 1145514 - RNA, 19 nt, Artificial Sequence
  Description of Artificial Sequence: Synthetic oligonucleotide
  Sense strand starting at position 2603 of SEQ ID NO: 916296
ccgggauuguguuuccauu

SEQ ID NO: 1145515 - RNA, 19 nt, Artificial Sequence
  Description of Artificial Sequence: Synthetic oligonucleotide
  Antisense strand to SEQ ID NO: 1145514
aauggaaacacaaucccgg

SEQ ID NO: 1145516 - RNA, 19 nt, Artificial Sequence
  Description of Artificial Sequence: Synthetic oligonucleotide
  Sense strand starting at position 2675 of SEQ ID NO: 916296
gcuuuaccucgcuggauuu

SEQ ID NO: 1145517 - RNA, 19 nt, Artificial Sequence
  Description of Artificial Sequence: Synthetic oligonucleotide
  Antisense strand to SEQ ID NO: 1145516
aaauccagcgagguaaagc

SEQ ID NO: 1145518 - RNA, 19 nt, Artificial Sequence
  Description of Artificial Sequence: Synthetic oligonucleotide
  Sense strand starting at position 2756 of SEQ ID NO: 916296
ucgagaggcaauggaauau

SEQ ID NO: 1145519 - RNA, 19 nt, Artificial Sequence
  Description of Artificial Sequence: Synthetic oligonucleotide
  Antisense strand to SEQ ID NO: 1145518
auauuccauugccucucga

SEQ ID NO: 1145520 - RNA, 19 nt, Artificial Sequence
  Description of Artificial Sequence: Synthetic oligonucleotide
  Sense strand starting at position 2765 of SEQ ID NO: 916296
aauggaauauacucggcaa

SEQ ID NO: 1145521 - RNA, 19 nt, Artificial Sequence
  Description of Artificial Sequence: Synthetic oligonucleotide
  Antisense strand to SEQ ID NO: 1145520
uugccgaguauauuccauu

SEQ ID NO: 1145522 - RNA, 19 nt, Artificial Sequence
  Description of Artificial Sequence: Synthetic oligonucleotide
  Sense strand starting at position 2767 of SEQ ID NO: 916296
uggaauauacucggcaaua

SEQ ID NO: 1145523 - RNA, 19 nt, Artificial Sequence
  Description of Artificial Sequence: Synthetic oligonucleotide
  Antisense strand to SEQ ID NO: 1145522
uauugccgaguauauucca

SEQ ID NO: 1145524 - RNA, 19 nt, Artificial Sequence
  Description of Artificial Sequence: Synthetic oligonucleotide
  Sense strand starting at position 2768 of SEQ ID NO: 916296
ggaauauacucggcaauaa

SEQ ID NO: 1145525 - RNA, 19 nt, Artificial Sequence
  Description of Artificial Sequence: Synthetic oligonucleotide
  Antisense strand to SEQ ID NO: 1145524
uuauugccgaguauauucc

SEQ ID NO: 1145526 - RNA, 19 nt, Artificial Sequence
  Description of Artificial Sequence: Synthetic oligonucleotide
  Sense strand starting at position 2777 of SEQ ID NO: 916296
ucggcaauaaauggagaaa

SEQ ID NO: 1145527 - RNA, 19 nt, Artificial Sequence
  Description of Artificial Sequence: Synthetic oligonucleotide
  Antisense strand to SEQ ID NO: 1145526
uuucuccauuuauugccga

SEQ ID NO: 1145528 - RNA, 19 nt, Artificial Sequence
  Description of Artificial Sequence: Synthetic oligonucleotide
  Sense strand starting at position 2945 of SEQ ID NO: 916296
aggagagcgcgcuuucuau

SEQ ID NO: 1145529 - RNA, 19 nt, Artificial Sequence
  Description of Artificial Sequence: Synthetic oligonucleotide
  Antisense strand to SEQ ID NO: 1145528
auagaaagcgcgcucuccu

SEQ ID NO: 1145530 - RNA, 19 nt, Artificial Sequence
  Description of Artificial Sequence: Synthetic oligonucleotide
  Sense strand starting at position 2954 of SEQ ID NO: 916296
cgcuuucuauagguauaca

SEQ ID NO: 1145531 - RNA, 19 nt, Artificial Sequence
  Description of Artificial Sequence: Synthetic oligonucleotide
  Antisense strand to SEQ ID NO: 1145530
uguauaccuauagaaagcg

SEQ ID NO: 1145532 - RNA, 19 nt, Artificial Sequence
  Description of Artificial Sequence: Synthetic oligonucleotide
  Sense strand starting at position 3081 of SEQ ID NO: 916296
uggguuaagccacaugaca

SEQ ID NO: 1145533 - RNA, 19 nt, Artificial Sequence
  Description of Artificial Sequence: Synthetic oligonucleotide
  Antisense strand to SEQ ID NO: 1145532
ugucauguggcuuaaccca

SEQ ID NO: 1145534 - RNA, 19 nt, Artificial Sequence
  Description of Artificial Sequence: Synthetic oligonucleotide
  Sense strand starting at position 3110 of SEQ ID NO: 916296
uuugaauacccgcaaugga

SEQ ID NO: 1145535 - RNA, 19 nt, Artificial Sequence
  Description of Artificial Sequence: Synthetic oligonucleotide
  Antisense strand to SEQ ID NO: 1145534
uccauugcggguauucaaa

SEQ ID NO: 1145536 - RNA, 19 nt, Artificial Sequence
  Description of Artificial Sequence: Synthetic oligonucleotide
  Sense strand starting at position 3306 of SEQ ID NO: 916296
gggagcaucuccguggaau

SEQ ID NO: 1145537 - RNA, 19 nt, Artificial Sequence
  Description of Artificial Sequence: Synthetic oligonucleotide
  Antisense strand to SEQ ID NO: 1145536
auuccacggagaugcuccc

SEQ ID NO: 1145538 - RNA, 19 nt, Artificial Sequence
  Description of Artificial Sequence: Synthetic oligonucleotide
  Sense strand starting at position 3307 of SEQ ID NO: 916296
ggagcaucuccguggaauu

SEQ ID NO: 1145539 - RNA, 19 nt, Artificial Sequence
  Description of Artificial Sequence: Synthetic oligonucleotide
  Antisense strand to SEQ ID NO: 1145538
aauuccacggagaugcucc

SEQ ID NO: 1145540 - RNA, 19 nt, Artificial Sequence
  Description of Artificial Sequence: Synthetic oligonucleotide
  Sense strand starting at position 3308 of SEQ ID NO: 916296
gagcaucuccguggaauug

SEQ ID NO: 1145541 - RNA, 19 nt, Artificial Sequence
  Description of Artificial Sequence: Synthetic oligonucleotide
  Antisense strand to SEQ ID NO: 1145540
caauuccacggagaugcuc

SEQ ID NO: 1145542 - RNA, 19 nt, Artificial Sequence
  Description of Artificial Sequence: Synthetic oligonucleotide
  Sense strand starting at position 3309 of SEQ ID NO: 916296
agcaucuccguggaauuga

SEQ ID NO: 1145543 - RNA, 19 nt, Artificial Sequence
  Description of Artificial Sequence: Synthetic oligonucleotide
  Antisense strand to SEQ ID NO: 1145542
ucaauuccacggagaugcu

SEQ ID NO: 1145544 - RNA, 19 nt, Artificial Sequence
  Description of Artificial Sequence: Synthetic oligonucleotide
  Sense strand starting at position 3318 of SEQ ID NO: 916296
guggaauugagucaaguuc

SEQ ID NO: 1145545 - RNA, 19 nt, Artificial Sequence
  Description of Artificial Sequence: Synthetic oligonucleotide
  Antisense strand to SEQ ID NO: 1145544
gaacuugacucaauuccac

SEQ ID NO: 1145546 - RNA, 19 nt, Artificial Sequence
  Description of Artificial Sequence: Synthetic oligonucleotide
  Sense strand starting at position 3538 of SEQ ID NO: 916296
auggacaggucugcagaaa

SEQ ID NO: 1145547 - RNA, 19 nt, Artificial Sequence
  Description of Artificial Sequence: Synthetic oligonucleotide
  Antisense strand to SEQ ID NO: 1145546
uuucugcagaccuguccau

SEQ ID NO: 1145548 - RNA, 19 nt, Artificial Sequence
  Description of Artificial Sequence: Synthetic oligonucleotide
  Sense strand starting at position 3618 of SEQ ID NO: 916296
cccggacaucggugaguua

SEQ ID NO: 1145549 - RNA, 19 nt, Artificial Sequence
  Description of Artificial Sequence: Synthetic oligonucleotide
  Antisense strand to SEQ ID NO: 1145548
uaacucaccgauguccggg

SEQ ID NO: 1145550 - RNA, 19 nt, Artificial Sequence
  Description of Artificial Sequence: Synthetic oligonucleotide
  Sense strand starting at position 3621 of SEQ ID NO: 916296
ggacaucggugaguuagga

SEQ ID NO: 1145551 - RNA, 19 nt, Artificial Sequence
  Description of Artificial Sequence: Synthetic oligonucleotide
  Antisense strand to SEQ ID NO: 1145550
uccuaacucaccgaugucc

SEQ ID NO: 1145552 - RNA, 19 nt, Artificial Sequence
  Description of Artificial Sequence: Synthetic oligonucleotide
  Sense strand starting at position 3643 of SEQ ID NO: 916296
uaauucuuaucugcgugau

SEQ ID NO: 1145553 - RNA, 19 nt, Artificial Sequence
  Description of Artificial Sequence: Synthetic oligonucleotide
  Antisense strand to SEQ ID NO: 1145552
aucacgcagauaagaauua

SEQ ID NO: 1145554 - RNA, 19 nt, Artificial Sequence
  Description of Artificial Sequence: Synthetic oligonucleotide
  Sense strand starting at position 3644 of SEQ ID NO: 916296
aauucuuaucugcgugauc

SEQ ID NO: 1145555 - RNA, 19 nt, Artificial Sequence
  Description of Artificial Sequence: Synthetic oligonucleotide
  Antisense strand to SEQ ID NO: 1145554
gaucacgcagauaagaauu

SEQ ID NO: 1145556 - RNA, 19 nt, Artificial Sequence
  Description of Artificial Sequence: Synthetic oligonucleotide
  Sense strand starting at position 3808 of SEQ ID NO: 916296
agaugagcccaguggaaga

SEQ ID NO: 1145557 - RNA, 19 nt, Artificial Sequence
  Description of Artificial Sequence: Synthetic oligonucleotide
  Antisense strand to SEQ ID NO: 1145556
ucuuccacugggcucaucu

SEQ ID NO: 1145558 - RNA, 19 nt, Artificial Sequence
  Description of Artificial Sequence: Synthetic oligonucleotide
  Sense strand starting at position 3853 of SEQ ID NO: 916296
cuaggaaacugcuuauccu

SEQ ID NO: 1145559 - RNA, 19 nt, Artificial Sequence
  Description of Artificial Sequence: Synthetic oligonucleotide
  Antisense strand to SEQ ID NO: 1145558
aggauaagcaguuuccuag

SEQ ID NO: 1145560 - RNA, 19 nt, Artificial Sequence
  Description of Artificial Sequence: Synthetic oligonucleotide
  Sense strand starting at position 3926 of SEQ ID NO: 916296
agucuagacuggguuguau

SEQ ID NO: 1145561 - RNA, 19 nt, Artificial Sequence
  Description of Artificial Sequence: Synthetic oligonucleotide
  Antisense strand to SEQ ID NO: 1145560
auacaacccagucuagacu

SEQ ID NO: 1145562 - RNA, 19 nt, Artificial Sequence
  Description of Artificial Sequence: Synthetic oligonucleotide
  Sense strand starting at position 3928 of SEQ ID NO: 916296
ucuagacuggguuguauga

SEQ ID NO: 1145563 - RNA, 19 nt, Artificial Sequence
  Description of Artificial Sequence: Synthetic oligonucleotide
  Antisense strand to SEQ ID NO: 1145562
ucauacaacccagucuaga

SEQ ID NO: 1145564 - RNA, 19 nt, Artificial Sequence
  Description of Artificial Sequence: Synthetic oligonucleotide
  Sense strand starting at position 19 of SEQ ID NO: 916297
ggugucuuggcuuagauua

SEQ ID NO: 1145565 - RNA, 19 nt, Artificial Sequence
  Description of Artificial Sequence: Synthetic oligonucleotide
  Antisense strand to SEQ ID NO: 1145564
uaaucuaagccaagacacc

SEQ ID NO: 1145566 - RNA, 19 nt, Artificial Sequence
  Description of Artificial Sequence: Synthetic oligonucleotide
  Sense strand starting at position 21 of SEQ ID NO: 916297
ugucuuggcuuagauuaag

SEQ ID NO: 1145567 - RNA, 19 nt, Artificial Sequence
  Description of Artificial Sequence: Synthetic oligonucleotide
  Antisense strand to SEQ ID NO: 1145566
cuuaaucuaagccaagaca

SEQ ID NO: 1145568 - RNA, 19 nt, Artificial Sequence
  Description of Artificial Sequence: Synthetic oligonucleotide
  Sense strand starting at position 24 of SEQ ID NO: 916297
cuuggcuuagauuaaggua

SEQ ID NO: 1145569 - RNA, 19 nt, Artificial Sequence
  Description of Artificial Sequence: Synthetic oligonucleotide
  Antisense strand to SEQ ID NO: 1145568
uaccuuaaucuaagccaag

SEQ ID NO: 1145570 - RNA, 19 nt, Artificial Sequence
  Description of Artificial Sequence: Synthetic oligonucleotide
  Sense strand starting at position 63 of SEQ ID NO: 916297
ucggaccucgucuggaaua

SEQ ID NO: 1145571 - RNA, 19 nt, Artificial Sequence
  Description of Artificial Sequence: Synthetic oligonucleotide
  Antisense strand to SEQ ID NO: 1145570
uauuccagacgagguccga

SEQ ID NO: 1145572 - RNA, 19 nt, Artificial Sequence
  Description of Artificial Sequence: Synthetic oligonucleotide
  Sense strand starting at position 65 of SEQ ID NO: 916297
ggaccucgucuggaauaug

SEQ ID NO: 1145573 - RNA, 19 nt, Artificial Sequence
  Description of Artificial Sequence: Synthetic oligonucleotide
  Antisense strand to SEQ ID NO: 1145572
cauauuccagacgaggucc

SEQ ID NO: 1145574 - RNA, 19 nt, Artificial Sequence
  Description of Artificial Sequence: Synthetic oligonucleotide
  Sense strand starting at position 131 of SEQ ID NO: 916297
gugugcgucgccguuuaua

SEQ ID NO: 1145575 - RNA, 19 nt, Artificial Sequence
  Description of Artificial Sequence: Synthetic oligonucleotide
  Antisense strand to SEQ ID NO: 1145574
uauaaacggcgacgcacac

SEQ ID NO: 1145576 - RNA, 19 nt, Artificial Sequence
  Description of Artificial Sequence: Synthetic oligonucleotide
  Sense strand starting at position 133 of SEQ ID NO: 916297
gugcgucgccguuuauaaa

SEQ ID NO: 1145577 - RNA, 19 nt, Artificial Sequence
  Description of Artificial Sequence: Synthetic oligonucleotide
  Antisense strand to SEQ ID NO: 1145576
uuuauaaacggcgacgcac

SEQ ID NO: 1145578 - RNA, 19 nt, Artificial Sequence
  Description of Artificial Sequence: Synthetic oligonucleotide
  Sense strand starting at position 244 of SEQ ID NO: 916297
ccacguacauuuggaagaa

SEQ ID NO: 1145579 - RNA, 19 nt, Artificial Sequence
  Description of Artificial Sequence: Synthetic oligonucleotide
  Antisense strand to SEQ ID NO: 1145578
uucuuccaaauguacgugg

SEQ ID NO: 1145580 - RNA, 19 nt, Artificial Sequence
  Description of Artificial Sequence: Synthetic oligonucleotide
  Sense strand starting at position 245 of SEQ ID NO: 916297
cacguacauuuggaagaaa

SEQ ID NO: 1145581 - RNA, 19 nt, Artificial Sequence
  Description of Artificial Sequence: Synthetic oligonucleotide
  Antisense strand to SEQ ID NO: 1145580
uuucuuccaaauguacgug

SEQ ID NO: 1145582 - RNA, 19 nt, Artificial Sequence
  Description of Artificial Sequence: Synthetic oligonucleotide
  Sense strand starting at position 266 of SEQ ID NO: 916297
aagccacuguguuaugaaa

SEQ ID NO: 1145583 - RNA, 19 nt, Artificial Sequence
  Description of Artificial Sequence: Synthetic oligonucleotide
  Antisense strand to SEQ ID NO: 1145582
uuucauaacacaguggcuu

SEQ ID NO: 1145584 - RNA, 19 nt, Artificial Sequence
  Description of Artificial Sequence: Synthetic oligonucleotide
  Sense strand starting at position 283 of SEQ ID NO: 916297
aaccauaugcgucggguua

SEQ ID NO: 1145585 - RNA, 19 nt, Artificial Sequence
  Description of Artificial Sequence: Synthetic oligonucleotide
  Antisense strand to SEQ ID NO: 1145584
uaacccgacgcauaugguu

SEQ ID NO: 1145586 - RNA, 19 nt, Artificial Sequence
  Description of Artificial Sequence: Synthetic oligonucleotide
  Sense strand starting at position 284 of SEQ ID NO: 916297
accauaugcgucggguuaa

SEQ ID NO: 1145587 - RNA, 19 nt, Artificial Sequence
  Description of Artificial Sequence: Synthetic oligonucleotide
  Antisense strand to SEQ ID NO: 1145586
uuaacccgacgcauauggu

SEQ ID NO: 1145588 - RNA, 19 nt, Artificial Sequence
  Description of Artificial Sequence: Synthetic oligonucleotide
  Sense strand starting at position 315 of SEQ ID NO: 916297
ggccauuagcaccaauuau

SEQ ID NO: 1145589 - RNA, 19 nt, Artificial Sequence
  Description of Artificial Sequence: Synthetic oligonucleotide
  Antisense strand to SEQ ID NO: 1145588
auaauuggugcuaauggcc

SEQ ID NO: 1145590 - RNA, 19 nt, Artificial Sequence
  Description of Artificial Sequence: Synthetic oligonucleotide
  Sense strand starting at position 903 of SEQ ID NO: 916297
gcaugugugagcucuagca

SEQ ID NO: 1145591 - RNA, 19 nt, Artificial Sequence
  Description of Artificial Sequence: Synthetic oligonucleotide
  Antisense strand to SEQ ID NO: 1145590
ugcuagagcucacacaugc

SEQ ID NO: 1145592 - RNA, 19 nt, Artificial Sequence
  Description of Artificial Sequence: Synthetic oligonucleotide
  Sense strand starting at position 905 of SEQ ID NO: 916297
augugugagcucuagcagu

SEQ ID NO: 1145593 - RNA, 19 nt, Artificial Sequence
  Description of Artificial Sequence: Synthetic oligonucleotide
  Antisense strand to SEQ ID NO: 1145592
acugcuagagcucacacau

SEQ ID NO: 1145594 - RNA, 19 nt, Artificial Sequence
  Description of Artificial Sequence: Synthetic oligonucleotide
  Sense strand starting at position 1104 of SEQ ID NO: 916297
gaucuauaauaagcaggua

SEQ ID NO: 1145595 - RNA, 19 nt, Artificial Sequence
  Description of Artificial Sequence: Synthetic oligonucleotide
  Antisense strand to SEQ ID NO: 1145594
uaccugcuuauuauagauc

SEQ ID NO: 1145596 - RNA, 19 nt, Artificial Sequence
  Description of Artificial Sequence: Synthetic oligonucleotide
  Sense strand starting at position 1250 of SEQ ID NO: 916297
accaguuaccgguauucca

SEQ ID NO: 1145597 - RNA, 19 nt, Artificial Sequence
  Description of Artificial Sequence: Synthetic oligonucleotide
  Antisense strand to SEQ ID NO: 1145596
uggaauaccgguaacuggu

SEQ ID NO: 1145598 - RNA, 19 nt, Artificial Sequence
  Description of Artificial Sequence: Synthetic oligonucleotide
  Sense strand starting at position 1372 of SEQ ID NO: 916297
gcuguccuauucuugaaac

SEQ ID NO: 1145599 - RNA, 19 nt, Artificial Sequence
  Description of Artificial Sequence: Synthetic oligonucleotide
  Antisense strand to SEQ ID NO: 1145598
guuucaagaauaggacagc

SEQ ID NO: 1145600 - RNA, 19 nt, Artificial Sequence
  Description of Artificial Sequence: Synthetic oligonucleotide
  Sense strand starting at position 1395 of SEQ ID NO: 916297
acggaccauuaguuacaua

SEQ ID NO: 1145601 - RNA, 19 nt, Artificial Sequence
  Description of Artificial Sequence: Synthetic oligonucleotide
  Antisense strand to SEQ ID NO: 1145600
uauguaacuaaugguccgu

SEQ ID NO: 1145602 - RNA, 19 nt, Artificial Sequence
  Description of Artificial Sequence: Synthetic oligonucleotide
  Sense strand starting at position 2048 of SEQ ID NO: 916297
uugugagucgaucguaaac

SEQ ID NO: 1145603 - RNA, 19 nt, Artificial Sequence
  Description of Artificial Sequence: Synthetic oligonucleotide
  Antisense strand to SEQ ID NO: 1145602
guuuacgaucgacucacaa

SEQ ID NO: 1145604 - RNA, 19 nt, Artificial Sequence
  Description of Artificial Sequence: Synthetic oligonucleotide
  Sense strand starting at position 2101 of SEQ ID NO: 916297
ccgggaaugcgaugcauuu

SEQ ID NO: 1145605 - RNA, 19 nt, Artificial Sequence
  Description of Artificial Sequence: Synthetic oligonucleotide
  Antisense strand to SEQ ID NO: 1145604
aaaugcaucgcauucccgg

SEQ ID NO: 1145606 - RNA, 19 nt, Artificial Sequence
  Description of Artificial Sequence: Synthetic oligonucleotide
  Sense strand starting at position 2107 of SEQ ID NO: 916297
augcgaugcauuuguguag

SEQ ID NO: 1145607 - RNA, 19 nt, Artificial Sequence
  Description of Artificial Sequence: Synthetic oligonucleotide
  Antisense strand to SEQ ID NO: 1145606
cuacacaaaugcaucgcau

SEQ ID NO: 1145608 - RNA, 19 nt, Artificial Sequence
  Description of Artificial Sequence: Synthetic oligonucleotide
  Sense strand starting at position 2116 of SEQ ID NO: 916297
auuuguguagcgugugcaa

SEQ ID NO: 1145609 - RNA, 19 nt, Artificial Sequence
  Description of Artificial Sequence: Synthetic oligonucleotide
  Antisense strand to SEQ ID NO: 1145608
uugcacacgcuacacaaau

SEQ ID NO: 1145610 - RNA, 19 nt, Artificial Sequence
  Description of Artificial Sequence: Synthetic oligonucleotide
  Sense strand starting at position 2148 of SEQ ID NO: 916297
ucgccauguuuacccaauu

SEQ ID NO: 1145611 - RNA, 19 nt, Artificial Sequence
  Description of Artificial Sequence: Synthetic oligonucleotide
  Antisense strand to SEQ ID NO: 1145610
aauuggguaaacauggcga

SEQ ID NO: 1145612 - RNA, 19 nt, Artificial Sequence
  Description of Artificial Sequence: Synthetic oligonucleotide
  Sense strand starting at position 2364 of SEQ ID NO: 916297
gggcauuaagguuggauca

SEQ ID NO: 1145613 - RNA, 19 nt, Artificial Sequence
  Description of Artificial Sequence: Synthetic oligonucleotide
  Antisense strand to SEQ ID NO: 1145612
ugauccaaccuuaaugccc

SEQ ID NO: 1145614 - RNA, 19 nt, Artificial Sequence
  Description of Artificial Sequence: Synthetic oligonucleotide
  Sense strand starting at position 2400 of SEQ ID NO: 916297
ugcaaagauuuguggccuu

SEQ ID NO: 1145615 - RNA, 19 nt, Artificial Sequence
  Description of Artificial Sequence: Synthetic oligonucleotide
  Antisense strand to SEQ ID NO: 1145614
aaggccacaaaucuuugca

SEQ ID NO: 1145616 - RNA, 19 nt, Artificial Sequence
  Description of Artificial Sequence: Synthetic oligonucleotide
  Sense strand starting at position 2421 of SEQ ID NO: 916297
ggcagugauggcuggugaa

SEQ ID NO: 1145617 - RNA, 19 nt, Artificial Sequence
  Description of Artificial Sequence: Synthetic oligonucleotide
  Antisense strand to SEQ ID NO: 1145616
uucaccagccaucacugcc

SEQ ID NO: 1145618 - RNA, 19 nt, Artificial Sequence
  Description of Artificial Sequence: Synthetic oligonucleotide
  Sense strand starting at position 2434 of SEQ ID NO: 916297
ggugaauugcagggauuga

SEQ ID NO: 1145619 - RNA, 19 nt, Artificial Sequence
  Description of Artificial Sequence: Synthetic oligonucleotide
  Antisense strand to SEQ ID NO: 1145618
ucaaucccugcaauucacc

SEQ ID NO: 1145620 - RNA, 19 nt, Artificial Sequence
  Description of Artificial Sequence: Synthetic oligonucleotide
  Sense strand starting at position 2604 of SEQ ID NO: 916297
ccuggaguggucugaagaa

SEQ ID NO: 1145621 - RNA, 19 nt, Artificial Sequence
  Description of Artificial Sequence: Synthetic oligonucleotide
  Antisense strand to SEQ ID NO: 1145620
uucuucagaccacuccagg

SEQ ID NO: 1145622 - RNA, 19 nt, Artificial Sequence
  Description of Artificial Sequence: Synthetic oligonucleotide
  Sense strand starting at position 2724 of SEQ ID NO: 916297
gucccuuucuuagagagaa

SEQ ID NO: 1145623 - RNA, 19 nt, Artificial Sequence
  Description of Artificial Sequence: Synthetic oligonucleotide
  Antisense strand to SEQ ID NO: 1145622
uucucucuaagaaagggac

SEQ ID NO: 1145624 - RNA, 19 nt, Artificial Sequence
  Description of Artificial Sequence: Synthetic oligonucleotide
  Sense strand starting at position 2791 of SEQ ID NO: 916297
gguggcuuauuugaaaucu

SEQ ID NO: 1145625 - RNA, 19 nt, Artificial Sequence
  Description of Artificial Sequence: Synthetic oligonucleotide
  Antisense strand to SEQ ID NO: 1145624
agauuucaaauaagccacc

SEQ ID NO: 1145626 - RNA, 19 nt, Artificial Sequence
  Description of Artificial Sequence: Synthetic oligonucleotide
  Sense strand starting at position 2837 of SEQ ID NO: 916297
ccaagaucuuggucucuac

SEQ ID NO: 1145627 - RNA, 19 nt, Artificial Sequence
  Description of Artificial Sequence: Synthetic oligonucleotide
  Antisense strand to SEQ ID NO: 1145626
guagagaccaagaucuugg

SEQ ID NO: 1145628 - RNA, 19 nt, Artificial Sequence
  Description of Artificial Sequence: Synthetic oligonucleotide
  Sense strand starting at position 3429 of SEQ ID NO: 916297
cgggcagcucaccggaaau

SEQ ID NO: 1145629 - RNA, 19 nt, Artificial Sequence
  Description of Artificial Sequence: Synthetic oligonucleotide
  Antisense strand to SEQ ID NO: 1145628
auuuccggugagcugcccg

SEQ ID NO: 1145630 - RNA, 19 nt, Artificial Sequence
  Description of Artificial Sequence: Synthetic oligonucleotide
  Sense strand starting at position 3464 of SEQ ID NO: 916297
ggcacaaccuguccugaau

SEQ ID NO: 1145631 - RNA, 19 nt, Artificial Sequence
  Description of Artificial Sequence: Synthetic oligonucleotide
  Antisense strand to SEQ ID NO: 1145630
auucaggacagguugugcc

SEQ ID NO: 1145632 - RNA, 19 nt, Artificial Sequence
  Description of Artificial Sequence: Synthetic oligonucleotide
  Sense strand starting at position 3522 of SEQ ID NO: 916297
cagucauuagggcaucuua

SEQ ID NO: 1145633 - RNA, 19 nt, Artificial Sequence
  Description of Artificial Sequence: Synthetic oligonucleotide
  Antisense strand to SEQ ID NO: 1145632
uaagaugcccuaaugacug

SEQ ID NO: 1145634 - RNA, 19 nt, Artificial Sequence
  Description of Artificial Sequence: Synthetic oligonucleotide
  Sense strand starting at position 3752 of SEQ ID NO: 916297
cagcucuacgguugagauu

SEQ ID NO: 1145635 - RNA, 19 nt, Artificial Sequence
  Description of Artificial Sequence: Synthetic oligonucleotide
  Antisense strand to SEQ ID NO: 1145634
aaucucaaccguagagcug

SEQ ID NO: 1145636 - RNA, 19 nt, Artificial Sequence
  Description of Artificial Sequence: Synthetic oligonucleotide
  Sense strand starting at position 3753 of SEQ ID NO: 916297
agcucuacgguugagauua

SEQ ID NO: 1145637 - RNA, 19 nt, Artificial Sequence
  Description of Artificial Sequence: Synthetic oligonucleotide
  Antisense strand to SEQ ID NO: 1145636
uaaucucaaccguagagcu

SEQ ID NO: 1145638 - RNA, 19 nt, Artificial Sequence
  Description of Artificial Sequence: Synthetic oligonucleotide
  Sense strand starting at position 3789 of SEQ ID NO: 916297
agcaaugagcgagaugcuu

SEQ ID NO: 1145639 - RNA, 19 nt, Artificial Sequence
  Description of Artificial Sequence: Synthetic oligonucleotide
  Antisense strand to SEQ ID NO: 1145638
aagcaucucgcucauugcu

SEQ ID NO: 1145640 - RNA, 19 nt, Artificial Sequence
  Description of Artificial Sequence: Synthetic oligonucleotide
  Sense strand starting at position 3862 of SEQ ID NO: 916297
agccacuuugauuggcuaa

SEQ ID NO: 1145641 - RNA, 19 nt, Artificial Sequence
  Description of Artificial Sequence: Synthetic oligonucleotide
  Antisense strand to SEQ ID NO: 1145640
uuagccaaucaaaguggcu

SEQ ID NO: 1145642 - RNA, 19 nt, Artificial Sequence
  Description of Artificial Sequence: Synthetic oligonucleotide
  Sense strand starting at position 3864 of SEQ ID NO: 916297
ccacuuugauuggcuaaua

SEQ ID NO: 1145643 - RNA, 19 nt, Artificial Sequence
  Description of Artificial Sequence: Synthetic oligonucleotide
  Antisense strand to SEQ ID NO: 1145642
uauuagccaaucaaagugg

SEQ ID NO: 1145644 - RNA, 19 nt, Artificial Sequence
  Description of Artificial Sequence: Synthetic oligonucleotide
  Sense strand starting at position 1181 of SEQ ID NO: 916298
gcugaagacuuuguagugu

SEQ ID NO: 1145645 - RNA, 19 nt, Artificial Sequence
  Description of Artificial Sequence: Synthetic oligonucleotide
  Antisense strand to SEQ ID NO: 1145644
acacuacaaagucuucagc

SEQ ID NO: 1145646 - RNA, 19 nt, Artificial Sequence
  Description of Artificial Sequence: Synthetic oligonucleotide
  Sense strand starting at position 1185 of SEQ ID NO: 916298
aagacuuuguaguguaaua

SEQ ID NO: 1145647 - RNA, 19 nt, Artificial Sequence
  Description of Artificial Sequence: Synthetic oligonucleotide
  Antisense strand to SEQ ID NO: 1145646
uauuacacuacaaagucuu

SEQ ID NO: 1145648 - RNA, 19 nt, Artificial Sequence
  Description of Artificial Sequence: Synthetic oligonucleotide
  Sense strand starting at position 1187 of SEQ ID NO: 916298
gacuuuguaguguaauaag

SEQ ID NO: 1145649 - RNA, 19 nt, Artificial Sequence
  Description of Artificial Sequence: Synthetic oligonucleotide
  Antisense strand to SEQ ID NO: 1145648
cuuauuacacuacaaaguc

SEQ ID NO: 1145650 - RNA, 19 nt, Artificial Sequence
  Description of Artificial Sequence: Synthetic oligonucleotide
  Sense strand starting at position 1219 of SEQ ID NO: 916298
uuguaacgacacugaauua

SEQ ID NO: 1145651 - RNA, 19 nt, Artificial Sequence
  Description of Artificial Sequence: Synthetic oligonucleotide
  Antisense strand to SEQ ID NO: 1145650
uaauucagugucguuacaa

SEQ ID NO: 1145652 - RNA, 19 nt, Artificial Sequence
  Description of Artificial Sequence: Synthetic oligonucleotide
  Sense strand starting at position 1249 of SEQ ID NO: 916298
uuagaaagcgagcauaguu

SEQ ID NO: 1145653 - RNA, 19 nt, Artificial Sequence
  Description of Artificial Sequence: Synthetic oligonucleotide
  Antisense strand to SEQ ID NO: 1145652
aacuaugcucgcuuucuaa

SEQ ID NO: 1145654 - RNA, 19 nt, Artificial Sequence
  Description of Artificial Sequence: Synthetic oligonucleotide
  Sense strand starting at position 1340 of SEQ ID NO: 916298
ggauguaauuacccauucu

SEQ ID NO: 1145655 - RNA, 19 nt, Artificial Sequence
  Description of Artificial Sequence: Synthetic oligonucleotide
  Antisense strand to SEQ ID NO: 1145654
agaauggguaauuacaucc

SEQ ID NO: 1145656 - RNA, 19 nt, Artificial Sequence
  Description of Artificial Sequence: Synthetic oligonucleotide
  Sense strand starting at position 1349 of SEQ ID NO: 916298
uacccauucucgcucguaa

SEQ ID NO: 1145657 - RNA, 19 nt, Artificial Sequence
  Description of Artificial Sequence: Synthetic oligonucleotide
  Antisense strand to SEQ ID NO: 1145656
uuacgagcgagaaugggua

SEQ ID NO: 1145658 - RNA, 19 nt, Artificial Sequence
  Description of Artificial Sequence: Synthetic oligonucleotide
  Sense strand starting at position 1351 of SEQ ID NO: 916298
cccauucucgcucguaaau

SEQ ID NO: 1145659 - RNA, 19 nt, Artificial Sequence
  Description of Artificial Sequence: Synthetic oligonucleotide
  Antisense strand to SEQ ID NO: 1145658
auuuacgagcgagaauggg

SEQ ID NO: 1145660 - RNA, 19 nt, Artificial Sequence
  Description of Artificial Sequence: Synthetic oligonucleotide
  Sense strand starting at position 2054 of SEQ ID NO: 916298
ugugacuccuccggccaau

SEQ ID NO: 1145661 - RNA, 19 nt, Artificial Sequence
  Description of Artificial Sequence: Synthetic oligonucleotide
  Antisense strand to SEQ ID NO: 1145660
auuggccggaggagucaca

SEQ ID NO: 1145662 - RNA, 19 nt, Artificial Sequence
  Description of Artificial Sequence: Synthetic oligonucleotide
  Sense strand starting at position 2101 of SEQ ID NO: 916298
ggaaccgaaucgcuuuauu

SEQ ID NO: 1145663 - RNA, 19 nt, Artificial Sequence
  Description of Artificial Sequence: Synthetic oligonucleotide
  Antisense strand to SEQ ID NO: 1145662
aauaaagcgauucgguucc

SEQ ID NO: 1145664 - RNA, 19 nt, Artificial Sequence
  Description of Artificial Sequence: Synthetic oligonucleotide
  Sense strand starting at position 2417 of SEQ ID NO: 916298
ucgugucucagucugugua

SEQ ID NO: 1145665 - RNA, 19 nt, Artificial Sequence
  Description of Artificial Sequence: Synthetic oligonucleotide
  Antisense strand to SEQ ID NO: 1145664
uacacagacugagacacga

SEQ ID NO: 1145666 - RNA, 19 nt, Artificial Sequence
  Description of Artificial Sequence: Synthetic oligonucleotide
  Sense strand starting at position 2729 of SEQ ID NO: 916298
acaggaagugguuggcaaa

SEQ ID NO: 1145667 - RNA, 19 nt, Artificial Sequence
  Description of Artificial Sequence: Synthetic oligonucleotide
  Antisense strand to SEQ ID NO: 1145666
uuugccaaccacuuccugu

SEQ ID NO: 1145668 - RNA, 19 nt, Artificial Sequence
  Description of Artificial Sequence: Synthetic oligonucleotide
  Sense strand starting at position 2910 of SEQ ID NO: 916298
agagcuuucugccaggagu

SEQ ID NO: 1145669 - RNA, 19 nt, Artificial Sequence
  Description of Artificial Sequence: Synthetic oligonucleotide
  Antisense strand to SEQ ID NO: 1145668
acuccuggcagaaagcucu

SEQ ID NO: 1145670 - RNA, 19 nt, Artificial Sequence
  Description of Artificial Sequence: Synthetic oligonucleotide
  Sense strand starting at position 2912 of SEQ ID NO: 916298
agcuuucugccaggaguca

SEQ ID NO: 1145671 - RNA, 19 nt, Artificial Sequence
  Description of Artificial Sequence: Synthetic oligonucleotide
  Antisense strand to SEQ ID NO: 1145670
ugacuccuggcagaaagcu

SEQ ID NO: 1145672 - RNA, 19 nt, Artificial Sequence
  Description of Artificial Sequence: Synthetic oligonucleotide
  Sense strand starting at position 2925 of SEQ ID NO: 916298
gagucagugcccugugaug

SEQ ID NO: 1145673 - RNA, 19 nt, Artificial Sequence
  Description of Artificial Sequence: Synthetic oligonucleotide
  Antisense strand to SEQ ID NO: 1145672
caucacagggcacugacuc

SEQ ID NO: 1145674 - RNA, 19 nt, Artificial Sequence
  Description of Artificial Sequence: Synthetic oligonucleotide
  Sense strand starting at position 2949 of SEQ ID NO: 916298
cagccaagauccugagagu

SEQ ID NO: 1145675 - RNA, 19 nt, Artificial Sequence
  Description of Artificial Sequence: Synthetic oligonucleotide
  Antisense strand to SEQ ID NO: 1145674
acucucaggaucuuggcug

SEQ ID NO: 1145676 - RNA, 19 nt, Artificial Sequence
  Description of Artificial Sequence: Synthetic oligonucleotide
  Sense strand starting at position 2950 of SEQ ID NO: 916298
agccaagauccugagaguu

SEQ ID NO: 1145677 - RNA, 19 nt, Artificial Sequence
  Description of Artificial Sequence: Synthetic oligonucleotide
  Antisense strand to SEQ ID NO: 1145676
aacucucaggaucuuggcu

SEQ ID NO: 1145678 - RNA, 19 nt, Artificial Sequence
  Description of Artificial Sequence: Synthetic oligonucleotide
  Sense strand starting at position 2952 of SEQ ID NO: 916298
ccaagauccugagaguucu

SEQ ID NO: 1145679 - RNA, 19 nt, Artificial Sequence
  Description of Artificial Sequence: Synthetic oligonucleotide
  Antisense strand to SEQ ID NO: 1145678
agaacucucaggaucuugg

SEQ ID NO: 1145680 - RNA, 19 nt, Artificial Sequence
  Description of Artificial Sequence: Synthetic oligonucleotide
  Sense strand starting at position 3044 of SEQ ID NO: 916298
aggagcuguauccauguaa

SEQ ID NO: 1145681 - RNA, 19 nt, Artificial Sequence
  Description of Artificial Sequence: Synthetic oligonucleotide
  Antisense strand to SEQ ID NO: 1145680
uuacauggauacagcuccu

SEQ ID NO: 1145682 - RNA, 19 nt, Artificial Sequence
  Description of Artificial Sequence: Synthetic oligonucleotide
  Sense strand starting at position 3055 of SEQ ID NO: 916298
ccauguaacacguguguuu

SEQ ID NO: 1145683 - RNA, 19 nt, Artificial Sequence
  Description of Artificial Sequence: Synthetic oligonucleotide
  Antisense strand to SEQ ID NO: 1145682
aaacacacguguuacaugg

SEQ ID NO: 1145684 - RNA, 19 nt, Artificial Sequence
  Description of Artificial Sequence: Synthetic oligonucleotide
  Sense strand starting at position 3058 of SEQ ID NO: 916298
uguaacacguguguuuaca

SEQ ID NO: 1145685 - RNA, 19 nt, Artificial Sequence
  Description of Artificial Sequence: Synthetic oligonucleotide
  Antisense strand to SEQ ID NO: 1145684
uguaaacacacguguuaca

SEQ ID NO: 1145686 - RNA, 19 nt, Artificial Sequence
  Description of Artificial Sequence: Synthetic oligonucleotide
  Sense strand starting at position 3128 of SEQ ID NO: 916298
aggcuaagcucaccaaguu

SEQ ID NO: 1145687 - RNA, 19 nt, Artificial Sequence
  Description of Artificial Sequence: Synthetic oligonucleotide
  Antisense strand to SEQ ID NO: 1145686
aacuuggugagcuuagccu

SEQ ID NO: 1145688 - RNA, 19 nt, Artificial Sequence
  Description of Artificial Sequence: Synthetic oligonucleotide
  Sense strand starting at position 3217 of SEQ ID NO: 916298
acaguaauacucugaugga

SEQ ID NO: 1145689 - RNA, 19 nt, Artificial Sequence
  Description of Artificial Sequence: Synthetic oligonucleotide
  Antisense strand to SEQ ID NO: 1145688
uccaucagaguauuacugu

SEQ ID NO: 1145690 - RNA, 19 nt, Artificial Sequence
  Description of Artificial Sequence: Synthetic oligonucleotide
  Sense strand starting at position 3218 of SEQ ID NO: 916298
caguaauacucugauggag

SEQ ID NO: 1145691 - RNA, 19 nt, Artificial Sequence
  Description of Artificial Sequence: Synthetic oligonucleotide
  Antisense strand to SEQ ID NO: 1145690
cuccaucagaguauuacug

SEQ ID NO: 1145692 - RNA, 19 nt, Artificial Sequence
  Description of Artificial Sequence: Synthetic oligonucleotide
  Sense strand starting at position 3343 of SEQ ID NO: 916298
auuaacugaucgcccauaa

SEQ ID NO: 1145693 - RNA, 19 nt, Artificial Sequence
  Description of Artificial Sequence: Synthetic oligonucleotide
  Antisense strand to SEQ ID NO: 1145692
uuaugggcgaucaguuaau

SEQ ID NO: 1145694 - RNA, 19 nt, Artificial Sequence
  Description of Artificial Sequence: Synthetic oligonucleotide
  Sense strand starting at position 3416 of SEQ ID NO: 916298
cuuguuguacuugauaaca

SEQ ID NO: 1145695 - RNA, 19 nt, Artificial Sequence
  Description of Artificial Sequence: Synthetic oligonucleotide
  Antisense strand to SEQ ID NO: 1145694
uguuaucaaguacaacaag

SEQ ID NO: 1145696 - RNA, 19 nt, Artificial Sequence
  Description of Artificial Sequence: Synthetic oligonucleotide
  Sense strand starting at position 3418 of SEQ ID NO: 916298
uguuguacuugauaacaau

SEQ ID NO: 1145697 - RNA, 19 nt, Artificial Sequence
  Description of Artificial Sequence: Synthetic oligonucleotide
  Antisense strand to SEQ ID NO: 1145696
auuguuaucaaguacaaca

SEQ ID NO: 1145698 - RNA, 19 nt, Artificial Sequence
  Description of Artificial Sequence: Synthetic oligonucleotide
  Sense strand starting at position 3534 of SEQ ID NO: 916298
gacuaaaucugccagcggu

SEQ ID NO: 1145699 - RNA, 19 nt, Artificial Sequence
  Description of Artificial Sequence: Synthetic oligonucleotide
  Antisense strand to SEQ ID NO: 1145698
accgcuggcagauuuaguc

SEQ ID NO: 1145700 - RNA, 19 nt, Artificial Sequence
  Description of Artificial Sequence: Synthetic oligonucleotide
  Sense strand starting at position 3604 of SEQ ID NO: 916298
auaaaucagucucgcggaa

SEQ ID NO: 1145701 - RNA, 19 nt, Artificial Sequence
  Description of Artificial Sequence: Synthetic oligonucleotide
  Antisense strand to SEQ ID NO: 1145700
uuccgcgagacugauuuau

SEQ ID NO: 1145702 - RNA, 19 nt, Artificial Sequence
  Description of Artificial Sequence: Synthetic oligonucleotide
  Sense strand starting at position 3606 of SEQ ID NO: 916298
aaaucagucucgcggaauc

SEQ ID NO: 1145703 - RNA, 19 nt, Artificial Sequence
  Description of Artificial Sequence: Synthetic oligonucleotide
  Antisense strand to SEQ ID NO: 1145702
gauuccgcgagacugauuu

SEQ ID NO: 1145704 - RNA, 19 nt, Artificial Sequence
  Description of Artificial Sequence: Synthetic oligonucleotide
  Sense strand starting at position 3735 of SEQ ID NO: 916298
uuaugaucgccgccgugau

SEQ ID NO: 1145705 - RNA, 19 nt, Artificial Sequence
  Description of Artificial Sequence: Synthetic oligonucleotide
  Antisense strand to SEQ ID NO: 1145704
aucacggcggcgaucauaa

SEQ ID NO: 1145706 - RNA, 19 nt, Artificial Sequence
  Description of Artificial Sequence: Synthetic oligonucleotide
  Sense strand starting at position 3736 of SEQ ID NO: 916298
uaugaucgccgccgugauu

SEQ ID NO: 1145707 - RNA, 19 nt, Artificial Sequence
  Description of Artificial Sequence: Synthetic oligonucleotide
  Antisense strand to SEQ ID NO: 1145706
aaucacggcggcgaucaua

SEQ ID NO: 1145708 - RNA, 19 nt, Artificial Sequence
  Description of Artificial Sequence: Synthetic oligonucleotide
  Sense strand starting at position 3745 of SEQ ID NO: 916298
cgccgugauuagucaaucu

SEQ ID NO: 1145709 - RNA, 19 nt, Artificial Sequence
  Description of Artificial Sequence: Synthetic oligonucleotide
  Antisense strand to SEQ ID NO: 1145708
agauugacuaaucacggcg

SEQ ID NO: 1145710 - RNA, 19 nt, Artificial Sequence
  Description of Artificial Sequence: Synthetic oligonucleotide
  Sense strand starting at position 3765 of SEQ ID NO: 916298
ccuuuaauucgccgcccua

SEQ ID NO: 1145711 - RNA, 19 nt, Artificial Sequence
  Description of Artificial Sequence: Synthetic oligonucleotide
  Antisense strand to SEQ ID NO: 1145710
uagggcggcgaauuaaagg

SEQ ID NO: 1145712 - RNA, 19 nt, Artificial Sequence
  Description of Artificial Sequence: Synthetic oligonucleotide
  Sense strand starting at position 3845 of SEQ ID NO: 916298
acaacuauuugaggguuua

SEQ ID NO: 1145713 - RNA, 19 nt, Artificial Sequence
  Description of Artificial Sequence: Synthetic oligonucleotide
  Antisense strand to SEQ ID NO: 1145712
uaaacccucaaauaguugu

SEQ ID NO: 1145714 - RNA, 19 nt, Artificial Sequence
  Description of Artificial Sequence: Synthetic oligonucleotide
  Sense strand starting at position 3856 of SEQ ID NO: 916298
aggguuuaauuagaacauc

SEQ ID NO: 1145715 - RNA, 19 nt, Artificial Sequence
  Description of Artificial Sequence: Synthetic oligonucleotide
  Antisense strand to SEQ ID NO: 1145714
gauguucuaauuaaacccu

SEQ ID NO: 1145716 - RNA, 19 nt, Artificial Sequence
  Description of Artificial Sequence: Synthetic oligonucleotide
  Sense strand starting at position 1289 of SEQ ID NO: 916299
auccaauuaugucgucgua

SEQ ID NO: 1145717 - RNA, 19 nt, Artificial Sequence
  Description of Artificial Sequence: Synthetic oligonucleotide
  Antisense strand to SEQ ID NO: 1145716
uacgacgacauaauuggau

SEQ ID NO: 1145718 - RNA, 19 nt, Artificial Sequence
  Description of Artificial Sequence: Synthetic oligonucleotide
  Sense strand starting at position 1291 of SEQ ID NO: 916299
ccaauuaugucgucguaaa

SEQ ID NO: 1145719 - RNA, 19 nt, Artificial Sequence
  Description of Artificial Sequence: Synthetic oligonucleotide
  Antisense strand to SEQ ID NO: 1145718
uuuacgacgacauaauugg

SEQ ID NO: 1145720 - RNA, 19 nt, Artificial Sequence
  Description of Artificial Sequence: Synthetic oligonucleotide
  Sense strand starting at position 1292 of SEQ ID NO: 916299
caauuaugucgucguaaau

SEQ ID NO: 1145721 - RNA, 19 nt, Artificial Sequence
  Description of Artificial Sequence: Synthetic oligonucleotide
  Antisense strand to SEQ ID NO: 1145720
auuuacgacgacauaauug

SEQ ID NO: 1145722 - RNA, 19 nt, Artificial Sequence
  Description of Artificial Sequence: Synthetic oligonucleotide
  Sense strand starting at position 1358 of SEQ ID NO: 916299
cauugaugccuggaucgua

SEQ ID NO: 1145723 - RNA, 19 nt, Artificial Sequence
  Description of Artificial Sequence: Synthetic oligonucleotide
  Antisense strand to SEQ ID NO: 1145722
uacgauccaggcaucaaug

SEQ ID NO: 1145724 - RNA, 19 nt, Artificial Sequence
  Description of Artificial Sequence: Synthetic oligonucleotide
  Sense strand starting at position 1378 of SEQ ID NO: 916299
aauuuauggccgcagguuu

SEQ ID NO: 1145725 - RNA, 19 nt, Artificial Sequence
  Description of Artificial Sequence: Synthetic oligonucleotide
  Antisense strand to SEQ ID NO: 1145724
aaaccugcggccauaaauu

SEQ ID NO: 1145726 - RNA, 19 nt, Artificial Sequence
  Description of Artificial Sequence: Synthetic oligonucleotide
  Sense strand starting at position 1463 of SEQ ID NO: 916299
uaaaguuuaccguggcuca

SEQ ID NO: 1145727 - RNA, 19 nt, Artificial Sequence
  Description of Artificial Sequence: Synthetic oligonucleotide
  Antisense strand to SEQ ID NO: 1145726
ugagccacgguaaacuuua

SEQ ID NO: 1145728 - RNA, 19 nt, Artificial Sequence
  Description of Artificial Sequence: Synthetic oligonucleotide
  Sense strand starting at position 1464 of SEQ ID NO: 916299
aaaguuuaccguggcucau

SEQ ID NO: 1145729 - RNA, 19 nt, Artificial Sequence
  Description of Artificial Sequence: Synthetic oligonucleotide
  Antisense strand to SEQ ID NO: 1145728
augagccacgguaaacuuu

SEQ ID NO: 1145730 - RNA, 19 nt, Artificial Sequence
  Description of Artificial Sequence: Synthetic oligonucleotide
  Sense strand starting at position 2034 of SEQ ID NO: 916299
ggagauaucucuuucuuua

SEQ ID NO: 1145731 - RNA, 19 nt, Artificial Sequence
  Description of Artificial Sequence: Synthetic oligonucleotide
  Antisense strand to SEQ ID NO: 1145730
uaaagaaagagauaucucc

SEQ ID NO: 1145732 - RNA, 19 nt, Artificial Sequence
  Description of Artificial Sequence: Synthetic oligonucleotide
  Sense strand starting at position 2082 of SEQ ID NO: 916299
cuuaaauagagucacguga

SEQ ID NO: 1145733 - RNA, 19 nt, Artificial Sequence
  Description of Artificial Sequence: Synthetic oligonucleotide
  Antisense strand to SEQ ID NO: 1145732
ucacgugacucuauuuaag

SEQ ID NO: 1145734 - RNA, 19 nt, Artificial Sequence
  Description of Artificial Sequence: Synthetic oligonucleotide
  Sense strand starting at position 2084 of SEQ ID NO: 916299
uaaauagagucacgugacu

SEQ ID NO: 1145735 - RNA, 19 nt, Artificial Sequence
  Description of Artificial Sequence: Synthetic oligonucleotide
  Antisense strand to SEQ ID NO: 1145734
agucacgugacucuauuua

SEQ ID NO: 1145736 - RNA, 19 nt, Artificial Sequence
  Description of Artificial Sequence: Synthetic oligonucleotide
  Sense strand starting at position 2105 of SEQ ID NO: 916299
agcggccacucauaaauuu

SEQ ID NO: 1145737 - RNA, 19 nt, Artificial Sequence
  Description of Artificial Sequence: Synthetic oligonucleotide
  Antisense strand to SEQ ID NO: 1145736
aaauuuaugaguggccgcu

SEQ ID NO: 1145738 - RNA, 19 nt, Artificial Sequence
  Description of Artificial Sequence: Synthetic oligonucleotide
  Sense strand starting at position 2128 of SEQ ID NO: 916299
ugaugaccuccgggagguu

SEQ ID NO: 1145739 - RNA, 19 nt, Artificial Sequence
  Description of Artificial Sequence: Synthetic oligonucleotide
  Antisense strand to SEQ ID NO: 1145738
aaccucccggaggucauca

SEQ ID NO: 1145740 - RNA, 19 nt, Artificial Sequence
  Description of Artificial Sequence: Synthetic oligonucleotide
  Sense strand starting at position 2165 of SEQ ID NO: 916299
aaagcaucucgauauguug

SEQ ID NO: 1145741 - RNA, 19 nt, Artificial Sequence
  Description of Artificial Sequence: Synthetic oligonucleotide
  Antisense strand to SEQ ID NO: 1145740
caacauaucgagaugcuuu

SEQ ID NO: 1145742 - RNA, 19 nt, Artificial Sequence
  Description of Artificial Sequence: Synthetic oligonucleotide
  Sense strand starting at position 2171 of SEQ ID NO: 916299
ucucgauauguuggcaaag

SEQ ID NO: 1145743 - RNA, 19 nt, Artificial Sequence
  Description of Artificial Sequence: Synthetic oligonucleotide
  Antisense strand to SEQ ID NO: 1145742
cuuugccaacauaucgaga

SEQ ID NO: 1145744 - RNA, 19 nt, Artificial Sequence
  Description of Artificial Sequence: Synthetic oligonucleotide
  Sense strand starting at position 2542 of SEQ ID NO: 916299
ggauuaaguuagguaaggu

SEQ ID NO: 1145745 - RNA, 19 nt, Artificial Sequence
  Description of Artificial Sequence: Synthetic oligonucleotide
  Antisense strand to SEQ ID NO: 1145744
accuuaccuaacuuaaucc

SEQ ID NO: 1145746 - RNA, 19 nt, Artificial Sequence
  Description of Artificial Sequence: Synthetic oligonucleotide
  Sense strand starting at position 2543 of SEQ ID NO: 916299
gauuaaguuagguaaggug

SEQ ID NO: 1145747 - RNA, 19 nt, Artificial Sequence
  Description of Artificial Sequence: Synthetic oligonucleotide
  Antisense strand to SEQ ID NO: 1145746
caccuuaccuaacuuaauc

SEQ ID NO: 1145748 - RNA, 19 nt, Artificial Sequence
  Description of Artificial Sequence: Synthetic oligonucleotide
  Sense strand starting at position 2667 of SEQ ID NO: 916299
ggugccuaucagcaagaga

SEQ ID NO: 1145749 - RNA, 19 nt, Artificial Sequence
  Description of Artificial Sequence: Synthetic oligonucleotide
  Antisense strand to SEQ ID NO: 1145748
ucucuugcugauaggcacc

SEQ ID NO: 1145750 - RNA, 19 nt, Artificial Sequence
  Description of Artificial Sequence: Synthetic oligonucleotide
  Sense strand starting at position 2690 of SEQ ID NO: 916299
agaauuagcuucugaagag

SEQ ID NO: 1145751 - RNA, 19 nt, Artificial Sequence
  Description of Artificial Sequence: Synthetic oligonucleotide
  Antisense strand to SEQ ID NO: 1145750
cucuucagaagcuaauucu

SEQ ID NO: 1145752 - RNA, 19 nt, Artificial Sequence
  Description of Artificial Sequence: Synthetic oligonucleotide
  Sense strand starting at position 2691 of SEQ ID NO: 916299
gaauuagcuucugaagagg

SEQ ID NO: 1145753 - RNA, 19 nt, Artificial Sequence
  Description of Artificial Sequence: Synthetic oligonucleotide
  Antisense strand to SEQ ID NO: 1145752
ccucuucagaagcuaauuc

SEQ ID NO: 1145754 - RNA, 19 nt, Artificial Sequence
  Description of Artificial Sequence: Synthetic oligonucleotide
  Sense strand starting at position 2729 of SEQ ID NO: 916299
gagggauccugagugguca

SEQ ID NO: 1145755 - RNA, 19 nt, Artificial Sequence
  Description of Artificial Sequence: Synthetic oligonucleotide
  Antisense strand to SEQ ID NO: 1145754
ugaccacucaggaucccuc

SEQ ID NO: 1145756 - RNA, 19 nt, Artificial Sequence
  Description of Artificial Sequence: Synthetic oligonucleotide
  Sense strand starting at position 2731 of SEQ ID NO: 916299
gggauccugaguggucaga

SEQ ID NO: 1145757 - RNA, 19 nt, Artificial Sequence
  Description of Artificial Sequence: Synthetic oligonucleotide
  Antisense strand to SEQ ID NO: 1145756
ucugaccacucaggauccc

SEQ ID NO: 1145758 - RNA, 19 nt, Artificial Sequence
  Description of Artificial Sequence: Synthetic oligonucleotide
  Sense strand starting at position 2733 of SEQ ID NO: 916299
gauccugaguggucagaac

SEQ ID NO: 1145759 - RNA, 19 nt, Artificial Sequence
  Description of Artificial Sequence: Synthetic oligonucleotide
  Antisense strand to SEQ ID NO: 1145758
guucugaccacucaggauc

SEQ ID NO: 1145760 - RNA, 19 nt, Artificial Sequence
  Description of Artificial Sequence: Synthetic oligonucleotide
  Sense strand starting at position 2784 of SEQ ID NO: 916299
caggcuguuugggauggau

SEQ ID NO: 1145761 - RNA, 19 nt, Artificial Sequence
  Description of Artificial Sequence: Synthetic oligonucleotide
  Antisense strand to SEQ ID NO: 1145760
auccaucccaaacagccug

SEQ ID NO: 1145762 - RNA, 19 nt, Artificial Sequence
  Description of Artificial Sequence: Synthetic oligonucleotide
  Sense strand starting at position 2786 of SEQ ID NO: 916299
ggcuguuugggauggaucu

SEQ ID NO: 1145763 - RNA, 19 nt, Artificial Sequence
  Description of Artificial Sequence: Synthetic oligonucleotide
  Antisense strand to SEQ ID NO: 1145762
agauccaucccaaacagcc

SEQ ID NO: 1145764 - RNA, 19 nt, Artificial Sequence
  Description of Artificial Sequence: Synthetic oligonucleotide
  Sense strand starting at position 2830 of SEQ ID NO: 916299
gcuagaccucaccaugcua

SEQ ID NO: 1145765 - RNA, 19 nt, Artificial Sequence
  Description of Artificial Sequence: Synthetic oligonucleotide
  Antisense strand to SEQ ID NO: 1145764
uagcauggugaggucuagc

SEQ ID NO: 1145766 - RNA, 19 nt, Artificial Sequence
  Description of Artificial Sequence: Synthetic oligonucleotide
  Sense strand starting at position 2937 of SEQ ID NO: 916299
cccugugugcgauccuuau

SEQ ID NO: 1145767 - RNA, 19 nt, Artificial Sequence
  Description of Artificial Sequence: Synthetic oligonucleotide
  Antisense strand to SEQ ID NO: 1145766
auaaggaucgcacacaggg

SEQ ID NO: 1145768 - RNA, 19 nt, Artificial Sequence
  Description of Artificial Sequence: Synthetic oligonucleotide
  Sense strand starting at position 2939 of SEQ ID NO: 916299
cugugugcgauccuuaugu

SEQ ID NO: 1145769 - RNA, 19 nt, Artificial Sequence
  Description of Artificial Sequence: Synthetic oligonucleotide
  Antisense strand to SEQ ID NO: 1145768
acauaaggaucgcacacag

SEQ ID NO: 1145770 - RNA, 19 nt, Artificial Sequence
  Description of Artificial Sequence: Synthetic oligonucleotide
  Sense strand starting at position 2948 of SEQ ID NO: 916299
auccuuaugugguaccuau

SEQ ID NO: 1145771 - RNA, 19 nt, Artificial Sequence
  Description of Artificial Sequence: Synthetic oligonucleotide
  Antisense strand to SEQ ID NO: 1145770
auagguaccacauaaggau

SEQ ID NO: 1145772 - RNA, 19 nt, Artificial Sequence
  Description of Artificial Sequence: Synthetic oligonucleotide
  Sense strand starting at position 2959 of SEQ ID NO: 916299
guaccuaugccagagguuu

SEQ ID NO: 1145773 - RNA, 19 nt, Artificial Sequence
  Description of Artificial Sequence: Synthetic oligonucleotide
  Antisense strand to SEQ ID NO: 1145772
aaaccucuggcauagguac

SEQ ID NO: 1145774 - RNA, 19 nt, Artificial Sequence
  Description of Artificial Sequence: Synthetic oligonucleotide
  Sense strand starting at position 2991 of SEQ ID NO: 916299
gauguuaauugaggacaug

SEQ ID NO: 1145775 - RNA, 19 nt, Artificial Sequence
  Description of Artificial Sequence: Synthetic oligonucleotide
  Antisense strand to SEQ ID NO: 1145774
cauguccucaauuaacauc

SEQ ID NO: 1145776 - RNA, 19 nt, Artificial Sequence
  Description of Artificial Sequence: Synthetic oligonucleotide
  Sense strand starting at position 3033 of SEQ ID NO: 916299
caaauauuacgugagcaug

SEQ ID NO: 1145777 - RNA, 19 nt, Artificial Sequence
  Description of Artificial Sequence: Synthetic oligonucleotide
  Antisense strand to SEQ ID NO: 1145776
caugcucacguaauauuug

SEQ ID NO: 1145778 - RNA, 19 nt, Artificial Sequence
  Description of Artificial Sequence: Synthetic oligonucleotide
  Sense strand starting at position 3138 of SEQ ID NO: 916299
gagagcaauuucugagcua

SEQ ID NO: 1145779 - RNA, 19 nt, Artificial Sequence
  Description of Artificial Sequence: Synthetic oligonucleotide
  Antisense strand to SEQ ID NO: 1145778
uagcucagaaauugcucuc

SEQ ID NO: 1145780 - RNA, 19 nt, Artificial Sequence
  Description of Artificial Sequence: Synthetic oligonucleotide
  Sense strand starting at position 3139 of SEQ ID NO: 916299
agagcaauuucugagcuac

SEQ ID NO: 1145781 - RNA, 19 nt, Artificial Sequence
  Description of Artificial Sequence: Synthetic oligonucleotide
  Antisense strand to SEQ ID NO: 1145780
guagcucagaaauugcucu

SEQ ID NO: 1145782 - RNA, 19 nt, Artificial Sequence
  Description of Artificial Sequence: Synthetic oligonucleotide
  Sense strand starting at position 3280 of SEQ ID NO: 916299
ccugcuucuucccaggaaa

SEQ ID NO: 1145783 - RNA, 19 nt, Artificial Sequence
  Description of Artificial Sequence: Synthetic oligonucleotide
  Antisense strand to SEQ ID NO: 1145782
uuuccugggaagaagcagg

SEQ ID NO: 1145784 - RNA, 19 nt, Artificial Sequence
  Description of Artificial Sequence: Synthetic oligonucleotide
  Sense strand starting at position 3282 of SEQ ID NO: 916299
ugcuucuucccaggaaauc

SEQ ID NO: 1145785 - RNA, 19 nt, Artificial Sequence
  Description of Artificial Sequence: Synthetic oligonucleotide
  Antisense strand to SEQ ID NO: 1145784
gauuuccugggaagaagca

SEQ ID NO: 1145786 - RNA, 19 nt, Artificial Sequence
  Description of Artificial Sequence: Synthetic oligonucleotide
  Sense strand starting at position 3283 of SEQ ID NO: 916299
gcuucuucccaggaaaucu

SEQ ID NO: 1145787 - RNA, 19 nt, Artificial Sequence
  Description of Artificial Sequence: Synthetic oligonucleotide
  Antisense strand to SEQ ID NO: 1145786
agauuuccugggaagaagc

SEQ ID NO: 1145788 - RNA, 19 nt, Artificial Sequence
  Description of Artificial Sequence: Synthetic oligonucleotide
  Sense strand starting at position 3477 of SEQ ID NO: 916299
agagaaggccaggguugau

SEQ ID NO: 1145789 - RNA, 19 nt, Artificial Sequence
  Description of Artificial Sequence: Synthetic oligonucleotide
  Antisense strand to SEQ ID NO: 1145788
aucaacccuggccuucucu

SEQ ID NO: 1145790 - RNA, 19 nt, Artificial Sequence
  Description of Artificial Sequence: Synthetic oligonucleotide
  Sense strand starting at position 3480 of SEQ ID NO: 916299
gaaggccaggguugauaaa

SEQ ID NO: 1145791 - RNA, 19 nt, Artificial Sequence
  Description of Artificial Sequence: Synthetic oligonucleotide
  Antisense strand to SEQ ID NO: 1145790
uuuaucaacccuggccuuc

SEQ ID NO: 1145792 - RNA, 19 nt, Artificial Sequence
  Description of Artificial Sequence: Synthetic oligonucleotide
  Sense strand starting at position 3490 of SEQ ID NO: 916299
guugauaaaugguuagggu

SEQ ID NO: 1145793 - RNA, 19 nt, Artificial Sequence
  Description of Artificial Sequence: Synthetic oligonucleotide
  Antisense strand to SEQ ID NO: 1145792
acccuaaccauuuaucaac

SEQ ID NO: 1145794 - RNA, 19 nt, Artificial Sequence
  Description of Artificial Sequence: Synthetic oligonucleotide
  Sense strand starting at position 3659 of SEQ ID NO: 916299
ucgagauguccuugaaucg

SEQ ID NO: 1145795 - RNA, 19 nt, Artificial Sequence
  Description of Artificial Sequence: Synthetic oligonucleotide
  Antisense strand to SEQ ID NO: 1145794
cgauucaaggacaucucga

SEQ ID NO: 1145796 - RNA, 19 nt, Artificial Sequence
  Description of Artificial Sequence: Synthetic oligonucleotide
  Sense strand starting at position 756 of SEQ ID NO: 916300
ccuaaagauccgggcacaa

SEQ ID NO: 1145797 - RNA, 19 nt, Artificial Sequence
  Description of Artificial Sequence: Synthetic oligonucleotide
  Antisense strand to SEQ ID NO: 1145796
uugugcccggaucuuuagg

SEQ ID NO: 1145798 - RNA, 19 nt, Artificial Sequence
  Description of Artificial Sequence: Synthetic oligonucleotide
  Sense strand starting at position 811 of SEQ ID NO: 916300
gacuguuucgccuagcaaa

SEQ ID NO: 1145799 - RNA, 19 nt, Artificial Sequence
  Description of Artificial Sequence: Synthetic oligonucleotide
  Antisense strand to SEQ ID NO: 1145798
uuugcuaggcgaaacaguc

SEQ ID NO: 1145800 - RNA, 19 nt, Artificial Sequence
  Description of Artificial Sequence: Synthetic oligonucleotide
  Sense strand starting at position 813 of SEQ ID NO: 916300
cuguuucgccuagcaaagu

SEQ ID NO: 1145801 - RNA, 19 nt, Artificial Sequence
  Description of Artificial Sequence: Synthetic oligonucleotide
  Antisense strand to SEQ ID NO: 1145800
acuuugcuaggcgaaacag

SEQ ID NO: 1145802 - RNA, 19 nt, Artificial Sequence
  Description of Artificial Sequence: Synthetic oligonucleotide
  Sense strand starting at position 963 of SEQ ID NO: 916300
gugugucccaaagaaaggu

SEQ ID NO: 1145803 - RNA, 19 nt, Artificial Sequence
  Description of Artificial Sequence: Synthetic oligonucleotide
  Antisense strand to SEQ ID NO: 1145802
accuuucuuugggacacac

SEQ ID NO: 1145804 - RNA, 19 nt, Artificial Sequence
  Description of Artificial Sequence: Synthetic oligonucleotide
  Sense strand starting at position 1121 of SEQ ID NO: 916300
gcauccuaguuccuuggaa

SEQ ID NO: 1145805 - RNA, 19 nt, Artificial Sequence
  Description of Artificial Sequence: Synthetic oligonucleotide
  Antisense strand to SEQ ID NO: 1145804
uuccaaggaacuaggaugc

SEQ ID NO: 1145806 - RNA, 19 nt, Artificial Sequence
  Description of Artificial Sequence: Synthetic oligonucleotide
  Sense strand starting at position 1123 of SEQ ID NO: 916300
auccuaguuccuuggaaac

SEQ ID NO: 1145807 - RNA, 19 nt, Artificial Sequence
  Description of Artificial Sequence: Synthetic oligonucleotide
  Antisense strand to SEQ ID NO: 1145806
guuuccaaggaacuaggau

SEQ ID NO: 1145808 - RNA, 19 nt, Artificial Sequence
  Description of Artificial Sequence: Synthetic oligonucleotide
  Sense strand starting at position 1354 of SEQ ID NO: 916300
cccugucucggugaggaga

SEQ ID NO: 1145809 - RNA, 19 nt, Artificial Sequence
  Description of Artificial Sequence: Synthetic oligonucleotide
  Antisense strand to SEQ ID NO: 1145808
ucuccucaccgagacaggg

SEQ ID NO: 1145810 - RNA, 19 nt, Artificial Sequence
  Description of Artificial Sequence: Synthetic oligonucleotide
  Sense strand starting at position 1365 of SEQ ID NO: 916300
ugaggagacgagcgugauu

SEQ ID NO: 1145811 - RNA, 19 nt, Artificial Sequence
  Description of Artificial Sequence: Synthetic oligonucleotide
  Antisense strand to SEQ ID NO: 1145810
aaucacgcucgucuccuca

SEQ ID NO: 1145812 - RNA, 19 nt, Artificial Sequence
  Description of Artificial Sequence: Synthetic oligonucleotide
  Sense strand starting at position 1368 of SEQ ID NO: 916300
ggagacgagcgugauuguu

SEQ ID NO: 1145813 - RNA, 19 nt, Artificial Sequence
  Description of Artificial Sequence: Synthetic oligonucleotide
  Antisense strand to SEQ ID NO: 1145812
aacaaucacgcucgucucc

SEQ ID NO: 1145814 - RNA, 19 nt, Artificial Sequence
  Description of Artificial Sequence: Synthetic oligonucleotide
  Sense strand starting at position 1462 of SEQ ID NO: 916300
auuuauaucucggagcugu

SEQ ID NO: 1145815 - RNA, 19 nt, Artificial Sequence
  Description of Artificial Sequence: Synthetic oligonucleotide
  Antisense strand to SEQ ID NO: 1145814
acagcuccgagauauaaau

SEQ ID NO: 1145816 - RNA, 19 nt, Artificial Sequence
  Description of Artificial Sequence: Synthetic oligonucleotide
  Sense strand starting at position 2088 of SEQ ID NO: 916300
ccuaguugagacuaagugu

SEQ ID NO: 1145817 - RNA, 19 nt, Artificial Sequence
  Description of Artificial Sequence: Synthetic oligonucleotide
  Antisense strand to SEQ ID NO: 1145816
acacuuagucucaacuagg

SEQ ID NO: 1145818 - RNA, 19 nt, Artificial Sequence
  Description of Artificial Sequence: Synthetic oligonucleotide
  Sense strand starting at position 2095 of SEQ ID NO: 916300
gagacuaagugugugcuuu

SEQ ID NO: 1145819 - RNA, 19 nt, Artificial Sequence
  Description of Artificial Sequence: Synthetic oligonucleotide
  Antisense strand to SEQ ID NO: 1145818
aaagcacacacuuagucuc

SEQ ID NO: 1145820 - RNA, 19 nt, Artificial Sequence
  Description of Artificial Sequence: Synthetic oligonucleotide
  Sense strand starting at position 2097 of SEQ ID NO: 916300
gacuaagugugugcuuuga

SEQ ID NO: 1145821 - RNA, 19 nt, Artificial Sequence
  Description of Artificial Sequence: Synthetic oligonucleotide
  Antisense strand to SEQ ID NO: 1145820
ucaaagcacacacuuaguc

SEQ ID NO: 1145822 - RNA, 19 nt, Artificial Sequence
  Description of Artificial Sequence: Synthetic oligonucleotide
  Sense strand starting at position 2099 of SEQ ID NO: 916300
cuaagugugugcuuugaaa

SEQ ID NO: 1145823 - RNA, 19 nt, Artificial Sequence
  Description of Artificial Sequence: Synthetic oligonucleotide
  Antisense strand to SEQ ID NO: 1145822
uuucaaagcacacacuuag

SEQ ID NO: 1145824 - RNA, 19 nt, Artificial Sequence
  Description of Artificial Sequence: Synthetic oligonucleotide
  Sense strand starting at position 2101 of SEQ ID NO: 916300
aagugugugcuuugaaagu

SEQ ID NO: 1145825 - RNA, 19 nt, Artificial Sequence
  Description of Artificial Sequence: Synthetic oligonucleotide
  Antisense strand to SEQ ID NO: 1145824
acuuucaaagcacacacuu

SEQ ID NO: 1145826 - RNA, 19 nt, Artificial Sequence
  Description of Artificial Sequence: Synthetic oligonucleotide
  Sense strand starting at position 2107 of SEQ ID NO: 916300
gugcuuugaaaguaagacu

SEQ ID NO: 1145827 - RNA, 19 nt, Artificial Sequence
  Description of Artificial Sequence: Synthetic oligonucleotide
  Antisense strand to SEQ ID NO: 1145826
agucuuacuuucaaagcac

SEQ ID NO: 1145828 - RNA, 19 nt, Artificial Sequence
  Description of Artificial Sequence: Synthetic oligonucleotide
  Sense strand starting at position 2116 of SEQ ID NO: 916300
aaguaagacuuggauuucu

SEQ ID NO: 1145829 - RNA, 19 nt, Artificial Sequence
  Description of Artificial Sequence: Synthetic oligonucleotide
  Antisense strand to SEQ ID NO: 1145828
agaaauccaagucuuacuu

SEQ ID NO: 1145830 - RNA, 19 nt, Artificial Sequence
  Description of Artificial Sequence: Synthetic oligonucleotide
  Sense strand starting at position 2238 of SEQ ID NO: 916300
gcuguacuaccaggaaauc

SEQ ID NO: 1145831 - RNA, 19 nt, Artificial Sequence
  Description of Artificial Sequence: Synthetic oligonucleotide
  Antisense strand to SEQ ID NO: 1145830
gauuuccugguaguacagc

SEQ ID NO: 1145832 - RNA, 19 nt, Artificial Sequence
  Description of Artificial Sequence: Synthetic oligonucleotide
  Sense strand starting at position 2418 of SEQ ID NO: 916300
agaaauccugcaggaaauc

SEQ ID NO: 1145833 - RNA, 19 nt, Artificial Sequence
  Description of Artificial Sequence: Synthetic oligonucleotide
  Antisense strand to SEQ ID NO: 1145832
gauuuccugcaggauuucu

SEQ ID NO: 1145834 - RNA, 19 nt, Artificial Sequence
  Description of Artificial Sequence: Synthetic oligonucleotide
  Sense strand starting at position 2552 of SEQ ID NO: 916300
guagaguguggcugagagu

SEQ ID NO: 1145835 - RNA, 19 nt, Artificial Sequence
  Description of Artificial Sequence: Synthetic oligonucleotide
  Antisense strand to SEQ ID NO: 1145834
acucucagccacacucuac

SEQ ID NO: 1145836 - RNA, 19 nt, Artificial Sequence
  Description of Artificial Sequence: Synthetic oligonucleotide
  Sense strand starting at position 2565 of SEQ ID NO: 916300
gagagucuugaauguagua

SEQ ID NO: 1145837 - RNA, 19 nt, Artificial Sequence
  Description of Artificial Sequence: Synthetic oligonucleotide
  Antisense strand to SEQ ID NO: 1145836
uacuacauucaagacucuc

SEQ ID NO: 1145838 - RNA, 19 nt, Artificial Sequence
  Description of Artificial Sequence: Synthetic oligonucleotide
  Sense strand starting at position 2868 of SEQ ID NO: 916300
ugagaaucuuucuagagac

SEQ ID NO: 1145839 - RNA, 19 nt, Artificial Sequence
  Description of Artificial Sequence: Synthetic oligonucleotide
  Antisense strand to SEQ ID NO: 1145838
gucucuagaaagauucuca

SEQ ID NO: 1145840 - RNA, 19 nt, Artificial Sequence
  Description of Artificial Sequence: Synthetic oligonucleotide
  Sense strand starting at position 2894 of SEQ ID NO: 916300
ccuguuuauguuggugaga

SEQ ID NO: 1145841 - RNA, 19 nt, Artificial Sequence
  Description of Artificial Sequence: Synthetic oligonucleotide
  Antisense strand to SEQ ID NO: 1145840
ucucaccaacauaaacagg

SEQ ID NO: 1145842 - RNA, 19 nt, Artificial Sequence
  Description of Artificial Sequence: Synthetic oligonucleotide
  Sense strand starting at position 2895 of SEQ ID NO: 916300
cuguuuauguuggugagaa

SEQ ID NO: 1145843 - RNA, 19 nt, Artificial Sequence
  Description of Artificial Sequence: Synthetic oligonucleotide
  Antisense strand to SEQ ID NO: 1145842
uucucaccaacauaaacag

SEQ ID NO: 1145844 - RNA, 19 nt, Artificial Sequence
  Description of Artificial Sequence: Synthetic oligonucleotide
  Sense strand starting at position 2897 of SEQ ID NO: 916300
guuuauguuggugagaauu

SEQ ID NO: 1145845 - RNA, 19 nt, Artificial Sequence
  Description of Artificial Sequence: Synthetic oligonucleotide
  Antisense strand to SEQ ID NO: 1145844
aauucucaccaacauaaac

SEQ ID NO: 1145846 - RNA, 19 nt, Artificial Sequence
  Description of Artificial Sequence: Synthetic oligonucleotide
  Sense strand starting at position 2899 of SEQ ID NO: 916300
uuauguuggugagaauuua

SEQ ID NO: 1145847 - RNA, 19 nt, Artificial Sequence
  Description of Artificial Sequence: Synthetic oligonucleotide
  Antisense strand to SEQ ID NO: 1145846
uaaauucucaccaacauaa

SEQ ID NO: 1145848 - RNA, 19 nt, Artificial Sequence
  Description of Artificial Sequence: Synthetic oligonucleotide
  Sense strand starting at position 3253 of SEQ ID NO: 916300
agcugaauccgaggcuugu

SEQ ID NO: 1145849 - RNA, 19 nt, Artificial Sequence
  Description of Artificial Sequence: Synthetic oligonucleotide
  Antisense strand to SEQ ID NO: 1145848
acaagccucggauucagcu

SEQ ID NO: 1145850 - RNA, 19 nt, Artificial Sequence
  Description of Artificial Sequence: Synthetic oligonucleotide
  Sense strand starting at position 3495 of SEQ ID NO: 916300
cccggaugucgccggauuu

SEQ ID NO: 1145851 - RNA, 19 nt, Artificial Sequence
  Description of Artificial Sequence: Synthetic oligonucleotide
  Antisense strand to SEQ ID NO: 1145850
aaauccggcgacauccggg

SEQ ID NO: 1145852 - RNA, 19 nt, Artificial Sequence
  Description of Artificial Sequence: Synthetic oligonucleotide
  Sense strand starting at position 3522 of SEQ ID NO: 916300
uuuccuucuguguaacaaa

SEQ ID NO: 1145853 - RNA, 19 nt, Artificial Sequence
  Description of Artificial Sequence: Synthetic oligonucleotide
  Antisense strand to SEQ ID NO: 1145852
uuuguuacacagaaggaaa

SEQ ID NO: 1145854 - RNA, 19 nt, Artificial Sequence
  Description of Artificial Sequence: Synthetic oligonucleotide
  Sense strand starting at position 3542 of SEQ ID NO: 916300
cggaguaaucaauggguag

SEQ ID NO: 1145855 - RNA, 19 nt, Artificial Sequence
  Description of Artificial Sequence: Synthetic oligonucleotide
  Antisense strand to SEQ ID NO: 1145854
cuacccauugauuacuccg

SEQ ID NO: 1145856 - RNA, 19 nt, Artificial Sequence
  Description of Artificial Sequence: Synthetic oligonucleotide
  Sense strand starting at position 3543 of SEQ ID NO: 916300
ggaguaaucaauggguagc

SEQ ID NO: 1145857 - RNA, 19 nt, Artificial Sequence
  Description of Artificial Sequence: Synthetic oligonucleotide
  Antisense strand to SEQ ID NO: 1145856
gcuacccauugauuacucc

SEQ ID NO: 1145858 - RNA, 19 nt, Artificial Sequence
  Description of Artificial Sequence: Synthetic oligonucleotide
  Sense strand starting at position 3545 of SEQ ID NO: 916300
aguaaucaauggguagcaa

SEQ ID NO: 1145859 - RNA, 19 nt, Artificial Sequence
  Description of Artificial Sequence: Synthetic oligonucleotide
  Antisense strand to SEQ ID NO: 1145858
uugcuacccauugauuacu

SEQ ID NO: 1145860 - RNA, 19 nt, Artificial Sequence
  Description of Artificial Sequence: Synthetic oligonucleotide
  Sense strand starting at position 3546 of SEQ ID NO: 916300
guaaucaauggguagcaau

SEQ ID NO: 1145861 - RNA, 19 nt, Artificial Sequence
  Description of Artificial Sequence: Synthetic oligonucleotide
  Antisense strand to SEQ ID NO: 1145860
auugcuacccauugauuac

SEQ ID NO: 1145862 - RNA, 19 nt, Artificial Sequence
  Description of Artificial Sequence: Synthetic oligonucleotide
  Sense strand starting at position 3549 of SEQ ID NO: 916300
aucaauggguagcaauaaa

SEQ ID NO: 1145863 - RNA, 19 nt, Artificial Sequence
  Description of Artificial Sequence: Synthetic oligonucleotide
  Antisense strand to SEQ ID NO: 1145862
uuuauugcuacccauugau

SEQ ID NO: 1145864 - RNA, 19 nt, Artificial Sequence
  Description of Artificial Sequence: Synthetic oligonucleotide
  Sense strand starting at position 3622 of SEQ ID NO: 916300
uaagguuucccuggagugu

SEQ ID NO: 1145865 - RNA, 19 nt, Artificial Sequence
  Description of Artificial Sequence: Synthetic oligonucleotide
  Antisense strand to SEQ ID NO: 1145864
acacuccagggaaaccuua

SEQ ID NO: 1145866 - RNA, 19 nt, Artificial Sequence
  Description of Artificial Sequence: Synthetic oligonucleotide
  Sense strand starting at position 3700 of SEQ ID NO: 916300
gagacaacauguuaguuaa

SEQ ID NO: 1145867 - RNA, 19 nt, Artificial Sequence
  Description of Artificial Sequence: Synthetic oligonucleotide
  Antisense strand to SEQ ID NO: 1145866
uuaacuaacauguugucuc

SEQ ID NO: 1145868 - RNA, 19 nt, Artificial Sequence
  Description of Artificial Sequence: Synthetic oligonucleotide
  Sense strand starting at position 3703 of SEQ ID NO: 916300
acaacauguuaguuaauac

SEQ ID NO: 1145869 - RNA, 19 nt, Artificial Sequence
  Description of Artificial Sequence: Synthetic oligonucleotide
  Antisense strand to SEQ ID NO: 1145868
guauuaacuaacauguugu

SEQ ID NO: 1145870 - RNA, 19 nt, Artificial Sequence
  Description of Artificial Sequence: Synthetic oligonucleotide
  Sense strand starting at position 3808 of SEQ ID NO: 916300
acagaaauuugucgguauu

SEQ ID NO: 1145871 - RNA, 19 nt, Artificial Sequence
  Description of Artificial Sequence: Synthetic oligonucleotide
  Antisense strand to SEQ ID NO: 1145870
aauaccgacaaauuucugu

SEQ ID NO: 1145872 - RNA, 19 nt, Artificial Sequence
  Description of Artificial Sequence: Synthetic oligonucleotide
  Sense strand starting at position 3838 of SEQ ID NO: 916300
gggaaagacuccuauaauu

SEQ ID NO: 1145873 - RNA, 19 nt, Artificial Sequence
  Description of Artificial Sequence: Synthetic oligonucleotide
  Antisense strand to SEQ ID NO: 1145872
aauuauaggagucuuuccc

SEQ ID NO: 1145874 - RNA, 19 nt, Artificial Sequence
  Description of Artificial Sequence: Synthetic oligonucleotide
  Sense strand starting at position 3950 of SEQ ID NO: 916300
uuagaugaguuaucucauu

SEQ ID NO: 1145875 - RNA, 19 nt, Artificial Sequence
  Description of Artificial Sequence: Synthetic oligonucleotide
  Antisense strand to SEQ ID NO: 1145874
aaugagauaacucaucuaa

SEQ ID NO: 1145876 - RNA, 19 nt, Artificial Sequence
  Description of Artificial Sequence: Synthetic oligonucleotide
  Sense strand starting at position 19 of SEQ ID NO: 916301
ggugucuuggcuuagauua

SEQ ID NO: 1145877 - RNA, 19 nt, Artificial Sequence
  Description of Artificial Sequence: Synthetic oligonucleotide
  Antisense strand to SEQ ID NO: 1145876
uaaucuaagccaagacacc

SEQ ID NO: 1145878 - RNA, 19 nt, Artificial Sequence
  Description of Artificial Sequence: Synthetic oligonucleotide
  Sense strand starting at position 21 of SEQ ID NO: 916301
ugucuuggcuuagauuaag

SEQ ID NO: 1145879 - RNA, 19 nt, Artificial Sequence
  Description of Artificial Sequence: Synthetic oligonucleotide
  Antisense strand to SEQ ID NO: 1145878
cuuaaucuaagccaagaca

SEQ ID NO: 1145880 - RNA, 19 nt, Artificial Sequence
  Description of Artificial Sequence: Synthetic oligonucleotide
  Sense strand starting at position 24 of SEQ ID NO: 916301
cuuggcuuagauuaaggua

SEQ ID NO: 1145881 - RNA, 19 nt, Artificial Sequence
  Description of Artificial Sequence: Synthetic oligonucleotide
  Antisense strand to SEQ ID NO: 1145880
uaccuuaaucuaagccaag

SEQ ID NO: 1145882 - RNA, 19 nt, Artificial Sequence
  Description of Artificial Sequence: Synthetic oligonucleotide
  Sense strand starting at position 63 of SEQ ID NO: 916301
ucggaccucgucuggaaua

SEQ ID NO: 1145883 - RNA, 19 nt, Artificial Sequence
  Description of Artificial Sequence: Synthetic oligonucleotide
  Antisense strand to SEQ ID NO: 1145882
uauuccagacgagguccga

SEQ ID NO: 1145884 - RNA, 19 nt, Artificial Sequence
  Description of Artificial Sequence: Synthetic oligonucleotide
  Sense strand starting at position 65 of SEQ ID NO: 916301
ggaccucgucuggaauaug

SEQ ID NO: 1145885 - RNA, 19 nt, Artificial Sequence
  Description of Artificial Sequence: Synthetic oligonucleotide
  Antisense strand to SEQ ID NO: 1145884
cauauuccagacgaggucc

SEQ ID NO: 1145886 - RNA, 19 nt, Artificial Sequence
  Description of Artificial Sequence: Synthetic oligonucleotide
  Sense strand starting at position 131 of SEQ ID NO: 916301
gugugcgucgccguuuaua

SEQ ID NO: 1145887 - RNA, 19 nt, Artificial Sequence
  Description of Artificial Sequence: Synthetic oligonucleotide
  Antisense strand to SEQ ID NO: 1145886
uauaaacggcgacgcacac

SEQ ID NO: 1145888 - RNA, 19 nt, Artificial Sequence
  Description of Artificial Sequence: Synthetic oligonucleotide
  Sense strand starting at position 133 of SEQ ID NO: 916301
gugcgucgccguuuauaaa

SEQ ID NO: 1145889 - RNA, 19 nt, Artificial Sequence
  Description of Artificial Sequence: Synthetic oligonucleotide
  Antisense strand to SEQ ID NO: 1145888
uuuauaaacggcgacgcac

SEQ ID NO: 1145890 - RNA, 19 nt, Artificial Sequence
  Description of Artificial Sequence: Synthetic oligonucleotide
  Sense strand starting at position 244 of SEQ ID NO: 916301
ccacguacauuuggaagaa

SEQ ID NO: 1145891 - RNA, 19 nt, Artificial Sequence
  Description of Artificial Sequence: Synthetic oligonucleotide
  Antisense strand to SEQ ID NO: 1145890
uucuuccaaauguacgugg

SEQ ID NO: 1145892 - RNA, 19 nt, Artificial Sequence
  Description of Artificial Sequence: Synthetic oligonucleotide
  Sense strand starting at position 245 of SEQ ID NO: 916301
cacguacauuuggaagaaa

SEQ ID NO: 1145893 - RNA, 19 nt, Artificial Sequence
  Description of Artificial Sequence: Synthetic oligonucleotide
  Antisense strand to SEQ ID NO: 1145892
uuucuuccaaauguacgug

SEQ ID NO: 1145894 - RNA, 19 nt, Artificial Sequence
  Description of Artificial Sequence: Synthetic oligonucleotide
  Sense strand starting at position 266 of SEQ ID NO: 916301
aagccacuguguuaugaaa

SEQ ID NO: 1145895 - RNA, 19 nt, Artificial Sequence
  Description of Artificial Sequence: Synthetic oligonucleotide
  Antisense strand to SEQ ID NO: 1145894
uuucauaacacaguggcuu

SEQ ID NO: 1145896 - RNA, 19 nt, Artificial Sequence
  Description of Artificial Sequence: Synthetic oligonucleotide
  Sense strand starting at position 283 of SEQ ID NO: 916301
aaccauaugcgucggguua

SEQ ID NO: 1145897 - RNA, 19 nt, Artificial Sequence
  Description of Artificial Sequence: Synthetic oligonucleotide
  Antisense strand to SEQ ID NO: 1145896
uaacccgacgcauaugguu

SEQ ID NO: 1145898 - RNA, 19 nt, Artificial Sequence
  Description of Artificial Sequence: Synthetic oligonucleotide
  Sense strand starting at position 284 of SEQ ID NO: 916301
accauaugcgucggguuaa

SEQ ID NO: 1145899 - RNA, 19 nt, Artificial Sequence
  Description of Artificial Sequence: Synthetic oligonucleotide
  Antisense strand to SEQ ID NO: 1145898
uuaacccgacgcauauggu

SEQ ID NO: 1145900 - RNA, 19 nt, Artificial Sequence
  Description of Artificial Sequence: Synthetic oligonucleotide
  Sense strand starting at position 315 of SEQ ID NO: 916301
ggccauuagcaccaauuau

SEQ ID NO: 1145901 - RNA, 19 nt, Artificial Sequence
  Description of Artificial Sequence: Synthetic oligonucleotide
  Antisense strand to SEQ ID NO: 1145900
auaauuggugcuaauggcc

SEQ ID NO: 1145902 - RNA, 19 nt, Artificial Sequence
  Description of Artificial Sequence: Synthetic oligonucleotide
  Sense strand starting at position 903 of SEQ ID NO: 916301
gcaugugugagcucuagca

SEQ ID NO: 1145903 - RNA, 19 nt, Artificial Sequence
  Description of Artificial Sequence: Synthetic oligonucleotide
  Antisense strand to SEQ ID NO: 1145902
ugcuagagcucacacaugc

SEQ ID NO: 1145904 - RNA, 19 nt, Artificial Sequence
  Description of Artificial Sequence: Synthetic oligonucleotide
  Sense strand starting at position 905 of SEQ ID NO: 916301
augugugagcucuagcagu

SEQ ID NO: 1145905 - RNA, 19 nt, Artificial Sequence
  Description of Artificial Sequence: Synthetic oligonucleotide
  Antisense strand to SEQ ID NO: 1145904
acugcuagagcucacacau

SEQ ID NO: 1145906 - RNA, 19 nt, Artificial Sequence
  Description of Artificial Sequence: Synthetic oligonucleotide
  Sense strand starting at position 1104 of SEQ ID NO: 916301
gaucuauaauaagcaggua

SEQ ID NO: 1145907 - RNA, 19 nt, Artificial Sequence
  Description of Artificial Sequence: Synthetic oligonucleotide
  Antisense strand to SEQ ID NO: 1145906
uaccugcuuauuauagauc

SEQ ID NO: 1145908 - RNA, 19 nt, Artificial Sequence
  Description of Artificial Sequence: Synthetic oligonucleotide
  Sense strand starting at position 1250 of SEQ ID NO: 916301
accaguuaccgguauucca

SEQ ID NO: 1145909 - RNA, 19 nt, Artificial Sequence
  Description of Artificial Sequence: Synthetic oligonucleotide
  Antisense strand to SEQ ID NO: 1145908
uggaauaccgguaacuggu

SEQ ID NO: 1145910 - RNA, 19 nt, Artificial Sequence
  Description of Artificial Sequence: Synthetic oligonucleotide
  Sense strand starting at position 1372 of SEQ ID NO: 916301
gcuguccuauucuugaaac

SEQ ID NO: 1145911 - RNA, 19 nt, Artificial Sequence
  Description of Artificial Sequence: Synthetic oligonucleotide
  Antisense strand to SEQ ID NO: 1145910
guuucaagaauaggacagc

SEQ ID NO: 1145912 - RNA, 19 nt, Artificial Sequence
  Description of Artificial Sequence: Synthetic oligonucleotide
  Sense strand starting at position 1395 of SEQ ID NO: 916301
acggaccauuaguuacaua

SEQ ID NO: 1145913 - RNA, 19 nt, Artificial Sequence
  Description of Artificial Sequence: Synthetic oligonucleotide
  Antisense strand to SEQ ID NO: 1145912
uauguaacuaaugguccgu

SEQ ID NO: 1145914 - RNA, 19 nt, Artificial Sequence
  Description of Artificial Sequence: Synthetic oligonucleotide
  Sense strand starting at position 2048 of SEQ ID NO: 916301
uugugagucgaucguaaac

SEQ ID NO: 1145915 - RNA, 19 nt, Artificial Sequence
  Description of Artificial Sequence: Synthetic oligonucleotide
  Antisense strand to SEQ ID NO: 1145914
guuuacgaucgacucacaa

SEQ ID NO: 1145916 - RNA, 19 nt, Artificial Sequence
  Description of Artificial Sequence: Synthetic oligonucleotide
  Sense strand starting at position 2101 of SEQ ID NO: 916301
ccgggaaugcgaugcauuu

SEQ ID NO: 1145917 - RNA, 19 nt, Artificial Sequence
  Description of Artificial Sequence: Synthetic oligonucleotide
  Antisense strand to SEQ ID NO: 1145916
aaaugcaucgcauucccgg

SEQ ID NO: 1145918 - RNA, 19 nt, Artificial Sequence
  Description of Artificial Sequence: Synthetic oligonucleotide
  Sense strand starting at position 2107 of SEQ ID NO: 916301
augcgaugcauuuguguag

SEQ ID NO: 1145919 - RNA, 19 nt, Artificial Sequence
  Description of Artificial Sequence: Synthetic oligonucleotide
  Antisense strand to SEQ ID NO: 1145918
cuacacaaaugcaucgcau

SEQ ID NO: 1145920 - RNA, 19 nt, Artificial Sequence
  Description of Artificial Sequence: Synthetic oligonucleotide
  Sense strand starting at position 2116 of SEQ ID NO: 916301
auuuguguagcgugugcaa

SEQ ID NO: 1145921 - RNA, 19 nt, Artificial Sequence
  Description of Artificial Sequence: Synthetic oligonucleotide
  Antisense strand to SEQ ID NO: 1145920
uugcacacgcuacacaaau

SEQ ID NO: 1145922 - RNA, 19 nt, Artificial Sequence
  Description of Artificial Sequence: Synthetic oligonucleotide
  Sense strand starting at position 2148 of SEQ ID NO: 916301
ucgccauguuuacccaauu

SEQ ID NO: 1145923 - RNA, 19 nt, Artificial Sequence
  Description of Artificial Sequence: Synthetic oligonucleotide
  Antisense strand to SEQ ID NO: 1145922
aauuggguaaacauggcga

SEQ ID NO: 1145924 - RNA, 19 nt, Artificial Sequence
  Description of Artificial Sequence: Synthetic oligonucleotide
  Sense strand starting at position 2364 of SEQ ID NO: 916301
gggcauuaagguuggauca

SEQ ID NO: 1145925 - RNA, 19 nt, Artificial Sequence
  Description of Artificial Sequence: Synthetic oligonucleotide
  Antisense strand to SEQ ID NO: 1145924
ugauccaaccuuaaugccc

SEQ ID NO: 1145926 - RNA, 19 nt, Artificial Sequence
  Description of Artificial Sequence: Synthetic oligonucleotide
  Sense strand starting at position 2400 of SEQ ID NO: 916301
ugcaaagauuuguggccuu

SEQ ID NO: 1145927 - RNA, 19 nt, Artificial Sequence
  Description of Artificial Sequence: Synthetic oligonucleotide
  Antisense strand to SEQ ID NO: 1145926
aaggccacaaaucuuugca

SEQ ID NO: 1145928 - RNA, 19 nt, Artificial Sequence
  Description of Artificial Sequence: Synthetic oligonucleotide
  Sense strand starting at position 2421 of SEQ ID NO: 916301
ggcagugauggcuggugaa

SEQ ID NO: 1145929 - RNA, 19 nt, Artificial Sequence
  Description of Artificial Sequence: Synthetic oligonucleotide
  Antisense strand to SEQ ID NO: 1145928
uucaccagccaucacugcc

SEQ ID NO: 1145930 - RNA, 19 nt, Artificial Sequence
  Description of Artificial Sequence: Synthetic oligonucleotide
  Sense strand starting at position 2434 of SEQ ID NO: 916301
ggugaauugcagggauuga

SEQ ID NO: 1145931 - RNA, 19 nt, Artificial Sequence
  Description of Artificial Sequence: Synthetic oligonucleotide
  Antisense strand to SEQ ID NO: 1145930
ucaaucccugcaauucacc

SEQ ID NO: 1145932 - RNA, 19 nt, Artificial Sequence
  Description of Artificial Sequence: Synthetic oligonucleotide
  Sense strand starting at position 2604 of SEQ ID NO: 916301
ccuggaguggucugaagaa

SEQ ID NO: 1145933 - RNA, 19 nt, Artificial Sequence
  Description of Artificial Sequence: Synthetic oligonucleotide
  Antisense strand to SEQ ID NO: 1145932
uucuucagaccacuccagg

SEQ ID NO: 1145934 - RNA, 19 nt, Artificial Sequence
  Description of Artificial Sequence: Synthetic oligonucleotide
  Sense strand starting at position 2724 of SEQ ID NO: 916301
gucccuuucuuagagagaa

SEQ ID NO: 1145935 - RNA, 19 nt, Artificial Sequence
  Description of Artificial Sequence: Synthetic oligonucleotide
  Antisense strand to SEQ ID NO: 1145934
uucucucuaagaaagggac

SEQ ID NO: 1145936 - RNA, 19 nt, Artificial Sequence
  Description of Artificial Sequence: Synthetic oligonucleotide
  Sense strand starting at position 2791 of SEQ ID NO: 916301
gguggcuuauuugaaaucu

SEQ ID NO: 1145937 - RNA, 19 nt, Artificial Sequence
  Description of Artificial Sequence: Synthetic oligonucleotide
  Antisense strand to SEQ ID NO: 1145936
agauuucaaauaagccacc

SEQ ID NO: 1145938 - RNA, 19 nt, Artificial Sequence
  Description of Artificial Sequence: Synthetic oligonucleotide
  Sense strand starting at position 2837 of SEQ ID NO: 916301
ccaagaucuuggucucuac

SEQ ID NO: 1145939 - RNA, 19 nt, Artificial Sequence
  Description of Artificial Sequence: Synthetic oligonucleotide
  Antisense strand to SEQ ID NO: 1145938
guagagaccaagaucuugg

SEQ ID NO: 1145940 - RNA, 19 nt, Artificial Sequence
  Description of Artificial Sequence: Synthetic oligonucleotide
  Sense strand starting at position 3429 of SEQ ID NO: 916301
cgggcagcucaccggaaau

SEQ ID NO: 1145941 - RNA, 19 nt, Artificial Sequence
  Description of Artificial Sequence: Synthetic oligonucleotide
  Antisense strand to SEQ ID NO: 1145940
auuuccggugagcugcccg

SEQ ID NO: 1145942 - RNA, 19 nt, Artificial Sequence
  Description of Artificial Sequence: Synthetic oligonucleotide
  Sense strand starting at position 3464 of SEQ ID NO: 916301
ggcacaaccuguccugaau

SEQ ID NO: 1145943 - RNA, 19 nt, Artificial Sequence
  Description of Artificial Sequence: Synthetic oligonucleotide
  Antisense strand to SEQ ID NO: 1145942
auucaggacagguugugcc

SEQ ID NO: 1145944 - RNA, 19 nt, Artificial Sequence
  Description of Artificial Sequence: Synthetic oligonucleotide
  Sense strand starting at position 3522 of SEQ ID NO: 916301
cagucauuagggcaucuua

SEQ ID NO: 1145945 - RNA, 19 nt, Artificial Sequence
  Description of Artificial Sequence: Synthetic oligonucleotide
  Antisense strand to SEQ ID NO: 1145944
uaagaugcccuaaugacug

SEQ ID NO: 1145946 - RNA, 19 nt, Artificial Sequence
  Description of Artificial Sequence: Synthetic oligonucleotide
  Sense strand starting at position 3752 of SEQ ID NO: 916301
cagcucuacgguugagauu

SEQ ID NO: 1145947 - RNA, 19 nt, Artificial Sequence
  Description of Artificial Sequence: Synthetic oligonucleotide
  Antisense strand to SEQ ID NO: 1145946
aaucucaaccguagagcug

SEQ ID NO: 1145948 - RNA, 19 nt, Artificial Sequence
  Description of Artificial Sequence: Synthetic oligonucleotide
  Sense strand starting at position 3753 of SEQ ID NO: 916301
agcucuacgguugagauua

SEQ ID NO: 1145949 - RNA, 19 nt, Artificial Sequence
  Description of Artificial Sequence: Synthetic oligonucleotide
  Antisense strand to SEQ ID NO: 1145948
uaaucucaaccguagagcu

SEQ ID NO: 1145950 - RNA, 19 nt, Artificial Sequence
  Description of Artificial Sequence: Synthetic oligonucleotide
  Sense strand starting at position 3789 of SEQ ID NO: 916301
agcaaugagcgagaugcuu

SEQ ID NO: 1145951 - RNA, 19 nt, Artificial Sequence
  Description of Artificial Sequence: Synthetic oligonucleotide
  Antisense strand to SEQ ID NO: 1145950
aagcaucucgcucauugcu

SEQ ID NO: 1145952 - RNA, 19 nt, Artificial Sequence
  Description of Artificial Sequence: Synthetic oligonucleotide
  Sense strand starting at position 3862 of SEQ ID NO: 916301
agccacuuugauuggcuaa

SEQ ID NO: 1145953 - RNA, 19 nt, Artificial Sequence
  Description of Artificial Sequence: Synthetic oligonucleotide
  Antisense strand to SEQ ID NO: 1145952
uuagccaaucaaaguggcu

SEQ ID NO: 1145954 - RNA, 19 nt, Artificial Sequence
  Description of Artificial Sequence: Synthetic oligonucleotide
  Sense strand starting at position 3864 of SEQ ID NO: 916301
ccacuuugauuggcuaaua

SEQ ID NO: 1145955 - RNA, 19 nt, Artificial Sequence
  Description of Artificial Sequence: Synthetic oligonucleotide
  Antisense strand to SEQ ID NO: 1145954
uauuagccaaucaaagugg

SEQ ID NO: 1145956 - RNA, 19 nt, Artificial Sequence
  Description of Artificial Sequence: Synthetic oligonucleotide
  Sense strand starting at position 294 of SEQ ID NO: 916302
ccuguaauccuaggaacug

SEQ ID NO: 1145957 - RNA, 19 nt, Artificial Sequence
  Description of Artificial Sequence: Synthetic oligonucleotide
  Antisense strand to SEQ ID NO: 1145956
caguuccuaggauuacagg

SEQ ID NO: 1145958 - RNA, 19 nt, Artificial Sequence
  Description of Artificial Sequence: Synthetic oligonucleotide
  Sense strand starting at position 313 of SEQ ID NO: 916302
gccuuugcagcuuuguuua

SEQ ID NO: 1145959 - RNA, 19 nt, Artificial Sequence
  Description of Artificial Sequence: Synthetic oligonucleotide
  Antisense strand to SEQ ID NO: 1145958
uaaacaaagcugcaaaggc

SEQ ID NO: 1145960 - RNA, 19 nt, Artificial Sequence
  Description of Artificial Sequence: Synthetic oligonucleotide
  Sense strand starting at position 345 of SEQ ID NO: 916302
gcauuuagugagcgaggcu

SEQ ID NO: 1145961 - RNA, 19 nt, Artificial Sequence
  Description of Artificial Sequence: Synthetic oligonucleotide
  Antisense strand to SEQ ID NO: 1145960
agccucgcucacuaaaugc

SEQ ID NO: 1145962 - RNA, 19 nt, Artificial Sequence
  Description of Artificial Sequence: Synthetic oligonucleotide
  Sense strand starting at position 365 of SEQ ID NO: 916302
gggacagacuguuuccaaa

SEQ ID NO: 1145963 - RNA, 19 nt, Artificial Sequence
  Description of Artificial Sequence: Synthetic oligonucleotide
  Antisense strand to SEQ ID NO: 1145962
uuuggaaacagucuguccc

SEQ ID NO: 1145964 - RNA, 19 nt, Artificial Sequence
  Description of Artificial Sequence: Synthetic oligonucleotide
  Sense strand starting at position 478 of SEQ ID NO: 916302
aauugaucugcuggaaugu

SEQ ID NO: 1145965 - RNA, 19 nt, Artificial Sequence
  Description of Artificial Sequence: Synthetic oligonucleotide
  Antisense strand to SEQ ID NO: 1145964
acauuccagcagaucaauu

SEQ ID NO: 1145966 - RNA, 19 nt, Artificial Sequence
  Description of Artificial Sequence: Synthetic oligonucleotide
  Sense strand starting at position 509 of SEQ ID NO: 916302
ccugauugcuaacuggaga

SEQ ID NO: 1145967 - RNA, 19 nt, Artificial Sequence
  Description of Artificial Sequence: Synthetic oligonucleotide
  Antisense strand to SEQ ID NO: 1145966
ucuccaguuagcaaucagg

SEQ ID NO: 1145968 - RNA, 19 nt, Artificial Sequence
  Description of Artificial Sequence: Synthetic oligonucleotide
  Sense strand starting at position 624 of SEQ ID NO: 916302
gggcucaugaccuaagcua

SEQ ID NO: 1145969 - RNA, 19 nt, Artificial Sequence
  Description of Artificial Sequence: Synthetic oligonucleotide
  Antisense strand to SEQ ID NO: 1145968
uagcuuaggucaugagccc

SEQ ID NO: 1145970 - RNA, 19 nt, Artificial Sequence
  Description of Artificial Sequence: Synthetic oligonucleotide
  Sense strand starting at position 827 of SEQ ID NO: 916302
ucaggcugguucucugaga

SEQ ID NO: 1145971 - RNA, 19 nt, Artificial Sequence
  Description of Artificial Sequence: Synthetic oligonucleotide
  Antisense strand to SEQ ID NO: 1145970
ucucagagaaccagccuga

SEQ ID NO: 1145972 - RNA, 19 nt, Artificial Sequence
  Description of Artificial Sequence: Synthetic oligonucleotide
  Sense strand starting at position 834 of SEQ ID NO: 916302
gguucucugagaggagguu

SEQ ID NO: 1145973 - RNA, 19 nt, Artificial Sequence
  Description of Artificial Sequence: Synthetic oligonucleotide
  Antisense strand to SEQ ID NO: 1145972
aaccuccucucagagaacc

SEQ ID NO: 1145974 - RNA, 19 nt, Artificial Sequence
  Description of Artificial Sequence: Synthetic oligonucleotide
  Sense strand starting at position 846 of SEQ ID NO: 916302
ggagguuaugggugcccua

SEQ ID NO: 1145975 - RNA, 19 nt, Artificial Sequence
  Description of Artificial Sequence: Synthetic oligonucleotide
  Antisense strand to SEQ ID NO: 1145974
uagggcacccauaaccucc

SEQ ID NO: 1145976 - RNA, 19 nt, Artificial Sequence
  Description of Artificial Sequence: Synthetic oligonucleotide
  Sense strand starting at position 871 of SEQ ID NO: 916302
cagagagccuguccuuaga

SEQ ID NO: 1145977 - RNA, 19 nt, Artificial Sequence
  Description of Artificial Sequence: Synthetic oligonucleotide
  Antisense strand to SEQ ID NO: 1145976
ucuaaggacaggcucucug

SEQ ID NO: 1145978 - RNA, 19 nt, Artificial Sequence
  Description of Artificial Sequence: Synthetic oligonucleotide
  Sense strand starting at position 873 of SEQ ID NO: 916302
gagagccuguccuuagagu

SEQ ID NO: 1145979 - RNA, 19 nt, Artificial Sequence
  Description of Artificial Sequence: Synthetic oligonucleotide
  Antisense strand to SEQ ID NO: 1145978
acucuaaggacaggcucuc

SEQ ID NO: 1145980 - RNA, 19 nt, Artificial Sequence
  Description of Artificial Sequence: Synthetic oligonucleotide
  Sense strand starting at position 988 of SEQ ID NO: 916302
uggagaaacugguuuguuc

SEQ ID NO: 1145981 - RNA, 19 nt, Artificial Sequence
  Description of Artificial Sequence: Synthetic oligonucleotide
  Antisense strand to SEQ ID NO: 1145980
gaacaaaccaguuucucca

SEQ ID NO: 1145982 - RNA, 19 nt, Artificial Sequence
  Description of Artificial Sequence: Synthetic oligonucleotide
  Sense strand starting at position 990 of SEQ ID NO: 916302
gagaaacugguuuguucca

SEQ ID NO: 1145983 - RNA, 19 nt, Artificial Sequence
  Description of Artificial Sequence: Synthetic oligonucleotide
  Antisense strand to SEQ ID NO: 1145982
uggaacaaaccaguuucuc

SEQ ID NO: 1145984 - RNA, 19 nt, Artificial Sequence
  Description of Artificial Sequence: Synthetic oligonucleotide
  Sense strand starting at position 991 of SEQ ID NO: 916302
agaaacugguuuguuccaa

SEQ ID NO: 1145985 - RNA, 19 nt, Artificial Sequence
  Description of Artificial Sequence: Synthetic oligonucleotide
  Antisense strand to SEQ ID NO: 1145984
uuggaacaaaccaguuucu

SEQ ID NO: 1145986 - RNA, 19 nt, Artificial Sequence
  Description of Artificial Sequence: Synthetic oligonucleotide
  Sense strand starting at position 992 of SEQ ID NO: 916302
gaaacugguuuguuccaaa

SEQ ID NO: 1145987 - RNA, 19 nt, Artificial Sequence
  Description of Artificial Sequence: Synthetic oligonucleotide
  Antisense strand to SEQ ID NO: 1145986
uuuggaacaaaccaguuuc

SEQ ID NO: 1145988 - RNA, 19 nt, Artificial Sequence
  Description of Artificial Sequence: Synthetic oligonucleotide
  Sense strand starting at position 2144 of SEQ ID NO: 916302
aggcgaauuccucagacuc

SEQ ID NO: 1145989 - RNA, 19 nt, Artificial Sequence
  Description of Artificial Sequence: Synthetic oligonucleotide
  Antisense strand to SEQ ID NO: 1145988
gagucugaggaauucgccu

SEQ ID NO: 1145990 - RNA, 19 nt, Artificial Sequence
  Description of Artificial Sequence: Synthetic oligonucleotide
  Sense strand starting at position 2183 of SEQ ID NO: 916302
acgcgauucgcguucauca

SEQ ID NO: 1145991 - RNA, 19 nt, Artificial Sequence
  Description of Artificial Sequence: Synthetic oligonucleotide
  Antisense strand to SEQ ID NO: 1145990
ugaugaacgcgaaucgcgu

SEQ ID NO: 1145992 - RNA, 19 nt, Artificial Sequence
  Description of Artificial Sequence: Synthetic oligonucleotide
  Sense strand starting at position 2184 of SEQ ID NO: 916302
cgcgauucgcguucaucaa

SEQ ID NO: 1145993 - RNA, 19 nt, Artificial Sequence
  Description of Artificial Sequence: Synthetic oligonucleotide
  Antisense strand to SEQ ID NO: 1145992
uugaugaacgcgaaucgcg

SEQ ID NO: 1145994 - RNA, 19 nt, Artificial Sequence
  Description of Artificial Sequence: Synthetic oligonucleotide
  Sense strand starting at position 2517 of SEQ ID NO: 916302
agguuaccucaacagguau

SEQ ID NO: 1145995 - RNA, 19 nt, Artificial Sequence
  Description of Artificial Sequence: Synthetic oligonucleotide
  Antisense strand to SEQ ID NO: 1145994
auaccuguugagguaaccu

SEQ ID NO: 1145996 - RNA, 19 nt, Artificial Sequence
  Description of Artificial Sequence: Synthetic oligonucleotide
  Sense strand starting at position 2609 of SEQ ID NO: 916302
ucccuaagucuggagacuu

SEQ ID NO: 1145997 - RNA, 19 nt, Artificial Sequence
  Description of Artificial Sequence: Synthetic oligonucleotide
  Antisense strand to SEQ ID NO: 1145996
aagucuccagacuuaggga

SEQ ID NO: 1145998 - RNA, 19 nt, Artificial Sequence
  Description of Artificial Sequence: Synthetic oligonucleotide
  Sense strand starting at position 2724 of SEQ ID NO: 916302
uccuuagauccaggagacu

SEQ ID NO: 1145999 - RNA, 19 nt, Artificial Sequence
  Description of Artificial Sequence: Synthetic oligonucleotide
  Antisense strand to SEQ ID NO: 1145998
agucuccuggaucuaagga

SEQ ID NO: 1146000 - RNA, 19 nt, Artificial Sequence
  Description of Artificial Sequence: Synthetic oligonucleotide
  Sense strand starting at position 2733 of SEQ ID NO: 916302
ccaggagacucucuugcua

SEQ ID NO: 1146001 - RNA, 19 nt, Artificial Sequence
  Description of Artificial Sequence: Synthetic oligonucleotide
  Antisense strand to SEQ ID NO: 1146000
uagcaagagagucuccugg

SEQ ID NO: 1146002 - RNA, 19 nt, Artificial Sequence
  Description of Artificial Sequence: Synthetic oligonucleotide
  Sense strand starting at position 2901 of SEQ ID NO: 916302
gagcaaagcugcuuaugga

SEQ ID NO: 1146003 - RNA, 19 nt, Artificial Sequence
  Description of Artificial Sequence: Synthetic oligonucleotide
  Antisense strand to SEQ ID NO: 1146002
uccauaagcagcuuugcuc

SEQ ID NO: 1146004 - RNA, 19 nt, Artificial Sequence
  Description of Artificial Sequence: Synthetic oligonucleotide
  Sense strand starting at position 2908 of SEQ ID NO: 916302
gcugcuuauggagacuaaa

SEQ ID NO: 1146005 - RNA, 19 nt, Artificial Sequence
  Description of Artificial Sequence: Synthetic oligonucleotide
  Antisense strand to SEQ ID NO: 1146004
uuuagucuccauaagcagc

SEQ ID NO: 1146006 - RNA, 19 nt, Artificial Sequence
  Description of Artificial Sequence: Synthetic oligonucleotide
  Sense strand starting at position 2974 of SEQ ID NO: 916302
gacauuucuucuuaggaga

SEQ ID NO: 1146007 - RNA, 19 nt, Artificial Sequence
  Description of Artificial Sequence: Synthetic oligonucleotide
  Antisense strand to SEQ ID NO: 1146006
ucuccuaagaagaaauguc

SEQ ID NO: 1146008 - RNA, 19 nt, Artificial Sequence
  Description of Artificial Sequence: Synthetic oligonucleotide
  Sense strand starting at position 2977 of SEQ ID NO: 916302
auuucuucuuaggagacua

SEQ ID NO: 1146009 - RNA, 19 nt, Artificial Sequence
  Description of Artificial Sequence: Synthetic oligonucleotide
  Antisense strand to SEQ ID NO: 1146008
uagucuccuaagaagaaau

SEQ ID NO: 1146010 - RNA, 19 nt, Artificial Sequence
  Description of Artificial Sequence: Synthetic oligonucleotide
  Sense strand starting at position 2988 of SEQ ID NO: 916302
ggagacuauuugcaucuga

SEQ ID NO: 1146011 - RNA, 19 nt, Artificial Sequence
  Description of Artificial Sequence: Synthetic oligonucleotide
  Antisense strand to SEQ ID NO: 1146010
ucagaugcaaauagucucc

SEQ ID NO: 1146012 - RNA, 19 nt, Artificial Sequence
  Description of Artificial Sequence: Synthetic oligonucleotide
  Sense strand starting at position 3184 of SEQ ID NO: 916302
acacuuucucuggaggguu

SEQ ID NO: 1146013 - RNA, 19 nt, Artificial Sequence
  Description of Artificial Sequence: Synthetic oligonucleotide
  Antisense strand to SEQ ID NO: 1146012
aacccuccagagaaagugu

SEQ ID NO: 1146014 - RNA, 19 nt, Artificial Sequence
  Description of Artificial Sequence: Synthetic oligonucleotide
  Sense strand starting at position 3291 of SEQ ID NO: 916302
uguacagugauuugggcuu

SEQ ID NO: 1146015 - RNA, 19 nt, Artificial Sequence
  Description of Artificial Sequence: Synthetic oligonucleotide
  Antisense strand to SEQ ID NO: 1146014
aagcccaaaucacuguaca

SEQ ID NO: 1146016 - RNA, 19 nt, Artificial Sequence
  Description of Artificial Sequence: Synthetic oligonucleotide
  Sense strand starting at position 3424 of SEQ ID NO: 916302
ggcuguuacacccaggaaa

SEQ ID NO: 1146017 - RNA, 19 nt, Artificial Sequence
  Description of Artificial Sequence: Synthetic oligonucleotide
  Antisense strand to SEQ ID NO: 1146016
uuuccuggguguaacagcc

SEQ ID NO: 1146018 - RNA, 19 nt, Artificial Sequence
  Description of Artificial Sequence: Synthetic oligonucleotide
  Sense strand starting at position 3426 of SEQ ID NO: 916302
cuguuacacccaggaaauc

SEQ ID NO: 1146019 - RNA, 19 nt, Artificial Sequence
  Description of Artificial Sequence: Synthetic oligonucleotide
  Antisense strand to SEQ ID NO: 1146018
gauuuccuggguguaacag

SEQ ID NO: 1146020 - RNA, 19 nt, Artificial Sequence
  Description of Artificial Sequence: Synthetic oligonucleotide
  Sense strand starting at position 3509 of SEQ ID NO: 916302
ccaugcucaguguaaacua

SEQ ID NO: 1146021 - RNA, 19 nt, Artificial Sequence
  Description of Artificial Sequence: Synthetic oligonucleotide
  Antisense strand to SEQ ID NO: 1146020
uaguuuacacugagcaugg

SEQ ID NO: 1146022 - RNA, 19 nt, Artificial Sequence
  Description of Artificial Sequence: Synthetic oligonucleotide
  Sense strand starting at position 3599 of SEQ ID NO: 916302
augcauacaugccugacaa

SEQ ID NO: 1146023 - RNA, 19 nt, Artificial Sequence
  Description of Artificial Sequence: Synthetic oligonucleotide
  Antisense strand to SEQ ID NO: 1146022
uugucaggcauguaugcau

SEQ ID NO: 1146024 - RNA, 19 nt, Artificial Sequence
  Description of Artificial Sequence: Synthetic oligonucleotide
  Sense strand starting at position 3600 of SEQ ID NO: 916302
ugcauacaugccugacaaa

SEQ ID NO: 1146025 - RNA, 19 nt, Artificial Sequence
  Description of Artificial Sequence: Synthetic oligonucleotide
  Antisense strand to SEQ ID NO: 1146024
uuugucaggcauguaugca

SEQ ID NO: 1146026 - RNA, 19 nt, Artificial Sequence
  Description of Artificial Sequence: Synthetic oligonucleotide
  Sense strand starting at position 3601 of SEQ ID NO: 916302
gcauacaugccugacaaac

SEQ ID NO: 1146027 - RNA, 19 nt, Artificial Sequence
  Description of Artificial Sequence: Synthetic oligonucleotide
  Antisense strand to SEQ ID NO: 1146026
guuugucaggcauguaugc

SEQ ID NO: 1146028 - RNA, 19 nt, Artificial Sequence
  Description of Artificial Sequence: Synthetic oligonucleotide
  Sense strand starting at position 3634 of SEQ ID NO: 916302
aggucuuugcauuaugaaa

SEQ ID NO: 1146029 - RNA, 19 nt, Artificial Sequence
  Description of Artificial Sequence: Synthetic oligonucleotide
  Antisense strand to SEQ ID NO: 1146028
uuucauaaugcaaagaccu

SEQ ID NO: 1146030 - RNA, 19 nt, Artificial Sequence
  Description of Artificial Sequence: Synthetic oligonucleotide
  Sense strand starting at position 3687 of SEQ ID NO: 916302
ggguuucaggguuggauga

SEQ ID NO: 1146031 - RNA, 19 nt, Artificial Sequence
  Description of Artificial Sequence: Synthetic oligonucleotide
  Antisense strand to SEQ ID NO: 1146030
ucauccaacccugaaaccc

SEQ ID NO: 1146032 - RNA, 19 nt, Artificial Sequence
  Description of Artificial Sequence: Synthetic oligonucleotide
  Sense strand starting at position 3791 of SEQ ID NO: 916302
gcaggaugguuuagagaga

SEQ ID NO: 1146033 - RNA, 19 nt, Artificial Sequence
  Description of Artificial Sequence: Synthetic oligonucleotide
  Antisense strand to SEQ ID NO: 1146032
ucucucuaaaccauccugc

SEQ ID NO: 1146034 - RNA, 19 nt, Artificial Sequence
  Description of Artificial Sequence: Synthetic oligonucleotide
  Sense strand starting at position 3868 of SEQ ID NO: 916302
auggccacucucugucaaa

SEQ ID NO: 1146035 - RNA, 19 nt, Artificial Sequence
  Description of Artificial Sequence: Synthetic oligonucleotide
  Antisense strand to SEQ ID NO: 1146034
uuugacagagaguggccau

SEQ ID NO: 1146036 - RNA, 19 nt, Artificial Sequence
  Description of Artificial Sequence: Synthetic oligonucleotide
  Sense strand starting at position 79 of SEQ ID NO: 916303
acgaccaaguccugaaauu

SEQ ID NO: 1146037 - RNA, 19 nt, Artificial Sequence
  Description of Artificial Sequence: Synthetic oligonucleotide
  Antisense strand to SEQ ID NO: 1146036
aauuucaggacuuggucgu

SEQ ID NO: 1146038 - RNA, 19 nt, Artificial Sequence
  Description of Artificial Sequence: Synthetic oligonucleotide
  Sense strand starting at position 109 of SEQ ID NO: 916303
gcuuccugacccugagaau

SEQ ID NO: 1146039 - RNA, 19 nt, Artificial Sequence
  Description of Artificial Sequence: Synthetic oligonucleotide
  Antisense strand to SEQ ID NO: 1146038
auucucagggucaggaagc

SEQ ID NO: 1146040 - RNA, 19 nt, Artificial Sequence
  Description of Artificial Sequence: Synthetic oligonucleotide
  Sense strand starting at position 190 of SEQ ID NO: 916303
gcgaauucucagggugaug

SEQ ID NO: 1146041 - RNA, 19 nt, Artificial Sequence
  Description of Artificial Sequence: Synthetic oligonucleotide
  Antisense strand to SEQ ID NO: 1146040
caucacccugagaauucgc

SEQ ID NO: 1146042 - RNA, 19 nt, Artificial Sequence
  Description of Artificial Sequence: Synthetic oligonucleotide
  Sense strand starting at position 192 of SEQ ID NO: 916303
gaauucucagggugaugcu

SEQ ID NO: 1146043 - RNA, 19 nt, Artificial Sequence
  Description of Artificial Sequence: Synthetic oligonucleotide
  Antisense strand to SEQ ID NO: 1146042
agcaucacccugagaauuc

SEQ ID NO: 1146044 - RNA, 19 nt, Artificial Sequence
  Description of Artificial Sequence: Synthetic oligonucleotide
  Sense strand starting at position 353 of SEQ ID NO: 916303
auuucagguuuaugggagu

SEQ ID NO: 1146045 - RNA, 19 nt, Artificial Sequence
  Description of Artificial Sequence: Synthetic oligonucleotide
  Antisense strand to SEQ ID NO: 1146044
acucccauaaaccugaaau

SEQ ID NO: 1146046 - RNA, 19 nt, Artificial Sequence
  Description of Artificial Sequence: Synthetic oligonucleotide
  Sense strand starting at position 359 of SEQ ID NO: 916303
gguuuaugggaguagcuga

SEQ ID NO: 1146047 - RNA, 19 nt, Artificial Sequence
  Description of Artificial Sequence: Synthetic oligonucleotide
  Antisense strand to SEQ ID NO: 1146046
ucagcuacucccauaaacc

SEQ ID NO: 1146048 - RNA, 19 nt, Artificial Sequence
  Description of Artificial Sequence: Synthetic oligonucleotide
  Sense strand starting at position 602 of SEQ ID NO: 916303
gccugucucccugauugga

SEQ ID NO: 1146049 - RNA, 19 nt, Artificial Sequence
  Description of Artificial Sequence: Synthetic oligonucleotide
  Antisense strand to SEQ ID NO: 1146048
uccaaucagggagacaggc

SEQ ID NO: 1146050 - RNA, 19 nt, Artificial Sequence
  Description of Artificial Sequence: Synthetic oligonucleotide
  Sense strand starting at position 660 of SEQ ID NO: 916303
uguguagaauucucuaauc

SEQ ID NO: 1146051 - RNA, 19 nt, Artificial Sequence
  Description of Artificial Sequence: Synthetic oligonucleotide
  Antisense strand to SEQ ID NO: 1146050
gauuagagaauucuacaca

SEQ ID NO: 1146052 - RNA, 19 nt, Artificial Sequence
  Description of Artificial Sequence: Synthetic oligonucleotide
  Sense strand starting at position 662 of SEQ ID NO: 916303
uguagaauucucuaaucug

SEQ ID NO: 1146053 - RNA, 19 nt, Artificial Sequence
  Description of Artificial Sequence: Synthetic oligonucleotide
  Antisense strand to SEQ ID NO: 1146052
cagauuagagaauucuaca

SEQ ID NO: 1146054 - RNA, 19 nt, Artificial Sequence
  Description of Artificial Sequence: Synthetic oligonucleotide
  Sense strand starting at position 796 of SEQ ID NO: 916303
cuuugaaaguccugaucuc

SEQ ID NO: 1146055 - RNA, 19 nt, Artificial Sequence
  Description of Artificial Sequence: Synthetic oligonucleotide
  Antisense strand to SEQ ID NO: 1146054
gagaucaggacuuucaaag

SEQ ID NO: 1146056 - RNA, 19 nt, Artificial Sequence
  Description of Artificial Sequence: Synthetic oligonucleotide
  Sense strand starting at position 797 of SEQ ID NO: 916303
uuugaaaguccugaucucu

SEQ ID NO: 1146057 - RNA, 19 nt, Artificial Sequence
  Description of Artificial Sequence: Synthetic oligonucleotide
  Antisense strand to SEQ ID NO: 1146056
agagaucaggacuuucaaa

SEQ ID NO: 1146058 - RNA, 19 nt, Artificial Sequence
  Description of Artificial Sequence: Synthetic oligonucleotide
  Sense strand starting at position 820 of SEQ ID NO: 916303
guucucaggcuucgaaaua

SEQ ID NO: 1146059 - RNA, 19 nt, Artificial Sequence
  Description of Artificial Sequence: Synthetic oligonucleotide
  Antisense strand to SEQ ID NO: 1146058
uauuucgaagccugagaac

SEQ ID NO: 1146060 - RNA, 19 nt, Artificial Sequence
  Description of Artificial Sequence: Synthetic oligonucleotide
  Sense strand starting at position 867 of SEQ ID NO: 916303
gggagaaguccauggaccu

SEQ ID NO: 1146061 - RNA, 19 nt, Artificial Sequence
  Description of Artificial Sequence: Synthetic oligonucleotide
  Antisense strand to SEQ ID NO: 1146060
agguccauggacuucuccc

SEQ ID NO: 1146062 - RNA, 19 nt, Artificial Sequence
  Description of Artificial Sequence: Synthetic oligonucleotide
  Sense strand starting at position 868 of SEQ ID NO: 916303
ggagaaguccauggaccuu

SEQ ID NO: 1146063 - RNA, 19 nt, Artificial Sequence
  Description of Artificial Sequence: Synthetic oligonucleotide
  Antisense strand to SEQ ID NO: 1146062
aagguccauggacuucucc

SEQ ID NO: 1146064 - RNA, 19 nt, Artificial Sequence
  Description of Artificial Sequence: Synthetic oligonucleotide
  Sense strand starting at position 1055 of SEQ ID NO: 916303
uccgccuuucuucgaaagu

SEQ ID NO: 1146065 - RNA, 19 nt, Artificial Sequence
  Description of Artificial Sequence: Synthetic oligonucleotide
  Antisense strand to SEQ ID NO: 1146064
acuuucgaagaaaggcgga

SEQ ID NO: 1146066 - RNA, 19 nt, Artificial Sequence
  Description of Artificial Sequence: Synthetic oligonucleotide
  Sense strand starting at position 1281 of SEQ ID NO: 916303
guucgggagggcuguaauu

SEQ ID NO: 1146067 - RNA, 19 nt, Artificial Sequence
  Description of Artificial Sequence: Synthetic oligonucleotide
  Antisense strand to SEQ ID NO: 1146066
aauuacagcccucccgaac

SEQ ID NO: 1146068 - RNA, 19 nt, Artificial Sequence
  Description of Artificial Sequence: Synthetic oligonucleotide
  Sense strand starting at position 2038 of SEQ ID NO: 916303
acgugaucguauuuaccca

SEQ ID NO: 1146069 - RNA, 19 nt, Artificial Sequence
  Description of Artificial Sequence: Synthetic oligonucleotide
  Antisense strand to SEQ ID NO: 1146068
uggguaaauacgaucacgu

SEQ ID NO: 1146070 - RNA, 19 nt, Artificial Sequence
  Description of Artificial Sequence: Synthetic oligonucleotide
  Sense strand starting at position 2209 of SEQ ID NO: 916303
gcuccuagcucaucugaga

SEQ ID NO: 1146071 - RNA, 19 nt, Artificial Sequence
  Description of Artificial Sequence: Synthetic oligonucleotide
  Antisense strand to SEQ ID NO: 1146070
ucucagaugagcuaggagc

SEQ ID NO: 1146072 - RNA, 19 nt, Artificial Sequence
  Description of Artificial Sequence: Synthetic oligonucleotide
  Sense strand starting at position 2395 of SEQ ID NO: 916303
ggaacuauuucuugacgua

SEQ ID NO: 1146073 - RNA, 19 nt, Artificial Sequence
  Description of Artificial Sequence: Synthetic oligonucleotide
  Antisense strand to SEQ ID NO: 1146072
uacgucaagaaauaguucc

SEQ ID NO: 1146074 - RNA, 19 nt, Artificial Sequence
  Description of Artificial Sequence: Synthetic oligonucleotide
  Sense strand starting at position 2398 of SEQ ID NO: 916303
acuauuucuugacguaauc

SEQ ID NO: 1146075 - RNA, 19 nt, Artificial Sequence
  Description of Artificial Sequence: Synthetic oligonucleotide
  Antisense strand to SEQ ID NO: 1146074
gauuacgucaagaaauagu

SEQ ID NO: 1146076 - RNA, 19 nt, Artificial Sequence
  Description of Artificial Sequence: Synthetic oligonucleotide
  Sense strand starting at position 2407 of SEQ ID NO: 916303
ugacguaauccgucucugu

SEQ ID NO: 1146077 - RNA, 19 nt, Artificial Sequence
  Description of Artificial Sequence: Synthetic oligonucleotide
  Antisense strand to SEQ ID NO: 1146076
acagagacggauuacguca

SEQ ID NO: 1146078 - RNA, 19 nt, Artificial Sequence
  Description of Artificial Sequence: Synthetic oligonucleotide
  Sense strand starting at position 2408 of SEQ ID NO: 916303
gacguaauccgucucuguc

SEQ ID NO: 1146079 - RNA, 19 nt, Artificial Sequence
  Description of Artificial Sequence: Synthetic oligonucleotide
  Antisense strand to SEQ ID NO: 1146078
gacagagacggauuacguc

SEQ ID NO: 1146080 - RNA, 19 nt, Artificial Sequence
  Description of Artificial Sequence: Synthetic oligonucleotide
  Sense strand starting at position 2456 of SEQ ID NO: 916303
agccgagaucagcgauugu

SEQ ID NO: 1146081 - RNA, 19 nt, Artificial Sequence
  Description of Artificial Sequence: Synthetic oligonucleotide
  Antisense strand to SEQ ID NO: 1146080
acaaucgcugaucucggcu

SEQ ID NO: 1146082 - RNA, 19 nt, Artificial Sequence
  Description of Artificial Sequence: Synthetic oligonucleotide
  Sense strand starting at position 2460 of SEQ ID NO: 916303
gagaucagcgauugucagu

SEQ ID NO: 1146083 - RNA, 19 nt, Artificial Sequence
  Description of Artificial Sequence: Synthetic oligonucleotide
  Antisense strand to SEQ ID NO: 1146082
acugacaaucgcugaucuc

SEQ ID NO: 1146084 - RNA, 19 nt, Artificial Sequence
  Description of Artificial Sequence: Synthetic oligonucleotide
  Sense strand starting at position 2465 of SEQ ID NO: 916303
cagcgauugucaguucgga

SEQ ID NO: 1146085 - RNA, 19 nt, Artificial Sequence
  Description of Artificial Sequence: Synthetic oligonucleotide
  Antisense strand to SEQ ID NO: 1146084
uccgaacugacaaucgcug

SEQ ID NO: 1146086 - RNA, 19 nt, Artificial Sequence
  Description of Artificial Sequence: Synthetic oligonucleotide
  Sense strand starting at position 2510 of SEQ ID NO: 916303
aauaguguguauguaugua

SEQ ID NO: 1146087 - RNA, 19 nt, Artificial Sequence
  Description of Artificial Sequence: Synthetic oligonucleotide
  Antisense strand to SEQ ID NO: 1146086
uacauacauacacacuauu

SEQ ID NO: 1146088 - RNA, 19 nt, Artificial Sequence
  Description of Artificial Sequence: Synthetic oligonucleotide
  Sense strand starting at position 2750 of SEQ ID NO: 916303
cucuuugcuuuggcacaga

SEQ ID NO: 1146089 - RNA, 19 nt, Artificial Sequence
  Description of Artificial Sequence: Synthetic oligonucleotide
  Antisense strand to SEQ ID NO: 1146088
ucugugccaaagcaaagag

SEQ ID NO: 1146090 - RNA, 19 nt, Artificial Sequence
  Description of Artificial Sequence: Synthetic oligonucleotide
  Sense strand starting at position 2753 of SEQ ID NO: 916303
uuugcuuuggcacagauau

SEQ ID NO: 1146091 - RNA, 19 nt, Artificial Sequence
  Description of Artificial Sequence: Synthetic oligonucleotide
  Antisense strand to SEQ ID NO: 1146090
auaucugugccaaagcaaa

SEQ ID NO: 1146092 - RNA, 19 nt, Artificial Sequence
  Description of Artificial Sequence: Synthetic oligonucleotide
  Sense strand starting at position 2830 of SEQ ID NO: 916303
gaagaaguguaggagagau

SEQ ID NO: 1146093 - RNA, 19 nt, Artificial Sequence
  Description of Artificial Sequence: Synthetic oligonucleotide
  Antisense strand to SEQ ID NO: 1146092
aucucuccuacacuucuuc

SEQ ID NO: 1146094 - RNA, 19 nt, Artificial Sequence
  Description of Artificial Sequence: Synthetic oligonucleotide
  Sense strand starting at position 2909 of SEQ ID NO: 916303
acuccaucucugcgacacu

SEQ ID NO: 1146095 - RNA, 19 nt, Artificial Sequence
  Description of Artificial Sequence: Synthetic oligonucleotide
  Antisense strand to SEQ ID NO: 1146094
agugucgcagagauggagu

SEQ ID NO: 1146096 - RNA, 19 nt, Artificial Sequence
  Description of Artificial Sequence: Synthetic oligonucleotide
  Sense strand starting at position 3064 of SEQ ID NO: 916303
ugaggaucauuugauuguu

SEQ ID NO: 1146097 - RNA, 19 nt, Artificial Sequence
  Description of Artificial Sequence: Synthetic oligonucleotide
  Antisense strand to SEQ ID NO: 1146096
aacaaucaaaugauccuca

SEQ ID NO: 1146098 - RNA, 19 nt, Artificial Sequence
  Description of Artificial Sequence: Synthetic oligonucleotide
  Sense strand starting at position 3203 of SEQ ID NO: 916303
ugugauugcagaggaauau

SEQ ID NO: 1146099 - RNA, 19 nt, Artificial Sequence
  Description of Artificial Sequence: Synthetic oligonucleotide
  Antisense strand to SEQ ID NO: 1146098
auauuccucugcaaucaca

SEQ ID NO: 1146100 - RNA, 19 nt, Artificial Sequence
  Description of Artificial Sequence: Synthetic oligonucleotide
  Sense strand starting at position 3212 of SEQ ID NO: 916303
agaggaauaucagacaacu

SEQ ID NO: 1146101 - RNA, 19 nt, Artificial Sequence
  Description of Artificial Sequence: Synthetic oligonucleotide
  Antisense strand to SEQ ID NO: 1146100
aguugucugauauuccucu

SEQ ID NO: 1146102 - RNA, 19 nt, Artificial Sequence
  Description of Artificial Sequence: Synthetic oligonucleotide
  Sense strand starting at position 3341 of SEQ ID NO: 916303
gcuuuagucaaguaggaaa

SEQ ID NO: 1146103 - RNA, 19 nt, Artificial Sequence
  Description of Artificial Sequence: Synthetic oligonucleotide
  Antisense strand to SEQ ID NO: 1146102
uuuccuacuugacuaaagc

SEQ ID NO: 1146104 - RNA, 19 nt, Artificial Sequence
  Description of Artificial Sequence: Synthetic oligonucleotide
  Sense strand starting at position 3343 of SEQ ID NO: 916303
uuuagucaaguaggaaauu

SEQ ID NO: 1146105 - RNA, 19 nt, Artificial Sequence
  Description of Artificial Sequence: Synthetic oligonucleotide
  Antisense strand to SEQ ID NO: 1146104
aauuuccuacuugacuaaa

SEQ ID NO: 1146106 - RNA, 19 nt, Artificial Sequence
  Description of Artificial Sequence: Synthetic oligonucleotide
  Sense strand starting at position 3344 of SEQ ID NO: 916303
uuagucaaguaggaaauua

SEQ ID NO: 1146107 - RNA, 19 nt, Artificial Sequence
  Description of Artificial Sequence: Synthetic oligonucleotide
  Antisense strand to SEQ ID NO: 1146106
uaauuuccuacuugacuaa

SEQ ID NO: 1146108 - RNA, 19 nt, Artificial Sequence
  Description of Artificial Sequence: Synthetic oligonucleotide
  Sense strand starting at position 3355 of SEQ ID NO: 916303
ggaaauuaucagggugggu

SEQ ID NO: 1146109 - RNA, 19 nt, Artificial Sequence
  Description of Artificial Sequence: Synthetic oligonucleotide
  Antisense strand to SEQ ID NO: 1146108
acccacccugauaauuucc

SEQ ID NO: 1146110 - RNA, 19 nt, Artificial Sequence
  Description of Artificial Sequence: Synthetic oligonucleotide
  Sense strand starting at position 3357 of SEQ ID NO: 916303
aaauuaucaggguggguga

SEQ ID NO: 1146111 - RNA, 19 nt, Artificial Sequence
  Description of Artificial Sequence: Synthetic oligonucleotide
  Antisense strand to SEQ ID NO: 1146110
ucacccacccugauaauuu

SEQ ID NO: 1146112 - RNA, 19 nt, Artificial Sequence
  Description of Artificial Sequence: Synthetic oligonucleotide
  Sense strand starting at position 3433 of SEQ ID NO: 916303
ccagaaauauggugcacuu

SEQ ID NO: 1146113 - RNA, 19 nt, Artificial Sequence
  Description of Artificial Sequence: Synthetic oligonucleotide
  Antisense strand to SEQ ID NO: 1146112
aagugcaccauauuucugg

SEQ ID NO: 1146114 - RNA, 19 nt, Artificial Sequence
  Description of Artificial Sequence: Synthetic oligonucleotide
  Sense strand starting at position 3910 of SEQ ID NO: 916303
gaggaugagggauguguuu

SEQ ID NO: 1146115 - RNA, 19 nt, Artificial Sequence
  Description of Artificial Sequence: Synthetic oligonucleotide
  Antisense strand to SEQ ID NO: 1146114
aaacacaucccucauccuc

SEQ ID NO: 1146116 - RNA, 19 nt, Artificial Sequence
  Description of Artificial Sequence: Synthetic oligonucleotide
  Sense strand starting at position 10 of SEQ ID NO: 916304
aaguuaguagcagaaauca

SEQ ID NO: 1146117 - RNA, 19 nt, Artificial Sequence
  Description of Artificial Sequence: Synthetic oligonucleotide
  Antisense strand to SEQ ID NO: 1146116
ugauuucugcuacuaacuu

SEQ ID NO: 1146118 - RNA, 19 nt, Artificial Sequence
  Description of Artificial Sequence: Synthetic oligonucleotide
  Sense strand starting at position 54 of SEQ ID NO: 916304
gcauuuaucucguuccaau

SEQ ID NO: 1146119 - RNA, 19 nt, Artificial Sequence
  Description of Artificial Sequence: Synthetic oligonucleotide
  Antisense strand to SEQ ID NO: 1146118
auuggaacgagauaaaugc

SEQ ID NO: 1146120 - RNA, 19 nt, Artificial Sequence
  Description of Artificial Sequence: Synthetic oligonucleotide
  Sense strand starting at position 691 of SEQ ID NO: 916304
uugaucucccagcauaaug

SEQ ID NO: 1146121 - RNA, 19 nt, Artificial Sequence
  Description of Artificial Sequence: Synthetic oligonucleotide
  Antisense strand to SEQ ID NO: 1146120
cauuaugcugggagaucaa

SEQ ID NO: 1146122 - RNA, 19 nt, Artificial Sequence
  Description of Artificial Sequence: Synthetic oligonucleotide
  Sense strand starting at position 1093 of SEQ ID NO: 916304
ucuuaaaucuaggcaauug

SEQ ID NO: 1146123 - RNA, 19 nt, Artificial Sequence
  Description of Artificial Sequence: Synthetic oligonucleotide
  Antisense strand to SEQ ID NO: 1146122
caauugccuagauuuaaga

SEQ ID NO: 1146124 - RNA, 19 nt, Artificial Sequence
  Description of Artificial Sequence: Synthetic oligonucleotide
  Sense strand starting at position 1255 of SEQ ID NO: 916304
gggcaaacauguuugaaua

SEQ ID NO: 1146125 - RNA, 19 nt, Artificial Sequence
  Description of Artificial Sequence: Synthetic oligonucleotide
  Antisense strand to SEQ ID NO: 1146124
uauucaaacauguuugccc

SEQ ID NO: 1146126 - RNA, 19 nt, Artificial Sequence
  Description of Artificial Sequence: Synthetic oligonucleotide
  Sense strand starting at position 1256 of SEQ ID NO: 916304
ggcaaacauguuugaauac

SEQ ID NO: 1146127 - RNA, 19 nt, Artificial Sequence
  Description of Artificial Sequence: Synthetic oligonucleotide
  Antisense strand to SEQ ID NO: 1146126
guauucaaacauguuugcc

SEQ ID NO: 1146128 - RNA, 19 nt, Artificial Sequence
  Description of Artificial Sequence: Synthetic oligonucleotide
  Sense strand starting at position 1315 of SEQ ID NO: 916304
agaggcacauggucagaua

SEQ ID NO: 1146129 - RNA, 19 nt, Artificial Sequence
  Description of Artificial Sequence: Synthetic oligonucleotide
  Antisense strand to SEQ ID NO: 1146128
uaucugaccaugugccucu

SEQ ID NO: 1146130 - RNA, 19 nt, Artificial Sequence
  Description of Artificial Sequence: Synthetic oligonucleotide
  Sense strand starting at position 1336 of SEQ ID NO: 916304
aaaguugauuguuuaggua

SEQ ID NO: 1146131 - RNA, 19 nt, Artificial Sequence
  Description of Artificial Sequence: Synthetic oligonucleotide
  Antisense strand to SEQ ID NO: 1146130
uaccuaaacaaucaacuuu

SEQ ID NO: 1146132 - RNA, 19 nt, Artificial Sequence
  Description of Artificial Sequence: Synthetic oligonucleotide
  Sense strand starting at position 1383 of SEQ ID NO: 916304
uugcuaguuggguaaauug

SEQ ID NO: 1146133 - RNA, 19 nt, Artificial Sequence
  Description of Artificial Sequence: Synthetic oligonucleotide
  Antisense strand to SEQ ID NO: 1146132
caauuuacccaacuagcaa

SEQ ID NO: 1146134 - RNA, 19 nt, Artificial Sequence
  Description of Artificial Sequence: Synthetic oligonucleotide
  Sense strand starting at position 1391 of SEQ ID NO: 916304
uggguaaauugguuauuga

SEQ ID NO: 1146135 - RNA, 19 nt, Artificial Sequence
  Description of Artificial Sequence: Synthetic oligonucleotide
  Antisense strand to SEQ ID NO: 1146134
ucaauaaccaauuuaccca

SEQ ID NO: 1146136 - RNA, 19 nt, Artificial Sequence
  Description of Artificial Sequence: Synthetic oligonucleotide
  Sense strand starting at position 1394 of SEQ ID NO: 916304
guaaauugguuauugagac

SEQ ID NO: 1146137 - RNA, 19 nt, Artificial Sequence
  Description of Artificial Sequence: Synthetic oligonucleotide
  Antisense strand to SEQ ID NO: 1146136
gucucaauaaccaauuuac

SEQ ID NO: 1146138 - RNA, 19 nt, Artificial Sequence
  Description of Artificial Sequence: Synthetic oligonucleotide
  Sense strand starting at position 1426 of SEQ ID NO: 916304
gucaaauugggauguaaua

SEQ ID NO: 1146139 - RNA, 19 nt, Artificial Sequence
  Description of Artificial Sequence: Synthetic oligonucleotide
  Antisense strand to SEQ ID NO: 1146138
uauuacaucccaauuugac

SEQ ID NO: 1146140 - RNA, 19 nt, Artificial Sequence
  Description of Artificial Sequence: Synthetic oligonucleotide
  Sense strand starting at position 1501 of SEQ ID NO: 916304
ggcacauuauaaguaucaa

SEQ ID NO: 1146141 - RNA, 19 nt, Artificial Sequence
  Description of Artificial Sequence: Synthetic oligonucleotide
  Antisense strand to SEQ ID NO: 1146140
uugauacuuauaaugugcc

SEQ ID NO: 1146142 - RNA, 19 nt, Artificial Sequence
  Description of Artificial Sequence: Synthetic oligonucleotide
  Sense strand starting at position 1595 of SEQ ID NO: 916304
caguauauggcucauagga

SEQ ID NO: 1146143 - RNA, 19 nt, Artificial Sequence
  Description of Artificial Sequence: Synthetic oligonucleotide
  Antisense strand to SEQ ID NO: 1146142
uccuaugagccauauacug

SEQ ID NO: 1146144 - RNA, 19 nt, Artificial Sequence
  Description of Artificial Sequence: Synthetic oligonucleotide
  Sense strand starting at position 1622 of SEQ ID NO: 916304
augaauauuuguuagcaga

SEQ ID NO: 1146145 - RNA, 19 nt, Artificial Sequence
  Description of Artificial Sequence: Synthetic oligonucleotide
  Antisense strand to SEQ ID NO: 1146144
ucugcuaacaaauauucau

SEQ ID NO: 1146146 - RNA, 19 nt, Artificial Sequence
  Description of Artificial Sequence: Synthetic oligonucleotide
  Sense strand starting at position 1641 of SEQ ID NO: 916304
aggacagcucuaugagaua

SEQ ID NO: 1146147 - RNA, 19 nt, Artificial Sequence
  Description of Artificial Sequence: Synthetic oligonucleotide
  Antisense strand to SEQ ID NO: 1146146
uaucucauagagcuguccu

SEQ ID NO: 1146148 - RNA, 19 nt, Artificial Sequence
  Description of Artificial Sequence: Synthetic oligonucleotide
  Sense strand starting at position 1653 of SEQ ID NO: 916304
ugagauagauugcuaucaa

SEQ ID NO: 1146149 - RNA, 19 nt, Artificial Sequence
  Description of Artificial Sequence: Synthetic oligonucleotide
  Antisense strand to SEQ ID NO: 1146148
uugauagcaaucuaucuca

SEQ ID NO: 1146150 - RNA, 19 nt, Artificial Sequence
  Description of Artificial Sequence: Synthetic oligonucleotide
  Sense strand starting at position 1781 of SEQ ID NO: 916304
cauaucggaucuguaaagu

SEQ ID NO: 1146151 - RNA, 19 nt, Artificial Sequence
  Description of Artificial Sequence: Synthetic oligonucleotide
  Antisense strand to SEQ ID NO: 1146150
acuuuacagauccgauaug

SEQ ID NO: 1146152 - RNA, 19 nt, Artificial Sequence
  Description of Artificial Sequence: Synthetic oligonucleotide
  Sense strand starting at position 1787 of SEQ ID NO: 916304
ggaucuguaaagugaggga

SEQ ID NO: 1146153 - RNA, 19 nt, Artificial Sequence
  Description of Artificial Sequence: Synthetic oligonucleotide
  Antisense strand to SEQ ID NO: 1146152
ucccucacuuuacagaucc

SEQ ID NO: 1146154 - RNA, 19 nt, Artificial Sequence
  Description of Artificial Sequence: Synthetic oligonucleotide
  Sense strand starting at position 2541 of SEQ ID NO: 916304
ggcaaagaacuuuagcaac

SEQ ID NO: 1146155 - RNA, 19 nt, Artificial Sequence
  Description of Artificial Sequence: Synthetic oligonucleotide
  Antisense strand to SEQ ID NO: 1146154
guugcuaaaguucuuugcc

SEQ ID NO: 1146156 - RNA, 19 nt, Artificial Sequence
  Description of Artificial Sequence: Synthetic oligonucleotide
  Sense strand starting at position 2558 of SEQ ID NO: 916304
acugaagaguuagccauau

SEQ ID NO: 1146157 - RNA, 19 nt, Artificial Sequence
  Description of Artificial Sequence: Synthetic oligonucleotide
  Antisense strand to SEQ ID NO: 1146156
auauggcuaacucuucagu

SEQ ID NO: 1146158 - RNA, 19 nt, Artificial Sequence
  Description of Artificial Sequence: Synthetic oligonucleotide
  Sense strand starting at position 2560 of SEQ ID NO: 916304
ugaagaguuagccauauug

SEQ ID NO: 1146159 - RNA, 19 nt, Artificial Sequence
  Description of Artificial Sequence: Synthetic oligonucleotide
  Antisense strand to SEQ ID NO: 1146158
caauauggcuaacucuuca

SEQ ID NO: 1146160 - RNA, 19 nt, Artificial Sequence
  Description of Artificial Sequence: Synthetic oligonucleotide
  Sense strand starting at position 2575 of SEQ ID NO: 916304
auugauauccagcaagagu

SEQ ID NO: 1146161 - RNA, 19 nt, Artificial Sequence
  Description of Artificial Sequence: Synthetic oligonucleotide
  Antisense strand to SEQ ID NO: 1146160
acucuugcuggauaucaau

SEQ ID NO: 1146162 - RNA, 19 nt, Artificial Sequence
  Description of Artificial Sequence: Synthetic oligonucleotide
  Sense strand starting at position 2623 of SEQ ID NO: 916304
gguuuaagugcugugcauu

SEQ ID NO: 1146163 - RNA, 19 nt, Artificial Sequence
  Description of Artificial Sequence: Synthetic oligonucleotide
  Antisense strand to SEQ ID NO: 1146162
aaugcacagcacuuaaacc

SEQ ID NO: 1146164 - RNA, 19 nt, Artificial Sequence
  Description of Artificial Sequence: Synthetic oligonucleotide
  Sense strand starting at position 2720 of SEQ ID NO: 916304
guguuacuuggugauuaaa

SEQ ID NO: 1146165 - RNA, 19 nt, Artificial Sequence
  Description of Artificial Sequence: Synthetic oligonucleotide
  Antisense strand to SEQ ID NO: 1146164
uuuaaucaccaaguaacac

SEQ ID NO: 1146166 - RNA, 19 nt, Artificial Sequence
  Description of Artificial Sequence: Synthetic oligonucleotide
  Sense strand starting at position 2722 of SEQ ID NO: 916304
guuacuuggugauuaaaca

SEQ ID NO: 1146167 - RNA, 19 nt, Artificial Sequence
  Description of Artificial Sequence: Synthetic oligonucleotide
  Antisense strand to SEQ ID NO: 1146166
uguuuaaucaccaaguaac

SEQ ID NO: 1146168 - RNA, 19 nt, Artificial Sequence
  Description of Artificial Sequence: Synthetic oligonucleotide
  Sense strand starting at position 2742 of SEQ ID NO: 916304
cugucaugugccucgcuga

SEQ ID NO: 1146169 - RNA, 19 nt, Artificial Sequence
  Description of Artificial Sequence: Synthetic oligonucleotide
  Antisense strand to SEQ ID NO: 1146168
ucagcgaggcacaugacag

SEQ ID NO: 1146170 - RNA, 19 nt, Artificial Sequence
  Description of Artificial Sequence: Synthetic oligonucleotide
  Sense strand starting at position 2901 of SEQ ID NO: 916304
ccggcauuugcugauugua

SEQ ID NO: 1146171 - RNA, 19 nt, Artificial Sequence
  Description of Artificial Sequence: Synthetic oligonucleotide
  Antisense strand to SEQ ID NO: 1146170
uacaaucagcaaaugccgg

SEQ ID NO: 1146172 - RNA, 19 nt, Artificial Sequence
  Description of Artificial Sequence: Synthetic oligonucleotide
  Sense strand starting at position 2903 of SEQ ID NO: 916304
ggcauuugcugauuguauc

SEQ ID NO: 1146173 - RNA, 19 nt, Artificial Sequence
  Description of Artificial Sequence: Synthetic oligonucleotide
  Antisense strand to SEQ ID NO: 1146172
gauacaaucagcaaaugcc

SEQ ID NO: 1146174 - RNA, 19 nt, Artificial Sequence
  Description of Artificial Sequence: Synthetic oligonucleotide
  Sense strand starting at position 3038 of SEQ ID NO: 916304
augcuaguggucuaaggac

SEQ ID NO: 1146175 - RNA, 19 nt, Artificial Sequence
  Description of Artificial Sequence: Synthetic oligonucleotide
  Antisense strand to SEQ ID NO: 1146174
guccuuagaccacuagcau

SEQ ID NO: 1146176 - RNA, 19 nt, Artificial Sequence
  Description of Artificial Sequence: Synthetic oligonucleotide
  Sense strand starting at position 3046 of SEQ ID NO: 916304
ggucuaaggaccgaacuuu

SEQ ID NO: 1146177 - RNA, 19 nt, Artificial Sequence
  Description of Artificial Sequence: Synthetic oligonucleotide
  Antisense strand to SEQ ID NO: 1146176
aaaguucgguccuuagacc

SEQ ID NO: 1146178 - RNA, 19 nt, Artificial Sequence
  Description of Artificial Sequence: Synthetic oligonucleotide
  Sense strand starting at position 3052 of SEQ ID NO: 916304
aggaccgaacuuugaguua

SEQ ID NO: 1146179 - RNA, 19 nt, Artificial Sequence
  Description of Artificial Sequence: Synthetic oligonucleotide
  Antisense strand to SEQ ID NO: 1146178
uaacucaaaguucgguccu

SEQ ID NO: 1146180 - RNA, 19 nt, Artificial Sequence
  Description of Artificial Sequence: Synthetic oligonucleotide
  Sense strand starting at position 3055 of SEQ ID NO: 916304
accgaacuuugaguuacaa

SEQ ID NO: 1146181 - RNA, 19 nt, Artificial Sequence
  Description of Artificial Sequence: Synthetic oligonucleotide
  Antisense strand to SEQ ID NO: 1146180
uuguaacucaaaguucggu

SEQ ID NO: 1146182 - RNA, 19 nt, Artificial Sequence
  Description of Artificial Sequence: Synthetic oligonucleotide
  Sense strand starting at position 3228 of SEQ ID NO: 916304
ucaguuugcagaggaagau

SEQ ID NO: 1146183 - RNA, 19 nt, Artificial Sequence
  Description of Artificial Sequence: Synthetic oligonucleotide
  Antisense strand to SEQ ID NO: 1146182
aucuuccucugcaaacuga

SEQ ID NO: 1146184 - RNA, 19 nt, Artificial Sequence
  Description of Artificial Sequence: Synthetic oligonucleotide
  Sense strand starting at position 3290 of SEQ ID NO: 916304
ggugauguaagaugaaguu

SEQ ID NO: 1146185 - RNA, 19 nt, Artificial Sequence
  Description of Artificial Sequence: Synthetic oligonucleotide
  Antisense strand to SEQ ID NO: 1146184
aacuucaucuuacaucacc

SEQ ID NO: 1146186 - RNA, 19 nt, Artificial Sequence
  Description of Artificial Sequence: Synthetic oligonucleotide
  Sense strand starting at position 3601 of SEQ ID NO: 916304
cggccauaagaugaaguuu

SEQ ID NO: 1146187 - RNA, 19 nt, Artificial Sequence
  Description of Artificial Sequence: Synthetic oligonucleotide
  Antisense strand to SEQ ID NO: 1146186
aaacuucaucuuauggccg

SEQ ID NO: 1146188 - RNA, 19 nt, Artificial Sequence
  Description of Artificial Sequence: Synthetic oligonucleotide
  Sense strand starting at position 3654 of SEQ ID NO: 916304
cugacuauaugcucaaagu

SEQ ID NO: 1146189 - RNA, 19 nt, Artificial Sequence
  Description of Artificial Sequence: Synthetic oligonucleotide
  Antisense strand to SEQ ID NO: 1146188
acuuugagcauauagucag

SEQ ID NO: 1146190 - RNA, 19 nt, Artificial Sequence
  Description of Artificial Sequence: Synthetic oligonucleotide
  Sense strand starting at position 3655 of SEQ ID NO: 916304
ugacuauaugcucaaagug

SEQ ID NO: 1146191 - RNA, 19 nt, Artificial Sequence
  Description of Artificial Sequence: Synthetic oligonucleotide
  Antisense strand to SEQ ID NO: 1146190
cacuuugagcauauaguca

SEQ ID NO: 1146192 - RNA, 19 nt, Artificial Sequence
  Description of Artificial Sequence: Synthetic oligonucleotide
  Sense strand starting at position 3660 of SEQ ID NO: 916304
auaugcucaaagugggauu

SEQ ID NO: 1146193 - RNA, 19 nt, Artificial Sequence
  Description of Artificial Sequence: Synthetic oligonucleotide
  Antisense strand to SEQ ID NO: 1146192
aaucccacuuugagcauau

SEQ ID NO: 1146194 - RNA, 19 nt, Artificial Sequence
  Description of Artificial Sequence: Synthetic oligonucleotide
  Sense strand starting at position 3765 of SEQ ID NO: 916304
ugcaguauacuauaugcau

SEQ ID NO: 1146195 - RNA, 19 nt, Artificial Sequence
  Description of Artificial Sequence: Synthetic oligonucleotide
  Antisense strand to SEQ ID NO: 1146194
augcauauaguauacugca

SEQ ID NO: 1146196 - RNA, 19 nt, Artificial Sequence
  Description of Artificial Sequence: Synthetic oligonucleotide
  Sense strand starting at position 162 of SEQ ID NO: 916305
gucggugggagcugaauua

SEQ ID NO: 1146197 - RNA, 19 nt, Artificial Sequence
  Description of Artificial Sequence: Synthetic oligonucleotide
  Antisense strand to SEQ ID NO: 1146196
uaauucagcucccaccgac

SEQ ID NO: 1146198 - RNA, 19 nt, Artificial Sequence
  Description of Artificial Sequence: Synthetic oligonucleotide
  Sense strand starting at position 684 of SEQ ID NO: 916305
agacccuccugggaagaua

SEQ ID NO: 1146199 - RNA, 19 nt, Artificial Sequence
  Description of Artificial Sequence: Synthetic oligonucleotide
  Antisense strand to SEQ ID NO: 1146198
uaucuucccaggagggucu

SEQ ID NO: 1146200 - RNA, 19 nt, Artificial Sequence
  Description of Artificial Sequence: Synthetic oligonucleotide
  Sense strand starting at position 978 of SEQ ID NO: 916305
gagguugagucccugaaag

SEQ ID NO: 1146201 - RNA, 19 nt, Artificial Sequence
  Description of Artificial Sequence: Synthetic oligonucleotide
  Antisense strand to SEQ ID NO: 1146200
cuuucagggacucaaccuc

SEQ ID NO: 1146202 - RNA, 19 nt, Artificial Sequence
  Description of Artificial Sequence: Synthetic oligonucleotide
  Sense strand starting at position 980 of SEQ ID NO: 916305
gguugagucccugaaagug

SEQ ID NO: 1146203 - RNA, 19 nt, Artificial Sequence
  Description of Artificial Sequence: Synthetic oligonucleotide
  Antisense strand to SEQ ID NO: 1146202
cacuuucagggacucaacc

SEQ ID NO: 1146204 - RNA, 19 nt, Artificial Sequence
  Description of Artificial Sequence: Synthetic oligonucleotide
  Sense strand starting at position 988 of SEQ ID NO: 916305
cccugaaagugagucuaga

SEQ ID NO: 1146205 - RNA, 19 nt, Artificial Sequence
  Description of Artificial Sequence: Synthetic oligonucleotide
  Antisense strand to SEQ ID NO: 1146204
ucuagacucacuuucaggg

SEQ ID NO: 1146206 - RNA, 19 nt, Artificial Sequence
  Description of Artificial Sequence: Synthetic oligonucleotide
  Sense strand starting at position 1112 of SEQ ID NO: 916305
agguuucucauguggaagu

SEQ ID NO: 1146207 - RNA, 19 nt, Artificial Sequence
  Description of Artificial Sequence: Synthetic oligonucleotide
  Antisense strand to SEQ ID NO: 1146206
acuuccacaugagaaaccu

SEQ ID NO: 1146208 - RNA, 19 nt, Artificial Sequence
  Description of Artificial Sequence: Synthetic oligonucleotide
  Sense strand starting at position 1220 of SEQ ID NO: 916305
ggauuuaaguuagaccuua

SEQ ID NO: 1146209 - RNA, 19 nt, Artificial Sequence
  Description of Artificial Sequence: Synthetic oligonucleotide
  Antisense strand to SEQ ID NO: 1146208
uaaggucuaacuuaaaucc

SEQ ID NO: 1146210 - RNA, 19 nt, Artificial Sequence
  Description of Artificial Sequence: Synthetic oligonucleotide
  Sense strand starting at position 1245 of SEQ ID NO: 916305
acuuccagaugggauuaaa

SEQ ID NO: 1146211 - RNA, 19 nt, Artificial Sequence
  Description of Artificial Sequence: Synthetic oligonucleotide
  Antisense strand to SEQ ID NO: 1146210
uuuaaucccaucuggaagu

SEQ ID NO: 1146212 - RNA, 19 nt, Artificial Sequence
  Description of Artificial Sequence: Synthetic oligonucleotide
  Sense strand starting at position 1622 of SEQ ID NO: 916305
ggauacaaguuuguuguga

SEQ ID NO: 1146213 - RNA, 19 nt, Artificial Sequence
  Description of Artificial Sequence: Synthetic oligonucleotide
  Antisense strand to SEQ ID NO: 1146212
ucacaacaaacuuguaucc

SEQ ID NO: 1146214 - RNA, 19 nt, Artificial Sequence
  Description of Artificial Sequence: Synthetic oligonucleotide
  Sense strand starting at position 1698 of SEQ ID NO: 916305
aggcaugcacgucauguau

SEQ ID NO: 1146215 - RNA, 19 nt, Artificial Sequence
  Description of Artificial Sequence: Synthetic oligonucleotide
  Antisense strand to SEQ ID NO: 1146214
auacaugacgugcaugccu

SEQ ID NO: 1146216 - RNA, 19 nt, Artificial Sequence
  Description of Artificial Sequence: Synthetic oligonucleotide
  Sense strand starting at position 1840 of SEQ ID NO: 916305
cuguaagucgucuaaggag

SEQ ID NO: 1146217 - RNA, 19 nt, Artificial Sequence
  Description of Artificial Sequence: Synthetic oligonucleotide
  Antisense strand to SEQ ID NO: 1146216
cuccuuagacgacuuacag

SEQ ID NO: 1146218 - RNA, 19 nt, Artificial Sequence
  Description of Artificial Sequence: Synthetic oligonucleotide
  Sense strand starting at position 1897 of SEQ ID NO: 916305
ggugcuucuggaagcguua

SEQ ID NO: 1146219 - RNA, 19 nt, Artificial Sequence
  Description of Artificial Sequence: Synthetic oligonucleotide
  Antisense strand to SEQ ID NO: 1146218
uaacgcuuccagaagcacc

SEQ ID NO: 1146220 - RNA, 19 nt, Artificial Sequence
  Description of Artificial Sequence: Synthetic oligonucleotide
  Sense strand starting at position 1904 of SEQ ID NO: 916305
cuggaagcguuacugaaga

SEQ ID NO: 1146221 - RNA, 19 nt, Artificial Sequence
  Description of Artificial Sequence: Synthetic oligonucleotide
  Antisense strand to SEQ ID NO: 1146220
ucuucaguaacgcuuccag

SEQ ID NO: 1146222 - RNA, 19 nt, Artificial Sequence
  Description of Artificial Sequence: Synthetic oligonucleotide
  Sense strand starting at position 1906 of SEQ ID NO: 916305
ggaagcguuacugaagaug

SEQ ID NO: 1146223 - RNA, 19 nt, Artificial Sequence
  Description of Artificial Sequence: Synthetic oligonucleotide
  Antisense strand to SEQ ID NO: 1146222
caucuucaguaacgcuucc

SEQ ID NO: 1146224 - RNA, 19 nt, Artificial Sequence
  Description of Artificial Sequence: Synthetic oligonucleotide
  Sense strand starting at position 1948 of SEQ ID NO: 916305
uggcacuuaccaugauuga

SEQ ID NO: 1146225 - RNA, 19 nt, Artificial Sequence
  Description of Artificial Sequence: Synthetic oligonucleotide
  Antisense strand to SEQ ID NO: 1146224
ucaaucaugguaagugcca

SEQ ID NO: 1146226 - RNA, 19 nt, Artificial Sequence
  Description of Artificial Sequence: Synthetic oligonucleotide
  Sense strand starting at position 1949 of SEQ ID NO: 916305
ggcacuuaccaugauugau

SEQ ID NO: 1146227 - RNA, 19 nt, Artificial Sequence
  Description of Artificial Sequence: Synthetic oligonucleotide
  Antisense strand to SEQ ID NO: 1146226
aucaaucaugguaagugcc

SEQ ID NO: 1146228 - RNA, 19 nt, Artificial Sequence
  Description of Artificial Sequence: Synthetic oligonucleotide
  Sense strand starting at position 2005 of SEQ ID NO: 916305
agugcugggccggaguauu

SEQ ID NO: 1146229 - RNA, 19 nt, Artificial Sequence
  Description of Artificial Sequence: Synthetic oligonucleotide
  Antisense strand to SEQ ID NO: 1146228
aauacuccggcccagcacu

SEQ ID NO: 1146230 - RNA, 19 nt, Artificial Sequence
  Description of Artificial Sequence: Synthetic oligonucleotide
  Sense strand starting at position 2173 of SEQ ID NO: 916305
ggcagugacguccacuagu

SEQ ID NO: 1146231 - RNA, 19 nt, Artificial Sequence
  Description of Artificial Sequence: Synthetic oligonucleotide
  Antisense strand to SEQ ID NO: 1146230
acuaguggacgucacugcc

SEQ ID NO: 1146232 - RNA, 19 nt, Artificial Sequence
  Description of Artificial Sequence: Synthetic oligonucleotide
  Sense strand starting at position 2316 of SEQ ID NO: 916305
ccagaacucuugccuagag

SEQ ID NO: 1146233 - RNA, 19 nt, Artificial Sequence
  Description of Artificial Sequence: Synthetic oligonucleotide
  Antisense strand to SEQ ID NO: 1146232
cucuaggcaagaguucugg

SEQ ID NO: 1146234 - RNA, 19 nt, Artificial Sequence
  Description of Artificial Sequence: Synthetic oligonucleotide
  Sense strand starting at position 2378 of SEQ ID NO: 916305
ugcgucacagcguuguauu

SEQ ID NO: 1146235 - RNA, 19 nt, Artificial Sequence
  Description of Artificial Sequence: Synthetic oligonucleotide
  Antisense strand to SEQ ID NO: 1146234
aauacaacgcugugacgca

SEQ ID NO: 1146236 - RNA, 19 nt, Artificial Sequence
  Description of Artificial Sequence: Synthetic oligonucleotide
  Sense strand starting at position 2388 of SEQ ID NO: 916305
cguuguauuccauagcucu

SEQ ID NO: 1146237 - RNA, 19 nt, Artificial Sequence
  Description of Artificial Sequence: Synthetic oligonucleotide
  Antisense strand to SEQ ID NO: 1146236
agagcuauggaauacaacg

SEQ ID NO: 1146238 - RNA, 19 nt, Artificial Sequence
  Description of Artificial Sequence: Synthetic oligonucleotide
  Sense strand starting at position 2481 of SEQ ID NO: 916305
cuuugagccucauuuguaa

SEQ ID NO: 1146239 - RNA, 19 nt, Artificial Sequence
  Description of Artificial Sequence: Synthetic oligonucleotide
  Antisense strand to SEQ ID NO: 1146238
uuacaaaugaggcucaaag

SEQ ID NO: 1146240 - RNA, 19 nt, Artificial Sequence
  Description of Artificial Sequence: Synthetic oligonucleotide
  Sense strand starting at position 2576 of SEQ ID NO: 916305
acucucaguguugguuaua

SEQ ID NO: 1146241 - RNA, 19 nt, Artificial Sequence
  Description of Artificial Sequence: Synthetic oligonucleotide
  Antisense strand to SEQ ID NO: 1146240
uauaaccaacacugagagu

SEQ ID NO: 1146242 - RNA, 19 nt, Artificial Sequence
  Description of Artificial Sequence: Synthetic oligonucleotide
  Sense strand starting at position 2577 of SEQ ID NO: 916305
cucucaguguugguuauaa

SEQ ID NO: 1146243 - RNA, 19 nt, Artificial Sequence
  Description of Artificial Sequence: Synthetic oligonucleotide
  Antisense strand to SEQ ID NO: 1146242
uuauaaccaacacugagag

SEQ ID NO: 1146244 - RNA, 19 nt, Artificial Sequence
  Description of Artificial Sequence: Synthetic oligonucleotide
  Sense strand starting at position 2579 of SEQ ID NO: 916305
cucaguguugguuauaauu

SEQ ID NO: 1146245 - RNA, 19 nt, Artificial Sequence
  Description of Artificial Sequence: Synthetic oligonucleotide
  Antisense strand to SEQ ID NO: 1146244
aauuauaaccaacacugag

SEQ ID NO: 1146246 - RNA, 19 nt, Artificial Sequence
  Description of Artificial Sequence: Synthetic oligonucleotide
  Sense strand starting at position 2607 of SEQ ID NO: 916305
agagaacauuccuaggcca

SEQ ID NO: 1146247 - RNA, 19 nt, Artificial Sequence
  Description of Artificial Sequence: Synthetic oligonucleotide
  Antisense strand to SEQ ID NO: 1146246
uggccuaggaauguucucu

SEQ ID NO: 1146248 - RNA, 19 nt, Artificial Sequence
  Description of Artificial Sequence: Synthetic oligonucleotide
  Sense strand starting at position 2655 of SEQ ID NO: 916305
gaacaugaaccgggcuauu

SEQ ID NO: 1146249 - RNA, 19 nt, Artificial Sequence
  Description of Artificial Sequence: Synthetic oligonucleotide
  Antisense strand to SEQ ID NO: 1146248
aauagcccgguucauguuc

SEQ ID NO: 1146250 - RNA, 19 nt, Artificial Sequence
  Description of Artificial Sequence: Synthetic oligonucleotide
  Sense strand starting at position 2699 of SEQ ID NO: 916305
uugcuagauugcccucuau

SEQ ID NO: 1146251 - RNA, 19 nt, Artificial Sequence
  Description of Artificial Sequence: Synthetic oligonucleotide
  Antisense strand to SEQ ID NO: 1146250
auagagggcaaucuagcaa

SEQ ID NO: 1146252 - RNA, 19 nt, Artificial Sequence
  Description of Artificial Sequence: Synthetic oligonucleotide
  Sense strand starting at position 2778 of SEQ ID NO: 916305
acaugucucccaggucaug

SEQ ID NO: 1146253 - RNA, 19 nt, Artificial Sequence
  Description of Artificial Sequence: Synthetic oligonucleotide
  Antisense strand to SEQ ID NO: 1146252
caugaccugggagacaugu

SEQ ID NO: 1146254 - RNA, 19 nt, Artificial Sequence
  Description of Artificial Sequence: Synthetic oligonucleotide
  Sense strand starting at position 2790 of SEQ ID NO: 916305
ggucauggaacugguaaga

SEQ ID NO: 1146255 - RNA, 19 nt, Artificial Sequence
  Description of Artificial Sequence: Synthetic oligonucleotide
  Antisense strand to SEQ ID NO: 1146254
ucuuaccaguuccaugacc

SEQ ID NO: 1146256 - RNA, 19 nt, Artificial Sequence
  Description of Artificial Sequence: Synthetic oligonucleotide
  Sense strand starting at position 2818 of SEQ ID NO: 916305
caaacucuggccuguuuga

SEQ ID NO: 1146257 - RNA, 19 nt, Artificial Sequence
  Description of Artificial Sequence: Synthetic oligonucleotide
  Antisense strand to SEQ ID NO: 1146256
ucaaacaggccagaguuug

SEQ ID NO: 1146258 - RNA, 19 nt, Artificial Sequence
  Description of Artificial Sequence: Synthetic oligonucleotide
  Sense strand starting at position 2825 of SEQ ID NO: 916305
uggccuguuugauucugaa

SEQ ID NO: 1146259 - RNA, 19 nt, Artificial Sequence
  Description of Artificial Sequence: Synthetic oligonucleotide
  Antisense strand to SEQ ID NO: 1146258
uucagaaucaaacaggcca

SEQ ID NO: 1146260 - RNA, 19 nt, Artificial Sequence
  Description of Artificial Sequence: Synthetic oligonucleotide
  Sense strand starting at position 2844 of SEQ ID NO: 916305
guuggaucucauugcacca

SEQ ID NO: 1146261 - RNA, 19 nt, Artificial Sequence
  Description of Artificial Sequence: Synthetic oligonucleotide
  Antisense strand to SEQ ID NO: 1146260
uggugcaaugagauccaac

SEQ ID NO: 1146262 - RNA, 19 nt, Artificial Sequence
  Description of Artificial Sequence: Synthetic oligonucleotide
  Sense strand starting at position 3380 of SEQ ID NO: 916305
ggagaagagcucuguguag

SEQ ID NO: 1146263 - RNA, 19 nt, Artificial Sequence
  Description of Artificial Sequence: Synthetic oligonucleotide
  Antisense strand to SEQ ID NO: 1146262
cuacacagagcucuucucc

SEQ ID NO: 1146264 - RNA, 19 nt, Artificial Sequence
  Description of Artificial Sequence: Synthetic oligonucleotide
  Sense strand starting at position 3423 of SEQ ID NO: 916305
aggaacaucuugucacuuu

SEQ ID NO: 1146265 - RNA, 19 nt, Artificial Sequence
  Description of Artificial Sequence: Synthetic oligonucleotide
  Antisense strand to SEQ ID NO: 1146264
aaagugacaagauguuccu

SEQ ID NO: 1146266 - RNA, 19 nt, Artificial Sequence
  Description of Artificial Sequence: Synthetic oligonucleotide
  Sense strand starting at position 3438 of SEQ ID NO: 916305
cuuugauugcuguggccaa

SEQ ID NO: 1146267 - RNA, 19 nt, Artificial Sequence
  Description of Artificial Sequence: Synthetic oligonucleotide
  Antisense strand to SEQ ID NO: 1146266
uuggccacagcaaucaaag

SEQ ID NO: 1146268 - RNA, 19 nt, Artificial Sequence
  Description of Artificial Sequence: Synthetic oligonucleotide
  Sense strand starting at position 3641 of SEQ ID NO: 916305
ucacaugucugggcagaga

SEQ ID NO: 1146269 - RNA, 19 nt, Artificial Sequence
  Description of Artificial Sequence: Synthetic oligonucleotide
  Antisense strand to SEQ ID NO: 1146268
ucucugcccagacauguga

SEQ ID NO: 1146270 - RNA, 19 nt, Artificial Sequence
  Description of Artificial Sequence: Synthetic oligonucleotide
  Sense strand starting at position 3816 of SEQ ID NO: 916305
gcucaagaagcucacugau

SEQ ID NO: 1146271 - RNA, 19 nt, Artificial Sequence
  Description of Artificial Sequence: Synthetic oligonucleotide
  Antisense strand to SEQ ID NO: 1146270
aucagugagcuucuugagc

SEQ ID NO: 1146272 - RNA, 19 nt, Artificial Sequence
  Description of Artificial Sequence: Synthetic oligonucleotide
  Sense strand starting at position 3818 of SEQ ID NO: 916305
ucaagaagcucacugauca

SEQ ID NO: 1146273 - RNA, 19 nt, Artificial Sequence
  Description of Artificial Sequence: Synthetic oligonucleotide
  Antisense strand to SEQ ID NO: 1146272
ugaucagugagcuucuuga

SEQ ID NO: 1146274 - RNA, 19 nt, Artificial Sequence
  Description of Artificial Sequence: Synthetic oligonucleotide
  Sense strand starting at position 3822 of SEQ ID NO: 916305
gaagcucacugaucagaug

SEQ ID NO: 1146275 - RNA, 19 nt, Artificial Sequence
  Description of Artificial Sequence: Synthetic oligonucleotide
  Antisense strand to SEQ ID NO: 1146274
caucugaucagugagcuuc

SEQ ID NO: 1146276 - RNA, 19 nt, Artificial Sequence
  Description of Artificial Sequence: Synthetic oligonucleotide
  Sense strand starting at position 59 of SEQ ID NO: 916306
ucuuccugucccugggauu

SEQ ID NO: 1146277 - RNA, 19 nt, Artificial Sequence
  Description of Artificial Sequence: Synthetic oligonucleotide
  Antisense strand to SEQ ID NO: 1146276
aaucccagggacaggaaga

SEQ ID NO: 1146278 - RNA, 19 nt, Artificial Sequence
  Description of Artificial Sequence: Synthetic oligonucleotide
  Sense strand starting at position 557 of SEQ ID NO: 916306
guaguaagacgaugcuuac

SEQ ID NO: 1146279 - RNA, 19 nt, Artificial Sequence
  Description of Artificial Sequence: Synthetic oligonucleotide
  Antisense strand to SEQ ID NO: 1146278
guaagcaucgucuuacuac

SEQ ID NO: 1146280 - RNA, 19 nt, Artificial Sequence
  Description of Artificial Sequence: Synthetic oligonucleotide
  Sense strand starting at position 575 of SEQ ID NO: 916306
cgcugugugcuuccucaaa

SEQ ID NO: 1146281 - RNA, 19 nt, Artificial Sequence
  Description of Artificial Sequence: Synthetic oligonucleotide
  Antisense strand to SEQ ID NO: 1146280
uuugaggaagcacacagcg

SEQ ID NO: 1146282 - RNA, 19 nt, Artificial Sequence
  Description of Artificial Sequence: Synthetic oligonucleotide
  Sense strand starting at position 785 of SEQ ID NO: 916306
aaggcuucccauuggaguu

SEQ ID NO: 1146283 - RNA, 19 nt, Artificial Sequence
  Description of Artificial Sequence: Synthetic oligonucleotide
  Antisense strand to SEQ ID NO: 1146282
aacuccaaugggaagccuu

SEQ ID NO: 1146284 - RNA, 19 nt, Artificial Sequence
  Description of Artificial Sequence: Synthetic oligonucleotide
  Sense strand starting at position 795 of SEQ ID NO: 916306
auuggaguuucccugaaag

SEQ ID NO: 1146285 - RNA, 19 nt, Artificial Sequence
  Description of Artificial Sequence: Synthetic oligonucleotide
  Antisense strand to SEQ ID NO: 1146284
cuuucagggaaacuccaau

SEQ ID NO: 1146286 - RNA, 19 nt, Artificial Sequence
  Description of Artificial Sequence: Synthetic oligonucleotide
  Sense strand starting at position 1149 of SEQ ID NO: 916306
cuuucuuggaagugcgaua

SEQ ID NO: 1146287 - RNA, 19 nt, Artificial Sequence
  Description of Artificial Sequence: Synthetic oligonucleotide
  Antisense strand to SEQ ID NO: 1146286
uaucgcacuuccaagaaag

SEQ ID NO: 1146288 - RNA, 19 nt, Artificial Sequence
  Description of Artificial Sequence: Synthetic oligonucleotide
  Sense strand starting at position 1174 of SEQ ID NO: 916306
aaguauuuggcguggcuua

SEQ ID NO: 1146289 - RNA, 19 nt, Artificial Sequence
  Description of Artificial Sequence: Synthetic oligonucleotide
  Antisense strand to SEQ ID NO: 1146288
uaagccacgccaaauacuu

SEQ ID NO: 1146290 - RNA, 19 nt, Artificial Sequence
  Description of Artificial Sequence: Synthetic oligonucleotide
  Sense strand starting at position 1286 of SEQ ID NO: 916306
gccacugagcuauaaguga

SEQ ID NO: 1146291 - RNA, 19 nt, Artificial Sequence
  Description of Artificial Sequence: Synthetic oligonucleotide
  Antisense strand to SEQ ID NO: 1146290
ucacuuauagcucaguggc

SEQ ID NO: 1146292 - RNA, 19 nt, Artificial Sequence
  Description of Artificial Sequence: Synthetic oligonucleotide
  Sense strand starting at position 1293 of SEQ ID NO: 916306
agcuauaagugaguagcaa

SEQ ID NO: 1146293 - RNA, 19 nt, Artificial Sequence
  Description of Artificial Sequence: Synthetic oligonucleotide
  Antisense strand to SEQ ID NO: 1146292
uugcuacucacuuauagcu

SEQ ID NO: 1146294 - RNA, 19 nt, Artificial Sequence
  Description of Artificial Sequence: Synthetic oligonucleotide
  Sense strand starting at position 1294 of SEQ ID NO: 916306
gcuauaagugaguagcaag

SEQ ID NO: 1146295 - RNA, 19 nt, Artificial Sequence
  Description of Artificial Sequence: Synthetic oligonucleotide
  Antisense strand to SEQ ID NO: 1146294
cuugcuacucacuuauagc

SEQ ID NO: 1146296 - RNA, 19 nt, Artificial Sequence
  Description of Artificial Sequence: Synthetic oligonucleotide
  Sense strand starting at position 1308 of SEQ ID NO: 916306
gcaagaugcgcuuaaggac

SEQ ID NO: 1146297 - RNA, 19 nt, Artificial Sequence
  Description of Artificial Sequence: Synthetic oligonucleotide
  Antisense strand to SEQ ID NO: 1146296
guccuuaagcgcaucuugc

SEQ ID NO: 1146298 - RNA, 19 nt, Artificial Sequence
  Description of Artificial Sequence: Synthetic oligonucleotide
  Sense strand starting at position 1400 of SEQ ID NO: 916306
gguggagaugcuugcaaga

SEQ ID NO: 1146299 - RNA, 19 nt, Artificial Sequence
  Description of Artificial Sequence: Synthetic oligonucleotide
  Antisense strand to SEQ ID NO: 1146298
ucuugcaagcaucuccacc

SEQ ID NO: 1146300 - RNA, 19 nt, Artificial Sequence
  Description of Artificial Sequence: Synthetic oligonucleotide
  Sense strand starting at position 2045 of SEQ ID NO: 916306
uaaagugucacauggugga

SEQ ID NO: 1146301 - RNA, 19 nt, Artificial Sequence
  Description of Artificial Sequence: Synthetic oligonucleotide
  Antisense strand to SEQ ID NO: 1146300
uccaccaugugacacuuua

SEQ ID NO: 1146302 - RNA, 19 nt, Artificial Sequence
  Description of Artificial Sequence: Synthetic oligonucleotide
  Sense strand starting at position 2385 of SEQ ID NO: 916306
ugcugaauucggcugcauu

SEQ ID NO: 1146303 - RNA, 19 nt, Artificial Sequence
  Description of Artificial Sequence: Synthetic oligonucleotide
  Antisense strand to SEQ ID NO: 1146302
aaugcagccgaauucagca

SEQ ID NO: 1146304 - RNA, 19 nt, Artificial Sequence
  Description of Artificial Sequence: Synthetic oligonucleotide
  Sense strand starting at position 2388 of SEQ ID NO: 916306
ugaauucggcugcauuauu

SEQ ID NO: 1146305 - RNA, 19 nt, Artificial Sequence
  Description of Artificial Sequence: Synthetic oligonucleotide
  Antisense strand to SEQ ID NO: 1146304
aauaaugcagccgaauuca

SEQ ID NO: 1146306 - RNA, 19 nt, Artificial Sequence
  Description of Artificial Sequence: Synthetic oligonucleotide
  Sense strand starting at position 2688 of SEQ ID NO: 916306
gggcuuucuaaagggaaac

SEQ ID NO: 1146307 - RNA, 19 nt, Artificial Sequence
  Description of Artificial Sequence: Synthetic oligonucleotide
  Antisense strand to SEQ ID NO: 1146306
guuucccuuuagaaagccc

SEQ ID NO: 1146308 - RNA, 19 nt, Artificial Sequence
  Description of Artificial Sequence: Synthetic oligonucleotide
  Sense strand starting at position 2701 of SEQ ID NO: 916306
ggaaacuucuugucugcuu

SEQ ID NO: 1146309 - RNA, 19 nt, Artificial Sequence
  Description of Artificial Sequence: Synthetic oligonucleotide
  Antisense strand to SEQ ID NO: 1146308
aagcagacaagaaguuucc

SEQ ID NO: 1146310 - RNA, 19 nt, Artificial Sequence
  Description of Artificial Sequence: Synthetic oligonucleotide
  Sense strand starting at position 2771 of SEQ ID NO: 916306
cgauuuaaugcgcagugga

SEQ ID NO: 1146311 - RNA, 19 nt, Artificial Sequence
  Description of Artificial Sequence: Synthetic oligonucleotide
  Antisense strand to SEQ ID NO: 1146310
uccacugcgcauuaaaucg

SEQ ID NO: 1146312 - RNA, 19 nt, Artificial Sequence
  Description of Artificial Sequence: Synthetic oligonucleotide
  Sense strand starting at position 2882 of SEQ ID NO: 916306
gcgucugcaguugucacaa

SEQ ID NO: 1146313 - RNA, 19 nt, Artificial Sequence
  Description of Artificial Sequence: Synthetic oligonucleotide
  Antisense strand to SEQ ID NO: 1146312
uugugacaacugcagacgc

SEQ ID NO: 1146314 - RNA, 19 nt, Artificial Sequence
  Description of Artificial Sequence: Synthetic oligonucleotide
  Sense strand starting at position 2950 of SEQ ID NO: 916306
gaaugaaaccugugaucuu

SEQ ID NO: 1146315 - RNA, 19 nt, Artificial Sequence
  Description of Artificial Sequence: Synthetic oligonucleotide
  Antisense strand to SEQ ID NO: 1146314
aagaucacagguuucauuc

SEQ ID NO: 1146316 - RNA, 19 nt, Artificial Sequence
  Description of Artificial Sequence: Synthetic oligonucleotide
  Sense strand starting at position 2953 of SEQ ID NO: 916306
ugaaaccugugaucuuaaa

SEQ ID NO: 1146317 - RNA, 19 nt, Artificial Sequence
  Description of Artificial Sequence: Synthetic oligonucleotide
  Antisense strand to SEQ ID NO: 1146316
uuuaagaucacagguuuca

SEQ ID NO: 1146318 - RNA, 19 nt, Artificial Sequence
  Description of Artificial Sequence: Synthetic oligonucleotide
  Sense strand starting at position 2965 of SEQ ID NO: 916306
ucuuaaaucgacugggauu

SEQ ID NO: 1146319 - RNA, 19 nt, Artificial Sequence
  Description of Artificial Sequence: Synthetic oligonucleotide
  Antisense strand to SEQ ID NO: 1146318
aaucccagucgauuuaaga

SEQ ID NO: 1146320 - RNA, 19 nt, Artificial Sequence
  Description of Artificial Sequence: Synthetic oligonucleotide
  Sense strand starting at position 2966 of SEQ ID NO: 916306
cuuaaaucgacugggauuc

SEQ ID NO: 1146321 - RNA, 19 nt, Artificial Sequence
  Description of Artificial Sequence: Synthetic oligonucleotide
  Antisense strand to SEQ ID NO: 1146320
gaaucccagucgauuuaag

SEQ ID NO: 1146322 - RNA, 19 nt, Artificial Sequence
  Description of Artificial Sequence: Synthetic oligonucleotide
  Sense strand starting at position 3009 of SEQ ID NO: 916306
cgggaugaguccagagaug

SEQ ID NO: 1146323 - RNA, 19 nt, Artificial Sequence
  Description of Artificial Sequence: Synthetic oligonucleotide
  Antisense strand to SEQ ID NO: 1146322
caucucuggacucaucccg

SEQ ID NO: 1146324 - RNA, 19 nt, Artificial Sequence
  Description of Artificial Sequence: Synthetic oligonucleotide
  Sense strand starting at position 3020 of SEQ ID NO: 916306
cagagauggcuccaaguug

SEQ ID NO: 1146325 - RNA, 19 nt, Artificial Sequence
  Description of Artificial Sequence: Synthetic oligonucleotide
  Antisense strand to SEQ ID NO: 1146324
caacuuggagccaucucug

SEQ ID NO: 1146326 - RNA, 19 nt, Artificial Sequence
  Description of Artificial Sequence: Synthetic oligonucleotide
  Sense strand starting at position 3084 of SEQ ID NO: 916306
cgcagaguauaaccaagau

SEQ ID NO: 1146327 - RNA, 19 nt, Artificial Sequence
  Description of Artificial Sequence: Synthetic oligonucleotide
  Antisense strand to SEQ ID NO: 1146326
aucuugguuauacucugcg

SEQ ID NO: 1146328 - RNA, 19 nt, Artificial Sequence
  Description of Artificial Sequence: Synthetic oligonucleotide
  Sense strand starting at position 3093 of SEQ ID NO: 916306
uaaccaagauucuucgagu

SEQ ID NO: 1146329 - RNA, 19 nt, Artificial Sequence
  Description of Artificial Sequence: Synthetic oligonucleotide
  Antisense strand to SEQ ID NO: 1146328
acucgaagaaucuugguua

SEQ ID NO: 1146330 - RNA, 19 nt, Artificial Sequence
  Description of Artificial Sequence: Synthetic oligonucleotide
  Sense strand starting at position 3094 of SEQ ID NO: 916306
aaccaagauucuucgaguc

SEQ ID NO: 1146331 - RNA, 19 nt, Artificial Sequence
  Description of Artificial Sequence: Synthetic oligonucleotide
  Antisense strand to SEQ ID NO: 1146330
gacucgaagaaucuugguu

SEQ ID NO: 1146332 - RNA, 19 nt, Artificial Sequence
  Description of Artificial Sequence: Synthetic oligonucleotide
  Sense strand starting at position 3101 of SEQ ID NO: 916306
auucuucgagucugugaac

SEQ ID NO: 1146333 - RNA, 19 nt, Artificial Sequence
  Description of Artificial Sequence: Synthetic oligonucleotide
  Antisense strand to SEQ ID NO: 1146332
guucacagacucgaagaau

SEQ ID NO: 1146334 - RNA, 19 nt, Artificial Sequence
  Description of Artificial Sequence: Synthetic oligonucleotide
  Sense strand starting at position 3206 of SEQ ID NO: 916306
cccacaacacugugugauu

SEQ ID NO: 1146335 - RNA, 19 nt, Artificial Sequence
  Description of Artificial Sequence: Synthetic oligonucleotide
  Antisense strand to SEQ ID NO: 1146334
aaucacacaguguuguggg

SEQ ID NO: 1146336 - RNA, 19 nt, Artificial Sequence
  Description of Artificial Sequence: Synthetic oligonucleotide
  Sense strand starting at position 3456 of SEQ ID NO: 916306
augaaaccgucaucugaac

SEQ ID NO: 1146337 - RNA, 19 nt, Artificial Sequence
  Description of Artificial Sequence: Synthetic oligonucleotide
  Antisense strand to SEQ ID NO: 1146336
guucagaugacgguuucau

SEQ ID NO: 1146338 - RNA, 19 nt, Artificial Sequence
  Description of Artificial Sequence: Synthetic oligonucleotide
  Sense strand starting at position 3526 of SEQ ID NO: 916306
cccuguaaucugggaauaa

SEQ ID NO: 1146339 - RNA, 19 nt, Artificial Sequence
  Description of Artificial Sequence: Synthetic oligonucleotide
  Antisense strand to SEQ ID NO: 1146338
uuauucccagauuacaggg

SEQ ID NO: 1146340 - RNA, 19 nt, Artificial Sequence
  Description of Artificial Sequence: Synthetic oligonucleotide
  Sense strand starting at position 3572 of SEQ ID NO: 916306
gagauuaaaugagagaaau

SEQ ID NO: 1146341 - RNA, 19 nt, Artificial Sequence
  Description of Artificial Sequence: Synthetic oligonucleotide
  Antisense strand to SEQ ID NO: 1146340
auuucucucauuuaaucuc

SEQ ID NO: 1146342 - RNA, 19 nt, Artificial Sequence
  Description of Artificial Sequence: Synthetic oligonucleotide
  Sense strand starting at position 3582 of SEQ ID NO: 916306
gagagaaaugugugccaag

SEQ ID NO: 1146343 - RNA, 19 nt, Artificial Sequence
  Description of Artificial Sequence: Synthetic oligonucleotide
  Antisense strand to SEQ ID NO: 1146342
cuuggcacacauuucucuc

SEQ ID NO: 1146344 - RNA, 19 nt, Artificial Sequence
  Description of Artificial Sequence: Synthetic oligonucleotide
  Sense strand starting at position 3730 of SEQ ID NO: 916306
cggguguagcguuccaaga

SEQ ID NO: 1146345 - RNA, 19 nt, Artificial Sequence
  Description of Artificial Sequence: Synthetic oligonucleotide
  Antisense strand to SEQ ID NO: 1146344
ucuuggaacgcuacacccg

SEQ ID NO: 1146346 - RNA, 19 nt, Artificial Sequence
  Description of Artificial Sequence: Synthetic oligonucleotide
  Sense strand starting at position 3864 of SEQ ID NO: 916306
ggacgauuauuacccuguu

SEQ ID NO: 1146347 - RNA, 19 nt, Artificial Sequence
  Description of Artificial Sequence: Synthetic oligonucleotide
  Antisense strand to SEQ ID NO: 1146346
aacaggguaauaaucgucc

SEQ ID NO: 1146348 - RNA, 19 nt, Artificial Sequence
  Description of Artificial Sequence: Synthetic oligonucleotide
  Sense strand starting at position 3865 of SEQ ID NO: 916306
gacgauuauuacccuguuu

SEQ ID NO: 1146349 - RNA, 19 nt, Artificial Sequence
  Description of Artificial Sequence: Synthetic oligonucleotide
  Antisense strand to SEQ ID NO: 1146348
aaacaggguaauaaucguc

SEQ ID NO: 1146350 - RNA, 19 nt, Artificial Sequence
  Description of Artificial Sequence: Synthetic oligonucleotide
  Sense strand starting at position 3943 of SEQ ID NO: 916306
cuuggauguugucuguaga

SEQ ID NO: 1146351 - RNA, 19 nt, Artificial Sequence
  Description of Artificial Sequence: Synthetic oligonucleotide
  Antisense strand to SEQ ID NO: 1146350
ucuacagacaacauccaag

SEQ ID NO: 1146352 - RNA, 19 nt, Artificial Sequence
  Description of Artificial Sequence: Synthetic oligonucleotide
  Sense strand starting at position 3944 of SEQ ID NO: 916306
uuggauguugucuguagaa

SEQ ID NO: 1146353 - RNA, 19 nt, Artificial Sequence
  Description of Artificial Sequence: Synthetic oligonucleotide
  Antisense strand to SEQ ID NO: 1146352
uucuacagacaacauccaa

SEQ ID NO: 1146354 - RNA, 19 nt, Artificial Sequence
  Description of Artificial Sequence: Synthetic oligonucleotide
  Sense strand starting at position 3946 of SEQ ID NO: 916306
ggauguugucuguagaaga

SEQ ID NO: 1146355 - RNA, 19 nt, Artificial Sequence
  Description of Artificial Sequence: Synthetic oligonucleotide
  Antisense strand to SEQ ID NO: 1146354
ucuucuacagacaacaucc

SEQ ID NO: 1146356 - RNA, 19 nt, Artificial Sequence
  Description of Artificial Sequence: Synthetic oligonucleotide
  Sense strand starting at position 440 of SEQ ID NO: 916307
aaaucaggcuucgagauuu

SEQ ID NO: 1146357 - RNA, 19 nt, Artificial Sequence
  Description of Artificial Sequence: Synthetic oligonucleotide
  Antisense strand to SEQ ID NO: 1146356
aaaucucgaagccugauuu

SEQ ID NO: 1146358 - RNA, 19 nt, Artificial Sequence
  Description of Artificial Sequence: Synthetic oligonucleotide
  Sense strand starting at position 498 of SEQ ID NO: 916307
uccugugugcucguguuca

SEQ ID NO: 1146359 - RNA, 19 nt, Artificial Sequence
  Description of Artificial Sequence: Synthetic oligonucleotide
  Antisense strand to SEQ ID NO: 1146358
ugaacacgagcacacagga

SEQ ID NO: 1146360 - RNA, 19 nt, Artificial Sequence
  Description of Artificial Sequence: Synthetic oligonucleotide
  Sense strand starting at position 500 of SEQ ID NO: 916307
cugugugcucguguucaaa

SEQ ID NO: 1146361 - RNA, 19 nt, Artificial Sequence
  Description of Artificial Sequence: Synthetic oligonucleotide
  Antisense strand to SEQ ID NO: 1146360
uuugaacacgagcacacag

SEQ ID NO: 1146362 - RNA, 19 nt, Artificial Sequence
  Description of Artificial Sequence: Synthetic oligonucleotide
  Sense strand starting at position 538 of SEQ ID NO: 916307
gugauuuauugagaggguu

SEQ ID NO: 1146363 - RNA, 19 nt, Artificial Sequence
  Description of Artificial Sequence: Synthetic oligonucleotide
  Antisense strand to SEQ ID NO: 1146362
aacccucucaauaaaucac

SEQ ID NO: 1146364 - RNA, 19 nt, Artificial Sequence
  Description of Artificial Sequence: Synthetic oligonucleotide
  Sense strand starting at position 610 of SEQ ID NO: 916307
uuggguaguuguugucuua

SEQ ID NO: 1146365 - RNA, 19 nt, Artificial Sequence
  Description of Artificial Sequence: Synthetic oligonucleotide
  Antisense strand to SEQ ID NO: 1146364
uaagacaacaacuacccaa

SEQ ID NO: 1146366 - RNA, 19 nt, Artificial Sequence
  Description of Artificial Sequence: Synthetic oligonucleotide
  Sense strand starting at position 613 of SEQ ID NO: 916307
gguaguuguugucuuauua

SEQ ID NO: 1146367 - RNA, 19 nt, Artificial Sequence
  Description of Artificial Sequence: Synthetic oligonucleotide
  Antisense strand to SEQ ID NO: 1146366
uaauaagacaacaacuacc

SEQ ID NO: 1146368 - RNA, 19 nt, Artificial Sequence
  Description of Artificial Sequence: Synthetic oligonucleotide
  Sense strand starting at position 621 of SEQ ID NO: 916307
uugucuuauuauugccaua

SEQ ID NO: 1146369 - RNA, 19 nt, Artificial Sequence
  Description of Artificial Sequence: Synthetic oligonucleotide
  Antisense strand to SEQ ID NO: 1146368
uauggcaauaauaagacaa

SEQ ID NO: 1146370 - RNA, 19 nt, Artificial Sequence
  Description of Artificial Sequence: Synthetic oligonucleotide
  Sense strand starting at position 623 of SEQ ID NO: 916307
gucuuauuauugccauauu

SEQ ID NO: 1146371 - RNA, 19 nt, Artificial Sequence
  Description of Artificial Sequence: Synthetic oligonucleotide
  Antisense strand to SEQ ID NO: 1146370
aauauggcaauaauaagac

SEQ ID NO: 1146372 - RNA, 19 nt, Artificial Sequence
  Description of Artificial Sequence: Synthetic oligonucleotide
  Sense strand starting at position 688 of SEQ ID NO: 916307
gaaacugugccaugggaau

SEQ ID NO: 1146373 - RNA, 19 nt, Artificial Sequence
  Description of Artificial Sequence: Synthetic oligonucleotide
  Antisense strand to SEQ ID NO: 1146372
auucccauggcacaguuuc

SEQ ID NO: 1146374 - RNA, 19 nt, Artificial Sequence
  Description of Artificial Sequence: Synthetic oligonucleotide
  Sense strand starting at position 706 of SEQ ID NO: 916307
ugugcauuaucuggugcau

SEQ ID NO: 1146375 - RNA, 19 nt, Artificial Sequence
  Description of Artificial Sequence: Synthetic oligonucleotide
  Antisense strand to SEQ ID NO: 1146374
augcaccagauaaugcaca

SEQ ID NO: 1146376 - RNA, 19 nt, Artificial Sequence
  Description of Artificial Sequence: Synthetic oligonucleotide
  Sense strand starting at position 708 of SEQ ID NO: 916307
ugcauuaucuggugcauua

SEQ ID NO: 1146377 - RNA, 19 nt, Artificial Sequence
  Description of Artificial Sequence: Synthetic oligonucleotide
  Antisense strand to SEQ ID NO: 1146376
uaaugcaccagauaaugca

SEQ ID NO: 1146378 - RNA, 19 nt, Artificial Sequence
  Description of Artificial Sequence: Synthetic oligonucleotide
  Sense strand starting at position 925 of SEQ ID NO: 916307
cagacauggguuugucuau

SEQ ID NO: 1146379 - RNA, 19 nt, Artificial Sequence
  Description of Artificial Sequence: Synthetic oligonucleotide
  Antisense strand to SEQ ID NO: 1146378
auagacaaacccaugucug

SEQ ID NO: 1146380 - RNA, 19 nt, Artificial Sequence
  Description of Artificial Sequence: Synthetic oligonucleotide
  Sense strand starting at position 926 of SEQ ID NO: 916307
agacauggguuugucuaua

SEQ ID NO: 1146381 - RNA, 19 nt, Artificial Sequence
  Description of Artificial Sequence: Synthetic oligonucleotide
  Antisense strand to SEQ ID NO: 1146380
uauagacaaacccaugucu

SEQ ID NO: 1146382 - RNA, 19 nt, Artificial Sequence
  Description of Artificial Sequence: Synthetic oligonucleotide
  Sense strand starting at position 931 of SEQ ID NO: 916307
uggguuugucuauaaacuc

SEQ ID NO: 1146383 - RNA, 19 nt, Artificial Sequence
  Description of Artificial Sequence: Synthetic oligonucleotide
  Antisense strand to SEQ ID NO: 1146382
gaguuuauagacaaaccca

SEQ ID NO: 1146384 - RNA, 19 nt, Artificial Sequence
  Description of Artificial Sequence: Synthetic oligonucleotide
  Sense strand starting at position 973 of SEQ ID NO: 916307
aagagcaagucuguaaaca

SEQ ID NO: 1146385 - RNA, 19 nt, Artificial Sequence
  Description of Artificial Sequence: Synthetic oligonucleotide
  Antisense strand to SEQ ID NO: 1146384
uguuuacagacuugcucuu

SEQ ID NO: 1146386 - RNA, 19 nt, Artificial Sequence
  Description of Artificial Sequence: Synthetic oligonucleotide
  Sense strand starting at position 974 of SEQ ID NO: 916307
agagcaagucuguaaacag

SEQ ID NO: 1146387 - RNA, 19 nt, Artificial Sequence
  Description of Artificial Sequence: Synthetic oligonucleotide
  Antisense strand to SEQ ID NO: 1146386
cuguuuacagacuugcucu

SEQ ID NO: 1146388 - RNA, 19 nt, Artificial Sequence
  Description of Artificial Sequence: Synthetic oligonucleotide
  Sense strand starting at position 1051 of SEQ ID NO: 916307
ggcuaaguauuccucaagu

SEQ ID NO: 1146389 - RNA, 19 nt, Artificial Sequence
  Description of Artificial Sequence: Synthetic oligonucleotide
  Antisense strand to SEQ ID NO: 1146388
acuugaggaauacuuagcc

SEQ ID NO: 1146390 - RNA, 19 nt, Artificial Sequence
  Description of Artificial Sequence: Synthetic oligonucleotide
  Sense strand starting at position 1053 of SEQ ID NO: 916307
cuaaguauuccucaaguca

SEQ ID NO: 1146391 - RNA, 19 nt, Artificial Sequence
  Description of Artificial Sequence: Synthetic oligonucleotide
  Antisense strand to SEQ ID NO: 1146390
ugacuugaggaauacuuag

SEQ ID NO: 1146392 - RNA, 19 nt, Artificial Sequence
  Description of Artificial Sequence: Synthetic oligonucleotide
  Sense strand starting at position 1389 of SEQ ID NO: 916307
cucucagaguucugggauc

SEQ ID NO: 1146393 - RNA, 19 nt, Artificial Sequence
  Description of Artificial Sequence: Synthetic oligonucleotide
  Antisense strand to SEQ ID NO: 1146392
gaucccagaacucugagag

SEQ ID NO: 1146394 - RNA, 19 nt, Artificial Sequence
  Description of Artificial Sequence: Synthetic oligonucleotide
  Sense strand starting at position 1391 of SEQ ID NO: 916307
cucagaguucugggaucuu

SEQ ID NO: 1146395 - RNA, 19 nt, Artificial Sequence
  Description of Artificial Sequence: Synthetic oligonucleotide
  Antisense strand to SEQ ID NO: 1146394
aagaucccagaacucugag

SEQ ID NO: 1146396 - RNA, 19 nt, Artificial Sequence
  Description of Artificial Sequence: Synthetic oligonucleotide
  Sense strand starting at position 1539 of SEQ ID NO: 916307
agucccuauuuguaaguau

SEQ ID NO: 1146397 - RNA, 19 nt, Artificial Sequence
  Description of Artificial Sequence: Synthetic oligonucleotide
  Antisense strand to SEQ ID NO: 1146396
auacuuacaaauagggacu

SEQ ID NO: 1146398 - RNA, 19 nt, Artificial Sequence
  Description of Artificial Sequence: Synthetic oligonucleotide
  Sense strand starting at position 1622 of SEQ ID NO: 916307
agagcaagcaaucgugaca

SEQ ID NO: 1146399 - RNA, 19 nt, Artificial Sequence
  Description of Artificial Sequence: Synthetic oligonucleotide
  Antisense strand to SEQ ID NO: 1146398
ugucacgauugcuugcucu

SEQ ID NO: 1146400 - RNA, 19 nt, Artificial Sequence
  Description of Artificial Sequence: Synthetic oligonucleotide
  Sense strand starting at position 2006 of SEQ ID NO: 916307
agaaucagaucuguuacua

SEQ ID NO: 1146401 - RNA, 19 nt, Artificial Sequence
  Description of Artificial Sequence: Synthetic oligonucleotide
  Antisense strand to SEQ ID NO: 1146400
uaguaacagaucugauucu

SEQ ID NO: 1146402 - RNA, 19 nt, Artificial Sequence
  Description of Artificial Sequence: Synthetic oligonucleotide
  Sense strand starting at position 2066 of SEQ ID NO: 916307
cagagagucuuguaugcuc

SEQ ID NO: 1146403 - RNA, 19 nt, Artificial Sequence
  Description of Artificial Sequence: Synthetic oligonucleotide
  Antisense strand to SEQ ID NO: 1146402
gagcauacaagacucucug

SEQ ID NO: 1146404 - RNA, 19 nt, Artificial Sequence
  Description of Artificial Sequence: Synthetic oligonucleotide
  Sense strand starting at position 2852 of SEQ ID NO: 916307
agucaccuuucugaaagaa

SEQ ID NO: 1146405 - RNA, 19 nt, Artificial Sequence
  Description of Artificial Sequence: Synthetic oligonucleotide
  Antisense strand to SEQ ID NO: 1146404
uucuuucagaaaggugacu

SEQ ID NO: 1146406 - RNA, 19 nt, Artificial Sequence
  Description of Artificial Sequence: Synthetic oligonucleotide
  Sense strand starting at position 3060 of SEQ ID NO: 916307
aagguugugcaacaaucau

SEQ ID NO: 1146407 - RNA, 19 nt, Artificial Sequence
  Description of Artificial Sequence: Synthetic oligonucleotide
  Antisense strand to SEQ ID NO: 1146406
augauuguugcacaaccuu

SEQ ID NO: 1146408 - RNA, 19 nt, Artificial Sequence
  Description of Artificial Sequence: Synthetic oligonucleotide
  Sense strand starting at position 3180 of SEQ ID NO: 916307
guaaucuacuuuccauguu

SEQ ID NO: 1146409 - RNA, 19 nt, Artificial Sequence
  Description of Artificial Sequence: Synthetic oligonucleotide
  Antisense strand to SEQ ID NO: 1146408
aacauggaaaguagauuac

SEQ ID NO: 1146410 - RNA, 19 nt, Artificial Sequence
  Description of Artificial Sequence: Synthetic oligonucleotide
  Sense strand starting at position 3189 of SEQ ID NO: 916307
uuuccauguuuguggauuu

SEQ ID NO: 1146411 - RNA, 19 nt, Artificial Sequence
  Description of Artificial Sequence: Synthetic oligonucleotide
  Antisense strand to SEQ ID NO: 1146410
aaauccacaaacauggaaa

SEQ ID NO: 1146412 - RNA, 19 nt, Artificial Sequence
  Description of Artificial Sequence: Synthetic oligonucleotide
  Sense strand starting at position 3264 of SEQ ID NO: 916307
ggcuucuucuguuuagcau

SEQ ID NO: 1146413 - RNA, 19 nt, Artificial Sequence
  Description of Artificial Sequence: Synthetic oligonucleotide
  Antisense strand to SEQ ID NO: 1146412
augcuaaacagaagaagcc

SEQ ID NO: 1146414 - RNA, 19 nt, Artificial Sequence
  Description of Artificial Sequence: Synthetic oligonucleotide
  Sense strand starting at position 3265 of SEQ ID NO: 916307
gcuucuucuguuuagcaua

SEQ ID NO: 1146415 - RNA, 19 nt, Artificial Sequence
  Description of Artificial Sequence: Synthetic oligonucleotide
  Antisense strand to SEQ ID NO: 1146414
uaugcuaaacagaagaagc

SEQ ID NO: 1146416 - RNA, 19 nt, Artificial Sequence
  Description of Artificial Sequence: Synthetic oligonucleotide
  Sense strand starting at position 3337 of SEQ ID NO: 916307
auuccauuguguggcuauu

SEQ ID NO: 1146417 - RNA, 19 nt, Artificial Sequence
  Description of Artificial Sequence: Synthetic oligonucleotide
  Antisense strand to SEQ ID NO: 1146416
aauagccacacaauggaau

SEQ ID NO: 1146418 - RNA, 19 nt, Artificial Sequence
  Description of Artificial Sequence: Synthetic oligonucleotide
  Sense strand starting at position 3489 of SEQ ID NO: 916307
ggauauauguacccuaaga

SEQ ID NO: 1146419 - RNA, 19 nt, Artificial Sequence
  Description of Artificial Sequence: Synthetic oligonucleotide
  Antisense strand to SEQ ID NO: 1146418
ucuuaggguacauauaucc

SEQ ID NO: 1146420 - RNA, 19 nt, Artificial Sequence
  Description of Artificial Sequence: Synthetic oligonucleotide
  Sense strand starting at position 3491 of SEQ ID NO: 916307
auauauguacccuaagagu

SEQ ID NO: 1146421 - RNA, 19 nt, Artificial Sequence
  Description of Artificial Sequence: Synthetic oligonucleotide
  Antisense strand to SEQ ID NO: 1146420
acucuuaggguacauauau

SEQ ID NO: 1146422 - RNA, 19 nt, Artificial Sequence
  Description of Artificial Sequence: Synthetic oligonucleotide
  Sense strand starting at position 3494 of SEQ ID NO: 916307
uauguacccuaagagugaa

SEQ ID NO: 1146423 - RNA, 19 nt, Artificial Sequence
  Description of Artificial Sequence: Synthetic oligonucleotide
  Antisense strand to SEQ ID NO: 1146422
uucacucuuaggguacaua

SEQ ID NO: 1146424 - RNA, 19 nt, Artificial Sequence
  Description of Artificial Sequence: Synthetic oligonucleotide
  Sense strand starting at position 3497 of SEQ ID NO: 916307
guacccuaagagugaaauu

SEQ ID NO: 1146425 - RNA, 19 nt, Artificial Sequence
  Description of Artificial Sequence: Synthetic oligonucleotide
  Antisense strand to SEQ ID NO: 1146424
aauuucacucuuaggguac

SEQ ID NO: 1146426 - RNA, 19 nt, Artificial Sequence
  Description of Artificial Sequence: Synthetic oligonucleotide
  Sense strand starting at position 64 of SEQ ID NO: 916308
gaaaucaguuagguaagca

SEQ ID NO: 1146427 - RNA, 19 nt, Artificial Sequence
  Description of Artificial Sequence: Synthetic oligonucleotide
  Antisense strand to SEQ ID NO: 1146426
ugcuuaccuaacugauuuc

SEQ ID NO: 1146428 - RNA, 19 nt, Artificial Sequence
  Description of Artificial Sequence: Synthetic oligonucleotide
  Sense strand starting at position 68 of SEQ ID NO: 916308
ucaguuagguaagcaaaua

SEQ ID NO: 1146429 - RNA, 19 nt, Artificial Sequence
  Description of Artificial Sequence: Synthetic oligonucleotide
  Antisense strand to SEQ ID NO: 1146428
uauuugcuuaccuaacuga

SEQ ID NO: 1146430 - RNA, 19 nt, Artificial Sequence
  Description of Artificial Sequence: Synthetic oligonucleotide
  Sense strand starting at position 223 of SEQ ID NO: 916308
guaggcuaccuuuaacauu

SEQ ID NO: 1146431 - RNA, 19 nt, Artificial Sequence
  Description of Artificial Sequence: Synthetic oligonucleotide
  Antisense strand to SEQ ID NO: 1146430
aauguuaaagguagccuac

SEQ ID NO: 1146432 - RNA, 19 nt, Artificial Sequence
  Description of Artificial Sequence: Synthetic oligonucleotide
  Sense strand starting at position 244 of SEQ ID NO: 916308
acuggaaauacucgguucu

SEQ ID NO: 1146433 - RNA, 19 nt, Artificial Sequence
  Description of Artificial Sequence: Synthetic oligonucleotide
  Antisense strand to SEQ ID NO: 1146432
agaaccgaguauuuccagu

SEQ ID NO: 1146434 - RNA, 19 nt, Artificial Sequence
  Description of Artificial Sequence: Synthetic oligonucleotide
  Sense strand starting at position 246 of SEQ ID NO: 916308
uggaaauacucgguucuua

SEQ ID NO: 1146435 - RNA, 19 nt, Artificial Sequence
  Description of Artificial Sequence: Synthetic oligonucleotide
  Antisense strand to SEQ ID NO: 1146434
uaagaaccgaguauuucca

SEQ ID NO: 1146436 - RNA, 19 nt, Artificial Sequence
  Description of Artificial Sequence: Synthetic oligonucleotide
  Sense strand starting at position 426 of SEQ ID NO: 916308
gguguacacaguuaaugaa

SEQ ID NO: 1146437 - RNA, 19 nt, Artificial Sequence
  Description of Artificial Sequence: Synthetic oligonucleotide
  Antisense strand to SEQ ID NO: 1146436
uucauuaacuguguacacc

SEQ ID NO: 1146438 - RNA, 19 nt, Artificial Sequence
  Description of Artificial Sequence: Synthetic oligonucleotide
  Sense strand starting at position 495 of SEQ ID NO: 916308
gcuaguauucugcaauaua

SEQ ID NO: 1146439 - RNA, 19 nt, Artificial Sequence
  Description of Artificial Sequence: Synthetic oligonucleotide
  Antisense strand to SEQ ID NO: 1146438
uauauugcagaauacuagc

SEQ ID NO: 1146440 - RNA, 19 nt, Artificial Sequence
  Description of Artificial Sequence: Synthetic oligonucleotide
  Sense strand starting at position 498 of SEQ ID NO: 916308
aguauucugcaauauaguu

SEQ ID NO: 1146441 - RNA, 19 nt, Artificial Sequence
  Description of Artificial Sequence: Synthetic oligonucleotide
  Antisense strand to SEQ ID NO: 1146440
aacuauauugcagaauacu

SEQ ID NO: 1146442 - RNA, 19 nt, Artificial Sequence
  Description of Artificial Sequence: Synthetic oligonucleotide
  Sense strand starting at position 539 of SEQ ID NO: 916308
ucaucacuccuagggacaa

SEQ ID NO: 1146443 - RNA, 19 nt, Artificial Sequence
  Description of Artificial Sequence: Synthetic oligonucleotide
  Antisense strand to SEQ ID NO: 1146442
uugucccuaggagugauga

SEQ ID NO: 1146444 - RNA, 19 nt, Artificial Sequence
  Description of Artificial Sequence: Synthetic oligonucleotide
  Sense strand starting at position 555 of SEQ ID NO: 916308
caaguuaggagguauguau

SEQ ID NO: 1146445 - RNA, 19 nt, Artificial Sequence
  Description of Artificial Sequence: Synthetic oligonucleotide
  Antisense strand to SEQ ID NO: 1146444
auacauaccuccuaacuug

SEQ ID NO: 1146446 - RNA, 19 nt, Artificial Sequence
  Description of Artificial Sequence: Synthetic oligonucleotide
  Sense strand starting at position 562 of SEQ ID NO: 916308
ggagguauguaugcacaca

SEQ ID NO: 1146447 - RNA, 19 nt, Artificial Sequence
  Description of Artificial Sequence: Synthetic oligonucleotide
  Antisense strand to SEQ ID NO: 1146446
ugugugcauacauaccucc

SEQ ID NO: 1146448 - RNA, 19 nt, Artificial Sequence
  Description of Artificial Sequence: Synthetic oligonucleotide
  Sense strand starting at position 594 of SEQ ID NO: 916308
uuaaauacaggguguuaga

SEQ ID NO: 1146449 - RNA, 19 nt, Artificial Sequence
  Description of Artificial Sequence: Synthetic oligonucleotide
  Antisense strand to SEQ ID NO: 1146448
ucuaacacccuguauuuaa

SEQ ID NO: 1146450 - RNA, 19 nt, Artificial Sequence
  Description of Artificial Sequence: Synthetic oligonucleotide
  Sense strand starting at position 642 of SEQ ID NO: 916308
auaagaagugaccguaacu

SEQ ID NO: 1146451 - RNA, 19 nt, Artificial Sequence
  Description of Artificial Sequence: Synthetic oligonucleotide
  Antisense strand to SEQ ID NO: 1146450
aguuacggucacuucuuau

SEQ ID NO: 1146452 - RNA, 19 nt, Artificial Sequence
  Description of Artificial Sequence: Synthetic oligonucleotide
  Sense strand starting at position 996 of SEQ ID NO: 916308
ugcugaagucuccaguaga

SEQ ID NO: 1146453 - RNA, 19 nt, Artificial Sequence
  Description of Artificial Sequence: Synthetic oligonucleotide
  Antisense strand to SEQ ID NO: 1146452
ucuacuggagacuucagca

SEQ ID NO: 1146454 - RNA, 19 nt, Artificial Sequence
  Description of Artificial Sequence: Synthetic oligonucleotide
  Sense strand starting at position 1073 of SEQ ID NO: 916308
uaacguuaagcagacugau

SEQ ID NO: 1146455 - RNA, 19 nt, Artificial Sequence
  Description of Artificial Sequence: Synthetic oligonucleotide
  Antisense strand to SEQ ID NO: 1146454
aucagucugcuuaacguua

SEQ ID NO: 1146456 - RNA, 19 nt, Artificial Sequence
  Description of Artificial Sequence: Synthetic oligonucleotide
  Sense strand starting at position 1530 of SEQ ID NO: 916308
gagaccuccgggcgagaua

SEQ ID NO: 1146457 - RNA, 19 nt, Artificial Sequence
  Description of Artificial Sequence: Synthetic oligonucleotide
  Antisense strand to SEQ ID NO: 1146456
uaucucgcccggaggucuc

SEQ ID NO: 1146458 - RNA, 19 nt, Artificial Sequence
  Description of Artificial Sequence: Synthetic oligonucleotide
  Sense strand starting at position 1549 of SEQ ID NO: 916308
cuauuagaucuguagggca

SEQ ID NO: 1146459 - RNA, 19 nt, Artificial Sequence
  Description of Artificial Sequence: Synthetic oligonucleotide
  Antisense strand to SEQ ID NO: 1146458
ugcccuacagaucuaauag

SEQ ID NO: 1146460 - RNA, 19 nt, Artificial Sequence
  Description of Artificial Sequence: Synthetic oligonucleotide
  Sense strand starting at position 1562 of SEQ ID NO: 916308
agggcaguuagaugauguu

SEQ ID NO: 1146461 - RNA, 19 nt, Artificial Sequence
  Description of Artificial Sequence: Synthetic oligonucleotide
  Antisense strand to SEQ ID NO: 1146460
aacaucaucuaacugcccu

SEQ ID NO: 1146462 - RNA, 19 nt, Artificial Sequence
  Description of Artificial Sequence: Synthetic oligonucleotide
  Sense strand starting at position 1632 of SEQ ID NO: 916308
cccucuuucgaggaauggu

SEQ ID NO: 1146463 - RNA, 19 nt, Artificial Sequence
  Description of Artificial Sequence: Synthetic oligonucleotide
  Antisense strand to SEQ ID NO: 1146462
accauuccucgaaagaggg

SEQ ID NO: 1146464 - RNA, 19 nt, Artificial Sequence
  Description of Artificial Sequence: Synthetic oligonucleotide
  Sense strand starting at position 2195 of SEQ ID NO: 916308
ggccuuggccucuaaggga

SEQ ID NO: 1146465 - RNA, 19 nt, Artificial Sequence
  Description of Artificial Sequence: Synthetic oligonucleotide
  Antisense strand to SEQ ID NO: 1146464
ucccuuagaggccaaggcc

SEQ ID NO: 1146466 - RNA, 19 nt, Artificial Sequence
  Description of Artificial Sequence: Synthetic oligonucleotide
  Sense strand starting at position 2221 of SEQ ID NO: 916308
caaugaauguaagcagaga

SEQ ID NO: 1146467 - RNA, 19 nt, Artificial Sequence
  Description of Artificial Sequence: Synthetic oligonucleotide
  Antisense strand to SEQ ID NO: 1146466
ucucugcuuacauucauug

SEQ ID NO: 1146468 - RNA, 19 nt, Artificial Sequence
  Description of Artificial Sequence: Synthetic oligonucleotide
  Sense strand starting at position 2365 of SEQ ID NO: 916308
gguuucguuggaagugauu

SEQ ID NO: 1146469 - RNA, 19 nt, Artificial Sequence
  Description of Artificial Sequence: Synthetic oligonucleotide
  Antisense strand to SEQ ID NO: 1146468
aaucacuuccaacgaaacc

SEQ ID NO: 1146470 - RNA, 19 nt, Artificial Sequence
  Description of Artificial Sequence: Synthetic oligonucleotide
  Sense strand starting at position 2376 of SEQ ID NO: 916308
aagugauuccagcacgacu

SEQ ID NO: 1146471 - RNA, 19 nt, Artificial Sequence
  Description of Artificial Sequence: Synthetic oligonucleotide
  Antisense strand to SEQ ID NO: 1146470
agucgugcuggaaucacuu

SEQ ID NO: 1146472 - RNA, 19 nt, Artificial Sequence
  Description of Artificial Sequence: Synthetic oligonucleotide
  Sense strand starting at position 2575 of SEQ ID NO: 916308
agucuuuggucucugagga

SEQ ID NO: 1146473 - RNA, 19 nt, Artificial Sequence
  Description of Artificial Sequence: Synthetic oligonucleotide
  Antisense strand to SEQ ID NO: 1146472
uccucagagaccaaagacu

SEQ ID NO: 1146474 - RNA, 19 nt, Artificial Sequence
  Description of Artificial Sequence: Synthetic oligonucleotide
  Sense strand starting at position 2696 of SEQ ID NO: 916308
gagauaugugccuauucca

SEQ ID NO: 1146475 - RNA, 19 nt, Artificial Sequence
  Description of Artificial Sequence: Synthetic oligonucleotide
  Antisense strand to SEQ ID NO: 1146474
uggaauaggcacauaucuc

SEQ ID NO: 1146476 - RNA, 19 nt, Artificial Sequence
  Description of Artificial Sequence: Synthetic oligonucleotide
  Sense strand starting at position 2714 of SEQ ID NO: 916308
aggagucuccauuguacac

SEQ ID NO: 1146477 - RNA, 19 nt, Artificial Sequence
  Description of Artificial Sequence: Synthetic oligonucleotide
  Antisense strand to SEQ ID NO: 1146476
guguacaauggagacuccu

SEQ ID NO: 1146478 - RNA, 19 nt, Artificial Sequence
  Description of Artificial Sequence: Synthetic oligonucleotide
  Sense strand starting at position 2928 of SEQ ID NO: 916308
ccuuaucugguuuacagaa

SEQ ID NO: 1146479 - RNA, 19 nt, Artificial Sequence
  Description of Artificial Sequence: Synthetic oligonucleotide
  Antisense strand to SEQ ID NO: 1146478
uucuguaaaccagauaagg

SEQ ID NO: 1146480 - RNA, 19 nt, Artificial Sequence
  Description of Artificial Sequence: Synthetic oligonucleotide
  Sense strand starting at position 3049 of SEQ ID NO: 916308
guagaacccuuucugugaa

SEQ ID NO: 1146481 - RNA, 19 nt, Artificial Sequence
  Description of Artificial Sequence: Synthetic oligonucleotide
  Antisense strand to SEQ ID NO: 1146480
uucacagaaaggguucuac

SEQ ID NO: 1146482 - RNA, 19 nt, Artificial Sequence
  Description of Artificial Sequence: Synthetic oligonucleotide
  Sense strand starting at position 3138 of SEQ ID NO: 916308
ggaggaugcaccugcagau

SEQ ID NO: 1146483 - RNA, 19 nt, Artificial Sequence
  Description of Artificial Sequence: Synthetic oligonucleotide
  Antisense strand to SEQ ID NO: 1146482
aucugcaggugcauccucc

SEQ ID NO: 1146484 - RNA, 19 nt, Artificial Sequence
  Description of Artificial Sequence: Synthetic oligonucleotide
  Sense strand starting at position 3216 of SEQ ID NO: 916308
auagaaauacccugucugu

SEQ ID NO: 1146485 - RNA, 19 nt, Artificial Sequence
  Description of Artificial Sequence: Synthetic oligonucleotide
  Antisense strand to SEQ ID NO: 1146484
acagacaggguauuucuau

SEQ ID NO: 1146486 - RNA, 19 nt, Artificial Sequence
  Description of Artificial Sequence: Synthetic oligonucleotide
  Sense strand starting at position 3231 of SEQ ID NO: 916308
cugugcucagaaggacaua

SEQ ID NO: 1146487 - RNA, 19 nt, Artificial Sequence
  Description of Artificial Sequence: Synthetic oligonucleotide
  Antisense strand to SEQ ID NO: 1146486
uauguccuucugagcacag

SEQ ID NO: 1146488 - RNA, 19 nt, Artificial Sequence
  Description of Artificial Sequence: Synthetic oligonucleotide
  Sense strand starting at position 3275 of SEQ ID NO: 916308
agggaagucccucaugcua

SEQ ID NO: 1146489 - RNA, 19 nt, Artificial Sequence
  Description of Artificial Sequence: Synthetic oligonucleotide
  Antisense strand to SEQ ID NO: 1146488
uagcaugagggacuucccu

SEQ ID NO: 1146490 - RNA, 19 nt, Artificial Sequence
  Description of Artificial Sequence: Synthetic oligonucleotide
  Sense strand starting at position 3445 of SEQ ID NO: 916308
guccgaauuccugaagaca

SEQ ID NO: 1146491 - RNA, 19 nt, Artificial Sequence
  Description of Artificial Sequence: Synthetic oligonucleotide
  Antisense strand to SEQ ID NO: 1146490
ugucuucaggaauucggac

SEQ ID NO: 1146492 - RNA, 19 nt, Artificial Sequence
  Description of Artificial Sequence: Synthetic oligonucleotide
  Sense strand starting at position 3554 of SEQ ID NO: 916308
gguggugccuuauuuacau

SEQ ID NO: 1146493 - RNA, 19 nt, Artificial Sequence
  Description of Artificial Sequence: Synthetic oligonucleotide
  Antisense strand to SEQ ID NO: 1146492
auguaaauaaggcaccacc

SEQ ID NO: 1146494 - RNA, 19 nt, Artificial Sequence
  Description of Artificial Sequence: Synthetic oligonucleotide
  Sense strand starting at position 3593 of SEQ ID NO: 916308
uguuauuaguaagcaaaga

SEQ ID NO: 1146495 - RNA, 19 nt, Artificial Sequence
  Description of Artificial Sequence: Synthetic oligonucleotide
  Antisense strand to SEQ ID NO: 1146494
ucuuugcuuacuaauaaca

SEQ ID NO: 1146496 - RNA, 19 nt, Artificial Sequence
  Description of Artificial Sequence: Synthetic oligonucleotide
  Sense strand starting at position 3594 of SEQ ID NO: 916308
guuauuaguaagcaaagag

SEQ ID NO: 1146497 - RNA, 19 nt, Artificial Sequence
  Description of Artificial Sequence: Synthetic oligonucleotide
  Antisense strand to SEQ ID NO: 1146496
cucuuugcuuacuaauaac

SEQ ID NO: 1146498 - RNA, 19 nt, Artificial Sequence
  Description of Artificial Sequence: Synthetic oligonucleotide
  Sense strand starting at position 3668 of SEQ ID NO: 916308
agcauacuagagugugaau

SEQ ID NO: 1146499 - RNA, 19 nt, Artificial Sequence
  Description of Artificial Sequence: Synthetic oligonucleotide
  Antisense strand to SEQ ID NO: 1146498
auucacacucuaguaugcu

SEQ ID NO: 1146500 - RNA, 19 nt, Artificial Sequence
  Description of Artificial Sequence: Synthetic oligonucleotide
  Sense strand starting at position 3670 of SEQ ID NO: 916308
cauacuagagugugaauua

SEQ ID NO: 1146501 - RNA, 19 nt, Artificial Sequence
  Description of Artificial Sequence: Synthetic oligonucleotide
  Antisense strand to SEQ ID NO: 1146500
uaauucacacucuaguaug

SEQ ID NO: 1146502 - RNA, 19 nt, Artificial Sequence
  Description of Artificial Sequence: Synthetic oligonucleotide
  Sense strand starting at position 3950 of SEQ ID NO: 916308
gacguuucugcagaugaug

SEQ ID NO: 1146503 - RNA, 19 nt, Artificial Sequence
  Description of Artificial Sequence: Synthetic oligonucleotide
  Antisense strand to SEQ ID NO: 1146502
caucaucugcagaaacguc

SEQ ID NO: 1146504 - RNA, 19 nt, Artificial Sequence
  Description of Artificial Sequence: Synthetic oligonucleotide
  Sense strand starting at position 3959 of SEQ ID NO: 916308
gcagaugaugaugggaauu

SEQ ID NO: 1146505 - RNA, 19 nt, Artificial Sequence
  Description of Artificial Sequence: Synthetic oligonucleotide
  Antisense strand to SEQ ID NO: 1146504
aauucccaucaucaucugc

SEQ ID NO: 1146506 - RNA, 19 nt, Artificial Sequence
  Description of Artificial Sequence: Synthetic oligonucleotide
  Sense strand starting at position 240 of SEQ ID NO: 916309
auggcaugacugugaacga

SEQ ID NO: 1146507 - RNA, 19 nt, Artificial Sequence
  Description of Artificial Sequence: Synthetic oligonucleotide
  Antisense strand to SEQ ID NO: 1146506
ucguucacagucaugccau

SEQ ID NO: 1146508 - RNA, 19 nt, Artificial Sequence
  Description of Artificial Sequence: Synthetic oligonucleotide
  Sense strand starting at position 535 of SEQ ID NO: 916309
gugguauuagcugagauau

SEQ ID NO: 1146509 - RNA, 19 nt, Artificial Sequence
  Description of Artificial Sequence: Synthetic oligonucleotide
  Antisense strand to SEQ ID NO: 1146508
auaucucagcuaauaccac

SEQ ID NO: 1146510 - RNA, 19 nt, Artificial Sequence
  Description of Artificial Sequence: Synthetic oligonucleotide
  Sense strand starting at position 601 of SEQ ID NO: 916309
agaguuaccaguuaguguu

SEQ ID NO: 1146511 - RNA, 19 nt, Artificial Sequence
  Description of Artificial Sequence: Synthetic oligonucleotide
  Antisense strand to SEQ ID NO: 1146510
aacacuaacugguaacucu

SEQ ID NO: 1146512 - RNA, 19 nt, Artificial Sequence
  Description of Artificial Sequence: Synthetic oligonucleotide
  Sense strand starting at position 664 of SEQ ID NO: 916309
agagguguuucaccggaaa

SEQ ID NO: 1146513 - RNA, 19 nt, Artificial Sequence
  Description of Artificial Sequence: Synthetic oligonucleotide
  Antisense strand to SEQ ID NO: 1146512
uuuccggugaaacaccucu

SEQ ID NO: 1146514 - RNA, 19 nt, Artificial Sequence
  Description of Artificial Sequence: Synthetic oligonucleotide
  Sense strand starting at position 667 of SEQ ID NO: 916309
gguguuucaccggaaacca

SEQ ID NO: 1146515 - RNA, 19 nt, Artificial Sequence
  Description of Artificial Sequence: Synthetic oligonucleotide
  Antisense strand to SEQ ID NO: 1146514
ugguuuccggugaaacacc

SEQ ID NO: 1146516 - RNA, 19 nt, Artificial Sequence
  Description of Artificial Sequence: Synthetic oligonucleotide
  Sense strand starting at position 727 of SEQ ID NO: 916309
acuucuagacucuguuaug

SEQ ID NO: 1146517 - RNA, 19 nt, Artificial Sequence
  Description of Artificial Sequence: Synthetic oligonucleotide
  Antisense strand to SEQ ID NO: 1146516
cauaacagagucuagaagu

SEQ ID NO: 1146518 - RNA, 19 nt, Artificial Sequence
  Description of Artificial Sequence: Synthetic oligonucleotide
  Sense strand starting at position 728 of SEQ ID NO: 916309
cuucuagacucuguuauga

SEQ ID NO: 1146519 - RNA, 19 nt, Artificial Sequence
  Description of Artificial Sequence: Synthetic oligonucleotide
  Antisense strand to SEQ ID NO: 1146518
ucauaacagagucuagaag

SEQ ID NO: 1146520 - RNA, 19 nt, Artificial Sequence
  Description of Artificial Sequence: Synthetic oligonucleotide
  Sense strand starting at position 866 of SEQ ID NO: 916309
ucuguaccaugauugauga

SEQ ID NO: 1146521 - RNA, 19 nt, Artificial Sequence
  Description of Artificial Sequence: Synthetic oligonucleotide
  Antisense strand to SEQ ID NO: 1146520
ucaucaaucaugguacaga

SEQ ID NO: 1146522 - RNA, 19 nt, Artificial Sequence
  Description of Artificial Sequence: Synthetic oligonucleotide
  Sense strand starting at position 1020 of SEQ ID NO: 916309
gucagcucccaggaaacuu

SEQ ID NO: 1146523 - RNA, 19 nt, Artificial Sequence
  Description of Artificial Sequence: Synthetic oligonucleotide
  Antisense strand to SEQ ID NO: 1146522
aaguuuccugggagcugac

SEQ ID NO: 1146524 - RNA, 19 nt, Artificial Sequence
  Description of Artificial Sequence: Synthetic oligonucleotide
  Sense strand starting at position 1030 of SEQ ID NO: 916309
aggaaacuuucucuggcua

SEQ ID NO: 1146525 - RNA, 19 nt, Artificial Sequence
  Description of Artificial Sequence: Synthetic oligonucleotide
  Antisense strand to SEQ ID NO: 1146524
uagccagagaaaguuuccu

SEQ ID NO: 1146526 - RNA, 19 nt, Artificial Sequence
  Description of Artificial Sequence: Synthetic oligonucleotide
  Sense strand starting at position 1031 of SEQ ID NO: 916309
ggaaacuuucucuggcuau

SEQ ID NO: 1146527 - RNA, 19 nt, Artificial Sequence
  Description of Artificial Sequence: Synthetic oligonucleotide
  Antisense strand to SEQ ID NO: 1146526
auagccagagaaaguuucc

SEQ ID NO: 1146528 - RNA, 19 nt, Artificial Sequence
  Description of Artificial Sequence: Synthetic oligonucleotide
  Sense strand starting at position 2173 of SEQ ID NO: 916309
caggucacccucuggaaau

SEQ ID NO: 1146529 - RNA, 19 nt, Artificial Sequence
  Description of Artificial Sequence: Synthetic oligonucleotide
  Antisense strand to SEQ ID NO: 1146528
auuuccagagggugaccug

SEQ ID NO: 1146530 - RNA, 19 nt, Artificial Sequence
  Description of Artificial Sequence: Synthetic oligonucleotide
  Sense strand starting at position 2263 of SEQ ID NO: 916309
cccaguggauuugaaggau

SEQ ID NO: 1146531 - RNA, 19 nt, Artificial Sequence
  Description of Artificial Sequence: Synthetic oligonucleotide
  Antisense strand to SEQ ID NO: 1146530
auccuucaaauccacuggg

SEQ ID NO: 1146532 - RNA, 19 nt, Artificial Sequence
  Description of Artificial Sequence: Synthetic oligonucleotide
  Sense strand starting at position 2425 of SEQ ID NO: 916309
agacuuuacugggcaggga

SEQ ID NO: 1146533 - RNA, 19 nt, Artificial Sequence
  Description of Artificial Sequence: Synthetic oligonucleotide
  Antisense strand to SEQ ID NO: 1146532
ucccugcccaguaaagucu

SEQ ID NO: 1146534 - RNA, 19 nt, Artificial Sequence
  Description of Artificial Sequence: Synthetic oligonucleotide
  Sense strand starting at position 2493 of SEQ ID NO: 916309
ggagaaagauuagacuuga

SEQ ID NO: 1146535 - RNA, 19 nt, Artificial Sequence
  Description of Artificial Sequence: Synthetic oligonucleotide
  Antisense strand to SEQ ID NO: 1146534
ucaagucuaaucuuucucc

SEQ ID NO: 1146536 - RNA, 19 nt, Artificial Sequence
  Description of Artificial Sequence: Synthetic oligonucleotide
  Sense strand starting at position 2507 of SEQ ID NO: 916309
cuugauucccaguagguca

SEQ ID NO: 1146537 - RNA, 19 nt, Artificial Sequence
  Description of Artificial Sequence: Synthetic oligonucleotide
  Antisense strand to SEQ ID NO: 1146536
ugaccuacugggaaucaag

SEQ ID NO: 1146538 - RNA, 19 nt, Artificial Sequence
  Description of Artificial Sequence: Synthetic oligonucleotide
  Sense strand starting at position 2563 of SEQ ID NO: 916309
gggucagcgaauggaaauu

SEQ ID NO: 1146539 - RNA, 19 nt, Artificial Sequence
  Description of Artificial Sequence: Synthetic oligonucleotide
  Antisense strand to SEQ ID NO: 1146538
aauuuccauucgcugaccc

SEQ ID NO: 1146540 - RNA, 19 nt, Artificial Sequence
  Description of Artificial Sequence: Synthetic oligonucleotide
  Sense strand starting at position 2588 of SEQ ID NO: 916309
gagggaaguccaggaguca

SEQ ID NO: 1146541 - RNA, 19 nt, Artificial Sequence
  Description of Artificial Sequence: Synthetic oligonucleotide
  Antisense strand to SEQ ID NO: 1146540
ugacuccuggacuucccuc

SEQ ID NO: 1146542 - RNA, 19 nt, Artificial Sequence
  Description of Artificial Sequence: Synthetic oligonucleotide
  Sense strand starting at position 2609 of SEQ ID NO: 916309
gggauucgggcucagcuaa

SEQ ID NO: 1146543 - RNA, 19 nt, Artificial Sequence
  Description of Artificial Sequence: Synthetic oligonucleotide
  Antisense strand to SEQ ID NO: 1146542
uuagcugagcccgaauccc

SEQ ID NO: 1146544 - RNA, 19 nt, Artificial Sequence
  Description of Artificial Sequence: Synthetic oligonucleotide
  Sense strand starting at position 2710 of SEQ ID NO: 916309
uaucgagggugaucagaaa

SEQ ID NO: 1146545 - RNA, 19 nt, Artificial Sequence
  Description of Artificial Sequence: Synthetic oligonucleotide
  Antisense strand to SEQ ID NO: 1146544
uuucugaucacccucgaua

SEQ ID NO: 1146546 - RNA, 19 nt, Artificial Sequence
  Description of Artificial Sequence: Synthetic oligonucleotide
  Sense strand starting at position 2718 of SEQ ID NO: 916309
gugaucagaaaucgaagau

SEQ ID NO: 1146547 - RNA, 19 nt, Artificial Sequence
  Description of Artificial Sequence: Synthetic oligonucleotide
  Antisense strand to SEQ ID NO: 1146546
aucuucgauuucugaucac

SEQ ID NO: 1146548 - RNA, 19 nt, Artificial Sequence
  Description of Artificial Sequence: Synthetic oligonucleotide
  Sense strand starting at position 3146 of SEQ ID NO: 916309
cagaaauccgauuaauguu

SEQ ID NO: 1146549 - RNA, 19 nt, Artificial Sequence
  Description of Artificial Sequence: Synthetic oligonucleotide
  Antisense strand to SEQ ID NO: 1146548
aacauuaaucggauuucug

SEQ ID NO: 1146550 - RNA, 19 nt, Artificial Sequence
  Description of Artificial Sequence: Synthetic oligonucleotide
  Sense strand starting at position 3155 of SEQ ID NO: 916309
gauuaauguuuggucaauc

SEQ ID NO: 1146551 - RNA, 19 nt, Artificial Sequence
  Description of Artificial Sequence: Synthetic oligonucleotide
  Antisense strand to SEQ ID NO: 1146550
gauugaccaaacauuaauc

SEQ ID NO: 1146552 - RNA, 19 nt, Artificial Sequence
  Description of Artificial Sequence: Synthetic oligonucleotide
  Sense strand starting at position 3156 of SEQ ID NO: 916309
auuaauguuuggucaauca

SEQ ID NO: 1146553 - RNA, 19 nt, Artificial Sequence
  Description of Artificial Sequence: Synthetic oligonucleotide
  Antisense strand to SEQ ID NO: 1146552
ugauugaccaaacauuaau

SEQ ID NO: 1146554 - RNA, 19 nt, Artificial Sequence
  Description of Artificial Sequence: Synthetic oligonucleotide
  Sense strand starting at position 3181 of SEQ ID NO: 916309
cuuuauaggcaguaacauu

SEQ ID NO: 1146555 - RNA, 19 nt, Artificial Sequence
  Description of Artificial Sequence: Synthetic oligonucleotide
  Antisense strand to SEQ ID NO: 1146554
aauguuacugccuauaaag

SEQ ID NO: 1146556 - RNA, 19 nt, Artificial Sequence
  Description of Artificial Sequence: Synthetic oligonucleotide
  Sense strand starting at position 3192 of SEQ ID NO: 916309
guaacauuauucccaggca

SEQ ID NO: 1146557 - RNA, 19 nt, Artificial Sequence
  Description of Artificial Sequence: Synthetic oligonucleotide
  Antisense strand to SEQ ID NO: 1146556
ugccugggaauaauguuac

SEQ ID NO: 1146558 - RNA, 19 nt, Artificial Sequence
  Description of Artificial Sequence: Synthetic oligonucleotide
  Sense strand starting at position 3364 of SEQ ID NO: 916309
cucuaugggcuuuauaaau

SEQ ID NO: 1146559 - RNA, 19 nt, Artificial Sequence
  Description of Artificial Sequence: Synthetic oligonucleotide
  Antisense strand to SEQ ID NO: 1146558
auuuauaaagcccauagag

SEQ ID NO: 1146560 - RNA, 19 nt, Artificial Sequence
  Description of Artificial Sequence: Synthetic oligonucleotide
  Sense strand starting at position 3408 of SEQ ID NO: 916309
aauccugugagguaagagu

SEQ ID NO: 1146561 - RNA, 19 nt, Artificial Sequence
  Description of Artificial Sequence: Synthetic oligonucleotide
  Antisense strand to SEQ ID NO: 1146560
acucuuaccucacaggauu

SEQ ID NO: 1146562 - RNA, 19 nt, Artificial Sequence
  Description of Artificial Sequence: Synthetic oligonucleotide
  Sense strand starting at position 3547 of SEQ ID NO: 916309
ggaggucuggucugaaacu

SEQ ID NO: 1146563 - RNA, 19 nt, Artificial Sequence
  Description of Artificial Sequence: Synthetic oligonucleotide
  Antisense strand to SEQ ID NO: 1146562
aguuucagaccagaccucc

SEQ ID NO: 1146564 - RNA, 19 nt, Artificial Sequence
  Description of Artificial Sequence: Synthetic oligonucleotide
  Sense strand starting at position 3658 of SEQ ID NO: 916309
ggguucuaaucuuugaucu

SEQ ID NO: 1146565 - RNA, 19 nt, Artificial Sequence
  Description of Artificial Sequence: Synthetic oligonucleotide
  Antisense strand to SEQ ID NO: 1146564
agaucaaagauuagaaccc

SEQ ID NO: 1146566 - RNA, 19 nt, Artificial Sequence
  Description of Artificial Sequence: Synthetic oligonucleotide
  Sense strand starting at position 3659 of SEQ ID NO: 916309
gguucuaaucuuugaucug

SEQ ID NO: 1146567 - RNA, 19 nt, Artificial Sequence
  Description of Artificial Sequence: Synthetic oligonucleotide
  Antisense strand to SEQ ID NO: 1146566
cagaucaaagauuagaacc

SEQ ID NO: 1146568 - RNA, 19 nt, Artificial Sequence
  Description of Artificial Sequence: Synthetic oligonucleotide
  Sense strand starting at position 3766 of SEQ ID NO: 916309
aacugaggauauuaaggaa

SEQ ID NO: 1146569 - RNA, 19 nt, Artificial Sequence
  Description of Artificial Sequence: Synthetic oligonucleotide
  Antisense strand to SEQ ID NO: 1146568
uuccuuaauauccucaguu

SEQ ID NO: 1146570 - RNA, 19 nt, Artificial Sequence
  Description of Artificial Sequence: Synthetic oligonucleotide
  Sense strand starting at position 3781 of SEQ ID NO: 916309
ggaauucagugagucauag

SEQ ID NO: 1146571 - RNA, 19 nt, Artificial Sequence
  Description of Artificial Sequence: Synthetic oligonucleotide
  Antisense strand to SEQ ID NO: 1146570
cuaugacucacugaauucc

SEQ ID NO: 1146572 - RNA, 19 nt, Artificial Sequence
  Description of Artificial Sequence: Synthetic oligonucleotide
  Sense strand starting at position 3787 of SEQ ID NO: 916309
cagugagucauagguugag

SEQ ID NO: 1146573 - RNA, 19 nt, Artificial Sequence
  Description of Artificial Sequence: Synthetic oligonucleotide
  Antisense strand to SEQ ID NO: 1146572
cucaaccuaugacucacug

SEQ ID NO: 1146574 - RNA, 19 nt, Artificial Sequence
  Description of Artificial Sequence: Synthetic oligonucleotide
  Sense strand starting at position 3790 of SEQ ID NO: 916309
ugagucauagguugagaaa

SEQ ID NO: 1146575 - RNA, 19 nt, Artificial Sequence
  Description of Artificial Sequence: Synthetic oligonucleotide
  Antisense strand to SEQ ID NO: 1146574
uuucucaaccuaugacuca

SEQ ID NO: 1146576 - RNA, 19 nt, Artificial Sequence
  Description of Artificial Sequence: Synthetic oligonucleotide
  Sense strand starting at position 3938 of SEQ ID NO: 916309
gaguuaaauccugacucga

SEQ ID NO: 1146577 - RNA, 19 nt, Artificial Sequence
  Description of Artificial Sequence: Synthetic oligonucleotide
  Antisense strand to SEQ ID NO: 1146576
ucgagucaggauuuaacuc

SEQ ID NO: 1146578 - RNA, 19 nt, Artificial Sequence
  Description of Artificial Sequence: Synthetic oligonucleotide
  Sense strand starting at position 3940 of SEQ ID NO: 916309
guuaaauccugacucgaua

SEQ ID NO: 1146579 - RNA, 19 nt, Artificial Sequence
  Description of Artificial Sequence: Synthetic oligonucleotide
  Antisense strand to SEQ ID NO: 1146578
uaucgagucaggauuuaac

SEQ ID NO: 1146580 - RNA, 19 nt, Artificial Sequence
  Description of Artificial Sequence: Synthetic oligonucleotide
  Sense strand starting at position 3943 of SEQ ID NO: 916309
aaauccugacucgauaguu

SEQ ID NO: 1146581 - RNA, 19 nt, Artificial Sequence
  Description of Artificial Sequence: Synthetic oligonucleotide
  Antisense strand to SEQ ID NO: 1146580
aacuaucgagucaggauuu

SEQ ID NO: 1146582 - RNA, 19 nt, Artificial Sequence
  Description of Artificial Sequence: Synthetic oligonucleotide
  Sense strand starting at position 3956 of SEQ ID NO: 916309
auaguuaaacgucacuauu

SEQ ID NO: 1146583 - RNA, 19 nt, Artificial Sequence
  Description of Artificial Sequence: Synthetic oligonucleotide
  Antisense strand to SEQ ID NO: 1146582
aauagugacguuuaacuau

SEQ ID NO: 1146584 - RNA, 19 nt, Artificial Sequence
  Description of Artificial Sequence: Synthetic oligonucleotide
  Sense strand starting at position 3959 of SEQ ID NO: 916309
guuaaacgucacuauuauc

SEQ ID NO: 1146585 - RNA, 19 nt, Artificial Sequence
  Description of Artificial Sequence: Synthetic oligonucleotide
  Antisense strand to SEQ ID NO: 1146584
gauaauagugacguuuaac

SEQ ID NO: 1146586 - RNA, 19 nt, Artificial Sequence
  Description of Artificial Sequence: Synthetic oligonucleotide
  Sense strand starting at position 130 of SEQ ID NO: 916310
gggagucagccagagaagu

SEQ ID NO: 1146587 - RNA, 19 nt, Artificial Sequence
  Description of Artificial Sequence: Synthetic oligonucleotide
  Antisense strand to SEQ ID NO: 1146586
acuucucuggcugacuccc

SEQ ID NO: 1146588 - RNA, 19 nt, Artificial Sequence
  Description of Artificial Sequence: Synthetic oligonucleotide
  Sense strand starting at position 205 of SEQ ID NO: 916310
ccggaaauccugcagaucu

SEQ ID NO: 1146589 - RNA, 19 nt, Artificial Sequence
  Description of Artificial Sequence: Synthetic oligonucleotide
  Antisense strand to SEQ ID NO: 1146588
agaucugcaggauuuccgg

SEQ ID NO: 1146590 - RNA, 19 nt, Artificial Sequence
  Description of Artificial Sequence: Synthetic oligonucleotide
  Sense strand starting at position 222 of SEQ ID NO: 916310
cucagauagcccugaacaa

SEQ ID NO: 1146591 - RNA, 19 nt, Artificial Sequence
  Description of Artificial Sequence: Synthetic oligonucleotide
  Antisense strand to SEQ ID NO: 1146590
uuguucagggcuaucugag

SEQ ID NO: 1146592 - RNA, 19 nt, Artificial Sequence
  Description of Artificial Sequence: Synthetic oligonucleotide
  Sense strand starting at position 384 of SEQ ID NO: 916310
ucagcaauccugcgaggua

SEQ ID NO: 1146593 - RNA, 19 nt, Artificial Sequence
  Description of Artificial Sequence: Synthetic oligonucleotide
  Antisense strand to SEQ ID NO: 1146592
uaccucgcaggauugcuga

SEQ ID NO: 1146594 - RNA, 19 nt, Artificial Sequence
  Description of Artificial Sequence: Synthetic oligonucleotide
  Sense strand starting at position 397 of SEQ ID NO: 916310
gagguagguacaugcuuaa

SEQ ID NO: 1146595 - RNA, 19 nt, Artificial Sequence
  Description of Artificial Sequence: Synthetic oligonucleotide
  Antisense strand to SEQ ID NO: 1146594
uuaagcauguaccuaccuc

SEQ ID NO: 1146596 - RNA, 19 nt, Artificial Sequence
  Description of Artificial Sequence: Synthetic oligonucleotide
  Sense strand starting at position 409 of SEQ ID NO: 916310
ugcuuaaccucaugggaca

SEQ ID NO: 1146597 - RNA, 19 nt, Artificial Sequence
  Description of Artificial Sequence: Synthetic oligonucleotide
  Antisense strand to SEQ ID NO: 1146596
ugucccaugagguuaagca

SEQ ID NO: 1146598 - RNA, 19 nt, Artificial Sequence
  Description of Artificial Sequence: Synthetic oligonucleotide
  Sense strand starting at position 513 of SEQ ID NO: 916310
gggcaauguuggagggagu

SEQ ID NO: 1146599 - RNA, 19 nt, Artificial Sequence
  Description of Artificial Sequence: Synthetic oligonucleotide
  Antisense strand to SEQ ID NO: 1146598
acucccuccaacauugccc

SEQ ID NO: 1146600 - RNA, 19 nt, Artificial Sequence
  Description of Artificial Sequence: Synthetic oligonucleotide
  Sense strand starting at position 514 of SEQ ID NO: 916310
ggcaauguuggagggaguu

SEQ ID NO: 1146601 - RNA, 19 nt, Artificial Sequence
  Description of Artificial Sequence: Synthetic oligonucleotide
  Antisense strand to SEQ ID NO: 1146600
aacucccuccaacauugcc

SEQ ID NO: 1146602 - RNA, 19 nt, Artificial Sequence
  Description of Artificial Sequence: Synthetic oligonucleotide
  Sense strand starting at position 629 of SEQ ID NO: 916310
uuuaaaguguuucuaggga

SEQ ID NO: 1146603 - RNA, 19 nt, Artificial Sequence
  Description of Artificial Sequence: Synthetic oligonucleotide
  Antisense strand to SEQ ID NO: 1146602
ucccuagaaacacuuuaaa

SEQ ID NO: 1146604 - RNA, 19 nt, Artificial Sequence
  Description of Artificial Sequence: Synthetic oligonucleotide
  Sense strand starting at position 633 of SEQ ID NO: 916310
aaguguuucuagggaagag

SEQ ID NO: 1146605 - RNA, 19 nt, Artificial Sequence
  Description of Artificial Sequence: Synthetic oligonucleotide
  Antisense strand to SEQ ID NO: 1146604
cucuucccuagaaacacuu

SEQ ID NO: 1146606 - RNA, 19 nt, Artificial Sequence
  Description of Artificial Sequence: Synthetic oligonucleotide
  Sense strand starting at position 634 of SEQ ID NO: 916310
aguguuucuagggaagagu

SEQ ID NO: 1146607 - RNA, 19 nt, Artificial Sequence
  Description of Artificial Sequence: Synthetic oligonucleotide
  Antisense strand to SEQ ID NO: 1146606
acucuucccuagaaacacu

SEQ ID NO: 1146608 - RNA, 19 nt, Artificial Sequence
  Description of Artificial Sequence: Synthetic oligonucleotide
  Sense strand starting at position 701 of SEQ ID NO: 916310
cagccuucucccgggacau

SEQ ID NO: 1146609 - RNA, 19 nt, Artificial Sequence
  Description of Artificial Sequence: Synthetic oligonucleotide
  Antisense strand to SEQ ID NO: 1146608
augucccgggagaaggcug

SEQ ID NO: 1146610 - RNA, 19 nt, Artificial Sequence
  Description of Artificial Sequence: Synthetic oligonucleotide
  Sense strand starting at position 782 of SEQ ID NO: 916310
cgaugcauccgaggacuua

SEQ ID NO: 1146611 - RNA, 19 nt, Artificial Sequence
  Description of Artificial Sequence: Synthetic oligonucleotide
  Antisense strand to SEQ ID NO: 1146610
uaaguccucggaugcaucg

SEQ ID NO: 1146612 - RNA, 19 nt, Artificial Sequence
  Description of Artificial Sequence: Synthetic oligonucleotide
  Sense strand starting at position 1580 of SEQ ID NO: 916310
gagcgaaucgcggaucaca

SEQ ID NO: 1146613 - RNA, 19 nt, Artificial Sequence
  Description of Artificial Sequence: Synthetic oligonucleotide
  Antisense strand to SEQ ID NO: 1146612
ugugauccgcgauucgcuc

SEQ ID NO: 1146614 - RNA, 19 nt, Artificial Sequence
  Description of Artificial Sequence: Synthetic oligonucleotide
  Sense strand starting at position 1816 of SEQ ID NO: 916310
cgcucugacgaaugagcaa

SEQ ID NO: 1146615 - RNA, 19 nt, Artificial Sequence
  Description of Artificial Sequence: Synthetic oligonucleotide
  Antisense strand to SEQ ID NO: 1146614
uugcucauucgucagagcg

SEQ ID NO: 1146616 - RNA, 19 nt, Artificial Sequence
  Description of Artificial Sequence: Synthetic oligonucleotide
  Sense strand starting at position 2037 of SEQ ID NO: 916310
cgaaucaguucuguuagcu

SEQ ID NO: 1146617 - RNA, 19 nt, Artificial Sequence
  Description of Artificial Sequence: Synthetic oligonucleotide
  Antisense strand to SEQ ID NO: 1146616
agcuaacagaacugauucg

SEQ ID NO: 1146618 - RNA, 19 nt, Artificial Sequence
  Description of Artificial Sequence: Synthetic oligonucleotide
  Sense strand starting at position 2167 of SEQ ID NO: 916310
uuguguuaguuuccucaug

SEQ ID NO: 1146619 - RNA, 19 nt, Artificial Sequence
  Description of Artificial Sequence: Synthetic oligonucleotide
  Antisense strand to SEQ ID NO: 1146618
caugaggaaacuaacacaa

SEQ ID NO: 1146620 - RNA, 19 nt, Artificial Sequence
  Description of Artificial Sequence: Synthetic oligonucleotide
  Sense strand starting at position 2222 of SEQ ID NO: 916310
acacaaauguguuaucuua

SEQ ID NO: 1146621 - RNA, 19 nt, Artificial Sequence
  Description of Artificial Sequence: Synthetic oligonucleotide
  Antisense strand to SEQ ID NO: 1146620
uaagauaacacauuugugu

SEQ ID NO: 1146622 - RNA, 19 nt, Artificial Sequence
  Description of Artificial Sequence: Synthetic oligonucleotide
  Sense strand starting at position 2253 of SEQ ID NO: 916310
ccagaagucucagaugggu

SEQ ID NO: 1146623 - RNA, 19 nt, Artificial Sequence
  Description of Artificial Sequence: Synthetic oligonucleotide
  Antisense strand to SEQ ID NO: 1146622
acccaucugagacuucugg

SEQ ID NO: 1146624 - RNA, 19 nt, Artificial Sequence
  Description of Artificial Sequence: Synthetic oligonucleotide
  Sense strand starting at position 2326 of SEQ ID NO: 916310
gguaguguguuccuugcuu

SEQ ID NO: 1146625 - RNA, 19 nt, Artificial Sequence
  Description of Artificial Sequence: Synthetic oligonucleotide
  Antisense strand to SEQ ID NO: 1146624
aagcaaggaacacacuacc

SEQ ID NO: 1146626 - RNA, 19 nt, Artificial Sequence
  Description of Artificial Sequence: Synthetic oligonucleotide
  Sense strand starting at position 2353 of SEQ ID NO: 916310
uggagaggugccugugauc

SEQ ID NO: 1146627 - RNA, 19 nt, Artificial Sequence
  Description of Artificial Sequence: Synthetic oligonucleotide
  Antisense strand to SEQ ID NO: 1146626
gaucacaggcaccucucca

SEQ ID NO: 1146628 - RNA, 19 nt, Artificial Sequence
  Description of Artificial Sequence: Synthetic oligonucleotide
  Sense strand starting at position 2362 of SEQ ID NO: 916310
gccugugauccuuggcugu

SEQ ID NO: 1146629 - RNA, 19 nt, Artificial Sequence
  Description of Artificial Sequence: Synthetic oligonucleotide
  Antisense strand to SEQ ID NO: 1146628
acagccaaggaucacaggc

SEQ ID NO: 1146630 - RNA, 19 nt, Artificial Sequence
  Description of Artificial Sequence: Synthetic oligonucleotide
  Sense strand starting at position 2410 of SEQ ID NO: 916310
agcgucuucucccuucuaa

SEQ ID NO: 1146631 - RNA, 19 nt, Artificial Sequence
  Description of Artificial Sequence: Synthetic oligonucleotide
  Antisense strand to SEQ ID NO: 1146630
uuagaagggagaagacgcu

SEQ ID NO: 1146632 - RNA, 19 nt, Artificial Sequence
  Description of Artificial Sequence: Synthetic oligonucleotide
  Sense strand starting at position 2426 of SEQ ID NO: 916310
uaaggagcccugugauuau

SEQ ID NO: 1146633 - RNA, 19 nt, Artificial Sequence
  Description of Artificial Sequence: Synthetic oligonucleotide
  Antisense strand to SEQ ID NO: 1146632
auaaucacagggcuccuua

SEQ ID NO: 1146634 - RNA, 19 nt, Artificial Sequence
  Description of Artificial Sequence: Synthetic oligonucleotide
  Sense strand starting at position 2436 of SEQ ID NO: 916310
ugugauuauaugggaucca

SEQ ID NO: 1146635 - RNA, 19 nt, Artificial Sequence
  Description of Artificial Sequence: Synthetic oligonucleotide
  Antisense strand to SEQ ID NO: 1146634
uggaucccauauaaucaca

SEQ ID NO: 1146636 - RNA, 19 nt, Artificial Sequence
  Description of Artificial Sequence: Synthetic oligonucleotide
  Sense strand starting at position 2468 of SEQ ID NO: 916310
ggcuaaucucuccagcuca

SEQ ID NO: 1146637 - RNA, 19 nt, Artificial Sequence
  Description of Artificial Sequence: Synthetic oligonucleotide
  Antisense strand to SEQ ID NO: 1146636
ugagcuggagagauuagcc

SEQ ID NO: 1146638 - RNA, 19 nt, Artificial Sequence
  Description of Artificial Sequence: Synthetic oligonucleotide
  Sense strand starting at position 2559 of SEQ ID NO: 916310
ggauguggauaucuuggua

SEQ ID NO: 1146639 - RNA, 19 nt, Artificial Sequence
  Description of Artificial Sequence: Synthetic oligonucleotide
  Antisense strand to SEQ ID NO: 1146638
uaccaagauauccacaucc

SEQ ID NO: 1146640 - RNA, 19 nt, Artificial Sequence
  Description of Artificial Sequence: Synthetic oligonucleotide
  Sense strand starting at position 2870 of SEQ ID NO: 916310
gggucagacuggucucgaa

SEQ ID NO: 1146641 - RNA, 19 nt, Artificial Sequence
  Description of Artificial Sequence: Synthetic oligonucleotide
  Antisense strand to SEQ ID NO: 1146640
uucgagaccagucugaccc

SEQ ID NO: 1146642 - RNA, 19 nt, Artificial Sequence
  Description of Artificial Sequence: Synthetic oligonucleotide
  Sense strand starting at position 3400 of SEQ ID NO: 916310
gccaccacgcucgguuaaa

SEQ ID NO: 1146643 - RNA, 19 nt, Artificial Sequence
  Description of Artificial Sequence: Synthetic oligonucleotide
  Antisense strand to SEQ ID NO: 1146642
uuuaaccgagcgugguggc

SEQ ID NO: 1146644 - RNA, 19 nt, Artificial Sequence
  Description of Artificial Sequence: Synthetic oligonucleotide
  Sense strand starting at position 3576 of SEQ ID NO: 916310
gucagaucuccugacuucu

SEQ ID NO: 1146645 - RNA, 19 nt, Artificial Sequence
  Description of Artificial Sequence: Synthetic oligonucleotide
  Antisense strand to SEQ ID NO: 1146644
agaagucaggagaucugac

SEQ ID NO: 1146646 - RNA, 19 nt, Artificial Sequence
  Description of Artificial Sequence: Synthetic oligonucleotide
  Sense strand starting at position 3582 of SEQ ID NO: 916310
ucuccugacuucucaguca

SEQ ID NO: 1146647 - RNA, 19 nt, Artificial Sequence
  Description of Artificial Sequence: Synthetic oligonucleotide
  Antisense strand to SEQ ID NO: 1146646
ugacugagaagucaggaga

SEQ ID NO: 1146648 - RNA, 19 nt, Artificial Sequence
  Description of Artificial Sequence: Synthetic oligonucleotide
  Sense strand starting at position 3585 of SEQ ID NO: 916310
ccugacuucucagucaugu

SEQ ID NO: 1146649 - RNA, 19 nt, Artificial Sequence
  Description of Artificial Sequence: Synthetic oligonucleotide
  Antisense strand to SEQ ID NO: 1146648
acaugacugagaagucagg

SEQ ID NO: 1146650 - RNA, 19 nt, Artificial Sequence
  Description of Artificial Sequence: Synthetic oligonucleotide
  Sense strand starting at position 3589 of SEQ ID NO: 916310
acuucucagucauguauua

SEQ ID NO: 1146651 - RNA, 19 nt, Artificial Sequence
  Description of Artificial Sequence: Synthetic oligonucleotide
  Antisense strand to SEQ ID NO: 1146650
uaauacaugacugagaagu

SEQ ID NO: 1146652 - RNA, 19 nt, Artificial Sequence
  Description of Artificial Sequence: Synthetic oligonucleotide
  Sense strand starting at position 3594 of SEQ ID NO: 916310
ucagucauguauuauuaca

SEQ ID NO: 1146653 - RNA, 19 nt, Artificial Sequence
  Description of Artificial Sequence: Synthetic oligonucleotide
  Antisense strand to SEQ ID NO: 1146652
uguaauaauacaugacuga

SEQ ID NO: 1146654 - RNA, 19 nt, Artificial Sequence
  Description of Artificial Sequence: Synthetic oligonucleotide
  Sense strand starting at position 3596 of SEQ ID NO: 916310
agucauguauuauuacaac

SEQ ID NO: 1146655 - RNA, 19 nt, Artificial Sequence
  Description of Artificial Sequence: Synthetic oligonucleotide
  Antisense strand to SEQ ID NO: 1146654
guuguaauaauacaugacu

SEQ ID NO: 1146656 - RNA, 19 nt, Artificial Sequence
  Description of Artificial Sequence: Synthetic oligonucleotide
  Sense strand starting at position 3633 of SEQ ID NO: 916310
aaggcauagucugguccau

SEQ ID NO: 1146657 - RNA, 19 nt, Artificial Sequence
  Description of Artificial Sequence: Synthetic oligonucleotide
  Antisense strand to SEQ ID NO: 1146656
auggaccagacuaugccuu

SEQ ID NO: 1146658 - RNA, 19 nt, Artificial Sequence
  Description of Artificial Sequence: Synthetic oligonucleotide
  Sense strand starting at position 3635 of SEQ ID NO: 916310
ggcauagucugguccauuu

SEQ ID NO: 1146659 - RNA, 19 nt, Artificial Sequence
  Description of Artificial Sequence: Synthetic oligonucleotide
  Antisense strand to SEQ ID NO: 1146658
aaauggaccagacuaugcc

SEQ ID NO: 1146660 - RNA, 19 nt, Artificial Sequence
  Description of Artificial Sequence: Synthetic oligonucleotide
  Sense strand starting at position 3830 of SEQ ID NO: 916310
guugcagcccucugucuua

SEQ ID NO: 1146661 - RNA, 19 nt, Artificial Sequence
  Description of Artificial Sequence: Synthetic oligonucleotide
  Antisense strand to SEQ ID NO: 1146660
uaagacagagggcugcaac

SEQ ID NO: 1146662 - RNA, 19 nt, Artificial Sequence
  Description of Artificial Sequence: Synthetic oligonucleotide
  Sense strand starting at position 3852 of SEQ ID NO: 916310
ucuggucuugccuguaguu

SEQ ID NO: 1146663 - RNA, 19 nt, Artificial Sequence
  Description of Artificial Sequence: Synthetic oligonucleotide
  Antisense strand to SEQ ID NO: 1146662
aacuacaggcaagaccaga

SEQ ID NO: 1146664 - RNA, 19 nt, Artificial Sequence
  Description of Artificial Sequence: Synthetic oligonucleotide
  Sense strand starting at position 3866 of SEQ ID NO: 916310
uaguuagacccuuagugca

SEQ ID NO: 1146665 - RNA, 19 nt, Artificial Sequence
  Description of Artificial Sequence: Synthetic oligonucleotide
  Antisense strand to SEQ ID NO: 1146664
ugcacuaagggucuaacua

SEQ ID NO: 1146666 - RNA, 19 nt, Artificial Sequence
  Description of Artificial Sequence: Synthetic oligonucleotide
  Sense strand starting at position 23 of SEQ ID NO: 916311
agaucacgauccugguaga

SEQ ID NO: 1146667 - RNA, 19 nt, Artificial Sequence
  Description of Artificial Sequence: Synthetic oligonucleotide
  Antisense strand to SEQ ID NO: 1146666
ucuaccaggaucgugaucu

SEQ ID NO: 1146668 - RNA, 19 nt, Artificial Sequence
  Description of Artificial Sequence: Synthetic oligonucleotide
  Sense strand starting at position 34 of SEQ ID NO: 916311
cugguagacugacauguua

SEQ ID NO: 1146669 - RNA, 19 nt, Artificial Sequence
  Description of Artificial Sequence: Synthetic oligonucleotide
  Antisense strand to SEQ ID NO: 1146668
uaacaugucagucuaccag

SEQ ID NO: 1146670 - RNA, 19 nt, Artificial Sequence
  Description of Artificial Sequence: Synthetic oligonucleotide
  Sense strand starting at position 205 of SEQ ID NO: 916311
uauggugugcccugaauua

SEQ ID NO: 1146671 - RNA, 19 nt, Artificial Sequence
  Description of Artificial Sequence: Synthetic oligonucleotide
  Antisense strand to SEQ ID NO: 1146670
uaauucagggcacaccaua

SEQ ID NO: 1146672 - RNA, 19 nt, Artificial Sequence
  Description of Artificial Sequence: Synthetic oligonucleotide
  Sense strand starting at position 225 of SEQ ID NO: 916311
aagggaguaugucacagau

SEQ ID NO: 1146673 - RNA, 19 nt, Artificial Sequence
  Description of Artificial Sequence: Synthetic oligonucleotide
  Antisense strand to SEQ ID NO: 1146672
aucugugacauacucccuu

SEQ ID NO: 1146674 - RNA, 19 nt, Artificial Sequence
  Description of Artificial Sequence: Synthetic oligonucleotide
  Sense strand starting at position 227 of SEQ ID NO: 916311
gggaguaugucacagauug

SEQ ID NO: 1146675 - RNA, 19 nt, Artificial Sequence
  Description of Artificial Sequence: Synthetic oligonucleotide
  Antisense strand to SEQ ID NO: 1146674
caaucugugacauacuccc

SEQ ID NO: 1146676 - RNA, 19 nt, Artificial Sequence
  Description of Artificial Sequence: Synthetic oligonucleotide
  Sense strand starting at position 525 of SEQ ID NO: 916311
caggauaugcuuuggguua

SEQ ID NO: 1146677 - RNA, 19 nt, Artificial Sequence
  Description of Artificial Sequence: Synthetic oligonucleotide
  Antisense strand to SEQ ID NO: 1146676
uaacccaaagcauauccug

SEQ ID NO: 1146678 - RNA, 19 nt, Artificial Sequence
  Description of Artificial Sequence: Synthetic oligonucleotide
  Sense strand starting at position 527 of SEQ ID NO: 916311
ggauaugcuuuggguuaga

SEQ ID NO: 1146679 - RNA, 19 nt, Artificial Sequence
  Description of Artificial Sequence: Synthetic oligonucleotide
  Antisense strand to SEQ ID NO: 1146678
ucuaacccaaagcauaucc

SEQ ID NO: 1146680 - RNA, 19 nt, Artificial Sequence
  Description of Artificial Sequence: Synthetic oligonucleotide
  Sense strand starting at position 530 of SEQ ID NO: 916311
uaugcuuuggguuagaacu

SEQ ID NO: 1146681 - RNA, 19 nt, Artificial Sequence
  Description of Artificial Sequence: Synthetic oligonucleotide
  Antisense strand to SEQ ID NO: 1146680
aguucuaacccaaagcaua

SEQ ID NO: 1146682 - RNA, 19 nt, Artificial Sequence
  Description of Artificial Sequence: Synthetic oligonucleotide
  Sense strand starting at position 537 of SEQ ID NO: 916311
uggguuagaacuugucgcu

SEQ ID NO: 1146683 - RNA, 19 nt, Artificial Sequence
  Description of Artificial Sequence: Synthetic oligonucleotide
  Antisense strand to SEQ ID NO: 1146682
agcgacaaguucuaaccca

SEQ ID NO: 1146684 - RNA, 19 nt, Artificial Sequence
  Description of Artificial Sequence: Synthetic oligonucleotide
  Sense strand starting at position 543 of SEQ ID NO: 916311
agaacuugucgcuagccua

SEQ ID NO: 1146685 - RNA, 19 nt, Artificial Sequence
  Description of Artificial Sequence: Synthetic oligonucleotide
  Antisense strand to SEQ ID NO: 1146684
uaggcuagcgacaaguucu

SEQ ID NO: 1146686 - RNA, 19 nt, Artificial Sequence
  Description of Artificial Sequence: Synthetic oligonucleotide
  Sense strand starting at position 650 of SEQ ID NO: 916311
acaagaacacucuggcuuu

SEQ ID NO: 1146687 - RNA, 19 nt, Artificial Sequence
  Description of Artificial Sequence: Synthetic oligonucleotide
  Antisense strand to SEQ ID NO: 1146686
aaagccagaguguucuugu

SEQ ID NO: 1146688 - RNA, 19 nt, Artificial Sequence
  Description of Artificial Sequence: Synthetic oligonucleotide
  Sense strand starting at position 785 of SEQ ID NO: 916311
gggagucagccagagaagu

SEQ ID NO: 1146689 - RNA, 19 nt, Artificial Sequence
  Description of Artificial Sequence: Synthetic oligonucleotide
  Antisense strand to SEQ ID NO: 1146688
acuucucuggcugacuccc

SEQ ID NO: 1146690 - RNA, 19 nt, Artificial Sequence
  Description of Artificial Sequence: Synthetic oligonucleotide
  Sense strand starting at position 860 of SEQ ID NO: 916311
ccggaaauccugcagaucu

SEQ ID NO: 1146691 - RNA, 19 nt, Artificial Sequence
  Description of Artificial Sequence: Synthetic oligonucleotide
  Antisense strand to SEQ ID NO: 1146690
agaucugcaggauuuccgg

SEQ ID NO: 1146692 - RNA, 19 nt, Artificial Sequence
  Description of Artificial Sequence: Synthetic oligonucleotide
  Sense strand starting at position 877 of SEQ ID NO: 916311
cucagauagcccugaacaa

SEQ ID NO: 1146693 - RNA, 19 nt, Artificial Sequence
  Description of Artificial Sequence: Synthetic oligonucleotide
  Antisense strand to SEQ ID NO: 1146692
uuguucagggcuaucugag

SEQ ID NO: 1146694 - RNA, 19 nt, Artificial Sequence
  Description of Artificial Sequence: Synthetic oligonucleotide
  Sense strand starting at position 1039 of SEQ ID NO: 916311
ucagcaauccugcgaggua

SEQ ID NO: 1146695 - RNA, 19 nt, Artificial Sequence
  Description of Artificial Sequence: Synthetic oligonucleotide
  Antisense strand to SEQ ID NO: 1146694
uaccucgcaggauugcuga

SEQ ID NO: 1146696 - RNA, 19 nt, Artificial Sequence
  Description of Artificial Sequence: Synthetic oligonucleotide
  Sense strand starting at position 1052 of SEQ ID NO: 916311
gagguagguacaugcuuaa

SEQ ID NO: 1146697 - RNA, 19 nt, Artificial Sequence
  Description of Artificial Sequence: Synthetic oligonucleotide
  Antisense strand to SEQ ID NO: 1146696
uuaagcauguaccuaccuc

SEQ ID NO: 1146698 - RNA, 19 nt, Artificial Sequence
  Description of Artificial Sequence: Synthetic oligonucleotide
  Sense strand starting at position 1064 of SEQ ID NO: 916311
ugcuuaaccucaugggaca

SEQ ID NO: 1146699 - RNA, 19 nt, Artificial Sequence
  Description of Artificial Sequence: Synthetic oligonucleotide
  Antisense strand to SEQ ID NO: 1146698
ugucccaugagguuaagca

SEQ ID NO: 1146700 - RNA, 19 nt, Artificial Sequence
  Description of Artificial Sequence: Synthetic oligonucleotide
  Sense strand starting at position 1168 of SEQ ID NO: 916311
gggcaauguuggagggagu

SEQ ID NO: 1146701 - RNA, 19 nt, Artificial Sequence
  Description of Artificial Sequence: Synthetic oligonucleotide
  Antisense strand to SEQ ID NO: 1146700
acucccuccaacauugccc

SEQ ID NO: 1146702 - RNA, 19 nt, Artificial Sequence
  Description of Artificial Sequence: Synthetic oligonucleotide
  Sense strand starting at position 1169 of SEQ ID NO: 916311
ggcaauguuggagggaguu

SEQ ID NO: 1146703 - RNA, 19 nt, Artificial Sequence
  Description of Artificial Sequence: Synthetic oligonucleotide
  Antisense strand to SEQ ID NO: 1146702
aacucccuccaacauugcc

SEQ ID NO: 1146704 - RNA, 19 nt, Artificial Sequence
  Description of Artificial Sequence: Synthetic oligonucleotide
  Sense strand starting at position 1284 of SEQ ID NO: 916311
uuuaaaguguuucuaggga

SEQ ID NO: 1146705 - RNA, 19 nt, Artificial Sequence
  Description of Artificial Sequence: Synthetic oligonucleotide
  Antisense strand to SEQ ID NO: 1146704
ucccuagaaacacuuuaaa

SEQ ID NO: 1146706 - RNA, 19 nt, Artificial Sequence
  Description of Artificial Sequence: Synthetic oligonucleotide
  Sense strand starting at position 1288 of SEQ ID NO: 916311
aaguguuucuagggaagag

SEQ ID NO: 1146707 - RNA, 19 nt, Artificial Sequence
  Description of Artificial Sequence: Synthetic oligonucleotide
  Antisense strand to SEQ ID NO: 1146706
cucuucccuagaaacacuu

SEQ ID NO: 1146708 - RNA, 19 nt, Artificial Sequence
  Description of Artificial Sequence: Synthetic oligonucleotide
  Sense strand starting at position 1289 of SEQ ID NO: 916311
aguguuucuagggaagagu

SEQ ID NO: 1146709 - RNA, 19 nt, Artificial Sequence
  Description of Artificial Sequence: Synthetic oligonucleotide
  Antisense strand to SEQ ID NO: 1146708
acucuucccuagaaacacu

SEQ ID NO: 1146710 - RNA, 19 nt, Artificial Sequence
  Description of Artificial Sequence: Synthetic oligonucleotide
  Sense strand starting at position 1356 of SEQ ID NO: 916311
cagccuucucccgggacau

SEQ ID NO: 1146711 - RNA, 19 nt, Artificial Sequence
  Description of Artificial Sequence: Synthetic oligonucleotide
  Antisense strand to SEQ ID NO: 1146710
augucccgggagaaggcug

SEQ ID NO: 1146712 - RNA, 19 nt, Artificial Sequence
  Description of Artificial Sequence: Synthetic oligonucleotide
  Sense strand starting at position 1437 of SEQ ID NO: 916311
cgaugcauccgaggacuua

SEQ ID NO: 1146713 - RNA, 19 nt, Artificial Sequence
  Description of Artificial Sequence: Synthetic oligonucleotide
  Antisense strand to SEQ ID NO: 1146712
uaaguccucggaugcaucg

SEQ ID NO: 1146714 - RNA, 19 nt, Artificial Sequence
  Description of Artificial Sequence: Synthetic oligonucleotide
  Sense strand starting at position 2235 of SEQ ID NO: 916311
gagcgaaucgcggaucaca

SEQ ID NO: 1146715 - RNA, 19 nt, Artificial Sequence
  Description of Artificial Sequence: Synthetic oligonucleotide
  Antisense strand to SEQ ID NO: 1146714
ugugauccgcgauucgcuc

SEQ ID NO: 1146716 - RNA, 19 nt, Artificial Sequence
  Description of Artificial Sequence: Synthetic oligonucleotide
  Sense strand starting at position 2465 of SEQ ID NO: 916311
gcagcacgcucugacgaau

SEQ ID NO: 1146717 - RNA, 19 nt, Artificial Sequence
  Description of Artificial Sequence: Synthetic oligonucleotide
  Antisense strand to SEQ ID NO: 1146716
auucgucagagcgugcugc

SEQ ID NO: 1146718 - RNA, 19 nt, Artificial Sequence
  Description of Artificial Sequence: Synthetic oligonucleotide
  Sense strand starting at position 2471 of SEQ ID NO: 916311
cgcucugacgaaugagcaa

SEQ ID NO: 1146719 - RNA, 19 nt, Artificial Sequence
  Description of Artificial Sequence: Synthetic oligonucleotide
  Antisense strand to SEQ ID NO: 1146718
uugcucauucgucagagcg

SEQ ID NO: 1146720 - RNA, 19 nt, Artificial Sequence
  Description of Artificial Sequence: Synthetic oligonucleotide
  Sense strand starting at position 2692 of SEQ ID NO: 916311
cgaaucaguucuguuagcu

SEQ ID NO: 1146721 - RNA, 19 nt, Artificial Sequence
  Description of Artificial Sequence: Synthetic oligonucleotide
  Antisense strand to SEQ ID NO: 1146720
agcuaacagaacugauucg

SEQ ID NO: 1146722 - RNA, 19 nt, Artificial Sequence
  Description of Artificial Sequence: Synthetic oligonucleotide
  Sense strand starting at position 2822 of SEQ ID NO: 916311
uuguguuaguuuccucaug

SEQ ID NO: 1146723 - RNA, 19 nt, Artificial Sequence
  Description of Artificial Sequence: Synthetic oligonucleotide
  Antisense strand to SEQ ID NO: 1146722
caugaggaaacuaacacaa

SEQ ID NO: 1146724 - RNA, 19 nt, Artificial Sequence
  Description of Artificial Sequence: Synthetic oligonucleotide
  Sense strand starting at position 2877 of SEQ ID NO: 916311
acacaaauguguuaucuua

SEQ ID NO: 1146725 - RNA, 19 nt, Artificial Sequence
  Description of Artificial Sequence: Synthetic oligonucleotide
  Antisense strand to SEQ ID NO: 1146724
uaagauaacacauuugugu

SEQ ID NO: 1146726 - RNA, 19 nt, Artificial Sequence
  Description of Artificial Sequence: Synthetic oligonucleotide
  Sense strand starting at position 2908 of SEQ ID NO: 916311
ccagaagucucagaugggu

SEQ ID NO: 1146727 - RNA, 19 nt, Artificial Sequence
  Description of Artificial Sequence: Synthetic oligonucleotide
  Antisense strand to SEQ ID NO: 1146726
acccaucugagacuucugg

SEQ ID NO: 1146728 - RNA, 19 nt, Artificial Sequence
  Description of Artificial Sequence: Synthetic oligonucleotide
  Sense strand starting at position 2981 of SEQ ID NO: 916311
gguaguguguuccuugcuu

SEQ ID NO: 1146729 - RNA, 19 nt, Artificial Sequence
  Description of Artificial Sequence: Synthetic oligonucleotide
  Antisense strand to SEQ ID NO: 1146728
aagcaaggaacacacuacc

SEQ ID NO: 1146730 - RNA, 19 nt, Artificial Sequence
  Description of Artificial Sequence: Synthetic oligonucleotide
  Sense strand starting at position 3008 of SEQ ID NO: 916311
uggagaggugccugugauc

SEQ ID NO: 1146731 - RNA, 19 nt, Artificial Sequence
  Description of Artificial Sequence: Synthetic oligonucleotide
  Antisense strand to SEQ ID NO: 1146730
gaucacaggcaccucucca

SEQ ID NO: 1146732 - RNA, 19 nt, Artificial Sequence
  Description of Artificial Sequence: Synthetic oligonucleotide
  Sense strand starting at position 3017 of SEQ ID NO: 916311
gccugugauccuuggcugu

SEQ ID NO: 1146733 - RNA, 19 nt, Artificial Sequence
  Description of Artificial Sequence: Synthetic oligonucleotide
  Antisense strand to SEQ ID NO: 1146732
acagccaaggaucacaggc

SEQ ID NO: 1146734 - RNA, 19 nt, Artificial Sequence
  Description of Artificial Sequence: Synthetic oligonucleotide
  Sense strand starting at position 3065 of SEQ ID NO: 916311
agcgucuucucccuucuaa

SEQ ID NO: 1146735 - RNA, 19 nt, Artificial Sequence
  Description of Artificial Sequence: Synthetic oligonucleotide
  Antisense strand to SEQ ID NO: 1146734
uuagaagggagaagacgcu

SEQ ID NO: 1146736 - RNA, 19 nt, Artificial Sequence
  Description of Artificial Sequence: Synthetic oligonucleotide
  Sense strand starting at position 3081 of SEQ ID NO: 916311
uaaggagcccugugauuau

SEQ ID NO: 1146737 - RNA, 19 nt, Artificial Sequence
  Description of Artificial Sequence: Synthetic oligonucleotide
  Antisense strand to SEQ ID NO: 1146736
auaaucacagggcuccuua

SEQ ID NO: 1146738 - RNA, 19 nt, Artificial Sequence
  Description of Artificial Sequence: Synthetic oligonucleotide
  Sense strand starting at position 3091 of SEQ ID NO: 916311
ugugauuauaugggaucca

SEQ ID NO: 1146739 - RNA, 19 nt, Artificial Sequence
  Description of Artificial Sequence: Synthetic oligonucleotide
  Antisense strand to SEQ ID NO: 1146738
uggaucccauauaaucaca

SEQ ID NO: 1146740 - RNA, 19 nt, Artificial Sequence
  Description of Artificial Sequence: Synthetic oligonucleotide
  Sense strand starting at position 3123 of SEQ ID NO: 916311
ggcuaaucucuccagcuca

SEQ ID NO: 1146741 - RNA, 19 nt, Artificial Sequence
  Description of Artificial Sequence: Synthetic oligonucleotide
  Antisense strand to SEQ ID NO: 1146740
ugagcuggagagauuagcc

SEQ ID NO: 1146742 - RNA, 19 nt, Artificial Sequence
  Description of Artificial Sequence: Synthetic oligonucleotide
  Sense strand starting at position 3214 of SEQ ID NO: 916311
ggauguggauaucuuggua

SEQ ID NO: 1146743 - RNA, 19 nt, Artificial Sequence
  Description of Artificial Sequence: Synthetic oligonucleotide
  Antisense strand to SEQ ID NO: 1146742
uaccaagauauccacaucc

SEQ ID NO: 1146744 - RNA, 19 nt, Artificial Sequence
  Description of Artificial Sequence: Synthetic oligonucleotide
  Sense strand starting at position 3525 of SEQ ID NO: 916311
gggucagacuggucucgaa

SEQ ID NO: 1146745 - RNA, 19 nt, Artificial Sequence
  Description of Artificial Sequence: Synthetic oligonucleotide
  Antisense strand to SEQ ID NO: 1146744
uucgagaccagucugaccc

SEQ ID NO: 1146746 - RNA, 19 nt, Artificial Sequence
  Description of Artificial Sequence: Synthetic oligonucleotide
  Sense strand starting at position 180 of SEQ ID NO: 916312
agauauucugcuuaucaga

SEQ ID NO: 1146747 - RNA, 19 nt, Artificial Sequence
  Description of Artificial Sequence: Synthetic oligonucleotide
  Antisense strand to SEQ ID NO: 1146746
ucugauaagcagaauaucu

SEQ ID NO: 1146748 - RNA, 19 nt, Artificial Sequence
  Description of Artificial Sequence: Synthetic oligonucleotide
  Sense strand starting at position 281 of SEQ ID NO: 916312
cuaaauaagccuugaaaug

SEQ ID NO: 1146749 - RNA, 19 nt, Artificial Sequence
  Description of Artificial Sequence: Synthetic oligonucleotide
  Antisense strand to SEQ ID NO: 1146748
cauuucaaggcuuauuuag

SEQ ID NO: 1146750 - RNA, 19 nt, Artificial Sequence
  Description of Artificial Sequence: Synthetic oligonucleotide
  Sense strand starting at position 340 of SEQ ID NO: 916312
guaggugcuguagaaaucu

SEQ ID NO: 1146751 - RNA, 19 nt, Artificial Sequence
  Description of Artificial Sequence: Synthetic oligonucleotide
  Antisense strand to SEQ ID NO: 1146750
agauuucuacagcaccuac

SEQ ID NO: 1146752 - RNA, 19 nt, Artificial Sequence
  Description of Artificial Sequence: Synthetic oligonucleotide
  Sense strand starting at position 348 of SEQ ID NO: 916312
uguagaaaucuuugcauau

SEQ ID NO: 1146753 - RNA, 19 nt, Artificial Sequence
  Description of Artificial Sequence: Synthetic oligonucleotide
  Antisense strand to SEQ ID NO: 1146752
auaugcaaagauuucuaca

SEQ ID NO: 1146754 - RNA, 19 nt, Artificial Sequence
  Description of Artificial Sequence: Synthetic oligonucleotide
  Sense strand starting at position 349 of SEQ ID NO: 916312
guagaaaucuuugcauauu

SEQ ID NO: 1146755 - RNA, 19 nt, Artificial Sequence
  Description of Artificial Sequence: Synthetic oligonucleotide
  Antisense strand to SEQ ID NO: 1146754
aauaugcaaagauuucuac

SEQ ID NO: 1146756 - RNA, 19 nt, Artificial Sequence
  Description of Artificial Sequence: Synthetic oligonucleotide
  Sense strand starting at position 413 of SEQ ID NO: 916312
agaugacgaucauucuaau

SEQ ID NO: 1146757 - RNA, 19 nt, Artificial Sequence
  Description of Artificial Sequence: Synthetic oligonucleotide
  Antisense strand to SEQ ID NO: 1146756
auuagaaugaucgucaucu

SEQ ID NO: 1146758 - RNA, 19 nt, Artificial Sequence
  Description of Artificial Sequence: Synthetic oligonucleotide
  Sense strand starting at position 671 of SEQ ID NO: 916312
gugacauaguuguuagaug

SEQ ID NO: 1146759 - RNA, 19 nt, Artificial Sequence
  Description of Artificial Sequence: Synthetic oligonucleotide
  Antisense strand to SEQ ID NO: 1146758
caucuaacaacuaugucac

SEQ ID NO: 1146760 - RNA, 19 nt, Artificial Sequence
  Description of Artificial Sequence: Synthetic oligonucleotide
  Sense strand starting at position 682 of SEQ ID NO: 916312
guuagauguccuuaauuac

SEQ ID NO: 1146761 - RNA, 19 nt, Artificial Sequence
  Description of Artificial Sequence: Synthetic oligonucleotide
  Antisense strand to SEQ ID NO: 1146760
guaauuaaggacaucuaac

SEQ ID NO: 1146762 - RNA, 19 nt, Artificial Sequence
  Description of Artificial Sequence: Synthetic oligonucleotide
  Sense strand starting at position 713 of SEQ ID NO: 916312
augaaaccuuucguaauaa

SEQ ID NO: 1146763 - RNA, 19 nt, Artificial Sequence
  Description of Artificial Sequence: Synthetic oligonucleotide
  Antisense strand to SEQ ID NO: 1146762
uuauuacgaaagguuucau

SEQ ID NO: 1146764 - RNA, 19 nt, Artificial Sequence
  Description of Artificial Sequence: Synthetic oligonucleotide
  Sense strand starting at position 794 of SEQ ID NO: 916312
uuuauagcagcuuagaagu

SEQ ID NO: 1146765 - RNA, 19 nt, Artificial Sequence
  Description of Artificial Sequence: Synthetic oligonucleotide
  Antisense strand to SEQ ID NO: 1146764
acuucuaagcugcuauaaa

SEQ ID NO: 1146766 - RNA, 19 nt, Artificial Sequence
  Description of Artificial Sequence: Synthetic oligonucleotide
  Sense strand starting at position 800 of SEQ ID NO: 916312
gcagcuuagaaguaauaag

SEQ ID NO: 1146767 - RNA, 19 nt, Artificial Sequence
  Description of Artificial Sequence: Synthetic oligonucleotide
  Antisense strand to SEQ ID NO: 1146766
cuuauuacuucuaagcugc

SEQ ID NO: 1146768 - RNA, 19 nt, Artificial Sequence
  Description of Artificial Sequence: Synthetic oligonucleotide
  Sense strand starting at position 858 of SEQ ID NO: 916312
gcuagcuagcaauauagaa

SEQ ID NO: 1146769 - RNA, 19 nt, Artificial Sequence
  Description of Artificial Sequence: Synthetic oligonucleotide
  Antisense strand to SEQ ID NO: 1146768
uucuauauugcuagcuagc

SEQ ID NO: 1146770 - RNA, 19 nt, Artificial Sequence
  Description of Artificial Sequence: Synthetic oligonucleotide
  Sense strand starting at position 1103 of SEQ ID NO: 916312
ucaguaucagguuaauaua

SEQ ID NO: 1146771 - RNA, 19 nt, Artificial Sequence
  Description of Artificial Sequence: Synthetic oligonucleotide
  Antisense strand to SEQ ID NO: 1146770
uauauuaaccugauacuga

SEQ ID NO: 1146772 - RNA, 19 nt, Artificial Sequence
  Description of Artificial Sequence: Synthetic oligonucleotide
  Sense strand starting at position 1264 of SEQ ID NO: 916312
ugguguuauucuuuaaaga

SEQ ID NO: 1146773 - RNA, 19 nt, Artificial Sequence
  Description of Artificial Sequence: Synthetic oligonucleotide
  Antisense strand to SEQ ID NO: 1146772
ucuuuaaagaauaacacca

SEQ ID NO: 1146774 - RNA, 19 nt, Artificial Sequence
  Description of Artificial Sequence: Synthetic oligonucleotide
  Sense strand starting at position 1265 of SEQ ID NO: 916312
gguguuauucuuuaaagaa

SEQ ID NO: 1146775 - RNA, 19 nt, Artificial Sequence
  Description of Artificial Sequence: Synthetic oligonucleotide
  Antisense strand to SEQ ID NO: 1146774
uucuuuaaagaauaacacc

SEQ ID NO: 1146776 - RNA, 19 nt, Artificial Sequence
  Description of Artificial Sequence: Synthetic oligonucleotide
  Sense strand starting at position 1314 of SEQ ID NO: 916312
aagguacuguucuuaagua

SEQ ID NO: 1146777 - RNA, 19 nt, Artificial Sequence
  Description of Artificial Sequence: Synthetic oligonucleotide
  Antisense strand to SEQ ID NO: 1146776
uacuuaagaacaguaccuu

SEQ ID NO: 1146778 - RNA, 19 nt, Artificial Sequence
  Description of Artificial Sequence: Synthetic oligonucleotide
  Sense strand starting at position 1346 of SEQ ID NO: 916312
aaucuaaggcuguaguuau

SEQ ID NO: 1146779 - RNA, 19 nt, Artificial Sequence
  Description of Artificial Sequence: Synthetic oligonucleotide
  Antisense strand to SEQ ID NO: 1146778
auaacuacagccuuagauu

SEQ ID NO: 1146780 - RNA, 19 nt, Artificial Sequence
  Description of Artificial Sequence: Synthetic oligonucleotide
  Sense strand starting at position 1354 of SEQ ID NO: 916312
gcuguaguuauuugacagu

SEQ ID NO: 1146781 - RNA, 19 nt, Artificial Sequence
  Description of Artificial Sequence: Synthetic oligonucleotide
  Antisense strand to SEQ ID NO: 1146780
acugucaaauaacuacagc

SEQ ID NO: 1146782 - RNA, 19 nt, Artificial Sequence
  Description of Artificial Sequence: Synthetic oligonucleotide
  Sense strand starting at position 1812 of SEQ ID NO: 916312
gugugcauuucucuaaaua

SEQ ID NO: 1146783 - RNA, 19 nt, Artificial Sequence
  Description of Artificial Sequence: Synthetic oligonucleotide
  Antisense strand to SEQ ID NO: 1146782
uauuuagagaaaugcacac

SEQ ID NO: 1146784 - RNA, 19 nt, Artificial Sequence
  Description of Artificial Sequence: Synthetic oligonucleotide
  Sense strand starting at position 2036 of SEQ ID NO: 916312
cagagagccucugucauua

SEQ ID NO: 1146785 - RNA, 19 nt, Artificial Sequence
  Description of Artificial Sequence: Synthetic oligonucleotide
  Antisense strand to SEQ ID NO: 1146784
uaaugacagaggcucucug

SEQ ID NO: 1146786 - RNA, 19 nt, Artificial Sequence
  Description of Artificial Sequence: Synthetic oligonucleotide
  Sense strand starting at position 2175 of SEQ ID NO: 916312
gugugucauacacagcaga

SEQ ID NO: 1146787 - RNA, 19 nt, Artificial Sequence
  Description of Artificial Sequence: Synthetic oligonucleotide
  Antisense strand to SEQ ID NO: 1146786
ucugcuguguaugacacac

SEQ ID NO: 1146788 - RNA, 19 nt, Artificial Sequence
  Description of Artificial Sequence: Synthetic oligonucleotide
  Sense strand starting at position 2210 of SEQ ID NO: 916312
cuuuguaagacaugaguga

SEQ ID NO: 1146789 - RNA, 19 nt, Artificial Sequence
  Description of Artificial Sequence: Synthetic oligonucleotide
  Antisense strand to SEQ ID NO: 1146788
ucacucaugucuuacaaag

SEQ ID NO: 1146790 - RNA, 19 nt, Artificial Sequence
  Description of Artificial Sequence: Synthetic oligonucleotide
  Sense strand starting at position 2237 of SEQ ID NO: 916312
gaauuaaguguauguuaug

SEQ ID NO: 1146791 - RNA, 19 nt, Artificial Sequence
  Description of Artificial Sequence: Synthetic oligonucleotide
  Antisense strand to SEQ ID NO: 1146790
cauaacauacacuuaauuc

SEQ ID NO: 1146792 - RNA, 19 nt, Artificial Sequence
  Description of Artificial Sequence: Synthetic oligonucleotide
  Sense strand starting at position 2359 of SEQ ID NO: 916312
gcugaaucccaugaagcuu

SEQ ID NO: 1146793 - RNA, 19 nt, Artificial Sequence
  Description of Artificial Sequence: Synthetic oligonucleotide
  Antisense strand to SEQ ID NO: 1146792
aagcuucaugggauucagc

SEQ ID NO: 1146794 - RNA, 19 nt, Artificial Sequence
  Description of Artificial Sequence: Synthetic oligonucleotide
  Sense strand starting at position 2486 of SEQ ID NO: 916312
gaagaccuacucuguggua

SEQ ID NO: 1146795 - RNA, 19 nt, Artificial Sequence
  Description of Artificial Sequence: Synthetic oligonucleotide
  Antisense strand to SEQ ID NO: 1146794
uaccacagaguaggucuuc

SEQ ID NO: 1146796 - RNA, 19 nt, Artificial Sequence
  Description of Artificial Sequence: Synthetic oligonucleotide
  Sense strand starting at position 2493 of SEQ ID NO: 916312
uacucugugguagggauua

SEQ ID NO: 1146797 - RNA, 19 nt, Artificial Sequence
  Description of Artificial Sequence: Synthetic oligonucleotide
  Antisense strand to SEQ ID NO: 1146796
uaaucccuaccacagagua

SEQ ID NO: 1146798 - RNA, 19 nt, Artificial Sequence
  Description of Artificial Sequence: Synthetic oligonucleotide
  Sense strand starting at position 2495 of SEQ ID NO: 916312
cucugugguagggauuauu

SEQ ID NO: 1146799 - RNA, 19 nt, Artificial Sequence
  Description of Artificial Sequence: Synthetic oligonucleotide
  Antisense strand to SEQ ID NO: 1146798
aauaaucccuaccacagag

SEQ ID NO: 1146800 - RNA, 19 nt, Artificial Sequence
  Description of Artificial Sequence: Synthetic oligonucleotide
  Sense strand starting at position 2498 of SEQ ID NO: 916312
ugugguagggauuauucua

SEQ ID NO: 1146801 - RNA, 19 nt, Artificial Sequence
  Description of Artificial Sequence: Synthetic oligonucleotide
  Antisense strand to SEQ ID NO: 1146800
uagaauaaucccuaccaca

SEQ ID NO: 1146802 - RNA, 19 nt, Artificial Sequence
  Description of Artificial Sequence: Synthetic oligonucleotide
  Sense strand starting at position 2505 of SEQ ID NO: 916312
gggauuauucuagguacca

SEQ ID NO: 1146803 - RNA, 19 nt, Artificial Sequence
  Description of Artificial Sequence: Synthetic oligonucleotide
  Antisense strand to SEQ ID NO: 1146802
ugguaccuagaauaauccc

SEQ ID NO: 1146804 - RNA, 19 nt, Artificial Sequence
  Description of Artificial Sequence: Synthetic oligonucleotide
  Sense strand starting at position 2506 of SEQ ID NO: 916312
ggauuauucuagguaccag

SEQ ID NO: 1146805 - RNA, 19 nt, Artificial Sequence
  Description of Artificial Sequence: Synthetic oligonucleotide
  Antisense strand to SEQ ID NO: 1146804
cugguaccuagaauaaucc

SEQ ID NO: 1146806 - RNA, 19 nt, Artificial Sequence
  Description of Artificial Sequence: Synthetic oligonucleotide
  Sense strand starting at position 2623 of SEQ ID NO: 916312
gguauauguagucaaguag

SEQ ID NO: 1146807 - RNA, 19 nt, Artificial Sequence
  Description of Artificial Sequence: Synthetic oligonucleotide
  Antisense strand to SEQ ID NO: 1146806
cuacuugacuacauauacc

SEQ ID NO: 1146808 - RNA, 19 nt, Artificial Sequence
  Description of Artificial Sequence: Synthetic oligonucleotide
  Sense strand starting at position 2712 of SEQ ID NO: 916312
ucccauuagcuccaugaga

SEQ ID NO: 1146809 - RNA, 19 nt, Artificial Sequence
  Description of Artificial Sequence: Synthetic oligonucleotide
  Antisense strand to SEQ ID NO: 1146808
ucucauggagcuaauggga

SEQ ID NO: 1146810 - RNA, 19 nt, Artificial Sequence
  Description of Artificial Sequence: Synthetic oligonucleotide
  Sense strand starting at position 2734 of SEQ ID NO: 916312
uuaugaauggcuuagcuca

SEQ ID NO: 1146811 - RNA, 19 nt, Artificial Sequence
  Description of Artificial Sequence: Synthetic oligonucleotide
  Antisense strand to SEQ ID NO: 1146810
ugagcuaagccauucauaa

SEQ ID NO: 1146812 - RNA, 19 nt, Artificial Sequence
  Description of Artificial Sequence: Synthetic oligonucleotide
  Sense strand starting at position 3245 of SEQ ID NO: 916312
augugcaugccuguguaau

SEQ ID NO: 1146813 - RNA, 19 nt, Artificial Sequence
  Description of Artificial Sequence: Synthetic oligonucleotide
  Antisense strand to SEQ ID NO: 1146812
auuacacaggcaugcacau

SEQ ID NO: 1146814 - RNA, 19 nt, Artificial Sequence
  Description of Artificial Sequence: Synthetic oligonucleotide
  Sense strand starting at position 3330 of SEQ ID NO: 916312
uuuguaacauuguuugaag

SEQ ID NO: 1146815 - RNA, 19 nt, Artificial Sequence
  Description of Artificial Sequence: Synthetic oligonucleotide
  Antisense strand to SEQ ID NO: 1146814
cuucaaacaauguuacaaa

SEQ ID NO: 1146816 - RNA, 19 nt, Artificial Sequence
  Description of Artificial Sequence: Synthetic oligonucleotide
  Sense strand starting at position 3342 of SEQ ID NO: 916312
uuugaagguguuugguaga

SEQ ID NO: 1146817 - RNA, 19 nt, Artificial Sequence
  Description of Artificial Sequence: Synthetic oligonucleotide
  Antisense strand to SEQ ID NO: 1146816
ucuaccaaacaccuucaaa

SEQ ID NO: 1146818 - RNA, 19 nt, Artificial Sequence
  Description of Artificial Sequence: Synthetic oligonucleotide
  Sense strand starting at position 3495 of SEQ ID NO: 916312
uccguaagaagauaaugua

SEQ ID NO: 1146819 - RNA, 19 nt, Artificial Sequence
  Description of Artificial Sequence: Synthetic oligonucleotide
  Antisense strand to SEQ ID NO: 1146818
uacauuaucuucuuacgga

SEQ ID NO: 1146820 - RNA, 19 nt, Artificial Sequence
  Description of Artificial Sequence: Synthetic oligonucleotide
  Sense strand starting at position 3510 of SEQ ID NO: 916312
uguacuuaacaaggugaau

SEQ ID NO: 1146821 - RNA, 19 nt, Artificial Sequence
  Description of Artificial Sequence: Synthetic oligonucleotide
  Antisense strand to SEQ ID NO: 1146820
auucaccuuguuaaguaca

SEQ ID NO: 1146822 - RNA, 19 nt, Artificial Sequence
  Description of Artificial Sequence: Synthetic oligonucleotide
  Sense strand starting at position 3859 of SEQ ID NO: 916312
ggagcagucacagaguuau

SEQ ID NO: 1146823 - RNA, 19 nt, Artificial Sequence
  Description of Artificial Sequence: Synthetic oligonucleotide
  Antisense strand to SEQ ID NO: 1146822
auaacucugugacugcucc

SEQ ID NO: 1146824 - RNA, 19 nt, Artificial Sequence
  Description of Artificial Sequence: Synthetic oligonucleotide
  Sense strand starting at position 3874 of SEQ ID NO: 916312
uuauaaaugccagagcugu

SEQ ID NO: 1146825 - RNA, 19 nt, Artificial Sequence
  Description of Artificial Sequence: Synthetic oligonucleotide
  Antisense strand to SEQ ID NO: 1146824
acagcucuggcauuuauaa

SEQ ID NO: 1146826 - RNA, 19 nt, Artificial Sequence
  Description of Artificial Sequence: Synthetic oligonucleotide
  Sense strand starting at position 23 of SEQ ID NO: 916313
gcugaucugugaucuggua

SEQ ID NO: 1146827 - RNA, 19 nt, Artificial Sequence
  Description of Artificial Sequence: Synthetic oligonucleotide
  Antisense strand to SEQ ID NO: 1146826
uaccagaucacagaucagc

SEQ ID NO: 1146828 - RNA, 19 nt, Artificial Sequence
  Description of Artificial Sequence: Synthetic oligonucleotide
  Sense strand starting at position 25 of SEQ ID NO: 916313
ugaucugugaucugguaaa

SEQ ID NO: 1146829 - RNA, 19 nt, Artificial Sequence
  Description of Artificial Sequence: Synthetic oligonucleotide
  Antisense strand to SEQ ID NO: 1146828
uuuaccagaucacagauca

SEQ ID NO: 1146830 - RNA, 19 nt, Artificial Sequence
  Description of Artificial Sequence: Synthetic oligonucleotide
  Sense strand starting at position 53 of SEQ ID NO: 916313
gguggagaucccugaaggu

SEQ ID NO: 1146831 - RNA, 19 nt, Artificial Sequence
  Description of Artificial Sequence: Synthetic oligonucleotide
  Antisense strand to SEQ ID NO: 1146830
accuucagggaucuccacc

SEQ ID NO: 1146832 - RNA, 19 nt, Artificial Sequence
  Description of Artificial Sequence: Synthetic oligonucleotide
  Sense strand starting at position 86 of SEQ ID NO: 916313
gcggucauuuccuagaaca

SEQ ID NO: 1146833 - RNA, 19 nt, Artificial Sequence
  Description of Artificial Sequence: Synthetic oligonucleotide
  Antisense strand to SEQ ID NO: 1146832
uguucuaggaaaugaccgc

SEQ ID NO: 1146834 - RNA, 19 nt, Artificial Sequence
  Description of Artificial Sequence: Synthetic oligonucleotide
  Sense strand starting at position 99 of SEQ ID NO: 916313
agaacauucggccaauccu

SEQ ID NO: 1146835 - RNA, 19 nt, Artificial Sequence
  Description of Artificial Sequence: Synthetic oligonucleotide
  Antisense strand to SEQ ID NO: 1146834
aggauuggccgaauguucu

SEQ ID NO: 1146836 - RNA, 19 nt, Artificial Sequence
  Description of Artificial Sequence: Synthetic oligonucleotide
  Sense strand starting at position 180 of SEQ ID NO: 916313
gggucauaauagcugagau

SEQ ID NO: 1146837 - RNA, 19 nt, Artificial Sequence
  Description of Artificial Sequence: Synthetic oligonucleotide
  Antisense strand to SEQ ID NO: 1146836
aucucagcuauuaugaccc

SEQ ID NO: 1146838 - RNA, 19 nt, Artificial Sequence
  Description of Artificial Sequence: Synthetic oligonucleotide
  Sense strand starting at position 181 of SEQ ID NO: 916313
ggucauaauagcugagaug

SEQ ID NO: 1146839 - RNA, 19 nt, Artificial Sequence
  Description of Artificial Sequence: Synthetic oligonucleotide
  Antisense strand to SEQ ID NO: 1146838
caucucagcuauuaugacc

SEQ ID NO: 1146840 - RNA, 19 nt, Artificial Sequence
  Description of Artificial Sequence: Synthetic oligonucleotide
  Sense strand starting at position 184 of SEQ ID NO: 916313
cauaauagcugagaugaga

SEQ ID NO: 1146841 - RNA, 19 nt, Artificial Sequence
  Description of Artificial Sequence: Synthetic oligonucleotide
  Antisense strand to SEQ ID NO: 1146840
ucucaucucagcuauuaug

SEQ ID NO: 1146842 - RNA, 19 nt, Artificial Sequence
  Description of Artificial Sequence: Synthetic oligonucleotide
  Sense strand starting at position 255 of SEQ ID NO: 916313
uggguuggagucugcaaga

SEQ ID NO: 1146843 - RNA, 19 nt, Artificial Sequence
  Description of Artificial Sequence: Synthetic oligonucleotide
  Antisense strand to SEQ ID NO: 1146842
ucuugcagacuccaaccca

SEQ ID NO: 1146844 - RNA, 19 nt, Artificial Sequence
  Description of Artificial Sequence: Synthetic oligonucleotide
  Sense strand starting at position 260 of SEQ ID NO: 916313
uggagucugcaagacacua

SEQ ID NO: 1146845 - RNA, 19 nt, Artificial Sequence
  Description of Artificial Sequence: Synthetic oligonucleotide
  Antisense strand to SEQ ID NO: 1146844
uagugucuugcagacucca

SEQ ID NO: 1146846 - RNA, 19 nt, Artificial Sequence
  Description of Artificial Sequence: Synthetic oligonucleotide
  Sense strand starting at position 326 of SEQ ID NO: 916313
ggaauccacuugguauaca

SEQ ID NO: 1146847 - RNA, 19 nt, Artificial Sequence
  Description of Artificial Sequence: Synthetic oligonucleotide
  Antisense strand to SEQ ID NO: 1146846
uguauaccaaguggauucc

SEQ ID NO: 1146848 - RNA, 19 nt, Artificial Sequence
  Description of Artificial Sequence: Synthetic oligonucleotide
  Sense strand starting at position 672 of SEQ ID NO: 916313
gcagguaccugguuuccau

SEQ ID NO: 1146849 - RNA, 19 nt, Artificial Sequence
  Description of Artificial Sequence: Synthetic oligonucleotide
  Antisense strand to SEQ ID NO: 1146848
auggaaaccagguaccugc

SEQ ID NO: 1146850 - RNA, 19 nt, Artificial Sequence
  Description of Artificial Sequence: Synthetic oligonucleotide
  Sense strand starting at position 687 of SEQ ID NO: 916313
ccaucaauauucuuuggga

SEQ ID NO: 1146851 - RNA, 19 nt, Artificial Sequence
  Description of Artificial Sequence: Synthetic oligonucleotide
  Antisense strand to SEQ ID NO: 1146850
ucccaaagaauauugaugg

SEQ ID NO: 1146852 - RNA, 19 nt, Artificial Sequence
  Description of Artificial Sequence: Synthetic oligonucleotide
  Sense strand starting at position 721 of SEQ ID NO: 916313
aagaaucacucguugcaag

SEQ ID NO: 1146853 - RNA, 19 nt, Artificial Sequence
  Description of Artificial Sequence: Synthetic oligonucleotide
  Antisense strand to SEQ ID NO: 1146852
cuugcaacgagugauucuu

SEQ ID NO: 1146854 - RNA, 19 nt, Artificial Sequence
  Description of Artificial Sequence: Synthetic oligonucleotide
  Sense strand starting at position 999 of SEQ ID NO: 916313
gcauucucugcggauucua

SEQ ID NO: 1146855 - RNA, 19 nt, Artificial Sequence
  Description of Artificial Sequence: Synthetic oligonucleotide
  Antisense strand to SEQ ID NO: 1146854
uagaauccgcagagaaugc

SEQ ID NO: 1146856 - RNA, 19 nt, Artificial Sequence
  Description of Artificial Sequence: Synthetic oligonucleotide
  Sense strand starting at position 1120 of SEQ ID NO: 916313
cccguugugagugguauga

SEQ ID NO: 1146857 - RNA, 19 nt, Artificial Sequence
  Description of Artificial Sequence: Synthetic oligonucleotide
  Antisense strand to SEQ ID NO: 1146856
ucauaccacucacaacggg

SEQ ID NO: 1146858 - RNA, 19 nt, Artificial Sequence
  Description of Artificial Sequence: Synthetic oligonucleotide
  Sense strand starting at position 1124 of SEQ ID NO: 916313
uugugagugguaugacaca

SEQ ID NO: 1146859 - RNA, 19 nt, Artificial Sequence
  Description of Artificial Sequence: Synthetic oligonucleotide
  Antisense strand to SEQ ID NO: 1146858
ugugucauaccacucacaa

SEQ ID NO: 1146860 - RNA, 19 nt, Artificial Sequence
  Description of Artificial Sequence: Synthetic oligonucleotide
  Sense strand starting at position 1229 of SEQ ID NO: 916313
cgcggaucucgggcgugau

SEQ ID NO: 1146861 - RNA, 19 nt, Artificial Sequence
  Description of Artificial Sequence: Synthetic oligonucleotide
  Antisense strand to SEQ ID NO: 1146860
aucacgcccgagauccgcg

SEQ ID NO: 1146862 - RNA, 19 nt, Artificial Sequence
  Description of Artificial Sequence: Synthetic oligonucleotide
  Sense strand starting at position 1628 of SEQ ID NO: 916313
gcugcaguugcuucuccaa

SEQ ID NO: 1146863 - RNA, 19 nt, Artificial Sequence
  Description of Artificial Sequence: Synthetic oligonucleotide
  Antisense strand to SEQ ID NO: 1146862
uuggagaagcaacugcagc

SEQ ID NO: 1146864 - RNA, 19 nt, Artificial Sequence
  Description of Artificial Sequence: Synthetic oligonucleotide
  Sense strand starting at position 1630 of SEQ ID NO: 916313
ugcaguugcuucuccaaca

SEQ ID NO: 1146865 - RNA, 19 nt, Artificial Sequence
  Description of Artificial Sequence: Synthetic oligonucleotide
  Antisense strand to SEQ ID NO: 1146864
uguuggagaagcaacugca

SEQ ID NO: 1146866 - RNA, 19 nt, Artificial Sequence
  Description of Artificial Sequence: Synthetic oligonucleotide
  Sense strand starting at position 1709 of SEQ ID NO: 916313
gggucuugagcacguugau

SEQ ID NO: 1146867 - RNA, 19 nt, Artificial Sequence
  Description of Artificial Sequence: Synthetic oligonucleotide
  Antisense strand to SEQ ID NO: 1146866
aucaacgugcucaagaccc

SEQ ID NO: 1146868 - RNA, 19 nt, Artificial Sequence
  Description of Artificial Sequence: Synthetic oligonucleotide
  Sense strand starting at position 2819 of SEQ ID NO: 916313
ggguaugcacaguagagaa

SEQ ID NO: 1146869 - RNA, 19 nt, Artificial Sequence
  Description of Artificial Sequence: Synthetic oligonucleotide
  Antisense strand to SEQ ID NO: 1146868
uucucuacugugcauaccc

SEQ ID NO: 1146870 - RNA, 19 nt, Artificial Sequence
  Description of Artificial Sequence: Synthetic oligonucleotide
  Sense strand starting at position 3022 of SEQ ID NO: 916313
guaucauucuguuucugga

SEQ ID NO: 1146871 - RNA, 19 nt, Artificial Sequence
  Description of Artificial Sequence: Synthetic oligonucleotide
  Antisense strand to SEQ ID NO: 1146870
uccagaaacagaaugauac

SEQ ID NO: 1146872 - RNA, 19 nt, Artificial Sequence
  Description of Artificial Sequence: Synthetic oligonucleotide
  Sense strand starting at position 3109 of SEQ ID NO: 916313
ugaugaugguccuuagguu

SEQ ID NO: 1146873 - RNA, 19 nt, Artificial Sequence
  Description of Artificial Sequence: Synthetic oligonucleotide
  Antisense strand to SEQ ID NO: 1146872
aaccuaaggaccaucauca

SEQ ID NO: 1146874 - RNA, 19 nt, Artificial Sequence
  Description of Artificial Sequence: Synthetic oligonucleotide
  Sense strand starting at position 3110 of SEQ ID NO: 916313
gaugaugguccuuagguuu

SEQ ID NO: 1146875 - RNA, 19 nt, Artificial Sequence
  Description of Artificial Sequence: Synthetic oligonucleotide
  Antisense strand to SEQ ID NO: 1146874
aaaccuaaggaccaucauc

SEQ ID NO: 1146876 - RNA, 19 nt, Artificial Sequence
  Description of Artificial Sequence: Synthetic oligonucleotide
  Sense strand starting at position 3194 of SEQ ID NO: 916313
gggcauucugccugaggaa

SEQ ID NO: 1146877 - RNA, 19 nt, Artificial Sequence
  Description of Artificial Sequence: Synthetic oligonucleotide
  Antisense strand to SEQ ID NO: 1146876
uuccucaggcagaaugccc

SEQ ID NO: 1146878 - RNA, 19 nt, Artificial Sequence
  Description of Artificial Sequence: Synthetic oligonucleotide
  Sense strand starting at position 3195 of SEQ ID NO: 916313
ggcauucugccugaggaaa

SEQ ID NO: 1146879 - RNA, 19 nt, Artificial Sequence
  Description of Artificial Sequence: Synthetic oligonucleotide
  Antisense strand to SEQ ID NO: 1146878
uuuccucaggcagaaugcc

SEQ ID NO: 1146880 - RNA, 19 nt, Artificial Sequence
  Description of Artificial Sequence: Synthetic oligonucleotide
  Sense strand starting at position 3229 of SEQ ID NO: 916313
gacuguaauuuaggugauc

SEQ ID NO: 1146881 - RNA, 19 nt, Artificial Sequence
  Description of Artificial Sequence: Synthetic oligonucleotide
  Antisense strand to SEQ ID NO: 1146880
gaucaccuaaauuacaguc

SEQ ID NO: 1146882 - RNA, 19 nt, Artificial Sequence
  Description of Artificial Sequence: Synthetic oligonucleotide
  Sense strand starting at position 3231 of SEQ ID NO: 916313
cuguaauuuaggugaucgu

SEQ ID NO: 1146883 - RNA, 19 nt, Artificial Sequence
  Description of Artificial Sequence: Synthetic oligonucleotide
  Antisense strand to SEQ ID NO: 1146882
acgaucaccuaaauuacag

SEQ ID NO: 1146884 - RNA, 19 nt, Artificial Sequence
  Description of Artificial Sequence: Synthetic oligonucleotide
  Sense strand starting at position 3242 of SEQ ID NO: 916313
gugaucguugcuuuagcuu

SEQ ID NO: 1146885 - RNA, 19 nt, Artificial Sequence
  Description of Artificial Sequence: Synthetic oligonucleotide
  Antisense strand to SEQ ID NO: 1146884
aagcuaaagcaacgaucac

SEQ ID NO: 1146886 - RNA, 19 nt, Artificial Sequence
  Description of Artificial Sequence: Synthetic oligonucleotide
  Sense strand starting at position 3305 of SEQ ID NO: 916313
gcugacugcuauccuggaa

SEQ ID NO: 1146887 - RNA, 19 nt, Artificial Sequence
  Description of Artificial Sequence: Synthetic oligonucleotide
  Antisense strand to SEQ ID NO: 1146886
uuccaggauagcagucagc

SEQ ID NO: 1146888 - RNA, 19 nt, Artificial Sequence
  Description of Artificial Sequence: Synthetic oligonucleotide
  Sense strand starting at position 3308 of SEQ ID NO: 916313
gacugcuauccuggaagcu

SEQ ID NO: 1146889 - RNA, 19 nt, Artificial Sequence
  Description of Artificial Sequence: Synthetic oligonucleotide
  Antisense strand to SEQ ID NO: 1146888
agcuuccaggauagcaguc

SEQ ID NO: 1146890 - RNA, 19 nt, Artificial Sequence
  Description of Artificial Sequence: Synthetic oligonucleotide
  Sense strand starting at position 3340 of SEQ ID NO: 916313
gucuuugugacagaaggua

SEQ ID NO: 1146891 - RNA, 19 nt, Artificial Sequence
  Description of Artificial Sequence: Synthetic oligonucleotide
  Antisense strand to SEQ ID NO: 1146890
uaccuucugucacaaagac

SEQ ID NO: 1146892 - RNA, 19 nt, Artificial Sequence
  Description of Artificial Sequence: Synthetic oligonucleotide
  Sense strand starting at position 3537 of SEQ ID NO: 916313
agguguggcuguuucagaa

SEQ ID NO: 1146893 - RNA, 19 nt, Artificial Sequence
  Description of Artificial Sequence: Synthetic oligonucleotide
  Antisense strand to SEQ ID NO: 1146892
uucugaaacagccacaccu

SEQ ID NO: 1146894 - RNA, 19 nt, Artificial Sequence
  Description of Artificial Sequence: Synthetic oligonucleotide
  Sense strand starting at position 3594 of SEQ ID NO: 916313
ugggccuuaucaccauauu

SEQ ID NO: 1146895 - RNA, 19 nt, Artificial Sequence
  Description of Artificial Sequence: Synthetic oligonucleotide
  Antisense strand to SEQ ID NO: 1146894
aauauggugauaaggccca

SEQ ID NO: 1146896 - RNA, 19 nt, Artificial Sequence
  Description of Artificial Sequence: Synthetic oligonucleotide
  Sense strand starting at position 3655 of SEQ ID NO: 916313
gcaggagcuccacacaauu

SEQ ID NO: 1146897 - RNA, 19 nt, Artificial Sequence
  Description of Artificial Sequence: Synthetic oligonucleotide
  Antisense strand to SEQ ID NO: 1146896
aauuguguggagcuccugc

SEQ ID NO: 1146898 - RNA, 19 nt, Artificial Sequence
  Description of Artificial Sequence: Synthetic oligonucleotide
  Sense strand starting at position 3668 of SEQ ID NO: 916313
acaauuaggucagugccua

SEQ ID NO: 1146899 - RNA, 19 nt, Artificial Sequence
  Description of Artificial Sequence: Synthetic oligonucleotide
  Antisense strand to SEQ ID NO: 1146898
uaggcacugaccuaauugu

SEQ ID NO: 1146900 - RNA, 19 nt, Artificial Sequence
  Description of Artificial Sequence: Synthetic oligonucleotide
  Sense strand starting at position 3669 of SEQ ID NO: 916313
caauuaggucagugccuaa

SEQ ID NO: 1146901 - RNA, 19 nt, Artificial Sequence
  Description of Artificial Sequence: Synthetic oligonucleotide
  Antisense strand to SEQ ID NO: 1146900
uuaggcacugaccuaauug

SEQ ID NO: 1146902 - RNA, 19 nt, Artificial Sequence
  Description of Artificial Sequence: Synthetic oligonucleotide
  Sense strand starting at position 3687 of SEQ ID NO: 916313
agagcagauuaccuaaauu

SEQ ID NO: 1146903 - RNA, 19 nt, Artificial Sequence
  Description of Artificial Sequence: Synthetic oligonucleotide
  Antisense strand to SEQ ID NO: 1146902
aauuuagguaaucugcucu

SEQ ID NO: 1146904 - RNA, 19 nt, Artificial Sequence
  Description of Artificial Sequence: Synthetic oligonucleotide
  Sense strand starting at position 3742 of SEQ ID NO: 916313
cuaguugaaccuuguauua

SEQ ID NO: 1146905 - RNA, 19 nt, Artificial Sequence
  Description of Artificial Sequence: Synthetic oligonucleotide
  Antisense strand to SEQ ID NO: 1146904
uaauacaagguucaacuag

SEQ ID NO: 1146906 - RNA, 19 nt, Artificial Sequence
  Description of Artificial Sequence: Synthetic oligonucleotide
  Sense strand starting at position 40 of SEQ ID NO: 916314
gguagaguuucagccauga

SEQ ID NO: 1146907 - RNA, 19 nt, Artificial Sequence
  Description of Artificial Sequence: Synthetic oligonucleotide
  Antisense strand to SEQ ID NO: 1146906
ucauggcugaaacucuacc

SEQ ID NO: 1146908 - RNA, 19 nt, Artificial Sequence
  Description of Artificial Sequence: Synthetic oligonucleotide
  Sense strand starting at position 94 of SEQ ID NO: 916314
aaugucuacuuucuggaga

SEQ ID NO: 1146909 - RNA, 19 nt, Artificial Sequence
  Description of Artificial Sequence: Synthetic oligonucleotide
  Antisense strand to SEQ ID NO: 1146908
ucuccagaaaguagacauu

SEQ ID NO: 1146910 - RNA, 19 nt, Artificial Sequence
  Description of Artificial Sequence: Synthetic oligonucleotide
  Sense strand starting at position 157 of SEQ ID NO: 916314
uuuaaauagccucaccgaa

SEQ ID NO: 1146911 - RNA, 19 nt, Artificial Sequence
  Description of Artificial Sequence: Synthetic oligonucleotide
  Antisense strand to SEQ ID NO: 1146910
uucggugaggcuauuuaaa

SEQ ID NO: 1146912 - RNA, 19 nt, Artificial Sequence
  Description of Artificial Sequence: Synthetic oligonucleotide
  Sense strand starting at position 246 of SEQ ID NO: 916314
ccuugauggucuccacacu

SEQ ID NO: 1146913 - RNA, 19 nt, Artificial Sequence
  Description of Artificial Sequence: Synthetic oligonucleotide
  Antisense strand to SEQ ID NO: 1146912
aguguggagaccaucaagg

SEQ ID NO: 1146914 - RNA, 19 nt, Artificial Sequence
  Description of Artificial Sequence: Synthetic oligonucleotide
  Sense strand starting at position 270 of SEQ ID NO: 916314
ggaugcucuggucaucuuu

SEQ ID NO: 1146915 - RNA, 19 nt, Artificial Sequence
  Description of Artificial Sequence: Synthetic oligonucleotide
  Antisense strand to SEQ ID NO: 1146914
aaagaugaccagagcaucc

SEQ ID NO: 1146916 - RNA, 19 nt, Artificial Sequence
  Description of Artificial Sequence: Synthetic oligonucleotide
  Sense strand starting at position 276 of SEQ ID NO: 916314
ucuggucaucuuuaaaguu

SEQ ID NO: 1146917 - RNA, 19 nt, Artificial Sequence
  Description of Artificial Sequence: Synthetic oligonucleotide
  Antisense strand to SEQ ID NO: 1146916
aacuuuaaagaugaccaga

SEQ ID NO: 1146918 - RNA, 19 nt, Artificial Sequence
  Description of Artificial Sequence: Synthetic oligonucleotide
  Sense strand starting at position 320 of SEQ ID NO: 916314
acaauuuggcucugcauua

SEQ ID NO: 1146919 - RNA, 19 nt, Artificial Sequence
  Description of Artificial Sequence: Synthetic oligonucleotide
  Antisense strand to SEQ ID NO: 1146918
uaaugcagagccaaauugu

SEQ ID NO: 1146920 - RNA, 19 nt, Artificial Sequence
  Description of Artificial Sequence: Synthetic oligonucleotide
  Sense strand starting at position 346 of SEQ ID NO: 916314
gucacucuccuuggaagga

SEQ ID NO: 1146921 - RNA, 19 nt, Artificial Sequence
  Description of Artificial Sequence: Synthetic oligonucleotide
  Antisense strand to SEQ ID NO: 1146920
uccuuccaaggagagugac

SEQ ID NO: 1146922 - RNA, 19 nt, Artificial Sequence
  Description of Artificial Sequence: Synthetic oligonucleotide
  Sense strand starting at position 377 of SEQ ID NO: 916314
agaggaugaugugaauuua

SEQ ID NO: 1146923 - RNA, 19 nt, Artificial Sequence
  Description of Artificial Sequence: Synthetic oligonucleotide
  Antisense strand to SEQ ID NO: 1146922
uaaauucacaucauccucu

SEQ ID NO: 1146924 - RNA, 19 nt, Artificial Sequence
  Description of Artificial Sequence: Synthetic oligonucleotide
  Sense strand starting at position 503 of SEQ ID NO: 916314
cugaaugaccugcauucua

SEQ ID NO: 1146925 - RNA, 19 nt, Artificial Sequence
  Description of Artificial Sequence: Synthetic oligonucleotide
  Antisense strand to SEQ ID NO: 1146924
uagaaugcaggucauucag

SEQ ID NO: 1146926 - RNA, 19 nt, Artificial Sequence
  Description of Artificial Sequence: Synthetic oligonucleotide
  Sense strand starting at position 671 of SEQ ID NO: 916314
gcuuaugugagauauagac

SEQ ID NO: 1146927 - RNA, 19 nt, Artificial Sequence
  Description of Artificial Sequence: Synthetic oligonucleotide
  Antisense strand to SEQ ID NO: 1146926
gucuauaucucacauaagc

SEQ ID NO: 1146928 - RNA, 19 nt, Artificial Sequence
  Description of Artificial Sequence: Synthetic oligonucleotide
  Sense strand starting at position 919 of SEQ ID NO: 916314
cuuccuguaggguauuauu

SEQ ID NO: 1146929 - RNA, 19 nt, Artificial Sequence
  Description of Artificial Sequence: Synthetic oligonucleotide
  Antisense strand to SEQ ID NO: 1146928
aauaauacccuacaggaag

SEQ ID NO: 1146930 - RNA, 19 nt, Artificial Sequence
  Description of Artificial Sequence: Synthetic oligonucleotide
  Sense strand starting at position 1029 of SEQ ID NO: 916314
aucaauugugaaugucuga

SEQ ID NO: 1146931 - RNA, 19 nt, Artificial Sequence
  Description of Artificial Sequence: Synthetic oligonucleotide
  Antisense strand to SEQ ID NO: 1146930
ucagacauucacaauugau

SEQ ID NO: 1146932 - RNA, 19 nt, Artificial Sequence
  Description of Artificial Sequence: Synthetic oligonucleotide
  Sense strand starting at position 1042 of SEQ ID NO: 916314
gucugaauauuauuaugac

SEQ ID NO: 1146933 - RNA, 19 nt, Artificial Sequence
  Description of Artificial Sequence: Synthetic oligonucleotide
  Antisense strand to SEQ ID NO: 1146932
gucauaauaauauucagac

SEQ ID NO: 1146934 - RNA, 19 nt, Artificial Sequence
  Description of Artificial Sequence: Synthetic oligonucleotide
  Sense strand starting at position 1226 of SEQ ID NO: 916314
aacgaaguuccggaauacu

SEQ ID NO: 1146935 - RNA, 19 nt, Artificial Sequence
  Description of Artificial Sequence: Synthetic oligonucleotide
  Antisense strand to SEQ ID NO: 1146934
aguauuccggaacuucguu

SEQ ID NO: 1146936 - RNA, 19 nt, Artificial Sequence
  Description of Artificial Sequence: Synthetic oligonucleotide
  Sense strand starting at position 1382 of SEQ ID NO: 916314
ugcuaaucuugaccuuaga

SEQ ID NO: 1146937 - RNA, 19 nt, Artificial Sequence
  Description of Artificial Sequence: Synthetic oligonucleotide
  Antisense strand to SEQ ID NO: 1146936
ucuaaggucaagauuagca

SEQ ID NO: 1146938 - RNA, 19 nt, Artificial Sequence
  Description of Artificial Sequence: Synthetic oligonucleotide
  Sense strand starting at position 1872 of SEQ ID NO: 916314
caucguuuccgagagaauu

SEQ ID NO: 1146939 - RNA, 19 nt, Artificial Sequence
  Description of Artificial Sequence: Synthetic oligonucleotide
  Antisense strand to SEQ ID NO: 1146938
aauucucucggaaacgaug

SEQ ID NO: 1146940 - RNA, 19 nt, Artificial Sequence
  Description of Artificial Sequence: Synthetic oligonucleotide
  Sense strand starting at position 1874 of SEQ ID NO: 916314
ucguuuccgagagaauuaa

SEQ ID NO: 1146941 - RNA, 19 nt, Artificial Sequence
  Description of Artificial Sequence: Synthetic oligonucleotide
  Antisense strand to SEQ ID NO: 1146940
uuaauucucucggaaacga

SEQ ID NO: 1146942 - RNA, 19 nt, Artificial Sequence
  Description of Artificial Sequence: Synthetic oligonucleotide
  Sense strand starting at position 1944 of SEQ ID NO: 916314
ggacuuaacugaucuuucu

SEQ ID NO: 1146943 - RNA, 19 nt, Artificial Sequence
  Description of Artificial Sequence: Synthetic oligonucleotide
  Antisense strand to SEQ ID NO: 1146942
agaaagaucaguuaagucc

SEQ ID NO: 1146944 - RNA, 19 nt, Artificial Sequence
  Description of Artificial Sequence: Synthetic oligonucleotide
  Sense strand starting at position 2042 of SEQ ID NO: 916314
ucuccugaggauuacguau

SEQ ID NO: 1146945 - RNA, 19 nt, Artificial Sequence
  Description of Artificial Sequence: Synthetic oligonucleotide
  Antisense strand to SEQ ID NO: 1146944
auacguaauccucaggaga

SEQ ID NO: 1146946 - RNA, 19 nt, Artificial Sequence
  Description of Artificial Sequence: Synthetic oligonucleotide
  Sense strand starting at position 2099 of SEQ ID NO: 916314
cagggaugauaguuuguau

SEQ ID NO: 1146947 - RNA, 19 nt, Artificial Sequence
  Description of Artificial Sequence: Synthetic oligonucleotide
  Antisense strand to SEQ ID NO: 1146946
auacaaacuaucaucccug

SEQ ID NO: 1146948 - RNA, 19 nt, Artificial Sequence
  Description of Artificial Sequence: Synthetic oligonucleotide
  Sense strand starting at position 2102 of SEQ ID NO: 916314
ggaugauaguuuguauuaa

SEQ ID NO: 1146949 - RNA, 19 nt, Artificial Sequence
  Description of Artificial Sequence: Synthetic oligonucleotide
  Antisense strand to SEQ ID NO: 1146948
uuaauacaaacuaucaucc

SEQ ID NO: 1146950 - RNA, 19 nt, Artificial Sequence
  Description of Artificial Sequence: Synthetic oligonucleotide
  Sense strand starting at position 2134 of SEQ ID NO: 916314
guggcauuuggguguugua

SEQ ID NO: 1146951 - RNA, 19 nt, Artificial Sequence
  Description of Artificial Sequence: Synthetic oligonucleotide
  Antisense strand to SEQ ID NO: 1146950
uacaacacccaaaugccac

SEQ ID NO: 1146952 - RNA, 19 nt, Artificial Sequence
  Description of Artificial Sequence: Synthetic oligonucleotide
  Sense strand starting at position 2144 of SEQ ID NO: 916314
gguguuguaguuagaguuu

SEQ ID NO: 1146953 - RNA, 19 nt, Artificial Sequence
  Description of Artificial Sequence: Synthetic oligonucleotide
  Antisense strand to SEQ ID NO: 1146952
aaacucuaacuacaacacc

SEQ ID NO: 1146954 - RNA, 19 nt, Artificial Sequence
  Description of Artificial Sequence: Synthetic oligonucleotide
  Sense strand starting at position 2151 of SEQ ID NO: 916314
uaguuagaguuuccuuuag

SEQ ID NO: 1146955 - RNA, 19 nt, Artificial Sequence
  Description of Artificial Sequence: Synthetic oligonucleotide
  Antisense strand to SEQ ID NO: 1146954
cuaaaggaaacucuaacua

SEQ ID NO: 1146956 - RNA, 19 nt, Artificial Sequence
  Description of Artificial Sequence: Synthetic oligonucleotide
  Sense strand starting at position 2153 of SEQ ID NO: 916314
guuagaguuuccuuuagac

SEQ ID NO: 1146957 - RNA, 19 nt, Artificial Sequence
  Description of Artificial Sequence: Synthetic oligonucleotide
  Antisense strand to SEQ ID NO: 1146956
gucuaaaggaaacucuaac

SEQ ID NO: 1146958 - RNA, 19 nt, Artificial Sequence
  Description of Artificial Sequence: Synthetic oligonucleotide
  Sense strand starting at position 2177 of SEQ ID NO: 916314
ggguccuuugacgaugaga

SEQ ID NO: 1146959 - RNA, 19 nt, Artificial Sequence
  Description of Artificial Sequence: Synthetic oligonucleotide
  Antisense strand to SEQ ID NO: 1146958
ucucaucgucaaaggaccc

SEQ ID NO: 1146960 - RNA, 19 nt, Artificial Sequence
  Description of Artificial Sequence: Synthetic oligonucleotide
  Sense strand starting at position 2179 of SEQ ID NO: 916314
guccuuugacgaugagaca

SEQ ID NO: 1146961 - RNA, 19 nt, Artificial Sequence
  Description of Artificial Sequence: Synthetic oligonucleotide
  Antisense strand to SEQ ID NO: 1146960
ugucucaucgucaaaggac

SEQ ID NO: 1146962 - RNA, 19 nt, Artificial Sequence
  Description of Artificial Sequence: Synthetic oligonucleotide
  Sense strand starting at position 2230 of SEQ ID NO: 916314
ggauucuuugaaggcacuu

SEQ ID NO: 1146963 - RNA, 19 nt, Artificial Sequence
  Description of Artificial Sequence: Synthetic oligonucleotide
  Antisense strand to SEQ ID NO: 1146962
aagugccuucaaagaaucc

SEQ ID NO: 1146964 - RNA, 19 nt, Artificial Sequence
  Description of Artificial Sequence: Synthetic oligonucleotide
  Sense strand starting at position 2332 of SEQ ID NO: 916314
gcacauugaucauuugcuu

SEQ ID NO: 1146965 - RNA, 19 nt, Artificial Sequence
  Description of Artificial Sequence: Synthetic oligonucleotide
  Antisense strand to SEQ ID NO: 1146964
aagcaaaugaucaaugugc

SEQ ID NO: 1146966 - RNA, 19 nt, Artificial Sequence
  Description of Artificial Sequence: Synthetic oligonucleotide
  Sense strand starting at position 2338 of SEQ ID NO: 916314
ugaucauuugcuugugguu

SEQ ID NO: 1146967 - RNA, 19 nt, Artificial Sequence
  Description of Artificial Sequence: Synthetic oligonucleotide
  Antisense strand to SEQ ID NO: 1146966
aaccacaagcaaaugauca

SEQ ID NO: 1146968 - RNA, 19 nt, Artificial Sequence
  Description of Artificial Sequence: Synthetic oligonucleotide
  Sense strand starting at position 2343 of SEQ ID NO: 916314
auuugcuugugguugggaa

SEQ ID NO: 1146969 - RNA, 19 nt, Artificial Sequence
  Description of Artificial Sequence: Synthetic oligonucleotide
  Antisense strand to SEQ ID NO: 1146968
uucccaaccacaagcaaau

SEQ ID NO: 1146970 - RNA, 19 nt, Artificial Sequence
  Description of Artificial Sequence: Synthetic oligonucleotide
  Sense strand starting at position 2491 of SEQ ID NO: 916314
ucaucagaguugguuagua

SEQ ID NO: 1146971 - RNA, 19 nt, Artificial Sequence
  Description of Artificial Sequence: Synthetic oligonucleotide
  Antisense strand to SEQ ID NO: 1146970
uacuaaccaacucugauga

SEQ ID NO: 1146972 - RNA, 19 nt, Artificial Sequence
  Description of Artificial Sequence: Synthetic oligonucleotide
  Sense strand starting at position 2493 of SEQ ID NO: 916314
aucagaguugguuaguaaa

SEQ ID NO: 1146973 - RNA, 19 nt, Artificial Sequence
  Description of Artificial Sequence: Synthetic oligonucleotide
  Antisense strand to SEQ ID NO: 1146972
uuuacuaaccaacucugau

SEQ ID NO: 1146974 - RNA, 19 nt, Artificial Sequence
  Description of Artificial Sequence: Synthetic oligonucleotide
  Sense strand starting at position 3392 of SEQ ID NO: 916314
uugcauuucuaccuguacu

SEQ ID NO: 1146975 - RNA, 19 nt, Artificial Sequence
  Description of Artificial Sequence: Synthetic oligonucleotide
  Antisense strand to SEQ ID NO: 1146974
aguacagguagaaaugcaa

SEQ ID NO: 1146976 - RNA, 19 nt, Artificial Sequence
  Description of Artificial Sequence: Synthetic oligonucleotide
  Sense strand starting at position 3402 of SEQ ID NO: 916314
accuguacuguguacauaa

SEQ ID NO: 1146977 - RNA, 19 nt, Artificial Sequence
  Description of Artificial Sequence: Synthetic oligonucleotide
  Antisense strand to SEQ ID NO: 1146976
uuauguacacaguacaggu

SEQ ID NO: 1146978 - RNA, 19 nt, Artificial Sequence
  Description of Artificial Sequence: Synthetic oligonucleotide
  Sense strand starting at position 3404 of SEQ ID NO: 916314
cuguacuguguacauaaca

SEQ ID NO: 1146979 - RNA, 19 nt, Artificial Sequence
  Description of Artificial Sequence: Synthetic oligonucleotide
  Antisense strand to SEQ ID NO: 1146978
uguuauguacacaguacag

SEQ ID NO: 1146980 - RNA, 19 nt, Artificial Sequence
  Description of Artificial Sequence: Synthetic oligonucleotide
  Sense strand starting at position 3437 of SEQ ID NO: 916314
gggcaaacuugauuccuga

SEQ ID NO: 1146981 - RNA, 19 nt, Artificial Sequence
  Description of Artificial Sequence: Synthetic oligonucleotide
  Antisense strand to SEQ ID NO: 1146980
ucaggaaucaaguuugccc

SEQ ID NO: 1146982 - RNA, 19 nt, Artificial Sequence
  Description of Artificial Sequence: Synthetic oligonucleotide
  Sense strand starting at position 3615 of SEQ ID NO: 916314
ggcauauaguaaucacuaa

SEQ ID NO: 1146983 - RNA, 19 nt, Artificial Sequence
  Description of Artificial Sequence: Synthetic oligonucleotide
  Antisense strand to SEQ ID NO: 1146982
uuagugauuacuauaugcc

SEQ ID NO: 1146984 - RNA, 19 nt, Artificial Sequence
  Description of Artificial Sequence: Synthetic oligonucleotide
  Sense strand starting at position 3654 of SEQ ID NO: 916314
ggcacauuggaugacuagu

SEQ ID NO: 1146985 - RNA, 19 nt, Artificial Sequence
  Description of Artificial Sequence: Synthetic oligonucleotide
  Antisense strand to SEQ ID NO: 1146984
acuagucauccaaugugcc

SEQ ID NO: 1146986 - RNA, 19 nt, Artificial Sequence
  Description of Artificial Sequence: Synthetic oligonucleotide
  Sense strand starting at position 452 of SEQ ID NO: 916315
cuuccacuagauugaauga

SEQ ID NO: 1146987 - RNA, 19 nt, Artificial Sequence
  Description of Artificial Sequence: Synthetic oligonucleotide
  Antisense strand to SEQ ID NO: 1146986
ucauucaaucuaguggaag

SEQ ID NO: 1146988 - RNA, 19 nt, Artificial Sequence
  Description of Artificial Sequence: Synthetic oligonucleotide
  Sense strand starting at position 518 of SEQ ID NO: 916315
ucaggcuggcagugagaaa

SEQ ID NO: 1146989 - RNA, 19 nt, Artificial Sequence
  Description of Artificial Sequence: Synthetic oligonucleotide
  Antisense strand to SEQ ID NO: 1146988
uuucucacugccagccuga

SEQ ID NO: 1146990 - RNA, 19 nt, Artificial Sequence
  Description of Artificial Sequence: Synthetic oligonucleotide
  Sense strand starting at position 587 of SEQ ID NO: 916315
agcuuuaccuagguaaaug

SEQ ID NO: 1146991 - RNA, 19 nt, Artificial Sequence
  Description of Artificial Sequence: Synthetic oligonucleotide
  Antisense strand to SEQ ID NO: 1146990
cauuuaccuagguaaagcu

SEQ ID NO: 1146992 - RNA, 19 nt, Artificial Sequence
  Description of Artificial Sequence: Synthetic oligonucleotide
  Sense strand starting at position 622 of SEQ ID NO: 916315
ugaauuaagcaaugaguug

SEQ ID NO: 1146993 - RNA, 19 nt, Artificial Sequence
  Description of Artificial Sequence: Synthetic oligonucleotide
  Antisense strand to SEQ ID NO: 1146992
caacucauugcuuaauuca

SEQ ID NO: 1146994 - RNA, 19 nt, Artificial Sequence
  Description of Artificial Sequence: Synthetic oligonucleotide
  Sense strand starting at position 652 of SEQ ID NO: 916315
ugucguucucuccuguaau

SEQ ID NO: 1146995 - RNA, 19 nt, Artificial Sequence
  Description of Artificial Sequence: Synthetic oligonucleotide
  Antisense strand to SEQ ID NO: 1146994
auuacaggagagaacgaca

SEQ ID NO: 1146996 - RNA, 19 nt, Artificial Sequence
  Description of Artificial Sequence: Synthetic oligonucleotide
  Sense strand starting at position 1025 of SEQ ID NO: 916315
ggauaaccaccauggcuua

SEQ ID NO: 1146997 - RNA, 19 nt, Artificial Sequence
  Description of Artificial Sequence: Synthetic oligonucleotide
  Antisense strand to SEQ ID NO: 1146996
uaagccauggugguuaucc

SEQ ID NO: 1146998 - RNA, 19 nt, Artificial Sequence
  Description of Artificial Sequence: Synthetic oligonucleotide
  Sense strand starting at position 1050 of SEQ ID NO: 916315
aucugagguuuccuuuaag

SEQ ID NO: 1146999 - RNA, 19 nt, Artificial Sequence
  Description of Artificial Sequence: Synthetic oligonucleotide
  Antisense strand to SEQ ID NO: 1146998
cuuaaaggaaaccucagau

SEQ ID NO: 1147000 - RNA, 19 nt, Artificial Sequence
  Description of Artificial Sequence: Synthetic oligonucleotide
  Sense strand starting at position 1053 of SEQ ID NO: 916315
ugagguuuccuuuaagcua

SEQ ID NO: 1147001 - RNA, 19 nt, Artificial Sequence
  Description of Artificial Sequence: Synthetic oligonucleotide
  Antisense strand to SEQ ID NO: 1147000
uagcuuaaaggaaaccuca

SEQ ID NO: 1147002 - RNA, 19 nt, Artificial Sequence
  Description of Artificial Sequence: Synthetic oligonucleotide
  Sense strand starting at position 1109 of SEQ ID NO: 916315
ccauauuggaagugcaagu

SEQ ID NO: 1147003 - RNA, 19 nt, Artificial Sequence
  Description of Artificial Sequence: Synthetic oligonucleotide
  Antisense strand to SEQ ID NO: 1147002
acuugcacuuccaauaugg

SEQ ID NO: 1147004 - RNA, 19 nt, Artificial Sequence
  Description of Artificial Sequence: Synthetic oligonucleotide
  Sense strand starting at position 1177 of SEQ ID NO: 916315
cgugcagaaauauguauuu

SEQ ID NO: 1147005 - RNA, 19 nt, Artificial Sequence
  Description of Artificial Sequence: Synthetic oligonucleotide
  Antisense strand to SEQ ID NO: 1147004
aaauacauauuucugcacg

SEQ ID NO: 1147006 - RNA, 19 nt, Artificial Sequence
  Description of Artificial Sequence: Synthetic oligonucleotide
  Sense strand starting at position 1266 of SEQ ID NO: 916315
aguacaacguuuccaggaa

SEQ ID NO: 1147007 - RNA, 19 nt, Artificial Sequence
  Description of Artificial Sequence: Synthetic oligonucleotide
  Antisense strand to SEQ ID NO: 1147006
uuccuggaaacguuguacu

SEQ ID NO: 1147008 - RNA, 19 nt, Artificial Sequence
  Description of Artificial Sequence: Synthetic oligonucleotide
  Sense strand starting at position 1270 of SEQ ID NO: 916315
caacguuuccaggaaggca

SEQ ID NO: 1147009 - RNA, 19 nt, Artificial Sequence
  Description of Artificial Sequence: Synthetic oligonucleotide
  Antisense strand to SEQ ID NO: 1147008
ugccuuccuggaaacguug

SEQ ID NO: 1147010 - RNA, 19 nt, Artificial Sequence
  Description of Artificial Sequence: Synthetic oligonucleotide
  Sense strand starting at position 1390 of SEQ ID NO: 916315
gcgggcucugcgcucuaaa

SEQ ID NO: 1147011 - RNA, 19 nt, Artificial Sequence
  Description of Artificial Sequence: Synthetic oligonucleotide
  Antisense strand to SEQ ID NO: 1147010
uuuagagcgcagagcccgc

SEQ ID NO: 1147012 - RNA, 19 nt, Artificial Sequence
  Description of Artificial Sequence: Synthetic oligonucleotide
  Sense strand starting at position 2257 of SEQ ID NO: 916315
acaauaagcuucccgaaag

SEQ ID NO: 1147013 - RNA, 19 nt, Artificial Sequence
  Description of Artificial Sequence: Synthetic oligonucleotide
  Antisense strand to SEQ ID NO: 1147012
cuuucgggaagcuuauugu

SEQ ID NO: 1147014 - RNA, 19 nt, Artificial Sequence
  Description of Artificial Sequence: Synthetic oligonucleotide
  Sense strand starting at position 2322 of SEQ ID NO: 916315
uguuaaaugcgugugaugu

SEQ ID NO: 1147015 - RNA, 19 nt, Artificial Sequence
  Description of Artificial Sequence: Synthetic oligonucleotide
  Antisense strand to SEQ ID NO: 1147014
acaucacacgcauuuaaca

SEQ ID NO: 1147016 - RNA, 19 nt, Artificial Sequence
  Description of Artificial Sequence: Synthetic oligonucleotide
  Sense strand starting at position 2385 of SEQ ID NO: 916315
ccaaacgugggugaugauu

SEQ ID NO: 1147017 - RNA, 19 nt, Artificial Sequence
  Description of Artificial Sequence: Synthetic oligonucleotide
  Antisense strand to SEQ ID NO: 1147016
aaucaucacccacguuugg

SEQ ID NO: 1147018 - RNA, 19 nt, Artificial Sequence
  Description of Artificial Sequence: Synthetic oligonucleotide
  Sense strand starting at position 2499 of SEQ ID NO: 916315
uccaaauuagguuaugcau

SEQ ID NO: 1147019 - RNA, 19 nt, Artificial Sequence
  Description of Artificial Sequence: Synthetic oligonucleotide
  Antisense strand to SEQ ID NO: 1147018
augcauaaccuaauuugga

SEQ ID NO: 1147020 - RNA, 19 nt, Artificial Sequence
  Description of Artificial Sequence: Synthetic oligonucleotide
  Sense strand starting at position 2505 of SEQ ID NO: 916315
uuagguuaugcauaggaac

SEQ ID NO: 1147021 - RNA, 19 nt, Artificial Sequence
  Description of Artificial Sequence: Synthetic oligonucleotide
  Antisense strand to SEQ ID NO: 1147020
guuccuaugcauaaccuaa

SEQ ID NO: 1147022 - RNA, 19 nt, Artificial Sequence
  Description of Artificial Sequence: Synthetic oligonucleotide
  Sense strand starting at position 2507 of SEQ ID NO: 916315
agguuaugcauaggaacaa

SEQ ID NO: 1147023 - RNA, 19 nt, Artificial Sequence
  Description of Artificial Sequence: Synthetic oligonucleotide
  Antisense strand to SEQ ID NO: 1147022
uuguuccuaugcauaaccu

SEQ ID NO: 1147024 - RNA, 19 nt, Artificial Sequence
  Description of Artificial Sequence: Synthetic oligonucleotide
  Sense strand starting at position 2533 of SEQ ID NO: 916315
gaggcucuggcaggauuaa

SEQ ID NO: 1147025 - RNA, 19 nt, Artificial Sequence
  Description of Artificial Sequence: Synthetic oligonucleotide
  Antisense strand to SEQ ID NO: 1147024
uuaauccugccagagccuc

SEQ ID NO: 1147026 - RNA, 19 nt, Artificial Sequence
  Description of Artificial Sequence: Synthetic oligonucleotide
  Sense strand starting at position 2534 of SEQ ID NO: 916315
aggcucuggcaggauuaaa

SEQ ID NO: 1147027 - RNA, 19 nt, Artificial Sequence
  Description of Artificial Sequence: Synthetic oligonucleotide
  Antisense strand to SEQ ID NO: 1147026
uuuaauccugccagagccu

SEQ ID NO: 1147028 - RNA, 19 nt, Artificial Sequence
  Description of Artificial Sequence: Synthetic oligonucleotide
  Sense strand starting at position 2608 of SEQ ID NO: 916315
uugccuguacugggaauua

SEQ ID NO: 1147029 - RNA, 19 nt, Artificial Sequence
  Description of Artificial Sequence: Synthetic oligonucleotide
  Antisense strand to SEQ ID NO: 1147028
uaauucccaguacaggcaa

SEQ ID NO: 1147030 - RNA, 19 nt, Artificial Sequence
  Description of Artificial Sequence: Synthetic oligonucleotide
  Sense strand starting at position 2681 of SEQ ID NO: 916315
gggagaacuaaguguccua

SEQ ID NO: 1147031 - RNA, 19 nt, Artificial Sequence
  Description of Artificial Sequence: Synthetic oligonucleotide
  Antisense strand to SEQ ID NO: 1147030
uaggacacuuaguucuccc

SEQ ID NO: 1147032 - RNA, 19 nt, Artificial Sequence
  Description of Artificial Sequence: Synthetic oligonucleotide
  Sense strand starting at position 2684 of SEQ ID NO: 916315
agaacuaaguguccuaaug

SEQ ID NO: 1147033 - RNA, 19 nt, Artificial Sequence
  Description of Artificial Sequence: Synthetic oligonucleotide
  Antisense strand to SEQ ID NO: 1147032
cauuaggacacuuaguucu

SEQ ID NO: 1147034 - RNA, 19 nt, Artificial Sequence
  Description of Artificial Sequence: Synthetic oligonucleotide
  Sense strand starting at position 2719 of SEQ ID NO: 916315
gugggcucucuuuagguga

SEQ ID NO: 1147035 - RNA, 19 nt, Artificial Sequence
  Description of Artificial Sequence: Synthetic oligonucleotide
  Antisense strand to SEQ ID NO: 1147034
ucaccuaaagagagcccac

SEQ ID NO: 1147036 - RNA, 19 nt, Artificial Sequence
  Description of Artificial Sequence: Synthetic oligonucleotide
  Sense strand starting at position 2727 of SEQ ID NO: 916315
ucuuuaggugacugcagaa

SEQ ID NO: 1147037 - RNA, 19 nt, Artificial Sequence
  Description of Artificial Sequence: Synthetic oligonucleotide
  Antisense strand to SEQ ID NO: 1147036
uucugcagucaccuaaaga

SEQ ID NO: 1147038 - RNA, 19 nt, Artificial Sequence
  Description of Artificial Sequence: Synthetic oligonucleotide
  Sense strand starting at position 2861 of SEQ ID NO: 916315
ugguuugugggagaccuua

SEQ ID NO: 1147039 - RNA, 19 nt, Artificial Sequence
  Description of Artificial Sequence: Synthetic oligonucleotide
  Antisense strand to SEQ ID NO: 1147038
uaaggucucccacaaacca

SEQ ID NO: 1147040 - RNA, 19 nt, Artificial Sequence
  Description of Artificial Sequence: Synthetic oligonucleotide
  Sense strand starting at position 2869 of SEQ ID NO: 916315
gggagaccuuaguuggcaa

SEQ ID NO: 1147041 - RNA, 19 nt, Artificial Sequence
  Description of Artificial Sequence: Synthetic oligonucleotide
  Antisense strand to SEQ ID NO: 1147040
uugccaacuaaggucuccc

SEQ ID NO: 1147042 - RNA, 19 nt, Artificial Sequence
  Description of Artificial Sequence: Synthetic oligonucleotide
  Sense strand starting at position 2870 of SEQ ID NO: 916315
ggagaccuuaguuggcaaa

SEQ ID NO: 1147043 - RNA, 19 nt, Artificial Sequence
  Description of Artificial Sequence: Synthetic oligonucleotide
  Antisense strand to SEQ ID NO: 1147042
uuugccaacuaaggucucc

SEQ ID NO: 1147044 - RNA, 19 nt, Artificial Sequence
  Description of Artificial Sequence: Synthetic oligonucleotide
  Sense strand starting at position 2871 of SEQ ID NO: 916315
gagaccuuaguuggcaaau

SEQ ID NO: 1147045 - RNA, 19 nt, Artificial Sequence
  Description of Artificial Sequence: Synthetic oligonucleotide
  Antisense strand to SEQ ID NO: 1147044
auuugccaacuaaggucuc

SEQ ID NO: 1147046 - RNA, 19 nt, Artificial Sequence
  Description of Artificial Sequence: Synthetic oligonucleotide
  Sense strand starting at position 2923 of SEQ ID NO: 916315
ccacgauacuuagugauau

SEQ ID NO: 1147047 - RNA, 19 nt, Artificial Sequence
  Description of Artificial Sequence: Synthetic oligonucleotide
  Antisense strand to SEQ ID NO: 1147046
auaucacuaaguaucgugg

SEQ ID NO: 1147048 - RNA, 19 nt, Artificial Sequence
  Description of Artificial Sequence: Synthetic oligonucleotide
  Sense strand starting at position 3183 of SEQ ID NO: 916315
gccggcagagauuauuaaa

SEQ ID NO: 1147049 - RNA, 19 nt, Artificial Sequence
  Description of Artificial Sequence: Synthetic oligonucleotide
  Antisense strand to SEQ ID NO: 1147048
uuuaauaaucucugccggc

SEQ ID NO: 1147050 - RNA, 19 nt, Artificial Sequence
  Description of Artificial Sequence: Synthetic oligonucleotide
  Sense strand starting at position 3265 of SEQ ID NO: 916315
gauuaagggccucaaguuu

SEQ ID NO: 1147051 - RNA, 19 nt, Artificial Sequence
  Description of Artificial Sequence: Synthetic oligonucleotide
  Antisense strand to SEQ ID NO: 1147050
aaacuugaggcccuuaauc

SEQ ID NO: 1147052 - RNA, 19 nt, Artificial Sequence
  Description of Artificial Sequence: Synthetic oligonucleotide
  Sense strand starting at position 3318 of SEQ ID NO: 916315
ucaggaaaguuucugucaa

SEQ ID NO: 1147053 - RNA, 19 nt, Artificial Sequence
  Description of Artificial Sequence: Synthetic oligonucleotide
  Antisense strand to SEQ ID NO: 1147052
uugacagaaacuuuccuga

SEQ ID NO: 1147054 - RNA, 19 nt, Artificial Sequence
  Description of Artificial Sequence: Synthetic oligonucleotide
  Sense strand starting at position 3320 of SEQ ID NO: 916315
aggaaaguuucugucaaau

SEQ ID NO: 1147055 - RNA, 19 nt, Artificial Sequence
  Description of Artificial Sequence: Synthetic oligonucleotide
  Antisense strand to SEQ ID NO: 1147054
auuugacagaaacuuuccu

SEQ ID NO: 1147056 - RNA, 19 nt, Artificial Sequence
  Description of Artificial Sequence: Synthetic oligonucleotide
  Sense strand starting at position 3331 of SEQ ID NO: 916315
ugucaaauggagugauguu

SEQ ID NO: 1147057 - RNA, 19 nt, Artificial Sequence
  Description of Artificial Sequence: Synthetic oligonucleotide
  Antisense strand to SEQ ID NO: 1147056
aacaucacuccauuugaca

SEQ ID NO: 1147058 - RNA, 19 nt, Artificial Sequence
  Description of Artificial Sequence: Synthetic oligonucleotide
  Sense strand starting at position 3332 of SEQ ID NO: 916315
gucaaauggagugauguuu

SEQ ID NO: 1147059 - RNA, 19 nt, Artificial Sequence
  Description of Artificial Sequence: Synthetic oligonucleotide
  Antisense strand to SEQ ID NO: 1147058
aaacaucacuccauuugac

SEQ ID NO: 1147060 - RNA, 19 nt, Artificial Sequence
  Description of Artificial Sequence: Synthetic oligonucleotide
  Sense strand starting at position 3429 of SEQ ID NO: 916315
uaacuuugagcccaggagu

SEQ ID NO: 1147061 - RNA, 19 nt, Artificial Sequence
  Description of Artificial Sequence: Synthetic oligonucleotide
  Antisense strand to SEQ ID NO: 1147060
acuccugggcucaaaguua

SEQ ID NO: 1147062 - RNA, 19 nt, Artificial Sequence
  Description of Artificial Sequence: Synthetic oligonucleotide
  Sense strand starting at position 3894 of SEQ ID NO: 916315
cugcaucugccauugugua

SEQ ID NO: 1147063 - RNA, 19 nt, Artificial Sequence
  Description of Artificial Sequence: Synthetic oligonucleotide
  Antisense strand to SEQ ID NO: 1147062
uacacaauggcagaugcag

SEQ ID NO: 1147064 - RNA, 19 nt, Artificial Sequence
  Description of Artificial Sequence: Synthetic oligonucleotide
  Sense strand starting at position 3972 of SEQ ID NO: 916315
ccucaauaggguugacaug

SEQ ID NO: 1147065 - RNA, 19 nt, Artificial Sequence
  Description of Artificial Sequence: Synthetic oligonucleotide
  Antisense strand to SEQ ID NO: 1147064
caugucaacccuauugagg

SEQ ID NO: 1147066 - RNA, 19 nt, Artificial Sequence
  Description of Artificial Sequence: Synthetic oligonucleotide
  Sense strand starting at position 51 of SEQ ID NO: 916316
cuauuaugagccuggguaa

SEQ ID NO: 1147067 - RNA, 19 nt, Artificial Sequence
  Description of Artificial Sequence: Synthetic oligonucleotide
  Antisense strand to SEQ ID NO: 1147066
uuacccaggcucauaauag

SEQ ID NO: 1147068 - RNA, 19 nt, Artificial Sequence
  Description of Artificial Sequence: Synthetic oligonucleotide
  Sense strand starting at position 52 of SEQ ID NO: 916316
uauuaugagccuggguaaa

SEQ ID NO: 1147069 - RNA, 19 nt, Artificial Sequence
  Description of Artificial Sequence: Synthetic oligonucleotide
  Antisense strand to SEQ ID NO: 1147068
uuuacccaggcucauaaua

SEQ ID NO: 1147070 - RNA, 19 nt, Artificial Sequence
  Description of Artificial Sequence: Synthetic oligonucleotide
  Sense strand starting at position 54 of SEQ ID NO: 916316
uuaugagccuggguaaacu

SEQ ID NO: 1147071 - RNA, 19 nt, Artificial Sequence
  Description of Artificial Sequence: Synthetic oligonucleotide
  Antisense strand to SEQ ID NO: 1147070
aguuuacccaggcucauaa

SEQ ID NO: 1147072 - RNA, 19 nt, Artificial Sequence
  Description of Artificial Sequence: Synthetic oligonucleotide
  Sense strand starting at position 237 of SEQ ID NO: 916316
uuggaaauaccuugagagu

SEQ ID NO: 1147073 - RNA, 19 nt, Artificial Sequence
  Description of Artificial Sequence: Synthetic oligonucleotide
  Antisense strand to SEQ ID NO: 1147072
acucucaagguauuuccaa

SEQ ID NO: 1147074 - RNA, 19 nt, Artificial Sequence
  Description of Artificial Sequence: Synthetic oligonucleotide
  Sense strand starting at position 558 of SEQ ID NO: 916316
acgucauuucuuugaaagc

SEQ ID NO: 1147075 - RNA, 19 nt, Artificial Sequence
  Description of Artificial Sequence: Synthetic oligonucleotide
  Antisense strand to SEQ ID NO: 1147074
gcuuucaaagaaaugacgu

SEQ ID NO: 1147076 - RNA, 19 nt, Artificial Sequence
  Description of Artificial Sequence: Synthetic oligonucleotide
  Sense strand starting at position 614 of SEQ ID NO: 916316
gaaucaggugccugacaag

SEQ ID NO: 1147077 - RNA, 19 nt, Artificial Sequence
  Description of Artificial Sequence: Synthetic oligonucleotide
  Antisense strand to SEQ ID NO: 1147076
cuugucaggcaccugauuc

SEQ ID NO: 1147078 - RNA, 19 nt, Artificial Sequence
  Description of Artificial Sequence: Synthetic oligonucleotide
  Sense strand starting at position 625 of SEQ ID NO: 916316
cugacaaggguguaucuuu

SEQ ID NO: 1147079 - RNA, 19 nt, Artificial Sequence
  Description of Artificial Sequence: Synthetic oligonucleotide
  Antisense strand to SEQ ID NO: 1147078
aaagauacacccuugucag

SEQ ID NO: 1147080 - RNA, 19 nt, Artificial Sequence
  Description of Artificial Sequence: Synthetic oligonucleotide
  Sense strand starting at position 630 of SEQ ID NO: 916316
aaggguguaucuuuaacuc

SEQ ID NO: 1147081 - RNA, 19 nt, Artificial Sequence
  Description of Artificial Sequence: Synthetic oligonucleotide
  Antisense strand to SEQ ID NO: 1147080
gaguuaaagauacacccuu

SEQ ID NO: 1147082 - RNA, 19 nt, Artificial Sequence
  Description of Artificial Sequence: Synthetic oligonucleotide
  Sense strand starting at position 639 of SEQ ID NO: 916316
ucuuuaacuccuggagcca

SEQ ID NO: 1147083 - RNA, 19 nt, Artificial Sequence
  Description of Artificial Sequence: Synthetic oligonucleotide
  Antisense strand to SEQ ID NO: 1147082
uggcuccaggaguuaaaga

SEQ ID NO: 1147084 - RNA, 19 nt, Artificial Sequence
  Description of Artificial Sequence: Synthetic oligonucleotide
  Sense strand starting at position 651 of SEQ ID NO: 916316
ggagccacuuacuugacua

SEQ ID NO: 1147085 - RNA, 19 nt, Artificial Sequence
  Description of Artificial Sequence: Synthetic oligonucleotide
  Antisense strand to SEQ ID NO: 1147084
uagucaaguaaguggcucc

SEQ ID NO: 1147086 - RNA, 19 nt, Artificial Sequence
  Description of Artificial Sequence: Synthetic oligonucleotide
  Sense strand starting at position 676 of SEQ ID NO: 916316
gucguaguggugaaguguu

SEQ ID NO: 1147087 - RNA, 19 nt, Artificial Sequence
  Description of Artificial Sequence: Synthetic oligonucleotide
  Antisense strand to SEQ ID NO: 1147086
aacacuucaccacuacgac

SEQ ID NO: 1147088 - RNA, 19 nt, Artificial Sequence
  Description of Artificial Sequence: Synthetic oligonucleotide
  Sense strand starting at position 1051 of SEQ ID NO: 916316
uuccauauacaguauguau

SEQ ID NO: 1147089 - RNA, 19 nt, Artificial Sequence
  Description of Artificial Sequence: Synthetic oligonucleotide
  Antisense strand to SEQ ID NO: 1147088
auacauacuguauauggaa

SEQ ID NO: 1147090 - RNA, 19 nt, Artificial Sequence
  Description of Artificial Sequence: Synthetic oligonucleotide
  Sense strand starting at position 1098 of SEQ ID NO: 916316
cagcaagaguugucaagga

SEQ ID NO: 1147091 - RNA, 19 nt, Artificial Sequence
  Description of Artificial Sequence: Synthetic oligonucleotide
  Antisense strand to SEQ ID NO: 1147090
uccuugacaacucuugcug

SEQ ID NO: 1147092 - RNA, 19 nt, Artificial Sequence
  Description of Artificial Sequence: Synthetic oligonucleotide
  Sense strand starting at position 1102 of SEQ ID NO: 916316
aagaguugucaaggaguuc

SEQ ID NO: 1147093 - RNA, 19 nt, Artificial Sequence
  Description of Artificial Sequence: Synthetic oligonucleotide
  Antisense strand to SEQ ID NO: 1147092
gaacuccuugacaacucuu

SEQ ID NO: 1147094 - RNA, 19 nt, Artificial Sequence
  Description of Artificial Sequence: Synthetic oligonucleotide
  Sense strand starting at position 1103 of SEQ ID NO: 916316
agaguugucaaggaguucu

SEQ ID NO: 1147095 - RNA, 19 nt, Artificial Sequence
  Description of Artificial Sequence: Synthetic oligonucleotide
  Antisense strand to SEQ ID NO: 1147094
agaacuccuugacaacucu

SEQ ID NO: 1147096 - RNA, 19 nt, Artificial Sequence
  Description of Artificial Sequence: Synthetic oligonucleotide
  Sense strand starting at position 1607 of SEQ ID NO: 916316
ucgguuccgaaacaaugaa

SEQ ID NO: 1147097 - RNA, 19 nt, Artificial Sequence
  Description of Artificial Sequence: Synthetic oligonucleotide
  Antisense strand to SEQ ID NO: 1147096
uucauuguuucggaaccga

SEQ ID NO: 1147098 - RNA, 19 nt, Artificial Sequence
  Description of Artificial Sequence: Synthetic oligonucleotide
  Sense strand starting at position 1639 of SEQ ID NO: 916316
agaacaguucuaggcagaa

SEQ ID NO: 1147099 - RNA, 19 nt, Artificial Sequence
  Description of Artificial Sequence: Synthetic oligonucleotide
  Antisense strand to SEQ ID NO: 1147098
uucugccuagaacuguucu

SEQ ID NO: 1147100 - RNA, 19 nt, Artificial Sequence
  Description of Artificial Sequence: Synthetic oligonucleotide
  Sense strand starting at position 1643 of SEQ ID NO: 916316
caguucuaggcagaagcaa

SEQ ID NO: 1147101 - RNA, 19 nt, Artificial Sequence
  Description of Artificial Sequence: Synthetic oligonucleotide
  Antisense strand to SEQ ID NO: 1147100
uugcuucugccuagaacug

SEQ ID NO: 1147102 - RNA, 19 nt, Artificial Sequence
  Description of Artificial Sequence: Synthetic oligonucleotide
  Sense strand starting at position 1861 of SEQ ID NO: 916316
uguugagagcaaugucaca

SEQ ID NO: 1147103 - RNA, 19 nt, Artificial Sequence
  Description of Artificial Sequence: Synthetic oligonucleotide
  Antisense strand to SEQ ID NO: 1147102
ugugacauugcucucaaca

SEQ ID NO: 1147104 - RNA, 19 nt, Artificial Sequence
  Description of Artificial Sequence: Synthetic oligonucleotide
  Sense strand starting at position 2062 of SEQ ID NO: 916316
cuggcaaaguuauugagua

SEQ ID NO: 1147105 - RNA, 19 nt, Artificial Sequence
  Description of Artificial Sequence: Synthetic oligonucleotide
  Antisense strand to SEQ ID NO: 1147104
uacucaauaacuuugccag

SEQ ID NO: 1147106 - RNA, 19 nt, Artificial Sequence
  Description of Artificial Sequence: Synthetic oligonucleotide
  Sense strand starting at position 2064 of SEQ ID NO: 916316
ggcaaaguuauugaguaag

SEQ ID NO: 1147107 - RNA, 19 nt, Artificial Sequence
  Description of Artificial Sequence: Synthetic oligonucleotide
  Antisense strand to SEQ ID NO: 1147106
cuuacucaauaacuuugcc

SEQ ID NO: 1147108 - RNA, 19 nt, Artificial Sequence
  Description of Artificial Sequence: Synthetic oligonucleotide
  Sense strand starting at position 2066 of SEQ ID NO: 916316
caaaguuauugaguaagga

SEQ ID NO: 1147109 - RNA, 19 nt, Artificial Sequence
  Description of Artificial Sequence: Synthetic oligonucleotide
  Antisense strand to SEQ ID NO: 1147108
uccuuacucaauaacuuug

SEQ ID NO: 1147110 - RNA, 19 nt, Artificial Sequence
  Description of Artificial Sequence: Synthetic oligonucleotide
  Sense strand starting at position 2182 of SEQ ID NO: 916316
aggguucgcagacauuaaa

SEQ ID NO: 1147111 - RNA, 19 nt, Artificial Sequence
  Description of Artificial Sequence: Synthetic oligonucleotide
  Antisense strand to SEQ ID NO: 1147110
uuuaaugucugcgaacccu

SEQ ID NO: 1147112 - RNA, 19 nt, Artificial Sequence
  Description of Artificial Sequence: Synthetic oligonucleotide
  Sense strand starting at position 2263 of SEQ ID NO: 916316
gacacaaacgucugcuaau

SEQ ID NO: 1147113 - RNA, 19 nt, Artificial Sequence
  Description of Artificial Sequence: Synthetic oligonucleotide
  Antisense strand to SEQ ID NO: 1147112
auuagcagacguuuguguc

SEQ ID NO: 1147114 - RNA, 19 nt, Artificial Sequence
  Description of Artificial Sequence: Synthetic oligonucleotide
  Sense strand starting at position 2264 of SEQ ID NO: 916316
acacaaacgucugcuaaua

SEQ ID NO: 1147115 - RNA, 19 nt, Artificial Sequence
  Description of Artificial Sequence: Synthetic oligonucleotide
  Antisense strand to SEQ ID NO: 1147114
uauuagcagacguuugugu

SEQ ID NO: 1147116 - RNA, 19 nt, Artificial Sequence
  Description of Artificial Sequence: Synthetic oligonucleotide
  Sense strand starting at position 2477 of SEQ ID NO: 916316
ccaagugagaggugugauc

SEQ ID NO: 1147117 - RNA, 19 nt, Artificial Sequence
  Description of Artificial Sequence: Synthetic oligonucleotide
  Antisense strand to SEQ ID NO: 1147116
gaucacaccucucacuugg

SEQ ID NO: 1147118 - RNA, 19 nt, Artificial Sequence
  Description of Artificial Sequence: Synthetic oligonucleotide
  Sense strand starting at position 3102 of SEQ ID NO: 916316
ccucuuucccuagagagcu

SEQ ID NO: 1147119 - RNA, 19 nt, Artificial Sequence
  Description of Artificial Sequence: Synthetic oligonucleotide
  Antisense strand to SEQ ID NO: 1147118
agcucucuagggaaagagg

SEQ ID NO: 1147120 - RNA, 19 nt, Artificial Sequence
  Description of Artificial Sequence: Synthetic oligonucleotide
  Sense strand starting at position 3320 of SEQ ID NO: 916316
aaaccugcuuuguuuggaa

SEQ ID NO: 1147121 - RNA, 19 nt, Artificial Sequence
  Description of Artificial Sequence: Synthetic oligonucleotide
  Antisense strand to SEQ ID NO: 1147120
uuccaaacaaagcagguuu

SEQ ID NO: 1147122 - RNA, 19 nt, Artificial Sequence
  Description of Artificial Sequence: Synthetic oligonucleotide
  Sense strand starting at position 3422 of SEQ ID NO: 916316
gaauuauguugugucaaug

SEQ ID NO: 1147123 - RNA, 19 nt, Artificial Sequence
  Description of Artificial Sequence: Synthetic oligonucleotide
  Antisense strand to SEQ ID NO: 1147122
cauugacacaacauaauuc

SEQ ID NO: 1147124 - RNA, 19 nt, Artificial Sequence
  Description of Artificial Sequence: Synthetic oligonucleotide
  Sense strand starting at position 3640 of SEQ ID NO: 916316
gugacacauucucugggaa

SEQ ID NO: 1147125 - RNA, 19 nt, Artificial Sequence
  Description of Artificial Sequence: Synthetic oligonucleotide
  Antisense strand to SEQ ID NO: 1147124
uucccagagaaugugucac

SEQ ID NO: 1147126 - RNA, 19 nt, Artificial Sequence
  Description of Artificial Sequence: Synthetic oligonucleotide
  Sense strand starting at position 3698 of SEQ ID NO: 916316
gaggcagauugugucauga

SEQ ID NO: 1147127 - RNA, 19 nt, Artificial Sequence
  Description of Artificial Sequence: Synthetic oligonucleotide
  Antisense strand to SEQ ID NO: 1147126
ucaugacacaaucugccuc

SEQ ID NO: 1147128 - RNA, 19 nt, Artificial Sequence
  Description of Artificial Sequence: Synthetic oligonucleotide
  Sense strand starting at position 3726 of SEQ ID NO: 916316
ggguaccauguugggaaau

SEQ ID NO: 1147129 - RNA, 19 nt, Artificial Sequence
  Description of Artificial Sequence: Synthetic oligonucleotide
  Antisense strand to SEQ ID NO: 1147128
auuucccaacaugguaccc

SEQ ID NO: 1147130 - RNA, 19 nt, Artificial Sequence
  Description of Artificial Sequence: Synthetic oligonucleotide
  Sense strand starting at position 3728 of SEQ ID NO: 916316
guaccauguugggaaauuu

SEQ ID NO: 1147131 - RNA, 19 nt, Artificial Sequence
  Description of Artificial Sequence: Synthetic oligonucleotide
  Antisense strand to SEQ ID NO: 1147130
aaauuucccaacaugguac

SEQ ID NO: 1147132 - RNA, 19 nt, Artificial Sequence
  Description of Artificial Sequence: Synthetic oligonucleotide
  Sense strand starting at position 3811 of SEQ ID NO: 916316
ggcccuggauuauucuuaa

SEQ ID NO: 1147133 - RNA, 19 nt, Artificial Sequence
  Description of Artificial Sequence: Synthetic oligonucleotide
  Antisense strand to SEQ ID NO: 1147132
uuaagaauaauccagggcc

SEQ ID NO: 1147134 - RNA, 19 nt, Artificial Sequence
  Description of Artificial Sequence: Synthetic oligonucleotide
  Sense strand starting at position 3822 of SEQ ID NO: 916316
auucuuaaugcagggauua

SEQ ID NO: 1147135 - RNA, 19 nt, Artificial Sequence
  Description of Artificial Sequence: Synthetic oligonucleotide
  Antisense strand to SEQ ID NO: 1147134
uaaucccugcauuaagaau

SEQ ID NO: 1147136 - RNA, 19 nt, Artificial Sequence
  Description of Artificial Sequence: Synthetic oligonucleotide
  Sense strand starting at position 3823 of SEQ ID NO: 916316
uucuuaaugcagggauuau

SEQ ID NO: 1147137 - RNA, 19 nt, Artificial Sequence
  Description of Artificial Sequence: Synthetic oligonucleotide
  Antisense strand to SEQ ID NO: 1147136
auaaucccugcauuaagaa

SEQ ID NO: 1147138 - RNA, 19 nt, Artificial Sequence
  Description of Artificial Sequence: Synthetic oligonucleotide
  Sense strand starting at position 3835 of SEQ ID NO: 916316
ggauuauccacaugugcag

SEQ ID NO: 1147139 - RNA, 19 nt, Artificial Sequence
  Description of Artificial Sequence: Synthetic oligonucleotide
  Antisense strand to SEQ ID NO: 1147138
cugcacauguggauaaucc

SEQ ID NO: 1147140 - RNA, 19 nt, Artificial Sequence
  Description of Artificial Sequence: Synthetic oligonucleotide
  Sense strand starting at position 3858 of SEQ ID NO: 916316
gugaguaaucccugcauuu

SEQ ID NO: 1147141 - RNA, 19 nt, Artificial Sequence
  Description of Artificial Sequence: Synthetic oligonucleotide
  Antisense strand to SEQ ID NO: 1147140
aaaugcagggauuacucac

SEQ ID NO: 1147142 - RNA, 19 nt, Artificial Sequence
  Description of Artificial Sequence: Synthetic oligonucleotide
  Sense strand starting at position 3887 of SEQ ID NO: 916316
cguggcuuccuuuaauaag

SEQ ID NO: 1147143 - RNA, 19 nt, Artificial Sequence
  Description of Artificial Sequence: Synthetic oligonucleotide
  Antisense strand to SEQ ID NO: 1147142
cuuauuaaaggaagccacg

SEQ ID NO: 1147144 - RNA, 19 nt, Artificial Sequence
  Description of Artificial Sequence: Synthetic oligonucleotide
  Sense strand starting at position 3919 of SEQ ID NO: 916316
cuugauuugugacaaaucu

SEQ ID NO: 1147145 - RNA, 19 nt, Artificial Sequence
  Description of Artificial Sequence: Synthetic oligonucleotide
  Antisense strand to SEQ ID NO: 1147144
agauuugucacaaaucaag

SEQ ID NO: 1147146 - RNA, 19 nt, Artificial Sequence
  Description of Artificial Sequence: Synthetic oligonucleotide
  Sense strand starting at position 45 of SEQ ID NO: 916317
caucucuuggagggacuua

SEQ ID NO: 1147147 - RNA, 19 nt, Artificial Sequence
  Description of Artificial Sequence: Synthetic oligonucleotide
  Antisense strand to SEQ ID NO: 1147146
uaagucccuccaagagaug

SEQ ID NO: 1147148 - RNA, 19 nt, Artificial Sequence
  Description of Artificial Sequence: Synthetic oligonucleotide
  Sense strand starting at position 54 of SEQ ID NO: 916317
gagggacuuaugugucacu

SEQ ID NO: 1147149 - RNA, 19 nt, Artificial Sequence
  Description of Artificial Sequence: Synthetic oligonucleotide
  Antisense strand to SEQ ID NO: 1147148
agugacacauaagucccuc

SEQ ID NO: 1147150 - RNA, 19 nt, Artificial Sequence
  Description of Artificial Sequence: Synthetic oligonucleotide
  Sense strand starting at position 111 of SEQ ID NO: 916317
guuggcaugacuuagucaa

SEQ ID NO: 1147151 - RNA, 19 nt, Artificial Sequence
  Description of Artificial Sequence: Synthetic oligonucleotide
  Antisense strand to SEQ ID NO: 1147150
uugacuaagucaugccaac

SEQ ID NO: 1147152 - RNA, 19 nt, Artificial Sequence
  Description of Artificial Sequence: Synthetic oligonucleotide
  Sense strand starting at position 118 of SEQ ID NO: 916317
ugacuuagucaaugauaga

SEQ ID NO: 1147153 - RNA, 19 nt, Artificial Sequence
  Description of Artificial Sequence: Synthetic oligonucleotide
  Antisense strand to SEQ ID NO: 1147152
ucuaucauugacuaaguca

SEQ ID NO: 1147154 - RNA, 19 nt, Artificial Sequence
  Description of Artificial Sequence: Synthetic oligonucleotide
  Sense strand starting at position 211 of SEQ ID NO: 916317
ccaugcuaagaugaucauu

SEQ ID NO: 1147155 - RNA, 19 nt, Artificial Sequence
  Description of Artificial Sequence: Synthetic oligonucleotide
  Antisense strand to SEQ ID NO: 1147154
aaugaucaucuuagcaugg

SEQ ID NO: 1147156 - RNA, 19 nt, Artificial Sequence
  Description of Artificial Sequence: Synthetic oligonucleotide
  Sense strand starting at position 213 of SEQ ID NO: 916317
augcuaagaugaucauuaa

SEQ ID NO: 1147157 - RNA, 19 nt, Artificial Sequence
  Description of Artificial Sequence: Synthetic oligonucleotide
  Antisense strand to SEQ ID NO: 1147156
uuaaugaucaucuuagcau

SEQ ID NO: 1147158 - RNA, 19 nt, Artificial Sequence
  Description of Artificial Sequence: Synthetic oligonucleotide
  Sense strand starting at position 216 of SEQ ID NO: 916317
cuaagaugaucauuaaguu

SEQ ID NO: 1147159 - RNA, 19 nt, Artificial Sequence
  Description of Artificial Sequence: Synthetic oligonucleotide
  Antisense strand to SEQ ID NO: 1147158
aacuuaaugaucaucuuag

SEQ ID NO: 1147160 - RNA, 19 nt, Artificial Sequence
  Description of Artificial Sequence: Synthetic oligonucleotide
  Sense strand starting at position 246 of SEQ ID NO: 916317
uuacuuguggcacaaagau

SEQ ID NO: 1147161 - RNA, 19 nt, Artificial Sequence
  Description of Artificial Sequence: Synthetic oligonucleotide
  Antisense strand to SEQ ID NO: 1147160
aucuuugugccacaaguaa

SEQ ID NO: 1147162 - RNA, 19 nt, Artificial Sequence
  Description of Artificial Sequence: Synthetic oligonucleotide
  Sense strand starting at position 389 of SEQ ID NO: 916317
ggagucaugcuggaagcua

SEQ ID NO: 1147163 - RNA, 19 nt, Artificial Sequence
  Description of Artificial Sequence: Synthetic oligonucleotide
  Antisense strand to SEQ ID NO: 1147162
uagcuuccagcaugacucc

SEQ ID NO: 1147164 - RNA, 19 nt, Artificial Sequence
  Description of Artificial Sequence: Synthetic oligonucleotide
  Sense strand starting at position 800 of SEQ ID NO: 916317
acaagaucuccgcauggaa

SEQ ID NO: 1147165 - RNA, 19 nt, Artificial Sequence
  Description of Artificial Sequence: Synthetic oligonucleotide
  Antisense strand to SEQ ID NO: 1147164
uuccaugcggagaucuugu

SEQ ID NO: 1147166 - RNA, 19 nt, Artificial Sequence
  Description of Artificial Sequence: Synthetic oligonucleotide
  Sense strand starting at position 802 of SEQ ID NO: 916317
aagaucuccgcauggaaau

SEQ ID NO: 1147167 - RNA, 19 nt, Artificial Sequence
  Description of Artificial Sequence: Synthetic oligonucleotide
  Antisense strand to SEQ ID NO: 1147166
auuuccaugcggagaucuu

SEQ ID NO: 1147168 - RNA, 19 nt, Artificial Sequence
  Description of Artificial Sequence: Synthetic oligonucleotide
  Sense strand starting at position 854 of SEQ ID NO: 916317
cuggaagaagcauguuauc

SEQ ID NO: 1147169 - RNA, 19 nt, Artificial Sequence
  Description of Artificial Sequence: Synthetic oligonucleotide
  Antisense strand to SEQ ID NO: 1147168
gauaacaugcuucuuccag

SEQ ID NO: 1147170 - RNA, 19 nt, Artificial Sequence
  Description of Artificial Sequence: Synthetic oligonucleotide
  Sense strand starting at position 859 of SEQ ID NO: 916317
agaagcauguuaucaucca

SEQ ID NO: 1147171 - RNA, 19 nt, Artificial Sequence
  Description of Artificial Sequence: Synthetic oligonucleotide
  Antisense strand to SEQ ID NO: 1147170
uggaugauaacaugcuucu

SEQ ID NO: 1147172 - RNA, 19 nt, Artificial Sequence
  Description of Artificial Sequence: Synthetic oligonucleotide
  Sense strand starting at position 1005 of SEQ ID NO: 916317
auugaucuugcagagcaua

SEQ ID NO: 1147173 - RNA, 19 nt, Artificial Sequence
  Description of Artificial Sequence: Synthetic oligonucleotide
  Antisense strand to SEQ ID NO: 1147172
uaugcucugcaagaucaau

SEQ ID NO: 1147174 - RNA, 19 nt, Artificial Sequence
  Description of Artificial Sequence: Synthetic oligonucleotide
  Sense strand starting at position 1050 of SEQ ID NO: 916317
ucuagaaaguauguuauuc

SEQ ID NO: 1147175 - RNA, 19 nt, Artificial Sequence
  Description of Artificial Sequence: Synthetic oligonucleotide
  Antisense strand to SEQ ID NO: 1147174
gaauaacauacuuucuaga

SEQ ID NO: 1147176 - RNA, 19 nt, Artificial Sequence
  Description of Artificial Sequence: Synthetic oligonucleotide
  Sense strand starting at position 1198 of SEQ ID NO: 916317
aaguuauagccuuagugaa

SEQ ID NO: 1147177 - RNA, 19 nt, Artificial Sequence
  Description of Artificial Sequence: Synthetic oligonucleotide
  Antisense strand to SEQ ID NO: 1147176
uucacuaaggcuauaacuu

SEQ ID NO: 1147178 - RNA, 19 nt, Artificial Sequence
  Description of Artificial Sequence: Synthetic oligonucleotide
  Sense strand starting at position 1271 of SEQ ID NO: 916317
auuuaagugcagcgauaca

SEQ ID NO: 1147179 - RNA, 19 nt, Artificial Sequence
  Description of Artificial Sequence: Synthetic oligonucleotide
  Antisense strand to SEQ ID NO: 1147178
uguaucgcugcacuuaaau

SEQ ID NO: 1147180 - RNA, 19 nt, Artificial Sequence
  Description of Artificial Sequence: Synthetic oligonucleotide
  Sense strand starting at position 1287 of SEQ ID NO: 916317
acauauaagucucuggaac

SEQ ID NO: 1147181 - RNA, 19 nt, Artificial Sequence
  Description of Artificial Sequence: Synthetic oligonucleotide
  Antisense strand to SEQ ID NO: 1147180
guuccagagacuuauaugu

SEQ ID NO: 1147182 - RNA, 19 nt, Artificial Sequence
  Description of Artificial Sequence: Synthetic oligonucleotide
  Sense strand starting at position 1298 of SEQ ID NO: 916317
ucuggaacuuaagaauuua

SEQ ID NO: 1147183 - RNA, 19 nt, Artificial Sequence
  Description of Artificial Sequence: Synthetic oligonucleotide
  Antisense strand to SEQ ID NO: 1147182
uaaauucuuaaguuccaga

SEQ ID NO: 1147184 - RNA, 19 nt, Artificial Sequence
  Description of Artificial Sequence: Synthetic oligonucleotide
  Sense strand starting at position 1364 of SEQ ID NO: 916317
ugaguuauauugucagaua

SEQ ID NO: 1147185 - RNA, 19 nt, Artificial Sequence
  Description of Artificial Sequence: Synthetic oligonucleotide
  Antisense strand to SEQ ID NO: 1147184
uaucugacaauauaacuca

SEQ ID NO: 1147186 - RNA, 19 nt, Artificial Sequence
  Description of Artificial Sequence: Synthetic oligonucleotide
  Sense strand starting at position 1432 of SEQ ID NO: 916317
uccuuuaguguagggaaca

SEQ ID NO: 1147187 - RNA, 19 nt, Artificial Sequence
  Description of Artificial Sequence: Synthetic oligonucleotide
  Antisense strand to SEQ ID NO: 1147186
uguucccuacacuaaagga

SEQ ID NO: 1147188 - RNA, 19 nt, Artificial Sequence
  Description of Artificial Sequence: Synthetic oligonucleotide
  Sense strand starting at position 1507 of SEQ ID NO: 916317
accgaacuugcuuaggagu

SEQ ID NO: 1147189 - RNA, 19 nt, Artificial Sequence
  Description of Artificial Sequence: Synthetic oligonucleotide
  Antisense strand to SEQ ID NO: 1147188
acuccuaagcaaguucggu

SEQ ID NO: 1147190 - RNA, 19 nt, Artificial Sequence
  Description of Artificial Sequence: Synthetic oligonucleotide
  Sense strand starting at position 1520 of SEQ ID NO: 916317
aggaguuuaaagugugaaa

SEQ ID NO: 1147191 - RNA, 19 nt, Artificial Sequence
  Description of Artificial Sequence: Synthetic oligonucleotide
  Antisense strand to SEQ ID NO: 1147190
uuucacacuuuaaacuccu

SEQ ID NO: 1147192 - RNA, 19 nt, Artificial Sequence
  Description of Artificial Sequence: Synthetic oligonucleotide
  Sense strand starting at position 1522 of SEQ ID NO: 916317
gaguuuaaagugugaaaca

SEQ ID NO: 1147193 - RNA, 19 nt, Artificial Sequence
  Description of Artificial Sequence: Synthetic oligonucleotide
  Antisense strand to SEQ ID NO: 1147192
uguuucacacuuuaaacuc

SEQ ID NO: 1147194 - RNA, 19 nt, Artificial Sequence
  Description of Artificial Sequence: Synthetic oligonucleotide
  Sense strand starting at position 1534 of SEQ ID NO: 916317
ugaaacaaguggucccaua

SEQ ID NO: 1147195 - RNA, 19 nt, Artificial Sequence
  Description of Artificial Sequence: Synthetic oligonucleotide
  Antisense strand to SEQ ID NO: 1147194
uaugggaccacuuguuuca

SEQ ID NO: 1147196 - RNA, 19 nt, Artificial Sequence
  Description of Artificial Sequence: Synthetic oligonucleotide
  Sense strand starting at position 1611 of SEQ ID NO: 916317
aaggaaagauaugauagaa

SEQ ID NO: 1147197 - RNA, 19 nt, Artificial Sequence
  Description of Artificial Sequence: Synthetic oligonucleotide
  Antisense strand to SEQ ID NO: 1147196
uucuaucauaucuuuccuu

SEQ ID NO: 1147198 - RNA, 19 nt, Artificial Sequence
  Description of Artificial Sequence: Synthetic oligonucleotide
  Sense strand starting at position 2001 of SEQ ID NO: 916317
uauuaugagccuggguaaa

SEQ ID NO: 1147199 - RNA, 19 nt, Artificial Sequence
  Description of Artificial Sequence: Synthetic oligonucleotide
  Antisense strand to SEQ ID NO: 1147198
uuuacccaggcucauaaua

SEQ ID NO: 1147200 - RNA, 19 nt, Artificial Sequence
  Description of Artificial Sequence: Synthetic oligonucleotide
  Sense strand starting at position 2186 of SEQ ID NO: 916317
uuggaaauaccuugagagu

SEQ ID NO: 1147201 - RNA, 19 nt, Artificial Sequence
  Description of Artificial Sequence: Synthetic oligonucleotide
  Antisense strand to SEQ ID NO: 1147200
acucucaagguauuuccaa

SEQ ID NO: 1147202 - RNA, 19 nt, Artificial Sequence
  Description of Artificial Sequence: Synthetic oligonucleotide
  Sense strand starting at position 2507 of SEQ ID NO: 916317
acgucauuucuuugaaagc

SEQ ID NO: 1147203 - RNA, 19 nt, Artificial Sequence
  Description of Artificial Sequence: Synthetic oligonucleotide
  Antisense strand to SEQ ID NO: 1147202
gcuuucaaagaaaugacgu

SEQ ID NO: 1147204 - RNA, 19 nt, Artificial Sequence
  Description of Artificial Sequence: Synthetic oligonucleotide
  Sense strand starting at position 2563 of SEQ ID NO: 916317
gaaucaggugccugacaag

SEQ ID NO: 1147205 - RNA, 19 nt, Artificial Sequence
  Description of Artificial Sequence: Synthetic oligonucleotide
  Antisense strand to SEQ ID NO: 1147204
cuugucaggcaccugauuc

SEQ ID NO: 1147206 - RNA, 19 nt, Artificial Sequence
  Description of Artificial Sequence: Synthetic oligonucleotide
  Sense strand starting at position 2574 of SEQ ID NO: 916317
cugacaaggguguaucuuu

SEQ ID NO: 1147207 - RNA, 19 nt, Artificial Sequence
  Description of Artificial Sequence: Synthetic oligonucleotide
  Antisense strand to SEQ ID NO: 1147206
aaagauacacccuugucag

SEQ ID NO: 1147208 - RNA, 19 nt, Artificial Sequence
  Description of Artificial Sequence: Synthetic oligonucleotide
  Sense strand starting at position 2600 of SEQ ID NO: 916317
ggagccacuuacuugacua

SEQ ID NO: 1147209 - RNA, 19 nt, Artificial Sequence
  Description of Artificial Sequence: Synthetic oligonucleotide
  Antisense strand to SEQ ID NO: 1147208
uagucaaguaaguggcucc

SEQ ID NO: 1147210 - RNA, 19 nt, Artificial Sequence
  Description of Artificial Sequence: Synthetic oligonucleotide
  Sense strand starting at position 2625 of SEQ ID NO: 916317
gucguaguggugaaguguu

SEQ ID NO: 1147211 - RNA, 19 nt, Artificial Sequence
  Description of Artificial Sequence: Synthetic oligonucleotide
  Antisense strand to SEQ ID NO: 1147210
aacacuucaccacuacgac

SEQ ID NO: 1147212 - RNA, 19 nt, Artificial Sequence
  Description of Artificial Sequence: Synthetic oligonucleotide
  Sense strand starting at position 3000 of SEQ ID NO: 916317
uuccauauacaguauguau

SEQ ID NO: 1147213 - RNA, 19 nt, Artificial Sequence
  Description of Artificial Sequence: Synthetic oligonucleotide
  Antisense strand to SEQ ID NO: 1147212
auacauacuguauauggaa

SEQ ID NO: 1147214 - RNA, 19 nt, Artificial Sequence
  Description of Artificial Sequence: Synthetic oligonucleotide
  Sense strand starting at position 3047 of SEQ ID NO: 916317
cagcaagaguugucaagga

SEQ ID NO: 1147215 - RNA, 19 nt, Artificial Sequence
  Description of Artificial Sequence: Synthetic oligonucleotide
  Antisense strand to SEQ ID NO: 1147214
uccuugacaacucuugcug

SEQ ID NO: 1147216 - RNA, 19 nt, Artificial Sequence
  Description of Artificial Sequence: Synthetic oligonucleotide
  Sense strand starting at position 3051 of SEQ ID NO: 916317
aagaguugucaaggaguuc

SEQ ID NO: 1147217 - RNA, 19 nt, Artificial Sequence
  Description of Artificial Sequence: Synthetic oligonucleotide
  Antisense strand to SEQ ID NO: 1147216
gaacuccuugacaacucuu

SEQ ID NO: 1147218 - RNA, 19 nt, Artificial Sequence
  Description of Artificial Sequence: Synthetic oligonucleotide
  Sense strand starting at position 3052 of SEQ ID NO: 916317
agaguugucaaggaguucu

SEQ ID NO: 1147219 - RNA, 19 nt, Artificial Sequence
  Description of Artificial Sequence: Synthetic oligonucleotide
  Antisense strand to SEQ ID NO: 1147218
agaacuccuugacaacucu

SEQ ID NO: 1147220 - RNA, 19 nt, Artificial Sequence
  Description of Artificial Sequence: Synthetic oligonucleotide
  Sense strand starting at position 3556 of SEQ ID NO: 916317
ucgguuccgaaacaaugaa

SEQ ID NO: 1147221 - RNA, 19 nt, Artificial Sequence
  Description of Artificial Sequence: Synthetic oligonucleotide
  Antisense strand to SEQ ID NO: 1147220
uucauuguuucggaaccga

SEQ ID NO: 1147222 - RNA, 19 nt, Artificial Sequence
  Description of Artificial Sequence: Synthetic oligonucleotide
  Sense strand starting at position 3588 of SEQ ID NO: 916317
agaacaguucuaggcagaa

SEQ ID NO: 1147223 - RNA, 19 nt, Artificial Sequence
  Description of Artificial Sequence: Synthetic oligonucleotide
  Antisense strand to SEQ ID NO: 1147222
uucugccuagaacuguucu

SEQ ID NO: 1147224 - RNA, 19 nt, Artificial Sequence
  Description of Artificial Sequence: Synthetic oligonucleotide
  Sense strand starting at position 3592 of SEQ ID NO: 916317
caguucuaggcagaagcaa

SEQ ID NO: 1147225 - RNA, 19 nt, Artificial Sequence
  Description of Artificial Sequence: Synthetic oligonucleotide
  Antisense strand to SEQ ID NO: 1147224
uugcuucugccuagaacug

SEQ ID NO: 1147226 - RNA, 19 nt, Artificial Sequence
  Description of Artificial Sequence: Synthetic oligonucleotide
  Sense strand starting at position 110 of SEQ ID NO: 916318
augugugucccugcuguga

SEQ ID NO: 1147227 - RNA, 19 nt, Artificial Sequence
  Description of Artificial Sequence: Synthetic oligonucleotide
  Antisense strand to SEQ ID NO: 1147226
ucacagcagggacacacau

SEQ ID NO: 1147228 - RNA, 19 nt, Artificial Sequence
  Description of Artificial Sequence: Synthetic oligonucleotide
  Sense strand starting at position 125 of SEQ ID NO: 916318
gugaccuugcuaugacuca

SEQ ID NO: 1147229 - RNA, 19 nt, Artificial Sequence
  Description of Artificial Sequence: Synthetic oligonucleotide
  Antisense strand to SEQ ID NO: 1147228
ugagucauagcaaggucac

SEQ ID NO: 1147230 - RNA, 19 nt, Artificial Sequence
  Description of Artificial Sequence: Synthetic oligonucleotide
  Sense strand starting at position 126 of SEQ ID NO: 916318
ugaccuugcuaugacucaa

SEQ ID NO: 1147231 - RNA, 19 nt, Artificial Sequence
  Description of Artificial Sequence: Synthetic oligonucleotide
  Antisense strand to SEQ ID NO: 1147230
uugagucauagcaagguca

SEQ ID NO: 1147232 - RNA, 19 nt, Artificial Sequence
  Description of Artificial Sequence: Synthetic oligonucleotide
  Sense strand starting at position 341 of SEQ ID NO: 916318
ccuggcucuggagaaaguu

SEQ ID NO: 1147233 - RNA, 19 nt, Artificial Sequence
  Description of Artificial Sequence: Synthetic oligonucleotide
  Antisense strand to SEQ ID NO: 1147232
aacuuucuccagagccagg

SEQ ID NO: 1147234 - RNA, 19 nt, Artificial Sequence
  Description of Artificial Sequence: Synthetic oligonucleotide
  Sense strand starting at position 441 of SEQ ID NO: 916318
uguacugacugcuuggaau

SEQ ID NO: 1147235 - RNA, 19 nt, Artificial Sequence
  Description of Artificial Sequence: Synthetic oligonucleotide
  Antisense strand to SEQ ID NO: 1147234
auuccaagcagucaguaca

SEQ ID NO: 1147236 - RNA, 19 nt, Artificial Sequence
  Description of Artificial Sequence: Synthetic oligonucleotide
  Sense strand starting at position 504 of SEQ ID NO: 916318
cuuccucugugccuaaaga

SEQ ID NO: 1147237 - RNA, 19 nt, Artificial Sequence
  Description of Artificial Sequence: Synthetic oligonucleotide
  Antisense strand to SEQ ID NO: 1147236
ucuuuaggcacagaggaag

SEQ ID NO: 1147238 - RNA, 19 nt, Artificial Sequence
  Description of Artificial Sequence: Synthetic oligonucleotide
  Sense strand starting at position 568 of SEQ ID NO: 916318
cugcaauccugagucugau

SEQ ID NO: 1147239 - RNA, 19 nt, Artificial Sequence
  Description of Artificial Sequence: Synthetic oligonucleotide
  Antisense strand to SEQ ID NO: 1147238
aucagacucaggauugcag

SEQ ID NO: 1147240 - RNA, 19 nt, Artificial Sequence
  Description of Artificial Sequence: Synthetic oligonucleotide
  Sense strand starting at position 936 of SEQ ID NO: 916318
gaacgauucugagcagguu

SEQ ID NO: 1147241 - RNA, 19 nt, Artificial Sequence
  Description of Artificial Sequence: Synthetic oligonucleotide
  Antisense strand to SEQ ID NO: 1147240
aaccugcucagaaucguuc

SEQ ID NO: 1147242 - RNA, 19 nt, Artificial Sequence
  Description of Artificial Sequence: Synthetic oligonucleotide
  Sense strand starting at position 939 of SEQ ID NO: 916318
cgauucugagcagguuuaa

SEQ ID NO: 1147243 - RNA, 19 nt, Artificial Sequence
  Description of Artificial Sequence: Synthetic oligonucleotide
  Antisense strand to SEQ ID NO: 1147242
uuaaaccugcucagaaucg

SEQ ID NO: 1147244 - RNA, 19 nt, Artificial Sequence
  Description of Artificial Sequence: Synthetic oligonucleotide
  Sense strand starting at position 1136 of SEQ ID NO: 916318
ggagucauuucucagugug

SEQ ID NO: 1147245 - RNA, 19 nt, Artificial Sequence
  Description of Artificial Sequence: Synthetic oligonucleotide
  Antisense strand to SEQ ID NO: 1147244
cacacugagaaaugacucc

SEQ ID NO: 1147246 - RNA, 19 nt, Artificial Sequence
  Description of Artificial Sequence: Synthetic oligonucleotide
  Sense strand starting at position 1143 of SEQ ID NO: 916318
uuucucagugugugcagaa

SEQ ID NO: 1147247 - RNA, 19 nt, Artificial Sequence
  Description of Artificial Sequence: Synthetic oligonucleotide
  Antisense strand to SEQ ID NO: 1147246
uucugcacacacugagaaa

SEQ ID NO: 1147248 - RNA, 19 nt, Artificial Sequence
  Description of Artificial Sequence: Synthetic oligonucleotide
  Sense strand starting at position 1144 of SEQ ID NO: 916318
uucucagugugugcagaau

SEQ ID NO: 1147249 - RNA, 19 nt, Artificial Sequence
  Description of Artificial Sequence: Synthetic oligonucleotide
  Antisense strand to SEQ ID NO: 1147248
auucugcacacacugagaa

SEQ ID NO: 1147250 - RNA, 19 nt, Artificial Sequence
  Description of Artificial Sequence: Synthetic oligonucleotide
  Sense strand starting at position 2161 of SEQ ID NO: 916318
guuucuguuuacuucccaa

SEQ ID NO: 1147251 - RNA, 19 nt, Artificial Sequence
  Description of Artificial Sequence: Synthetic oligonucleotide
  Antisense strand to SEQ ID NO: 1147250
uugggaaguaaacagaaac

SEQ ID NO: 1147252 - RNA, 19 nt, Artificial Sequence
  Description of Artificial Sequence: Synthetic oligonucleotide
  Sense strand starting at position 2195 of SEQ ID NO: 916318
cuugcuuuguucccgggaa

SEQ ID NO: 1147253 - RNA, 19 nt, Artificial Sequence
  Description of Artificial Sequence: Synthetic oligonucleotide
  Antisense strand to SEQ ID NO: 1147252
uucccgggaacaaagcaag

SEQ ID NO: 1147254 - RNA, 19 nt, Artificial Sequence
  Description of Artificial Sequence: Synthetic oligonucleotide
  Sense strand starting at position 2197 of SEQ ID NO: 916318
ugcuuuguucccgggaauc

SEQ ID NO: 1147255 - RNA, 19 nt, Artificial Sequence
  Description of Artificial Sequence: Synthetic oligonucleotide
  Antisense strand to SEQ ID NO: 1147254
gauucccgggaacaaagca

SEQ ID NO: 1147256 - RNA, 19 nt, Artificial Sequence
  Description of Artificial Sequence: Synthetic oligonucleotide
  Sense strand starting at position 2210 of SEQ ID NO: 916318
ggaaucucggcccggaauu

SEQ ID NO: 1147257 - RNA, 19 nt, Artificial Sequence
  Description of Artificial Sequence: Synthetic oligonucleotide
  Antisense strand to SEQ ID NO: 1147256
aauuccgggccgagauucc

SEQ ID NO: 1147258 - RNA, 19 nt, Artificial Sequence
  Description of Artificial Sequence: Synthetic oligonucleotide
  Sense strand starting at position 2211 of SEQ ID NO: 916318
gaaucucggcccggaauuu

SEQ ID NO: 1147259 - RNA, 19 nt, Artificial Sequence
  Description of Artificial Sequence: Synthetic oligonucleotide
  Antisense strand to SEQ ID NO: 1147258
aaauuccgggccgagauuc

SEQ ID NO: 1147260 - RNA, 19 nt, Artificial Sequence
  Description of Artificial Sequence: Synthetic oligonucleotide
  Sense strand starting at position 2295 of SEQ ID NO: 916318
gugcaauccacuuagugug

SEQ ID NO: 1147261 - RNA, 19 nt, Artificial Sequence
  Description of Artificial Sequence: Synthetic oligonucleotide
  Antisense strand to SEQ ID NO: 1147260
cacacuaaguggauugcac

SEQ ID NO: 1147262 - RNA, 19 nt, Artificial Sequence
  Description of Artificial Sequence: Synthetic oligonucleotide
  Sense strand starting at position 2472 of SEQ ID NO: 916318
gggaaauucuacugcugau

SEQ ID NO: 1147263 - RNA, 19 nt, Artificial Sequence
  Description of Artificial Sequence: Synthetic oligonucleotide
  Antisense strand to SEQ ID NO: 1147262
aucagcaguagaauuuccc

SEQ ID NO: 1147264 - RNA, 19 nt, Artificial Sequence
  Description of Artificial Sequence: Synthetic oligonucleotide
  Sense strand starting at position 2551 of SEQ ID NO: 916318
gcacccuugagguaagacu

SEQ ID NO: 1147265 - RNA, 19 nt, Artificial Sequence
  Description of Artificial Sequence: Synthetic oligonucleotide
  Antisense strand to SEQ ID NO: 1147264
agucuuaccucaagggugc

SEQ ID NO: 1147266 - RNA, 19 nt, Artificial Sequence
  Description of Artificial Sequence: Synthetic oligonucleotide
  Sense strand starting at position 2560 of SEQ ID NO: 916318
agguaagacuauggagaaa

SEQ ID NO: 1147267 - RNA, 19 nt, Artificial Sequence
  Description of Artificial Sequence: Synthetic oligonucleotide
  Antisense strand to SEQ ID NO: 1147266
uuucuccauagucuuaccu

SEQ ID NO: 1147268 - RNA, 19 nt, Artificial Sequence
  Description of Artificial Sequence: Synthetic oligonucleotide
  Sense strand starting at position 2647 of SEQ ID NO: 916318
acuugaaugaaccguagga

SEQ ID NO: 1147269 - RNA, 19 nt, Artificial Sequence
  Description of Artificial Sequence: Synthetic oligonucleotide
  Antisense strand to SEQ ID NO: 1147268
uccuacgguucauucaagu

SEQ ID NO: 1147270 - RNA, 19 nt, Artificial Sequence
  Description of Artificial Sequence: Synthetic oligonucleotide
  Sense strand starting at position 2690 of SEQ ID NO: 916318
ugcggagucuggaaggauu

SEQ ID NO: 1147271 - RNA, 19 nt, Artificial Sequence
  Description of Artificial Sequence: Synthetic oligonucleotide
  Antisense strand to SEQ ID NO: 1147270
aauccuuccagacuccgca

SEQ ID NO: 1147272 - RNA, 19 nt, Artificial Sequence
  Description of Artificial Sequence: Synthetic oligonucleotide
  Sense strand starting at position 2757 of SEQ ID NO: 916318
gggaaauuggcagguugaa

SEQ ID NO: 1147273 - RNA, 19 nt, Artificial Sequence
  Description of Artificial Sequence: Synthetic oligonucleotide
  Antisense strand to SEQ ID NO: 1147272
uucaaccugccaauuuccc

SEQ ID NO: 1147274 - RNA, 19 nt, Artificial Sequence
  Description of Artificial Sequence: Synthetic oligonucleotide
  Sense strand starting at position 2990 of SEQ ID NO: 916318
gggacuacucagcaucuuu

SEQ ID NO: 1147275 - RNA, 19 nt, Artificial Sequence
  Description of Artificial Sequence: Synthetic oligonucleotide
  Antisense strand to SEQ ID NO: 1147274
aaagaugcugaguaguccc

SEQ ID NO: 1147276 - RNA, 19 nt, Artificial Sequence
  Description of Artificial Sequence: Synthetic oligonucleotide
  Sense strand starting at position 3131 of SEQ ID NO: 916318
gggauuguuuccuucggca

SEQ ID NO: 1147277 - RNA, 19 nt, Artificial Sequence
  Description of Artificial Sequence: Synthetic oligonucleotide
  Antisense strand to SEQ ID NO: 1147276
ugccgaaggaaacaauccc

SEQ ID NO: 1147278 - RNA, 19 nt, Artificial Sequence
  Description of Artificial Sequence: Synthetic oligonucleotide
  Sense strand starting at position 3133 of SEQ ID NO: 916318
gauuguuuccuucggcaac

SEQ ID NO: 1147279 - RNA, 19 nt, Artificial Sequence
  Description of Artificial Sequence: Synthetic oligonucleotide
  Antisense strand to SEQ ID NO: 1147278
guugccgaaggaaacaauc

SEQ ID NO: 1147280 - RNA, 19 nt, Artificial Sequence
  Description of Artificial Sequence: Synthetic oligonucleotide
  Sense strand starting at position 3162 of SEQ ID NO: 916318
ccaacucuggguuaugcaa

SEQ ID NO: 1147281 - RNA, 19 nt, Artificial Sequence
  Description of Artificial Sequence: Synthetic oligonucleotide
  Antisense strand to SEQ ID NO: 1147280
uugcauaacccagaguugg

SEQ ID NO: 1147282 - RNA, 19 nt, Artificial Sequence
  Description of Artificial Sequence: Synthetic oligonucleotide
  Sense strand starting at position 3219 of SEQ ID NO: 916318
ggcagugacuaaguuuaaa

SEQ ID NO: 1147283 - RNA, 19 nt, Artificial Sequence
  Description of Artificial Sequence: Synthetic oligonucleotide
  Antisense strand to SEQ ID NO: 1147282
uuuaaacuuagucacugcc

SEQ ID NO: 1147284 - RNA, 19 nt, Artificial Sequence
  Description of Artificial Sequence: Synthetic oligonucleotide
  Sense strand starting at position 3351 of SEQ ID NO: 916318
uaggacauguguuuggaga

SEQ ID NO: 1147285 - RNA, 19 nt, Artificial Sequence
  Description of Artificial Sequence: Synthetic oligonucleotide
  Antisense strand to SEQ ID NO: 1147284
ucuccaaacacauguccua

SEQ ID NO: 1147286 - RNA, 19 nt, Artificial Sequence
  Description of Artificial Sequence: Synthetic oligonucleotide
  Sense strand starting at position 3352 of SEQ ID NO: 916318
aggacauguguuuggagaa

SEQ ID NO: 1147287 - RNA, 19 nt, Artificial Sequence
  Description of Artificial Sequence: Synthetic oligonucleotide
  Antisense strand to SEQ ID NO: 1147286
uucuccaaacacauguccu

SEQ ID NO: 1147288 - RNA, 19 nt, Artificial Sequence
  Description of Artificial Sequence: Synthetic oligonucleotide
  Sense strand starting at position 3353 of SEQ ID NO: 916318
ggacauguguuuggagaau

SEQ ID NO: 1147289 - RNA, 19 nt, Artificial Sequence
  Description of Artificial Sequence: Synthetic oligonucleotide
  Antisense strand to SEQ ID NO: 1147288
auucuccaaacacaugucc

SEQ ID NO: 1147290 - RNA, 19 nt, Artificial Sequence
  Description of Artificial Sequence: Synthetic oligonucleotide
  Sense strand starting at position 3379 of SEQ ID NO: 916318
uccuguuucccugagauac

SEQ ID NO: 1147291 - RNA, 19 nt, Artificial Sequence
  Description of Artificial Sequence: Synthetic oligonucleotide
  Antisense strand to SEQ ID NO: 1147290
guaucucagggaaacagga

SEQ ID NO: 1147292 - RNA, 19 nt, Artificial Sequence
  Description of Artificial Sequence: Synthetic oligonucleotide
  Sense strand starting at position 3381 of SEQ ID NO: 916318
cuguuucccugagauacug

SEQ ID NO: 1147293 - RNA, 19 nt, Artificial Sequence
  Description of Artificial Sequence: Synthetic oligonucleotide
  Antisense strand to SEQ ID NO: 1147292
caguaucucagggaaacag

SEQ ID NO: 1147294 - RNA, 19 nt, Artificial Sequence
  Description of Artificial Sequence: Synthetic oligonucleotide
  Sense strand starting at position 3584 of SEQ ID NO: 916318
aaccaaggcugucagagau

SEQ ID NO: 1147295 - RNA, 19 nt, Artificial Sequence
  Description of Artificial Sequence: Synthetic oligonucleotide
  Antisense strand to SEQ ID NO: 1147294
aucucugacagccuugguu

SEQ ID NO: 1147296 - RNA, 19 nt, Artificial Sequence
  Description of Artificial Sequence: Synthetic oligonucleotide
  Sense strand starting at position 3597 of SEQ ID NO: 916318
agagauggguuccagagua

SEQ ID NO: 1147297 - RNA, 19 nt, Artificial Sequence
  Description of Artificial Sequence: Synthetic oligonucleotide
  Antisense strand to SEQ ID NO: 1147296
uacucuggaacccaucucu

SEQ ID NO: 1147298 - RNA, 19 nt, Artificial Sequence
  Description of Artificial Sequence: Synthetic oligonucleotide
  Sense strand starting at position 3703 of SEQ ID NO: 916318
ucggguuggugcuccugaa

SEQ ID NO: 1147299 - RNA, 19 nt, Artificial Sequence
  Description of Artificial Sequence: Synthetic oligonucleotide
  Antisense strand to SEQ ID NO: 1147298
uucaggagcaccaacccga

SEQ ID NO: 1147300 - RNA, 19 nt, Artificial Sequence
  Description of Artificial Sequence: Synthetic oligonucleotide
  Sense strand starting at position 3707 of SEQ ID NO: 916318
guuggugcuccugaauaag

SEQ ID NO: 1147301 - RNA, 19 nt, Artificial Sequence
  Description of Artificial Sequence: Synthetic oligonucleotide
  Antisense strand to SEQ ID NO: 1147300
cuuauucaggagcaccaac

SEQ ID NO: 1147302 - RNA, 19 nt, Artificial Sequence
  Description of Artificial Sequence: Synthetic oligonucleotide
  Sense strand starting at position 3710 of SEQ ID NO: 916318
ggugcuccugaauaagaug

SEQ ID NO: 1147303 - RNA, 19 nt, Artificial Sequence
  Description of Artificial Sequence: Synthetic oligonucleotide
  Antisense strand to SEQ ID NO: 1147302
caucuuauucaggagcacc

SEQ ID NO: 1147304 - RNA, 19 nt, Artificial Sequence
  Description of Artificial Sequence: Synthetic oligonucleotide
  Sense strand starting at position 3757 of SEQ ID NO: 916318
aagagauggcugugcucuu

SEQ ID NO: 1147305 - RNA, 19 nt, Artificial Sequence
  Description of Artificial Sequence: Synthetic oligonucleotide
  Antisense strand to SEQ ID NO: 1147304
aagagcacagccaucucuu

SEQ ID NO: 1147306 - RNA, 19 nt, Artificial Sequence
  Description of Artificial Sequence: Synthetic oligonucleotide
  Sense strand starting at position 235 of SEQ ID NO: 916319
ugggaugagucaccaguaa

SEQ ID NO: 1147307 - RNA, 19 nt, Artificial Sequence
  Description of Artificial Sequence: Synthetic oligonucleotide
  Antisense strand to SEQ ID NO: 1147306
uuacuggugacucauccca

SEQ ID NO: 1147308 - RNA, 19 nt, Artificial Sequence
  Description of Artificial Sequence: Synthetic oligonucleotide
  Sense strand starting at position 239 of SEQ ID NO: 916319
augagucaccaguaaagua

SEQ ID NO: 1147309 - RNA, 19 nt, Artificial Sequence
  Description of Artificial Sequence: Synthetic oligonucleotide
  Antisense strand to SEQ ID NO: 1147308
uacuuuacuggugacucau

SEQ ID NO: 1147310 - RNA, 19 nt, Artificial Sequence
  Description of Artificial Sequence: Synthetic oligonucleotide
  Sense strand starting at position 254 of SEQ ID NO: 916319
aguauaauuccauauguag

SEQ ID NO: 1147311 - RNA, 19 nt, Artificial Sequence
  Description of Artificial Sequence: Synthetic oligonucleotide
  Antisense strand to SEQ ID NO: 1147310
cuacauauggaauuauacu

SEQ ID NO: 1147312 - RNA, 19 nt, Artificial Sequence
  Description of Artificial Sequence: Synthetic oligonucleotide
  Sense strand starting at position 293 of SEQ ID NO: 916319
uguccagggucucuucuaa

SEQ ID NO: 1147313 - RNA, 19 nt, Artificial Sequence
  Description of Artificial Sequence: Synthetic oligonucleotide
  Antisense strand to SEQ ID NO: 1147312
uuagaagagacccuggaca

SEQ ID NO: 1147314 - RNA, 19 nt, Artificial Sequence
  Description of Artificial Sequence: Synthetic oligonucleotide
  Sense strand starting at position 313 of SEQ ID NO: 916319
auucuaucacucuggaaga

SEQ ID NO: 1147315 - RNA, 19 nt, Artificial Sequence
  Description of Artificial Sequence: Synthetic oligonucleotide
  Antisense strand to SEQ ID NO: 1147314
ucuuccagagugauagaau

SEQ ID NO: 1147316 - RNA, 19 nt, Artificial Sequence
  Description of Artificial Sequence: Synthetic oligonucleotide
  Sense strand starting at position 1046 of SEQ ID NO: 916319
gguugcaaguauuuccauu

SEQ ID NO: 1147317 - RNA, 19 nt, Artificial Sequence
  Description of Artificial Sequence: Synthetic oligonucleotide
  Antisense strand to SEQ ID NO: 1147316
aauggaaauacuugcaacc

SEQ ID NO: 1147318 - RNA, 19 nt, Artificial Sequence
  Description of Artificial Sequence: Synthetic oligonucleotide
  Sense strand starting at position 1090 of SEQ ID NO: 916319
gggcagaugugucccggaa

SEQ ID NO: 1147319 - RNA, 19 nt, Artificial Sequence
  Description of Artificial Sequence: Synthetic oligonucleotide
  Antisense strand to SEQ ID NO: 1147318
uuccgggacacaucugccc

SEQ ID NO: 1147320 - RNA, 19 nt, Artificial Sequence
  Description of Artificial Sequence: Synthetic oligonucleotide
  Sense strand starting at position 1122 of SEQ ID NO: 916319
acaggaaguaacgguuuau

SEQ ID NO: 1147321 - RNA, 19 nt, Artificial Sequence
  Description of Artificial Sequence: Synthetic oligonucleotide
  Antisense strand to SEQ ID NO: 1147320
auaaaccguuacuuccugu

SEQ ID NO: 1147322 - RNA, 19 nt, Artificial Sequence
  Description of Artificial Sequence: Synthetic oligonucleotide
  Sense strand starting at position 1126 of SEQ ID NO: 916319
gaaguaacgguuuauaaca

SEQ ID NO: 1147323 - RNA, 19 nt, Artificial Sequence
  Description of Artificial Sequence: Synthetic oligonucleotide
  Antisense strand to SEQ ID NO: 1147322
uguuauaaaccguuacuuc

SEQ ID NO: 1147324 - RNA, 19 nt, Artificial Sequence
  Description of Artificial Sequence: Synthetic oligonucleotide
  Sense strand starting at position 1134 of SEQ ID NO: 916319
gguuuauaacaacgugaac

SEQ ID NO: 1147325 - RNA, 19 nt, Artificial Sequence
  Description of Artificial Sequence: Synthetic oligonucleotide
  Antisense strand to SEQ ID NO: 1147324
guucacguuguuauaaacc

SEQ ID NO: 1147326 - RNA, 19 nt, Artificial Sequence
  Description of Artificial Sequence: Synthetic oligonucleotide
  Sense strand starting at position 1207 of SEQ ID NO: 916319
acaaauggcucguucccaa

SEQ ID NO: 1147327 - RNA, 19 nt, Artificial Sequence
  Description of Artificial Sequence: Synthetic oligonucleotide
  Antisense strand to SEQ ID NO: 1147326
uugggaacgagccauuugu

SEQ ID NO: 1147328 - RNA, 19 nt, Artificial Sequence
  Description of Artificial Sequence: Synthetic oligonucleotide
  Sense strand starting at position 1885 of SEQ ID NO: 916319
gcgccuuccacugcgauau

SEQ ID NO: 1147329 - RNA, 19 nt, Artificial Sequence
  Description of Artificial Sequence: Synthetic oligonucleotide
  Antisense strand to SEQ ID NO: 1147328
auaucgcaguggaaggcgc

SEQ ID NO: 1147330 - RNA, 19 nt, Artificial Sequence
  Description of Artificial Sequence: Synthetic oligonucleotide
  Sense strand starting at position 1897 of SEQ ID NO: 916319
gcgauauugcuccaaaucc

SEQ ID NO: 1147331 - RNA, 19 nt, Artificial Sequence
  Description of Artificial Sequence: Synthetic oligonucleotide
  Antisense strand to SEQ ID NO: 1147330
ggauuuggagcaauaucgc

SEQ ID NO: 1147332 - RNA, 19 nt, Artificial Sequence
  Description of Artificial Sequence: Synthetic oligonucleotide
  Sense strand starting at position 1906 of SEQ ID NO: 916319
cuccaaauccgaggaaauu

SEQ ID NO: 1147333 - RNA, 19 nt, Artificial Sequence
  Description of Artificial Sequence: Synthetic oligonucleotide
  Antisense strand to SEQ ID NO: 1147332
aauuuccucggauuuggag

SEQ ID NO: 1147334 - RNA, 19 nt, Artificial Sequence
  Description of Artificial Sequence: Synthetic oligonucleotide
  Sense strand starting at position 2161 of SEQ ID NO: 916319
ggguguguuuauuugcaua

SEQ ID NO: 1147335 - RNA, 19 nt, Artificial Sequence
  Description of Artificial Sequence: Synthetic oligonucleotide
  Antisense strand to SEQ ID NO: 1147334
uaugcaaauaaacacaccc

SEQ ID NO: 1147336 - RNA, 19 nt, Artificial Sequence
  Description of Artificial Sequence: Synthetic oligonucleotide
  Sense strand starting at position 2204 of SEQ ID NO: 916319
gguggauccggcgggauuu

SEQ ID NO: 1147337 - RNA, 19 nt, Artificial Sequence
  Description of Artificial Sequence: Synthetic oligonucleotide
  Antisense strand to SEQ ID NO: 1147336
aaaucccgccggauccacc

SEQ ID NO: 1147338 - RNA, 19 nt, Artificial Sequence
  Description of Artificial Sequence: Synthetic oligonucleotide
  Sense strand starting at position 2853 of SEQ ID NO: 916319
cugagaauuugaggacaug

SEQ ID NO: 1147339 - RNA, 19 nt, Artificial Sequence
  Description of Artificial Sequence: Synthetic oligonucleotide
  Antisense strand to SEQ ID NO: 1147338
cauguccucaaauucucag

SEQ ID NO: 1147340 - RNA, 19 nt, Artificial Sequence
  Description of Artificial Sequence: Synthetic oligonucleotide
  Sense strand starting at position 2870 of SEQ ID NO: 916319
uggaauauuugauaaccau

SEQ ID NO: 1147341 - RNA, 19 nt, Artificial Sequence
  Description of Artificial Sequence: Synthetic oligonucleotide
  Antisense strand to SEQ ID NO: 1147340
augguuaucaaauauucca

SEQ ID NO: 1147342 - RNA, 19 nt, Artificial Sequence
  Description of Artificial Sequence: Synthetic oligonucleotide
  Sense strand starting at position 3133 of SEQ ID NO: 916319
cagagugucuuauuugcuu

SEQ ID NO: 1147343 - RNA, 19 nt, Artificial Sequence
  Description of Artificial Sequence: Synthetic oligonucleotide
  Antisense strand to SEQ ID NO: 1147342
aagcaaauaagacacucug

SEQ ID NO: 1147344 - RNA, 19 nt, Artificial Sequence
  Description of Artificial Sequence: Synthetic oligonucleotide
  Sense strand starting at position 3138 of SEQ ID NO: 916319
ugucuuauuugcuuagcua

SEQ ID NO: 1147345 - RNA, 19 nt, Artificial Sequence
  Description of Artificial Sequence: Synthetic oligonucleotide
  Antisense strand to SEQ ID NO: 1147344
uagcuaagcaaauaagaca

SEQ ID NO: 1147346 - RNA, 19 nt, Artificial Sequence
  Description of Artificial Sequence: Synthetic oligonucleotide
  Sense strand starting at position 3139 of SEQ ID NO: 916319
gucuuauuugcuuagcuau

SEQ ID NO: 1147347 - RNA, 19 nt, Artificial Sequence
  Description of Artificial Sequence: Synthetic oligonucleotide
  Antisense strand to SEQ ID NO: 1147346
auagcuaagcaaauaagac

SEQ ID NO: 1147348 - RNA, 19 nt, Artificial Sequence
  Description of Artificial Sequence: Synthetic oligonucleotide
  Sense strand starting at position 3153 of SEQ ID NO: 916319
gcuauuggacaucaccuaa

SEQ ID NO: 1147349 - RNA, 19 nt, Artificial Sequence
  Description of Artificial Sequence: Synthetic oligonucleotide
  Antisense strand to SEQ ID NO: 1147348
uuaggugauguccaauagc

SEQ ID NO: 1147350 - RNA, 19 nt, Artificial Sequence
  Description of Artificial Sequence: Synthetic oligonucleotide
  Sense strand starting at position 3414 of SEQ ID NO: 916319
gucauugaagcuugauaau

SEQ ID NO: 1147351 - RNA, 19 nt, Artificial Sequence
  Description of Artificial Sequence: Synthetic oligonucleotide
  Antisense strand to SEQ ID NO: 1147350
auuaucaagcuucaaugac

SEQ ID NO: 1147352 - RNA, 19 nt, Artificial Sequence
  Description of Artificial Sequence: Synthetic oligonucleotide
  Sense strand starting at position 3443 of SEQ ID NO: 916319
uucugugagcuccaaguua

SEQ ID NO: 1147353 - RNA, 19 nt, Artificial Sequence
  Description of Artificial Sequence: Synthetic oligonucleotide
  Antisense strand to SEQ ID NO: 1147352
uaacuuggagcucacagaa

SEQ ID NO: 1147354 - RNA, 19 nt, Artificial Sequence
  Description of Artificial Sequence: Synthetic oligonucleotide
  Sense strand starting at position 3515 of SEQ ID NO: 916319
uuucuucuuugaguagacu

SEQ ID NO: 1147355 - RNA, 19 nt, Artificial Sequence
  Description of Artificial Sequence: Synthetic oligonucleotide
  Antisense strand to SEQ ID NO: 1147354
agucuacucaaagaagaaa

SEQ ID NO: 1147356 - RNA, 19 nt, Artificial Sequence
  Description of Artificial Sequence: Synthetic oligonucleotide
  Sense strand starting at position 3521 of SEQ ID NO: 916319
cuuugaguagacugugaau

SEQ ID NO: 1147357 - RNA, 19 nt, Artificial Sequence
  Description of Artificial Sequence: Synthetic oligonucleotide
  Antisense strand to SEQ ID NO: 1147356
auucacagucuacucaaag

SEQ ID NO: 1147358 - RNA, 19 nt, Artificial Sequence
  Description of Artificial Sequence: Synthetic oligonucleotide
  Sense strand starting at position 3523 of SEQ ID NO: 916319
uugaguagacugugaauua

SEQ ID NO: 1147359 - RNA, 19 nt, Artificial Sequence
  Description of Artificial Sequence: Synthetic oligonucleotide
  Antisense strand to SEQ ID NO: 1147358
uaauucacagucuacucaa

SEQ ID NO: 1147360 - RNA, 19 nt, Artificial Sequence
  Description of Artificial Sequence: Synthetic oligonucleotide
  Sense strand starting at position 3571 of SEQ ID NO: 916319
agucuuggugucugacaua

SEQ ID NO: 1147361 - RNA, 19 nt, Artificial Sequence
  Description of Artificial Sequence: Synthetic oligonucleotide
  Antisense strand to SEQ ID NO: 1147360
uaugucagacaccaagacu

SEQ ID NO: 1147362 - RNA, 19 nt, Artificial Sequence
  Description of Artificial Sequence: Synthetic oligonucleotide
  Sense strand starting at position 3598 of SEQ ID NO: 916319
ggcacaaauguguauugaa

SEQ ID NO: 1147363 - RNA, 19 nt, Artificial Sequence
  Description of Artificial Sequence: Synthetic oligonucleotide
  Antisense strand to SEQ ID NO: 1147362
uucaauacacauuugugcc

SEQ ID NO: 1147364 - RNA, 19 nt, Artificial Sequence
  Description of Artificial Sequence: Synthetic oligonucleotide
  Sense strand starting at position 3652 of SEQ ID NO: 916319
ucuauacauuguguaaagu

SEQ ID NO: 1147365 - RNA, 19 nt, Artificial Sequence
  Description of Artificial Sequence: Synthetic oligonucleotide
  Antisense strand to SEQ ID NO: 1147364
acuuuacacaauguauaga

SEQ ID NO: 1147366 - RNA, 19 nt, Artificial Sequence
  Description of Artificial Sequence: Synthetic oligonucleotide
  Sense strand starting at position 3653 of SEQ ID NO: 916319
cuauacauuguguaaaguu

SEQ ID NO: 1147367 - RNA, 19 nt, Artificial Sequence
  Description of Artificial Sequence: Synthetic oligonucleotide
  Antisense strand to SEQ ID NO: 1147366
aacuuuacacaauguauag

SEQ ID NO: 1147368 - RNA, 19 nt, Artificial Sequence
  Description of Artificial Sequence: Synthetic oligonucleotide
  Sense strand starting at position 3696 of SEQ ID NO: 916319
gauauugugaacuggguuu

SEQ ID NO: 1147369 - RNA, 19 nt, Artificial Sequence
  Description of Artificial Sequence: Synthetic oligonucleotide
  Antisense strand to SEQ ID NO: 1147368
aaacccaguucacaauauc

SEQ ID NO: 1147370 - RNA, 19 nt, Artificial Sequence
  Description of Artificial Sequence: Synthetic oligonucleotide
  Sense strand starting at position 3803 of SEQ ID NO: 916319
auguccuccuggucugaga

SEQ ID NO: 1147371 - RNA, 19 nt, Artificial Sequence
  Description of Artificial Sequence: Synthetic oligonucleotide
  Antisense strand to SEQ ID NO: 1147370
ucucagaccaggaggacau

SEQ ID NO: 1147372 - RNA, 19 nt, Artificial Sequence
  Description of Artificial Sequence: Synthetic oligonucleotide
  Sense strand starting at position 3805 of SEQ ID NO: 916319
guccuccuggucugagaaa

SEQ ID NO: 1147373 - RNA, 19 nt, Artificial Sequence
  Description of Artificial Sequence: Synthetic oligonucleotide
  Antisense strand to SEQ ID NO: 1147372
uuucucagaccaggaggac

SEQ ID NO: 1147374 - RNA, 19 nt, Artificial Sequence
  Description of Artificial Sequence: Synthetic oligonucleotide
  Sense strand starting at position 3828 of SEQ ID NO: 916319
aucagaaaguguuuccugu

SEQ ID NO: 1147375 - RNA, 19 nt, Artificial Sequence
  Description of Artificial Sequence: Synthetic oligonucleotide
  Antisense strand to SEQ ID NO: 1147374
acaggaaacacuuucugau

SEQ ID NO: 1147376 - RNA, 19 nt, Artificial Sequence
  Description of Artificial Sequence: Synthetic oligonucleotide
  Sense strand starting at position 3830 of SEQ ID NO: 916319
cagaaaguguuuccuguug

SEQ ID NO: 1147377 - RNA, 19 nt, Artificial Sequence
  Description of Artificial Sequence: Synthetic oligonucleotide
  Antisense strand to SEQ ID NO: 1147376
caacaggaaacacuuucug

SEQ ID NO: 1147378 - RNA, 19 nt, Artificial Sequence
  Description of Artificial Sequence: Synthetic oligonucleotide
  Sense strand starting at position 3849 of SEQ ID NO: 916319
cuuugugggaaauguguuu

SEQ ID NO: 1147379 - RNA, 19 nt, Artificial Sequence
  Description of Artificial Sequence: Synthetic oligonucleotide
  Antisense strand to SEQ ID NO: 1147378
aaacacauuucccacaaag

SEQ ID NO: 1147380 - RNA, 19 nt, Artificial Sequence
  Description of Artificial Sequence: Synthetic oligonucleotide
  Sense strand starting at position 3854 of SEQ ID NO: 916319
ugggaaauguguuuagcaa

SEQ ID NO: 1147381 - RNA, 19 nt, Artificial Sequence
  Description of Artificial Sequence: Synthetic oligonucleotide
  Antisense strand to SEQ ID NO: 1147380
uugcuaaacacauuuccca

SEQ ID NO: 1147382 - RNA, 19 nt, Artificial Sequence
  Description of Artificial Sequence: Synthetic oligonucleotide
  Sense strand starting at position 3855 of SEQ ID NO: 916319
gggaaauguguuuagcaag

SEQ ID NO: 1147383 - RNA, 19 nt, Artificial Sequence
  Description of Artificial Sequence: Synthetic oligonucleotide
  Antisense strand to SEQ ID NO: 1147382
cuugcuaaacacauuuccc

SEQ ID NO: 1147384 - RNA, 19 nt, Artificial Sequence
  Description of Artificial Sequence: Synthetic oligonucleotide
  Sense strand starting at position 3887 of SEQ ID NO: 916319
ugacauccuccuugaacga

SEQ ID NO: 1147385 - RNA, 19 nt, Artificial Sequence
  Description of Artificial Sequence: Synthetic oligonucleotide
  Antisense strand to SEQ ID NO: 1147384
ucguucaaggaggauguca

SEQ ID NO: 1147386 - RNA, 19 nt, Artificial Sequence
  Description of Artificial Sequence: Synthetic oligonucleotide
  Sense strand starting at position 212 of SEQ ID NO: 916320
uguugcccucccuaagauu

SEQ ID NO: 1147387 - RNA, 19 nt, Artificial Sequence
  Description of Artificial Sequence: Synthetic oligonucleotide
  Antisense strand to SEQ ID NO: 1147386
aaucuuagggagggcaaca

SEQ ID NO: 1147388 - RNA, 19 nt, Artificial Sequence
  Description of Artificial Sequence: Synthetic oligonucleotide
  Sense strand starting at position 312 of SEQ ID NO: 916320
aggcuuucuugggcaccaa

SEQ ID NO: 1147389 - RNA, 19 nt, Artificial Sequence
  Description of Artificial Sequence: Synthetic oligonucleotide
  Antisense strand to SEQ ID NO: 1147388
uuggugcccaagaaagccu

SEQ ID NO: 1147390 - RNA, 19 nt, Artificial Sequence
  Description of Artificial Sequence: Synthetic oligonucleotide
  Sense strand starting at position 360 of SEQ ID NO: 916320
ggacuagaguaagauuuag

SEQ ID NO: 1147391 - RNA, 19 nt, Artificial Sequence
  Description of Artificial Sequence: Synthetic oligonucleotide
  Antisense strand to SEQ ID NO: 1147390
cuaaaucuuacucuagucc

SEQ ID NO: 1147392 - RNA, 19 nt, Artificial Sequence
  Description of Artificial Sequence: Synthetic oligonucleotide
  Sense strand starting at position 366 of SEQ ID NO: 916320
gaguaagauuuaggaaguu

SEQ ID NO: 1147393 - RNA, 19 nt, Artificial Sequence
  Description of Artificial Sequence: Synthetic oligonucleotide
  Antisense strand to SEQ ID NO: 1147392
aacuuccuaaaucuuacuc

SEQ ID NO: 1147394 - RNA, 19 nt, Artificial Sequence
  Description of Artificial Sequence: Synthetic oligonucleotide
  Sense strand starting at position 484 of SEQ ID NO: 916320
gcucuuaggucucugagaa

SEQ ID NO: 1147395 - RNA, 19 nt, Artificial Sequence
  Description of Artificial Sequence: Synthetic oligonucleotide
  Antisense strand to SEQ ID NO: 1147394
uucucagagaccuaagagc

SEQ ID NO: 1147396 - RNA, 19 nt, Artificial Sequence
  Description of Artificial Sequence: Synthetic oligonucleotide
  Sense strand starting at position 485 of SEQ ID NO: 916320
cucuuaggucucugagaaa

SEQ ID NO: 1147397 - RNA, 19 nt, Artificial Sequence
  Description of Artificial Sequence: Synthetic oligonucleotide
  Antisense strand to SEQ ID NO: 1147396
uuucucagagaccuaagag

SEQ ID NO: 1147398 - RNA, 19 nt, Artificial Sequence
  Description of Artificial Sequence: Synthetic oligonucleotide
  Sense strand starting at position 488 of SEQ ID NO: 916320
uuaggucucugagaaauuu

SEQ ID NO: 1147399 - RNA, 19 nt, Artificial Sequence
  Description of Artificial Sequence: Synthetic oligonucleotide
  Antisense strand to SEQ ID NO: 1147398
aaauuucucagagaccuaa

SEQ ID NO: 1147400 - RNA, 19 nt, Artificial Sequence
  Description of Artificial Sequence: Synthetic oligonucleotide
  Sense strand starting at position 510 of SEQ ID NO: 916320
ugcucaaagucaucauaga

SEQ ID NO: 1147401 - RNA, 19 nt, Artificial Sequence
  Description of Artificial Sequence: Synthetic oligonucleotide
  Antisense strand to SEQ ID NO: 1147400
ucuaugaugacuuugagca

SEQ ID NO: 1147402 - RNA, 19 nt, Artificial Sequence
  Description of Artificial Sequence: Synthetic oligonucleotide
  Sense strand starting at position 511 of SEQ ID NO: 916320
gcucaaagucaucauagau

SEQ ID NO: 1147403 - RNA, 19 nt, Artificial Sequence
  Description of Artificial Sequence: Synthetic oligonucleotide
  Antisense strand to SEQ ID NO: 1147402
aucuaugaugacuuugagc

SEQ ID NO: 1147404 - RNA, 19 nt, Artificial Sequence
  Description of Artificial Sequence: Synthetic oligonucleotide
  Sense strand starting at position 690 of SEQ ID NO: 916320
cugccuuuccuugagaccu

SEQ ID NO: 1147405 - RNA, 19 nt, Artificial Sequence
  Description of Artificial Sequence: Synthetic oligonucleotide
  Antisense strand to SEQ ID NO: 1147404
aggucucaaggaaaggcag

SEQ ID NO: 1147406 - RNA, 19 nt, Artificial Sequence
  Description of Artificial Sequence: Synthetic oligonucleotide
  Sense strand starting at position 717 of SEQ ID NO: 916320
uggcuacaucuagggaaua

SEQ ID NO: 1147407 - RNA, 19 nt, Artificial Sequence
  Description of Artificial Sequence: Synthetic oligonucleotide
  Antisense strand to SEQ ID NO: 1147406
uauucccuagauguagcca

SEQ ID NO: 1147408 - RNA, 19 nt, Artificial Sequence
  Description of Artificial Sequence: Synthetic oligonucleotide
  Sense strand starting at position 728 of SEQ ID NO: 916320
agggaauagccaugagcuu

SEQ ID NO: 1147409 - RNA, 19 nt, Artificial Sequence
  Description of Artificial Sequence: Synthetic oligonucleotide
  Antisense strand to SEQ ID NO: 1147408
aagcucauggcuauucccu

SEQ ID NO: 1147410 - RNA, 19 nt, Artificial Sequence
  Description of Artificial Sequence: Synthetic oligonucleotide
  Sense strand starting at position 734 of SEQ ID NO: 916320
uagccaugagcuuggagaa

SEQ ID NO: 1147411 - RNA, 19 nt, Artificial Sequence
  Description of Artificial Sequence: Synthetic oligonucleotide
  Antisense strand to SEQ ID NO: 1147410
uucuccaagcucauggcua

SEQ ID NO: 1147412 - RNA, 19 nt, Artificial Sequence
  Description of Artificial Sequence: Synthetic oligonucleotide
  Sense strand starting at position 851 of SEQ ID NO: 916320
cagggaauaguggguacaa

SEQ ID NO: 1147413 - RNA, 19 nt, Artificial Sequence
  Description of Artificial Sequence: Synthetic oligonucleotide
  Antisense strand to SEQ ID NO: 1147412
uuguacccacuauucccug

SEQ ID NO: 1147414 - RNA, 19 nt, Artificial Sequence
  Description of Artificial Sequence: Synthetic oligonucleotide
  Sense strand starting at position 922 of SEQ ID NO: 916320
cccucagaucucuguucca

SEQ ID NO: 1147415 - RNA, 19 nt, Artificial Sequence
  Description of Artificial Sequence: Synthetic oligonucleotide
  Antisense strand to SEQ ID NO: 1147414
uggaacagagaucugaggg

SEQ ID NO: 1147416 - RNA, 19 nt, Artificial Sequence
  Description of Artificial Sequence: Synthetic oligonucleotide
  Sense strand starting at position 1056 of SEQ ID NO: 916320
aggccuaaucaagauguca

SEQ ID NO: 1147417 - RNA, 19 nt, Artificial Sequence
  Description of Artificial Sequence: Synthetic oligonucleotide
  Antisense strand to SEQ ID NO: 1147416
ugacaucuugauuaggccu

SEQ ID NO: 1147418 - RNA, 19 nt, Artificial Sequence
  Description of Artificial Sequence: Synthetic oligonucleotide
  Sense strand starting at position 2060 of SEQ ID NO: 916320
ggaggaagguugcucucua

SEQ ID NO: 1147419 - RNA, 19 nt, Artificial Sequence
  Description of Artificial Sequence: Synthetic oligonucleotide
  Antisense strand to SEQ ID NO: 1147418
uagagagcaaccuuccucc

SEQ ID NO: 1147420 - RNA, 19 nt, Artificial Sequence
  Description of Artificial Sequence: Synthetic oligonucleotide
  Sense strand starting at position 2061 of SEQ ID NO: 916320
gaggaagguugcucucuag

SEQ ID NO: 1147421 - RNA, 19 nt, Artificial Sequence
  Description of Artificial Sequence: Synthetic oligonucleotide
  Antisense strand to SEQ ID NO: 1147420
cuagagagcaaccuuccuc

SEQ ID NO: 1147422 - RNA, 19 nt, Artificial Sequence
  Description of Artificial Sequence: Synthetic oligonucleotide
  Sense strand starting at position 2064 of SEQ ID NO: 916320
gaagguugcucucuagaug

SEQ ID NO: 1147423 - RNA, 19 nt, Artificial Sequence
  Description of Artificial Sequence: Synthetic oligonucleotide
  Antisense strand to SEQ ID NO: 1147422
caucuagagagcaaccuuc

SEQ ID NO: 1147424 - RNA, 19 nt, Artificial Sequence
  Description of Artificial Sequence: Synthetic oligonucleotide
  Sense strand starting at position 2065 of SEQ ID NO: 916320
aagguugcucucuagaugu

SEQ ID NO: 1147425 - RNA, 19 nt, Artificial Sequence
  Description of Artificial Sequence: Synthetic oligonucleotide
  Antisense strand to SEQ ID NO: 1147424
acaucuagagagcaaccuu

SEQ ID NO: 1147426 - RNA, 19 nt, Artificial Sequence
  Description of Artificial Sequence: Synthetic oligonucleotide
  Sense strand starting at position 2244 of SEQ ID NO: 916320
agccgaaagcccuggauga

SEQ ID NO: 1147427 - RNA, 19 nt, Artificial Sequence
  Description of Artificial Sequence: Synthetic oligonucleotide
  Antisense strand to SEQ ID NO: 1147426
ucauccagggcuuucggcu

SEQ ID NO: 1147428 - RNA, 19 nt, Artificial Sequence
  Description of Artificial Sequence: Synthetic oligonucleotide
  Sense strand starting at position 2245 of SEQ ID NO: 916320
gccgaaagcccuggaugaa

SEQ ID NO: 1147429 - RNA, 19 nt, Artificial Sequence
  Description of Artificial Sequence: Synthetic oligonucleotide
  Antisense strand to SEQ ID NO: 1147428
uucauccagggcuuucggc

SEQ ID NO: 1147430 - RNA, 19 nt, Artificial Sequence
  Description of Artificial Sequence: Synthetic oligonucleotide
  Sense strand starting at position 2246 of SEQ ID NO: 916320
ccgaaagcccuggaugaau

SEQ ID NO: 1147431 - RNA, 19 nt, Artificial Sequence
  Description of Artificial Sequence: Synthetic oligonucleotide
  Antisense strand to SEQ ID NO: 1147430
auucauccagggcuuucgg

SEQ ID NO: 1147432 - RNA, 19 nt, Artificial Sequence
  Description of Artificial Sequence: Synthetic oligonucleotide
  Sense strand starting at position 2308 of SEQ ID NO: 916320
aggagcugcucacugacaa

SEQ ID NO: 1147433 - RNA, 19 nt, Artificial Sequence
  Description of Artificial Sequence: Synthetic oligonucleotide
  Antisense strand to SEQ ID NO: 1147432
uugucagugagcagcuccu

SEQ ID NO: 1147434 - RNA, 19 nt, Artificial Sequence
  Description of Artificial Sequence: Synthetic oligonucleotide
  Sense strand starting at position 2309 of SEQ ID NO: 916320
ggagcugcucacugacaaa

SEQ ID NO: 1147435 - RNA, 19 nt, Artificial Sequence
  Description of Artificial Sequence: Synthetic oligonucleotide
  Antisense strand to SEQ ID NO: 1147434
uuugucagugagcagcucc

SEQ ID NO: 1147436 - RNA, 19 nt, Artificial Sequence
  Description of Artificial Sequence: Synthetic oligonucleotide
  Sense strand starting at position 2610 of SEQ ID NO: 916320
agggaaugaucuguaccuu

SEQ ID NO: 1147437 - RNA, 19 nt, Artificial Sequence
  Description of Artificial Sequence: Synthetic oligonucleotide
  Antisense strand to SEQ ID NO: 1147436
aagguacagaucauucccu

SEQ ID NO: 1147438 - RNA, 19 nt, Artificial Sequence
  Description of Artificial Sequence: Synthetic oligonucleotide
  Sense strand starting at position 2664 of SEQ ID NO: 916320
gaaucacauucugugagga

SEQ ID NO: 1147439 - RNA, 19 nt, Artificial Sequence
  Description of Artificial Sequence: Synthetic oligonucleotide
  Antisense strand to SEQ ID NO: 1147438
uccucacagaaugugauuc

SEQ ID NO: 1147440 - RNA, 19 nt, Artificial Sequence
  Description of Artificial Sequence: Synthetic oligonucleotide
  Sense strand starting at position 2665 of SEQ ID NO: 916320
aaucacauucugugaggaa

SEQ ID NO: 1147441 - RNA, 19 nt, Artificial Sequence
  Description of Artificial Sequence: Synthetic oligonucleotide
  Antisense strand to SEQ ID NO: 1147440
uuccucacagaaugugauu

SEQ ID NO: 1147442 - RNA, 19 nt, Artificial Sequence
  Description of Artificial Sequence: Synthetic oligonucleotide
  Sense strand starting at position 2838 of SEQ ID NO: 916320
ccauaugacucuuccagga

SEQ ID NO: 1147443 - RNA, 19 nt, Artificial Sequence
  Description of Artificial Sequence: Synthetic oligonucleotide
  Antisense strand to SEQ ID NO: 1147442
uccuggaagagucauaugg

SEQ ID NO: 1147444 - RNA, 19 nt, Artificial Sequence
  Description of Artificial Sequence: Synthetic oligonucleotide
  Sense strand starting at position 2856 of SEQ ID NO: 916320
agagaugggucagugauga

SEQ ID NO: 1147445 - RNA, 19 nt, Artificial Sequence
  Description of Artificial Sequence: Synthetic oligonucleotide
  Antisense strand to SEQ ID NO: 1147444
ucaucacugacccaucucu

SEQ ID NO: 1147446 - RNA, 19 nt, Artificial Sequence
  Description of Artificial Sequence: Synthetic oligonucleotide
  Sense strand starting at position 3038 of SEQ ID NO: 916320
agaggccacuucuuaucua

SEQ ID NO: 1147447 - RNA, 19 nt, Artificial Sequence
  Description of Artificial Sequence: Synthetic oligonucleotide
  Antisense strand to SEQ ID NO: 1147446
uagauaagaaguggccucu

SEQ ID NO: 1147448 - RNA, 19 nt, Artificial Sequence
  Description of Artificial Sequence: Synthetic oligonucleotide
  Sense strand starting at position 3041 of SEQ ID NO: 916320
ggccacuucuuaucuagga

SEQ ID NO: 1147449 - RNA, 19 nt, Artificial Sequence
  Description of Artificial Sequence: Synthetic oligonucleotide
  Antisense strand to SEQ ID NO: 1147448
uccuagauaagaaguggcc

SEQ ID NO: 1147450 - RNA, 19 nt, Artificial Sequence
  Description of Artificial Sequence: Synthetic oligonucleotide
  Sense strand starting at position 3045 of SEQ ID NO: 916320
acuucuuaucuaggacaug

SEQ ID NO: 1147451 - RNA, 19 nt, Artificial Sequence
  Description of Artificial Sequence: Synthetic oligonucleotide
  Antisense strand to SEQ ID NO: 1147450
cauguccuagauaagaagu

SEQ ID NO: 1147452 - RNA, 19 nt, Artificial Sequence
  Description of Artificial Sequence: Synthetic oligonucleotide
  Sense strand starting at position 3062 of SEQ ID NO: 916320
ugccaaucugcugaaagca

SEQ ID NO: 1147453 - RNA, 19 nt, Artificial Sequence
  Description of Artificial Sequence: Synthetic oligonucleotide
  Antisense strand to SEQ ID NO: 1147452
ugcuuucagcagauuggca

SEQ ID NO: 1147454 - RNA, 19 nt, Artificial Sequence
  Description of Artificial Sequence: Synthetic oligonucleotide
  Sense strand starting at position 3110 of SEQ ID NO: 916320
gcaaaucaccuccaugagu

SEQ ID NO: 1147455 - RNA, 19 nt, Artificial Sequence
  Description of Artificial Sequence: Synthetic oligonucleotide
  Antisense strand to SEQ ID NO: 1147454
acucauggaggugauuugc

SEQ ID NO: 1147456 - RNA, 19 nt, Artificial Sequence
  Description of Artificial Sequence: Synthetic oligonucleotide
  Sense strand starting at position 3382 of SEQ ID NO: 916320
cuaccugaucccugucauu

SEQ ID NO: 1147457 - RNA, 19 nt, Artificial Sequence
  Description of Artificial Sequence: Synthetic oligonucleotide
  Antisense strand to SEQ ID NO: 1147456
aaugacagggaucagguag

SEQ ID NO: 1147458 - RNA, 19 nt, Artificial Sequence
  Description of Artificial Sequence: Synthetic oligonucleotide
  Sense strand starting at position 3408 of SEQ ID NO: 916320
gcauguggcagauauugaa

SEQ ID NO: 1147459 - RNA, 19 nt, Artificial Sequence
  Description of Artificial Sequence: Synthetic oligonucleotide
  Antisense strand to SEQ ID NO: 1147458
uucaauaucugccacaugc

SEQ ID NO: 1147460 - RNA, 19 nt, Artificial Sequence
  Description of Artificial Sequence: Synthetic oligonucleotide
  Sense strand starting at position 3415 of SEQ ID NO: 916320
gcagauauugaaugccuuu

SEQ ID NO: 1147461 - RNA, 19 nt, Artificial Sequence
  Description of Artificial Sequence: Synthetic oligonucleotide
  Antisense strand to SEQ ID NO: 1147460
aaaggcauucaauaucugc

SEQ ID NO: 1147462 - RNA, 19 nt, Artificial Sequence
  Description of Artificial Sequence: Synthetic oligonucleotide
  Sense strand starting at position 3580 of SEQ ID NO: 916320
uugguccuacuuuagagua

SEQ ID NO: 1147463 - RNA, 19 nt, Artificial Sequence
  Description of Artificial Sequence: Synthetic oligonucleotide
  Antisense strand to SEQ ID NO: 1147462
uacucuaaaguaggaccaa

SEQ ID NO: 1147464 - RNA, 19 nt, Artificial Sequence
  Description of Artificial Sequence: Synthetic oligonucleotide
  Sense strand starting at position 3635 of SEQ ID NO: 916320
ggguuucugauagggauac

SEQ ID NO: 1147465 - RNA, 19 nt, Artificial Sequence
  Description of Artificial Sequence: Synthetic oligonucleotide
  Antisense strand to SEQ ID NO: 1147464
guaucccuaucagaaaccc

SEQ ID NO: 1147466 - RNA, 19 nt, Artificial Sequence
  Description of Artificial Sequence: Synthetic oligonucleotide
  Sense strand starting at position 37 of SEQ ID NO: 916321
ugcacauuccucuggauau

SEQ ID NO: 1147467 - RNA, 19 nt, Artificial Sequence
  Description of Artificial Sequence: Synthetic oligonucleotide
  Antisense strand to SEQ ID NO: 1147466
auauccagaggaaugugca

SEQ ID NO: 1147468 - RNA, 19 nt, Artificial Sequence
  Description of Artificial Sequence: Synthetic oligonucleotide
  Sense strand starting at position 107 of SEQ ID NO: 916321
uaauguugugcugaaacuu

SEQ ID NO: 1147469 - RNA, 19 nt, Artificial Sequence
  Description of Artificial Sequence: Synthetic oligonucleotide
  Antisense strand to SEQ ID NO: 1147468
aaguuucagcacaacauua

SEQ ID NO: 1147470 - RNA, 19 nt, Artificial Sequence
  Description of Artificial Sequence: Synthetic oligonucleotide
  Sense strand starting at position 329 of SEQ ID NO: 916321
gaaagagcggaguaguuua

SEQ ID NO: 1147471 - RNA, 19 nt, Artificial Sequence
  Description of Artificial Sequence: Synthetic oligonucleotide
  Antisense strand to SEQ ID NO: 1147470
uaaacuacuccgcucuuuc

SEQ ID NO: 1147472 - RNA, 19 nt, Artificial Sequence
  Description of Artificial Sequence: Synthetic oligonucleotide
  Sense strand starting at position 337 of SEQ ID NO: 916321
ggaguaguuuaugcaaauu

SEQ ID NO: 1147473 - RNA, 19 nt, Artificial Sequence
  Description of Artificial Sequence: Synthetic oligonucleotide
  Antisense strand to SEQ ID NO: 1147472
aauuugcauaaacuacucc

SEQ ID NO: 1147474 - RNA, 19 nt, Artificial Sequence
  Description of Artificial Sequence: Synthetic oligonucleotide
  Sense strand starting at position 346 of SEQ ID NO: 916321
uaugcaaauucuguaagga

SEQ ID NO: 1147475 - RNA, 19 nt, Artificial Sequence
  Description of Artificial Sequence: Synthetic oligonucleotide
  Antisense strand to SEQ ID NO: 1147474
uccuuacagaauuugcaua

SEQ ID NO: 1147476 - RNA, 19 nt, Artificial Sequence
  Description of Artificial Sequence: Synthetic oligonucleotide
  Sense strand starting at position 371 of SEQ ID NO: 916321
ccucaaucguaucuccaga

SEQ ID NO: 1147477 - RNA, 19 nt, Artificial Sequence
  Description of Artificial Sequence: Synthetic oligonucleotide
  Antisense strand to SEQ ID NO: 1147476
ucuggagauacgauugagg

SEQ ID NO: 1147478 - RNA, 19 nt, Artificial Sequence
  Description of Artificial Sequence: Synthetic oligonucleotide
  Sense strand starting at position 373 of SEQ ID NO: 916321
ucaaucguaucuccagaaa

SEQ ID NO: 1147479 - RNA, 19 nt, Artificial Sequence
  Description of Artificial Sequence: Synthetic oligonucleotide
  Antisense strand to SEQ ID NO: 1147478
uuucuggagauacgauuga

SEQ ID NO: 1147480 - RNA, 19 nt, Artificial Sequence
  Description of Artificial Sequence: Synthetic oligonucleotide
  Sense strand starting at position 550 of SEQ ID NO: 916321
guggcuucccaugacauca

SEQ ID NO: 1147481 - RNA, 19 nt, Artificial Sequence
  Description of Artificial Sequence: Synthetic oligonucleotide
  Antisense strand to SEQ ID NO: 1147480
ugaugucaugggaagccac

SEQ ID NO: 1147482 - RNA, 19 nt, Artificial Sequence
  Description of Artificial Sequence: Synthetic oligonucleotide
  Sense strand starting at position 686 of SEQ ID NO: 916321
uuuccacaucuagauguuu

SEQ ID NO: 1147483 - RNA, 19 nt, Artificial Sequence
  Description of Artificial Sequence: Synthetic oligonucleotide
  Antisense strand to SEQ ID NO: 1147482
aaacaucuagauguggaaa

SEQ ID NO: 1147484 - RNA, 19 nt, Artificial Sequence
  Description of Artificial Sequence: Synthetic oligonucleotide
  Sense strand starting at position 816 of SEQ ID NO: 916321
agaugugacucagucaaag

SEQ ID NO: 1147485 - RNA, 19 nt, Artificial Sequence
  Description of Artificial Sequence: Synthetic oligonucleotide
  Antisense strand to SEQ ID NO: 1147484
cuuugacugagucacaucu

SEQ ID NO: 1147486 - RNA, 19 nt, Artificial Sequence
  Description of Artificial Sequence: Synthetic oligonucleotide
  Sense strand starting at position 1140 of SEQ ID NO: 916321
cacucaucugcagguggaa

SEQ ID NO: 1147487 - RNA, 19 nt, Artificial Sequence
  Description of Artificial Sequence: Synthetic oligonucleotide
  Antisense strand to SEQ ID NO: 1147486
uuccaccugcagaugagug

SEQ ID NO: 1147488 - RNA, 19 nt, Artificial Sequence
  Description of Artificial Sequence: Synthetic oligonucleotide
  Sense strand starting at position 1351 of SEQ ID NO: 916321
gggucuggacauugagcaa

SEQ ID NO: 1147489 - RNA, 19 nt, Artificial Sequence
  Description of Artificial Sequence: Synthetic oligonucleotide
  Antisense strand to SEQ ID NO: 1147488
uugcucaauguccagaccc

SEQ ID NO: 1147490 - RNA, 19 nt, Artificial Sequence
  Description of Artificial Sequence: Synthetic oligonucleotide
  Sense strand starting at position 1354 of SEQ ID NO: 916321
ucuggacauugagcaaaua

SEQ ID NO: 1147491 - RNA, 19 nt, Artificial Sequence
  Description of Artificial Sequence: Synthetic oligonucleotide
  Antisense strand to SEQ ID NO: 1147490
uauuugcucaauguccaga

SEQ ID NO: 1147492 - RNA, 19 nt, Artificial Sequence
  Description of Artificial Sequence: Synthetic oligonucleotide
  Sense strand starting at position 1450 of SEQ ID NO: 916321
agaugugugcaugaguuua

SEQ ID NO: 1147493 - RNA, 19 nt, Artificial Sequence
  Description of Artificial Sequence: Synthetic oligonucleotide
  Antisense strand to SEQ ID NO: 1147492
uaaacucaugcacacaucu

SEQ ID NO: 1147494 - RNA, 19 nt, Artificial Sequence
  Description of Artificial Sequence: Synthetic oligonucleotide
  Sense strand starting at position 1455 of SEQ ID NO: 916321
ugugcaugaguuuagaaca

SEQ ID NO: 1147495 - RNA, 19 nt, Artificial Sequence
  Description of Artificial Sequence: Synthetic oligonucleotide
  Antisense strand to SEQ ID NO: 1147494
uguucuaaacucaugcaca

SEQ ID NO: 1147496 - RNA, 19 nt, Artificial Sequence
  Description of Artificial Sequence: Synthetic oligonucleotide
  Sense strand starting at position 1743 of SEQ ID NO: 916321
gcaggauugagauguauac

SEQ ID NO: 1147497 - RNA, 19 nt, Artificial Sequence
  Description of Artificial Sequence: Synthetic oligonucleotide
  Antisense strand to SEQ ID NO: 1147496
guauacaucucaauccugc

SEQ ID NO: 1147498 - RNA, 19 nt, Artificial Sequence
  Description of Artificial Sequence: Synthetic oligonucleotide
  Sense strand starting at position 1750 of SEQ ID NO: 916321
ugagauguauaccuccuua

SEQ ID NO: 1147499 - RNA, 19 nt, Artificial Sequence
  Description of Artificial Sequence: Synthetic oligonucleotide
  Antisense strand to SEQ ID NO: 1147498
uaaggagguauacaucuca

SEQ ID NO: 1147500 - RNA, 19 nt, Artificial Sequence
  Description of Artificial Sequence: Synthetic oligonucleotide
  Sense strand starting at position 1806 of SEQ ID NO: 916321
ggaaguuggacuugucaag

SEQ ID NO: 1147501 - RNA, 19 nt, Artificial Sequence
  Description of Artificial Sequence: Synthetic oligonucleotide
  Antisense strand to SEQ ID NO: 1147500
cuugacaaguccaacuucc

SEQ ID NO: 1147502 - RNA, 19 nt, Artificial Sequence
  Description of Artificial Sequence: Synthetic oligonucleotide
  Sense strand starting at position 2088 of SEQ ID NO: 916321
ugaagauucugcuugugac

SEQ ID NO: 1147503 - RNA, 19 nt, Artificial Sequence
  Description of Artificial Sequence: Synthetic oligonucleotide
  Antisense strand to SEQ ID NO: 1147502
gucacaagcagaaucuuca

SEQ ID NO: 1147504 - RNA, 19 nt, Artificial Sequence
  Description of Artificial Sequence: Synthetic oligonucleotide
  Sense strand starting at position 2197 of SEQ ID NO: 916321
ccaguacugucuucugaga

SEQ ID NO: 1147505 - RNA, 19 nt, Artificial Sequence
  Description of Artificial Sequence: Synthetic oligonucleotide
  Antisense strand to SEQ ID NO: 1147504
ucucagaagacaguacugg

SEQ ID NO: 1147506 - RNA, 19 nt, Artificial Sequence
  Description of Artificial Sequence: Synthetic oligonucleotide
  Sense strand starting at position 2205 of SEQ ID NO: 916321
gucuucugagaacgaccua

SEQ ID NO: 1147507 - RNA, 19 nt, Artificial Sequence
  Description of Artificial Sequence: Synthetic oligonucleotide
  Antisense strand to SEQ ID NO: 1147506
uaggucguucucagaagac

SEQ ID NO: 1147508 - RNA, 19 nt, Artificial Sequence
  Description of Artificial Sequence: Synthetic oligonucleotide
  Sense strand starting at position 2423 of SEQ ID NO: 916321
ccuauaguggcugaguaag

SEQ ID NO: 1147509 - RNA, 19 nt, Artificial Sequence
  Description of Artificial Sequence: Synthetic oligonucleotide
  Antisense strand to SEQ ID NO: 1147508
cuuacucagccacuauagg

SEQ ID NO: 1147510 - RNA, 19 nt, Artificial Sequence
  Description of Artificial Sequence: Synthetic oligonucleotide
  Sense strand starting at position 2482 of SEQ ID NO: 916321
uucuuaucucauuggaggu

SEQ ID NO: 1147511 - RNA, 19 nt, Artificial Sequence
  Description of Artificial Sequence: Synthetic oligonucleotide
  Antisense strand to SEQ ID NO: 1147510
accuccaaugagauaagaa

SEQ ID NO: 1147512 - RNA, 19 nt, Artificial Sequence
  Description of Artificial Sequence: Synthetic oligonucleotide
  Sense strand starting at position 2642 of SEQ ID NO: 916321
auaacugucuuggcuaauc

SEQ ID NO: 1147513 - RNA, 19 nt, Artificial Sequence
  Description of Artificial Sequence: Synthetic oligonucleotide
  Antisense strand to SEQ ID NO: 1147512
gauuagccaagacaguuau

SEQ ID NO: 1147514 - RNA, 19 nt, Artificial Sequence
  Description of Artificial Sequence: Synthetic oligonucleotide
  Sense strand starting at position 2652 of SEQ ID NO: 916321
uggcuaaucuaauuauugu

SEQ ID NO: 1147515 - RNA, 19 nt, Artificial Sequence
  Description of Artificial Sequence: Synthetic oligonucleotide
  Antisense strand to SEQ ID NO: 1147514
acaauaauuagauuagcca

SEQ ID NO: 1147516 - RNA, 19 nt, Artificial Sequence
  Description of Artificial Sequence: Synthetic oligonucleotide
  Sense strand starting at position 3067 of SEQ ID NO: 916321
agagguuccgcguuaccuu

SEQ ID NO: 1147517 - RNA, 19 nt, Artificial Sequence
  Description of Artificial Sequence: Synthetic oligonucleotide
  Antisense strand to SEQ ID NO: 1147516
aagguaacgcggaaccucu

SEQ ID NO: 1147518 - RNA, 19 nt, Artificial Sequence
  Description of Artificial Sequence: Synthetic oligonucleotide
  Sense strand starting at position 3120 of SEQ ID NO: 916321
gaaauucucccgcagagca

SEQ ID NO: 1147519 - RNA, 19 nt, Artificial Sequence
  Description of Artificial Sequence: Synthetic oligonucleotide
  Antisense strand to SEQ ID NO: 1147518
ugcucugcgggagaauuuc

SEQ ID NO: 1147520 - RNA, 19 nt, Artificial Sequence
  Description of Artificial Sequence: Synthetic oligonucleotide
  Sense strand starting at position 3188 of SEQ ID NO: 916321
gaaugugaauuagugcaaa

SEQ ID NO: 1147521 - RNA, 19 nt, Artificial Sequence
  Description of Artificial Sequence: Synthetic oligonucleotide
  Antisense strand to SEQ ID NO: 1147520
uuugcacuaauucacauuc

SEQ ID NO: 1147522 - RNA, 19 nt, Artificial Sequence
  Description of Artificial Sequence: Synthetic oligonucleotide
  Sense strand starting at position 3238 of SEQ ID NO: 916321
aguuaagaucaggaguguu

SEQ ID NO: 1147523 - RNA, 19 nt, Artificial Sequence
  Description of Artificial Sequence: Synthetic oligonucleotide
  Antisense strand to SEQ ID NO: 1147522
aacacuccugaucuuaacu

SEQ ID NO: 1147524 - RNA, 19 nt, Artificial Sequence
  Description of Artificial Sequence: Synthetic oligonucleotide
  Sense strand starting at position 3241 of SEQ ID NO: 916321
uaagaucaggaguguugaa

SEQ ID NO: 1147525 - RNA, 19 nt, Artificial Sequence
  Description of Artificial Sequence: Synthetic oligonucleotide
  Antisense strand to SEQ ID NO: 1147524
uucaacacuccugaucuua

SEQ ID NO: 1147526 - RNA, 19 nt, Artificial Sequence
  Description of Artificial Sequence: Synthetic oligonucleotide
  Sense strand starting at position 3253 of SEQ ID NO: 916321
uguugaagaacuggaagua

SEQ ID NO: 1147527 - RNA, 19 nt, Artificial Sequence
  Description of Artificial Sequence: Synthetic oligonucleotide
  Antisense strand to SEQ ID NO: 1147526
uacuuccaguucuucaaca

SEQ ID NO: 1147528 - RNA, 19 nt, Artificial Sequence
  Description of Artificial Sequence: Synthetic oligonucleotide
  Sense strand starting at position 3588 of SEQ ID NO: 916321
guugaagagcucuauuguc

SEQ ID NO: 1147529 - RNA, 19 nt, Artificial Sequence
  Description of Artificial Sequence: Synthetic oligonucleotide
  Antisense strand to SEQ ID NO: 1147528
gacaauagagcucuucaac

SEQ ID NO: 1147530 - RNA, 19 nt, Artificial Sequence
  Description of Artificial Sequence: Synthetic oligonucleotide
  Sense strand starting at position 3604 of SEQ ID NO: 916321
guccaucauggugaugaua

SEQ ID NO: 1147531 - RNA, 19 nt, Artificial Sequence
  Description of Artificial Sequence: Synthetic oligonucleotide
  Antisense strand to SEQ ID NO: 1147530
uaucaucaccaugauggac

SEQ ID NO: 1147532 - RNA, 19 nt, Artificial Sequence
  Description of Artificial Sequence: Synthetic oligonucleotide
  Sense strand starting at position 3607 of SEQ ID NO: 916321
caucauggugaugauaguu

SEQ ID NO: 1147533 - RNA, 19 nt, Artificial Sequence
  Description of Artificial Sequence: Synthetic oligonucleotide
  Antisense strand to SEQ ID NO: 1147532
aacuaucaucaccaugaug

SEQ ID NO: 1147534 - RNA, 19 nt, Artificial Sequence
  Description of Artificial Sequence: Synthetic oligonucleotide
  Sense strand starting at position 3658 of SEQ ID NO: 916321
aagagcauagauuguaaau

SEQ ID NO: 1147535 - RNA, 19 nt, Artificial Sequence
  Description of Artificial Sequence: Synthetic oligonucleotide
  Antisense strand to SEQ ID NO: 1147534
auuuacaaucuaugcucuu

SEQ ID NO: 1147536 - RNA, 19 nt, Artificial Sequence
  Description of Artificial Sequence: Synthetic oligonucleotide
  Sense strand starting at position 3669 of SEQ ID NO: 916321
uuguaaauguucucauuac

SEQ ID NO: 1147537 - RNA, 19 nt, Artificial Sequence
  Description of Artificial Sequence: Synthetic oligonucleotide
  Antisense strand to SEQ ID NO: 1147536
guaaugagaacauuuacaa

SEQ ID NO: 1147538 - RNA, 19 nt, Artificial Sequence
  Description of Artificial Sequence: Synthetic oligonucleotide
  Sense strand starting at position 3753 of SEQ ID NO: 916321
aaugcaugcguauaucaaa

SEQ ID NO: 1147539 - RNA, 19 nt, Artificial Sequence
  Description of Artificial Sequence: Synthetic oligonucleotide
  Antisense strand to SEQ ID NO: 1147538
uuugauauacgcaugcauu

SEQ ID NO: 1147540 - RNA, 19 nt, Artificial Sequence
  Description of Artificial Sequence: Synthetic oligonucleotide
  Sense strand starting at position 3887 of SEQ ID NO: 916321
uuugcaauaacgugaauga

SEQ ID NO: 1147541 - RNA, 19 nt, Artificial Sequence
  Description of Artificial Sequence: Synthetic oligonucleotide
  Antisense strand to SEQ ID NO: 1147540
ucauucacguuauugcaaa

SEQ ID NO: 1147542 - RNA, 19 nt, Artificial Sequence
  Description of Artificial Sequence: Synthetic oligonucleotide
  Sense strand starting at position 3888 of SEQ ID NO: 916321
uugcaauaacgugaaugaa

SEQ ID NO: 1147543 - RNA, 19 nt, Artificial Sequence
  Description of Artificial Sequence: Synthetic oligonucleotide
  Antisense strand to SEQ ID NO: 1147542
uucauucacguuauugcaa

SEQ ID NO: 1147544 - RNA, 19 nt, Artificial Sequence
  Description of Artificial Sequence: Synthetic oligonucleotide
  Sense strand starting at position 3897 of SEQ ID NO: 916321
cgugaaugaaccugaagga

SEQ ID NO: 1147545 - RNA, 19 nt, Artificial Sequence
  Description of Artificial Sequence: Synthetic oligonucleotide
  Antisense strand to SEQ ID NO: 1147544
uccuucagguucauucacg

SEQ ID NO: 1147546 - RNA, 19 nt, Artificial Sequence
  Description of Artificial Sequence: Synthetic oligonucleotide
  Sense strand starting at position 51 of SEQ ID NO: 916322
ccaauuguccuuugagagg

SEQ ID NO: 1147547 - RNA, 19 nt, Artificial Sequence
  Description of Artificial Sequence: Synthetic oligonucleotide
  Antisense strand to SEQ ID NO: 1147546
ccucucaaaggacaauugg

SEQ ID NO: 1147548 - RNA, 19 nt, Artificial Sequence
  Description of Artificial Sequence: Synthetic oligonucleotide
  Sense strand starting at position 56 of SEQ ID NO: 916322
uguccuuugagaggaaagu

SEQ ID NO: 1147549 - RNA, 19 nt, Artificial Sequence
  Description of Artificial Sequence: Synthetic oligonucleotide
  Antisense strand to SEQ ID NO: 1147548
acuuuccucucaaaggaca

SEQ ID NO: 1147550 - RNA, 19 nt, Artificial Sequence
  Description of Artificial Sequence: Synthetic oligonucleotide
  Sense strand starting at position 163 of SEQ ID NO: 916322
ggacucccgucuuugauca

SEQ ID NO: 1147551 - RNA, 19 nt, Artificial Sequence
  Description of Artificial Sequence: Synthetic oligonucleotide
  Antisense strand to SEQ ID NO: 1147550
ugaucaaagacgggagucc

SEQ ID NO: 1147552 - RNA, 19 nt, Artificial Sequence
  Description of Artificial Sequence: Synthetic oligonucleotide
  Sense strand starting at position 167 of SEQ ID NO: 916322
ucccgucuuugaucagaua

SEQ ID NO: 1147553 - RNA, 19 nt, Artificial Sequence
  Description of Artificial Sequence: Synthetic oligonucleotide
  Antisense strand to SEQ ID NO: 1147552
uaucugaucaaagacggga

SEQ ID NO: 1147554 - RNA, 19 nt, Artificial Sequence
  Description of Artificial Sequence: Synthetic oligonucleotide
  Sense strand starting at position 168 of SEQ ID NO: 916322
cccgucuuugaucagauau

SEQ ID NO: 1147555 - RNA, 19 nt, Artificial Sequence
  Description of Artificial Sequence: Synthetic oligonucleotide
  Antisense strand to SEQ ID NO: 1147554
auaucugaucaaagacggg

SEQ ID NO: 1147556 - RNA, 19 nt, Artificial Sequence
  Description of Artificial Sequence: Synthetic oligonucleotide
  Sense strand starting at position 183 of SEQ ID NO: 916322
auauacucuuggccaagaa

SEQ ID NO: 1147557 - RNA, 19 nt, Artificial Sequence
  Description of Artificial Sequence: Synthetic oligonucleotide
  Antisense strand to SEQ ID NO: 1147556
uucuuggccaagaguauau

SEQ ID NO: 1147558 - RNA, 19 nt, Artificial Sequence
  Description of Artificial Sequence: Synthetic oligonucleotide
  Sense strand starting at position 230 of SEQ ID NO: 916322
gcaagugacccuuagguau

SEQ ID NO: 1147559 - RNA, 19 nt, Artificial Sequence
  Description of Artificial Sequence: Synthetic oligonucleotide
  Antisense strand to SEQ ID NO: 1147558
auaccuaagggucacuugc

SEQ ID NO: 1147560 - RNA, 19 nt, Artificial Sequence
  Description of Artificial Sequence: Synthetic oligonucleotide
  Sense strand starting at position 282 of SEQ ID NO: 916322
cuugcucagccauauagga

SEQ ID NO: 1147561 - RNA, 19 nt, Artificial Sequence
  Description of Artificial Sequence: Synthetic oligonucleotide
  Antisense strand to SEQ ID NO: 1147560
uccuauauggcugagcaag

SEQ ID NO: 1147562 - RNA, 19 nt, Artificial Sequence
  Description of Artificial Sequence: Synthetic oligonucleotide
  Sense strand starting at position 297 of SEQ ID NO: 916322
aggaauuaauacuaaagag

SEQ ID NO: 1147563 - RNA, 19 nt, Artificial Sequence
  Description of Artificial Sequence: Synthetic oligonucleotide
  Antisense strand to SEQ ID NO: 1147562
cucuuuaguauuaauuccu

SEQ ID NO: 1147564 - RNA, 19 nt, Artificial Sequence
  Description of Artificial Sequence: Synthetic oligonucleotide
  Sense strand starting at position 314 of SEQ ID NO: 916322
agaucccaguuauucuaua

SEQ ID NO: 1147565 - RNA, 19 nt, Artificial Sequence
  Description of Artificial Sequence: Synthetic oligonucleotide
  Antisense strand to SEQ ID NO: 1147564
uauagaauaacugggaucu

SEQ ID NO: 1147566 - RNA, 19 nt, Artificial Sequence
  Description of Artificial Sequence: Synthetic oligonucleotide
  Sense strand starting at position 1241 of SEQ ID NO: 916322
acugaagacucacccaguu

SEQ ID NO: 1147567 - RNA, 19 nt, Artificial Sequence
  Description of Artificial Sequence: Synthetic oligonucleotide
  Antisense strand to SEQ ID NO: 1147566
aacugggugagucuucagu

SEQ ID NO: 1147568 - RNA, 19 nt, Artificial Sequence
  Description of Artificial Sequence: Synthetic oligonucleotide
  Sense strand starting at position 1445 of SEQ ID NO: 916322
cucuuagauccuggaauga

SEQ ID NO: 1147569 - RNA, 19 nt, Artificial Sequence
  Description of Artificial Sequence: Synthetic oligonucleotide
  Antisense strand to SEQ ID NO: 1147568
ucauuccaggaucuaagag

SEQ ID NO: 1147570 - RNA, 19 nt, Artificial Sequence
  Description of Artificial Sequence: Synthetic oligonucleotide
  Sense strand starting at position 1489 of SEQ ID NO: 916322
guaagauaguacuucugaa

SEQ ID NO: 1147571 - RNA, 19 nt, Artificial Sequence
  Description of Artificial Sequence: Synthetic oligonucleotide
  Antisense strand to SEQ ID NO: 1147570
uucagaaguacuaucuuac

SEQ ID NO: 1147572 - RNA, 19 nt, Artificial Sequence
  Description of Artificial Sequence: Synthetic oligonucleotide
  Sense strand starting at position 2051 of SEQ ID NO: 916322
ccuuuauaccagcagguga

SEQ ID NO: 1147573 - RNA, 19 nt, Artificial Sequence
  Description of Artificial Sequence: Synthetic oligonucleotide
  Antisense strand to SEQ ID NO: 1147572
ucaccugcugguauaaagg

SEQ ID NO: 1147574 - RNA, 19 nt, Artificial Sequence
  Description of Artificial Sequence: Synthetic oligonucleotide
  Sense strand starting at position 2185 of SEQ ID NO: 916322
augggacacauguguaaug

SEQ ID NO: 1147575 - RNA, 19 nt, Artificial Sequence
  Description of Artificial Sequence: Synthetic oligonucleotide
  Antisense strand to SEQ ID NO: 1147574
cauuacacaugugucccau

SEQ ID NO: 1147576 - RNA, 19 nt, Artificial Sequence
  Description of Artificial Sequence: Synthetic oligonucleotide
  Sense strand starting at position 2196 of SEQ ID NO: 916322
guguaaugcucuccaggaa

SEQ ID NO: 1147577 - RNA, 19 nt, Artificial Sequence
  Description of Artificial Sequence: Synthetic oligonucleotide
  Antisense strand to SEQ ID NO: 1147576
uuccuggagagcauuacac

SEQ ID NO: 1147578 - RNA, 19 nt, Artificial Sequence
  Description of Artificial Sequence: Synthetic oligonucleotide
  Sense strand starting at position 2197 of SEQ ID NO: 916322
uguaaugcucuccaggaau

SEQ ID NO: 1147579 - RNA, 19 nt, Artificial Sequence
  Description of Artificial Sequence: Synthetic oligonucleotide
  Antisense strand to SEQ ID NO: 1147578
auuccuggagagcauuaca

SEQ ID NO: 1147580 - RNA, 19 nt, Artificial Sequence
  Description of Artificial Sequence: Synthetic oligonucleotide
  Sense strand starting at position 2321 of SEQ ID NO: 916322
guuugaucuuucccugauc

SEQ ID NO: 1147581 - RNA, 19 nt, Artificial Sequence
  Description of Artificial Sequence: Synthetic oligonucleotide
  Antisense strand to SEQ ID NO: 1147580
gaucagggaaagaucaaac

SEQ ID NO: 1147582 - RNA, 19 nt, Artificial Sequence
  Description of Artificial Sequence: Synthetic oligonucleotide
  Sense strand starting at position 2392 of SEQ ID NO: 916322
cuuccuccugcuugaggaa

SEQ ID NO: 1147583 - RNA, 19 nt, Artificial Sequence
  Description of Artificial Sequence: Synthetic oligonucleotide
  Antisense strand to SEQ ID NO: 1147582
uuccucaagcaggaggaag

SEQ ID NO: 1147584 - RNA, 19 nt, Artificial Sequence
  Description of Artificial Sequence: Synthetic oligonucleotide
  Sense strand starting at position 2571 of SEQ ID NO: 916322
agagaaugcgcaugaagga

SEQ ID NO: 1147585 - RNA, 19 nt, Artificial Sequence
  Description of Artificial Sequence: Synthetic oligonucleotide
  Antisense strand to SEQ ID NO: 1147584
uccuucaugcgcauucucu

SEQ ID NO: 1147586 - RNA, 19 nt, Artificial Sequence
  Description of Artificial Sequence: Synthetic oligonucleotide
  Sense strand starting at position 2710 of SEQ ID NO: 916322
acccuaguggcccaagauu

SEQ ID NO: 1147587 - RNA, 19 nt, Artificial Sequence
  Description of Artificial Sequence: Synthetic oligonucleotide
  Antisense strand to SEQ ID NO: 1147586
aaucuugggccacuagggu

SEQ ID NO: 1147588 - RNA, 19 nt, Artificial Sequence
  Description of Artificial Sequence: Synthetic oligonucleotide
  Sense strand starting at position 2736 of SEQ ID NO: 916322
cucuauaagaguuggauga

SEQ ID NO: 1147589 - RNA, 19 nt, Artificial Sequence
  Description of Artificial Sequence: Synthetic oligonucleotide
  Antisense strand to SEQ ID NO: 1147588
ucauccaacucuuauagag

SEQ ID NO: 1147590 - RNA, 19 nt, Artificial Sequence
  Description of Artificial Sequence: Synthetic oligonucleotide
  Sense strand starting at position 2737 of SEQ ID NO: 916322
ucuauaagaguuggaugau

SEQ ID NO: 1147591 - RNA, 19 nt, Artificial Sequence
  Description of Artificial Sequence: Synthetic oligonucleotide
  Antisense strand to SEQ ID NO: 1147590
aucauccaacucuuauaga

SEQ ID NO: 1147592 - RNA, 19 nt, Artificial Sequence
  Description of Artificial Sequence: Synthetic oligonucleotide
  Sense strand starting at position 2740 of SEQ ID NO: 916322
auaagaguuggaugauguu

SEQ ID NO: 1147593 - RNA, 19 nt, Artificial Sequence
  Description of Artificial Sequence: Synthetic oligonucleotide
  Antisense strand to SEQ ID NO: 1147592
aacaucauccaacucuuau

SEQ ID NO: 1147594 - RNA, 19 nt, Artificial Sequence
  Description of Artificial Sequence: Synthetic oligonucleotide
  Sense strand starting at position 2774 of SEQ ID NO: 916322
gcaaauaaggccuggaagu

SEQ ID NO: 1147595 - RNA, 19 nt, Artificial Sequence
  Description of Artificial Sequence: Synthetic oligonucleotide
  Antisense strand to SEQ ID NO: 1147594
acuuccaggccuuauuugc

SEQ ID NO: 1147596 - RNA, 19 nt, Artificial Sequence
  Description of Artificial Sequence: Synthetic oligonucleotide
  Sense strand starting at position 2775 of SEQ ID NO: 916322
caaauaaggccuggaaguu

SEQ ID NO: 1147597 - RNA, 19 nt, Artificial Sequence
  Description of Artificial Sequence: Synthetic oligonucleotide
  Antisense strand to SEQ ID NO: 1147596
aacuuccaggccuuauuug

SEQ ID NO: 1147598 - RNA, 19 nt, Artificial Sequence
  Description of Artificial Sequence: Synthetic oligonucleotide
  Sense strand starting at position 2828 of SEQ ID NO: 916322
ucauucugacgucauccaa

SEQ ID NO: 1147599 - RNA, 19 nt, Artificial Sequence
  Description of Artificial Sequence: Synthetic oligonucleotide
  Antisense strand to SEQ ID NO: 1147598
uuggaugacgucagaauga

SEQ ID NO: 1147600 - RNA, 19 nt, Artificial Sequence
  Description of Artificial Sequence: Synthetic oligonucleotide
  Sense strand starting at position 2840 of SEQ ID NO: 916322
cauccaaauuguucuggga

SEQ ID NO: 1147601 - RNA, 19 nt, Artificial Sequence
  Description of Artificial Sequence: Synthetic oligonucleotide
  Antisense strand to SEQ ID NO: 1147600
ucccagaacaauuuggaug

SEQ ID NO: 1147602 - RNA, 19 nt, Artificial Sequence
  Description of Artificial Sequence: Synthetic oligonucleotide
  Sense strand starting at position 2911 of SEQ ID NO: 916322
ccaggaguucuggguaguc

SEQ ID NO: 1147603 - RNA, 19 nt, Artificial Sequence
  Description of Artificial Sequence: Synthetic oligonucleotide
  Antisense strand to SEQ ID NO: 1147602
gacuacccagaacuccugg

SEQ ID NO: 1147604 - RNA, 19 nt, Artificial Sequence
  Description of Artificial Sequence: Synthetic oligonucleotide
  Sense strand starting at position 2913 of SEQ ID NO: 916322
aggaguucuggguagucga

SEQ ID NO: 1147605 - RNA, 19 nt, Artificial Sequence
  Description of Artificial Sequence: Synthetic oligonucleotide
  Antisense strand to SEQ ID NO: 1147604
ucgacuacccagaacuccu

SEQ ID NO: 1147606 - RNA, 19 nt, Artificial Sequence
  Description of Artificial Sequence: Synthetic oligonucleotide
  Sense strand starting at position 3018 of SEQ ID NO: 916322
ugaugcaacaucgagugaa

SEQ ID NO: 1147607 - RNA, 19 nt, Artificial Sequence
  Description of Artificial Sequence: Synthetic oligonucleotide
  Antisense strand to SEQ ID NO: 1147606
uucacucgauguugcauca

SEQ ID NO: 1147608 - RNA, 19 nt, Artificial Sequence
  Description of Artificial Sequence: Synthetic oligonucleotide
  Sense strand starting at position 3021 of SEQ ID NO: 916322
ugcaacaucgagugaaaca

SEQ ID NO: 1147609 - RNA, 19 nt, Artificial Sequence
  Description of Artificial Sequence: Synthetic oligonucleotide
  Antisense strand to SEQ ID NO: 1147608
uguuucacucgauguugca

SEQ ID NO: 1147610 - RNA, 19 nt, Artificial Sequence
  Description of Artificial Sequence: Synthetic oligonucleotide
  Sense strand starting at position 3124 of SEQ ID NO: 916322
uuucgaagacgucagaaug

SEQ ID NO: 1147611 - RNA, 19 nt, Artificial Sequence
  Description of Artificial Sequence: Synthetic oligonucleotide
  Antisense strand to SEQ ID NO: 1147610
cauucugacgucuucgaaa

SEQ ID NO: 1147612 - RNA, 19 nt, Artificial Sequence
  Description of Artificial Sequence: Synthetic oligonucleotide
  Sense strand starting at position 3206 of SEQ ID NO: 916322
ugagaaacuuguccugaau

SEQ ID NO: 1147613 - RNA, 19 nt, Artificial Sequence
  Description of Artificial Sequence: Synthetic oligonucleotide
  Antisense strand to SEQ ID NO: 1147612
auucaggacaaguuucuca

SEQ ID NO: 1147614 - RNA, 19 nt, Artificial Sequence
  Description of Artificial Sequence: Synthetic oligonucleotide
  Sense strand starting at position 3283 of SEQ ID NO: 916322
uauuaugauucuguaggua

SEQ ID NO: 1147615 - RNA, 19 nt, Artificial Sequence
  Description of Artificial Sequence: Synthetic oligonucleotide
  Antisense strand to SEQ ID NO: 1147614
uaccuacagaaucauaaua

SEQ ID NO: 1147616 - RNA, 19 nt, Artificial Sequence
  Description of Artificial Sequence: Synthetic oligonucleotide
  Sense strand starting at position 3286 of SEQ ID NO: 916322
uaugauucuguagguauga

SEQ ID NO: 1147617 - RNA, 19 nt, Artificial Sequence
  Description of Artificial Sequence: Synthetic oligonucleotide
  Antisense strand to SEQ ID NO: 1147616
ucauaccuacagaaucaua

SEQ ID NO: 1147618 - RNA, 19 nt, Artificial Sequence
  Description of Artificial Sequence: Synthetic oligonucleotide
  Sense strand starting at position 3295 of SEQ ID NO: 916322
guagguaugagcuaagaga

SEQ ID NO: 1147619 - RNA, 19 nt, Artificial Sequence
  Description of Artificial Sequence: Synthetic oligonucleotide
  Antisense strand to SEQ ID NO: 1147618
ucucuuagcucauaccuac

SEQ ID NO: 1147620 - RNA, 19 nt, Artificial Sequence
  Description of Artificial Sequence: Synthetic oligonucleotide
  Sense strand starting at position 3686 of SEQ ID NO: 916322
aucagagaauuaucugagu

SEQ ID NO: 1147621 - RNA, 19 nt, Artificial Sequence
  Description of Artificial Sequence: Synthetic oligonucleotide
  Antisense strand to SEQ ID NO: 1147620
acucagauaauucucugau

SEQ ID NO: 1147622 - RNA, 19 nt, Artificial Sequence
  Description of Artificial Sequence: Synthetic oligonucleotide
  Sense strand starting at position 3697 of SEQ ID NO: 916322
aucugaguuugggugagaa

SEQ ID NO: 1147623 - RNA, 19 nt, Artificial Sequence
  Description of Artificial Sequence: Synthetic oligonucleotide
  Antisense strand to SEQ ID NO: 1147622
uucucacccaaacucagau

SEQ ID NO: 1147624 - RNA, 19 nt, Artificial Sequence
  Description of Artificial Sequence: Synthetic oligonucleotide
  Sense strand starting at position 3699 of SEQ ID NO: 916322
cugaguuugggugagaacu

SEQ ID NO: 1147625 - RNA, 19 nt, Artificial Sequence
  Description of Artificial Sequence: Synthetic oligonucleotide
  Antisense strand to SEQ ID NO: 1147624
aguucucacccaaacucag

SEQ ID NO: 1147626 - RNA, 19 nt, Artificial Sequence
  Description of Artificial Sequence: Synthetic oligonucleotide
  Sense strand starting at position 288 of SEQ ID NO: 916323
ccaugaugcccaggaugaa

SEQ ID NO: 1147627 - RNA, 19 nt, Artificial Sequence
  Description of Artificial Sequence: Synthetic oligonucleotide
  Antisense strand to SEQ ID NO: 1147626
uucauccugggcaucaugg

SEQ ID NO: 1147628 - RNA, 19 nt, Artificial Sequence
  Description of Artificial Sequence: Synthetic oligonucleotide
  Sense strand starting at position 325 of SEQ ID NO: 916323
cuucccaaggauugcaaua

SEQ ID NO: 1147629 - RNA, 19 nt, Artificial Sequence
  Description of Artificial Sequence: Synthetic oligonucleotide
  Antisense strand to SEQ ID NO: 1147628
uauugcaauccuugggaag

SEQ ID NO: 1147630 - RNA, 19 nt, Artificial Sequence
  Description of Artificial Sequence: Synthetic oligonucleotide
  Sense strand starting at position 330 of SEQ ID NO: 916323
caaggauugcaauaaggcu

SEQ ID NO: 1147631 - RNA, 19 nt, Artificial Sequence
  Description of Artificial Sequence: Synthetic oligonucleotide
  Antisense strand to SEQ ID NO: 1147630
agccuuauugcaauccuug

SEQ ID NO: 1147632 - RNA, 19 nt, Artificial Sequence
  Description of Artificial Sequence: Synthetic oligonucleotide
  Sense strand starting at position 455 of SEQ ID NO: 916323
aggcaacucgacuaacauu

SEQ ID NO: 1147633 - RNA, 19 nt, Artificial Sequence
  Description of Artificial Sequence: Synthetic oligonucleotide
  Antisense strand to SEQ ID NO: 1147632
aauguuagucgaguugccu

SEQ ID NO: 1147634 - RNA, 19 nt, Artificial Sequence
  Description of Artificial Sequence: Synthetic oligonucleotide
  Sense strand starting at position 576 of SEQ ID NO: 916323
auagaaaugugaucacuuu

SEQ ID NO: 1147635 - RNA, 19 nt, Artificial Sequence
  Description of Artificial Sequence: Synthetic oligonucleotide
  Antisense strand to SEQ ID NO: 1147634
aaagugaucacauuucuau

SEQ ID NO: 1147636 - RNA, 19 nt, Artificial Sequence
  Description of Artificial Sequence: Synthetic oligonucleotide
  Sense strand starting at position 1015 of SEQ ID NO: 916323
caaaguugguacucaagaa

SEQ ID NO: 1147637 - RNA, 19 nt, Artificial Sequence
  Description of Artificial Sequence: Synthetic oligonucleotide
  Antisense strand to SEQ ID NO: 1147636
uucuugaguaccaacuuug

SEQ ID NO: 1147638 - RNA, 19 nt, Artificial Sequence
  Description of Artificial Sequence: Synthetic oligonucleotide
  Sense strand starting at position 1143 of SEQ ID NO: 916323
augagccauucuuuaagaa

SEQ ID NO: 1147639 - RNA, 19 nt, Artificial Sequence
  Description of Artificial Sequence: Synthetic oligonucleotide
  Antisense strand to SEQ ID NO: 1147638
uucuuaaagaauggcucau

SEQ ID NO: 1147640 - RNA, 19 nt, Artificial Sequence
  Description of Artificial Sequence: Synthetic oligonucleotide
  Sense strand starting at position 1180 of SEQ ID NO: 916323
cugaguaauguacaguuau

SEQ ID NO: 1147641 - RNA, 19 nt, Artificial Sequence
  Description of Artificial Sequence: Synthetic oligonucleotide
  Antisense strand to SEQ ID NO: 1147640
auaacuguacauuacucag

SEQ ID NO: 1147642 - RNA, 19 nt, Artificial Sequence
  Description of Artificial Sequence: Synthetic oligonucleotide
  Sense strand starting at position 1202 of SEQ ID NO: 916323
augcuauuucccuggugau

SEQ ID NO: 1147643 - RNA, 19 nt, Artificial Sequence
  Description of Artificial Sequence: Synthetic oligonucleotide
  Antisense strand to SEQ ID NO: 1147642
aucaccagggaaauagcau

SEQ ID NO: 1147644 - RNA, 19 nt, Artificial Sequence
  Description of Artificial Sequence: Synthetic oligonucleotide
  Sense strand starting at position 1203 of SEQ ID NO: 916323
ugcuauuucccuggugaug

SEQ ID NO: 1147645 - RNA, 19 nt, Artificial Sequence
  Description of Artificial Sequence: Synthetic oligonucleotide
  Antisense strand to SEQ ID NO: 1147644
caucaccagggaaauagca

SEQ ID NO: 1147646 - RNA, 19 nt, Artificial Sequence
  Description of Artificial Sequence: Synthetic oligonucleotide
  Sense strand starting at position 1277 of SEQ ID NO: 916323
uggugugagacagauucuu

SEQ ID NO: 1147647 - RNA, 19 nt, Artificial Sequence
  Description of Artificial Sequence: Synthetic oligonucleotide
  Antisense strand to SEQ ID NO: 1147646
aagaaucugucucacacca

SEQ ID NO: 1147648 - RNA, 19 nt, Artificial Sequence
  Description of Artificial Sequence: Synthetic oligonucleotide
  Sense strand starting at position 1323 of SEQ ID NO: 916323
ggaucaaaugcacaguauu

SEQ ID NO: 1147649 - RNA, 19 nt, Artificial Sequence
  Description of Artificial Sequence: Synthetic oligonucleotide
  Antisense strand to SEQ ID NO: 1147648
aauacugugcauuugaucc

SEQ ID NO: 1147650 - RNA, 19 nt, Artificial Sequence
  Description of Artificial Sequence: Synthetic oligonucleotide
  Sense strand starting at position 1336 of SEQ ID NO: 916323
aguauuuguuguguauacu

SEQ ID NO: 1147651 - RNA, 19 nt, Artificial Sequence
  Description of Artificial Sequence: Synthetic oligonucleotide
  Antisense strand to SEQ ID NO: 1147650
aguauacacaacaaauacu

SEQ ID NO: 1147652 - RNA, 19 nt, Artificial Sequence
  Description of Artificial Sequence: Synthetic oligonucleotide
  Sense strand starting at position 1337 of SEQ ID NO: 916323
guauuuguuguguauacuu

SEQ ID NO: 1147653 - RNA, 19 nt, Artificial Sequence
  Description of Artificial Sequence: Synthetic oligonucleotide
  Antisense strand to SEQ ID NO: 1147652
aaguauacacaacaaauac

SEQ ID NO: 1147654 - RNA, 19 nt, Artificial Sequence
  Description of Artificial Sequence: Synthetic oligonucleotide
  Sense strand starting at position 1363 of SEQ ID NO: 916323
ggcucaauuucugccuaag

SEQ ID NO: 1147655 - RNA, 19 nt, Artificial Sequence
  Description of Artificial Sequence: Synthetic oligonucleotide
  Antisense strand to SEQ ID NO: 1147654
cuuaggcagaaauugagcc

SEQ ID NO: 1147656 - RNA, 19 nt, Artificial Sequence
  Description of Artificial Sequence: Synthetic oligonucleotide
  Sense strand starting at position 1372 of SEQ ID NO: 916323
ucugccuaaggcuaugaaa

SEQ ID NO: 1147657 - RNA, 19 nt, Artificial Sequence
  Description of Artificial Sequence: Synthetic oligonucleotide
  Antisense strand to SEQ ID NO: 1147656
uuucauagccuuaggcaga

SEQ ID NO: 1147658 - RNA, 19 nt, Artificial Sequence
  Description of Artificial Sequence: Synthetic oligonucleotide
  Sense strand starting at position 1465 of SEQ ID NO: 916323
gaagcuguucuugaaauug

SEQ ID NO: 1147659 - RNA, 19 nt, Artificial Sequence
  Description of Artificial Sequence: Synthetic oligonucleotide
  Antisense strand to SEQ ID NO: 1147658
caauuucaagaacagcuuc

SEQ ID NO: 1147660 - RNA, 19 nt, Artificial Sequence
  Description of Artificial Sequence: Synthetic oligonucleotide
  Sense strand starting at position 1733 of SEQ ID NO: 916323
aguuguauccaagauugua

SEQ ID NO: 1147661 - RNA, 19 nt, Artificial Sequence
  Description of Artificial Sequence: Synthetic oligonucleotide
  Antisense strand to SEQ ID NO: 1147660
uacaaucuuggauacaacu

SEQ ID NO: 1147662 - RNA, 19 nt, Artificial Sequence
  Description of Artificial Sequence: Synthetic oligonucleotide
  Sense strand starting at position 1749 of SEQ ID NO: 916323
guaaauguccuugagguca

SEQ ID NO: 1147663 - RNA, 19 nt, Artificial Sequence
  Description of Artificial Sequence: Synthetic oligonucleotide
  Antisense strand to SEQ ID NO: 1147662
ugaccucaaggacauuuac

SEQ ID NO: 1147664 - RNA, 19 nt, Artificial Sequence
  Description of Artificial Sequence: Synthetic oligonucleotide
  Sense strand starting at position 1782 of SEQ ID NO: 916323
gccuaauacuuacuggaau

SEQ ID NO: 1147665 - RNA, 19 nt, Artificial Sequence
  Description of Artificial Sequence: Synthetic oligonucleotide
  Antisense strand to SEQ ID NO: 1147664
auuccaguaaguauuaggc

SEQ ID NO: 1147666 - RNA, 19 nt, Artificial Sequence
  Description of Artificial Sequence: Synthetic oligonucleotide
  Sense strand starting at position 1817 of SEQ ID NO: 916323
gcugcuuugauauagagag

SEQ ID NO: 1147667 - RNA, 19 nt, Artificial Sequence
  Description of Artificial Sequence: Synthetic oligonucleotide
  Antisense strand to SEQ ID NO: 1147666
cucucuauaucaaagcagc

SEQ ID NO: 1147668 - RNA, 19 nt, Artificial Sequence
  Description of Artificial Sequence: Synthetic oligonucleotide
  Sense strand starting at position 2014 of SEQ ID NO: 916323
acuaaugccgguuagauga

SEQ ID NO: 1147669 - RNA, 19 nt, Artificial Sequence
  Description of Artificial Sequence: Synthetic oligonucleotide
  Antisense strand to SEQ ID NO: 1147668
ucaucuaaccggcauuagu

SEQ ID NO: 1147670 - RNA, 19 nt, Artificial Sequence
  Description of Artificial Sequence: Synthetic oligonucleotide
  Sense strand starting at position 2034 of SEQ ID NO: 916323
aggauaaccuacuuaaugu

SEQ ID NO: 1147671 - RNA, 19 nt, Artificial Sequence
  Description of Artificial Sequence: Synthetic oligonucleotide
  Antisense strand to SEQ ID NO: 1147670
acauuaaguagguuauccu

SEQ ID NO: 1147672 - RNA, 19 nt, Artificial Sequence
  Description of Artificial Sequence: Synthetic oligonucleotide
  Sense strand starting at position 2079 of SEQ ID NO: 916323
ggugcugugaaagauaauu

SEQ ID NO: 1147673 - RNA, 19 nt, Artificial Sequence
  Description of Artificial Sequence: Synthetic oligonucleotide
  Antisense strand to SEQ ID NO: 1147672
aauuaucuuucacagcacc

SEQ ID NO: 1147674 - RNA, 19 nt, Artificial Sequence
  Description of Artificial Sequence: Synthetic oligonucleotide
  Sense strand starting at position 2421 of SEQ ID NO: 916323
aggaaaucugcucacgauu

SEQ ID NO: 1147675 - RNA, 19 nt, Artificial Sequence
  Description of Artificial Sequence: Synthetic oligonucleotide
  Antisense strand to SEQ ID NO: 1147674
aaucgugagcagauuuccu

SEQ ID NO: 1147676 - RNA, 19 nt, Artificial Sequence
  Description of Artificial Sequence: Synthetic oligonucleotide
  Sense strand starting at position 2561 of SEQ ID NO: 916323
ucaagauauguuuggaacu

SEQ ID NO: 1147677 - RNA, 19 nt, Artificial Sequence
  Description of Artificial Sequence: Synthetic oligonucleotide
  Antisense strand to SEQ ID NO: 1147676
aguuccaaacauaucuuga

SEQ ID NO: 1147678 - RNA, 19 nt, Artificial Sequence
  Description of Artificial Sequence: Synthetic oligonucleotide
  Sense strand starting at position 2676 of SEQ ID NO: 916323
agugcaaauuccuugaaga

SEQ ID NO: 1147679 - RNA, 19 nt, Artificial Sequence
  Description of Artificial Sequence: Synthetic oligonucleotide
  Antisense strand to SEQ ID NO: 1147678
ucuucaaggaauuugcacu

SEQ ID NO: 1147680 - RNA, 19 nt, Artificial Sequence
  Description of Artificial Sequence: Synthetic oligonucleotide
  Sense strand starting at position 2927 of SEQ ID NO: 916323
ccucauuucugucccaguu

SEQ ID NO: 1147681 - RNA, 19 nt, Artificial Sequence
  Description of Artificial Sequence: Synthetic oligonucleotide
  Antisense strand to SEQ ID NO: 1147680
aacugggacagaaaugagg

SEQ ID NO: 1147682 - RNA, 19 nt, Artificial Sequence
  Description of Artificial Sequence: Synthetic oligonucleotide
  Sense strand starting at position 3066 of SEQ ID NO: 916323
auguguaucagggauaagu

SEQ ID NO: 1147683 - RNA, 19 nt, Artificial Sequence
  Description of Artificial Sequence: Synthetic oligonucleotide
  Antisense strand to SEQ ID NO: 1147682
acuuaucccugauacacau

SEQ ID NO: 1147684 - RNA, 19 nt, Artificial Sequence
  Description of Artificial Sequence: Synthetic oligonucleotide
  Sense strand starting at position 3068 of SEQ ID NO: 916323
guguaucagggauaaguca

SEQ ID NO: 1147685 - RNA, 19 nt, Artificial Sequence
  Description of Artificial Sequence: Synthetic oligonucleotide
  Antisense strand to SEQ ID NO: 1147684
ugacuuaucccugauacac

SEQ ID NO: 1147686 - RNA, 19 nt, Artificial Sequence
  Description of Artificial Sequence: Synthetic oligonucleotide
  Sense strand starting at position 3090 of SEQ ID NO: 916323
cuagaaaucugguugugag

SEQ ID NO: 1147687 - RNA, 19 nt, Artificial Sequence
  Description of Artificial Sequence: Synthetic oligonucleotide
  Antisense strand to SEQ ID NO: 1147686
cucacaaccagauuucuag

SEQ ID NO: 1147688 - RNA, 19 nt, Artificial Sequence
  Description of Artificial Sequence: Synthetic oligonucleotide
  Sense strand starting at position 3098 of SEQ ID NO: 916323
cugguugugaguuaagaga

SEQ ID NO: 1147689 - RNA, 19 nt, Artificial Sequence
  Description of Artificial Sequence: Synthetic oligonucleotide
  Antisense strand to SEQ ID NO: 1147688
ucucuuaacucacaaccag

SEQ ID NO: 1147690 - RNA, 19 nt, Artificial Sequence
  Description of Artificial Sequence: Synthetic oligonucleotide
  Sense strand starting at position 3295 of SEQ ID NO: 916323
augaguggaucucuuggaa

SEQ ID NO: 1147691 - RNA, 19 nt, Artificial Sequence
  Description of Artificial Sequence: Synthetic oligonucleotide
  Antisense strand to SEQ ID NO: 1147690
uuccaagagauccacucau

SEQ ID NO: 1147692 - RNA, 19 nt, Artificial Sequence
  Description of Artificial Sequence: Synthetic oligonucleotide
  Sense strand starting at position 3336 of SEQ ID NO: 916323
ggagcaagaucacugguaa

SEQ ID NO: 1147693 - RNA, 19 nt, Artificial Sequence
  Description of Artificial Sequence: Synthetic oligonucleotide
  Antisense strand to SEQ ID NO: 1147692
uuaccagugaucuugcucc

SEQ ID NO: 1147694 - RNA, 19 nt, Artificial Sequence
  Description of Artificial Sequence: Synthetic oligonucleotide
  Sense strand starting at position 3337 of SEQ ID NO: 916323
gagcaagaucacugguaac

SEQ ID NO: 1147695 - RNA, 19 nt, Artificial Sequence
  Description of Artificial Sequence: Synthetic oligonucleotide
  Antisense strand to SEQ ID NO: 1147694
guuaccagugaucuugcuc

SEQ ID NO: 1147696 - RNA, 19 nt, Artificial Sequence
  Description of Artificial Sequence: Synthetic oligonucleotide
  Sense strand starting at position 3494 of SEQ ID NO: 916323
cugaaaggauguuugaacu

SEQ ID NO: 1147697 - RNA, 19 nt, Artificial Sequence
  Description of Artificial Sequence: Synthetic oligonucleotide
  Antisense strand to SEQ ID NO: 1147696
aguucaaacauccuuucag

SEQ ID NO: 1147698 - RNA, 19 nt, Artificial Sequence
  Description of Artificial Sequence: Synthetic oligonucleotide
  Sense strand starting at position 3582 of SEQ ID NO: 916323
auuauaaguuccuuuggaa

SEQ ID NO: 1147699 - RNA, 19 nt, Artificial Sequence
  Description of Artificial Sequence: Synthetic oligonucleotide
  Antisense strand to SEQ ID NO: 1147698
uuccaaaggaacuuauaau

SEQ ID NO: 1147700 - RNA, 19 nt, Artificial Sequence
  Description of Artificial Sequence: Synthetic oligonucleotide
  Sense strand starting at position 3599 of SEQ ID NO: 916323
aaagaaacagugugaacuu

SEQ ID NO: 1147701 - RNA, 19 nt, Artificial Sequence
  Description of Artificial Sequence: Synthetic oligonucleotide
  Antisense strand to SEQ ID NO: 1147700
aaguucacacuguuucuuu

SEQ ID NO: 1147702 - RNA, 19 nt, Artificial Sequence
  Description of Artificial Sequence: Synthetic oligonucleotide
  Sense strand starting at position 3640 of SEQ ID NO: 916323
cccuuagagggcgaggauu

SEQ ID NO: 1147703 - RNA, 19 nt, Artificial Sequence
  Description of Artificial Sequence: Synthetic oligonucleotide
  Antisense strand to SEQ ID NO: 1147702
aauccucgcccucuaaggg

SEQ ID NO: 1147704 - RNA, 19 nt, Artificial Sequence
  Description of Artificial Sequence: Synthetic oligonucleotide
  Sense strand starting at position 3642 of SEQ ID NO: 916323
cuuagagggcgaggauuaa

SEQ ID NO: 1147705 - RNA, 19 nt, Artificial Sequence
  Description of Artificial Sequence: Synthetic oligonucleotide
  Antisense strand to SEQ ID NO: 1147704
uuaauccucgcccucuaag

SEQ ID NO: 1147706 - RNA, 19 nt, Artificial Sequence
  Description of Artificial Sequence: Synthetic oligonucleotide
  Sense strand starting at position 123 of SEQ ID NO: 916324
aaggaaucacggcagaguu

SEQ ID NO: 1147707 - RNA, 19 nt, Artificial Sequence
  Description of Artificial Sequence: Synthetic oligonucleotide
  Antisense strand to SEQ ID NO: 1147706
aacucugccgugauuccuu

SEQ ID NO: 1147708 - RNA, 19 nt, Artificial Sequence
  Description of Artificial Sequence: Synthetic oligonucleotide
  Sense strand starting at position 148 of SEQ ID NO: 916324
cuuagcugucggucaucuu

SEQ ID NO: 1147709 - RNA, 19 nt, Artificial Sequence
  Description of Artificial Sequence: Synthetic oligonucleotide
  Antisense strand to SEQ ID NO: 1147708
aagaugaccgacagcuaag

SEQ ID NO: 1147710 - RNA, 19 nt, Artificial Sequence
  Description of Artificial Sequence: Synthetic oligonucleotide
  Sense strand starting at position 231 of SEQ ID NO: 916324
ggcuccagaggucaaugau

SEQ ID NO: 1147711 - RNA, 19 nt, Artificial Sequence
  Description of Artificial Sequence: Synthetic oligonucleotide
  Antisense strand to SEQ ID NO: 1147710
aucauugaccucuggagcc

SEQ ID NO: 1147712 - RNA, 19 nt, Artificial Sequence
  Description of Artificial Sequence: Synthetic oligonucleotide
  Sense strand starting at position 296 of SEQ ID NO: 916324
ggaugaagcguuuacauuc

SEQ ID NO: 1147713 - RNA, 19 nt, Artificial Sequence
  Description of Artificial Sequence: Synthetic oligonucleotide
  Antisense strand to SEQ ID NO: 1147712
gaauguaaacgcuucaucc

SEQ ID NO: 1147714 - RNA, 19 nt, Artificial Sequence
  Description of Artificial Sequence: Synthetic oligonucleotide
  Sense strand starting at position 322 of SEQ ID NO: 916324
ucuguuggcacagaaaugu

SEQ ID NO: 1147715 - RNA, 19 nt, Artificial Sequence
  Description of Artificial Sequence: Synthetic oligonucleotide
  Antisense strand to SEQ ID NO: 1147714
acauuucugugccaacaga

SEQ ID NO: 1147716 - RNA, 19 nt, Artificial Sequence
  Description of Artificial Sequence: Synthetic oligonucleotide
  Sense strand starting at position 359 of SEQ ID NO: 916324
gaaauaugaguuugucgag

SEQ ID NO: 1147717 - RNA, 19 nt, Artificial Sequence
  Description of Artificial Sequence: Synthetic oligonucleotide
  Antisense strand to SEQ ID NO: 1147716
cucgacaaacucauauuuc

SEQ ID NO: 1147718 - RNA, 19 nt, Artificial Sequence
  Description of Artificial Sequence: Synthetic oligonucleotide
  Sense strand starting at position 400 of SEQ ID NO: 916324
acagauuuguugucuagcu

SEQ ID NO: 1147719 - RNA, 19 nt, Artificial Sequence
  Description of Artificial Sequence: Synthetic oligonucleotide
  Antisense strand to SEQ ID NO: 1147718
agcuagacaacaaaucugu

SEQ ID NO: 1147720 - RNA, 19 nt, Artificial Sequence
  Description of Artificial Sequence: Synthetic oligonucleotide
  Sense strand starting at position 402 of SEQ ID NO: 916324
agauuuguugucuagcugu

SEQ ID NO: 1147721 - RNA, 19 nt, Artificial Sequence
  Description of Artificial Sequence: Synthetic oligonucleotide
  Antisense strand to SEQ ID NO: 1147720
acagcuagacaacaaaucu

SEQ ID NO: 1147722 - RNA, 19 nt, Artificial Sequence
  Description of Artificial Sequence: Synthetic oligonucleotide
  Sense strand starting at position 420 of SEQ ID NO: 916324
ucugauugucuugagauau

SEQ ID NO: 1147723 - RNA, 19 nt, Artificial Sequence
  Description of Artificial Sequence: Synthetic oligonucleotide
  Antisense strand to SEQ ID NO: 1147722
auaucucaagacaaucaga

SEQ ID NO: 1147724 - RNA, 19 nt, Artificial Sequence
  Description of Artificial Sequence: Synthetic oligonucleotide
  Sense strand starting at position 432 of SEQ ID NO: 916324
gagauaugcccggauggcu

SEQ ID NO: 1147725 - RNA, 19 nt, Artificial Sequence
  Description of Artificial Sequence: Synthetic oligonucleotide
  Antisense strand to SEQ ID NO: 1147724
agccauccgggcauaucuc

SEQ ID NO: 1147726 - RNA, 19 nt, Artificial Sequence
  Description of Artificial Sequence: Synthetic oligonucleotide
  Sense strand starting at position 553 of SEQ ID NO: 916324
aggagaaauggucaguguu

SEQ ID NO: 1147727 - RNA, 19 nt, Artificial Sequence
  Description of Artificial Sequence: Synthetic oligonucleotide
  Antisense strand to SEQ ID NO: 1147726
aacacugaccauuucuccu

SEQ ID NO: 1147728 - RNA, 19 nt, Artificial Sequence
  Description of Artificial Sequence: Synthetic oligonucleotide
  Sense strand starting at position 592 of SEQ ID NO: 916324
aagucuuaacagugaaugu

SEQ ID NO: 1147729 - RNA, 19 nt, Artificial Sequence
  Description of Artificial Sequence: Synthetic oligonucleotide
  Antisense strand to SEQ ID NO: 1147728
acauucacuguuaagacuu

SEQ ID NO: 1147730 - RNA, 19 nt, Artificial Sequence
  Description of Artificial Sequence: Synthetic oligonucleotide
  Sense strand starting at position 862 of SEQ ID NO: 916324
uugggacucuguguuaaag

SEQ ID NO: 1147731 - RNA, 19 nt, Artificial Sequence
  Description of Artificial Sequence: Synthetic oligonucleotide
  Antisense strand to SEQ ID NO: 1147730
cuuuaacacagagucccaa

SEQ ID NO: 1147732 - RNA, 19 nt, Artificial Sequence
  Description of Artificial Sequence: Synthetic oligonucleotide
  Sense strand starting at position 1047 of SEQ ID NO: 916324
accugaacugcccagucau

SEQ ID NO: 1147733 - RNA, 19 nt, Artificial Sequence
  Description of Artificial Sequence: Synthetic oligonucleotide
  Antisense strand to SEQ ID NO: 1147732
augacugggcaguucaggu

SEQ ID NO: 1147734 - RNA, 19 nt, Artificial Sequence
  Description of Artificial Sequence: Synthetic oligonucleotide
  Sense strand starting at position 1063 of SEQ ID NO: 916324
caucuuggguugguaacaa

SEQ ID NO: 1147735 - RNA, 19 nt, Artificial Sequence
  Description of Artificial Sequence: Synthetic oligonucleotide
  Antisense strand to SEQ ID NO: 1147734
uuguuaccaacccaagaug

SEQ ID NO: 1147736 - RNA, 19 nt, Artificial Sequence
  Description of Artificial Sequence: Synthetic oligonucleotide
  Sense strand starting at position 1171 of SEQ ID NO: 916324
ugggcauuuguuuguuuga

SEQ ID NO: 1147737 - RNA, 19 nt, Artificial Sequence
  Description of Artificial Sequence: Synthetic oligonucleotide
  Antisense strand to SEQ ID NO: 1147736
ucaaacaaacaaaugccca

SEQ ID NO: 1147738 - RNA, 19 nt, Artificial Sequence
  Description of Artificial Sequence: Synthetic oligonucleotide
  Sense strand starting at position 1172 of SEQ ID NO: 916324
gggcauuuguuuguuugau

SEQ ID NO: 1147739 - RNA, 19 nt, Artificial Sequence
  Description of Artificial Sequence: Synthetic oligonucleotide
  Antisense strand to SEQ ID NO: 1147738
aucaaacaaacaaaugccc

SEQ ID NO: 1147740 - RNA, 19 nt, Artificial Sequence
  Description of Artificial Sequence: Synthetic oligonucleotide
  Sense strand starting at position 1173 of SEQ ID NO: 916324
ggcauuuguuuguuugauc

SEQ ID NO: 1147741 - RNA, 19 nt, Artificial Sequence
  Description of Artificial Sequence: Synthetic oligonucleotide
  Antisense strand to SEQ ID NO: 1147740
gaucaaacaaacaaaugcc

SEQ ID NO: 1147742 - RNA, 19 nt, Artificial Sequence
  Description of Artificial Sequence: Synthetic oligonucleotide
  Sense strand starting at position 1174 of SEQ ID NO: 916324
gcauuuguuuguuugauca

SEQ ID NO: 1147743 - RNA, 19 nt, Artificial Sequence
  Description of Artificial Sequence: Synthetic oligonucleotide
  Antisense strand to SEQ ID NO: 1147742
ugaucaaacaaacaaaugc

SEQ ID NO: 1147744 - RNA, 19 nt, Artificial Sequence
  Description of Artificial Sequence: Synthetic oligonucleotide
  Sense strand starting at position 1672 of SEQ ID NO: 916324
cuguaauuccucgacuauu

SEQ ID NO: 1147745 - RNA, 19 nt, Artificial Sequence
  Description of Artificial Sequence: Synthetic oligonucleotide
  Antisense strand to SEQ ID NO: 1147744
aauagucgaggaauuacag

SEQ ID NO: 1147746 - RNA, 19 nt, Artificial Sequence
  Description of Artificial Sequence: Synthetic oligonucleotide
  Sense strand starting at position 1893 of SEQ ID NO: 916324
uccagaaucuuccugguga

SEQ ID NO: 1147747 - RNA, 19 nt, Artificial Sequence
  Description of Artificial Sequence: Synthetic oligonucleotide
  Antisense strand to SEQ ID NO: 1147746
ucaccaggaagauucugga

SEQ ID NO: 1147748 - RNA, 19 nt, Artificial Sequence
  Description of Artificial Sequence: Synthetic oligonucleotide
  Sense strand starting at position 1895 of SEQ ID NO: 916324
cagaaucuuccuggugaga

SEQ ID NO: 1147749 - RNA, 19 nt, Artificial Sequence
  Description of Artificial Sequence: Synthetic oligonucleotide
  Antisense strand to SEQ ID NO: 1147748
ucucaccaggaagauucug

SEQ ID NO: 1147750 - RNA, 19 nt, Artificial Sequence
  Description of Artificial Sequence: Synthetic oligonucleotide
  Sense strand starting at position 1947 of SEQ ID NO: 916324
accagugauaccugaguga

SEQ ID NO: 1147751 - RNA, 19 nt, Artificial Sequence
  Description of Artificial Sequence: Synthetic oligonucleotide
  Antisense strand to SEQ ID NO: 1147750
ucacucagguaucacuggu

SEQ ID NO: 1147752 - RNA, 19 nt, Artificial Sequence
  Description of Artificial Sequence: Synthetic oligonucleotide
  Sense strand starting at position 1950 of SEQ ID NO: 916324
agugauaccugagugagag

SEQ ID NO: 1147753 - RNA, 19 nt, Artificial Sequence
  Description of Artificial Sequence: Synthetic oligonucleotide
  Antisense strand to SEQ ID NO: 1147752
cucucacucagguaucacu

SEQ ID NO: 1147754 - RNA, 19 nt, Artificial Sequence
  Description of Artificial Sequence: Synthetic oligonucleotide
  Sense strand starting at position 2034 of SEQ ID NO: 916324
gcugccuggagguauauaa

SEQ ID NO: 1147755 - RNA, 19 nt, Artificial Sequence
  Description of Artificial Sequence: Synthetic oligonucleotide
  Antisense strand to SEQ ID NO: 1147754
uuauauaccuccaggcagc

SEQ ID NO: 1147756 - RNA, 19 nt, Artificial Sequence
  Description of Artificial Sequence: Synthetic oligonucleotide
  Sense strand starting at position 2259 of SEQ ID NO: 916324
gccauucuucuuggaagga

SEQ ID NO: 1147757 - RNA, 19 nt, Artificial Sequence
  Description of Artificial Sequence: Synthetic oligonucleotide
  Antisense strand to SEQ ID NO: 1147756
uccuuccaagaagaauggc

SEQ ID NO: 1147758 - RNA, 19 nt, Artificial Sequence
  Description of Artificial Sequence: Synthetic oligonucleotide
  Sense strand starting at position 2269 of SEQ ID NO: 916324
uuggaaggagccuguugau

SEQ ID NO: 1147759 - RNA, 19 nt, Artificial Sequence
  Description of Artificial Sequence: Synthetic oligonucleotide
  Antisense strand to SEQ ID NO: 1147758
aucaacaggcuccuuccaa

SEQ ID NO: 1147760 - RNA, 19 nt, Artificial Sequence
  Description of Artificial Sequence: Synthetic oligonucleotide
  Sense strand starting at position 2348 of SEQ ID NO: 916324
ggugacuuccaggaguuca

SEQ ID NO: 1147761 - RNA, 19 nt, Artificial Sequence
  Description of Artificial Sequence: Synthetic oligonucleotide
  Antisense strand to SEQ ID NO: 1147760
ugaacuccuggaagucacc

SEQ ID NO: 1147762 - RNA, 19 nt, Artificial Sequence
  Description of Artificial Sequence: Synthetic oligonucleotide
  Sense strand starting at position 2412 of SEQ ID NO: 916324
gcaugagaugugcagaaug

SEQ ID NO: 1147763 - RNA, 19 nt, Artificial Sequence
  Description of Artificial Sequence: Synthetic oligonucleotide
  Antisense strand to SEQ ID NO: 1147762
cauucugcacaucucaugc

SEQ ID NO: 1147764 - RNA, 19 nt, Artificial Sequence
  Description of Artificial Sequence: Synthetic oligonucleotide
  Sense strand starting at position 2595 of SEQ ID NO: 916324
gagacugugauccagaguu

SEQ ID NO: 1147765 - RNA, 19 nt, Artificial Sequence
  Description of Artificial Sequence: Synthetic oligonucleotide
  Antisense strand to SEQ ID NO: 1147764
aacucuggaucacagucuc

SEQ ID NO: 1147766 - RNA, 19 nt, Artificial Sequence
  Description of Artificial Sequence: Synthetic oligonucleotide
  Sense strand starting at position 2597 of SEQ ID NO: 916324
gacugugauccagaguuau

SEQ ID NO: 1147767 - RNA, 19 nt, Artificial Sequence
  Description of Artificial Sequence: Synthetic oligonucleotide
  Antisense strand to SEQ ID NO: 1147766
auaacucuggaucacaguc

SEQ ID NO: 1147768 - RNA, 19 nt, Artificial Sequence
  Description of Artificial Sequence: Synthetic oligonucleotide
  Sense strand starting at position 2607 of SEQ ID NO: 916324
cagaguuauugcuugaaau

SEQ ID NO: 1147769 - RNA, 19 nt, Artificial Sequence
  Description of Artificial Sequence: Synthetic oligonucleotide
  Antisense strand to SEQ ID NO: 1147768
auuucaagcaauaacucug

SEQ ID NO: 1147770 - RNA, 19 nt, Artificial Sequence
  Description of Artificial Sequence: Synthetic oligonucleotide
  Sense strand starting at position 2608 of SEQ ID NO: 916324
agaguuauugcuugaaauc

SEQ ID NO: 1147771 - RNA, 19 nt, Artificial Sequence
  Description of Artificial Sequence: Synthetic oligonucleotide
  Antisense strand to SEQ ID NO: 1147770
gauuucaagcaauaacucu

SEQ ID NO: 1147772 - RNA, 19 nt, Artificial Sequence
  Description of Artificial Sequence: Synthetic oligonucleotide
  Sense strand starting at position 2609 of SEQ ID NO: 916324
gaguuauugcuugaaaucc

SEQ ID NO: 1147773 - RNA, 19 nt, Artificial Sequence
  Description of Artificial Sequence: Synthetic oligonucleotide
  Antisense strand to SEQ ID NO: 1147772
ggauuucaagcaauaacuc

SEQ ID NO: 1147774 - RNA, 19 nt, Artificial Sequence
  Description of Artificial Sequence: Synthetic oligonucleotide
  Sense strand starting at position 3447 of SEQ ID NO: 916324
ggcacaaaucacuaugcua

SEQ ID NO: 1147775 - RNA, 19 nt, Artificial Sequence
  Description of Artificial Sequence: Synthetic oligonucleotide
  Antisense strand to SEQ ID NO: 1147774
uagcauagugauuugugcc

SEQ ID NO: 1147776 - RNA, 19 nt, Artificial Sequence
  Description of Artificial Sequence: Synthetic oligonucleotide
  Sense strand starting at position 3819 of SEQ ID NO: 916324
cgggaauagcggugaagaa

SEQ ID NO: 1147777 - RNA, 19 nt, Artificial Sequence
  Description of Artificial Sequence: Synthetic oligonucleotide
  Antisense strand to SEQ ID NO: 1147776
uucuucaccgcuauucccg

SEQ ID NO: 1147778 - RNA, 19 nt, Artificial Sequence
  Description of Artificial Sequence: Synthetic oligonucleotide
  Sense strand starting at position 3828 of SEQ ID NO: 916324
cggugaagaaguuagaguu

SEQ ID NO: 1147779 - RNA, 19 nt, Artificial Sequence
  Description of Artificial Sequence: Synthetic oligonucleotide
  Antisense strand to SEQ ID NO: 1147778
aacucuaacuucuucaccg

SEQ ID NO: 1147780 - RNA, 19 nt, Artificial Sequence
  Description of Artificial Sequence: Synthetic oligonucleotide
  Sense strand starting at position 3952 of SEQ ID NO: 916324
cuuuaagucaggugaucag

SEQ ID NO: 1147781 - RNA, 19 nt, Artificial Sequence
  Description of Artificial Sequence: Synthetic oligonucleotide
  Antisense strand to SEQ ID NO: 1147780
cugaucaccugacuuaaag

SEQ ID NO: 1147782 - RNA, 19 nt, Artificial Sequence
  Description of Artificial Sequence: Synthetic oligonucleotide
  Sense strand starting at position 3956 of SEQ ID NO: 916324
aagucaggugaucagcaaa

SEQ ID NO: 1147783 - RNA, 19 nt, Artificial Sequence
  Description of Artificial Sequence: Synthetic oligonucleotide
  Antisense strand to SEQ ID NO: 1147782
uuugcugaucaccugacuu

SEQ ID NO: 1147784 - RNA, 19 nt, Artificial Sequence
  Description of Artificial Sequence: Synthetic oligonucleotide
  Sense strand starting at position 3976 of SEQ ID NO: 916324
gucucucugagaggugaca

SEQ ID NO: 1147785 - RNA, 19 nt, Artificial Sequence
  Description of Artificial Sequence: Synthetic oligonucleotide
  Antisense strand to SEQ ID NO: 1147784
ugucaccucucagagagac

SEQ ID NO: 1147786 - RNA, 19 nt, Artificial Sequence
  Description of Artificial Sequence: Synthetic oligonucleotide
  Sense strand starting at position 591 of SEQ ID NO: 916325
cucacuuucuaagcaggaa

SEQ ID NO: 1147787 - RNA, 19 nt, Artificial Sequence
  Description of Artificial Sequence: Synthetic oligonucleotide
  Antisense strand to SEQ ID NO: 1147786
uuccugcuuagaaagugag

SEQ ID NO: 1147788 - RNA, 19 nt, Artificial Sequence
  Description of Artificial Sequence: Synthetic oligonucleotide
  Sense strand starting at position 712 of SEQ ID NO: 916325
ucuuaucucuguccuggaa

SEQ ID NO: 1147789 - RNA, 19 nt, Artificial Sequence
  Description of Artificial Sequence: Synthetic oligonucleotide
  Antisense strand to SEQ ID NO: 1147788
uuccaggacagagauaaga

SEQ ID NO: 1147790 - RNA, 19 nt, Artificial Sequence
  Description of Artificial Sequence: Synthetic oligonucleotide
  Sense strand starting at position 715 of SEQ ID NO: 916325
uaucucuguccuggaaugu

SEQ ID NO: 1147791 - RNA, 19 nt, Artificial Sequence
  Description of Artificial Sequence: Synthetic oligonucleotide
  Antisense strand to SEQ ID NO: 1147790
acauuccaggacagagaua

SEQ ID NO: 1147792 - RNA, 19 nt, Artificial Sequence
  Description of Artificial Sequence: Synthetic oligonucleotide
  Sense strand starting at position 716 of SEQ ID NO: 916325
aucucuguccuggaauguu

SEQ ID NO: 1147793 - RNA, 19 nt, Artificial Sequence
  Description of Artificial Sequence: Synthetic oligonucleotide
  Antisense strand to SEQ ID NO: 1147792
aacauuccaggacagagau

SEQ ID NO: 1147794 - RNA, 19 nt, Artificial Sequence
  Description of Artificial Sequence: Synthetic oligonucleotide
  Sense strand starting at position 724 of SEQ ID NO: 916325
ccuggaauguuaucacuaa

SEQ ID NO: 1147795 - RNA, 19 nt, Artificial Sequence
  Description of Artificial Sequence: Synthetic oligonucleotide
  Antisense strand to SEQ ID NO: 1147794
uuagugauaacauuccagg

SEQ ID NO: 1147796 - RNA, 19 nt, Artificial Sequence
  Description of Artificial Sequence: Synthetic oligonucleotide
  Sense strand starting at position 935 of SEQ ID NO: 916325
gcugaccucugagucauaa

SEQ ID NO: 1147797 - RNA, 19 nt, Artificial Sequence
  Description of Artificial Sequence: Synthetic oligonucleotide
  Antisense strand to SEQ ID NO: 1147796
uuaugacucagaggucagc

SEQ ID NO: 1147798 - RNA, 19 nt, Artificial Sequence
  Description of Artificial Sequence: Synthetic oligonucleotide
  Sense strand starting at position 1170 of SEQ ID NO: 916325
uuaucucacuugucacagu

SEQ ID NO: 1147799 - RNA, 19 nt, Artificial Sequence
  Description of Artificial Sequence: Synthetic oligonucleotide
  Antisense strand to SEQ ID NO: 1147798
acugugacaagugagauaa

SEQ ID NO: 1147800 - RNA, 19 nt, Artificial Sequence
  Description of Artificial Sequence: Synthetic oligonucleotide
  Sense strand starting at position 1203 of SEQ ID NO: 916325
ugcagaaucuguuuccuac

SEQ ID NO: 1147801 - RNA, 19 nt, Artificial Sequence
  Description of Artificial Sequence: Synthetic oligonucleotide
  Antisense strand to SEQ ID NO: 1147800
guaggaaacagauucugca

SEQ ID NO: 1147802 - RNA, 19 nt, Artificial Sequence
  Description of Artificial Sequence: Synthetic oligonucleotide
  Sense strand starting at position 1248 of SEQ ID NO: 916325
agccuugucuuacucauuu

SEQ ID NO: 1147803 - RNA, 19 nt, Artificial Sequence
  Description of Artificial Sequence: Synthetic oligonucleotide
  Antisense strand to SEQ ID NO: 1147802
aaaugaguaagacaaggcu

SEQ ID NO: 1147804 - RNA, 19 nt, Artificial Sequence
  Description of Artificial Sequence: Synthetic oligonucleotide
  Sense strand starting at position 1283 of SEQ ID NO: 916325
ugccauuaugucugaccca

SEQ ID NO: 1147805 - RNA, 19 nt, Artificial Sequence
  Description of Artificial Sequence: Synthetic oligonucleotide
  Antisense strand to SEQ ID NO: 1147804
ugggucagacauaauggca

SEQ ID NO: 1147806 - RNA, 19 nt, Artificial Sequence
  Description of Artificial Sequence: Synthetic oligonucleotide
  Sense strand starting at position 1442 of SEQ ID NO: 916325
aucuuuacuccaugaagag

SEQ ID NO: 1147807 - RNA, 19 nt, Artificial Sequence
  Description of Artificial Sequence: Synthetic oligonucleotide
  Antisense strand to SEQ ID NO: 1147806
cucuucauggaguaaagau

SEQ ID NO: 1147808 - RNA, 19 nt, Artificial Sequence
  Description of Artificial Sequence: Synthetic oligonucleotide
  Sense strand starting at position 1591 of SEQ ID NO: 916325
aacgauucugaacgacuau

SEQ ID NO: 1147809 - RNA, 19 nt, Artificial Sequence
  Description of Artificial Sequence: Synthetic oligonucleotide
  Antisense strand to SEQ ID NO: 1147808
auagucguucagaaucguu

SEQ ID NO: 1147810 - RNA, 19 nt, Artificial Sequence
  Description of Artificial Sequence: Synthetic oligonucleotide
  Sense strand starting at position 1914 of SEQ ID NO: 916325
ugcucuuacuguccagaua

SEQ ID NO: 1147811 - RNA, 19 nt, Artificial Sequence
  Description of Artificial Sequence: Synthetic oligonucleotide
  Antisense strand to SEQ ID NO: 1147810
uaucuggacaguaagagca

SEQ ID NO: 1147812 - RNA, 19 nt, Artificial Sequence
  Description of Artificial Sequence: Synthetic oligonucleotide
  Sense strand starting at position 1915 of SEQ ID NO: 916325
gcucuuacuguccagauaa

SEQ ID NO: 1147813 - RNA, 19 nt, Artificial Sequence
  Description of Artificial Sequence: Synthetic oligonucleotide
  Antisense strand to SEQ ID NO: 1147812
uuaucuggacaguaagagc

SEQ ID NO: 1147814 - RNA, 19 nt, Artificial Sequence
  Description of Artificial Sequence: Synthetic oligonucleotide
  Sense strand starting at position 1917 of SEQ ID NO: 916325
ucuuacuguccagauaaug

SEQ ID NO: 1147815 - RNA, 19 nt, Artificial Sequence
  Description of Artificial Sequence: Synthetic oligonucleotide
  Antisense strand to SEQ ID NO: 1147814
cauuaucuggacaguaaga

SEQ ID NO: 1147816 - RNA, 19 nt, Artificial Sequence
  Description of Artificial Sequence: Synthetic oligonucleotide
  Sense strand starting at position 2059 of SEQ ID NO: 916325
aggagaacuuccgcccuua

SEQ ID NO: 1147817 - RNA, 19 nt, Artificial Sequence
  Description of Artificial Sequence: Synthetic oligonucleotide
  Antisense strand to SEQ ID NO: 1147816
uaagggcggaaguucuccu

SEQ ID NO: 1147818 - RNA, 19 nt, Artificial Sequence
  Description of Artificial Sequence: Synthetic oligonucleotide
  Sense strand starting at position 2355 of SEQ ID NO: 916325
gcucauauugcguaaacau

SEQ ID NO: 1147819 - RNA, 19 nt, Artificial Sequence
  Description of Artificial Sequence: Synthetic oligonucleotide
  Antisense strand to SEQ ID NO: 1147818
auguuuacgcaauaugagc

SEQ ID NO: 1147820 - RNA, 19 nt, Artificial Sequence
  Description of Artificial Sequence: Synthetic oligonucleotide
  Sense strand starting at position 2364 of SEQ ID NO: 916325
gcguaaacauaccuucuca

SEQ ID NO: 1147821 - RNA, 19 nt, Artificial Sequence
  Description of Artificial Sequence: Synthetic oligonucleotide
  Antisense strand to SEQ ID NO: 1147820
ugagaagguauguuuacgc

SEQ ID NO: 1147822 - RNA, 19 nt, Artificial Sequence
  Description of Artificial Sequence: Synthetic oligonucleotide
  Sense strand starting at position 2437 of SEQ ID NO: 916325
ccaguuaguuucuuaagga

SEQ ID NO: 1147823 - RNA, 19 nt, Artificial Sequence
  Description of Artificial Sequence: Synthetic oligonucleotide
  Antisense strand to SEQ ID NO: 1147822
uccuuaagaaacuaacugg

SEQ ID NO: 1147824 - RNA, 19 nt, Artificial Sequence
  Description of Artificial Sequence: Synthetic oligonucleotide
  Sense strand starting at position 2468 of SEQ ID NO: 916325
guaucaggccuugagacau

SEQ ID NO: 1147825 - RNA, 19 nt, Artificial Sequence
  Description of Artificial Sequence: Synthetic oligonucleotide
  Antisense strand to SEQ ID NO: 1147824
augucucaaggccugauac

SEQ ID NO: 1147826 - RNA, 19 nt, Artificial Sequence
  Description of Artificial Sequence: Synthetic oligonucleotide
  Sense strand starting at position 2628 of SEQ ID NO: 916325
gucagagcuccuguacguu

SEQ ID NO: 1147827 - RNA, 19 nt, Artificial Sequence
  Description of Artificial Sequence: Synthetic oligonucleotide
  Antisense strand to SEQ ID NO: 1147826
aacguacaggagcucugac

SEQ ID NO: 1147828 - RNA, 19 nt, Artificial Sequence
  Description of Artificial Sequence: Synthetic oligonucleotide
  Sense strand starting at position 3060 of SEQ ID NO: 916325
ugauguuagcaucauaauu

SEQ ID NO: 1147829 - RNA, 19 nt, Artificial Sequence
  Description of Artificial Sequence: Synthetic oligonucleotide
  Antisense strand to SEQ ID NO: 1147828
aauuaugaugcuaacauca

SEQ ID NO: 1147830 - RNA, 19 nt, Artificial Sequence
  Description of Artificial Sequence: Synthetic oligonucleotide
  Sense strand starting at position 3132 of SEQ ID NO: 916325
guugcuagccaucacucua

SEQ ID NO: 1147831 - RNA, 19 nt, Artificial Sequence
  Description of Artificial Sequence: Synthetic oligonucleotide
  Antisense strand to SEQ ID NO: 1147830
uagagugauggcuagcaac

SEQ ID NO: 1147832 - RNA, 19 nt, Artificial Sequence
  Description of Artificial Sequence: Synthetic oligonucleotide
  Sense strand starting at position 3140 of SEQ ID NO: 916325
ccaucacucuagucagcua

SEQ ID NO: 1147833 - RNA, 19 nt, Artificial Sequence
  Description of Artificial Sequence: Synthetic oligonucleotide
  Antisense strand to SEQ ID NO: 1147832
uagcugacuagagugaugg

SEQ ID NO: 1147834 - RNA, 19 nt, Artificial Sequence
  Description of Artificial Sequence: Synthetic oligonucleotide
  Sense strand starting at position 3147 of SEQ ID NO: 916325
ucuagucagcuaugguaga

SEQ ID NO: 1147835 - RNA, 19 nt, Artificial Sequence
  Description of Artificial Sequence: Synthetic oligonucleotide
  Antisense strand to SEQ ID NO: 1147834
ucuaccauagcugacuaga

SEQ ID NO: 1147836 - RNA, 19 nt, Artificial Sequence
  Description of Artificial Sequence: Synthetic oligonucleotide
  Sense strand starting at position 3152 of SEQ ID NO: 916325
ucagcuaugguagagugau

SEQ ID NO: 1147837 - RNA, 19 nt, Artificial Sequence
  Description of Artificial Sequence: Synthetic oligonucleotide
  Antisense strand to SEQ ID NO: 1147836
aucacucuaccauagcuga

SEQ ID NO: 1147838 - RNA, 19 nt, Artificial Sequence
  Description of Artificial Sequence: Synthetic oligonucleotide
  Sense strand starting at position 3162 of SEQ ID NO: 916325
uagagugauuucuaugguu

SEQ ID NO: 1147839 - RNA, 19 nt, Artificial Sequence
  Description of Artificial Sequence: Synthetic oligonucleotide
  Antisense strand to SEQ ID NO: 1147838
aaccauagaaaucacucua

SEQ ID NO: 1147840 - RNA, 19 nt, Artificial Sequence
  Description of Artificial Sequence: Synthetic oligonucleotide
  Sense strand starting at position 3196 of SEQ ID NO: 916325
agcagucaaggguaugaga

SEQ ID NO: 1147841 - RNA, 19 nt, Artificial Sequence
  Description of Artificial Sequence: Synthetic oligonucleotide
  Antisense strand to SEQ ID NO: 1147840
ucucauacccuugacugcu

SEQ ID NO: 1147842 - RNA, 19 nt, Artificial Sequence
  Description of Artificial Sequence: Synthetic oligonucleotide
  Sense strand starting at position 3275 of SEQ ID NO: 916325
guguuaguaagauaguauu

SEQ ID NO: 1147843 - RNA, 19 nt, Artificial Sequence
  Description of Artificial Sequence: Synthetic oligonucleotide
  Antisense strand to SEQ ID NO: 1147842
aauacuaucuuacuaacac

SEQ ID NO: 1147844 - RNA, 19 nt, Artificial Sequence
  Description of Artificial Sequence: Synthetic oligonucleotide
  Sense strand starting at position 3356 of SEQ ID NO: 916325
aaugucuuacggcaaguuu

SEQ ID NO: 1147845 - RNA, 19 nt, Artificial Sequence
  Description of Artificial Sequence: Synthetic oligonucleotide
  Antisense strand to SEQ ID NO: 1147844
aaacuugccguaagacauu

SEQ ID NO: 1147846 - RNA, 19 nt, Artificial Sequence
  Description of Artificial Sequence: Synthetic oligonucleotide
  Sense strand starting at position 3484 of SEQ ID NO: 916325
agggauguauuugaaacau

SEQ ID NO: 1147847 - RNA, 19 nt, Artificial Sequence
  Description of Artificial Sequence: Synthetic oligonucleotide
  Antisense strand to SEQ ID NO: 1147846
auguuucaaauacaucccu

SEQ ID NO: 1147848 - RNA, 19 nt, Artificial Sequence
  Description of Artificial Sequence: Synthetic oligonucleotide
  Sense strand starting at position 3574 of SEQ ID NO: 916325
aaggaucuguagccuguaa

SEQ ID NO: 1147849 - RNA, 19 nt, Artificial Sequence
  Description of Artificial Sequence: Synthetic oligonucleotide
  Antisense strand to SEQ ID NO: 1147848
uuacaggcuacagauccuu

SEQ ID NO: 1147850 - RNA, 19 nt, Artificial Sequence
  Description of Artificial Sequence: Synthetic oligonucleotide
  Sense strand starting at position 3576 of SEQ ID NO: 916325
ggaucuguagccuguaaac

SEQ ID NO: 1147851 - RNA, 19 nt, Artificial Sequence
  Description of Artificial Sequence: Synthetic oligonucleotide
  Antisense strand to SEQ ID NO: 1147850
guuuacaggcuacagaucc

SEQ ID NO: 1147852 - RNA, 19 nt, Artificial Sequence
  Description of Artificial Sequence: Synthetic oligonucleotide
  Sense strand starting at position 3628 of SEQ ID NO: 916325
agcaauagaauccgggaaa

SEQ ID NO: 1147853 - RNA, 19 nt, Artificial Sequence
  Description of Artificial Sequence: Synthetic oligonucleotide
  Antisense strand to SEQ ID NO: 1147852
uuucccggauucuauugcu

SEQ ID NO: 1147854 - RNA, 19 nt, Artificial Sequence
  Description of Artificial Sequence: Synthetic oligonucleotide
  Sense strand starting at position 3639 of SEQ ID NO: 916325
ccgggaaacugcucuaauu

SEQ ID NO: 1147855 - RNA, 19 nt, Artificial Sequence
  Description of Artificial Sequence: Synthetic oligonucleotide
  Antisense strand to SEQ ID NO: 1147854
aauuagagcaguuucccgg

SEQ ID NO: 1147856 - RNA, 19 nt, Artificial Sequence
  Description of Artificial Sequence: Synthetic oligonucleotide
  Sense strand starting at position 3741 of SEQ ID NO: 916325
ggaauaagugagugugagu

SEQ ID NO: 1147857 - RNA, 19 nt, Artificial Sequence
  Description of Artificial Sequence: Synthetic oligonucleotide
  Antisense strand to SEQ ID NO: 1147856
acucacacucacuuauucc

SEQ ID NO: 1147858 - RNA, 19 nt, Artificial Sequence
  Description of Artificial Sequence: Synthetic oligonucleotide
  Sense strand starting at position 3774 of SEQ ID NO: 916325
aguagauucuaguucuaau

SEQ ID NO: 1147859 - RNA, 19 nt, Artificial Sequence
  Description of Artificial Sequence: Synthetic oligonucleotide
  Antisense strand to SEQ ID NO: 1147858
auuagaacuagaaucuacu

SEQ ID NO: 1147860 - RNA, 19 nt, Artificial Sequence
  Description of Artificial Sequence: Synthetic oligonucleotide
  Sense strand starting at position 3858 of SEQ ID NO: 916325
guaaauaugcagggagcua

SEQ ID NO: 1147861 - RNA, 19 nt, Artificial Sequence
  Description of Artificial Sequence: Synthetic oligonucleotide
  Antisense strand to SEQ ID NO: 1147860
uagcucccugcauauuuac

SEQ ID NO: 1147862 - RNA, 19 nt, Artificial Sequence
  Description of Artificial Sequence: Synthetic oligonucleotide
  Sense strand starting at position 3888 of SEQ ID NO: 916325
cauauuuggucauauguga

SEQ ID NO: 1147863 - RNA, 19 nt, Artificial Sequence
  Description of Artificial Sequence: Synthetic oligonucleotide
  Antisense strand to SEQ ID NO: 1147862
ucacauaugaccaaauaug

SEQ ID NO: 1147864 - RNA, 19 nt, Artificial Sequence
  Description of Artificial Sequence: Synthetic oligonucleotide
  Sense strand starting at position 3974 of SEQ ID NO: 916325
uaaauuaagugggcuuuau

SEQ ID NO: 1147865 - RNA, 19 nt, Artificial Sequence
  Description of Artificial Sequence: Synthetic oligonucleotide
  Antisense strand to SEQ ID NO: 1147864
auaaagcccacuuaauuua

SEQ ID NO: 1147866 - RNA, 19 nt, Artificial Sequence
  Description of Artificial Sequence: Synthetic oligonucleotide
  Sense strand starting at position 950 of SEQ ID NO: 916326
ccaucuuucugagucccau

SEQ ID NO: 1147867 - RNA, 19 nt, Artificial Sequence
  Description of Artificial Sequence: Synthetic oligonucleotide
  Antisense strand to SEQ ID NO: 1147866
augggacucagaaagaugg

SEQ ID NO: 1147868 - RNA, 19 nt, Artificial Sequence
  Description of Artificial Sequence: Synthetic oligonucleotide
  Sense strand starting at position 972 of SEQ ID NO: 916326
gacccuguucucugugaua

SEQ ID NO: 1147869 - RNA, 19 nt, Artificial Sequence
  Description of Artificial Sequence: Synthetic oligonucleotide
  Antisense strand to SEQ ID NO: 1147868
uaucacagagaacaggguc

SEQ ID NO: 1147870 - RNA, 19 nt, Artificial Sequence
  Description of Artificial Sequence: Synthetic oligonucleotide
  Sense strand starting at position 974 of SEQ ID NO: 916326
cccuguucucugugauaug

SEQ ID NO: 1147871 - RNA, 19 nt, Artificial Sequence
  Description of Artificial Sequence: Synthetic oligonucleotide
  Antisense strand to SEQ ID NO: 1147870
cauaucacagagaacaggg

SEQ ID NO: 1147872 - RNA, 19 nt, Artificial Sequence
  Description of Artificial Sequence: Synthetic oligonucleotide
  Sense strand starting at position 999 of SEQ ID NO: 916326
ugagguauauaugggaaca

SEQ ID NO: 1147873 - RNA, 19 nt, Artificial Sequence
  Description of Artificial Sequence: Synthetic oligonucleotide
  Antisense strand to SEQ ID NO: 1147872
uguucccauauauaccuca

SEQ ID NO: 1147874 - RNA, 19 nt, Artificial Sequence
  Description of Artificial Sequence: Synthetic oligonucleotide
  Sense strand starting at position 1001 of SEQ ID NO: 916326
agguauauaugggaacaug

SEQ ID NO: 1147875 - RNA, 19 nt, Artificial Sequence
  Description of Artificial Sequence: Synthetic oligonucleotide
  Antisense strand to SEQ ID NO: 1147874
cauguucccauauauaccu

SEQ ID NO: 1147876 - RNA, 19 nt, Artificial Sequence
  Description of Artificial Sequence: Synthetic oligonucleotide
  Sense strand starting at position 1016 of SEQ ID NO: 916326
caugacauauggugaggua

SEQ ID NO: 1147877 - RNA, 19 nt, Artificial Sequence
  Description of Artificial Sequence: Synthetic oligonucleotide
  Antisense strand to SEQ ID NO: 1147876
uaccucaccauaugucaug

SEQ ID NO: 1147878 - RNA, 19 nt, Artificial Sequence
  Description of Artificial Sequence: Synthetic oligonucleotide
  Sense strand starting at position 1259 of SEQ ID NO: 916326
agugaaauuuaccagcuuu

SEQ ID NO: 1147879 - RNA, 19 nt, Artificial Sequence
  Description of Artificial Sequence: Synthetic oligonucleotide
  Antisense strand to SEQ ID NO: 1147878
aaagcugguaaauuucacu

SEQ ID NO: 1147880 - RNA, 19 nt, Artificial Sequence
  Description of Artificial Sequence: Synthetic oligonucleotide
  Sense strand starting at position 1293 of SEQ ID NO: 916326
ucaggucugagcuaccaga

SEQ ID NO: 1147881 - RNA, 19 nt, Artificial Sequence
  Description of Artificial Sequence: Synthetic oligonucleotide
  Antisense strand to SEQ ID NO: 1147880
ucugguagcucagaccuga

SEQ ID NO: 1147882 - RNA, 19 nt, Artificial Sequence
  Description of Artificial Sequence: Synthetic oligonucleotide
  Sense strand starting at position 1356 of SEQ ID NO: 916326
gagauuauagccuguggga

SEQ ID NO: 1147883 - RNA, 19 nt, Artificial Sequence
  Description of Artificial Sequence: Synthetic oligonucleotide
  Antisense strand to SEQ ID NO: 1147882
ucccacaggcuauaaucuc

SEQ ID NO: 1147884 - RNA, 19 nt, Artificial Sequence
  Description of Artificial Sequence: Synthetic oligonucleotide
  Sense strand starting at position 1358 of SEQ ID NO: 916326
gauuauagccugugggaag

SEQ ID NO: 1147885 - RNA, 19 nt, Artificial Sequence
  Description of Artificial Sequence: Synthetic oligonucleotide
  Antisense strand to SEQ ID NO: 1147884
cuucccacaggcuauaauc

SEQ ID NO: 1147886 - RNA, 19 nt, Artificial Sequence
  Description of Artificial Sequence: Synthetic oligonucleotide
  Sense strand starting at position 1399 of SEQ ID NO: 916326
gaaggagucagagguaagu

SEQ ID NO: 1147887 - RNA, 19 nt, Artificial Sequence
  Description of Artificial Sequence: Synthetic oligonucleotide
  Antisense strand to SEQ ID NO: 1147886
acuuaccucugacuccuuc

SEQ ID NO: 1147888 - RNA, 19 nt, Artificial Sequence
  Description of Artificial Sequence: Synthetic oligonucleotide
  Sense strand starting at position 2005 of SEQ ID NO: 916326
aacgcauagucagugaaag

SEQ ID NO: 1147889 - RNA, 19 nt, Artificial Sequence
  Description of Artificial Sequence: Synthetic oligonucleotide
  Antisense strand to SEQ ID NO: 1147888
cuuucacugacuaugcguu

SEQ ID NO: 1147890 - RNA, 19 nt, Artificial Sequence
  Description of Artificial Sequence: Synthetic oligonucleotide
  Sense strand starting at position 2006 of SEQ ID NO: 916326
acgcauagucagugaaagu

SEQ ID NO: 1147891 - RNA, 19 nt, Artificial Sequence
  Description of Artificial Sequence: Synthetic oligonucleotide
  Antisense strand to SEQ ID NO: 1147890
acuuucacugacuaugcgu

SEQ ID NO: 1147892 - RNA, 19 nt, Artificial Sequence
  Description of Artificial Sequence: Synthetic oligonucleotide
  Sense strand starting at position 2007 of SEQ ID NO: 916326
cgcauagucagugaaagua

SEQ ID NO: 1147893 - RNA, 19 nt, Artificial Sequence
  Description of Artificial Sequence: Synthetic oligonucleotide
  Antisense strand to SEQ ID NO: 1147892
uacuuucacugacuaugcg

SEQ ID NO: 1147894 - RNA, 19 nt, Artificial Sequence
  Description of Artificial Sequence: Synthetic oligonucleotide
  Sense strand starting at position 2042 of SEQ ID NO: 916326
aggagagguugguuuguuu

SEQ ID NO: 1147895 - RNA, 19 nt, Artificial Sequence
  Description of Artificial Sequence: Synthetic oligonucleotide
  Antisense strand to SEQ ID NO: 1147894
aaacaaaccaaccucuccu

SEQ ID NO: 1147896 - RNA, 19 nt, Artificial Sequence
  Description of Artificial Sequence: Synthetic oligonucleotide
  Sense strand starting at position 2088 of SEQ ID NO: 916326
uugggagacaguuguuauc

SEQ ID NO: 1147897 - RNA, 19 nt, Artificial Sequence
  Description of Artificial Sequence: Synthetic oligonucleotide
  Antisense strand to SEQ ID NO: 1147896
gauaacaacugucucccaa

SEQ ID NO: 1147898 - RNA, 19 nt, Artificial Sequence
  Description of Artificial Sequence: Synthetic oligonucleotide
  Sense strand starting at position 2090 of SEQ ID NO: 916326
gggagacaguuguuaucca

SEQ ID NO: 1147899 - RNA, 19 nt, Artificial Sequence
  Description of Artificial Sequence: Synthetic oligonucleotide
  Antisense strand to SEQ ID NO: 1147898
uggauaacaacugucuccc

SEQ ID NO: 1147900 - RNA, 19 nt, Artificial Sequence
  Description of Artificial Sequence: Synthetic oligonucleotide
  Sense strand starting at position 2091 of SEQ ID NO: 916326
ggagacaguuguuauccau

SEQ ID NO: 1147901 - RNA, 19 nt, Artificial Sequence
  Description of Artificial Sequence: Synthetic oligonucleotide
  Antisense strand to SEQ ID NO: 1147900
auggauaacaacugucucc

SEQ ID NO: 1147902 - RNA, 19 nt, Artificial Sequence
  Description of Artificial Sequence: Synthetic oligonucleotide
  Sense strand starting at position 2095 of SEQ ID NO: 916326
acaguuguuauccauguga

SEQ ID NO: 1147903 - RNA, 19 nt, Artificial Sequence
  Description of Artificial Sequence: Synthetic oligonucleotide
  Antisense strand to SEQ ID NO: 1147902
ucacauggauaacaacugu

SEQ ID NO: 1147904 - RNA, 19 nt, Artificial Sequence
  Description of Artificial Sequence: Synthetic oligonucleotide
  Sense strand starting at position 2097 of SEQ ID NO: 916326
aguuguuauccaugugagc

SEQ ID NO: 1147905 - RNA, 19 nt, Artificial Sequence
  Description of Artificial Sequence: Synthetic oligonucleotide
  Antisense strand to SEQ ID NO: 1147904
gcucacauggauaacaacu

SEQ ID NO: 1147906 - RNA, 19 nt, Artificial Sequence
  Description of Artificial Sequence: Synthetic oligonucleotide
  Sense strand starting at position 2099 of SEQ ID NO: 916326
uuguuauccaugugagcug

SEQ ID NO: 1147907 - RNA, 19 nt, Artificial Sequence
  Description of Artificial Sequence: Synthetic oligonucleotide
  Antisense strand to SEQ ID NO: 1147906
cagcucacauggauaacaa

SEQ ID NO: 1147908 - RNA, 19 nt, Artificial Sequence
  Description of Artificial Sequence: Synthetic oligonucleotide
  Sense strand starting at position 2129 of SEQ ID NO: 916326
guucaaaggugagagauua

SEQ ID NO: 1147909 - RNA, 19 nt, Artificial Sequence
  Description of Artificial Sequence: Synthetic oligonucleotide
  Antisense strand to SEQ ID NO: 1147908
uaaucucucaccuuugaac

SEQ ID NO: 1147910 - RNA, 19 nt, Artificial Sequence
  Description of Artificial Sequence: Synthetic oligonucleotide
  Sense strand starting at position 2280 of SEQ ID NO: 916326
cacugucacgcaugaacaa

SEQ ID NO: 1147911 - RNA, 19 nt, Artificial Sequence
  Description of Artificial Sequence: Synthetic oligonucleotide
  Antisense strand to SEQ ID NO: 1147910
uuguucaugcgugacagug

SEQ ID NO: 1147912 - RNA, 19 nt, Artificial Sequence
  Description of Artificial Sequence: Synthetic oligonucleotide
  Sense strand starting at position 2281 of SEQ ID NO: 916326
acugucacgcaugaacaau

SEQ ID NO: 1147913 - RNA, 19 nt, Artificial Sequence
  Description of Artificial Sequence: Synthetic oligonucleotide
  Antisense strand to SEQ ID NO: 1147912
auuguucaugcgugacagu

SEQ ID NO: 1147914 - RNA, 19 nt, Artificial Sequence
  Description of Artificial Sequence: Synthetic oligonucleotide
  Sense strand starting at position 2387 of SEQ ID NO: 916326
auuuguuagcccugguuga

SEQ ID NO: 1147915 - RNA, 19 nt, Artificial Sequence
  Description of Artificial Sequence: Synthetic oligonucleotide
  Antisense strand to SEQ ID NO: 1147914
ucaaccagggcuaacaaau

SEQ ID NO: 1147916 - RNA, 19 nt, Artificial Sequence
  Description of Artificial Sequence: Synthetic oligonucleotide
  Sense strand starting at position 2464 of SEQ ID NO: 916326
guguucuagccaugucuuu

SEQ ID NO: 1147917 - RNA, 19 nt, Artificial Sequence
  Description of Artificial Sequence: Synthetic oligonucleotide
  Antisense strand to SEQ ID NO: 1147916
aaagacauggcuagaacac

SEQ ID NO: 1147918 - RNA, 19 nt, Artificial Sequence
  Description of Artificial Sequence: Synthetic oligonucleotide
  Sense strand starting at position 2470 of SEQ ID NO: 916326
uagccaugucuuugaugcu

SEQ ID NO: 1147919 - RNA, 19 nt, Artificial Sequence
  Description of Artificial Sequence: Synthetic oligonucleotide
  Antisense strand to SEQ ID NO: 1147918
agcaucaaagacauggcua

SEQ ID NO: 1147920 - RNA, 19 nt, Artificial Sequence
  Description of Artificial Sequence: Synthetic oligonucleotide
  Sense strand starting at position 2476 of SEQ ID NO: 916326
ugucuuugaugcucucaga

SEQ ID NO: 1147921 - RNA, 19 nt, Artificial Sequence
  Description of Artificial Sequence: Synthetic oligonucleotide
  Antisense strand to SEQ ID NO: 1147920
ucugagagcaucaaagaca

SEQ ID NO: 1147922 - RNA, 19 nt, Artificial Sequence
  Description of Artificial Sequence: Synthetic oligonucleotide
  Sense strand starting at position 2517 of SEQ ID NO: 916326
gggcuugaguuccagauuu

SEQ ID NO: 1147923 - RNA, 19 nt, Artificial Sequence
  Description of Artificial Sequence: Synthetic oligonucleotide
  Antisense strand to SEQ ID NO: 1147922
aaaucuggaacucaagccc

SEQ ID NO: 1147924 - RNA, 19 nt, Artificial Sequence
  Description of Artificial Sequence: Synthetic oligonucleotide
  Sense strand starting at position 2876 of SEQ ID NO: 916326
gugccuggccaggaguaua

SEQ ID NO: 1147925 - RNA, 19 nt, Artificial Sequence
  Description of Artificial Sequence: Synthetic oligonucleotide
  Antisense strand to SEQ ID NO: 1147924
uauacuccuggccaggcac

SEQ ID NO: 1147926 - RNA, 19 nt, Artificial Sequence
  Description of Artificial Sequence: Synthetic oligonucleotide
  Sense strand starting at position 2905 of SEQ ID NO: 916326
ccagguauucuugguuguu

SEQ ID NO: 1147927 - RNA, 19 nt, Artificial Sequence
  Description of Artificial Sequence: Synthetic oligonucleotide
  Antisense strand to SEQ ID NO: 1147926
aacaaccaagaauaccugg

SEQ ID NO: 1147928 - RNA, 19 nt, Artificial Sequence
  Description of Artificial Sequence: Synthetic oligonucleotide
  Sense strand starting at position 2908 of SEQ ID NO: 916326
gguauucuugguuguuguu

SEQ ID NO: 1147929 - RNA, 19 nt, Artificial Sequence
  Description of Artificial Sequence: Synthetic oligonucleotide
  Antisense strand to SEQ ID NO: 1147928
aacaacaaccaagaauacc

SEQ ID NO: 1147930 - RNA, 19 nt, Artificial Sequence
  Description of Artificial Sequence: Synthetic oligonucleotide
  Sense strand starting at position 2934 of SEQ ID NO: 916326
ucuugcacuugucucagaa

SEQ ID NO: 1147931 - RNA, 19 nt, Artificial Sequence
  Description of Artificial Sequence: Synthetic oligonucleotide
  Antisense strand to SEQ ID NO: 1147930
uucugagacaagugcaaga

SEQ ID NO: 1147932 - RNA, 19 nt, Artificial Sequence
  Description of Artificial Sequence: Synthetic oligonucleotide
  Sense strand starting at position 2973 of SEQ ID NO: 916326
gugucauggcacugagaaa

SEQ ID NO: 1147933 - RNA, 19 nt, Artificial Sequence
  Description of Artificial Sequence: Synthetic oligonucleotide
  Antisense strand to SEQ ID NO: 1147932
uuucucagugccaugacac

SEQ ID NO: 1147934 - RNA, 19 nt, Artificial Sequence
  Description of Artificial Sequence: Synthetic oligonucleotide
  Sense strand starting at position 3015 of SEQ ID NO: 916326
augcaagucuuugaagauu

SEQ ID NO: 1147935 - RNA, 19 nt, Artificial Sequence
  Description of Artificial Sequence: Synthetic oligonucleotide
  Antisense strand to SEQ ID NO: 1147934
aaucuucaaagacuugcau

SEQ ID NO: 1147936 - RNA, 19 nt, Artificial Sequence
  Description of Artificial Sequence: Synthetic oligonucleotide
  Sense strand starting at position 3122 of SEQ ID NO: 916326
ggcaaaucauuugaacuca

SEQ ID NO: 1147937 - RNA, 19 nt, Artificial Sequence
  Description of Artificial Sequence: Synthetic oligonucleotide
  Antisense strand to SEQ ID NO: 1147936
ugaguucaaaugauuugcc

SEQ ID NO: 1147938 - RNA, 19 nt, Artificial Sequence
  Description of Artificial Sequence: Synthetic oligonucleotide
  Sense strand starting at position 3336 of SEQ ID NO: 916326
gcacaccugccugggaaau

SEQ ID NO: 1147939 - RNA, 19 nt, Artificial Sequence
  Description of Artificial Sequence: Synthetic oligonucleotide
  Antisense strand to SEQ ID NO: 1147938
auuucccaggcaggugugc

SEQ ID NO: 1147940 - RNA, 19 nt, Artificial Sequence
  Description of Artificial Sequence: Synthetic oligonucleotide
  Sense strand starting at position 3409 of SEQ ID NO: 916326
gggcaaucauguccuacuu

SEQ ID NO: 1147941 - RNA, 19 nt, Artificial Sequence
  Description of Artificial Sequence: Synthetic oligonucleotide
  Antisense strand to SEQ ID NO: 1147940
aaguaggacaugauugccc

SEQ ID NO: 1147942 - RNA, 19 nt, Artificial Sequence
  Description of Artificial Sequence: Synthetic oligonucleotide
  Sense strand starting at position 3465 of SEQ ID NO: 916326
uugcuauugccacaaguaa

SEQ ID NO: 1147943 - RNA, 19 nt, Artificial Sequence
  Description of Artificial Sequence: Synthetic oligonucleotide
  Antisense strand to SEQ ID NO: 1147942
uuacuuguggcaauagcaa

SEQ ID NO: 1147944 - RNA, 19 nt, Artificial Sequence
  Description of Artificial Sequence: Synthetic oligonucleotide
  Sense strand starting at position 3593 of SEQ ID NO: 916326
acccgacaacuuuguauca

SEQ ID NO: 1147945 - RNA, 19 nt, Artificial Sequence
  Description of Artificial Sequence: Synthetic oligonucleotide
  Antisense strand to SEQ ID NO: 1147944
ugauacaaaguugucgggu

SEQ ID NO: 1147946 - RNA, 19 nt, Artificial Sequence
  Description of Artificial Sequence: Synthetic oligonucleotide
  Sense strand starting at position 1260 of SEQ ID NO: 916327
agaugaagcucuccucuga

SEQ ID NO: 1147947 - RNA, 19 nt, Artificial Sequence
  Description of Artificial Sequence: Synthetic oligonucleotide
  Antisense strand to SEQ ID NO: 1147946
ucagaggagagcuucaucu

SEQ ID NO: 1147948 - RNA, 19 nt, Artificial Sequence
  Description of Artificial Sequence: Synthetic oligonucleotide
  Sense strand starting at position 1328 of SEQ ID NO: 916327
aguagagacugcuuugugu

SEQ ID NO: 1147949 - RNA, 19 nt, Artificial Sequence
  Description of Artificial Sequence: Synthetic oligonucleotide
  Antisense strand to SEQ ID NO: 1147948
acacaaagcagucucuacu

SEQ ID NO: 1147950 - RNA, 19 nt, Artificial Sequence
  Description of Artificial Sequence: Synthetic oligonucleotide
  Sense strand starting at position 1337 of SEQ ID NO: 916327
ugcuuuguguccucugcaa

SEQ ID NO: 1147951 - RNA, 19 nt, Artificial Sequence
  Description of Artificial Sequence: Synthetic oligonucleotide
  Antisense strand to SEQ ID NO: 1147950
uugcagaggacacaaagca

SEQ ID NO: 1147952 - RNA, 19 nt, Artificial Sequence
  Description of Artificial Sequence: Synthetic oligonucleotide
  Sense strand starting at position 1991 of SEQ ID NO: 916327
gcucaugucuggcuacuga

SEQ ID NO: 1147953 - RNA, 19 nt, Artificial Sequence
  Description of Artificial Sequence: Synthetic oligonucleotide
  Antisense strand to SEQ ID NO: 1147952
ucaguagccagacaugagc

SEQ ID NO: 1147954 - RNA, 19 nt, Artificial Sequence
  Description of Artificial Sequence: Synthetic oligonucleotide
  Sense strand starting at position 2074 of SEQ ID NO: 916327
cccucugagucccaggauu

SEQ ID NO: 1147955 - RNA, 19 nt, Artificial Sequence
  Description of Artificial Sequence: Synthetic oligonucleotide
  Antisense strand to SEQ ID NO: 1147954
aauccugggacucagaggg

SEQ ID NO: 1147956 - RNA, 19 nt, Artificial Sequence
  Description of Artificial Sequence: Synthetic oligonucleotide
  Sense strand starting at position 2174 of SEQ ID NO: 916327
ggugacugggccugaagua

SEQ ID NO: 1147957 - RNA, 19 nt, Artificial Sequence
  Description of Artificial Sequence: Synthetic oligonucleotide
  Antisense strand to SEQ ID NO: 1147956
uacuucaggcccagucacc

SEQ ID NO: 1147958 - RNA, 19 nt, Artificial Sequence
  Description of Artificial Sequence: Synthetic oligonucleotide
  Sense strand starting at position 2335 of SEQ ID NO: 916327
ccucuagucuuucuagcuu

SEQ ID NO: 1147959 - RNA, 19 nt, Artificial Sequence
  Description of Artificial Sequence: Synthetic oligonucleotide
  Antisense strand to SEQ ID NO: 1147958
aagcuagaaagacuagagg

SEQ ID NO: 1147960 - RNA, 19 nt, Artificial Sequence
  Description of Artificial Sequence: Synthetic oligonucleotide
  Sense strand starting at position 2387 of SEQ ID NO: 916327
gugaguuccaguggguauu

SEQ ID NO: 1147961 - RNA, 19 nt, Artificial Sequence
  Description of Artificial Sequence: Synthetic oligonucleotide
  Antisense strand to SEQ ID NO: 1147960
aauacccacuggaacucac

SEQ ID NO: 1147962 - RNA, 19 nt, Artificial Sequence
  Description of Artificial Sequence: Synthetic oligonucleotide
  Sense strand starting at position 2654 of SEQ ID NO: 916327
gggaacguguuccugugau

SEQ ID NO: 1147963 - RNA, 19 nt, Artificial Sequence
  Description of Artificial Sequence: Synthetic oligonucleotide
  Antisense strand to SEQ ID NO: 1147962
aucacaggaacacguuccc

SEQ ID NO: 1147964 - RNA, 19 nt, Artificial Sequence
  Description of Artificial Sequence: Synthetic oligonucleotide
  Sense strand starting at position 2658 of SEQ ID NO: 916327
acguguuccugugaugucu

SEQ ID NO: 1147965 - RNA, 19 nt, Artificial Sequence
  Description of Artificial Sequence: Synthetic oligonucleotide
  Antisense strand to SEQ ID NO: 1147964
agacaucacaggaacacgu

SEQ ID NO: 1147966 - RNA, 19 nt, Artificial Sequence
  Description of Artificial Sequence: Synthetic oligonucleotide
  Sense strand starting at position 2724 of SEQ ID NO: 916327
ggcagaguccaucaggacu

SEQ ID NO: 1147967 - RNA, 19 nt, Artificial Sequence
  Description of Artificial Sequence: Synthetic oligonucleotide
  Antisense strand to SEQ ID NO: 1147966
aguccugauggacucugcc

SEQ ID NO: 1147968 - RNA, 19 nt, Artificial Sequence
  Description of Artificial Sequence: Synthetic oligonucleotide
  Sense strand starting at position 2791 of SEQ ID NO: 916327
cuuucaagggacugugaga

SEQ ID NO: 1147969 - RNA, 19 nt, Artificial Sequence
  Description of Artificial Sequence: Synthetic oligonucleotide
  Antisense strand to SEQ ID NO: 1147968
ucucacagucccuugaaag

SEQ ID NO: 1147970 - RNA, 19 nt, Artificial Sequence
  Description of Artificial Sequence: Synthetic oligonucleotide
  Sense strand starting at position 2800 of SEQ ID NO: 916327
gacugugagaguugccuaa

SEQ ID NO: 1147971 - RNA, 19 nt, Artificial Sequence
  Description of Artificial Sequence: Synthetic oligonucleotide
  Antisense strand to SEQ ID NO: 1147970
uuaggcaacucucacaguc

SEQ ID NO: 1147972 - RNA, 19 nt, Artificial Sequence
  Description of Artificial Sequence: Synthetic oligonucleotide
  Sense strand starting at position 2802 of SEQ ID NO: 916327
cugugagaguugccuaaau

SEQ ID NO: 1147973 - RNA, 19 nt, Artificial Sequence
  Description of Artificial Sequence: Synthetic oligonucleotide
  Antisense strand to SEQ ID NO: 1147972
auuuaggcaacucucacag

SEQ ID NO: 1147974 - RNA, 19 nt, Artificial Sequence
  Description of Artificial Sequence: Synthetic oligonucleotide
  Sense strand starting at position 3742 of SEQ ID NO: 916327
cagaguagcuaagucuaca

SEQ ID NO: 1147975 - RNA, 19 nt, Artificial Sequence
  Description of Artificial Sequence: Synthetic oligonucleotide
  Antisense strand to SEQ ID NO: 1147974
uguagacuuagcuacucug

SEQ ID NO: 1147976 - RNA, 19 nt, Artificial Sequence
  Description of Artificial Sequence: Synthetic oligonucleotide
  Sense strand starting at position 3901 of SEQ ID NO: 916327
gucccaaggcgcuaggauu

SEQ ID NO: 1147977 - RNA, 19 nt, Artificial Sequence
  Description of Artificial Sequence: Synthetic oligonucleotide
  Antisense strand to SEQ ID NO: 1147976
aauccuagcgccuugggac

SEQ ID NO: 1147978 - RNA, 19 nt, Artificial Sequence
  Description of Artificial Sequence: Synthetic oligonucleotide
  Sense strand starting at position 3942 of SEQ ID NO: 916327
aguccucacuggcuuuaaa

SEQ ID NO: 1147979 - RNA, 19 nt, Artificial Sequence
  Description of Artificial Sequence: Synthetic oligonucleotide
  Antisense strand to SEQ ID NO: 1147978
uuuaaagccagugaggacu

SEQ ID NO: 1147980 - RNA, 19 nt, Artificial Sequence
  Description of Artificial Sequence: Synthetic oligonucleotide
  Sense strand starting at position 3 of SEQ ID NO: 916328
aguauuauugcagaucaaa

SEQ ID NO: 1147981 - RNA, 19 nt, Artificial Sequence
  Description of Artificial Sequence: Synthetic oligonucleotide
  Antisense strand to SEQ ID NO: 1147980
uuugaucugcaauaauacu

SEQ ID NO: 1147982 - RNA, 19 nt, Artificial Sequence
  Description of Artificial Sequence: Synthetic oligonucleotide
  Sense strand starting at position 59 of SEQ ID NO: 916328
agaauuaaguguguaccca

SEQ ID NO: 1147983 - RNA, 19 nt, Artificial Sequence
  Description of Artificial Sequence: Synthetic oligonucleotide
  Antisense strand to SEQ ID NO: 1147982
uggguacacacuuaauucu

SEQ ID NO: 1147984 - RNA, 19 nt, Artificial Sequence
  Description of Artificial Sequence: Synthetic oligonucleotide
  Sense strand starting at position 60 of SEQ ID NO: 916328
gaauuaaguguguacccau

SEQ ID NO: 1147985 - RNA, 19 nt, Artificial Sequence
  Description of Artificial Sequence: Synthetic oligonucleotide
  Antisense strand to SEQ ID NO: 1147984
auggguacacacuuaauuc

SEQ ID NO: 1147986 - RNA, 19 nt, Artificial Sequence
  Description of Artificial Sequence: Synthetic oligonucleotide
  Sense strand starting at position 100 of SEQ ID NO: 916328
cuuauuaaaguguaacuga

SEQ ID NO: 1147987 - RNA, 19 nt, Artificial Sequence
  Description of Artificial Sequence: Synthetic oligonucleotide
  Antisense strand to SEQ ID NO: 1147986
ucaguuacacuuuaauaag

SEQ ID NO: 1147988 - RNA, 19 nt, Artificial Sequence
  Description of Artificial Sequence: Synthetic oligonucleotide
  Sense strand starting at position 137 of SEQ ID NO: 916328
agcacucugcaagauuagu

SEQ ID NO: 1147989 - RNA, 19 nt, Artificial Sequence
  Description of Artificial Sequence: Synthetic oligonucleotide
  Antisense strand to SEQ ID NO: 1147988
acuaaucuugcagagugcu

SEQ ID NO: 1147990 - RNA, 19 nt, Artificial Sequence
  Description of Artificial Sequence: Synthetic oligonucleotide
  Sense strand starting at position 168 of SEQ ID NO: 916328
auguuucuaguuuauccaa

SEQ ID NO: 1147991 - RNA, 19 nt, Artificial Sequence
  Description of Artificial Sequence: Synthetic oligonucleotide
  Antisense strand to SEQ ID NO: 1147990
uuggauaaacuagaaacau

SEQ ID NO: 1147992 - RNA, 19 nt, Artificial Sequence
  Description of Artificial Sequence: Synthetic oligonucleotide
  Sense strand starting at position 216 of SEQ ID NO: 916328
uuaaguacauucuuaagag

SEQ ID NO: 1147993 - RNA, 19 nt, Artificial Sequence
  Description of Artificial Sequence: Synthetic oligonucleotide
  Antisense strand to SEQ ID NO: 1147992
cucuuaagaauguacuuaa

SEQ ID NO: 1147994 - RNA, 19 nt, Artificial Sequence
  Description of Artificial Sequence: Synthetic oligonucleotide
  Sense strand starting at position 886 of SEQ ID NO: 916328
ugcauagauuggucuugaa

SEQ ID NO: 1147995 - RNA, 19 nt, Artificial Sequence
  Description of Artificial Sequence: Synthetic oligonucleotide
  Antisense strand to SEQ ID NO: 1147994
uucaagaccaaucuaugca

SEQ ID NO: 1147996 - RNA, 19 nt, Artificial Sequence
  Description of Artificial Sequence: Synthetic oligonucleotide
  Sense strand starting at position 1011 of SEQ ID NO: 916328
guuguauauagaugcagag

SEQ ID NO: 1147997 - RNA, 19 nt, Artificial Sequence
  Description of Artificial Sequence: Synthetic oligonucleotide
  Antisense strand to SEQ ID NO: 1147996
cucugcaucuauauacaac

SEQ ID NO: 1147998 - RNA, 19 nt, Artificial Sequence
  Description of Artificial Sequence: Synthetic oligonucleotide
  Sense strand starting at position 1168 of SEQ ID NO: 916328
aagagcagucagggauaau

SEQ ID NO: 1147999 - RNA, 19 nt, Artificial Sequence
  Description of Artificial Sequence: Synthetic oligonucleotide
  Antisense strand to SEQ ID NO: 1147998
auuaucccugacugcucuu

SEQ ID NO: 1148000 - RNA, 19 nt, Artificial Sequence
  Description of Artificial Sequence: Synthetic oligonucleotide
  Sense strand starting at position 1179 of SEQ ID NO: 916328
gggauaaugcaucagucua

SEQ ID NO: 1148001 - RNA, 19 nt, Artificial Sequence
  Description of Artificial Sequence: Synthetic oligonucleotide
  Antisense strand to SEQ ID NO: 1148000
uagacugaugcauuauccc

SEQ ID NO: 1148002 - RNA, 19 nt, Artificial Sequence
  Description of Artificial Sequence: Synthetic oligonucleotide
  Sense strand starting at position 1189 of SEQ ID NO: 916328
aucagucuaccgcaaacau

SEQ ID NO: 1148003 - RNA, 19 nt, Artificial Sequence
  Description of Artificial Sequence: Synthetic oligonucleotide
  Antisense strand to SEQ ID NO: 1148002
auguuugcgguagacugau

SEQ ID NO: 1148004 - RNA, 19 nt, Artificial Sequence
  Description of Artificial Sequence: Synthetic oligonucleotide
  Sense strand starting at position 1260 of SEQ ID NO: 916328
aacgguccugucgauaaua

SEQ ID NO: 1148005 - RNA, 19 nt, Artificial Sequence
  Description of Artificial Sequence: Synthetic oligonucleotide
  Antisense strand to SEQ ID NO: 1148004
uauuaucgacaggaccguu

SEQ ID NO: 1148006 - RNA, 19 nt, Artificial Sequence
  Description of Artificial Sequence: Synthetic oligonucleotide
  Sense strand starting at position 1270 of SEQ ID NO: 916328
ucgauaauaguucggaaga

SEQ ID NO: 1148007 - RNA, 19 nt, Artificial Sequence
  Description of Artificial Sequence: Synthetic oligonucleotide
  Antisense strand to SEQ ID NO: 1148006
ucuuccgaacuauuaucga

SEQ ID NO: 1148008 - RNA, 19 nt, Artificial Sequence
  Description of Artificial Sequence: Synthetic oligonucleotide
  Sense strand starting at position 1281 of SEQ ID NO: 916328
ucggaagaucuccauccau

SEQ ID NO: 1148009 - RNA, 19 nt, Artificial Sequence
  Description of Artificial Sequence: Synthetic oligonucleotide
  Antisense strand to SEQ ID NO: 1148008
auggauggagaucuuccga

SEQ ID NO: 1148010 - RNA, 19 nt, Artificial Sequence
  Description of Artificial Sequence: Synthetic oligonucleotide
  Sense strand starting at position 1435 of SEQ ID NO: 916328
gggcuaacauuugagaaug

SEQ ID NO: 1148011 - RNA, 19 nt, Artificial Sequence
  Description of Artificial Sequence: Synthetic oligonucleotide
  Antisense strand to SEQ ID NO: 1148010
cauucucaaauguuagccc

SEQ ID NO: 1148012 - RNA, 19 nt, Artificial Sequence
  Description of Artificial Sequence: Synthetic oligonucleotide
  Sense strand starting at position 1437 of SEQ ID NO: 916328
gcuaacauuugagaaugaa

SEQ ID NO: 1148013 - RNA, 19 nt, Artificial Sequence
  Description of Artificial Sequence: Synthetic oligonucleotide
  Antisense strand to SEQ ID NO: 1148012
uucauucucaaauguuagc

SEQ ID NO: 1148014 - RNA, 19 nt, Artificial Sequence
  Description of Artificial Sequence: Synthetic oligonucleotide
  Sense strand starting at position 1586 of SEQ ID NO: 916328
aaugaauaccacugagguc

SEQ ID NO: 1148015 - RNA, 19 nt, Artificial Sequence
  Description of Artificial Sequence: Synthetic oligonucleotide
  Antisense strand to SEQ ID NO: 1148014
gaccucagugguauucauu

SEQ ID NO: 1148016 - RNA, 19 nt, Artificial Sequence
  Description of Artificial Sequence: Synthetic oligonucleotide
  Sense strand starting at position 1618 of SEQ ID NO: 916328
augagauucuaagugagug

SEQ ID NO: 1148017 - RNA, 19 nt, Artificial Sequence
  Description of Artificial Sequence: Synthetic oligonucleotide
  Antisense strand to SEQ ID NO: 1148016
cacucacuuagaaucucau

SEQ ID NO: 1148018 - RNA, 19 nt, Artificial Sequence
  Description of Artificial Sequence: Synthetic oligonucleotide
  Sense strand starting at position 1619 of SEQ ID NO: 916328
ugagauucuaagugaguga

SEQ ID NO: 1148019 - RNA, 19 nt, Artificial Sequence
  Description of Artificial Sequence: Synthetic oligonucleotide
  Antisense strand to SEQ ID NO: 1148018
ucacucacuuagaaucuca

SEQ ID NO: 1148020 - RNA, 19 nt, Artificial Sequence
  Description of Artificial Sequence: Synthetic oligonucleotide
  Sense strand starting at position 1652 of SEQ ID NO: 916328
cccuuugagggucaaacuu

SEQ ID NO: 1148021 - RNA, 19 nt, Artificial Sequence
  Description of Artificial Sequence: Synthetic oligonucleotide
  Antisense strand to SEQ ID NO: 1148020
aaguuugacccucaaaggg

SEQ ID NO: 1148022 - RNA, 19 nt, Artificial Sequence
  Description of Artificial Sequence: Synthetic oligonucleotide
  Sense strand starting at position 1787 of SEQ ID NO: 916328
agauauauggcucaccucu

SEQ ID NO: 1148023 - RNA, 19 nt, Artificial Sequence
  Description of Artificial Sequence: Synthetic oligonucleotide
  Antisense strand to SEQ ID NO: 1148022
agaggugagccauauaucu

SEQ ID NO: 1148024 - RNA, 19 nt, Artificial Sequence
  Description of Artificial Sequence: Synthetic oligonucleotide
  Sense strand starting at position 1818 of SEQ ID NO: 916328
guugcagaagacggauauu

SEQ ID NO: 1148025 - RNA, 19 nt, Artificial Sequence
  Description of Artificial Sequence: Synthetic oligonucleotide
  Antisense strand to SEQ ID NO: 1148024
aauauccgucuucugcaac

SEQ ID NO: 1148026 - RNA, 19 nt, Artificial Sequence
  Description of Artificial Sequence: Synthetic oligonucleotide
  Sense strand starting at position 1827 of SEQ ID NO: 916328
gacggauauugccuccaca

SEQ ID NO: 1148027 - RNA, 19 nt, Artificial Sequence
  Description of Artificial Sequence: Synthetic oligonucleotide
  Antisense strand to SEQ ID NO: 1148026
uguggaggcaauauccguc

SEQ ID NO: 1148028 - RNA, 19 nt, Artificial Sequence
  Description of Artificial Sequence: Synthetic oligonucleotide
  Sense strand starting at position 1963 of SEQ ID NO: 916328
aaauguuucggucagugac

SEQ ID NO: 1148029 - RNA, 19 nt, Artificial Sequence
  Description of Artificial Sequence: Synthetic oligonucleotide
  Antisense strand to SEQ ID NO: 1148028
gucacugaccgaaacauuu

SEQ ID NO: 1148030 - RNA, 19 nt, Artificial Sequence
  Description of Artificial Sequence: Synthetic oligonucleotide
  Sense strand starting at position 2039 of SEQ ID NO: 916328
cgccuagugacauaguaac

SEQ ID NO: 1148031 - RNA, 19 nt, Artificial Sequence
  Description of Artificial Sequence: Synthetic oligonucleotide
  Antisense strand to SEQ ID NO: 1148030
guuacuaugucacuaggcg

SEQ ID NO: 1148032 - RNA, 19 nt, Artificial Sequence
  Description of Artificial Sequence: Synthetic oligonucleotide
  Sense strand starting at position 2045 of SEQ ID NO: 916328
gugacauaguaaccaucuu

SEQ ID NO: 1148033 - RNA, 19 nt, Artificial Sequence
  Description of Artificial Sequence: Synthetic oligonucleotide
  Antisense strand to SEQ ID NO: 1148032
aagaugguuacuaugucac

SEQ ID NO: 1148034 - RNA, 19 nt, Artificial Sequence
  Description of Artificial Sequence: Synthetic oligonucleotide
  Sense strand starting at position 2136 of SEQ ID NO: 916328
cuguauaaaguauagcaau

SEQ ID NO: 1148035 - RNA, 19 nt, Artificial Sequence
  Description of Artificial Sequence: Synthetic oligonucleotide
  Antisense strand to SEQ ID NO: 1148034
auugcuauacuuuauacag

SEQ ID NO: 1148036 - RNA, 19 nt, Artificial Sequence
  Description of Artificial Sequence: Synthetic oligonucleotide
  Sense strand starting at position 2276 of SEQ ID NO: 916328
ucugguaggucuuucagga

SEQ ID NO: 1148037 - RNA, 19 nt, Artificial Sequence
  Description of Artificial Sequence: Synthetic oligonucleotide
  Antisense strand to SEQ ID NO: 1148036
uccugaaagaccuaccaga

SEQ ID NO: 1148038 - RNA, 19 nt, Artificial Sequence
  Description of Artificial Sequence: Synthetic oligonucleotide
  Sense strand starting at position 2535 of SEQ ID NO: 916328
acaguuguacaacauguua

SEQ ID NO: 1148039 - RNA, 19 nt, Artificial Sequence
  Description of Artificial Sequence: Synthetic oligonucleotide
  Antisense strand to SEQ ID NO: 1148038
uaacauguuguacaacugu

SEQ ID NO: 1148040 - RNA, 19 nt, Artificial Sequence
  Description of Artificial Sequence: Synthetic oligonucleotide
  Sense strand starting at position 3159 of SEQ ID NO: 916328
auuacuuaccauugaguua

SEQ ID NO: 1148041 - RNA, 19 nt, Artificial Sequence
  Description of Artificial Sequence: Synthetic oligonucleotide
  Antisense strand to SEQ ID NO: 1148040
uaacucaaugguaaguaau

SEQ ID NO: 1148042 - RNA, 19 nt, Artificial Sequence
  Description of Artificial Sequence: Synthetic oligonucleotide
  Sense strand starting at position 3357 of SEQ ID NO: 916328
guaacacaugacuguacau

SEQ ID NO: 1148043 - RNA, 19 nt, Artificial Sequence
  Description of Artificial Sequence: Synthetic oligonucleotide
  Antisense strand to SEQ ID NO: 1148042
auguacagucauguguuac

SEQ ID NO: 1148044 - RNA, 19 nt, Artificial Sequence
  Description of Artificial Sequence: Synthetic oligonucleotide
  Sense strand starting at position 3415 of SEQ ID NO: 916328
agggcuuuaugggcuauau

SEQ ID NO: 1148045 - RNA, 19 nt, Artificial Sequence
  Description of Artificial Sequence: Synthetic oligonucleotide
  Antisense strand to SEQ ID NO: 1148044
auauagcccauaaagcccu

SEQ ID NO: 1148046 - RNA, 19 nt, Artificial Sequence
  Description of Artificial Sequence: Synthetic oligonucleotide
  Sense strand starting at position 3417 of SEQ ID NO: 916328
ggcuuuaugggcuauauua

SEQ ID NO: 1148047 - RNA, 19 nt, Artificial Sequence
  Description of Artificial Sequence: Synthetic oligonucleotide
  Antisense strand to SEQ ID NO: 1148046
uaauauagcccauaaagcc

SEQ ID NO: 1148048 - RNA, 19 nt, Artificial Sequence
  Description of Artificial Sequence: Synthetic oligonucleotide
  Sense strand starting at position 3419 of SEQ ID NO: 916328
cuuuaugggcuauauuaag

SEQ ID NO: 1148049 - RNA, 19 nt, Artificial Sequence
  Description of Artificial Sequence: Synthetic oligonucleotide
  Antisense strand to SEQ ID NO: 1148048
cuuaauauagcccauaaag

SEQ ID NO: 1148050 - RNA, 19 nt, Artificial Sequence
  Description of Artificial Sequence: Synthetic oligonucleotide
  Sense strand starting at position 3516 of SEQ ID NO: 916328
gaggguuaggcugagcuua

SEQ ID NO: 1148051 - RNA, 19 nt, Artificial Sequence
  Description of Artificial Sequence: Synthetic oligonucleotide
  Antisense strand to SEQ ID NO: 1148050
uaagcucagccuaacccuc

SEQ ID NO: 1148052 - RNA, 19 nt, Artificial Sequence
  Description of Artificial Sequence: Synthetic oligonucleotide
  Sense strand starting at position 3527 of SEQ ID NO: 916328
ugagcuuauguauagaaua

SEQ ID NO: 1148053 - RNA, 19 nt, Artificial Sequence
  Description of Artificial Sequence: Synthetic oligonucleotide
  Antisense strand to SEQ ID NO: 1148052
uauucuauacauaagcuca

SEQ ID NO: 1148054 - RNA, 19 nt, Artificial Sequence
  Description of Artificial Sequence: Synthetic oligonucleotide
  Sense strand starting at position 3547 of SEQ ID NO: 916328
ccaaguguccuguacaaau

SEQ ID NO: 1148055 - RNA, 19 nt, Artificial Sequence
  Description of Artificial Sequence: Synthetic oligonucleotide
  Antisense strand to SEQ ID NO: 1148054
auuuguacaggacacuugg

SEQ ID NO: 1148056 - RNA, 19 nt, Artificial Sequence
  Description of Artificial Sequence: Synthetic oligonucleotide
  Sense strand starting at position 3577 of SEQ ID NO: 916328
uagacaagaucuguuguau

SEQ ID NO: 1148057 - RNA, 19 nt, Artificial Sequence
  Description of Artificial Sequence: Synthetic oligonucleotide
  Antisense strand to SEQ ID NO: 1148056
auacaacagaucuugucua

SEQ ID NO: 1148058 - RNA, 19 nt, Artificial Sequence
  Description of Artificial Sequence: Synthetic oligonucleotide
  Sense strand starting at position 3717 of SEQ ID NO: 916328
ucuggaauagcuggaauua

SEQ ID NO: 1148059 - RNA, 19 nt, Artificial Sequence
  Description of Artificial Sequence: Synthetic oligonucleotide
  Antisense strand to SEQ ID NO: 1148058
uaauuccagcuauuccaga

SEQ ID NO: 1148060 - RNA, 19 nt, Artificial Sequence
  Description of Artificial Sequence: Synthetic oligonucleotide
  Sense strand starting at position 26 of SEQ ID NO: 916329
acugaugaaucagaaagaa

SEQ ID NO: 1148061 - RNA, 19 nt, Artificial Sequence
  Description of Artificial Sequence: Synthetic oligonucleotide
  Antisense strand to SEQ ID NO: 1148060
uucuuucugauucaucagu

SEQ ID NO: 1148062 - RNA, 19 nt, Artificial Sequence
  Description of Artificial Sequence: Synthetic oligonucleotide
  Sense strand starting at position 65 of SEQ ID NO: 916329
agggaaguguaaccugaua

SEQ ID NO: 1148063 - RNA, 19 nt, Artificial Sequence
  Description of Artificial Sequence: Synthetic oligonucleotide
  Antisense strand to SEQ ID NO: 1148062
uaucagguuacacuucccu

SEQ ID NO: 1148064 - RNA, 19 nt, Artificial Sequence
  Description of Artificial Sequence: Synthetic oligonucleotide
  Sense strand starting at position 67 of SEQ ID NO: 916329
ggaaguguaaccugauauc

SEQ ID NO: 1148065 - RNA, 19 nt, Artificial Sequence
  Description of Artificial Sequence: Synthetic oligonucleotide
  Antisense strand to SEQ ID NO: 1148064
gauaucagguuacacuucc

SEQ ID NO: 1148066 - RNA, 19 nt, Artificial Sequence
  Description of Artificial Sequence: Synthetic oligonucleotide
  Sense strand starting at position 73 of SEQ ID NO: 916329
guaaccugauaucaaagga

SEQ ID NO: 1148067 - RNA, 19 nt, Artificial Sequence
  Description of Artificial Sequence: Synthetic oligonucleotide
  Antisense strand to SEQ ID NO: 1148066
uccuuugauaucagguuac

SEQ ID NO: 1148068 - RNA, 19 nt, Artificial Sequence
  Description of Artificial Sequence: Synthetic oligonucleotide
  Sense strand starting at position 145 of SEQ ID NO: 916329
auauuaguagacugcaaau

SEQ ID NO: 1148069 - RNA, 19 nt, Artificial Sequence
  Description of Artificial Sequence: Synthetic oligonucleotide
  Antisense strand to SEQ ID NO: 1148068
auuugcagucuacuaauau

SEQ ID NO: 1148070 - RNA, 19 nt, Artificial Sequence
  Description of Artificial Sequence: Synthetic oligonucleotide
  Sense strand starting at position 311 of SEQ ID NO: 916329
gcaccagugcauuaucuuu

SEQ ID NO: 1148071 - RNA, 19 nt, Artificial Sequence
  Description of Artificial Sequence: Synthetic oligonucleotide
  Antisense strand to SEQ ID NO: 1148070
aaagauaaugcacuggugc

SEQ ID NO: 1148072 - RNA, 19 nt, Artificial Sequence
  Description of Artificial Sequence: Synthetic oligonucleotide
  Sense strand starting at position 316 of SEQ ID NO: 916329
agugcauuaucuuugggca

SEQ ID NO: 1148073 - RNA, 19 nt, Artificial Sequence
  Description of Artificial Sequence: Synthetic oligonucleotide
  Antisense strand to SEQ ID NO: 1148072
ugcccaaagauaaugcacu

SEQ ID NO: 1148074 - RNA, 19 nt, Artificial Sequence
  Description of Artificial Sequence: Synthetic oligonucleotide
  Sense strand starting at position 424 of SEQ ID NO: 916329
ccaccuagguuuccuauua

SEQ ID NO: 1148075 - RNA, 19 nt, Artificial Sequence
  Description of Artificial Sequence: Synthetic oligonucleotide
  Antisense strand to SEQ ID NO: 1148074
uaauaggaaaccuaggugg

SEQ ID NO: 1148076 - RNA, 19 nt, Artificial Sequence
  Description of Artificial Sequence: Synthetic oligonucleotide
  Sense strand starting at position 592 of SEQ ID NO: 916329
cacaguuucugauucguua

SEQ ID NO: 1148077 - RNA, 19 nt, Artificial Sequence
  Description of Artificial Sequence: Synthetic oligonucleotide
  Antisense strand to SEQ ID NO: 1148076
uaacgaaucagaaacugug

SEQ ID NO: 1148078 - RNA, 19 nt, Artificial Sequence
  Description of Artificial Sequence: Synthetic oligonucleotide
  Sense strand starting at position 605 of SEQ ID NO: 916329
ucguuaagucuggacugaa

SEQ ID NO: 1148079 - RNA, 19 nt, Artificial Sequence
  Description of Artificial Sequence: Synthetic oligonucleotide
  Antisense strand to SEQ ID NO: 1148078
uucaguccagacuuaacga

SEQ ID NO: 1148080 - RNA, 19 nt, Artificial Sequence
  Description of Artificial Sequence: Synthetic oligonucleotide
  Sense strand starting at position 679 of SEQ ID NO: 916329
ugggcaacgcuuugagaac

SEQ ID NO: 1148081 - RNA, 19 nt, Artificial Sequence
  Description of Artificial Sequence: Synthetic oligonucleotide
  Antisense strand to SEQ ID NO: 1148080
guucucaaagcguugccca

SEQ ID NO: 1148082 - RNA, 19 nt, Artificial Sequence
  Description of Artificial Sequence: Synthetic oligonucleotide
  Sense strand starting at position 789 of SEQ ID NO: 916329
uaguaagaggucugugauu

SEQ ID NO: 1148083 - RNA, 19 nt, Artificial Sequence
  Description of Artificial Sequence: Synthetic oligonucleotide
  Antisense strand to SEQ ID NO: 1148082
aaucacagaccucuuacua

SEQ ID NO: 1148084 - RNA, 19 nt, Artificial Sequence
  Description of Artificial Sequence: Synthetic oligonucleotide
  Sense strand starting at position 791 of SEQ ID NO: 916329
guaagaggucugugauucu

SEQ ID NO: 1148085 - RNA, 19 nt, Artificial Sequence
  Description of Artificial Sequence: Synthetic oligonucleotide
  Antisense strand to SEQ ID NO: 1148084
agaaucacagaccucuuac

SEQ ID NO: 1148086 - RNA, 19 nt, Artificial Sequence
  Description of Artificial Sequence: Synthetic oligonucleotide
  Sense strand starting at position 828 of SEQ ID NO: 916329
aagaaauaagcuggaguuu

SEQ ID NO: 1148087 - RNA, 19 nt, Artificial Sequence
  Description of Artificial Sequence: Synthetic oligonucleotide
  Antisense strand to SEQ ID NO: 1148086
aaacuccagcuuauuucuu

SEQ ID NO: 1148088 - RNA, 19 nt, Artificial Sequence
  Description of Artificial Sequence: Synthetic oligonucleotide
  Sense strand starting at position 884 of SEQ ID NO: 916329
gaaagacgucaaggcuaau

SEQ ID NO: 1148089 - RNA, 19 nt, Artificial Sequence
  Description of Artificial Sequence: Synthetic oligonucleotide
  Antisense strand to SEQ ID NO: 1148088
auuagccuugacgucuuuc

SEQ ID NO: 1148090 - RNA, 19 nt, Artificial Sequence
  Description of Artificial Sequence: Synthetic oligonucleotide
  Sense strand starting at position 890 of SEQ ID NO: 916329
cgucaaggcuaauuaggaa

SEQ ID NO: 1148091 - RNA, 19 nt, Artificial Sequence
  Description of Artificial Sequence: Synthetic oligonucleotide
  Antisense strand to SEQ ID NO: 1148090
uuccuaauuagccuugacg

SEQ ID NO: 1148092 - RNA, 19 nt, Artificial Sequence
  Description of Artificial Sequence: Synthetic oligonucleotide
  Sense strand starting at position 1372 of SEQ ID NO: 916329
cgagcuguucggcaaagau

SEQ ID NO: 1148093 - RNA, 19 nt, Artificial Sequence
  Description of Artificial Sequence: Synthetic oligonucleotide
  Antisense strand to SEQ ID NO: 1148092
aucuuugccgaacagcucg

SEQ ID NO: 1148094 - RNA, 19 nt, Artificial Sequence
  Description of Artificial Sequence: Synthetic oligonucleotide
  Sense strand starting at position 1577 of SEQ ID NO: 916329
gcucguucucggcugcaau

SEQ ID NO: 1148095 - RNA, 19 nt, Artificial Sequence
  Description of Artificial Sequence: Synthetic oligonucleotide
  Antisense strand to SEQ ID NO: 1148094
auugcagccgagaacgagc

SEQ ID NO: 1148096 - RNA, 19 nt, Artificial Sequence
  Description of Artificial Sequence: Synthetic oligonucleotide
  Sense strand starting at position 1631 of SEQ ID NO: 916329
ggaugauccgguugagguc

SEQ ID NO: 1148097 - RNA, 19 nt, Artificial Sequence
  Description of Artificial Sequence: Synthetic oligonucleotide
  Antisense strand to SEQ ID NO: 1148096
gaccucaaccggaucaucc

SEQ ID NO: 1148098 - RNA, 19 nt, Artificial Sequence
  Description of Artificial Sequence: Synthetic oligonucleotide
  Sense strand starting at position 2005 of SEQ ID NO: 916329
uaggcuucuuucccggaaa

SEQ ID NO: 1148099 - RNA, 19 nt, Artificial Sequence
  Description of Artificial Sequence: Synthetic oligonucleotide
  Antisense strand to SEQ ID NO: 1148098
uuuccgggaaagaagccua

SEQ ID NO: 1148100 - RNA, 19 nt, Artificial Sequence
  Description of Artificial Sequence: Synthetic oligonucleotide
  Sense strand starting at position 2008 of SEQ ID NO: 916329
gcuucuuucccggaaagga

SEQ ID NO: 1148101 - RNA, 19 nt, Artificial Sequence
  Description of Artificial Sequence: Synthetic oligonucleotide
  Antisense strand to SEQ ID NO: 1148100
uccuuuccgggaaagaagc

SEQ ID NO: 1148102 - RNA, 19 nt, Artificial Sequence
  Description of Artificial Sequence: Synthetic oligonucleotide
  Sense strand starting at position 2151 of SEQ ID NO: 916329
gcauaucuggaugguguga

SEQ ID NO: 1148103 - RNA, 19 nt, Artificial Sequence
  Description of Artificial Sequence: Synthetic oligonucleotide
  Antisense strand to SEQ ID NO: 1148102
ucacaccauccagauaugc

SEQ ID NO: 1148104 - RNA, 19 nt, Artificial Sequence
  Description of Artificial Sequence: Synthetic oligonucleotide
  Sense strand starting at position 2176 of SEQ ID NO: 916329
uuguuaguccgagaacugu

SEQ ID NO: 1148105 - RNA, 19 nt, Artificial Sequence
  Description of Artificial Sequence: Synthetic oligonucleotide
  Antisense strand to SEQ ID NO: 1148104
acaguucucggacuaacaa

SEQ ID NO: 1148106 - RNA, 19 nt, Artificial Sequence
  Description of Artificial Sequence: Synthetic oligonucleotide
  Sense strand starting at position 2184 of SEQ ID NO: 916329
ccgagaacuguaugggcau

SEQ ID NO: 1148107 - RNA, 19 nt, Artificial Sequence
  Description of Artificial Sequence: Synthetic oligonucleotide
  Antisense strand to SEQ ID NO: 1148106
augcccauacaguucucgg

SEQ ID NO: 1148108 - RNA, 19 nt, Artificial Sequence
  Description of Artificial Sequence: Synthetic oligonucleotide
  Sense strand starting at position 2385 of SEQ ID NO: 916329
agaugaauuccaugcaagu

SEQ ID NO: 1148109 - RNA, 19 nt, Artificial Sequence
  Description of Artificial Sequence: Synthetic oligonucleotide
  Antisense strand to SEQ ID NO: 1148108
acuugcauggaauucaucu

SEQ ID NO: 1148110 - RNA, 19 nt, Artificial Sequence
  Description of Artificial Sequence: Synthetic oligonucleotide
  Sense strand starting at position 2401 of SEQ ID NO: 916329
aguuaaugugaaggaauuc

SEQ ID NO: 1148111 - RNA, 19 nt, Artificial Sequence
  Description of Artificial Sequence: Synthetic oligonucleotide
  Antisense strand to SEQ ID NO: 1148110
gaauuccuucacauuaacu

SEQ ID NO: 1148112 - RNA, 19 nt, Artificial Sequence
  Description of Artificial Sequence: Synthetic oligonucleotide
  Sense strand starting at position 2424 of SEQ ID NO: 916329
ccugauagaugagacaaau

SEQ ID NO: 1148113 - RNA, 19 nt, Artificial Sequence
  Description of Artificial Sequence: Synthetic oligonucleotide
  Antisense strand to SEQ ID NO: 1148112
auuugucucaucuaucagg

SEQ ID NO: 1148114 - RNA, 19 nt, Artificial Sequence
  Description of Artificial Sequence: Synthetic oligonucleotide
  Sense strand starting at position 2506 of SEQ ID NO: 916329
cccuuuaaaugauagggau

SEQ ID NO: 1148115 - RNA, 19 nt, Artificial Sequence
  Description of Artificial Sequence: Synthetic oligonucleotide
  Antisense strand to SEQ ID NO: 1148114
aucccuaucauuuaaaggg

SEQ ID NO: 1148116 - RNA, 19 nt, Artificial Sequence
  Description of Artificial Sequence: Synthetic oligonucleotide
  Sense strand starting at position 2530 of SEQ ID NO: 916329
aagugaagugcuggguaga

SEQ ID NO: 1148117 - RNA, 19 nt, Artificial Sequence
  Description of Artificial Sequence: Synthetic oligonucleotide
  Antisense strand to SEQ ID NO: 1148116
ucuacccagcacuucacuu

SEQ ID NO: 1148118 - RNA, 19 nt, Artificial Sequence
  Description of Artificial Sequence: Synthetic oligonucleotide
  Sense strand starting at position 2663 of SEQ ID NO: 916329
cccauacugugccuaugaa

SEQ ID NO: 1148119 - RNA, 19 nt, Artificial Sequence
  Description of Artificial Sequence: Synthetic oligonucleotide
  Antisense strand to SEQ ID NO: 1148118
uucauaggcacaguauggg

SEQ ID NO: 1148120 - RNA, 19 nt, Artificial Sequence
  Description of Artificial Sequence: Synthetic oligonucleotide
  Sense strand starting at position 2664 of SEQ ID NO: 916329
ccauacugugccuaugaaa

SEQ ID NO: 1148121 - RNA, 19 nt, Artificial Sequence
  Description of Artificial Sequence: Synthetic oligonucleotide
  Antisense strand to SEQ ID NO: 1148120
uuucauaggcacaguaugg

SEQ ID NO: 1148122 - RNA, 19 nt, Artificial Sequence
  Description of Artificial Sequence: Synthetic oligonucleotide
  Sense strand starting at position 2995 of SEQ ID NO: 916329
cugucugugcgacaaggua

SEQ ID NO: 1148123 - RNA, 19 nt, Artificial Sequence
  Description of Artificial Sequence: Synthetic oligonucleotide
  Antisense strand to SEQ ID NO: 1148122
uaccuugucgcacagacag

SEQ ID NO: 1148124 - RNA, 19 nt, Artificial Sequence
  Description of Artificial Sequence: Synthetic oligonucleotide
  Sense strand starting at position 3359 of SEQ ID NO: 916329
guuauacuguuucuaucca

SEQ ID NO: 1148125 - RNA, 19 nt, Artificial Sequence
  Description of Artificial Sequence: Synthetic oligonucleotide
  Antisense strand to SEQ ID NO: 1148124
uggauagaaacaguauaac

SEQ ID NO: 1148126 - RNA, 19 nt, Artificial Sequence
  Description of Artificial Sequence: Synthetic oligonucleotide
  Sense strand starting at position 3429 of SEQ ID NO: 916329
cugguucuuccugagguua

SEQ ID NO: 1148127 - RNA, 19 nt, Artificial Sequence
  Description of Artificial Sequence: Synthetic oligonucleotide
  Antisense strand to SEQ ID NO: 1148126
uaaccucaggaagaaccag

SEQ ID NO: 1148128 - RNA, 19 nt, Artificial Sequence
  Description of Artificial Sequence: Synthetic oligonucleotide
  Sense strand starting at position 3460 of SEQ ID NO: 916329
ggguucuaauuacauuuaa

SEQ ID NO: 1148129 - RNA, 19 nt, Artificial Sequence
  Description of Artificial Sequence: Synthetic oligonucleotide
  Antisense strand to SEQ ID NO: 1148128
uuaaauguaauuagaaccc

SEQ ID NO: 1148130 - RNA, 19 nt, Artificial Sequence
  Description of Artificial Sequence: Synthetic oligonucleotide
  Sense strand starting at position 3532 of SEQ ID NO: 916329
gcagauaauuaagauagau

SEQ ID NO: 1148131 - RNA, 19 nt, Artificial Sequence
  Description of Artificial Sequence: Synthetic oligonucleotide
  Antisense strand to SEQ ID NO: 1148130
aucuaucuuaauuaucugc

SEQ ID NO: 1148132 - RNA, 19 nt, Artificial Sequence
  Description of Artificial Sequence: Synthetic oligonucleotide
  Sense strand starting at position 3552 of SEQ ID NO: 916329
gggucaauuaacugaguuc

SEQ ID NO: 1148133 - RNA, 19 nt, Artificial Sequence
  Description of Artificial Sequence: Synthetic oligonucleotide
  Antisense strand to SEQ ID NO: 1148132
gaacucaguuaauugaccc

SEQ ID NO: 1148134 - RNA, 19 nt, Artificial Sequence
  Description of Artificial Sequence: Synthetic oligonucleotide
  Sense strand starting at position 3748 of SEQ ID NO: 916329
cuaugucucuuccuugauu

SEQ ID NO: 1148135 - RNA, 19 nt, Artificial Sequence
  Description of Artificial Sequence: Synthetic oligonucleotide
  Antisense strand to SEQ ID NO: 1148134
aaucaaggaagagacauag

SEQ ID NO: 1148136 - RNA, 19 nt, Artificial Sequence
  Description of Artificial Sequence: Synthetic oligonucleotide
  Sense strand starting at position 3750 of SEQ ID NO: 916329
augucucuuccuugauuuc

SEQ ID NO: 1148137 - RNA, 19 nt, Artificial Sequence
  Description of Artificial Sequence: Synthetic oligonucleotide
  Antisense strand to SEQ ID NO: 1148136
gaaaucaaggaagagacau

SEQ ID NO: 1148138 - RNA, 19 nt, Artificial Sequence
  Description of Artificial Sequence: Synthetic oligonucleotide
  Sense strand starting at position 3844 of SEQ ID NO: 916329
ggacaucaugaaugucuaa

SEQ ID NO: 1148139 - RNA, 19 nt, Artificial Sequence
  Description of Artificial Sequence: Synthetic oligonucleotide
  Antisense strand to SEQ ID NO: 1148138
uuagacauucaugaugucc

SEQ ID NO: 1148140 - RNA, 19 nt, Artificial Sequence
  Description of Artificial Sequence: Synthetic oligonucleotide
  Sense strand starting at position 284 of SEQ ID NO: 916330
ggugguaccaauugguauu

SEQ ID NO: 1148141 - RNA, 19 nt, Artificial Sequence
  Description of Artificial Sequence: Synthetic oligonucleotide
  Antisense strand to SEQ ID NO: 1148140
aauaccaauugguaccacc

SEQ ID NO: 1148142 - RNA, 19 nt, Artificial Sequence
  Description of Artificial Sequence: Synthetic oligonucleotide
  Sense strand starting at position 353 of SEQ ID NO: 916330
acaugaugauacuugguau

SEQ ID NO: 1148143 - RNA, 19 nt, Artificial Sequence
  Description of Artificial Sequence: Synthetic oligonucleotide
  Antisense strand to SEQ ID NO: 1148142
auaccaaguaucaucaugu

SEQ ID NO: 1148144 - RNA, 19 nt, Artificial Sequence
  Description of Artificial Sequence: Synthetic oligonucleotide
  Sense strand starting at position 356 of SEQ ID NO: 916330
ugaugauacuugguauugu

SEQ ID NO: 1148145 - RNA, 19 nt, Artificial Sequence
  Description of Artificial Sequence: Synthetic oligonucleotide
  Antisense strand to SEQ ID NO: 1148144
acaauaccaaguaucauca

SEQ ID NO: 1148146 - RNA, 19 nt, Artificial Sequence
  Description of Artificial Sequence: Synthetic oligonucleotide
  Sense strand starting at position 664 of SEQ ID NO: 916330
cgccucuugcgaucaagca

SEQ ID NO: 1148147 - RNA, 19 nt, Artificial Sequence
  Description of Artificial Sequence: Synthetic oligonucleotide
  Antisense strand to SEQ ID NO: 1148146
ugcuugaucgcaagaggcg

SEQ ID NO: 1148148 - RNA, 19 nt, Artificial Sequence
  Description of Artificial Sequence: Synthetic oligonucleotide
  Sense strand starting at position 1600 of SEQ ID NO: 916330
ucccauguuugacuugaaa

SEQ ID NO: 1148149 - RNA, 19 nt, Artificial Sequence
  Description of Artificial Sequence: Synthetic oligonucleotide
  Antisense strand to SEQ ID NO: 1148148
uuucaagucaaacauggga

SEQ ID NO: 1148150 - RNA, 19 nt, Artificial Sequence
  Description of Artificial Sequence: Synthetic oligonucleotide
  Sense strand starting at position 1618 of SEQ ID NO: 916330
auaaguuaacuacgauaug

SEQ ID NO: 1148151 - RNA, 19 nt, Artificial Sequence
  Description of Artificial Sequence: Synthetic oligonucleotide
  Antisense strand to SEQ ID NO: 1148150
cauaucguaguuaacuuau

SEQ ID NO: 1148152 - RNA, 19 nt, Artificial Sequence
  Description of Artificial Sequence: Synthetic oligonucleotide
  Sense strand starting at position 1621 of SEQ ID NO: 916330
aguuaacuacgauaugacu

SEQ ID NO: 1148153 - RNA, 19 nt, Artificial Sequence
  Description of Artificial Sequence: Synthetic oligonucleotide
  Antisense strand to SEQ ID NO: 1148152
agucauaucguaguuaacu

SEQ ID NO: 1148154 - RNA, 19 nt, Artificial Sequence
  Description of Artificial Sequence: Synthetic oligonucleotide
  Sense strand starting at position 1629 of SEQ ID NO: 916330
acgauaugacucugcuuga

SEQ ID NO: 1148155 - RNA, 19 nt, Artificial Sequence
  Description of Artificial Sequence: Synthetic oligonucleotide
  Antisense strand to SEQ ID NO: 1148154
ucaagcagagucauaucgu

SEQ ID NO: 1148156 - RNA, 19 nt, Artificial Sequence
  Description of Artificial Sequence: Synthetic oligonucleotide
  Sense strand starting at position 1630 of SEQ ID NO: 916330
cgauaugacucugcuugac

SEQ ID NO: 1148157 - RNA, 19 nt, Artificial Sequence
  Description of Artificial Sequence: Synthetic oligonucleotide
  Antisense strand to SEQ ID NO: 1148156
gucaagcagagucauaucg

SEQ ID NO: 1148158 - RNA, 19 nt, Artificial Sequence
  Description of Artificial Sequence: Synthetic oligonucleotide
  Sense strand starting at position 1740 of SEQ ID NO: 916330
gagcgaaagguccagacua

SEQ ID NO: 1148159 - RNA, 19 nt, Artificial Sequence
  Description of Artificial Sequence: Synthetic oligonucleotide
  Antisense strand to SEQ ID NO: 1148158
uagucuggaccuuucgcuc

SEQ ID NO: 1148160 - RNA, 19 nt, Artificial Sequence
  Description of Artificial Sequence: Synthetic oligonucleotide
  Sense strand starting at position 1742 of SEQ ID NO: 916330
gcgaaagguccagacuaag

SEQ ID NO: 1148161 - RNA, 19 nt, Artificial Sequence
  Description of Artificial Sequence: Synthetic oligonucleotide
  Antisense strand to SEQ ID NO: 1148160
cuuagucuggaccuuucgc

SEQ ID NO: 1148162 - RNA, 19 nt, Artificial Sequence
  Description of Artificial Sequence: Synthetic oligonucleotide
  Sense strand starting at position 1811 of SEQ ID NO: 916330
gcuucuaauuccucaggga

SEQ ID NO: 1148163 - RNA, 19 nt, Artificial Sequence
  Description of Artificial Sequence: Synthetic oligonucleotide
  Antisense strand to SEQ ID NO: 1148162
ucccugaggaauuagaagc

SEQ ID NO: 1148164 - RNA, 19 nt, Artificial Sequence
  Description of Artificial Sequence: Synthetic oligonucleotide
  Sense strand starting at position 2026 of SEQ ID NO: 916330
auuuauuguuccgcucagu

SEQ ID NO: 1148165 - RNA, 19 nt, Artificial Sequence
  Description of Artificial Sequence: Synthetic oligonucleotide
  Antisense strand to SEQ ID NO: 1148164
acugagcggaacaauaaau

SEQ ID NO: 1148166 - RNA, 19 nt, Artificial Sequence
  Description of Artificial Sequence: Synthetic oligonucleotide
  Sense strand starting at position 2027 of SEQ ID NO: 916330
uuuauuguuccgcucaguu

SEQ ID NO: 1148167 - RNA, 19 nt, Artificial Sequence
  Description of Artificial Sequence: Synthetic oligonucleotide
  Antisense strand to SEQ ID NO: 1148166
aacugagcggaacaauaaa

SEQ ID NO: 1148168 - RNA, 19 nt, Artificial Sequence
  Description of Artificial Sequence: Synthetic oligonucleotide
  Sense strand starting at position 2053 of SEQ ID NO: 916330
ccuccugaagucugaccaa

SEQ ID NO: 1148169 - RNA, 19 nt, Artificial Sequence
  Description of Artificial Sequence: Synthetic oligonucleotide
  Antisense strand to SEQ ID NO: 1148168
uuggucagacuucaggagg

SEQ ID NO: 1148170 - RNA, 19 nt, Artificial Sequence
  Description of Artificial Sequence: Synthetic oligonucleotide
  Sense strand starting at position 2056 of SEQ ID NO: 916330
ccugaagucugaccaauca

SEQ ID NO: 1148171 - RNA, 19 nt, Artificial Sequence
  Description of Artificial Sequence: Synthetic oligonucleotide
  Antisense strand to SEQ ID NO: 1148170
ugauuggucagacuucagg

SEQ ID NO: 1148172 - RNA, 19 nt, Artificial Sequence
  Description of Artificial Sequence: Synthetic oligonucleotide
  Sense strand starting at position 2129 of SEQ ID NO: 916330
guuggacucaacgaguaag

SEQ ID NO: 1148173 - RNA, 19 nt, Artificial Sequence
  Description of Artificial Sequence: Synthetic oligonucleotide
  Antisense strand to SEQ ID NO: 1148172
cuuacucguugaguccaac

SEQ ID NO: 1148174 - RNA, 19 nt, Artificial Sequence
  Description of Artificial Sequence: Synthetic oligonucleotide
  Sense strand starting at position 2245 of SEQ ID NO: 916330
gcggaaggacgugauaguu

SEQ ID NO: 1148175 - RNA, 19 nt, Artificial Sequence
  Description of Artificial Sequence: Synthetic oligonucleotide
  Antisense strand to SEQ ID NO: 1148174
aacuaucacguccuuccgc

SEQ ID NO: 1148176 - RNA, 19 nt, Artificial Sequence
  Description of Artificial Sequence: Synthetic oligonucleotide
  Sense strand starting at position 2255 of SEQ ID NO: 916330
gugauaguuggccaaucag

SEQ ID NO: 1148177 - RNA, 19 nt, Artificial Sequence
  Description of Artificial Sequence: Synthetic oligonucleotide
  Antisense strand to SEQ ID NO: 1148176
cugauuggccaacuaucac

SEQ ID NO: 1148178 - RNA, 19 nt, Artificial Sequence
  Description of Artificial Sequence: Synthetic oligonucleotide
  Sense strand starting at position 2530 of SEQ ID NO: 916330
cguguaagaauccgaggga

SEQ ID NO: 1148179 - RNA, 19 nt, Artificial Sequence
  Description of Artificial Sequence: Synthetic oligonucleotide
  Antisense strand to SEQ ID NO: 1148178
ucccucggauucuuacacg

SEQ ID NO: 1148180 - RNA, 19 nt, Artificial Sequence
  Description of Artificial Sequence: Synthetic oligonucleotide
  Sense strand starting at position 3105 of SEQ ID NO: 916330
aaaugacguguuugaauuc

SEQ ID NO: 1148181 - RNA, 19 nt, Artificial Sequence
  Description of Artificial Sequence: Synthetic oligonucleotide
  Antisense strand to SEQ ID NO: 1148180
gaauucaaacacgucauuu

SEQ ID NO: 1148182 - RNA, 19 nt, Artificial Sequence
  Description of Artificial Sequence: Synthetic oligonucleotide
  Sense strand starting at position 3137 of SEQ ID NO: 916330
gguucuagucguaggugua

SEQ ID NO: 1148183 - RNA, 19 nt, Artificial Sequence
  Description of Artificial Sequence: Synthetic oligonucleotide
  Antisense strand to SEQ ID NO: 1148182
uacaccuacgacuagaacc

SEQ ID NO: 1148184 - RNA, 19 nt, Artificial Sequence
  Description of Artificial Sequence: Synthetic oligonucleotide
  Sense strand starting at position 3151 of SEQ ID NO: 916330
guguauauaggguaauggu

SEQ ID NO: 1148185 - RNA, 19 nt, Artificial Sequence
  Description of Artificial Sequence: Synthetic oligonucleotide
  Antisense strand to SEQ ID NO: 1148184
accauuacccuauauacac

SEQ ID NO: 1148186 - RNA, 19 nt, Artificial Sequence
  Description of Artificial Sequence: Synthetic oligonucleotide
  Sense strand starting at position 3320 of SEQ ID NO: 916330
acauaauucuguuucggga

SEQ ID NO: 1148187 - RNA, 19 nt, Artificial Sequence
  Description of Artificial Sequence: Synthetic oligonucleotide
  Antisense strand to SEQ ID NO: 1148186
ucccgaaacagaauuaugu

SEQ ID NO: 1148188 - RNA, 19 nt, Artificial Sequence
  Description of Artificial Sequence: Synthetic oligonucleotide
  Sense strand starting at position 3340 of SEQ ID NO: 916330
gucucaccugugcauugaa

SEQ ID NO: 1148189 - RNA, 19 nt, Artificial Sequence
  Description of Artificial Sequence: Synthetic oligonucleotide
  Antisense strand to SEQ ID NO: 1148188
uucaaugcacaggugagac

SEQ ID NO: 1148190 - RNA, 19 nt, Artificial Sequence
  Description of Artificial Sequence: Synthetic oligonucleotide
  Sense strand starting at position 3412 of SEQ ID NO: 916330
aguugugacagucaagaug

SEQ ID NO: 1148191 - RNA, 19 nt, Artificial Sequence
  Description of Artificial Sequence: Synthetic oligonucleotide
  Antisense strand to SEQ ID NO: 1148190
caucuugacugucacaacu

SEQ ID NO: 1148192 - RNA, 19 nt, Artificial Sequence
  Description of Artificial Sequence: Synthetic oligonucleotide
  Sense strand starting at position 3420 of SEQ ID NO: 916330
cagucaagaugucuccaga

SEQ ID NO: 1148193 - RNA, 19 nt, Artificial Sequence
  Description of Artificial Sequence: Synthetic oligonucleotide
  Antisense strand to SEQ ID NO: 1148192
ucuggagacaucuugacug

SEQ ID NO: 1148194 - RNA, 19 nt, Artificial Sequence
  Description of Artificial Sequence: Synthetic oligonucleotide
  Sense strand starting at position 3532 of SEQ ID NO: 916330
guuaaacaaccguguugaa

SEQ ID NO: 1148195 - RNA, 19 nt, Artificial Sequence
  Description of Artificial Sequence: Synthetic oligonucleotide
  Antisense strand to SEQ ID NO: 1148194
uucaacacgguuguuuaac

SEQ ID NO: 1148196 - RNA, 19 nt, Artificial Sequence
  Description of Artificial Sequence: Synthetic oligonucleotide
  Sense strand starting at position 3554 of SEQ ID NO: 916330
uuugaaugcgaggacuuua

SEQ ID NO: 1148197 - RNA, 19 nt, Artificial Sequence
  Description of Artificial Sequence: Synthetic oligonucleotide
  Antisense strand to SEQ ID NO: 1148196
uaaaguccucgcauucaaa

SEQ ID NO: 1148198 - RNA, 19 nt, Artificial Sequence
  Description of Artificial Sequence: Synthetic oligonucleotide
  Sense strand starting at position 3559 of SEQ ID NO: 916330
augcgaggacuuuaaucua

SEQ ID NO: 1148199 - RNA, 19 nt, Artificial Sequence
  Description of Artificial Sequence: Synthetic oligonucleotide
  Antisense strand to SEQ ID NO: 1148198
uagauuaaaguccucgcau

SEQ ID NO: 1148200 - RNA, 19 nt, Artificial Sequence
  Description of Artificial Sequence: Synthetic oligonucleotide
  Sense strand starting at position 3570 of SEQ ID NO: 916330
uuaaucuaugguggcagau

SEQ ID NO: 1148201 - RNA, 19 nt, Artificial Sequence
  Description of Artificial Sequence: Synthetic oligonucleotide
  Antisense strand to SEQ ID NO: 1148200
aucugccaccauagauuaa

SEQ ID NO: 1148202 - RNA, 19 nt, Artificial Sequence
  Description of Artificial Sequence: Synthetic oligonucleotide
  Sense strand starting at position 3711 of SEQ ID NO: 916330
uuggacagccgugaguuaa

SEQ ID NO: 1148203 - RNA, 19 nt, Artificial Sequence
  Description of Artificial Sequence: Synthetic oligonucleotide
  Antisense strand to SEQ ID NO: 1148202
uuaacucacggcuguccaa

SEQ ID NO: 1148204 - RNA, 19 nt, Artificial Sequence
  Description of Artificial Sequence: Synthetic oligonucleotide
  Sense strand starting at position 3770 of SEQ ID NO: 916330
agaaaccucuucucuguga

SEQ ID NO: 1148205 - RNA, 19 nt, Artificial Sequence
  Description of Artificial Sequence: Synthetic oligonucleotide
  Antisense strand to SEQ ID NO: 1148204
ucacagagaagagguuucu

SEQ ID NO: 1148206 - RNA, 19 nt, Artificial Sequence
  Description of Artificial Sequence: Synthetic oligonucleotide
  Sense strand starting at position 3777 of SEQ ID NO: 916330
ucuucucugugaguuaaua

SEQ ID NO: 1148207 - RNA, 19 nt, Artificial Sequence
  Description of Artificial Sequence: Synthetic oligonucleotide
  Antisense strand to SEQ ID NO: 1148206
uauuaacucacagagaaga

SEQ ID NO: 1148208 - RNA, 19 nt, Artificial Sequence
  Description of Artificial Sequence: Synthetic oligonucleotide
  Sense strand starting at position 3812 of SEQ ID NO: 916330
aaguaaacaugggagauaa

SEQ ID NO: 1148209 - RNA, 19 nt, Artificial Sequence
  Description of Artificial Sequence: Synthetic oligonucleotide
  Antisense strand to SEQ ID NO: 1148208
uuaucucccauguuuacuu

SEQ ID NO: 1148210 - RNA, 19 nt, Artificial Sequence
  Description of Artificial Sequence: Synthetic oligonucleotide
  Sense strand starting at position 3822 of SEQ ID NO: 916330
gggagauaauugucaaagc

SEQ ID NO: 1148211 - RNA, 19 nt, Artificial Sequence
  Description of Artificial Sequence: Synthetic oligonucleotide
  Antisense strand to SEQ ID NO: 1148210
gcuuugacaauuaucuccc

SEQ ID NO: 1148212 - RNA, 19 nt, Artificial Sequence
  Description of Artificial Sequence: Synthetic oligonucleotide
  Sense strand starting at position 3830 of SEQ ID NO: 916330
auugucaaagcugaguaau

SEQ ID NO: 1148213 - RNA, 19 nt, Artificial Sequence
  Description of Artificial Sequence: Synthetic oligonucleotide
  Antisense strand to SEQ ID NO: 1148212
auuacucagcuuugacaau

SEQ ID NO: 1148214 - RNA, 19 nt, Artificial Sequence
  Description of Artificial Sequence: Synthetic oligonucleotide
  Sense strand starting at position 3833 of SEQ ID NO: 916330
gucaaagcugaguaaugga

SEQ ID NO: 1148215 - RNA, 19 nt, Artificial Sequence
  Description of Artificial Sequence: Synthetic oligonucleotide
  Antisense strand to SEQ ID NO: 1148214
uccauuacucagcuuugac

SEQ ID NO: 1148216 - RNA, 19 nt, Artificial Sequence
  Description of Artificial Sequence: Synthetic oligonucleotide
  Sense strand starting at position 3965 of SEQ ID NO: 916330
aguagugucucaucuggga

SEQ ID NO: 1148217 - RNA, 19 nt, Artificial Sequence
  Description of Artificial Sequence: Synthetic oligonucleotide
  Antisense strand to SEQ ID NO: 1148216
ucccagaugagacacuacu

SEQ ID NO: 1148218 - RNA, 19 nt, Artificial Sequence
  Description of Artificial Sequence: Synthetic oligonucleotide
  Sense strand starting at position 3969 of SEQ ID NO: 916330
gugucucaucugggauuuc

SEQ ID NO: 1148219 - RNA, 19 nt, Artificial Sequence
  Description of Artificial Sequence: Synthetic oligonucleotide
  Antisense strand to SEQ ID NO: 1148218
gaaaucccagaugagacac

SEQ ID NO: 1148220 - RNA, 19 nt, Artificial Sequence
  Description of Artificial Sequence: Synthetic oligonucleotide
  Sense strand starting at position 165 of SEQ ID NO: 916331
cuuaaugcaccuggaugaa

SEQ ID NO: 1148221 - RNA, 19 nt, Artificial Sequence
  Description of Artificial Sequence: Synthetic oligonucleotide
  Antisense strand to SEQ ID NO: 1148220
uucauccaggugcauuaag

SEQ ID NO: 1148222 - RNA, 19 nt, Artificial Sequence
  Description of Artificial Sequence: Synthetic oligonucleotide
  Sense strand starting at position 185 of SEQ ID NO: 916331
augagauucucagcucuac

SEQ ID NO: 1148223 - RNA, 19 nt, Artificial Sequence
  Description of Artificial Sequence: Synthetic oligonucleotide
  Antisense strand to SEQ ID NO: 1148222
guagagcugagaaucucau

SEQ ID NO: 1148224 - RNA, 19 nt, Artificial Sequence
  Description of Artificial Sequence: Synthetic oligonucleotide
  Sense strand starting at position 247 of SEQ ID NO: 916331
ggugcugaccagggacaau

SEQ ID NO: 1148225 - RNA, 19 nt, Artificial Sequence
  Description of Artificial Sequence: Synthetic oligonucleotide
  Antisense strand to SEQ ID NO: 1148224
auugucccuggucagcacc

SEQ ID NO: 1148226 - RNA, 19 nt, Artificial Sequence
  Description of Artificial Sequence: Synthetic oligonucleotide
  Sense strand starting at position 298 of SEQ ID NO: 916331
ucacuugccuaaucagaga

SEQ ID NO: 1148227 - RNA, 19 nt, Artificial Sequence
  Description of Artificial Sequence: Synthetic oligonucleotide
  Antisense strand to SEQ ID NO: 1148226
ucucugauuaggcaaguga

SEQ ID NO: 1148228 - RNA, 19 nt, Artificial Sequence
  Description of Artificial Sequence: Synthetic oligonucleotide
  Sense strand starting at position 528 of SEQ ID NO: 916331
uggccuuaacagggagauu

SEQ ID NO: 1148229 - RNA, 19 nt, Artificial Sequence
  Description of Artificial Sequence: Synthetic oligonucleotide
  Antisense strand to SEQ ID NO: 1148228
aaucucccuguuaaggcca

SEQ ID NO: 1148230 - RNA, 19 nt, Artificial Sequence
  Description of Artificial Sequence: Synthetic oligonucleotide
  Sense strand starting at position 552 of SEQ ID NO: 916331
aggcauggcaucugaauac

SEQ ID NO: 1148231 - RNA, 19 nt, Artificial Sequence
  Description of Artificial Sequence: Synthetic oligonucleotide
  Antisense strand to SEQ ID NO: 1148230
guauucagaugccaugccu

SEQ ID NO: 1148232 - RNA, 19 nt, Artificial Sequence
  Description of Artificial Sequence: Synthetic oligonucleotide
  Sense strand starting at position 620 of SEQ ID NO: 916331
ggccaaacacccuguauga

SEQ ID NO: 1148233 - RNA, 19 nt, Artificial Sequence
  Description of Artificial Sequence: Synthetic oligonucleotide
  Antisense strand to SEQ ID NO: 1148232
ucauacaggguguuuggcc

SEQ ID NO: 1148234 - RNA, 19 nt, Artificial Sequence
  Description of Artificial Sequence: Synthetic oligonucleotide
  Sense strand starting at position 787 of SEQ ID NO: 916331
agagaaagcuucccuaaau

SEQ ID NO: 1148235 - RNA, 19 nt, Artificial Sequence
  Description of Artificial Sequence: Synthetic oligonucleotide
  Antisense strand to SEQ ID NO: 1148234
auuuagggaagcuuucucu

SEQ ID NO: 1148236 - RNA, 19 nt, Artificial Sequence
  Description of Artificial Sequence: Synthetic oligonucleotide
  Sense strand starting at position 879 of SEQ ID NO: 916331
cuugguuucccacaucacu

SEQ ID NO: 1148237 - RNA, 19 nt, Artificial Sequence
  Description of Artificial Sequence: Synthetic oligonucleotide
  Antisense strand to SEQ ID NO: 1148236
agugaugugggaaaccaag

SEQ ID NO: 1148238 - RNA, 19 nt, Artificial Sequence
  Description of Artificial Sequence: Synthetic oligonucleotide
  Sense strand starting at position 1151 of SEQ ID NO: 916331
cguuuaaaugcugucaguu

SEQ ID NO: 1148239 - RNA, 19 nt, Artificial Sequence
  Description of Artificial Sequence: Synthetic oligonucleotide
  Antisense strand to SEQ ID NO: 1148238
aacugacagcauuuaaacg

SEQ ID NO: 1148240 - RNA, 19 nt, Artificial Sequence
  Description of Artificial Sequence: Synthetic oligonucleotide
  Sense strand starting at position 1276 of SEQ ID NO: 916331
ggauaucguucccucauuu

SEQ ID NO: 1148241 - RNA, 19 nt, Artificial Sequence
  Description of Artificial Sequence: Synthetic oligonucleotide
  Antisense strand to SEQ ID NO: 1148240
aaaugagggaacgauaucc

SEQ ID NO: 1148242 - RNA, 19 nt, Artificial Sequence
  Description of Artificial Sequence: Synthetic oligonucleotide
  Sense strand starting at position 2384 of SEQ ID NO: 916331
gugaaucugacuggccaga

SEQ ID NO: 1148243 - RNA, 19 nt, Artificial Sequence
  Description of Artificial Sequence: Synthetic oligonucleotide
  Antisense strand to SEQ ID NO: 1148242
ucuggccagucagauucac

SEQ ID NO: 1148244 - RNA, 19 nt, Artificial Sequence
  Description of Artificial Sequence: Synthetic oligonucleotide
  Sense strand starting at position 2543 of SEQ ID NO: 916331
gagaaaugugcuggaggac

SEQ ID NO: 1148245 - RNA, 19 nt, Artificial Sequence
  Description of Artificial Sequence: Synthetic oligonucleotide
  Antisense strand to SEQ ID NO: 1148244
guccuccagcacauuucuc

SEQ ID NO: 1148246 - RNA, 19 nt, Artificial Sequence
  Description of Artificial Sequence: Synthetic oligonucleotide
  Sense strand starting at position 2811 of SEQ ID NO: 916331
ggguuuccucugggaguga

SEQ ID NO: 1148247 - RNA, 19 nt, Artificial Sequence
  Description of Artificial Sequence: Synthetic oligonucleotide
  Antisense strand to SEQ ID NO: 1148246
ucacucccagaggaaaccc

SEQ ID NO: 1148248 - RNA, 19 nt, Artificial Sequence
  Description of Artificial Sequence: Synthetic oligonucleotide
  Sense strand starting at position 2845 of SEQ ID NO: 916331
guggcaguuccugauagaa

SEQ ID NO: 1148249 - RNA, 19 nt, Artificial Sequence
  Description of Artificial Sequence: Synthetic oligonucleotide
  Antisense strand to SEQ ID NO: 1148248
uucuaucaggaacugccac

SEQ ID NO: 1148250 - RNA, 19 nt, Artificial Sequence
  Description of Artificial Sequence: Synthetic oligonucleotide
  Sense strand starting at position 2964 of SEQ ID NO: 916331
accaaacacugugcuagau

SEQ ID NO: 1148251 - RNA, 19 nt, Artificial Sequence
  Description of Artificial Sequence: Synthetic oligonucleotide
  Antisense strand to SEQ ID NO: 1148250
aucuagcacaguguuuggu

SEQ ID NO: 1148252 - RNA, 19 nt, Artificial Sequence
  Description of Artificial Sequence: Synthetic oligonucleotide
  Sense strand starting at position 3030 of SEQ ID NO: 916331
cuuauaaauaaguggguga

SEQ ID NO: 1148253 - RNA, 19 nt, Artificial Sequence
  Description of Artificial Sequence: Synthetic oligonucleotide
  Antisense strand to SEQ ID NO: 1148252
ucacccacuuauuuauaag

SEQ ID NO: 1148254 - RNA, 19 nt, Artificial Sequence
  Description of Artificial Sequence: Synthetic oligonucleotide
  Sense strand starting at position 3031 of SEQ ID NO: 916331
uuauaaauaagugggugaa

SEQ ID NO: 1148255 - RNA, 19 nt, Artificial Sequence
  Description of Artificial Sequence: Synthetic oligonucleotide
  Antisense strand to SEQ ID NO: 1148254
uucacccacuuauuuauaa

SEQ ID NO: 1148256 - RNA, 19 nt, Artificial Sequence
  Description of Artificial Sequence: Synthetic oligonucleotide
  Sense strand starting at position 3034 of SEQ ID NO: 916331
uaaauaagugggugaaauu

SEQ ID NO: 1148257 - RNA, 19 nt, Artificial Sequence
  Description of Artificial Sequence: Synthetic oligonucleotide
  Antisense strand to SEQ ID NO: 1148256
aauuucacccacuuauuua

SEQ ID NO: 1148258 - RNA, 19 nt, Artificial Sequence
  Description of Artificial Sequence: Synthetic oligonucleotide
  Sense strand starting at position 3043 of SEQ ID NO: 916331
gggugaaauuggucaugau

SEQ ID NO: 1148259 - RNA, 19 nt, Artificial Sequence
  Description of Artificial Sequence: Synthetic oligonucleotide
  Antisense strand to SEQ ID NO: 1148258
aucaugaccaauuucaccc

SEQ ID NO: 1148260 - RNA, 19 nt, Artificial Sequence
  Description of Artificial Sequence: Synthetic oligonucleotide
  Sense strand starting at position 3044 of SEQ ID NO: 916331
ggugaaauuggucaugauu

SEQ ID NO: 1148261 - RNA, 19 nt, Artificial Sequence
  Description of Artificial Sequence: Synthetic oligonucleotide
  Antisense strand to SEQ ID NO: 1148260
aaucaugaccaauuucacc

SEQ ID NO: 1148262 - RNA, 19 nt, Artificial Sequence
  Description of Artificial Sequence: Synthetic oligonucleotide
  Sense strand starting at position 3050 of SEQ ID NO: 916331
auuggucaugauuaacuuu

SEQ ID NO: 1148263 - RNA, 19 nt, Artificial Sequence
  Description of Artificial Sequence: Synthetic oligonucleotide
  Antisense strand to SEQ ID NO: 1148262
aaaguuaaucaugaccaau

SEQ ID NO: 1148264 - RNA, 19 nt, Artificial Sequence
  Description of Artificial Sequence: Synthetic oligonucleotide
  Sense strand starting at position 3056 of SEQ ID NO: 916331
caugauuaacuuugacgua

SEQ ID NO: 1148265 - RNA, 19 nt, Artificial Sequence
  Description of Artificial Sequence: Synthetic oligonucleotide
  Antisense strand to SEQ ID NO: 1148264
uacgucaaaguuaaucaug

SEQ ID NO: 1148266 - RNA, 19 nt, Artificial Sequence
  Description of Artificial Sequence: Synthetic oligonucleotide
  Sense strand starting at position 3076 of SEQ ID NO: 916331
gauagugguggugaguaau

SEQ ID NO: 1148267 - RNA, 19 nt, Artificial Sequence
  Description of Artificial Sequence: Synthetic oligonucleotide
  Antisense strand to SEQ ID NO: 1148266
auuacucaccaccacuauc

SEQ ID NO: 1148268 - RNA, 19 nt, Artificial Sequence
  Description of Artificial Sequence: Synthetic oligonucleotide
  Sense strand starting at position 3087 of SEQ ID NO: 916331
ugaguaaucaggcagaggu

SEQ ID NO: 1148269 - RNA, 19 nt, Artificial Sequence
  Description of Artificial Sequence: Synthetic oligonucleotide
  Antisense strand to SEQ ID NO: 1148268
accucugccugauuacuca

SEQ ID NO: 1148270 - RNA, 19 nt, Artificial Sequence
  Description of Artificial Sequence: Synthetic oligonucleotide
  Sense strand starting at position 3089 of SEQ ID NO: 916331
aguaaucaggcagagguuu

SEQ ID NO: 1148271 - RNA, 19 nt, Artificial Sequence
  Description of Artificial Sequence: Synthetic oligonucleotide
  Antisense strand to SEQ ID NO: 1148270
aaaccucugccugauuacu

SEQ ID NO: 1148272 - RNA, 19 nt, Artificial Sequence
  Description of Artificial Sequence: Synthetic oligonucleotide
  Sense strand starting at position 3150 of SEQ ID NO: 916331
ggcuucuuacaggaaguga

SEQ ID NO: 1148273 - RNA, 19 nt, Artificial Sequence
  Description of Artificial Sequence: Synthetic oligonucleotide
  Antisense strand to SEQ ID NO: 1148272
ucacuuccuguaagaagcc

SEQ ID NO: 1148274 - RNA, 19 nt, Artificial Sequence
  Description of Artificial Sequence: Synthetic oligonucleotide
  Sense strand starting at position 3225 of SEQ ID NO: 916331
agacauuaaucagcaccga

SEQ ID NO: 1148275 - RNA, 19 nt, Artificial Sequence
  Description of Artificial Sequence: Synthetic oligonucleotide
  Antisense strand to SEQ ID NO: 1148274
ucggugcugauuaaugucu

SEQ ID NO: 1148276 - RNA, 19 nt, Artificial Sequence
  Description of Artificial Sequence: Synthetic oligonucleotide
  Sense strand starting at position 3282 of SEQ ID NO: 916331
cuaggugcaaaguaaugua

SEQ ID NO: 1148277 - RNA, 19 nt, Artificial Sequence
  Description of Artificial Sequence: Synthetic oligonucleotide
  Antisense strand to SEQ ID NO: 1148276
uacauuacuuugcaccuag

SEQ ID NO: 1148278 - RNA, 19 nt, Artificial Sequence
  Description of Artificial Sequence: Synthetic oligonucleotide
  Sense strand starting at position 3502 of SEQ ID NO: 916331
uucugacagagguguuacu

SEQ ID NO: 1148279 - RNA, 19 nt, Artificial Sequence
  Description of Artificial Sequence: Synthetic oligonucleotide
  Antisense strand to SEQ ID NO: 1148278
aguaacaccucugucagaa

SEQ ID NO: 1148280 - RNA, 19 nt, Artificial Sequence
  Description of Artificial Sequence: Synthetic oligonucleotide
  Sense strand starting at position 3509 of SEQ ID NO: 916331
agagguguuacucaaguug

SEQ ID NO: 1148281 - RNA, 19 nt, Artificial Sequence
  Description of Artificial Sequence: Synthetic oligonucleotide
  Antisense strand to SEQ ID NO: 1148280
caacuugaguaacaccucu

SEQ ID NO: 1148282 - RNA, 19 nt, Artificial Sequence
  Description of Artificial Sequence: Synthetic oligonucleotide
  Sense strand starting at position 3626 of SEQ ID NO: 916331
aauagagcacuugguuuaa

SEQ ID NO: 1148283 - RNA, 19 nt, Artificial Sequence
  Description of Artificial Sequence: Synthetic oligonucleotide
  Antisense strand to SEQ ID NO: 1148282
uuaaaccaagugcucuauu

SEQ ID NO: 1148284 - RNA, 19 nt, Artificial Sequence
  Description of Artificial Sequence: Synthetic oligonucleotide
  Sense strand starting at position 3628 of SEQ ID NO: 916331
uagagcacuugguuuaaau

SEQ ID NO: 1148285 - RNA, 19 nt, Artificial Sequence
  Description of Artificial Sequence: Synthetic oligonucleotide
  Antisense strand to SEQ ID NO: 1148284
auuuaaaccaagugcucua

SEQ ID NO: 1148286 - RNA, 19 nt, Artificial Sequence
  Description of Artificial Sequence: Synthetic oligonucleotide
  Sense strand starting at position 3630 of SEQ ID NO: 916331
gagcacuugguuuaaauua

SEQ ID NO: 1148287 - RNA, 19 nt, Artificial Sequence
  Description of Artificial Sequence: Synthetic oligonucleotide
  Antisense strand to SEQ ID NO: 1148286
uaauuuaaaccaagugcuc

SEQ ID NO: 1148288 - RNA, 19 nt, Artificial Sequence
  Description of Artificial Sequence: Synthetic oligonucleotide
  Sense strand starting at position 3643 of SEQ ID NO: 916331
aaauuaauuuggcagggaa

SEQ ID NO: 1148289 - RNA, 19 nt, Artificial Sequence
  Description of Artificial Sequence: Synthetic oligonucleotide
  Antisense strand to SEQ ID NO: 1148288
uucccugccaaauuaauuu

SEQ ID NO: 1148290 - RNA, 19 nt, Artificial Sequence
  Description of Artificial Sequence: Synthetic oligonucleotide
  Sense strand starting at position 3656 of SEQ ID NO: 916331
agggaaauaucccuuuccu

SEQ ID NO: 1148291 - RNA, 19 nt, Artificial Sequence
  Description of Artificial Sequence: Synthetic oligonucleotide
  Antisense strand to SEQ ID NO: 1148290
aggaaagggauauuucccu

SEQ ID NO: 1148292 - RNA, 19 nt, Artificial Sequence
  Description of Artificial Sequence: Synthetic oligonucleotide
  Sense strand starting at position 3847 of SEQ ID NO: 916331
ggaaaugaguuguucuuuc

SEQ ID NO: 1148293 - RNA, 19 nt, Artificial Sequence
  Description of Artificial Sequence: Synthetic oligonucleotide
  Antisense strand to SEQ ID NO: 1148292
gaaagaacaacucauuucc

SEQ ID NO: 1148294 - RNA, 19 nt, Artificial Sequence
  Description of Artificial Sequence: Synthetic oligonucleotide
  Sense strand starting at position 3901 of SEQ ID NO: 916331
cuaugaguacgcuucgcau

SEQ ID NO: 1148295 - RNA, 19 nt, Artificial Sequence
  Description of Artificial Sequence: Synthetic oligonucleotide
  Antisense strand to SEQ ID NO: 1148294
augcgaagcguacucauag

SEQ ID NO: 1148296 - RNA, 19 nt, Artificial Sequence
  Description of Artificial Sequence: Synthetic oligonucleotide
  Sense strand starting at position 3909 of SEQ ID NO: 916331
acgcuucgcauguuuguua

SEQ ID NO: 1148297 - RNA, 19 nt, Artificial Sequence
  Description of Artificial Sequence: Synthetic oligonucleotide
  Antisense strand to SEQ ID NO: 1148296
uaacaaacaugcgaagcgu

SEQ ID NO: 1148298 - RNA, 19 nt, Artificial Sequence
  Description of Artificial Sequence: Synthetic oligonucleotide
  Sense strand starting at position 3929 of SEQ ID NO: 916331
uguguuguuccguucuuca

SEQ ID NO: 1148299 - RNA, 19 nt, Artificial Sequence
  Description of Artificial Sequence: Synthetic oligonucleotide
  Antisense strand to SEQ ID NO: 1148298
ugaagaacggaacaacaca

SEQ ID NO: 1148300 - RNA, 19 nt, Artificial Sequence
  Description of Artificial Sequence: Synthetic oligonucleotide
  Sense strand starting at position 59 of SEQ ID NO: 916332
gcugaccucaugugugaua

SEQ ID NO: 1148301 - RNA, 19 nt, Artificial Sequence
  Description of Artificial Sequence: Synthetic oligonucleotide
  Antisense strand to SEQ ID NO: 1148300
uaucacacaugaggucagc

SEQ ID NO: 1148302 - RNA, 19 nt, Artificial Sequence
  Description of Artificial Sequence: Synthetic oligonucleotide
  Sense strand starting at position 222 of SEQ ID NO: 916332
cuguguucucggagagcag

SEQ ID NO: 1148303 - RNA, 19 nt, Artificial Sequence
  Description of Artificial Sequence: Synthetic oligonucleotide
  Antisense strand to SEQ ID NO: 1148302
cugcucuccgagaacacag

SEQ ID NO: 1148304 - RNA, 19 nt, Artificial Sequence
  Description of Artificial Sequence: Synthetic oligonucleotide
  Sense strand starting at position 224 of SEQ ID NO: 916332
guguucucggagagcagua

SEQ ID NO: 1148305 - RNA, 19 nt, Artificial Sequence
  Description of Artificial Sequence: Synthetic oligonucleotide
  Antisense strand to SEQ ID NO: 1148304
uacugcucuccgagaacac

SEQ ID NO: 1148306 - RNA, 19 nt, Artificial Sequence
  Description of Artificial Sequence: Synthetic oligonucleotide
  Sense strand starting at position 297 of SEQ ID NO: 916332
ucagguauguucuccugaa

SEQ ID NO: 1148307 - RNA, 19 nt, Artificial Sequence
  Description of Artificial Sequence: Synthetic oligonucleotide
  Antisense strand to SEQ ID NO: 1148306
uucaggagaacauaccuga

SEQ ID NO: 1148308 - RNA, 19 nt, Artificial Sequence
  Description of Artificial Sequence: Synthetic oligonucleotide
  Sense strand starting at position 298 of SEQ ID NO: 916332
cagguauguucuccugaaa

SEQ ID NO: 1148309 - RNA, 19 nt, Artificial Sequence
  Description of Artificial Sequence: Synthetic oligonucleotide
  Antisense strand to SEQ ID NO: 1148308
uuucaggagaacauaccug

SEQ ID NO: 1148310 - RNA, 19 nt, Artificial Sequence
  Description of Artificial Sequence: Synthetic oligonucleotide
  Sense strand starting at position 301 of SEQ ID NO: 916332
guauguucuccugaaagua

SEQ ID NO: 1148311 - RNA, 19 nt, Artificial Sequence
  Description of Artificial Sequence: Synthetic oligonucleotide
  Antisense strand to SEQ ID NO: 1148310
uacuuucaggagaacauac

SEQ ID NO: 1148312 - RNA, 19 nt, Artificial Sequence
  Description of Artificial Sequence: Synthetic oligonucleotide
  Sense strand starting at position 630 of SEQ ID NO: 916332
ccauucguauuccuuauuu

SEQ ID NO: 1148313 - RNA, 19 nt, Artificial Sequence
  Description of Artificial Sequence: Synthetic oligonucleotide
  Antisense strand to SEQ ID NO: 1148312
aaauaaggaauacgaaugg

SEQ ID NO: 1148314 - RNA, 19 nt, Artificial Sequence
  Description of Artificial Sequence: Synthetic oligonucleotide
  Sense strand starting at position 666 of SEQ ID NO: 916332
aggcucucauugcuugaga

SEQ ID NO: 1148315 - RNA, 19 nt, Artificial Sequence
  Description of Artificial Sequence: Synthetic oligonucleotide
  Antisense strand to SEQ ID NO: 1148314
ucucaagcaaugagagccu

SEQ ID NO: 1148316 - RNA, 19 nt, Artificial Sequence
  Description of Artificial Sequence: Synthetic oligonucleotide
  Sense strand starting at position 669 of SEQ ID NO: 916332
cucucauugcuugagauca

SEQ ID NO: 1148317 - RNA, 19 nt, Artificial Sequence
  Description of Artificial Sequence: Synthetic oligonucleotide
  Antisense strand to SEQ ID NO: 1148316
ugaucucaagcaaugagag

SEQ ID NO: 1148318 - RNA, 19 nt, Artificial Sequence
  Description of Artificial Sequence: Synthetic oligonucleotide
  Sense strand starting at position 698 of SEQ ID NO: 916332
gaacgacugagucgagauu

SEQ ID NO: 1148319 - RNA, 19 nt, Artificial Sequence
  Description of Artificial Sequence: Synthetic oligonucleotide
  Antisense strand to SEQ ID NO: 1148318
aaucucgacucagucguuc

SEQ ID NO: 1148320 - RNA, 19 nt, Artificial Sequence
  Description of Artificial Sequence: Synthetic oligonucleotide
  Sense strand starting at position 767 of SEQ ID NO: 916332
gaccuacagcccugggaau

SEQ ID NO: 1148321 - RNA, 19 nt, Artificial Sequence
  Description of Artificial Sequence: Synthetic oligonucleotide
  Antisense strand to SEQ ID NO: 1148320
auucccagggcuguagguc

SEQ ID NO: 1148322 - RNA, 19 nt, Artificial Sequence
  Description of Artificial Sequence: Synthetic oligonucleotide
  Sense strand starting at position 782 of SEQ ID NO: 916332
gaauucuaagacugugaug

SEQ ID NO: 1148323 - RNA, 19 nt, Artificial Sequence
  Description of Artificial Sequence: Synthetic oligonucleotide
  Antisense strand to SEQ ID NO: 1148322
caucacagucuuagaauuc

SEQ ID NO: 1148324 - RNA, 19 nt, Artificial Sequence
  Description of Artificial Sequence: Synthetic oligonucleotide
  Sense strand starting at position 831 of SEQ ID NO: 916332
ccaagauaaggcugggagu

SEQ ID NO: 1148325 - RNA, 19 nt, Artificial Sequence
  Description of Artificial Sequence: Synthetic oligonucleotide
  Antisense strand to SEQ ID NO: 1148324
acucccagccuuaucuugg

SEQ ID NO: 1148326 - RNA, 19 nt, Artificial Sequence
  Description of Artificial Sequence: Synthetic oligonucleotide
  Sense strand starting at position 832 of SEQ ID NO: 916332
caagauaaggcugggaguu

SEQ ID NO: 1148327 - RNA, 19 nt, Artificial Sequence
  Description of Artificial Sequence: Synthetic oligonucleotide
  Antisense strand to SEQ ID NO: 1148326
aacucccagccuuaucuug

SEQ ID NO: 1148328 - RNA, 19 nt, Artificial Sequence
  Description of Artificial Sequence: Synthetic oligonucleotide
  Sense strand starting at position 833 of SEQ ID NO: 916332
aagauaaggcugggaguuu

SEQ ID NO: 1148329 - RNA, 19 nt, Artificial Sequence
  Description of Artificial Sequence: Synthetic oligonucleotide
  Antisense strand to SEQ ID NO: 1148328
aaacucccagccuuaucuu

SEQ ID NO: 1148330 - RNA, 19 nt, Artificial Sequence
  Description of Artificial Sequence: Synthetic oligonucleotide
  Sense strand starting at position 878 of SEQ ID NO: 916332
gugucuuggguacaaggaa

SEQ ID NO: 1148331 - RNA, 19 nt, Artificial Sequence
  Description of Artificial Sequence: Synthetic oligonucleotide
  Antisense strand to SEQ ID NO: 1148330
uuccuuguacccaagacac

SEQ ID NO: 1148332 - RNA, 19 nt, Artificial Sequence
  Description of Artificial Sequence: Synthetic oligonucleotide
  Sense strand starting at position 906 of SEQ ID NO: 916332
gguggaugcugaguagaau

SEQ ID NO: 1148333 - RNA, 19 nt, Artificial Sequence
  Description of Artificial Sequence: Synthetic oligonucleotide
  Antisense strand to SEQ ID NO: 1148332
auucuacucagcauccacc

SEQ ID NO: 1148334 - RNA, 19 nt, Artificial Sequence
  Description of Artificial Sequence: Synthetic oligonucleotide
  Sense strand starting at position 907 of SEQ ID NO: 916332
guggaugcugaguagaauu

SEQ ID NO: 1148335 - RNA, 19 nt, Artificial Sequence
  Description of Artificial Sequence: Synthetic oligonucleotide
  Antisense strand to SEQ ID NO: 1148334
aauucuacucagcauccac

SEQ ID NO: 1148336 - RNA, 19 nt, Artificial Sequence
  Description of Artificial Sequence: Synthetic oligonucleotide
  Sense strand starting at position 2131 of SEQ ID NO: 916332
cucuaccugucucuggaaa

SEQ ID NO: 1148337 - RNA, 19 nt, Artificial Sequence
  Description of Artificial Sequence: Synthetic oligonucleotide
  Antisense strand to SEQ ID NO: 1148336
uuuccagagacagguagag

SEQ ID NO: 1148338 - RNA, 19 nt, Artificial Sequence
  Description of Artificial Sequence: Synthetic oligonucleotide
  Sense strand starting at position 2132 of SEQ ID NO: 916332
ucuaccugucucuggaaau

SEQ ID NO: 1148339 - RNA, 19 nt, Artificial Sequence
  Description of Artificial Sequence: Synthetic oligonucleotide
  Antisense strand to SEQ ID NO: 1148338
auuuccagagacagguaga

SEQ ID NO: 1148340 - RNA, 19 nt, Artificial Sequence
  Description of Artificial Sequence: Synthetic oligonucleotide
  Sense strand starting at position 2144 of SEQ ID NO: 916332
uggaaaucccuuuggccuu

SEQ ID NO: 1148341 - RNA, 19 nt, Artificial Sequence
  Description of Artificial Sequence: Synthetic oligonucleotide
  Antisense strand to SEQ ID NO: 1148340
aaggccaaagggauuucca

SEQ ID NO: 1148342 - RNA, 19 nt, Artificial Sequence
  Description of Artificial Sequence: Synthetic oligonucleotide
  Sense strand starting at position 2164 of SEQ ID NO: 916332
ucugauggguucuuaccau

SEQ ID NO: 1148343 - RNA, 19 nt, Artificial Sequence
  Description of Artificial Sequence: Synthetic oligonucleotide
  Antisense strand to SEQ ID NO: 1148342
augguaagaacccaucaga

SEQ ID NO: 1148344 - RNA, 19 nt, Artificial Sequence
  Description of Artificial Sequence: Synthetic oligonucleotide
  Sense strand starting at position 2181 of SEQ ID NO: 916332
augcguuaagucgcaucaa

SEQ ID NO: 1148345 - RNA, 19 nt, Artificial Sequence
  Description of Artificial Sequence: Synthetic oligonucleotide
  Antisense strand to SEQ ID NO: 1148344
uugaugcgacuuaacgcau

SEQ ID NO: 1148346 - RNA, 19 nt, Artificial Sequence
  Description of Artificial Sequence: Synthetic oligonucleotide
  Sense strand starting at position 2443 of SEQ ID NO: 916332
gcgugcauuccugauugga

SEQ ID NO: 1148347 - RNA, 19 nt, Artificial Sequence
  Description of Artificial Sequence: Synthetic oligonucleotide
  Antisense strand to SEQ ID NO: 1148346
uccaaucaggaaugcacgc

SEQ ID NO: 1148348 - RNA, 19 nt, Artificial Sequence
  Description of Artificial Sequence: Synthetic oligonucleotide
  Sense strand starting at position 2531 of SEQ ID NO: 916332
cacagcuaggccgagauau

SEQ ID NO: 1148349 - RNA, 19 nt, Artificial Sequence
  Description of Artificial Sequence: Synthetic oligonucleotide
  Antisense strand to SEQ ID NO: 1148348
auaucucggccuagcugug

SEQ ID NO: 1148350 - RNA, 19 nt, Artificial Sequence
  Description of Artificial Sequence: Synthetic oligonucleotide
  Sense strand starting at position 2614 of SEQ ID NO: 916332
cacuauaccuccguagagu

SEQ ID NO: 1148351 - RNA, 19 nt, Artificial Sequence
  Description of Artificial Sequence: Synthetic oligonucleotide
  Antisense strand to SEQ ID NO: 1148350
acucuacggagguauagug

SEQ ID NO: 1148352 - RNA, 19 nt, Artificial Sequence
  Description of Artificial Sequence: Synthetic oligonucleotide
  Sense strand starting at position 2615 of SEQ ID NO: 916332
acuauaccuccguagaguu

SEQ ID NO: 1148353 - RNA, 19 nt, Artificial Sequence
  Description of Artificial Sequence: Synthetic oligonucleotide
  Antisense strand to SEQ ID NO: 1148352
aacucuacggagguauagu

SEQ ID NO: 1148354 - RNA, 19 nt, Artificial Sequence
  Description of Artificial Sequence: Synthetic oligonucleotide
  Sense strand starting at position 2781 of SEQ ID NO: 916332
ggaggaucuggcuagccaa

SEQ ID NO: 1148355 - RNA, 19 nt, Artificial Sequence
  Description of Artificial Sequence: Synthetic oligonucleotide
  Antisense strand to SEQ ID NO: 1148354
uuggcuagccagauccucc

SEQ ID NO: 1148356 - RNA, 19 nt, Artificial Sequence
  Description of Artificial Sequence: Synthetic oligonucleotide
  Sense strand starting at position 2876 of SEQ ID NO: 916332
gggagauacugagauaaag

SEQ ID NO: 1148357 - RNA, 19 nt, Artificial Sequence
  Description of Artificial Sequence: Synthetic oligonucleotide
  Antisense strand to SEQ ID NO: 1148356
cuuuaucucaguaucuccc

SEQ ID NO: 1148358 - RNA, 19 nt, Artificial Sequence
  Description of Artificial Sequence: Synthetic oligonucleotide
  Sense strand starting at position 2886 of SEQ ID NO: 916332
gagauaaagcuaugcugau

SEQ ID NO: 1148359 - RNA, 19 nt, Artificial Sequence
  Description of Artificial Sequence: Synthetic oligonucleotide
  Antisense strand to SEQ ID NO: 1148358
aucagcauagcuuuaucuc

SEQ ID NO: 1148360 - RNA, 19 nt, Artificial Sequence
  Description of Artificial Sequence: Synthetic oligonucleotide
  Sense strand starting at position 2887 of SEQ ID NO: 916332
agauaaagcuaugcugauc

SEQ ID NO: 1148361 - RNA, 19 nt, Artificial Sequence
  Description of Artificial Sequence: Synthetic oligonucleotide
  Antisense strand to SEQ ID NO: 1148360
gaucagcauagcuuuaucu

SEQ ID NO: 1148362 - RNA, 19 nt, Artificial Sequence
  Description of Artificial Sequence: Synthetic oligonucleotide
  Sense strand starting at position 3075 of SEQ ID NO: 916332
agcugauccugccugguaa

SEQ ID NO: 1148363 - RNA, 19 nt, Artificial Sequence
  Description of Artificial Sequence: Synthetic oligonucleotide
  Antisense strand to SEQ ID NO: 1148362
uuaccaggcaggaucagcu

SEQ ID NO: 1148364 - RNA, 19 nt, Artificial Sequence
  Description of Artificial Sequence: Synthetic oligonucleotide
  Sense strand starting at position 3291 of SEQ ID NO: 916332
augaaacucucacugcaga

SEQ ID NO: 1148365 - RNA, 19 nt, Artificial Sequence
  Description of Artificial Sequence: Synthetic oligonucleotide
  Antisense strand to SEQ ID NO: 1148364
ucugcagugagaguuucau

SEQ ID NO: 1148366 - RNA, 19 nt, Artificial Sequence
  Description of Artificial Sequence: Synthetic oligonucleotide
  Sense strand starting at position 3308 of SEQ ID NO: 916332
gagauuuguucuuaaugca

SEQ ID NO: 1148367 - RNA, 19 nt, Artificial Sequence
  Description of Artificial Sequence: Synthetic oligonucleotide
  Antisense strand to SEQ ID NO: 1148366
ugcauuaagaacaaaucuc

SEQ ID NO: 1148368 - RNA, 19 nt, Artificial Sequence
  Description of Artificial Sequence: Synthetic oligonucleotide
  Sense strand starting at position 3640 of SEQ ID NO: 916332
cggagaguuuauguauuca

SEQ ID NO: 1148369 - RNA, 19 nt, Artificial Sequence
  Description of Artificial Sequence: Synthetic oligonucleotide
  Antisense strand to SEQ ID NO: 1148368
ugaauacauaaacucuccg

SEQ ID NO: 1148370 - RNA, 19 nt, Artificial Sequence
  Description of Artificial Sequence: Synthetic oligonucleotide
  Sense strand starting at position 3683 of SEQ ID NO: 916332
agguguugaguuugacucu

SEQ ID NO: 1148371 - RNA, 19 nt, Artificial Sequence
  Description of Artificial Sequence: Synthetic oligonucleotide
  Antisense strand to SEQ ID NO: 1148370
agagucaaacucaacaccu

SEQ ID NO: 1148372 - RNA, 19 nt, Artificial Sequence
  Description of Artificial Sequence: Synthetic oligonucleotide
  Sense strand starting at position 3686 of SEQ ID NO: 916332
uguugaguuugacucucau

SEQ ID NO: 1148373 - RNA, 19 nt, Artificial Sequence
  Description of Artificial Sequence: Synthetic oligonucleotide
  Antisense strand to SEQ ID NO: 1148372
augagagucaaacucaaca

SEQ ID NO: 1148374 - RNA, 19 nt, Artificial Sequence
  Description of Artificial Sequence: Synthetic oligonucleotide
  Sense strand starting at position 3895 of SEQ ID NO: 916332
uuaugucuuccacacauga

SEQ ID NO: 1148375 - RNA, 19 nt, Artificial Sequence
  Description of Artificial Sequence: Synthetic oligonucleotide
  Antisense strand to SEQ ID NO: 1148374
ucauguguggaagacauaa

SEQ ID NO: 1148376 - RNA, 19 nt, Artificial Sequence
  Description of Artificial Sequence: Synthetic oligonucleotide
  Sense strand starting at position 3908 of SEQ ID NO: 916332
acaugaaguucguuggaaa

SEQ ID NO: 1148377 - RNA, 19 nt, Artificial Sequence
  Description of Artificial Sequence: Synthetic oligonucleotide
  Antisense strand to SEQ ID NO: 1148376
uuuccaacgaacuucaugu

SEQ ID NO: 1148378 - RNA, 19 nt, Artificial Sequence
  Description of Artificial Sequence: Synthetic oligonucleotide
  Sense strand starting at position 3952 of SEQ ID NO: 916332
uuacuauuccaugaccagu

SEQ ID NO: 1148379 - RNA, 19 nt, Artificial Sequence
  Description of Artificial Sequence: Synthetic oligonucleotide
  Antisense strand to SEQ ID NO: 1148378
acuggucauggaauaguaa

SEQ ID NO: 1148380 - RNA, 19 nt, Artificial Sequence
  Description of Artificial Sequence: Synthetic oligonucleotide
  Sense strand starting at position 140 of SEQ ID NO: 916333
uggcucccuugcuuugaaa

SEQ ID NO: 1148381 - RNA, 19 nt, Artificial Sequence
  Description of Artificial Sequence: Synthetic oligonucleotide
  Antisense strand to SEQ ID NO: 1148380
uuucaaagcaagggagcca

SEQ ID NO: 1148382 - RNA, 19 nt, Artificial Sequence
  Description of Artificial Sequence: Synthetic oligonucleotide
  Sense strand starting at position 220 of SEQ ID NO: 916333
agggcugcaugcuugaaau

SEQ ID NO: 1148383 - RNA, 19 nt, Artificial Sequence
  Description of Artificial Sequence: Synthetic oligonucleotide
  Antisense strand to SEQ ID NO: 1148382
auuucaagcaugcagcccu

SEQ ID NO: 1148384 - RNA, 19 nt, Artificial Sequence
  Description of Artificial Sequence: Synthetic oligonucleotide
  Sense strand starting at position 226 of SEQ ID NO: 916333
gcaugcuugaaauggauca

SEQ ID NO: 1148385 - RNA, 19 nt, Artificial Sequence
  Description of Artificial Sequence: Synthetic oligonucleotide
  Antisense strand to SEQ ID NO: 1148384
ugauccauuucaagcaugc

SEQ ID NO: 1148386 - RNA, 19 nt, Artificial Sequence
  Description of Artificial Sequence: Synthetic oligonucleotide
  Sense strand starting at position 244 of SEQ ID NO: 916333
acugaauuguucuuugaug

SEQ ID NO: 1148387 - RNA, 19 nt, Artificial Sequence
  Description of Artificial Sequence: Synthetic oligonucleotide
  Antisense strand to SEQ ID NO: 1148386
caucaaagaacaauucagu

SEQ ID NO: 1148388 - RNA, 19 nt, Artificial Sequence
  Description of Artificial Sequence: Synthetic oligonucleotide
  Sense strand starting at position 263 of SEQ ID NO: 916333
ccagaaaugucuguacuuu

SEQ ID NO: 1148389 - RNA, 19 nt, Artificial Sequence
  Description of Artificial Sequence: Synthetic oligonucleotide
  Antisense strand to SEQ ID NO: 1148388
aaaguacagacauuucugg

SEQ ID NO: 1148390 - RNA, 19 nt, Artificial Sequence
  Description of Artificial Sequence: Synthetic oligonucleotide
  Sense strand starting at position 291 of SEQ ID NO: 916333
guuagauguggccagaaag

SEQ ID NO: 1148391 - RNA, 19 nt, Artificial Sequence
  Description of Artificial Sequence: Synthetic oligonucleotide
  Antisense strand to SEQ ID NO: 1148390
cuuucuggccacaucuaac

SEQ ID NO: 1148392 - RNA, 19 nt, Artificial Sequence
  Description of Artificial Sequence: Synthetic oligonucleotide
  Sense strand starting at position 446 of SEQ ID NO: 916333
ccaguuuccugaccuguua

SEQ ID NO: 1148393 - RNA, 19 nt, Artificial Sequence
  Description of Artificial Sequence: Synthetic oligonucleotide
  Antisense strand to SEQ ID NO: 1148392
uaacaggucaggaaacugg

SEQ ID NO: 1148394 - RNA, 19 nt, Artificial Sequence
  Description of Artificial Sequence: Synthetic oligonucleotide
  Sense strand starting at position 468 of SEQ ID NO: 916333
aaacacuggcgaugauaau

SEQ ID NO: 1148395 - RNA, 19 nt, Artificial Sequence
  Description of Artificial Sequence: Synthetic oligonucleotide
  Antisense strand to SEQ ID NO: 1148394
auuaucaucgccaguguuu

SEQ ID NO: 1148396 - RNA, 19 nt, Artificial Sequence
  Description of Artificial Sequence: Synthetic oligonucleotide
  Sense strand starting at position 481 of SEQ ID NO: 916333
gauaaugacucacagagua

SEQ ID NO: 1148397 - RNA, 19 nt, Artificial Sequence
  Description of Artificial Sequence: Synthetic oligonucleotide
  Antisense strand to SEQ ID NO: 1148396
uacucugugagucauuauc

SEQ ID NO: 1148398 - RNA, 19 nt, Artificial Sequence
  Description of Artificial Sequence: Synthetic oligonucleotide
  Sense strand starting at position 515 of SEQ ID NO: 916333
ugagacaagccauguaaag

SEQ ID NO: 1148399 - RNA, 19 nt, Artificial Sequence
  Description of Artificial Sequence: Synthetic oligonucleotide
  Antisense strand to SEQ ID NO: 1148398
cuuuacauggcuugucuca

SEQ ID NO: 1148400 - RNA, 19 nt, Artificial Sequence
  Description of Artificial Sequence: Synthetic oligonucleotide
  Sense strand starting at position 524 of SEQ ID NO: 916333
ccauguaaagcaugaauau

SEQ ID NO: 1148401 - RNA, 19 nt, Artificial Sequence
  Description of Artificial Sequence: Synthetic oligonucleotide
  Antisense strand to SEQ ID NO: 1148400
auauucaugcuuuacaugg

SEQ ID NO: 1148402 - RNA, 19 nt, Artificial Sequence
  Description of Artificial Sequence: Synthetic oligonucleotide
  Sense strand starting at position 533 of SEQ ID NO: 916333
gcaugaauaucuggauuuc

SEQ ID NO: 1148403 - RNA, 19 nt, Artificial Sequence
  Description of Artificial Sequence: Synthetic oligonucleotide
  Antisense strand to SEQ ID NO: 1148402
gaaauccagauauucaugc

SEQ ID NO: 1148404 - RNA, 19 nt, Artificial Sequence
  Description of Artificial Sequence: Synthetic oligonucleotide
  Sense strand starting at position 662 of SEQ ID NO: 916333
ucaguaacucuaggaaauc

SEQ ID NO: 1148405 - RNA, 19 nt, Artificial Sequence
  Description of Artificial Sequence: Synthetic oligonucleotide
  Antisense strand to SEQ ID NO: 1148404
gauuuccuagaguuacuga

SEQ ID NO: 1148406 - RNA, 19 nt, Artificial Sequence
  Description of Artificial Sequence: Synthetic oligonucleotide
  Sense strand starting at position 671 of SEQ ID NO: 916333
cuaggaaaucaacggguau

SEQ ID NO: 1148407 - RNA, 19 nt, Artificial Sequence
  Description of Artificial Sequence: Synthetic oligonucleotide
  Antisense strand to SEQ ID NO: 1148406
auacccguugauuuccuag

SEQ ID NO: 1148408 - RNA, 19 nt, Artificial Sequence
  Description of Artificial Sequence: Synthetic oligonucleotide
  Sense strand starting at position 760 of SEQ ID NO: 916333
ucaaaugcacacuggaaau

SEQ ID NO: 1148409 - RNA, 19 nt, Artificial Sequence
  Description of Artificial Sequence: Synthetic oligonucleotide
  Antisense strand to SEQ ID NO: 1148408
auuuccagugugcauuuga

SEQ ID NO: 1148410 - RNA, 19 nt, Artificial Sequence
  Description of Artificial Sequence: Synthetic oligonucleotide
  Sense strand starting at position 811 of SEQ ID NO: 916333
ucuuaagggccauaacuua

SEQ ID NO: 1148411 - RNA, 19 nt, Artificial Sequence
  Description of Artificial Sequence: Synthetic oligonucleotide
  Antisense strand to SEQ ID NO: 1148410
uaaguuauggcccuuaaga

SEQ ID NO: 1148412 - RNA, 19 nt, Artificial Sequence
  Description of Artificial Sequence: Synthetic oligonucleotide
  Sense strand starting at position 1037 of SEQ ID NO: 916333
acaugacauuguggaauau

SEQ ID NO: 1148413 - RNA, 19 nt, Artificial Sequence
  Description of Artificial Sequence: Synthetic oligonucleotide
  Antisense strand to SEQ ID NO: 1148412
auauuccacaaugucaugu

SEQ ID NO: 1148414 - RNA, 19 nt, Artificial Sequence
  Description of Artificial Sequence: Synthetic oligonucleotide
  Sense strand starting at position 1102 of SEQ ID NO: 916333
uccgaauuaucucuggcua

SEQ ID NO: 1148415 - RNA, 19 nt, Artificial Sequence
  Description of Artificial Sequence: Synthetic oligonucleotide
  Antisense strand to SEQ ID NO: 1148414
uagccagagauaauucgga

SEQ ID NO: 1148416 - RNA, 19 nt, Artificial Sequence
  Description of Artificial Sequence: Synthetic oligonucleotide
  Sense strand starting at position 1103 of SEQ ID NO: 916333
ccgaauuaucucuggcuac

SEQ ID NO: 1148417 - RNA, 19 nt, Artificial Sequence
  Description of Artificial Sequence: Synthetic oligonucleotide
  Antisense strand to SEQ ID NO: 1148416
guagccagagauaauucgg

SEQ ID NO: 1148418 - RNA, 19 nt, Artificial Sequence
  Description of Artificial Sequence: Synthetic oligonucleotide
  Sense strand starting at position 1137 of SEQ ID NO: 916333
caggcaguugcucaacuuu

SEQ ID NO: 1148419 - RNA, 19 nt, Artificial Sequence
  Description of Artificial Sequence: Synthetic oligonucleotide
  Antisense strand to SEQ ID NO: 1148418
aaaguugagcaacugccug

SEQ ID NO: 1148420 - RNA, 19 nt, Artificial Sequence
  Description of Artificial Sequence: Synthetic oligonucleotide
  Sense strand starting at position 1288 of SEQ ID NO: 916333
cauugcaaaccguaguuua

SEQ ID NO: 1148421 - RNA, 19 nt, Artificial Sequence
  Description of Artificial Sequence: Synthetic oligonucleotide
  Antisense strand to SEQ ID NO: 1148420
uaaacuacgguuugcaaug

SEQ ID NO: 1148422 - RNA, 19 nt, Artificial Sequence
  Description of Artificial Sequence: Synthetic oligonucleotide
  Sense strand starting at position 1298 of SEQ ID NO: 916333
cguaguuuacuuuagcauu

SEQ ID NO: 1148423 - RNA, 19 nt, Artificial Sequence
  Description of Artificial Sequence: Synthetic oligonucleotide
  Antisense strand to SEQ ID NO: 1148422
aaugcuaaaguaaacuacg

SEQ ID NO: 1148424 - RNA, 19 nt, Artificial Sequence
  Description of Artificial Sequence: Synthetic oligonucleotide
  Sense strand starting at position 1337 of SEQ ID NO: 916333
ggcuuagggaugcauugaa

SEQ ID NO: 1148425 - RNA, 19 nt, Artificial Sequence
  Description of Artificial Sequence: Synthetic oligonucleotide
  Antisense strand to SEQ ID NO: 1148424
uucaaugcaucccuaagcc

SEQ ID NO: 1148426 - RNA, 19 nt, Artificial Sequence
  Description of Artificial Sequence: Synthetic oligonucleotide
  Sense strand starting at position 1365 of SEQ ID NO: 916333
ggauaaguaucucaaaguu

SEQ ID NO: 1148427 - RNA, 19 nt, Artificial Sequence
  Description of Artificial Sequence: Synthetic oligonucleotide
  Antisense strand to SEQ ID NO: 1148426
aacuuugagauacuuaucc

SEQ ID NO: 1148428 - RNA, 19 nt, Artificial Sequence
  Description of Artificial Sequence: Synthetic oligonucleotide
  Sense strand starting at position 2274 of SEQ ID NO: 916333
acggcuagcggugucauua

SEQ ID NO: 1148429 - RNA, 19 nt, Artificial Sequence
  Description of Artificial Sequence: Synthetic oligonucleotide
  Antisense strand to SEQ ID NO: 1148428
uaaugacaccgcuagccgu

SEQ ID NO: 1148430 - RNA, 19 nt, Artificial Sequence
  Description of Artificial Sequence: Synthetic oligonucleotide
  Sense strand starting at position 2548 of SEQ ID NO: 916333
gagggagugucguuaugcu

SEQ ID NO: 1148431 - RNA, 19 nt, Artificial Sequence
  Description of Artificial Sequence: Synthetic oligonucleotide
  Antisense strand to SEQ ID NO: 1148430
agcauaacgacacucccuc

SEQ ID NO: 1148432 - RNA, 19 nt, Artificial Sequence
  Description of Artificial Sequence: Synthetic oligonucleotide
  Sense strand starting at position 2838 of SEQ ID NO: 916333
guacauauaugggauuauu

SEQ ID NO: 1148433 - RNA, 19 nt, Artificial Sequence
  Description of Artificial Sequence: Synthetic oligonucleotide
  Antisense strand to SEQ ID NO: 1148432
aauaaucccauauauguac

SEQ ID NO: 1148434 - RNA, 19 nt, Artificial Sequence
  Description of Artificial Sequence: Synthetic oligonucleotide
  Sense strand starting at position 2996 of SEQ ID NO: 916333
ggcuuccuugaugaaauau

SEQ ID NO: 1148435 - RNA, 19 nt, Artificial Sequence
  Description of Artificial Sequence: Synthetic oligonucleotide
  Antisense strand to SEQ ID NO: 1148434
auauuucaucaaggaagcc

SEQ ID NO: 1148436 - RNA, 19 nt, Artificial Sequence
  Description of Artificial Sequence: Synthetic oligonucleotide
  Sense strand starting at position 3005 of SEQ ID NO: 916333
gaugaaauaucguuccauc

SEQ ID NO: 1148437 - RNA, 19 nt, Artificial Sequence
  Description of Artificial Sequence: Synthetic oligonucleotide
  Antisense strand to SEQ ID NO: 1148436
gauggaacgauauuucauc

SEQ ID NO: 1148438 - RNA, 19 nt, Artificial Sequence
  Description of Artificial Sequence: Synthetic oligonucleotide
  Sense strand starting at position 3149 of SEQ ID NO: 916333
ggucacaugaggcauguua

SEQ ID NO: 1148439 - RNA, 19 nt, Artificial Sequence
  Description of Artificial Sequence: Synthetic oligonucleotide
  Antisense strand to SEQ ID NO: 1148438
uaacaugccucaugugacc

SEQ ID NO: 1148440 - RNA, 19 nt, Artificial Sequence
  Description of Artificial Sequence: Synthetic oligonucleotide
  Sense strand starting at position 3160 of SEQ ID NO: 916333
gcauguuaccagugacaaa

SEQ ID NO: 1148441 - RNA, 19 nt, Artificial Sequence
  Description of Artificial Sequence: Synthetic oligonucleotide
  Antisense strand to SEQ ID NO: 1148440
uuugucacugguaacaugc

SEQ ID NO: 1148442 - RNA, 19 nt, Artificial Sequence
  Description of Artificial Sequence: Synthetic oligonucleotide
  Sense strand starting at position 3210 of SEQ ID NO: 916333
agccuuagugacuggaaga

SEQ ID NO: 1148443 - RNA, 19 nt, Artificial Sequence
  Description of Artificial Sequence: Synthetic oligonucleotide
  Antisense strand to SEQ ID NO: 1148442
ucuuccagucacuaaggcu

SEQ ID NO: 1148444 - RNA, 19 nt, Artificial Sequence
  Description of Artificial Sequence: Synthetic oligonucleotide
  Sense strand starting at position 3211 of SEQ ID NO: 916333
gccuuagugacuggaagag

SEQ ID NO: 1148445 - RNA, 19 nt, Artificial Sequence
  Description of Artificial Sequence: Synthetic oligonucleotide
  Antisense strand to SEQ ID NO: 1148444
cucuuccagucacuaaggc

SEQ ID NO: 1148446 - RNA, 19 nt, Artificial Sequence
  Description of Artificial Sequence: Synthetic oligonucleotide
  Sense strand starting at position 3266 of SEQ ID NO: 916333
uuugaaaccucucagauug

SEQ ID NO: 1148447 - RNA, 19 nt, Artificial Sequence
  Description of Artificial Sequence: Synthetic oligonucleotide
  Antisense strand to SEQ ID NO: 1148446
caaucugagagguuucaaa

SEQ ID NO: 1148448 - RNA, 19 nt, Artificial Sequence
  Description of Artificial Sequence: Synthetic oligonucleotide
  Sense strand starting at position 3268 of SEQ ID NO: 916333
ugaaaccucucagauugua

SEQ ID NO: 1148449 - RNA, 19 nt, Artificial Sequence
  Description of Artificial Sequence: Synthetic oligonucleotide
  Antisense strand to SEQ ID NO: 1148448
uacaaucugagagguuuca

SEQ ID NO: 1148450 - RNA, 19 nt, Artificial Sequence
  Description of Artificial Sequence: Synthetic oligonucleotide
  Sense strand starting at position 3280 of SEQ ID NO: 916333
gauuguagucuuuggaaua

SEQ ID NO: 1148451 - RNA, 19 nt, Artificial Sequence
  Description of Artificial Sequence: Synthetic oligonucleotide
  Antisense strand to SEQ ID NO: 1148450
uauuccaaagacuacaauc

SEQ ID NO: 1148452 - RNA, 19 nt, Artificial Sequence
  Description of Artificial Sequence: Synthetic oligonucleotide
  Sense strand starting at position 3409 of SEQ ID NO: 916333
cauacugugugggcaagaa

SEQ ID NO: 1148453 - RNA, 19 nt, Artificial Sequence
  Description of Artificial Sequence: Synthetic oligonucleotide
  Antisense strand to SEQ ID NO: 1148452
uucuugcccacacaguaug

SEQ ID NO: 1148454 - RNA, 19 nt, Artificial Sequence
  Description of Artificial Sequence: Synthetic oligonucleotide
  Sense strand starting at position 3419 of SEQ ID NO: 916333
gggcaagaauuucgauauc

SEQ ID NO: 1148455 - RNA, 19 nt, Artificial Sequence
  Description of Artificial Sequence: Synthetic oligonucleotide
  Antisense strand to SEQ ID NO: 1148454
gauaucgaaauucuugccc

SEQ ID NO: 1148456 - RNA, 19 nt, Artificial Sequence
  Description of Artificial Sequence: Synthetic oligonucleotide
  Sense strand starting at position 3952 of SEQ ID NO: 916333
acaggaaaucacugcagau

SEQ ID NO: 1148457 - RNA, 19 nt, Artificial Sequence
  Description of Artificial Sequence: Synthetic oligonucleotide
  Antisense strand to SEQ ID NO: 1148456
aucugcagugauuuccugu

SEQ ID NO: 1148458 - RNA, 19 nt, Artificial Sequence
  Description of Artificial Sequence: Synthetic oligonucleotide
  Sense strand starting at position 3981 of SEQ ID NO: 916333
aucagaaaggccugcuuua

SEQ ID NO: 1148459 - RNA, 19 nt, Artificial Sequence
  Description of Artificial Sequence: Synthetic oligonucleotide
  Antisense strand to SEQ ID NO: 1148458
uaaagcaggccuuucugau

SEQ ID NO: 1148460 - RNA, 19 nt, Artificial Sequence
  Description of Artificial Sequence: Synthetic oligonucleotide
  Sense strand starting at position 133 of SEQ ID NO: 916334
acucuauaguauguuagau

SEQ ID NO: 1148461 - RNA, 19 nt, Artificial Sequence
  Description of Artificial Sequence: Synthetic oligonucleotide
  Antisense strand to SEQ ID NO: 1148460
aucuaacauacuauagagu

SEQ ID NO: 1148462 - RNA, 19 nt, Artificial Sequence
  Description of Artificial Sequence: Synthetic oligonucleotide
  Sense strand starting at position 149 of SEQ ID NO: 916334
gauggugccaagugaaaug

SEQ ID NO: 1148463 - RNA, 19 nt, Artificial Sequence
  Description of Artificial Sequence: Synthetic oligonucleotide
  Antisense strand to SEQ ID NO: 1148462
cauuucacuuggcaccauc

SEQ ID NO: 1148464 - RNA, 19 nt, Artificial Sequence
  Description of Artificial Sequence: Synthetic oligonucleotide
  Sense strand starting at position 154 of SEQ ID NO: 916334
ugccaagugaaaugaaaga

SEQ ID NO: 1148465 - RNA, 19 nt, Artificial Sequence
  Description of Artificial Sequence: Synthetic oligonucleotide
  Antisense strand to SEQ ID NO: 1148464
ucuuucauuucacuuggca

SEQ ID NO: 1148466 - RNA, 19 nt, Artificial Sequence
  Description of Artificial Sequence: Synthetic oligonucleotide
  Sense strand starting at position 231 of SEQ ID NO: 916334
auaagaaggugccauuuga

SEQ ID NO: 1148467 - RNA, 19 nt, Artificial Sequence
  Description of Artificial Sequence: Synthetic oligonucleotide
  Antisense strand to SEQ ID NO: 1148466
ucaaauggcaccuucuuau

SEQ ID NO: 1148468 - RNA, 19 nt, Artificial Sequence
  Description of Artificial Sequence: Synthetic oligonucleotide
  Sense strand starting at position 281 of SEQ ID NO: 916334
acuggacuaucugugggaa

SEQ ID NO: 1148469 - RNA, 19 nt, Artificial Sequence
  Description of Artificial Sequence: Synthetic oligonucleotide
  Antisense strand to SEQ ID NO: 1148468
uucccacagauaguccagu

SEQ ID NO: 1148470 - RNA, 19 nt, Artificial Sequence
  Description of Artificial Sequence: Synthetic oligonucleotide
  Sense strand starting at position 282 of SEQ ID NO: 916334
cuggacuaucugugggaaa

SEQ ID NO: 1148471 - RNA, 19 nt, Artificial Sequence
  Description of Artificial Sequence: Synthetic oligonucleotide
  Antisense strand to SEQ ID NO: 1148470
uuucccacagauaguccag

SEQ ID NO: 1148472 - RNA, 19 nt, Artificial Sequence
  Description of Artificial Sequence: Synthetic oligonucleotide
  Sense strand starting at position 469 of SEQ ID NO: 916334
uuuauccucugggugagau

SEQ ID NO: 1148473 - RNA, 19 nt, Artificial Sequence
  Description of Artificial Sequence: Synthetic oligonucleotide
  Antisense strand to SEQ ID NO: 1148472
aucucacccagaggauaaa

SEQ ID NO: 1148474 - RNA, 19 nt, Artificial Sequence
  Description of Artificial Sequence: Synthetic oligonucleotide
  Sense strand starting at position 481 of SEQ ID NO: 916334
gugagauguagaugcugga

SEQ ID NO: 1148475 - RNA, 19 nt, Artificial Sequence
  Description of Artificial Sequence: Synthetic oligonucleotide
  Antisense strand to SEQ ID NO: 1148474
uccagcaucuacaucucac

SEQ ID NO: 1148476 - RNA, 19 nt, Artificial Sequence
  Description of Artificial Sequence: Synthetic oligonucleotide
  Sense strand starting at position 513 of SEQ ID NO: 916334
gagacaugcucuguacuca

SEQ ID NO: 1148477 - RNA, 19 nt, Artificial Sequence
  Description of Artificial Sequence: Synthetic oligonucleotide
  Antisense strand to SEQ ID NO: 1148476
ugaguacagagcaugucuc

SEQ ID NO: 1148478 - RNA, 19 nt, Artificial Sequence
  Description of Artificial Sequence: Synthetic oligonucleotide
  Sense strand starting at position 514 of SEQ ID NO: 916334
agacaugcucuguacucau

SEQ ID NO: 1148479 - RNA, 19 nt, Artificial Sequence
  Description of Artificial Sequence: Synthetic oligonucleotide
  Antisense strand to SEQ ID NO: 1148478
augaguacagagcaugucu

SEQ ID NO: 1148480 - RNA, 19 nt, Artificial Sequence
  Description of Artificial Sequence: Synthetic oligonucleotide
  Sense strand starting at position 523 of SEQ ID NO: 916334
cuguacucaugucuuagaa

SEQ ID NO: 1148481 - RNA, 19 nt, Artificial Sequence
  Description of Artificial Sequence: Synthetic oligonucleotide
  Antisense strand to SEQ ID NO: 1148480
uucuaagacaugaguacag

SEQ ID NO: 1148482 - RNA, 19 nt, Artificial Sequence
  Description of Artificial Sequence: Synthetic oligonucleotide
  Sense strand starting at position 530 of SEQ ID NO: 916334
caugucuuagaaggauacu

SEQ ID NO: 1148483 - RNA, 19 nt, Artificial Sequence
  Description of Artificial Sequence: Synthetic oligonucleotide
  Antisense strand to SEQ ID NO: 1148482
aguauccuucuaagacaug

SEQ ID NO: 1148484 - RNA, 19 nt, Artificial Sequence
  Description of Artificial Sequence: Synthetic oligonucleotide
  Sense strand starting at position 676 of SEQ ID NO: 916334
gcagaaguccuaggauucu

SEQ ID NO: 1148485 - RNA, 19 nt, Artificial Sequence
  Description of Artificial Sequence: Synthetic oligonucleotide
  Antisense strand to SEQ ID NO: 1148484
agaauccuaggacuucugc

SEQ ID NO: 1148486 - RNA, 19 nt, Artificial Sequence
  Description of Artificial Sequence: Synthetic oligonucleotide
  Sense strand starting at position 797 of SEQ ID NO: 916334
caaguuuggccuggaauau

SEQ ID NO: 1148487 - RNA, 19 nt, Artificial Sequence
  Description of Artificial Sequence: Synthetic oligonucleotide
  Antisense strand to SEQ ID NO: 1148486
auauuccaggccaaacuug

SEQ ID NO: 1148488 - RNA, 19 nt, Artificial Sequence
  Description of Artificial Sequence: Synthetic oligonucleotide
  Sense strand starting at position 798 of SEQ ID NO: 916334
aaguuuggccuggaauauc

SEQ ID NO: 1148489 - RNA, 19 nt, Artificial Sequence
  Description of Artificial Sequence: Synthetic oligonucleotide
  Antisense strand to SEQ ID NO: 1148488
gauauuccaggccaaacuu

SEQ ID NO: 1148490 - RNA, 19 nt, Artificial Sequence
  Description of Artificial Sequence: Synthetic oligonucleotide
  Sense strand starting at position 823 of SEQ ID NO: 916334
ucaguuuggagagguagaa

SEQ ID NO: 1148491 - RNA, 19 nt, Artificial Sequence
  Description of Artificial Sequence: Synthetic oligonucleotide
  Antisense strand to SEQ ID NO: 1148490
uucuaccucuccaaacuga

SEQ ID NO: 1148492 - RNA, 19 nt, Artificial Sequence
  Description of Artificial Sequence: Synthetic oligonucleotide
  Sense strand starting at position 1028 of SEQ ID NO: 916334
gugcuuucucgcuuucuca

SEQ ID NO: 1148493 - RNA, 19 nt, Artificial Sequence
  Description of Artificial Sequence: Synthetic oligonucleotide
  Antisense strand to SEQ ID NO: 1148492
ugagaaagcgagaaagcac

SEQ ID NO: 1148494 - RNA, 19 nt, Artificial Sequence
  Description of Artificial Sequence: Synthetic oligonucleotide
  Sense strand starting at position 1427 of SEQ ID NO: 916334
ugcgaauguacucaucuga

SEQ ID NO: 1148495 - RNA, 19 nt, Artificial Sequence
  Description of Artificial Sequence: Synthetic oligonucleotide
  Antisense strand to SEQ ID NO: 1148494
ucagaugaguacauucgca

SEQ ID NO: 1148496 - RNA, 19 nt, Artificial Sequence
  Description of Artificial Sequence: Synthetic oligonucleotide
  Sense strand starting at position 1434 of SEQ ID NO: 916334
guacucaucugaucccaua

SEQ ID NO: 1148497 - RNA, 19 nt, Artificial Sequence
  Description of Artificial Sequence: Synthetic oligonucleotide
  Antisense strand to SEQ ID NO: 1148496
uaugggaucagaugaguac

SEQ ID NO: 1148498 - RNA, 19 nt, Artificial Sequence
  Description of Artificial Sequence: Synthetic oligonucleotide
  Sense strand starting at position 1467 of SEQ ID NO: 916334
ucuaauucccuggaagcuu

SEQ ID NO: 1148499 - RNA, 19 nt, Artificial Sequence
  Description of Artificial Sequence: Synthetic oligonucleotide
  Antisense strand to SEQ ID NO: 1148498
aagcuuccagggaauuaga

SEQ ID NO: 1148500 - RNA, 19 nt, Artificial Sequence
  Description of Artificial Sequence: Synthetic oligonucleotide
  Sense strand starting at position 1492 of SEQ ID NO: 916334
cggagaaacaagcgaauua

SEQ ID NO: 1148501 - RNA, 19 nt, Artificial Sequence
  Description of Artificial Sequence: Synthetic oligonucleotide
  Antisense strand to SEQ ID NO: 1148500
uaauucgcuuguuucuccg

SEQ ID NO: 1148502 - RNA, 19 nt, Artificial Sequence
  Description of Artificial Sequence: Synthetic oligonucleotide
  Sense strand starting at position 1627 of SEQ ID NO: 916334
gggccugagaggugagaaa

SEQ ID NO: 1148503 - RNA, 19 nt, Artificial Sequence
  Description of Artificial Sequence: Synthetic oligonucleotide
  Antisense strand to SEQ ID NO: 1148502
uuucucaccucucaggccc

SEQ ID NO: 1148504 - RNA, 19 nt, Artificial Sequence
  Description of Artificial Sequence: Synthetic oligonucleotide
  Sense strand starting at position 1749 of SEQ ID NO: 916334
gucuuucuucuggaguaag

SEQ ID NO: 1148505 - RNA, 19 nt, Artificial Sequence
  Description of Artificial Sequence: Synthetic oligonucleotide
  Antisense strand to SEQ ID NO: 1148504
cuuacuccagaagaaagac

SEQ ID NO: 1148506 - RNA, 19 nt, Artificial Sequence
  Description of Artificial Sequence: Synthetic oligonucleotide
  Sense strand starting at position 1760 of SEQ ID NO: 916334
ggaguaagcucugucaaag

SEQ ID NO: 1148507 - RNA, 19 nt, Artificial Sequence
  Description of Artificial Sequence: Synthetic oligonucleotide
  Antisense strand to SEQ ID NO: 1148506
cuuugacagagcuuacucc

SEQ ID NO: 1148508 - RNA, 19 nt, Artificial Sequence
  Description of Artificial Sequence: Synthetic oligonucleotide
  Sense strand starting at position 2073 of SEQ ID NO: 916334
ugagaaacuccacguauug

SEQ ID NO: 1148509 - RNA, 19 nt, Artificial Sequence
  Description of Artificial Sequence: Synthetic oligonucleotide
  Antisense strand to SEQ ID NO: 1148508
caauacguggaguuucuca

SEQ ID NO: 1148510 - RNA, 19 nt, Artificial Sequence
  Description of Artificial Sequence: Synthetic oligonucleotide
  Sense strand starting at position 2317 of SEQ ID NO: 916334
acccuuugcgcccaaagaa

SEQ ID NO: 1148511 - RNA, 19 nt, Artificial Sequence
  Description of Artificial Sequence: Synthetic oligonucleotide
  Antisense strand to SEQ ID NO: 1148510
uucuuugggcgcaaagggu

SEQ ID NO: 1148512 - RNA, 19 nt, Artificial Sequence
  Description of Artificial Sequence: Synthetic oligonucleotide
  Sense strand starting at position 2504 of SEQ ID NO: 916334
ucuaguaccuucucaggau

SEQ ID NO: 1148513 - RNA, 19 nt, Artificial Sequence
  Description of Artificial Sequence: Synthetic oligonucleotide
  Antisense strand to SEQ ID NO: 1148512
auccugagaagguacuaga

SEQ ID NO: 1148514 - RNA, 19 nt, Artificial Sequence
  Description of Artificial Sequence: Synthetic oligonucleotide
  Sense strand starting at position 2592 of SEQ ID NO: 916334
gucucuguugaaugggaau

SEQ ID NO: 1148515 - RNA, 19 nt, Artificial Sequence
  Description of Artificial Sequence: Synthetic oligonucleotide
  Antisense strand to SEQ ID NO: 1148514
auucccauucaacagagac

SEQ ID NO: 1148516 - RNA, 19 nt, Artificial Sequence
  Description of Artificial Sequence: Synthetic oligonucleotide
  Sense strand starting at position 2789 of SEQ ID NO: 916334
ggccaaucccuacagcuau

SEQ ID NO: 1148517 - RNA, 19 nt, Artificial Sequence
  Description of Artificial Sequence: Synthetic oligonucleotide
  Antisense strand to SEQ ID NO: 1148516
auagcuguagggauuggcc

SEQ ID NO: 1148518 - RNA, 19 nt, Artificial Sequence
  Description of Artificial Sequence: Synthetic oligonucleotide
  Sense strand starting at position 3017 of SEQ ID NO: 916334
gguacuaacucagcuacau

SEQ ID NO: 1148519 - RNA, 19 nt, Artificial Sequence
  Description of Artificial Sequence: Synthetic oligonucleotide
  Antisense strand to SEQ ID NO: 1148518
auguagcugaguuaguacc

SEQ ID NO: 1148520 - RNA, 19 nt, Artificial Sequence
  Description of Artificial Sequence: Synthetic oligonucleotide
  Sense strand starting at position 3138 of SEQ ID NO: 916334
ugaggucucugccucauuu

SEQ ID NO: 1148521 - RNA, 19 nt, Artificial Sequence
  Description of Artificial Sequence: Synthetic oligonucleotide
  Antisense strand to SEQ ID NO: 1148520
aaaugaggcagagaccuca

SEQ ID NO: 1148522 - RNA, 19 nt, Artificial Sequence
  Description of Artificial Sequence: Synthetic oligonucleotide
  Sense strand starting at position 3142 of SEQ ID NO: 916334
gucucugccucauuucuau

SEQ ID NO: 1148523 - RNA, 19 nt, Artificial Sequence
  Description of Artificial Sequence: Synthetic oligonucleotide
  Antisense strand to SEQ ID NO: 1148522
auagaaaugaggcagagac

SEQ ID NO: 1148524 - RNA, 19 nt, Artificial Sequence
  Description of Artificial Sequence: Synthetic oligonucleotide
  Sense strand starting at position 3319 of SEQ ID NO: 916334
augugugaucaucaguagu

SEQ ID NO: 1148525 - RNA, 19 nt, Artificial Sequence
  Description of Artificial Sequence: Synthetic oligonucleotide
  Antisense strand to SEQ ID NO: 1148524
acuacugaugaucacacau

SEQ ID NO: 1148526 - RNA, 19 nt, Artificial Sequence
  Description of Artificial Sequence: Synthetic oligonucleotide
  Sense strand starting at position 3322 of SEQ ID NO: 916334
ugugaucaucaguaguaaa

SEQ ID NO: 1148527 - RNA, 19 nt, Artificial Sequence
  Description of Artificial Sequence: Synthetic oligonucleotide
  Antisense strand to SEQ ID NO: 1148526
uuuacuacugaugaucaca

SEQ ID NO: 1148528 - RNA, 19 nt, Artificial Sequence
  Description of Artificial Sequence: Synthetic oligonucleotide
  Sense strand starting at position 3424 of SEQ ID NO: 916334
cuagaacugcuaugcagaa

SEQ ID NO: 1148529 - RNA, 19 nt, Artificial Sequence
  Description of Artificial Sequence: Synthetic oligonucleotide
  Antisense strand to SEQ ID NO: 1148528
uucugcauagcaguucuag

SEQ ID NO: 1148530 - RNA, 19 nt, Artificial Sequence
  Description of Artificial Sequence: Synthetic oligonucleotide
  Sense strand starting at position 3778 of SEQ ID NO: 916334
cagguuccuguagauuauu

SEQ ID NO: 1148531 - RNA, 19 nt, Artificial Sequence
  Description of Artificial Sequence: Synthetic oligonucleotide
  Antisense strand to SEQ ID NO: 1148530
aauaaucuacaggaaccug

SEQ ID NO: 1148532 - RNA, 19 nt, Artificial Sequence
  Description of Artificial Sequence: Synthetic oligonucleotide
  Sense strand starting at position 3786 of SEQ ID NO: 916334
uguagauuauuggucagga

SEQ ID NO: 1148533 - RNA, 19 nt, Artificial Sequence
  Description of Artificial Sequence: Synthetic oligonucleotide
  Antisense strand to SEQ ID NO: 1148532
uccugaccaauaaucuaca

SEQ ID NO: 1148534 - RNA, 19 nt, Artificial Sequence
  Description of Artificial Sequence: Synthetic oligonucleotide
  Sense strand starting at position 3787 of SEQ ID NO: 916334
guagauuauuggucaggaa

SEQ ID NO: 1148535 - RNA, 19 nt, Artificial Sequence
  Description of Artificial Sequence: Synthetic oligonucleotide
  Antisense strand to SEQ ID NO: 1148534
uuccugaccaauaaucuac

SEQ ID NO: 1148536 - RNA, 19 nt, Artificial Sequence
  Description of Artificial Sequence: Synthetic oligonucleotide
  Sense strand starting at position 3968 of SEQ ID NO: 916334
cagggucccuaaucuuaga

SEQ ID NO: 1148537 - RNA, 19 nt, Artificial Sequence
  Description of Artificial Sequence: Synthetic oligonucleotide
  Antisense strand to SEQ ID NO: 1148536
ucuaagauuagggacccug

SEQ ID NO: 1148538 - RNA, 19 nt, Artificial Sequence
  Description of Artificial Sequence: Synthetic oligonucleotide
  Sense strand starting at position 3978 of SEQ ID NO: 916334
aaucuuagauguccuugga

SEQ ID NO: 1148539 - RNA, 19 nt, Artificial Sequence
  Description of Artificial Sequence: Synthetic oligonucleotide
  Antisense strand to SEQ ID NO: 1148538
uccaaggacaucuaagauu

SEQ ID NO: 1148540 - RNA, 19 nt, Artificial Sequence
  Description of Artificial Sequence: Synthetic oligonucleotide
  Sense strand starting at position 470 of SEQ ID NO: 916335
ugggcuguuggcgaauuua

SEQ ID NO: 1148541 - RNA, 19 nt, Artificial Sequence
  Description of Artificial Sequence: Synthetic oligonucleotide
  Antisense strand to SEQ ID NO: 1148540
uaaauucgccaacagccca

SEQ ID NO: 1148542 - RNA, 19 nt, Artificial Sequence
  Description of Artificial Sequence: Synthetic oligonucleotide
  Sense strand starting at position 550 of SEQ ID NO: 916335
gcgguaacuguuguuuauc

SEQ ID NO: 1148543 - RNA, 19 nt, Artificial Sequence
  Description of Artificial Sequence: Synthetic oligonucleotide
  Antisense strand to SEQ ID NO: 1148542
gauaaacaacaguuaccgc

SEQ ID NO: 1148544 - RNA, 19 nt, Artificial Sequence
  Description of Artificial Sequence: Synthetic oligonucleotide
  Sense strand starting at position 553 of SEQ ID NO: 916335
guaacuguuguuuaucagu

SEQ ID NO: 1148545 - RNA, 19 nt, Artificial Sequence
  Description of Artificial Sequence: Synthetic oligonucleotide
  Antisense strand to SEQ ID NO: 1148544
acugauaaacaacaguuac

SEQ ID NO: 1148546 - RNA, 19 nt, Artificial Sequence
  Description of Artificial Sequence: Synthetic oligonucleotide
  Sense strand starting at position 720 of SEQ ID NO: 916335
gucccuaccuucuugugau

SEQ ID NO: 1148547 - RNA, 19 nt, Artificial Sequence
  Description of Artificial Sequence: Synthetic oligonucleotide
  Antisense strand to SEQ ID NO: 1148546
aucacaagaagguagggac

SEQ ID NO: 1148548 - RNA, 19 nt, Artificial Sequence
  Description of Artificial Sequence: Synthetic oligonucleotide
  Sense strand starting at position 2057 of SEQ ID NO: 916335
gacccaacuucuguccgaa

SEQ ID NO: 1148549 - RNA, 19 nt, Artificial Sequence
  Description of Artificial Sequence: Synthetic oligonucleotide
  Antisense strand to SEQ ID NO: 1148548
uucggacagaaguuggguc

SEQ ID NO: 1148550 - RNA, 19 nt, Artificial Sequence
  Description of Artificial Sequence: Synthetic oligonucleotide
  Sense strand starting at position 2060 of SEQ ID NO: 916335
ccaacuucuguccgaaguu

SEQ ID NO: 1148551 - RNA, 19 nt, Artificial Sequence
  Description of Artificial Sequence: Synthetic oligonucleotide
  Antisense strand to SEQ ID NO: 1148550
aacuucggacagaaguugg

SEQ ID NO: 1148552 - RNA, 19 nt, Artificial Sequence
  Description of Artificial Sequence: Synthetic oligonucleotide
  Sense strand starting at position 2174 of SEQ ID NO: 916335
ccuguuaucuaaguuccca

SEQ ID NO: 1148553 - RNA, 19 nt, Artificial Sequence
  Description of Artificial Sequence: Synthetic oligonucleotide
  Antisense strand to SEQ ID NO: 1148552
ugggaacuuagauaacagg

SEQ ID NO: 1148554 - RNA, 19 nt, Artificial Sequence
  Description of Artificial Sequence: Synthetic oligonucleotide
  Sense strand starting at position 2285 of SEQ ID NO: 916335
acccgagagucauuagaag

SEQ ID NO: 1148555 - RNA, 19 nt, Artificial Sequence
  Description of Artificial Sequence: Synthetic oligonucleotide
  Antisense strand to SEQ ID NO: 1148554
cuucuaaugacucucgggu

SEQ ID NO: 1148556 - RNA, 19 nt, Artificial Sequence
  Description of Artificial Sequence: Synthetic oligonucleotide
  Sense strand starting at position 2292 of SEQ ID NO: 916335
agucauuagaagcgcaaga

SEQ ID NO: 1148557 - RNA, 19 nt, Artificial Sequence
  Description of Artificial Sequence: Synthetic oligonucleotide
  Antisense strand to SEQ ID NO: 1148556
ucuugcgcuucuaaugacu

SEQ ID NO: 1148558 - RNA, 19 nt, Artificial Sequence
  Description of Artificial Sequence: Synthetic oligonucleotide
  Sense strand starting at position 2551 of SEQ ID NO: 916335
gggaguacgagugggaaua

SEQ ID NO: 1148559 - RNA, 19 nt, Artificial Sequence
  Description of Artificial Sequence: Synthetic oligonucleotide
  Antisense strand to SEQ ID NO: 1148558
uauucccacucguacuccc

SEQ ID NO: 1148560 - RNA, 19 nt, Artificial Sequence
  Description of Artificial Sequence: Synthetic oligonucleotide
  Sense strand starting at position 2552 of SEQ ID NO: 916335
ggaguacgagugggaauau

SEQ ID NO: 1148561 - RNA, 19 nt, Artificial Sequence
  Description of Artificial Sequence: Synthetic oligonucleotide
  Antisense strand to SEQ ID NO: 1148560
auauucccacucguacucc

SEQ ID NO: 1148562 - RNA, 19 nt, Artificial Sequence
  Description of Artificial Sequence: Synthetic oligonucleotide
  Sense strand starting at position 2759 of SEQ ID NO: 916335
gucggauuugagugcuuac

SEQ ID NO: 1148563 - RNA, 19 nt, Artificial Sequence
  Description of Artificial Sequence: Synthetic oligonucleotide
  Antisense strand to SEQ ID NO: 1148562
guaagcacucaaauccgac

SEQ ID NO: 1148564 - RNA, 19 nt, Artificial Sequence
  Description of Artificial Sequence: Synthetic oligonucleotide
  Sense strand starting at position 2791 of SEQ ID NO: 916335
ccuugcaaacguuaucuca

SEQ ID NO: 1148565 - RNA, 19 nt, Artificial Sequence
  Description of Artificial Sequence: Synthetic oligonucleotide
  Antisense strand to SEQ ID NO: 1148564
ugagauaacguuugcaagg

SEQ ID NO: 1148566 - RNA, 19 nt, Artificial Sequence
  Description of Artificial Sequence: Synthetic oligonucleotide
  Sense strand starting at position 2793 of SEQ ID NO: 916335
uugcaaacguuaucucauu

SEQ ID NO: 1148567 - RNA, 19 nt, Artificial Sequence
  Description of Artificial Sequence: Synthetic oligonucleotide
  Antisense strand to SEQ ID NO: 1148566
aaugagauaacguuugcaa

SEQ ID NO: 1148568 - RNA, 19 nt, Artificial Sequence
  Description of Artificial Sequence: Synthetic oligonucleotide
  Sense strand starting at position 2886 of SEQ ID NO: 916335
gaggaaaguuucuugcuca

SEQ ID NO: 1148569 - RNA, 19 nt, Artificial Sequence
  Description of Artificial Sequence: Synthetic oligonucleotide
  Antisense strand to SEQ ID NO: 1148568
ugagcaagaaacuuuccuc

SEQ ID NO: 1148570 - RNA, 19 nt, Artificial Sequence
  Description of Artificial Sequence: Synthetic oligonucleotide
  Sense strand starting at position 2889 of SEQ ID NO: 916335
gaaaguuucuugcucaaga

SEQ ID NO: 1148571 - RNA, 19 nt, Artificial Sequence
  Description of Artificial Sequence: Synthetic oligonucleotide
  Antisense strand to SEQ ID NO: 1148570
ucuugagcaagaaacuuuc

SEQ ID NO: 1148572 - RNA, 19 nt, Artificial Sequence
  Description of Artificial Sequence: Synthetic oligonucleotide
  Sense strand starting at position 2920 of SEQ ID NO: 916335
caagucaggccuuguacuu

SEQ ID NO: 1148573 - RNA, 19 nt, Artificial Sequence
  Description of Artificial Sequence: Synthetic oligonucleotide
  Antisense strand to SEQ ID NO: 1148572
aaguacaaggccugacuug

SEQ ID NO: 1148574 - RNA, 19 nt, Artificial Sequence
  Description of Artificial Sequence: Synthetic oligonucleotide
  Sense strand starting at position 2930 of SEQ ID NO: 916335
cuuguacuuugaucccauu

SEQ ID NO: 1148575 - RNA, 19 nt, Artificial Sequence
  Description of Artificial Sequence: Synthetic oligonucleotide
  Antisense strand to SEQ ID NO: 1148574
aaugggaucaaaguacaag

SEQ ID NO: 1148576 - RNA, 19 nt, Artificial Sequence
  Description of Artificial Sequence: Synthetic oligonucleotide
  Sense strand starting at position 2973 of SEQ ID NO: 916335
cguccaacaguagaaauaa

SEQ ID NO: 1148577 - RNA, 19 nt, Artificial Sequence
  Description of Artificial Sequence: Synthetic oligonucleotide
  Antisense strand to SEQ ID NO: 1148576
uuauuucuacuguuggacg

SEQ ID NO: 1148578 - RNA, 19 nt, Artificial Sequence
  Description of Artificial Sequence: Synthetic oligonucleotide
  Sense strand starting at position 3024 of SEQ ID NO: 916335
uaggaaugacggcgaugau

SEQ ID NO: 1148579 - RNA, 19 nt, Artificial Sequence
  Description of Artificial Sequence: Synthetic oligonucleotide
  Antisense strand to SEQ ID NO: 1148578
aucaucgccgucauuccua

SEQ ID NO: 1148580 - RNA, 19 nt, Artificial Sequence
  Description of Artificial Sequence: Synthetic oligonucleotide
  Sense strand starting at position 3027 of SEQ ID NO: 916335
gaaugacggcgaugaugaa

SEQ ID NO: 1148581 - RNA, 19 nt, Artificial Sequence
  Description of Artificial Sequence: Synthetic oligonucleotide
  Antisense strand to SEQ ID NO: 1148580
uucaucaucgccgucauuc

SEQ ID NO: 1148582 - RNA, 19 nt, Artificial Sequence
  Description of Artificial Sequence: Synthetic oligonucleotide
  Sense strand starting at position 3037 of SEQ ID NO: 916335
gaugaugaaacuuguggua

SEQ ID NO: 1148583 - RNA, 19 nt, Artificial Sequence
  Description of Artificial Sequence: Synthetic oligonucleotide
  Antisense strand to SEQ ID NO: 1148582
uaccacaaguuucaucauc

SEQ ID NO: 1148584 - RNA, 19 nt, Artificial Sequence
  Description of Artificial Sequence: Synthetic oligonucleotide
  Sense strand starting at position 3060 of SEQ ID NO: 916335
aaauauugaccgcgauggu

SEQ ID NO: 1148585 - RNA, 19 nt, Artificial Sequence
  Description of Artificial Sequence: Synthetic oligonucleotide
  Antisense strand to SEQ ID NO: 1148584
accaucgcggucaauauuu

SEQ ID NO: 1148586 - RNA, 19 nt, Artificial Sequence
  Description of Artificial Sequence: Synthetic oligonucleotide
  Sense strand starting at position 3067 of SEQ ID NO: 916335
gaccgcgauggugauaaua

SEQ ID NO: 1148587 - RNA, 19 nt, Artificial Sequence
  Description of Artificial Sequence: Synthetic oligonucleotide
  Antisense strand to SEQ ID NO: 1148586
uauuaucaccaucgcgguc

SEQ ID NO: 1148588 - RNA, 19 nt, Artificial Sequence
  Description of Artificial Sequence: Synthetic oligonucleotide
  Sense strand starting at position 3093 of SEQ ID NO: 916335
aaagguuucugguucugga

SEQ ID NO: 1148589 - RNA, 19 nt, Artificial Sequence
  Description of Artificial Sequence: Synthetic oligonucleotide
  Antisense strand to SEQ ID NO: 1148588
uccagaaccagaaaccuuu

SEQ ID NO: 1148590 - RNA, 19 nt, Artificial Sequence
  Description of Artificial Sequence: Synthetic oligonucleotide
  Sense strand starting at position 3185 of SEQ ID NO: 916335
cgacuuccuuaucugcaga

SEQ ID NO: 1148591 - RNA, 19 nt, Artificial Sequence
  Description of Artificial Sequence: Synthetic oligonucleotide
  Antisense strand to SEQ ID NO: 1148590
ucugcagauaaggaagucg

SEQ ID NO: 1148592 - RNA, 19 nt, Artificial Sequence
  Description of Artificial Sequence: Synthetic oligonucleotide
  Sense strand starting at position 3272 of SEQ ID NO: 916335
gucauaacauggucucuca

SEQ ID NO: 1148593 - RNA, 19 nt, Artificial Sequence
  Description of Artificial Sequence: Synthetic oligonucleotide
  Antisense strand to SEQ ID NO: 1148592
ugagagaccauguuaugac

SEQ ID NO: 1148594 - RNA, 19 nt, Artificial Sequence
  Description of Artificial Sequence: Synthetic oligonucleotide
  Sense strand starting at position 3296 of SEQ ID NO: 916335
aaccuuaugagguggugau

SEQ ID NO: 1148595 - RNA, 19 nt, Artificial Sequence
  Description of Artificial Sequence: Synthetic oligonucleotide
  Antisense strand to SEQ ID NO: 1148594
aucaccaccucauaagguu

SEQ ID NO: 1148596 - RNA, 19 nt, Artificial Sequence
  Description of Artificial Sequence: Synthetic oligonucleotide
  Sense strand starting at position 3297 of SEQ ID NO: 916335
accuuaugagguggugaua

SEQ ID NO: 1148597 - RNA, 19 nt, Artificial Sequence
  Description of Artificial Sequence: Synthetic oligonucleotide
  Antisense strand to SEQ ID NO: 1148596
uaucaccaccucauaaggu

SEQ ID NO: 1148598 - RNA, 19 nt, Artificial Sequence
  Description of Artificial Sequence: Synthetic oligonucleotide
  Sense strand starting at position 3306 of SEQ ID NO: 916335
gguggugauaucuacugua

SEQ ID NO: 1148599 - RNA, 19 nt, Artificial Sequence
  Description of Artificial Sequence: Synthetic oligonucleotide
  Antisense strand to SEQ ID NO: 1148598
uacaguagauaucaccacc

SEQ ID NO: 1148600 - RNA, 19 nt, Artificial Sequence
  Description of Artificial Sequence: Synthetic oligonucleotide
  Sense strand starting at position 3320 of SEQ ID NO: 916335
cuguauaauccaggaucuc

SEQ ID NO: 1148601 - RNA, 19 nt, Artificial Sequence
  Description of Artificial Sequence: Synthetic oligonucleotide
  Antisense strand to SEQ ID NO: 1148600
gagauccuggauuauacag

SEQ ID NO: 1148602 - RNA, 19 nt, Artificial Sequence
  Description of Artificial Sequence: Synthetic oligonucleotide
  Sense strand starting at position 3343 of SEQ ID NO: 916335
ggaaauagguggcacauuu

SEQ ID NO: 1148603 - RNA, 19 nt, Artificial Sequence
  Description of Artificial Sequence: Synthetic oligonucleotide
  Antisense strand to SEQ ID NO: 1148602
aaaugugccaccuauuucc

SEQ ID NO: 1148604 - RNA, 19 nt, Artificial Sequence
  Description of Artificial Sequence: Synthetic oligonucleotide
  Sense strand starting at position 3365 of SEQ ID NO: 916335
uuaggaugaucugagagaa

SEQ ID NO: 1148605 - RNA, 19 nt, Artificial Sequence
  Description of Artificial Sequence: Synthetic oligonucleotide
  Antisense strand to SEQ ID NO: 1148604
uucucucagaucauccuaa

SEQ ID NO: 1148606 - RNA, 19 nt, Artificial Sequence
  Description of Artificial Sequence: Synthetic oligonucleotide
  Sense strand starting at position 3484 of SEQ ID NO: 916335
aagggugugaucugaauug

SEQ ID NO: 1148607 - RNA, 19 nt, Artificial Sequence
  Description of Artificial Sequence: Synthetic oligonucleotide
  Antisense strand to SEQ ID NO: 1148606
caauucagaucacacccuu

SEQ ID NO: 1148608 - RNA, 19 nt, Artificial Sequence
  Description of Artificial Sequence: Synthetic oligonucleotide
  Sense strand starting at position 3493 of SEQ ID NO: 916335
aucugaauuguguggagag

SEQ ID NO: 1148609 - RNA, 19 nt, Artificial Sequence
  Description of Artificial Sequence: Synthetic oligonucleotide
  Antisense strand to SEQ ID NO: 1148608
cucuccacacaauucagau

SEQ ID NO: 1148610 - RNA, 19 nt, Artificial Sequence
  Description of Artificial Sequence: Synthetic oligonucleotide
  Sense strand starting at position 3513 of SEQ ID NO: 916335
gcaccugagaccugcugau

SEQ ID NO: 1148611 - RNA, 19 nt, Artificial Sequence
  Description of Artificial Sequence: Synthetic oligonucleotide
  Antisense strand to SEQ ID NO: 1148610
aucagcaggucucaggugc

SEQ ID NO: 1148612 - RNA, 19 nt, Artificial Sequence
  Description of Artificial Sequence: Synthetic oligonucleotide
  Sense strand starting at position 3517 of SEQ ID NO: 916335
cugagaccugcugauaacu

SEQ ID NO: 1148613 - RNA, 19 nt, Artificial Sequence
  Description of Artificial Sequence: Synthetic oligonucleotide
  Antisense strand to SEQ ID NO: 1148612
aguuaucagcaggucucag

SEQ ID NO: 1148614 - RNA, 19 nt, Artificial Sequence
  Description of Artificial Sequence: Synthetic oligonucleotide
  Sense strand starting at position 3558 of SEQ ID NO: 916335
guuuccugucaaggauuga

SEQ ID NO: 1148615 - RNA, 19 nt, Artificial Sequence
  Description of Artificial Sequence: Synthetic oligonucleotide
  Antisense strand to SEQ ID NO: 1148614
ucaauccuugacaggaaac

SEQ ID NO: 1148616 - RNA, 19 nt, Artificial Sequence
  Description of Artificial Sequence: Synthetic oligonucleotide
  Sense strand starting at position 3671 of SEQ ID NO: 916335
ccaggaaaccugugcauga

SEQ ID NO: 1148617 - RNA, 19 nt, Artificial Sequence
  Description of Artificial Sequence: Synthetic oligonucleotide
  Antisense strand to SEQ ID NO: 1148616
ucaugcacagguuuccugg

SEQ ID NO: 1148618 - RNA, 19 nt, Artificial Sequence
  Description of Artificial Sequence: Synthetic oligonucleotide
  Sense strand starting at position 3682 of SEQ ID NO: 916335
gugcaugaggucuauacuc

SEQ ID NO: 1148619 - RNA, 19 nt, Artificial Sequence
  Description of Artificial Sequence: Synthetic oligonucleotide
  Antisense strand to SEQ ID NO: 1148618
gaguauagaccucaugcac

SEQ ID NO: 1148620 - RNA, 19 nt, Artificial Sequence
  Description of Artificial Sequence: Synthetic oligonucleotide
  Sense strand starting at position 92 of SEQ ID NO: 916336
aaguguugagaauauagca

SEQ ID NO: 1148621 - RNA, 19 nt, Artificial Sequence
  Description of Artificial Sequence: Synthetic oligonucleotide
  Antisense strand to SEQ ID NO: 1148620
ugcuauauucucaacacuu

SEQ ID NO: 1148622 - RNA, 19 nt, Artificial Sequence
  Description of Artificial Sequence: Synthetic oligonucleotide
  Sense strand starting at position 140 of SEQ ID NO: 916336
cccuauggagcuuauagua

SEQ ID NO: 1148623 - RNA, 19 nt, Artificial Sequence
  Description of Artificial Sequence: Synthetic oligonucleotide
  Antisense strand to SEQ ID NO: 1148622
uacuauaagcuccauaggg

SEQ ID NO: 1148624 - RNA, 19 nt, Artificial Sequence
  Description of Artificial Sequence: Synthetic oligonucleotide
  Sense strand starting at position 155 of SEQ ID NO: 916336
aguaauggagcuuacaacu

SEQ ID NO: 1148625 - RNA, 19 nt, Artificial Sequence
  Description of Artificial Sequence: Synthetic oligonucleotide
  Antisense strand to SEQ ID NO: 1148624
aguuguaagcuccauuacu

SEQ ID NO: 1148626 - RNA, 19 nt, Artificial Sequence
  Description of Artificial Sequence: Synthetic oligonucleotide
  Sense strand starting at position 187 of SEQ ID NO: 916336
augguaguauaucuaacau

SEQ ID NO: 1148627 - RNA, 19 nt, Artificial Sequence
  Description of Artificial Sequence: Synthetic oligonucleotide
  Antisense strand to SEQ ID NO: 1148626
auguuagauauacuaccau

SEQ ID NO: 1148628 - RNA, 19 nt, Artificial Sequence
  Description of Artificial Sequence: Synthetic oligonucleotide
  Sense strand starting at position 198 of SEQ ID NO: 916336
ucuaacauugcagaaguga

SEQ ID NO: 1148629 - RNA, 19 nt, Artificial Sequence
  Description of Artificial Sequence: Synthetic oligonucleotide
  Antisense strand to SEQ ID NO: 1148628
ucacuucugcaauguuaga

SEQ ID NO: 1148630 - RNA, 19 nt, Artificial Sequence
  Description of Artificial Sequence: Synthetic oligonucleotide
  Sense strand starting at position 209 of SEQ ID NO: 916336
agaagugaguguguaauag

SEQ ID NO: 1148631 - RNA, 19 nt, Artificial Sequence
  Description of Artificial Sequence: Synthetic oligonucleotide
  Antisense strand to SEQ ID NO: 1148630
cuauuacacacucacuucu

SEQ ID NO: 1148632 - RNA, 19 nt, Artificial Sequence
  Description of Artificial Sequence: Synthetic oligonucleotide
  Sense strand starting at position 218 of SEQ ID NO: 916336
uguguaauaguguaauucu

SEQ ID NO: 1148633 - RNA, 19 nt, Artificial Sequence
  Description of Artificial Sequence: Synthetic oligonucleotide
  Antisense strand to SEQ ID NO: 1148632
agaauuacacuauuacaca

SEQ ID NO: 1148634 - RNA, 19 nt, Artificial Sequence
  Description of Artificial Sequence: Synthetic oligonucleotide
  Sense strand starting at position 221 of SEQ ID NO: 916336
guaauaguguaauucuuuc

SEQ ID NO: 1148635 - RNA, 19 nt, Artificial Sequence
  Description of Artificial Sequence: Synthetic oligonucleotide
  Antisense strand to SEQ ID NO: 1148634
gaaagaauuacacuauuac

SEQ ID NO: 1148636 - RNA, 19 nt, Artificial Sequence
  Description of Artificial Sequence: Synthetic oligonucleotide
  Sense strand starting at position 344 of SEQ ID NO: 916336
gaaggugcuuugucaauuu

SEQ ID NO: 1148637 - RNA, 19 nt, Artificial Sequence
  Description of Artificial Sequence: Synthetic oligonucleotide
  Antisense strand to SEQ ID NO: 1148636
aaauugacaaagcaccuuc

SEQ ID NO: 1148638 - RNA, 19 nt, Artificial Sequence
  Description of Artificial Sequence: Synthetic oligonucleotide
  Sense strand starting at position 943 of SEQ ID NO: 916336
agugcuuugcauuagaacu

SEQ ID NO: 1148639 - RNA, 19 nt, Artificial Sequence
  Description of Artificial Sequence: Synthetic oligonucleotide
  Antisense strand to SEQ ID NO: 1148638
aguucuaaugcaaagcacu

SEQ ID NO: 1148640 - RNA, 19 nt, Artificial Sequence
  Description of Artificial Sequence: Synthetic oligonucleotide
  Sense strand starting at position 1023 of SEQ ID NO: 916336
ccuuuaaugcuccaccgga

SEQ ID NO: 1148641 - RNA, 19 nt, Artificial Sequence
  Description of Artificial Sequence: Synthetic oligonucleotide
  Antisense strand to SEQ ID NO: 1148640
uccgguggagcauuaaagg

SEQ ID NO: 1148642 - RNA, 19 nt, Artificial Sequence
  Description of Artificial Sequence: Synthetic oligonucleotide
  Sense strand starting at position 1036 of SEQ ID NO: 916336
accggagaauccucuccau

SEQ ID NO: 1148643 - RNA, 19 nt, Artificial Sequence
  Description of Artificial Sequence: Synthetic oligonucleotide
  Antisense strand to SEQ ID NO: 1148642
auggagaggauucuccggu

SEQ ID NO: 1148644 - RNA, 19 nt, Artificial Sequence
  Description of Artificial Sequence: Synthetic oligonucleotide
  Sense strand starting at position 1039 of SEQ ID NO: 916336
ggagaauccucuccauacu

SEQ ID NO: 1148645 - RNA, 19 nt, Artificial Sequence
  Description of Artificial Sequence: Synthetic oligonucleotide
  Antisense strand to SEQ ID NO: 1148644
aguauggagaggauucucc

SEQ ID NO: 1148646 - RNA, 19 nt, Artificial Sequence
  Description of Artificial Sequence: Synthetic oligonucleotide
  Sense strand starting at position 1081 of SEQ ID NO: 916336
uuuauuauccggugacuau

SEQ ID NO: 1148647 - RNA, 19 nt, Artificial Sequence
  Description of Artificial Sequence: Synthetic oligonucleotide
  Antisense strand to SEQ ID NO: 1148646
auagucaccggauaauaaa

SEQ ID NO: 1148648 - RNA, 19 nt, Artificial Sequence
  Description of Artificial Sequence: Synthetic oligonucleotide
  Sense strand starting at position 1082 of SEQ ID NO: 916336
uuauuauccggugacuauu

SEQ ID NO: 1148649 - RNA, 19 nt, Artificial Sequence
  Description of Artificial Sequence: Synthetic oligonucleotide
  Antisense strand to SEQ ID NO: 1148648
aauagucaccggauaauaa

SEQ ID NO: 1148650 - RNA, 19 nt, Artificial Sequence
  Description of Artificial Sequence: Synthetic oligonucleotide
  Sense strand starting at position 1112 of SEQ ID NO: 916336
uuaugagcuaucugaggac

SEQ ID NO: 1148651 - RNA, 19 nt, Artificial Sequence
  Description of Artificial Sequence: Synthetic oligonucleotide
  Antisense strand to SEQ ID NO: 1148650
guccucagauagcucauaa

SEQ ID NO: 1148652 - RNA, 19 nt, Artificial Sequence
  Description of Artificial Sequence: Synthetic oligonucleotide
  Sense strand starting at position 1255 of SEQ ID NO: 916336
acacuuaagugagcacuaa

SEQ ID NO: 1148653 - RNA, 19 nt, Artificial Sequence
  Description of Artificial Sequence: Synthetic oligonucleotide
  Antisense strand to SEQ ID NO: 1148652
uuagugcucacuuaagugu

SEQ ID NO: 1148654 - RNA, 19 nt, Artificial Sequence
  Description of Artificial Sequence: Synthetic oligonucleotide
  Sense strand starting at position 1612 of SEQ ID NO: 916336
ugaagcuaucaauaaaguu

SEQ ID NO: 1148655 - RNA, 19 nt, Artificial Sequence
  Description of Artificial Sequence: Synthetic oligonucleotide
  Antisense strand to SEQ ID NO: 1148654
aacuuuauugauagcuuca

SEQ ID NO: 1148656 - RNA, 19 nt, Artificial Sequence
  Description of Artificial Sequence: Synthetic oligonucleotide
  Sense strand starting at position 1758 of SEQ ID NO: 916336
gcaccuaccguaucguuau

SEQ ID NO: 1148657 - RNA, 19 nt, Artificial Sequence
  Description of Artificial Sequence: Synthetic oligonucleotide
  Antisense strand to SEQ ID NO: 1148656
auaacgauacgguaggugc

SEQ ID NO: 1148658 - RNA, 19 nt, Artificial Sequence
  Description of Artificial Sequence: Synthetic oligonucleotide
  Sense strand starting at position 2050 of SEQ ID NO: 916336
ccaacucugaugugaguga

SEQ ID NO: 1148659 - RNA, 19 nt, Artificial Sequence
  Description of Artificial Sequence: Synthetic oligonucleotide
  Antisense strand to SEQ ID NO: 1148658
ucacucacaucagaguugg

SEQ ID NO: 1148660 - RNA, 19 nt, Artificial Sequence
  Description of Artificial Sequence: Synthetic oligonucleotide
  Sense strand starting at position 2335 of SEQ ID NO: 916336
gugaguugcaaucagcaua

SEQ ID NO: 1148661 - RNA, 19 nt, Artificial Sequence
  Description of Artificial Sequence: Synthetic oligonucleotide
  Antisense strand to SEQ ID NO: 1148660
uaugcugauugcaacucac

SEQ ID NO: 1148662 - RNA, 19 nt, Artificial Sequence
  Description of Artificial Sequence: Synthetic oligonucleotide
  Sense strand starting at position 2338 of SEQ ID NO: 916336
aguugcaaucagcauauaa

SEQ ID NO: 1148663 - RNA, 19 nt, Artificial Sequence
  Description of Artificial Sequence: Synthetic oligonucleotide
  Antisense strand to SEQ ID NO: 1148662
uuauaugcugauugcaacu

SEQ ID NO: 1148664 - RNA, 19 nt, Artificial Sequence
  Description of Artificial Sequence: Synthetic oligonucleotide
  Sense strand starting at position 2383 of SEQ ID NO: 916336
aagugacucccagguagua

SEQ ID NO: 1148665 - RNA, 19 nt, Artificial Sequence
  Description of Artificial Sequence: Synthetic oligonucleotide
  Antisense strand to SEQ ID NO: 1148664
uacuaccugggagucacuu

SEQ ID NO: 1148666 - RNA, 19 nt, Artificial Sequence
  Description of Artificial Sequence: Synthetic oligonucleotide
  Sense strand starting at position 2454 of SEQ ID NO: 916336
uguauacuggcuuauaaug

SEQ ID NO: 1148667 - RNA, 19 nt, Artificial Sequence
  Description of Artificial Sequence: Synthetic oligonucleotide
  Antisense strand to SEQ ID NO: 1148666
cauuauaagccaguauaca

SEQ ID NO: 1148668 - RNA, 19 nt, Artificial Sequence
  Description of Artificial Sequence: Synthetic oligonucleotide
  Sense strand starting at position 2664 of SEQ ID NO: 916336
gcgugcucaaaccagaauu

SEQ ID NO: 1148669 - RNA, 19 nt, Artificial Sequence
  Description of Artificial Sequence: Synthetic oligonucleotide
  Antisense strand to SEQ ID NO: 1148668
aauucugguuugagcacgc

SEQ ID NO: 1148670 - RNA, 19 nt, Artificial Sequence
  Description of Artificial Sequence: Synthetic oligonucleotide
  Sense strand starting at position 2677 of SEQ ID NO: 916336
agaauuguuugaucccaaa

SEQ ID NO: 1148671 - RNA, 19 nt, Artificial Sequence
  Description of Artificial Sequence: Synthetic oligonucleotide
  Antisense strand to SEQ ID NO: 1148670
uuugggaucaaacaauucu

SEQ ID NO: 1148672 - RNA, 19 nt, Artificial Sequence
  Description of Artificial Sequence: Synthetic oligonucleotide
  Sense strand starting at position 2731 of SEQ ID NO: 916336
guaggagagucuucaggcu

SEQ ID NO: 1148673 - RNA, 19 nt, Artificial Sequence
  Description of Artificial Sequence: Synthetic oligonucleotide
  Antisense strand to SEQ ID NO: 1148672
agccugaagacucuccuac

SEQ ID NO: 1148674 - RNA, 19 nt, Artificial Sequence
  Description of Artificial Sequence: Synthetic oligonucleotide
  Sense strand starting at position 2752 of SEQ ID NO: 916336
aagugaagguugccuggau

SEQ ID NO: 1148675 - RNA, 19 nt, Artificial Sequence
  Description of Artificial Sequence: Synthetic oligonucleotide
  Antisense strand to SEQ ID NO: 1148674
auccaggcaaccuucacuu

SEQ ID NO: 1148676 - RNA, 19 nt, Artificial Sequence
  Description of Artificial Sequence: Synthetic oligonucleotide
  Sense strand starting at position 2753 of SEQ ID NO: 916336
agugaagguugccuggauu

SEQ ID NO: 1148677 - RNA, 19 nt, Artificial Sequence
  Description of Artificial Sequence: Synthetic oligonucleotide
  Antisense strand to SEQ ID NO: 1148676
aauccaggcaaccuucacu

SEQ ID NO: 1148678 - RNA, 19 nt, Artificial Sequence
  Description of Artificial Sequence: Synthetic oligonucleotide
  Sense strand starting at position 2880 of SEQ ID NO: 916336
uugggauacuuucuuucca

SEQ ID NO: 1148679 - RNA, 19 nt, Artificial Sequence
  Description of Artificial Sequence: Synthetic oligonucleotide
  Antisense strand to SEQ ID NO: 1148678
uggaaagaaaguaucccaa

SEQ ID NO: 1148680 - RNA, 19 nt, Artificial Sequence
  Description of Artificial Sequence: Synthetic oligonucleotide
  Sense strand starting at position 2881 of SEQ ID NO: 916336
ugggauacuuucuuuccau

SEQ ID NO: 1148681 - RNA, 19 nt, Artificial Sequence
  Description of Artificial Sequence: Synthetic oligonucleotide
  Antisense strand to SEQ ID NO: 1148680
auggaaagaaaguauccca

SEQ ID NO: 1148682 - RNA, 19 nt, Artificial Sequence
  Description of Artificial Sequence: Synthetic oligonucleotide
  Sense strand starting at position 2882 of SEQ ID NO: 916336
gggauacuuucuuuccaug

SEQ ID NO: 1148683 - RNA, 19 nt, Artificial Sequence
  Description of Artificial Sequence: Synthetic oligonucleotide
  Antisense strand to SEQ ID NO: 1148682
cauggaaagaaaguauccc

SEQ ID NO: 1148684 - RNA, 19 nt, Artificial Sequence
  Description of Artificial Sequence: Synthetic oligonucleotide
  Sense strand starting at position 2932 of SEQ ID NO: 916336
cucgucaaucagggcaaua

SEQ ID NO: 1148685 - RNA, 19 nt, Artificial Sequence
  Description of Artificial Sequence: Synthetic oligonucleotide
  Antisense strand to SEQ ID NO: 1148684
uauugcccugauugacgag

SEQ ID NO: 1148686 - RNA, 19 nt, Artificial Sequence
  Description of Artificial Sequence: Synthetic oligonucleotide
  Sense strand starting at position 2934 of SEQ ID NO: 916336
cgucaaucagggcaauauu

SEQ ID NO: 1148687 - RNA, 19 nt, Artificial Sequence
  Description of Artificial Sequence: Synthetic oligonucleotide
  Antisense strand to SEQ ID NO: 1148686
aauauugcccugauugacg

SEQ ID NO: 1148688 - RNA, 19 nt, Artificial Sequence
  Description of Artificial Sequence: Synthetic oligonucleotide
  Sense strand starting at position 2944 of SEQ ID NO: 916336
ggcaauauuuaugaaauca

SEQ ID NO: 1148689 - RNA, 19 nt, Artificial Sequence
  Description of Artificial Sequence: Synthetic oligonucleotide
  Antisense strand to SEQ ID NO: 1148688
ugauuucauaaauauugcc

SEQ ID NO: 1148690 - RNA, 19 nt, Artificial Sequence
  Description of Artificial Sequence: Synthetic oligonucleotide
  Sense strand starting at position 3046 of SEQ ID NO: 916336
gauucuaccuuaucuggga

SEQ ID NO: 1148691 - RNA, 19 nt, Artificial Sequence
  Description of Artificial Sequence: Synthetic oligonucleotide
  Antisense strand to SEQ ID NO: 1148690
ucccagauaagguagaauc

SEQ ID NO: 1148692 - RNA, 19 nt, Artificial Sequence
  Description of Artificial Sequence: Synthetic oligonucleotide
  Sense strand starting at position 3444 of SEQ ID NO: 916336
gcuaccacucaaggagaau

SEQ ID NO: 1148693 - RNA, 19 nt, Artificial Sequence
  Description of Artificial Sequence: Synthetic oligonucleotide
  Antisense strand to SEQ ID NO: 1148692
auucuccuugagugguagc

SEQ ID NO: 1148694 - RNA, 19 nt, Artificial Sequence
  Description of Artificial Sequence: Synthetic oligonucleotide
  Sense strand starting at position 3765 of SEQ ID NO: 916336
uugagagucuugcucugga

SEQ ID NO: 1148695 - RNA, 19 nt, Artificial Sequence
  Description of Artificial Sequence: Synthetic oligonucleotide
  Antisense strand to SEQ ID NO: 1148694
uccagagcaagacucucaa

SEQ ID NO: 1148696 - RNA, 19 nt, Artificial Sequence
  Description of Artificial Sequence: Synthetic oligonucleotide
  Sense strand starting at position 3903 of SEQ ID NO: 916336
cuuucuaugucuguacaua

SEQ ID NO: 1148697 - RNA, 19 nt, Artificial Sequence
  Description of Artificial Sequence: Synthetic oligonucleotide
  Antisense strand to SEQ ID NO: 1148696
uauguacagacauagaaag

SEQ ID NO: 1148698 - RNA, 19 nt, Artificial Sequence
  Description of Artificial Sequence: Synthetic oligonucleotide
  Sense strand starting at position 3904 of SEQ ID NO: 916336
uuucuaugucuguacauag

SEQ ID NO: 1148699 - RNA, 19 nt, Artificial Sequence
  Description of Artificial Sequence: Synthetic oligonucleotide
  Antisense strand to SEQ ID NO: 1148698
cuauguacagacauagaaa

SEQ ID NO: 1148700 - RNA, 19 nt, Artificial Sequence
  Description of Artificial Sequence: Synthetic oligonucleotide
  Sense strand starting at position 29 of SEQ ID NO: 916337
gguuaaaugccagacaacu

SEQ ID NO: 1148701 - RNA, 19 nt, Artificial Sequence
  Description of Artificial Sequence: Synthetic oligonucleotide
  Antisense strand to SEQ ID NO: 1148700
aguugucuggcauuuaacc

SEQ ID NO: 1148702 - RNA, 19 nt, Artificial Sequence
  Description of Artificial Sequence: Synthetic oligonucleotide
  Sense strand starting at position 104 of SEQ ID NO: 916337
cuccauuagggcugugaua

SEQ ID NO: 1148703 - RNA, 19 nt, Artificial Sequence
  Description of Artificial Sequence: Synthetic oligonucleotide
  Antisense strand to SEQ ID NO: 1148702
uaucacagcccuaauggag

SEQ ID NO: 1148704 - RNA, 19 nt, Artificial Sequence
  Description of Artificial Sequence: Synthetic oligonucleotide
  Sense strand starting at position 106 of SEQ ID NO: 916337
ccauuagggcugugauaag

SEQ ID NO: 1148705 - RNA, 19 nt, Artificial Sequence
  Description of Artificial Sequence: Synthetic oligonucleotide
  Antisense strand to SEQ ID NO: 1148704
cuuaucacagcccuaaugg

SEQ ID NO: 1148706 - RNA, 19 nt, Artificial Sequence
  Description of Artificial Sequence: Synthetic oligonucleotide
  Sense strand starting at position 331 of SEQ ID NO: 916337
ccaguuguauuagcuagau

SEQ ID NO: 1148707 - RNA, 19 nt, Artificial Sequence
  Description of Artificial Sequence: Synthetic oligonucleotide
  Antisense strand to SEQ ID NO: 1148706
aucuagcuaauacaacugg

SEQ ID NO: 1148708 - RNA, 19 nt, Artificial Sequence
  Description of Artificial Sequence: Synthetic oligonucleotide
  Sense strand starting at position 335 of SEQ ID NO: 916337
uuguauuagcuagauuaac

SEQ ID NO: 1148709 - RNA, 19 nt, Artificial Sequence
  Description of Artificial Sequence: Synthetic oligonucleotide
  Antisense strand to SEQ ID NO: 1148708
guuaaucuagcuaauacaa

SEQ ID NO: 1148710 - RNA, 19 nt, Artificial Sequence
  Description of Artificial Sequence: Synthetic oligonucleotide
  Sense strand starting at position 390 of SEQ ID NO: 916337
ucaguuaacugucucaugu

SEQ ID NO: 1148711 - RNA, 19 nt, Artificial Sequence
  Description of Artificial Sequence: Synthetic oligonucleotide
  Antisense strand to SEQ ID NO: 1148710
acaugagacaguuaacuga

SEQ ID NO: 1148712 - RNA, 19 nt, Artificial Sequence
  Description of Artificial Sequence: Synthetic oligonucleotide
  Sense strand starting at position 416 of SEQ ID NO: 916337
caggucgcuucugacagaa

SEQ ID NO: 1148713 - RNA, 19 nt, Artificial Sequence
  Description of Artificial Sequence: Synthetic oligonucleotide
  Antisense strand to SEQ ID NO: 1148712
uucugucagaagcgaccug

SEQ ID NO: 1148714 - RNA, 19 nt, Artificial Sequence
  Description of Artificial Sequence: Synthetic oligonucleotide
  Sense strand starting at position 418 of SEQ ID NO: 916337
ggucgcuucugacagaauu

SEQ ID NO: 1148715 - RNA, 19 nt, Artificial Sequence
  Description of Artificial Sequence: Synthetic oligonucleotide
  Antisense strand to SEQ ID NO: 1148714
aauucugucagaagcgacc

SEQ ID NO: 1148716 - RNA, 19 nt, Artificial Sequence
  Description of Artificial Sequence: Synthetic oligonucleotide
  Sense strand starting at position 491 of SEQ ID NO: 916337
ccagcucagagauguagaa

SEQ ID NO: 1148717 - RNA, 19 nt, Artificial Sequence
  Description of Artificial Sequence: Synthetic oligonucleotide
  Antisense strand to SEQ ID NO: 1148716
uucuacaucucugagcugg

SEQ ID NO: 1148718 - RNA, 19 nt, Artificial Sequence
  Description of Artificial Sequence: Synthetic oligonucleotide
  Sense strand starting at position 541 of SEQ ID NO: 916337
ccaggaaucuggcaucuau

SEQ ID NO: 1148719 - RNA, 19 nt, Artificial Sequence
  Description of Artificial Sequence: Synthetic oligonucleotide
  Antisense strand to SEQ ID NO: 1148718
auagaugccagauuccugg

SEQ ID NO: 1148720 - RNA, 19 nt, Artificial Sequence
  Description of Artificial Sequence: Synthetic oligonucleotide
  Sense strand starting at position 719 of SEQ ID NO: 916337
gcuuaucacugugcugagu

SEQ ID NO: 1148721 - RNA, 19 nt, Artificial Sequence
  Description of Artificial Sequence: Synthetic oligonucleotide
  Antisense strand to SEQ ID NO: 1148720
acucagcacagugauaagc

SEQ ID NO: 1148722 - RNA, 19 nt, Artificial Sequence
  Description of Artificial Sequence: Synthetic oligonucleotide
  Sense strand starting at position 727 of SEQ ID NO: 916337
cugugcugaguugggaaua

SEQ ID NO: 1148723 - RNA, 19 nt, Artificial Sequence
  Description of Artificial Sequence: Synthetic oligonucleotide
  Antisense strand to SEQ ID NO: 1148722
uauucccaacucagcacag

SEQ ID NO: 1148724 - RNA, 19 nt, Artificial Sequence
  Description of Artificial Sequence: Synthetic oligonucleotide
  Sense strand starting at position 746 of SEQ ID NO: 916337
aggauccuccuuugagauu

SEQ ID NO: 1148725 - RNA, 19 nt, Artificial Sequence
  Description of Artificial Sequence: Synthetic oligonucleotide
  Antisense strand to SEQ ID NO: 1148724
aaucucaaaggaggauccu

SEQ ID NO: 1148726 - RNA, 19 nt, Artificial Sequence
  Description of Artificial Sequence: Synthetic oligonucleotide
  Sense strand starting at position 747 of SEQ ID NO: 916337
ggauccuccuuugagauuu

SEQ ID NO: 1148727 - RNA, 19 nt, Artificial Sequence
  Description of Artificial Sequence: Synthetic oligonucleotide
  Antisense strand to SEQ ID NO: 1148726
aaaucucaaaggaggaucc

SEQ ID NO: 1148728 - RNA, 19 nt, Artificial Sequence
  Description of Artificial Sequence: Synthetic oligonucleotide
  Sense strand starting at position 840 of SEQ ID NO: 916337
cccagaagucccggucuca

SEQ ID NO: 1148729 - RNA, 19 nt, Artificial Sequence
  Description of Artificial Sequence: Synthetic oligonucleotide
  Antisense strand to SEQ ID NO: 1148728
ugagaccgggacuucuggg

SEQ ID NO: 1148730 - RNA, 19 nt, Artificial Sequence
  Description of Artificial Sequence: Synthetic oligonucleotide
  Sense strand starting at position 1215 of SEQ ID NO: 916337
gucuuugacuuuccuccua

SEQ ID NO: 1148731 - RNA, 19 nt, Artificial Sequence
  Description of Artificial Sequence: Synthetic oligonucleotide
  Antisense strand to SEQ ID NO: 1148730
uaggaggaaagucaaagac

SEQ ID NO: 1148732 - RNA, 19 nt, Artificial Sequence
  Description of Artificial Sequence: Synthetic oligonucleotide
  Sense strand starting at position 1717 of SEQ ID NO: 916337
gucuguucccggccgguaa

SEQ ID NO: 1148733 - RNA, 19 nt, Artificial Sequence
  Description of Artificial Sequence: Synthetic oligonucleotide
  Antisense strand to SEQ ID NO: 1148732
uuaccggccgggaacagac

SEQ ID NO: 1148734 - RNA, 19 nt, Artificial Sequence
  Description of Artificial Sequence: Synthetic oligonucleotide
  Sense strand starting at position 2013 of SEQ ID NO: 916337
ggaggaguuugccaaacuc

SEQ ID NO: 1148735 - RNA, 19 nt, Artificial Sequence
  Description of Artificial Sequence: Synthetic oligonucleotide
  Antisense strand to SEQ ID NO: 1148734
gaguuuggcaaacuccucc

SEQ ID NO: 1148736 - RNA, 19 nt, Artificial Sequence
  Description of Artificial Sequence: Synthetic oligonucleotide
  Sense strand starting at position 2182 of SEQ ID NO: 916337
gguugucuggacuggguua

SEQ ID NO: 1148737 - RNA, 19 nt, Artificial Sequence
  Description of Artificial Sequence: Synthetic oligonucleotide
  Antisense strand to SEQ ID NO: 1148736
uaacccaguccagacaacc

SEQ ID NO: 1148738 - RNA, 19 nt, Artificial Sequence
  Description of Artificial Sequence: Synthetic oligonucleotide
  Sense strand starting at position 2311 of SEQ ID NO: 916337
cggagaauuuccuaaugag

SEQ ID NO: 1148739 - RNA, 19 nt, Artificial Sequence
  Description of Artificial Sequence: Synthetic oligonucleotide
  Antisense strand to SEQ ID NO: 1148738
cucauuaggaaauucuccg

SEQ ID NO: 1148740 - RNA, 19 nt, Artificial Sequence
  Description of Artificial Sequence: Synthetic oligonucleotide
  Sense strand starting at position 2353 of SEQ ID NO: 916337
ggaggaagccuguauaugu

SEQ ID NO: 1148741 - RNA, 19 nt, Artificial Sequence
  Description of Artificial Sequence: Synthetic oligonucleotide
  Antisense strand to SEQ ID NO: 1148740
acauauacaggcuuccucc

SEQ ID NO: 1148742 - RNA, 19 nt, Artificial Sequence
  Description of Artificial Sequence: Synthetic oligonucleotide
  Sense strand starting at position 2378 of SEQ ID NO: 916337
ggucucccucagugcuuua

SEQ ID NO: 1148743 - RNA, 19 nt, Artificial Sequence
  Description of Artificial Sequence: Synthetic oligonucleotide
  Antisense strand to SEQ ID NO: 1148742
uaaagcacugagggagacc

SEQ ID NO: 1148744 - RNA, 19 nt, Artificial Sequence
  Description of Artificial Sequence: Synthetic oligonucleotide
  Sense strand starting at position 2389 of SEQ ID NO: 916337
gugcuuuagggaggagacu

SEQ ID NO: 1148745 - RNA, 19 nt, Artificial Sequence
  Description of Artificial Sequence: Synthetic oligonucleotide
  Antisense strand to SEQ ID NO: 1148744
agucuccucccuaaagcac

SEQ ID NO: 1148746 - RNA, 19 nt, Artificial Sequence
  Description of Artificial Sequence: Synthetic oligonucleotide
  Sense strand starting at position 2718 of SEQ ID NO: 916337
ggaucugacaguugaccaa

SEQ ID NO: 1148747 - RNA, 19 nt, Artificial Sequence
  Description of Artificial Sequence: Synthetic oligonucleotide
  Antisense strand to SEQ ID NO: 1148746
uuggucaacugucagaucc

SEQ ID NO: 1148748 - RNA, 19 nt, Artificial Sequence
  Description of Artificial Sequence: Synthetic oligonucleotide
  Sense strand starting at position 2758 of SEQ ID NO: 916337
cucaguaccugcuugauua

SEQ ID NO: 1148749 - RNA, 19 nt, Artificial Sequence
  Description of Artificial Sequence: Synthetic oligonucleotide
  Antisense strand to SEQ ID NO: 1148748
uaaucaagcagguacugag

SEQ ID NO: 1148750 - RNA, 19 nt, Artificial Sequence
  Description of Artificial Sequence: Synthetic oligonucleotide
  Sense strand starting at position 2759 of SEQ ID NO: 916337
ucaguaccugcuugauuaa

SEQ ID NO: 1148751 - RNA, 19 nt, Artificial Sequence
  Description of Artificial Sequence: Synthetic oligonucleotide
  Antisense strand to SEQ ID NO: 1148750
uuaaucaagcagguacuga

SEQ ID NO: 1148752 - RNA, 19 nt, Artificial Sequence
  Description of Artificial Sequence: Synthetic oligonucleotide
  Sense strand starting at position 2762 of SEQ ID NO: 916337
guaccugcuugauuaaacu

SEQ ID NO: 1148753 - RNA, 19 nt, Artificial Sequence
  Description of Artificial Sequence: Synthetic oligonucleotide
  Antisense strand to SEQ ID NO: 1148752
aguuuaaucaagcagguac

SEQ ID NO: 1148754 - RNA, 19 nt, Artificial Sequence
  Description of Artificial Sequence: Synthetic oligonucleotide
  Sense strand starting at position 2827 of SEQ ID NO: 916337
gguggaaagucuugcaaag

SEQ ID NO: 1148755 - RNA, 19 nt, Artificial Sequence
  Description of Artificial Sequence: Synthetic oligonucleotide
  Antisense strand to SEQ ID NO: 1148754
cuuugcaagacuuuccacc

SEQ ID NO: 1148756 - RNA, 19 nt, Artificial Sequence
  Description of Artificial Sequence: Synthetic oligonucleotide
  Sense strand starting at position 2860 of SEQ ID NO: 916337
gcuccuaauggcuguaaac

SEQ ID NO: 1148757 - RNA, 19 nt, Artificial Sequence
  Description of Artificial Sequence: Synthetic oligonucleotide
  Antisense strand to SEQ ID NO: 1148756
guuuacagccauuaggagc

SEQ ID NO: 1148758 - RNA, 19 nt, Artificial Sequence
  Description of Artificial Sequence: Synthetic oligonucleotide
  Sense strand starting at position 3325 of SEQ ID NO: 916337
agcucaggcucugugugau

SEQ ID NO: 1148759 - RNA, 19 nt, Artificial Sequence
  Description of Artificial Sequence: Synthetic oligonucleotide
  Antisense strand to SEQ ID NO: 1148758
aucacacagagccugagcu

SEQ ID NO: 1148760 - RNA, 19 nt, Artificial Sequence
  Description of Artificial Sequence: Synthetic oligonucleotide
  Sense strand starting at position 3355 of SEQ ID NO: 916337
ucaggauucuagccuuuau

SEQ ID NO: 1148761 - RNA, 19 nt, Artificial Sequence
  Description of Artificial Sequence: Synthetic oligonucleotide
  Antisense strand to SEQ ID NO: 1148760
auaaaggcuagaauccuga

SEQ ID NO: 1148762 - RNA, 19 nt, Artificial Sequence
  Description of Artificial Sequence: Synthetic oligonucleotide
  Sense strand starting at position 3408 of SEQ ID NO: 916337
gucucuuuccuccaggacu

SEQ ID NO: 1148763 - RNA, 19 nt, Artificial Sequence
  Description of Artificial Sequence: Synthetic oligonucleotide
  Antisense strand to SEQ ID NO: 1148762
aguccuggaggaaagagac

SEQ ID NO: 1148764 - RNA, 19 nt, Artificial Sequence
  Description of Artificial Sequence: Synthetic oligonucleotide
  Sense strand starting at position 3450 of SEQ ID NO: 916337
ugucaauaauauccuguca

SEQ ID NO: 1148765 - RNA, 19 nt, Artificial Sequence
  Description of Artificial Sequence: Synthetic oligonucleotide
  Antisense strand to SEQ ID NO: 1148764
ugacaggauauuauugaca

SEQ ID NO: 1148766 - RNA, 19 nt, Artificial Sequence
  Description of Artificial Sequence: Synthetic oligonucleotide
  Sense strand starting at position 3511 of SEQ ID NO: 916337
cugaaaggcucagaauaag

SEQ ID NO: 1148767 - RNA, 19 nt, Artificial Sequence
  Description of Artificial Sequence: Synthetic oligonucleotide
  Antisense strand to SEQ ID NO: 1148766
cuuauucugagccuuucag

SEQ ID NO: 1148768 - RNA, 19 nt, Artificial Sequence
  Description of Artificial Sequence: Synthetic oligonucleotide
  Sense strand starting at position 3523 of SEQ ID NO: 916337
gaauaagagugcccagagu

SEQ ID NO: 1148769 - RNA, 19 nt, Artificial Sequence
  Description of Artificial Sequence: Synthetic oligonucleotide
  Antisense strand to SEQ ID NO: 1148768
acucugggcacucuuauuc

SEQ ID NO: 1148770 - RNA, 19 nt, Artificial Sequence
  Description of Artificial Sequence: Synthetic oligonucleotide
  Sense strand starting at position 3724 of SEQ ID NO: 916337
acccuuucuuaggugagga

SEQ ID NO: 1148771 - RNA, 19 nt, Artificial Sequence
  Description of Artificial Sequence: Synthetic oligonucleotide
  Antisense strand to SEQ ID NO: 1148770
uccucaccuaagaaagggu

SEQ ID NO: 1148772 - RNA, 19 nt, Artificial Sequence
  Description of Artificial Sequence: Synthetic oligonucleotide
  Sense strand starting at position 3725 of SEQ ID NO: 916337
cccuuucuuaggugaggaa

SEQ ID NO: 1148773 - RNA, 19 nt, Artificial Sequence
  Description of Artificial Sequence: Synthetic oligonucleotide
  Antisense strand to SEQ ID NO: 1148772
uuccucaccuaagaaaggg

SEQ ID NO: 1148774 - RNA, 19 nt, Artificial Sequence
  Description of Artificial Sequence: Synthetic oligonucleotide
  Sense strand starting at position 3748 of SEQ ID NO: 916337
gggaaucucugggucagga

SEQ ID NO: 1148775 - RNA, 19 nt, Artificial Sequence
  Description of Artificial Sequence: Synthetic oligonucleotide
  Antisense strand to SEQ ID NO: 1148774
uccugacccagagauuccc

SEQ ID NO: 1148776 - RNA, 19 nt, Artificial Sequence
  Description of Artificial Sequence: Synthetic oligonucleotide
  Sense strand starting at position 3800 of SEQ ID NO: 916337
uuaggugagagcuacucaa

SEQ ID NO: 1148777 - RNA, 19 nt, Artificial Sequence
  Description of Artificial Sequence: Synthetic oligonucleotide
  Antisense strand to SEQ ID NO: 1148776
uugaguagcucucaccuaa

SEQ ID NO: 1148778 - RNA, 19 nt, Artificial Sequence
  Description of Artificial Sequence: Synthetic oligonucleotide
  Sense strand starting at position 3804 of SEQ ID NO: 916337
gugagagcuacucaagcca

SEQ ID NO: 1148779 - RNA, 19 nt, Artificial Sequence
  Description of Artificial Sequence: Synthetic oligonucleotide
  Antisense strand to SEQ ID NO: 1148778
uggcuugaguagcucucac

SEQ ID NO: 1148780 - RNA, 19 nt, Artificial Sequence
  Description of Artificial Sequence: Synthetic oligonucleotide
  Sense strand starting at position 281 of SEQ ID NO: 916338
guccucgaacucugacaga

SEQ ID NO: 1148781 - RNA, 19 nt, Artificial Sequence
  Description of Artificial Sequence: Synthetic oligonucleotide
  Antisense strand to SEQ ID NO: 1148780
ucugucagaguucgaggac

SEQ ID NO: 1148782 - RNA, 19 nt, Artificial Sequence
  Description of Artificial Sequence: Synthetic oligonucleotide
  Sense strand starting at position 426 of SEQ ID NO: 916338
accagaugauagggauaau

SEQ ID NO: 1148783 - RNA, 19 nt, Artificial Sequence
  Description of Artificial Sequence: Synthetic oligonucleotide
  Antisense strand to SEQ ID NO: 1148782
auuaucccuaucaucuggu

SEQ ID NO: 1148784 - RNA, 19 nt, Artificial Sequence
  Description of Artificial Sequence: Synthetic oligonucleotide
  Sense strand starting at position 575 of SEQ ID NO: 916338
aguaauggauacuuaaugu

SEQ ID NO: 1148785 - RNA, 19 nt, Artificial Sequence
  Description of Artificial Sequence: Synthetic oligonucleotide
  Antisense strand to SEQ ID NO: 1148784
acauuaaguauccauuacu

SEQ ID NO: 1148786 - RNA, 19 nt, Artificial Sequence
  Description of Artificial Sequence: Synthetic oligonucleotide
  Sense strand starting at position 581 of SEQ ID NO: 916338
ggauacuuaauguggcuua

SEQ ID NO: 1148787 - RNA, 19 nt, Artificial Sequence
  Description of Artificial Sequence: Synthetic oligonucleotide
  Antisense strand to SEQ ID NO: 1148786
uaagccacauuaaguaucc

SEQ ID NO: 1148788 - RNA, 19 nt, Artificial Sequence
  Description of Artificial Sequence: Synthetic oligonucleotide
  Sense strand starting at position 594 of SEQ ID NO: 916338
ggcuuaggcacugguugaa

SEQ ID NO: 1148789 - RNA, 19 nt, Artificial Sequence
  Description of Artificial Sequence: Synthetic oligonucleotide
  Antisense strand to SEQ ID NO: 1148788
uucaaccagugccuaagcc

SEQ ID NO: 1148790 - RNA, 19 nt, Artificial Sequence
  Description of Artificial Sequence: Synthetic oligonucleotide
  Sense strand starting at position 600 of SEQ ID NO: 916338
ggcacugguugaagagaga

SEQ ID NO: 1148791 - RNA, 19 nt, Artificial Sequence
  Description of Artificial Sequence: Synthetic oligonucleotide
  Antisense strand to SEQ ID NO: 1148790
ucucucuucaaccagugcc

SEQ ID NO: 1148792 - RNA, 19 nt, Artificial Sequence
  Description of Artificial Sequence: Synthetic oligonucleotide
  Sense strand starting at position 833 of SEQ ID NO: 916338
auuccuggaguuggaaauu

SEQ ID NO: 1148793 - RNA, 19 nt, Artificial Sequence
  Description of Artificial Sequence: Synthetic oligonucleotide
  Antisense strand to SEQ ID NO: 1148792
aauuuccaacuccaggaau

SEQ ID NO: 1148794 - RNA, 19 nt, Artificial Sequence
  Description of Artificial Sequence: Synthetic oligonucleotide
  Sense strand starting at position 843 of SEQ ID NO: 916338
uuggaaauuugcuaaggag

SEQ ID NO: 1148795 - RNA, 19 nt, Artificial Sequence
  Description of Artificial Sequence: Synthetic oligonucleotide
  Antisense strand to SEQ ID NO: 1148794
cuccuuagcaaauuuccaa

SEQ ID NO: 1148796 - RNA, 19 nt, Artificial Sequence
  Description of Artificial Sequence: Synthetic oligonucleotide
  Sense strand starting at position 1024 of SEQ ID NO: 916338
caaucuucccguggucuua

SEQ ID NO: 1148797 - RNA, 19 nt, Artificial Sequence
  Description of Artificial Sequence: Synthetic oligonucleotide
  Antisense strand to SEQ ID NO: 1148796
uaagaccacgggaagauug

SEQ ID NO: 1148798 - RNA, 19 nt, Artificial Sequence
  Description of Artificial Sequence: Synthetic oligonucleotide
  Sense strand starting at position 1034 of SEQ ID NO: 916338
guggucuuaagccacagaa

SEQ ID NO: 1148799 - RNA, 19 nt, Artificial Sequence
  Description of Artificial Sequence: Synthetic oligonucleotide
  Antisense strand to SEQ ID NO: 1148798
uucuguggcuuaagaccac

SEQ ID NO: 1148800 - RNA, 19 nt, Artificial Sequence
  Description of Artificial Sequence: Synthetic oligonucleotide
  Sense strand starting at position 1036 of SEQ ID NO: 916338
ggucuuaagccacagaagu

SEQ ID NO: 1148801 - RNA, 19 nt, Artificial Sequence
  Description of Artificial Sequence: Synthetic oligonucleotide
  Antisense strand to SEQ ID NO: 1148800
acuucuguggcuuaagacc

SEQ ID NO: 1148802 - RNA, 19 nt, Artificial Sequence
  Description of Artificial Sequence: Synthetic oligonucleotide
  Sense strand starting at position 1109 of SEQ ID NO: 916338
augcucuagcaggaaguua

SEQ ID NO: 1148803 - RNA, 19 nt, Artificial Sequence
  Description of Artificial Sequence: Synthetic oligonucleotide
  Antisense strand to SEQ ID NO: 1148802
uaacuuccugcuagagcau

SEQ ID NO: 1148804 - RNA, 19 nt, Artificial Sequence
  Description of Artificial Sequence: Synthetic oligonucleotide
  Sense strand starting at position 1120 of SEQ ID NO: 916338
ggaaguuauuucuggaguc

SEQ ID NO: 1148805 - RNA, 19 nt, Artificial Sequence
  Description of Artificial Sequence: Synthetic oligonucleotide
  Antisense strand to SEQ ID NO: 1148804
gacuccagaaauaacuucc

SEQ ID NO: 1148806 - RNA, 19 nt, Artificial Sequence
  Description of Artificial Sequence: Synthetic oligonucleotide
  Sense strand starting at position 1121 of SEQ ID NO: 916338
gaaguuauuucuggagucu

SEQ ID NO: 1148807 - RNA, 19 nt, Artificial Sequence
  Description of Artificial Sequence: Synthetic oligonucleotide
  Antisense strand to SEQ ID NO: 1148806
agacuccagaaauaacuuc

SEQ ID NO: 1148808 - RNA, 19 nt, Artificial Sequence
  Description of Artificial Sequence: Synthetic oligonucleotide
  Sense strand starting at position 1194 of SEQ ID NO: 916338
cucccauucuaagcagaga

SEQ ID NO: 1148809 - RNA, 19 nt, Artificial Sequence
  Description of Artificial Sequence: Synthetic oligonucleotide
  Antisense strand to SEQ ID NO: 1148808
ucucugcuuagaaugggag

SEQ ID NO: 1148810 - RNA, 19 nt, Artificial Sequence
  Description of Artificial Sequence: Synthetic oligonucleotide
  Sense strand starting at position 1319 of SEQ ID NO: 916338
ggagaugguucgcugccaa

SEQ ID NO: 1148811 - RNA, 19 nt, Artificial Sequence
  Description of Artificial Sequence: Synthetic oligonucleotide
  Antisense strand to SEQ ID NO: 1148810
uuggcagcgaaccaucucc

SEQ ID NO: 1148812 - RNA, 19 nt, Artificial Sequence
  Description of Artificial Sequence: Synthetic oligonucleotide
  Sense strand starting at position 1663 of SEQ ID NO: 916338
ccaucacguccagauugaa

SEQ ID NO: 1148813 - RNA, 19 nt, Artificial Sequence
  Description of Artificial Sequence: Synthetic oligonucleotide
  Antisense strand to SEQ ID NO: 1148812
uucaaucuggacgugaugg

SEQ ID NO: 1148814 - RNA, 19 nt, Artificial Sequence
  Description of Artificial Sequence: Synthetic oligonucleotide
  Sense strand starting at position 1793 of SEQ ID NO: 916338
gcgcgagcucccagcgaau

SEQ ID NO: 1148815 - RNA, 19 nt, Artificial Sequence
  Description of Artificial Sequence: Synthetic oligonucleotide
  Antisense strand to SEQ ID NO: 1148814
auucgcugggagcucgcgc

SEQ ID NO: 1148816 - RNA, 19 nt, Artificial Sequence
  Description of Artificial Sequence: Synthetic oligonucleotide
  Sense strand starting at position 1804 of SEQ ID NO: 916338
cagcgaaugcaagggaaau

SEQ ID NO: 1148817 - RNA, 19 nt, Artificial Sequence
  Description of Artificial Sequence: Synthetic oligonucleotide
  Antisense strand to SEQ ID NO: 1148816
auuucccuugcauucgcug

SEQ ID NO: 1148818 - RNA, 19 nt, Artificial Sequence
  Description of Artificial Sequence: Synthetic oligonucleotide
  Sense strand starting at position 1855 of SEQ ID NO: 916338
cgcgucucuggucuccaaa

SEQ ID NO: 1148819 - RNA, 19 nt, Artificial Sequence
  Description of Artificial Sequence: Synthetic oligonucleotide
  Antisense strand to SEQ ID NO: 1148818
uuuggagaccagagacgcg

SEQ ID NO: 1148820 - RNA, 19 nt, Artificial Sequence
  Description of Artificial Sequence: Synthetic oligonucleotide
  Sense strand starting at position 1857 of SEQ ID NO: 916338
cgucucuggucuccaaagu

SEQ ID NO: 1148821 - RNA, 19 nt, Artificial Sequence
  Description of Artificial Sequence: Synthetic oligonucleotide
  Antisense strand to SEQ ID NO: 1148820
acuuuggagaccagagacg

SEQ ID NO: 1148822 - RNA, 19 nt, Artificial Sequence
  Description of Artificial Sequence: Synthetic oligonucleotide
  Sense strand starting at position 2557 of SEQ ID NO: 916338
uagccacaucgucaggauu

SEQ ID NO: 1148823 - RNA, 19 nt, Artificial Sequence
  Description of Artificial Sequence: Synthetic oligonucleotide
  Antisense strand to SEQ ID NO: 1148822
aauccugacgauguggcua

SEQ ID NO: 1148824 - RNA, 19 nt, Artificial Sequence
  Description of Artificial Sequence: Synthetic oligonucleotide
  Sense strand starting at position 2608 of SEQ ID NO: 916338
gagagaaacucgggagaua

SEQ ID NO: 1148825 - RNA, 19 nt, Artificial Sequence
  Description of Artificial Sequence: Synthetic oligonucleotide
  Antisense strand to SEQ ID NO: 1148824
uaucucccgaguuucucuc

SEQ ID NO: 1148826 - RNA, 19 nt, Artificial Sequence
  Description of Artificial Sequence: Synthetic oligonucleotide
  Sense strand starting at position 2686 of SEQ ID NO: 916338
gagauuaauugacaaggga

SEQ ID NO: 1148827 - RNA, 19 nt, Artificial Sequence
  Description of Artificial Sequence: Synthetic oligonucleotide
  Antisense strand to SEQ ID NO: 1148826
ucccuugucaauuaaucuc

SEQ ID NO: 1148828 - RNA, 19 nt, Artificial Sequence
  Description of Artificial Sequence: Synthetic oligonucleotide
  Sense strand starting at position 3052 of SEQ ID NO: 916338
auuuauaacuccgauacag

SEQ ID NO: 1148829 - RNA, 19 nt, Artificial Sequence
  Description of Artificial Sequence: Synthetic oligonucleotide
  Antisense strand to SEQ ID NO: 1148828
cuguaucggaguuauaaau

SEQ ID NO: 1148830 - RNA, 19 nt, Artificial Sequence
  Description of Artificial Sequence: Synthetic oligonucleotide
  Sense strand starting at position 3166 of SEQ ID NO: 916338
uggucuugugaauauacau

SEQ ID NO: 1148831 - RNA, 19 nt, Artificial Sequence
  Description of Artificial Sequence: Synthetic oligonucleotide
  Antisense strand to SEQ ID NO: 1148830
auguauauucacaagacca

SEQ ID NO: 1148832 - RNA, 19 nt, Artificial Sequence
  Description of Artificial Sequence: Synthetic oligonucleotide
  Sense strand starting at position 3269 of SEQ ID NO: 916338
cuuggaaucuuucucagag

SEQ ID NO: 1148833 - RNA, 19 nt, Artificial Sequence
  Description of Artificial Sequence: Synthetic oligonucleotide
  Antisense strand to SEQ ID NO: 1148832
cucugagaaagauuccaag

SEQ ID NO: 1148834 - RNA, 19 nt, Artificial Sequence
  Description of Artificial Sequence: Synthetic oligonucleotide
  Sense strand starting at position 3270 of SEQ ID NO: 916338
uuggaaucuuucucagagu

SEQ ID NO: 1148835 - RNA, 19 nt, Artificial Sequence
  Description of Artificial Sequence: Synthetic oligonucleotide
  Antisense strand to SEQ ID NO: 1148834
acucugagaaagauuccaa

SEQ ID NO: 1148836 - RNA, 19 nt, Artificial Sequence
  Description of Artificial Sequence: Synthetic oligonucleotide
  Sense strand starting at position 3492 of SEQ ID NO: 916338
gacagucuuugccuuggau

SEQ ID NO: 1148837 - RNA, 19 nt, Artificial Sequence
  Description of Artificial Sequence: Synthetic oligonucleotide
  Antisense strand to SEQ ID NO: 1148836
auccaaggcaaagacuguc

SEQ ID NO: 1148838 - RNA, 19 nt, Artificial Sequence
  Description of Artificial Sequence: Synthetic oligonucleotide
  Sense strand starting at position 3494 of SEQ ID NO: 916338
cagucuuugccuuggauaa

SEQ ID NO: 1148839 - RNA, 19 nt, Artificial Sequence
  Description of Artificial Sequence: Synthetic oligonucleotide
  Antisense strand to SEQ ID NO: 1148838
uuauccaaggcaaagacug

SEQ ID NO: 1148840 - RNA, 19 nt, Artificial Sequence
  Description of Artificial Sequence: Synthetic oligonucleotide
  Sense strand starting at position 3495 of SEQ ID NO: 916338
agucuuugccuuggauaag

SEQ ID NO: 1148841 - RNA, 19 nt, Artificial Sequence
  Description of Artificial Sequence: Synthetic oligonucleotide
  Antisense strand to SEQ ID NO: 1148840
cuuauccaaggcaaagacu

SEQ ID NO: 1148842 - RNA, 19 nt, Artificial Sequence
  Description of Artificial Sequence: Synthetic oligonucleotide
  Sense strand starting at position 3498 of SEQ ID NO: 916338
cuuugccuuggauaaguua

SEQ ID NO: 1148843 - RNA, 19 nt, Artificial Sequence
  Description of Artificial Sequence: Synthetic oligonucleotide
  Antisense strand to SEQ ID NO: 1148842
uaacuuauccaaggcaaag

SEQ ID NO: 1148844 - RNA, 19 nt, Artificial Sequence
  Description of Artificial Sequence: Synthetic oligonucleotide
  Sense strand starting at position 3501 of SEQ ID NO: 916338
ugccuuggauaaguuaaca

SEQ ID NO: 1148845 - RNA, 19 nt, Artificial Sequence
  Description of Artificial Sequence: Synthetic oligonucleotide
  Antisense strand to SEQ ID NO: 1148844
uguuaacuuauccaaggca

SEQ ID NO: 1148846 - RNA, 19 nt, Artificial Sequence
  Description of Artificial Sequence: Synthetic oligonucleotide
  Sense strand starting at position 3506 of SEQ ID NO: 916338
uggauaaguuaacagacau

SEQ ID NO: 1148847 - RNA, 19 nt, Artificial Sequence
  Description of Artificial Sequence: Synthetic oligonucleotide
  Antisense strand to SEQ ID NO: 1148846
augucuguuaacuuaucca

SEQ ID NO: 1148848 - RNA, 19 nt, Artificial Sequence
  Description of Artificial Sequence: Synthetic oligonucleotide
  Sense strand starting at position 3599 of SEQ ID NO: 916338
cagguacuauaaggaaaua

SEQ ID NO: 1148849 - RNA, 19 nt, Artificial Sequence
  Description of Artificial Sequence: Synthetic oligonucleotide
  Antisense strand to SEQ ID NO: 1148848
uauuuccuuauaguaccug

SEQ ID NO: 1148850 - RNA, 19 nt, Artificial Sequence
  Description of Artificial Sequence: Synthetic oligonucleotide
  Sense strand starting at position 3611 of SEQ ID NO: 916338
ggaaauacauaugcuguca

SEQ ID NO: 1148851 - RNA, 19 nt, Artificial Sequence
  Description of Artificial Sequence: Synthetic oligonucleotide
  Antisense strand to SEQ ID NO: 1148850
ugacagcauauguauuucc

SEQ ID NO: 1148852 - RNA, 19 nt, Artificial Sequence
  Description of Artificial Sequence: Synthetic oligonucleotide
  Sense strand starting at position 3876 of SEQ ID NO: 916338
uucugugauccagggcuga

SEQ ID NO: 1148853 - RNA, 19 nt, Artificial Sequence
  Description of Artificial Sequence: Synthetic oligonucleotide
  Antisense strand to SEQ ID NO: 1148852
ucagcccuggaucacagaa

SEQ ID NO: 1148854 - RNA, 19 nt, Artificial Sequence
  Description of Artificial Sequence: Synthetic oligonucleotide
  Sense strand starting at position 3904 of SEQ ID NO: 916338
ccaagaaucugcuucugac

SEQ ID NO: 1148855 - RNA, 19 nt, Artificial Sequence
  Description of Artificial Sequence: Synthetic oligonucleotide
  Antisense strand to SEQ ID NO: 1148854
gucagaagcagauucuugg

SEQ ID NO: 1148856 - RNA, 19 nt, Artificial Sequence
  Description of Artificial Sequence: Synthetic oligonucleotide
  Sense strand starting at position 3932 of SEQ ID NO: 916338
ccaaauauuugagaaguca

SEQ ID NO: 1148857 - RNA, 19 nt, Artificial Sequence
  Description of Artificial Sequence: Synthetic oligonucleotide
  Antisense strand to SEQ ID NO: 1148856
ugacuucucaaauauuugg

SEQ ID NO: 1148858 - RNA, 19 nt, Artificial Sequence
  Description of Artificial Sequence: Synthetic oligonucleotide
  Sense strand starting at position 3965 of SEQ ID NO: 916338
gaggaaagaucaggaaaga

SEQ ID NO: 1148859 - RNA, 19 nt, Artificial Sequence
  Description of Artificial Sequence: Synthetic oligonucleotide
  Antisense strand to SEQ ID NO: 1148858
ucuuuccugaucuuuccuc

SEQ ID NO: 1148860 - RNA, 19 nt, Artificial Sequence
  Description of Artificial Sequence: Synthetic oligonucleotide
  Sense strand starting at position 96 of SEQ ID NO: 916339
cgguaagcucaauauuaaa

SEQ ID NO: 1148861 - RNA, 19 nt, Artificial Sequence
  Description of Artificial Sequence: Synthetic oligonucleotide
  Antisense strand to SEQ ID NO: 1148860
uuuaauauugagcuuaccg

SEQ ID NO: 1148862 - RNA, 19 nt, Artificial Sequence
  Description of Artificial Sequence: Synthetic oligonucleotide
  Sense strand starting at position 637 of SEQ ID NO: 916339
ugugguggugauuauccaa

SEQ ID NO: 1148863 - RNA, 19 nt, Artificial Sequence
  Description of Artificial Sequence: Synthetic oligonucleotide
  Antisense strand to SEQ ID NO: 1148862
uuggauaaucaccaccaca

SEQ ID NO: 1148864 - RNA, 19 nt, Artificial Sequence
  Description of Artificial Sequence: Synthetic oligonucleotide
  Sense strand starting at position 640 of SEQ ID NO: 916339
gguggugauuauccaaauc

SEQ ID NO: 1148865 - RNA, 19 nt, Artificial Sequence
  Description of Artificial Sequence: Synthetic oligonucleotide
  Antisense strand to SEQ ID NO: 1148864
gauuuggauaaucaccacc

SEQ ID NO: 1148866 - RNA, 19 nt, Artificial Sequence
  Description of Artificial Sequence: Synthetic oligonucleotide
  Sense strand starting at position 743 of SEQ ID NO: 916339
gccaguuaacaauacugua

SEQ ID NO: 1148867 - RNA, 19 nt, Artificial Sequence
  Description of Artificial Sequence: Synthetic oligonucleotide
  Antisense strand to SEQ ID NO: 1148866
uacaguauuguuaacuggc

SEQ ID NO: 1148868 - RNA, 19 nt, Artificial Sequence
  Description of Artificial Sequence: Synthetic oligonucleotide
  Sense strand starting at position 1269 of SEQ ID NO: 916339
ggaauagauuaauacacug

SEQ ID NO: 1148869 - RNA, 19 nt, Artificial Sequence
  Description of Artificial Sequence: Synthetic oligonucleotide
  Antisense strand to SEQ ID NO: 1148868
caguguauuaaucuauucc

SEQ ID NO: 1148870 - RNA, 19 nt, Artificial Sequence
  Description of Artificial Sequence: Synthetic oligonucleotide
  Sense strand starting at position 1342 of SEQ ID NO: 916339
aaagaaauguggcuaguau

SEQ ID NO: 1148871 - RNA, 19 nt, Artificial Sequence
  Description of Artificial Sequence: Synthetic oligonucleotide
  Antisense strand to SEQ ID NO: 1148870
auacuagccacauuucuuu

SEQ ID NO: 1148872 - RNA, 19 nt, Artificial Sequence
  Description of Artificial Sequence: Synthetic oligonucleotide
  Sense strand starting at position 1548 of SEQ ID NO: 916339
ccacuuugagaucaguauu

SEQ ID NO: 1148873 - RNA, 19 nt, Artificial Sequence
  Description of Artificial Sequence: Synthetic oligonucleotide
  Antisense strand to SEQ ID NO: 1148872
aauacugaucucaaagugg

SEQ ID NO: 1148874 - RNA, 19 nt, Artificial Sequence
  Description of Artificial Sequence: Synthetic oligonucleotide
  Sense strand starting at position 1599 of SEQ ID NO: 916339
uguugucucuagcuuacaa

SEQ ID NO: 1148875 - RNA, 19 nt, Artificial Sequence
  Description of Artificial Sequence: Synthetic oligonucleotide
  Antisense strand to SEQ ID NO: 1148874
uuguaagcuagagacaaca

SEQ ID NO: 1148876 - RNA, 19 nt, Artificial Sequence
  Description of Artificial Sequence: Synthetic oligonucleotide
  Sense strand starting at position 1788 of SEQ ID NO: 916339
ucugaauucugguuguagu

SEQ ID NO: 1148877 - RNA, 19 nt, Artificial Sequence
  Description of Artificial Sequence: Synthetic oligonucleotide
  Antisense strand to SEQ ID NO: 1148876
acuacaaccagaauucaga

SEQ ID NO: 1148878 - RNA, 19 nt, Artificial Sequence
  Description of Artificial Sequence: Synthetic oligonucleotide
  Sense strand starting at position 1789 of SEQ ID NO: 916339
cugaauucugguuguaguc

SEQ ID NO: 1148879 - RNA, 19 nt, Artificial Sequence
  Description of Artificial Sequence: Synthetic oligonucleotide
  Antisense strand to SEQ ID NO: 1148878
gacuacaaccagaauucag

SEQ ID NO: 1148880 - RNA, 19 nt, Artificial Sequence
  Description of Artificial Sequence: Synthetic oligonucleotide
  Sense strand starting at position 1802 of SEQ ID NO: 916339
guagucaaagcuugaacca

SEQ ID NO: 1148881 - RNA, 19 nt, Artificial Sequence
  Description of Artificial Sequence: Synthetic oligonucleotide
  Antisense strand to SEQ ID NO: 1148880
ugguucaagcuuugacuac

SEQ ID NO: 1148882 - RNA, 19 nt, Artificial Sequence
  Description of Artificial Sequence: Synthetic oligonucleotide
  Sense strand starting at position 1809 of SEQ ID NO: 916339
aagcuugaaccaugggagu

SEQ ID NO: 1148883 - RNA, 19 nt, Artificial Sequence
  Description of Artificial Sequence: Synthetic oligonucleotide
  Antisense strand to SEQ ID NO: 1148882
acucccaugguucaagcuu

SEQ ID NO: 1148884 - RNA, 19 nt, Artificial Sequence
  Description of Artificial Sequence: Synthetic oligonucleotide
  Sense strand starting at position 2008 of SEQ ID NO: 916339
ggccaacauuuggaacuua

SEQ ID NO: 1148885 - RNA, 19 nt, Artificial Sequence
  Description of Artificial Sequence: Synthetic oligonucleotide
  Antisense strand to SEQ ID NO: 1148884
uaaguuccaaauguuggcc

SEQ ID NO: 1148886 - RNA, 19 nt, Artificial Sequence
  Description of Artificial Sequence: Synthetic oligonucleotide
  Sense strand starting at position 2064 of SEQ ID NO: 916339
cagaucucccaguauguga

SEQ ID NO: 1148887 - RNA, 19 nt, Artificial Sequence
  Description of Artificial Sequence: Synthetic oligonucleotide
  Antisense strand to SEQ ID NO: 1148886
ucacauacugggagaucug

SEQ ID NO: 1148888 - RNA, 19 nt, Artificial Sequence
  Description of Artificial Sequence: Synthetic oligonucleotide
  Sense strand starting at position 2172 of SEQ ID NO: 916339
caguuuggagcuugcuaau

SEQ ID NO: 1148889 - RNA, 19 nt, Artificial Sequence
  Description of Artificial Sequence: Synthetic oligonucleotide
  Antisense strand to SEQ ID NO: 1148888
auuagcaagcuccaaacug

SEQ ID NO: 1148890 - RNA, 19 nt, Artificial Sequence
  Description of Artificial Sequence: Synthetic oligonucleotide
  Sense strand starting at position 2349 of SEQ ID NO: 916339
gauagauauguaugcgacu

SEQ ID NO: 1148891 - RNA, 19 nt, Artificial Sequence
  Description of Artificial Sequence: Synthetic oligonucleotide
  Antisense strand to SEQ ID NO: 1148890
agucgcauacauaucuauc

SEQ ID NO: 1148892 - RNA, 19 nt, Artificial Sequence
  Description of Artificial Sequence: Synthetic oligonucleotide
  Sense strand starting at position 2350 of SEQ ID NO: 916339
auagauauguaugcgacuu

SEQ ID NO: 1148893 - RNA, 19 nt, Artificial Sequence
  Description of Artificial Sequence: Synthetic oligonucleotide
  Antisense strand to SEQ ID NO: 1148892
aagucgcauacauaucuau

SEQ ID NO: 1148894 - RNA, 19 nt, Artificial Sequence
  Description of Artificial Sequence: Synthetic oligonucleotide
  Sense strand starting at position 2362 of SEQ ID NO: 916339
gcgacuuguguccaucucu

SEQ ID NO: 1148895 - RNA, 19 nt, Artificial Sequence
  Description of Artificial Sequence: Synthetic oligonucleotide
  Antisense strand to SEQ ID NO: 1148894
agagauggacacaagucgc

SEQ ID NO: 1148896 - RNA, 19 nt, Artificial Sequence
  Description of Artificial Sequence: Synthetic oligonucleotide
  Sense strand starting at position 2367 of SEQ ID NO: 916339
uuguguccaucucuaccaa

SEQ ID NO: 1148897 - RNA, 19 nt, Artificial Sequence
  Description of Artificial Sequence: Synthetic oligonucleotide
  Antisense strand to SEQ ID NO: 1148896
uugguagagauggacacaa

SEQ ID NO: 1148898 - RNA, 19 nt, Artificial Sequence
  Description of Artificial Sequence: Synthetic oligonucleotide
  Sense strand starting at position 2572 of SEQ ID NO: 916339
gaggcuaaugucugcagaa

SEQ ID NO: 1148899 - RNA, 19 nt, Artificial Sequence
  Description of Artificial Sequence: Synthetic oligonucleotide
  Antisense strand to SEQ ID NO: 1148898
uucugcagacauuagccuc

SEQ ID NO: 1148900 - RNA, 19 nt, Artificial Sequence
  Description of Artificial Sequence: Synthetic oligonucleotide
  Sense strand starting at position 2573 of SEQ ID NO: 916339
aggcuaaugucugcagaau

SEQ ID NO: 1148901 - RNA, 19 nt, Artificial Sequence
  Description of Artificial Sequence: Synthetic oligonucleotide
  Antisense strand to SEQ ID NO: 1148900
auucugcagacauuagccu

SEQ ID NO: 1148902 - RNA, 19 nt, Artificial Sequence
  Description of Artificial Sequence: Synthetic oligonucleotide
  Sense strand starting at position 2574 of SEQ ID NO: 916339
ggcuaaugucugcagaauc

SEQ ID NO: 1148903 - RNA, 19 nt, Artificial Sequence
  Description of Artificial Sequence: Synthetic oligonucleotide
  Antisense strand to SEQ ID NO: 1148902
gauucugcagacauuagcc

SEQ ID NO: 1148904 - RNA, 19 nt, Artificial Sequence
  Description of Artificial Sequence: Synthetic oligonucleotide
  Sense strand starting at position 2601 of SEQ ID NO: 916339
cucuacaccgauugugaaa

SEQ ID NO: 1148905 - RNA, 19 nt, Artificial Sequence
  Description of Artificial Sequence: Synthetic oligonucleotide
  Antisense strand to SEQ ID NO: 1148904
uuucacaaucgguguagag

SEQ ID NO: 1148906 - RNA, 19 nt, Artificial Sequence
  Description of Artificial Sequence: Synthetic oligonucleotide
  Sense strand starting at position 2667 of SEQ ID NO: 916339
cugacacucucccugaguu

SEQ ID NO: 1148907 - RNA, 19 nt, Artificial Sequence
  Description of Artificial Sequence: Synthetic oligonucleotide
  Antisense strand to SEQ ID NO: 1148906
aacucagggagagugucag

SEQ ID NO: 1148908 - RNA, 19 nt, Artificial Sequence
  Description of Artificial Sequence: Synthetic oligonucleotide
  Sense strand starting at position 2675 of SEQ ID NO: 916339
cucccugaguuggccuaau

SEQ ID NO: 1148909 - RNA, 19 nt, Artificial Sequence
  Description of Artificial Sequence: Synthetic oligonucleotide
  Antisense strand to SEQ ID NO: 1148908
auuaggccaacucagggag

SEQ ID NO: 1148910 - RNA, 19 nt, Artificial Sequence
  Description of Artificial Sequence: Synthetic oligonucleotide
  Sense strand starting at position 2966 of SEQ ID NO: 916339
agcccuucucuggagcaga

SEQ ID NO: 1148911 - RNA, 19 nt, Artificial Sequence
  Description of Artificial Sequence: Synthetic oligonucleotide
  Antisense strand to SEQ ID NO: 1148910
ucugcuccagagaagggcu

SEQ ID NO: 1148912 - RNA, 19 nt, Artificial Sequence
  Description of Artificial Sequence: Synthetic oligonucleotide
  Sense strand starting at position 3107 of SEQ ID NO: 916339
gggucucaacugugguuua

SEQ ID NO: 1148913 - RNA, 19 nt, Artificial Sequence
  Description of Artificial Sequence: Synthetic oligonucleotide
  Antisense strand to SEQ ID NO: 1148912
uaaaccacaguugagaccc

SEQ ID NO: 1148914 - RNA, 19 nt, Artificial Sequence
  Description of Artificial Sequence: Synthetic oligonucleotide
  Sense strand starting at position 3127 of SEQ ID NO: 916339
gcaguauacagcgguaaga

SEQ ID NO: 1148915 - RNA, 19 nt, Artificial Sequence
  Description of Artificial Sequence: Synthetic oligonucleotide
  Antisense strand to SEQ ID NO: 1148914
ucuuaccgcuguauacugc

SEQ ID NO: 1148916 - RNA, 19 nt, Artificial Sequence
  Description of Artificial Sequence: Synthetic oligonucleotide
  Sense strand starting at position 3129 of SEQ ID NO: 916339
aguauacagcgguaagacu

SEQ ID NO: 1148917 - RNA, 19 nt, Artificial Sequence
  Description of Artificial Sequence: Synthetic oligonucleotide
  Antisense strand to SEQ ID NO: 1148916
agucuuaccgcuguauacu

SEQ ID NO: 1148918 - RNA, 19 nt, Artificial Sequence
  Description of Artificial Sequence: Synthetic oligonucleotide
  Sense strand starting at position 3171 of SEQ ID NO: 916339
ggauuuguauccuagcucu

SEQ ID NO: 1148919 - RNA, 19 nt, Artificial Sequence
  Description of Artificial Sequence: Synthetic oligonucleotide
  Antisense strand to SEQ ID NO: 1148918
agagcuaggauacaaaucc

SEQ ID NO: 1148920 - RNA, 19 nt, Artificial Sequence
  Description of Artificial Sequence: Synthetic oligonucleotide
  Sense strand starting at position 3239 of SEQ ID NO: 916339
ucugcaaauuugggauacu

SEQ ID NO: 1148921 - RNA, 19 nt, Artificial Sequence
  Description of Artificial Sequence: Synthetic oligonucleotide
  Antisense strand to SEQ ID NO: 1148920
aguaucccaaauuugcaga

SEQ ID NO: 1148922 - RNA, 19 nt, Artificial Sequence
  Description of Artificial Sequence: Synthetic oligonucleotide
  Sense strand starting at position 3274 of SEQ ID NO: 916339
agaacuguucuagggauua

SEQ ID NO: 1148923 - RNA, 19 nt, Artificial Sequence
  Description of Artificial Sequence: Synthetic oligonucleotide
  Antisense strand to SEQ ID NO: 1148922
uaaucccuagaacaguucu

SEQ ID NO: 1148924 - RNA, 19 nt, Artificial Sequence
  Description of Artificial Sequence: Synthetic oligonucleotide
  Sense strand starting at position 3305 of SEQ ID NO: 916339
cauguaaagugcuugacua

SEQ ID NO: 1148925 - RNA, 19 nt, Artificial Sequence
  Description of Artificial Sequence: Synthetic oligonucleotide
  Antisense strand to SEQ ID NO: 1148924
uagucaagcacuuuacaug

SEQ ID NO: 1148926 - RNA, 19 nt, Artificial Sequence
  Description of Artificial Sequence: Synthetic oligonucleotide
  Sense strand starting at position 3306 of SEQ ID NO: 916339
auguaaagugcuugacuau

SEQ ID NO: 1148927 - RNA, 19 nt, Artificial Sequence
  Description of Artificial Sequence: Synthetic oligonucleotide
  Antisense strand to SEQ ID NO: 1148926
auagucaagcacuuuacau

SEQ ID NO: 1148928 - RNA, 19 nt, Artificial Sequence
  Description of Artificial Sequence: Synthetic oligonucleotide
  Sense strand starting at position 3307 of SEQ ID NO: 916339
uguaaagugcuugacuaug

SEQ ID NO: 1148929 - RNA, 19 nt, Artificial Sequence
  Description of Artificial Sequence: Synthetic oligonucleotide
  Antisense strand to SEQ ID NO: 1148928
cauagucaagcacuuuaca

SEQ ID NO: 1148930 - RNA, 19 nt, Artificial Sequence
  Description of Artificial Sequence: Synthetic oligonucleotide
  Sense strand starting at position 3309 of SEQ ID NO: 916339
uaaagugcuugacuaugau

SEQ ID NO: 1148931 - RNA, 19 nt, Artificial Sequence
  Description of Artificial Sequence: Synthetic oligonucleotide
  Antisense strand to SEQ ID NO: 1148930
aucauagucaagcacuuua

SEQ ID NO: 1148932 - RNA, 19 nt, Artificial Sequence
  Description of Artificial Sequence: Synthetic oligonucleotide
  Sense strand starting at position 3318 of SEQ ID NO: 916339
ugacuaugaugaguacuaa

SEQ ID NO: 1148933 - RNA, 19 nt, Artificial Sequence
  Description of Artificial Sequence: Synthetic oligonucleotide
  Antisense strand to SEQ ID NO: 1148932
uuaguacucaucauaguca

SEQ ID NO: 1148934 - RNA, 19 nt, Artificial Sequence
  Description of Artificial Sequence: Synthetic oligonucleotide
  Sense strand starting at position 3322 of SEQ ID NO: 916339
uaugaugaguacuaagaaa

SEQ ID NO: 1148935 - RNA, 19 nt, Artificial Sequence
  Description of Artificial Sequence: Synthetic oligonucleotide
  Antisense strand to SEQ ID NO: 1148934
uuucuuaguacucaucaua

SEQ ID NO: 1148936 - RNA, 19 nt, Artificial Sequence
  Description of Artificial Sequence: Synthetic oligonucleotide
  Sense strand starting at position 3513 of SEQ ID NO: 916339
uugggaugcuauucugcaa

SEQ ID NO: 1148937 - RNA, 19 nt, Artificial Sequence
  Description of Artificial Sequence: Synthetic oligonucleotide
  Antisense strand to SEQ ID NO: 1148936
uugcagaauagcaucccaa

SEQ ID NO: 1148938 - RNA, 19 nt, Artificial Sequence
  Description of Artificial Sequence: Synthetic oligonucleotide
  Sense strand starting at position 3516 of SEQ ID NO: 916339
ggaugcuauucugcaaaua

SEQ ID NO: 1148939 - RNA, 19 nt, Artificial Sequence
  Description of Artificial Sequence: Synthetic oligonucleotide
  Antisense strand to SEQ ID NO: 1148938
uauuugcagaauagcaucc

SEQ ID NO: 1148940 - RNA, 19 nt, Artificial Sequence
  Description of Artificial Sequence: Synthetic oligonucleotide
  Sense strand starting at position 213 of SEQ ID NO: 916340
gcaacugaaucuguaggau

SEQ ID NO: 1148941 - RNA, 19 nt, Artificial Sequence
  Description of Artificial Sequence: Synthetic oligonucleotide
  Antisense strand to SEQ ID NO: 1148940
auccuacagauucaguugc

SEQ ID NO: 1148942 - RNA, 19 nt, Artificial Sequence
  Description of Artificial Sequence: Synthetic oligonucleotide
  Sense strand starting at position 249 of SEQ ID NO: 916340
cgugcaggauaacuagaua

SEQ ID NO: 1148943 - RNA, 19 nt, Artificial Sequence
  Description of Artificial Sequence: Synthetic oligonucleotide
  Antisense strand to SEQ ID NO: 1148942
uaucuaguuauccugcacg

SEQ ID NO: 1148944 - RNA, 19 nt, Artificial Sequence
  Description of Artificial Sequence: Synthetic oligonucleotide
  Sense strand starting at position 261 of SEQ ID NO: 916340
cuagauagguaucauuugu

SEQ ID NO: 1148945 - RNA, 19 nt, Artificial Sequence
  Description of Artificial Sequence: Synthetic oligonucleotide
  Antisense strand to SEQ ID NO: 1148944
acaaaugauaccuaucuag

SEQ ID NO: 1148946 - RNA, 19 nt, Artificial Sequence
  Description of Artificial Sequence: Synthetic oligonucleotide
  Sense strand starting at position 267 of SEQ ID NO: 916340
agguaucauuuguaauacu

SEQ ID NO: 1148947 - RNA, 19 nt, Artificial Sequence
  Description of Artificial Sequence: Synthetic oligonucleotide
  Antisense strand to SEQ ID NO: 1148946
aguauuacaaaugauaccu

SEQ ID NO: 1148948 - RNA, 19 nt, Artificial Sequence
  Description of Artificial Sequence: Synthetic oligonucleotide
  Sense strand starting at position 278 of SEQ ID NO: 916340
guaauacugguguguauuu

SEQ ID NO: 1148949 - RNA, 19 nt, Artificial Sequence
  Description of Artificial Sequence: Synthetic oligonucleotide
  Antisense strand to SEQ ID NO: 1148948
aaauacacaccaguauuac

SEQ ID NO: 1148950 - RNA, 19 nt, Artificial Sequence
  Description of Artificial Sequence: Synthetic oligonucleotide
  Sense strand starting at position 336 of SEQ ID NO: 916340
ggguauugccaacauaaac

SEQ ID NO: 1148951 - RNA, 19 nt, Artificial Sequence
  Description of Artificial Sequence: Synthetic oligonucleotide
  Antisense strand to SEQ ID NO: 1148950
guuuauguuggcaauaccc

SEQ ID NO: 1148952 - RNA, 19 nt, Artificial Sequence
  Description of Artificial Sequence: Synthetic oligonucleotide
  Sense strand starting at position 385 of SEQ ID NO: 916340
aucagcaauguaugagaaa

SEQ ID NO: 1148953 - RNA, 19 nt, Artificial Sequence
  Description of Artificial Sequence: Synthetic oligonucleotide
  Antisense strand to SEQ ID NO: 1148952
uuucucauacauugcugau

SEQ ID NO: 1148954 - RNA, 19 nt, Artificial Sequence
  Description of Artificial Sequence: Synthetic oligonucleotide
  Sense strand starting at position 465 of SEQ ID NO: 916340
uccagauacucugcacaga

SEQ ID NO: 1148955 - RNA, 19 nt, Artificial Sequence
  Description of Artificial Sequence: Synthetic oligonucleotide
  Antisense strand to SEQ ID NO: 1148954
ucugugcagaguaucugga

SEQ ID NO: 1148956 - RNA, 19 nt, Artificial Sequence
  Description of Artificial Sequence: Synthetic oligonucleotide
  Sense strand starting at position 501 of SEQ ID NO: 916340
gguguugaguccuugaaug

SEQ ID NO: 1148957 - RNA, 19 nt, Artificial Sequence
  Description of Artificial Sequence: Synthetic oligonucleotide
  Antisense strand to SEQ ID NO: 1148956
cauucaaggacucaacacc

SEQ ID NO: 1148958 - RNA, 19 nt, Artificial Sequence
  Description of Artificial Sequence: Synthetic oligonucleotide
  Sense strand starting at position 503 of SEQ ID NO: 916340
uguugaguccuugaauguc

SEQ ID NO: 1148959 - RNA, 19 nt, Artificial Sequence
  Description of Artificial Sequence: Synthetic oligonucleotide
  Antisense strand to SEQ ID NO: 1148958
gacauucaaggacucaaca

SEQ ID NO: 1148960 - RNA, 19 nt, Artificial Sequence
  Description of Artificial Sequence: Synthetic oligonucleotide
  Sense strand starting at position 546 of SEQ ID NO: 916340
gaccucaggcgccauauau

SEQ ID NO: 1148961 - RNA, 19 nt, Artificial Sequence
  Description of Artificial Sequence: Synthetic oligonucleotide
  Antisense strand to SEQ ID NO: 1148960
auauauggcgccugagguc

SEQ ID NO: 1148962 - RNA, 19 nt, Artificial Sequence
  Description of Artificial Sequence: Synthetic oligonucleotide
  Sense strand starting at position 839 of SEQ ID NO: 916340
gagaauacauguucugcca

SEQ ID NO: 1148963 - RNA, 19 nt, Artificial Sequence
  Description of Artificial Sequence: Synthetic oligonucleotide
  Antisense strand to SEQ ID NO: 1148962
uggcagaacauguauucuc

SEQ ID NO: 1148964 - RNA, 19 nt, Artificial Sequence
  Description of Artificial Sequence: Synthetic oligonucleotide
  Sense strand starting at position 1062 of SEQ ID NO: 916340
agggucacccagugaacua

SEQ ID NO: 1148965 - RNA, 19 nt, Artificial Sequence
  Description of Artificial Sequence: Synthetic oligonucleotide
  Antisense strand to SEQ ID NO: 1148964
uaguucacugggugacccu

SEQ ID NO: 1148966 - RNA, 19 nt, Artificial Sequence
  Description of Artificial Sequence: Synthetic oligonucleotide
  Sense strand starting at position 1255 of SEQ ID NO: 916340
cugggaccaagugguuauu

SEQ ID NO: 1148967 - RNA, 19 nt, Artificial Sequence
  Description of Artificial Sequence: Synthetic oligonucleotide
  Antisense strand to SEQ ID NO: 1148966
aauaaccacuuggucccag

SEQ ID NO: 1148968 - RNA, 19 nt, Artificial Sequence
  Description of Artificial Sequence: Synthetic oligonucleotide
  Sense strand starting at position 1485 of SEQ ID NO: 916340
gaagaagucugagcugaag

SEQ ID NO: 1148969 - RNA, 19 nt, Artificial Sequence
  Description of Artificial Sequence: Synthetic oligonucleotide
  Antisense strand to SEQ ID NO: 1148968
cuucagcucagacuucuuc

SEQ ID NO: 1148970 - RNA, 19 nt, Artificial Sequence
  Description of Artificial Sequence: Synthetic oligonucleotide
  Sense strand starting at position 1550 of SEQ ID NO: 916340
cccucaguauaaucgguau

SEQ ID NO: 1148971 - RNA, 19 nt, Artificial Sequence
  Description of Artificial Sequence: Synthetic oligonucleotide
  Antisense strand to SEQ ID NO: 1148970
auaccgauuauacugaggg

SEQ ID NO: 1148972 - RNA, 19 nt, Artificial Sequence
  Description of Artificial Sequence: Synthetic oligonucleotide
  Sense strand starting at position 1554 of SEQ ID NO: 916340
caguauaaucgguauaccu

SEQ ID NO: 1148973 - RNA, 19 nt, Artificial Sequence
  Description of Artificial Sequence: Synthetic oligonucleotide
  Antisense strand to SEQ ID NO: 1148972
agguauaccgauuauacug

SEQ ID NO: 1148974 - RNA, 19 nt, Artificial Sequence
  Description of Artificial Sequence: Synthetic oligonucleotide
  Sense strand starting at position 1668 of SEQ ID NO: 916340
gcaggagagauugggcuuu

SEQ ID NO: 1148975 - RNA, 19 nt, Artificial Sequence
  Description of Artificial Sequence: Synthetic oligonucleotide
  Antisense strand to SEQ ID NO: 1148974
aaagcccaaucucuccugc

SEQ ID NO: 1148976 - RNA, 19 nt, Artificial Sequence
  Description of Artificial Sequence: Synthetic oligonucleotide
  Sense strand starting at position 1940 of SEQ ID NO: 916340
uguguacugaucugggaga

SEQ ID NO: 1148977 - RNA, 19 nt, Artificial Sequence
  Description of Artificial Sequence: Synthetic oligonucleotide
  Antisense strand to SEQ ID NO: 1148976
ucucccagaucaguacaca

SEQ ID NO: 1148978 - RNA, 19 nt, Artificial Sequence
  Description of Artificial Sequence: Synthetic oligonucleotide
  Sense strand starting at position 2116 of SEQ ID NO: 916340
auguguugaacguaacaua

SEQ ID NO: 1148979 - RNA, 19 nt, Artificial Sequence
  Description of Artificial Sequence: Synthetic oligonucleotide
  Antisense strand to SEQ ID NO: 1148978
uauguuacguucaacacau

SEQ ID NO: 1148980 - RNA, 19 nt, Artificial Sequence
  Description of Artificial Sequence: Synthetic oligonucleotide
  Sense strand starting at position 2260 of SEQ ID NO: 916340
cuaguaaguagcuagucua

SEQ ID NO: 1148981 - RNA, 19 nt, Artificial Sequence
  Description of Artificial Sequence: Synthetic oligonucleotide
  Antisense strand to SEQ ID NO: 1148980
uagacuagcuacuuacuag

SEQ ID NO: 1148982 - RNA, 19 nt, Artificial Sequence
  Description of Artificial Sequence: Synthetic oligonucleotide
  Sense strand starting at position 2263 of SEQ ID NO: 916340
guaaguagcuagucuagga

SEQ ID NO: 1148983 - RNA, 19 nt, Artificial Sequence
  Description of Artificial Sequence: Synthetic oligonucleotide
  Antisense strand to SEQ ID NO: 1148982
uccuagacuagcuacuuac

SEQ ID NO: 1148984 - RNA, 19 nt, Artificial Sequence
  Description of Artificial Sequence: Synthetic oligonucleotide
  Sense strand starting at position 2268 of SEQ ID NO: 916340
uagcuagucuaggauuuaa

SEQ ID NO: 1148985 - RNA, 19 nt, Artificial Sequence
  Description of Artificial Sequence: Synthetic oligonucleotide
  Antisense strand to SEQ ID NO: 1148984
uuaaauccuagacuagcua

SEQ ID NO: 1148986 - RNA, 19 nt, Artificial Sequence
  Description of Artificial Sequence: Synthetic oligonucleotide
  Sense strand starting at position 2377 of SEQ ID NO: 916340
cucuguuucccaggcacaa

SEQ ID NO: 1148987 - RNA, 19 nt, Artificial Sequence
  Description of Artificial Sequence: Synthetic oligonucleotide
  Antisense strand to SEQ ID NO: 1148986
uugugccugggaaacagag

SEQ ID NO: 1148988 - RNA, 19 nt, Artificial Sequence
  Description of Artificial Sequence: Synthetic oligonucleotide
  Sense strand starting at position 2771 of SEQ ID NO: 916340
ucggcuggucugggauuua

SEQ ID NO: 1148989 - RNA, 19 nt, Artificial Sequence
  Description of Artificial Sequence: Synthetic oligonucleotide
  Antisense strand to SEQ ID NO: 1148988
uaaaucccagaccagccga

SEQ ID NO: 1148990 - RNA, 19 nt, Artificial Sequence
  Description of Artificial Sequence: Synthetic oligonucleotide
  Sense strand starting at position 2831 of SEQ ID NO: 916340
uuacuuauauaggaaggaa

SEQ ID NO: 1148991 - RNA, 19 nt, Artificial Sequence
  Description of Artificial Sequence: Synthetic oligonucleotide
  Antisense strand to SEQ ID NO: 1148990
uuccuuccuauauaaguaa

SEQ ID NO: 1148992 - RNA, 19 nt, Artificial Sequence
  Description of Artificial Sequence: Synthetic oligonucleotide
  Sense strand starting at position 2932 of SEQ ID NO: 916340
auuauauaagugugcuuga

SEQ ID NO: 1148993 - RNA, 19 nt, Artificial Sequence
  Description of Artificial Sequence: Synthetic oligonucleotide
  Antisense strand to SEQ ID NO: 1148992
ucaagcacacuuauauaau

SEQ ID NO: 1148994 - RNA, 19 nt, Artificial Sequence
  Description of Artificial Sequence: Synthetic oligonucleotide
  Sense strand starting at position 2935 of SEQ ID NO: 916340
auauaagugugcuugacua

SEQ ID NO: 1148995 - RNA, 19 nt, Artificial Sequence
  Description of Artificial Sequence: Synthetic oligonucleotide
  Antisense strand to SEQ ID NO: 1148994
uagucaagcacacuuauau

SEQ ID NO: 1148996 - RNA, 19 nt, Artificial Sequence
  Description of Artificial Sequence: Synthetic oligonucleotide
  Sense strand starting at position 2937 of SEQ ID NO: 916340
auaagugugcuugacuaca

SEQ ID NO: 1148997 - RNA, 19 nt, Artificial Sequence
  Description of Artificial Sequence: Synthetic oligonucleotide
  Antisense strand to SEQ ID NO: 1148996
uguagucaagcacacuuau

SEQ ID NO: 1148998 - RNA, 19 nt, Artificial Sequence
  Description of Artificial Sequence: Synthetic oligonucleotide
  Sense strand starting at position 2939 of SEQ ID NO: 916340
aagugugcuugacuacaua

SEQ ID NO: 1148999 - RNA, 19 nt, Artificial Sequence
  Description of Artificial Sequence: Synthetic oligonucleotide
  Antisense strand to SEQ ID NO: 1148998
uauguagucaagcacacuu

SEQ ID NO: 1149000 - RNA, 19 nt, Artificial Sequence
  Description of Artificial Sequence: Synthetic oligonucleotide
  Sense strand starting at position 3005 of SEQ ID NO: 916340
acuaguaguaaggagcuua

SEQ ID NO: 1149001 - RNA, 19 nt, Artificial Sequence
  Description of Artificial Sequence: Synthetic oligonucleotide
  Antisense strand to SEQ ID NO: 1149000
uaagcuccuuacuacuagu

SEQ ID NO: 1149002 - RNA, 19 nt, Artificial Sequence
  Description of Artificial Sequence: Synthetic oligonucleotide
  Sense strand starting at position 3069 of SEQ ID NO: 916340
gcaagacucacaggauugu

SEQ ID NO: 1149003 - RNA, 19 nt, Artificial Sequence
  Description of Artificial Sequence: Synthetic oligonucleotide
  Antisense strand to SEQ ID NO: 1149002
acaauccugugagucuugc

SEQ ID NO: 1149004 - RNA, 19 nt, Artificial Sequence
  Description of Artificial Sequence: Synthetic oligonucleotide
  Sense strand starting at position 3079 of SEQ ID NO: 916340
caggauugucgugagaauu

SEQ ID NO: 1149005 - RNA, 19 nt, Artificial Sequence
  Description of Artificial Sequence: Synthetic oligonucleotide
  Antisense strand to SEQ ID NO: 1149004
aauucucacgacaauccug

SEQ ID NO: 1149006 - RNA, 19 nt, Artificial Sequence
  Description of Artificial Sequence: Synthetic oligonucleotide
  Sense strand starting at position 3146 of SEQ ID NO: 916340
uaaguaagggcuugauaag

SEQ ID NO: 1149007 - RNA, 19 nt, Artificial Sequence
  Description of Artificial Sequence: Synthetic oligonucleotide
  Antisense strand to SEQ ID NO: 1149006
cuuaucaagcccuuacuua

SEQ ID NO: 1149008 - RNA, 19 nt, Artificial Sequence
  Description of Artificial Sequence: Synthetic oligonucleotide
  Sense strand starting at position 3267 of SEQ ID NO: 916340
aggcucagagcaugugauu

SEQ ID NO: 1149009 - RNA, 19 nt, Artificial Sequence
  Description of Artificial Sequence: Synthetic oligonucleotide
  Antisense strand to SEQ ID NO: 1149008
aaucacaugcucugagccu

SEQ ID NO: 1149010 - RNA, 19 nt, Artificial Sequence
  Description of Artificial Sequence: Synthetic oligonucleotide
  Sense strand starting at position 3431 of SEQ ID NO: 916340
gcuccuggcccauacagau

SEQ ID NO: 1149011 - RNA, 19 nt, Artificial Sequence
  Description of Artificial Sequence: Synthetic oligonucleotide
  Antisense strand to SEQ ID NO: 1149010
aucuguaugggccaggagc

SEQ ID NO: 1149012 - RNA, 19 nt, Artificial Sequence
  Description of Artificial Sequence: Synthetic oligonucleotide
  Sense strand starting at position 3455 of SEQ ID NO: 916340
agagcuuugagagggaacu

SEQ ID NO: 1149013 - RNA, 19 nt, Artificial Sequence
  Description of Artificial Sequence: Synthetic oligonucleotide
  Antisense strand to SEQ ID NO: 1149012
aguucccucucaaagcucu

SEQ ID NO: 1149014 - RNA, 19 nt, Artificial Sequence
  Description of Artificial Sequence: Synthetic oligonucleotide
  Sense strand starting at position 3456 of SEQ ID NO: 916340
gagcuuugagagggaacua

SEQ ID NO: 1149015 - RNA, 19 nt, Artificial Sequence
  Description of Artificial Sequence: Synthetic oligonucleotide
  Antisense strand to SEQ ID NO: 1149014
uaguucccucucaaagcuc

SEQ ID NO: 1149016 - RNA, 19 nt, Artificial Sequence
  Description of Artificial Sequence: Synthetic oligonucleotide
  Sense strand starting at position 3695 of SEQ ID NO: 916340
ggccucaggcuaugggaua

SEQ ID NO: 1149017 - RNA, 19 nt, Artificial Sequence
  Description of Artificial Sequence: Synthetic oligonucleotide
  Antisense strand to SEQ ID NO: 1149016
uaucccauagccugaggcc

SEQ ID NO: 1149018 - RNA, 19 nt, Artificial Sequence
  Description of Artificial Sequence: Synthetic oligonucleotide
  Sense strand starting at position 3783 of SEQ ID NO: 916340
ugugguuuccucuagagcu

SEQ ID NO: 1149019 - RNA, 19 nt, Artificial Sequence
  Description of Artificial Sequence: Synthetic oligonucleotide
  Antisense strand to SEQ ID NO: 1149018
agcucuagaggaaaccaca

SEQ ID NO: 1149020 - RNA, 19 nt, Artificial Sequence
  Description of Artificial Sequence: Synthetic oligonucleotide
  Sense strand starting at position 44 of SEQ ID NO: 916341
gcuuuaguugcauaagaaa

SEQ ID NO: 1149021 - RNA, 19 nt, Artificial Sequence
  Description of Artificial Sequence: Synthetic oligonucleotide
  Antisense strand to SEQ ID NO: 1149020
uuucuuaugcaacuaaagc

SEQ ID NO: 1149022 - RNA, 19 nt, Artificial Sequence
  Description of Artificial Sequence: Synthetic oligonucleotide
  Sense strand starting at position 224 of SEQ ID NO: 916341
gggucguugcagguuaagu

SEQ ID NO: 1149023 - RNA, 19 nt, Artificial Sequence
  Description of Artificial Sequence: Synthetic oligonucleotide
  Antisense strand to SEQ ID NO: 1149022
acuuaaccugcaacgaccc

SEQ ID NO: 1149024 - RNA, 19 nt, Artificial Sequence
  Description of Artificial Sequence: Synthetic oligonucleotide
  Sense strand starting at position 300 of SEQ ID NO: 916341
guuccacagccugaaaugu

SEQ ID NO: 1149025 - RNA, 19 nt, Artificial Sequence
  Description of Artificial Sequence: Synthetic oligonucleotide
  Antisense strand to SEQ ID NO: 1149024
acauuucaggcuguggaac

SEQ ID NO: 1149026 - RNA, 19 nt, Artificial Sequence
  Description of Artificial Sequence: Synthetic oligonucleotide
  Sense strand starting at position 785 of SEQ ID NO: 916341
ccaagagaggcucagcauu

SEQ ID NO: 1149027 - RNA, 19 nt, Artificial Sequence
  Description of Artificial Sequence: Synthetic oligonucleotide
  Antisense strand to SEQ ID NO: 1149026
aaugcugagccucucuugg

SEQ ID NO: 1149028 - RNA, 19 nt, Artificial Sequence
  Description of Artificial Sequence: Synthetic oligonucleotide
  Sense strand starting at position 839 of SEQ ID NO: 916341
gucugaguucuagaaccca

SEQ ID NO: 1149029 - RNA, 19 nt, Artificial Sequence
  Description of Artificial Sequence: Synthetic oligonucleotide
  Antisense strand to SEQ ID NO: 1149028
uggguucuagaacucagac

SEQ ID NO: 1149030 - RNA, 19 nt, Artificial Sequence
  Description of Artificial Sequence: Synthetic oligonucleotide
  Sense strand starting at position 926 of SEQ ID NO: 916341
gcgaguccugguucggcaa

SEQ ID NO: 1149031 - RNA, 19 nt, Artificial Sequence
  Description of Artificial Sequence: Synthetic oligonucleotide
  Antisense strand to SEQ ID NO: 1149030
uugccgaaccaggacucgc

SEQ ID NO: 1149032 - RNA, 19 nt, Artificial Sequence
  Description of Artificial Sequence: Synthetic oligonucleotide
  Sense strand starting at position 952 of SEQ ID NO: 916341
aggaaacugcuccagcgaa

SEQ ID NO: 1149033 - RNA, 19 nt, Artificial Sequence
  Description of Artificial Sequence: Synthetic oligonucleotide
  Antisense strand to SEQ ID NO: 1149032
uucgcuggagcaguuuccu

SEQ ID NO: 1149034 - RNA, 19 nt, Artificial Sequence
  Description of Artificial Sequence: Synthetic oligonucleotide
  Sense strand starting at position 1261 of SEQ ID NO: 916341
ugucucugagcuugagauu

SEQ ID NO: 1149035 - RNA, 19 nt, Artificial Sequence
  Description of Artificial Sequence: Synthetic oligonucleotide
  Antisense strand to SEQ ID NO: 1149034
aaucucaagcucagagaca

SEQ ID NO: 1149036 - RNA, 19 nt, Artificial Sequence
  Description of Artificial Sequence: Synthetic oligonucleotide
  Sense strand starting at position 1262 of SEQ ID NO: 916341
gucucugagcuugagauua

SEQ ID NO: 1149037 - RNA, 19 nt, Artificial Sequence
  Description of Artificial Sequence: Synthetic oligonucleotide
  Antisense strand to SEQ ID NO: 1149036
uaaucucaagcucagagac

SEQ ID NO: 1149038 - RNA, 19 nt, Artificial Sequence
  Description of Artificial Sequence: Synthetic oligonucleotide
  Sense strand starting at position 1291 of SEQ ID NO: 916341
gagaaagucuugccucuca

SEQ ID NO: 1149039 - RNA, 19 nt, Artificial Sequence
  Description of Artificial Sequence: Synthetic oligonucleotide
  Antisense strand to SEQ ID NO: 1149038
ugagaggcaagacuuucuc

SEQ ID NO: 1149040 - RNA, 19 nt, Artificial Sequence
  Description of Artificial Sequence: Synthetic oligonucleotide
  Sense strand starting at position 1863 of SEQ ID NO: 916341
uccuguuccuuucugaagu

SEQ ID NO: 1149041 - RNA, 19 nt, Artificial Sequence
  Description of Artificial Sequence: Synthetic oligonucleotide
  Antisense strand to SEQ ID NO: 1149040
acuucagaaaggaacagga

SEQ ID NO: 1149042 - RNA, 19 nt, Artificial Sequence
  Description of Artificial Sequence: Synthetic oligonucleotide
  Sense strand starting at position 2450 of SEQ ID NO: 916341
ggguaauuugcuggccaag

SEQ ID NO: 1149043 - RNA, 19 nt, Artificial Sequence
  Description of Artificial Sequence: Synthetic oligonucleotide
  Antisense strand to SEQ ID NO: 1149042
cuuggccagcaaauuaccc

SEQ ID NO: 1149044 - RNA, 19 nt, Artificial Sequence
  Description of Artificial Sequence: Synthetic oligonucleotide
  Sense strand starting at position 2468 of SEQ ID NO: 916341
ggaagagguaggcguugaa

SEQ ID NO: 1149045 - RNA, 19 nt, Artificial Sequence
  Description of Artificial Sequence: Synthetic oligonucleotide
  Antisense strand to SEQ ID NO: 1149044
uucaacgccuaccucuucc

SEQ ID NO: 1149046 - RNA, 19 nt, Artificial Sequence
  Description of Artificial Sequence: Synthetic oligonucleotide
  Sense strand starting at position 2471 of SEQ ID NO: 916341
agagguaggcguugaagua

SEQ ID NO: 1149047 - RNA, 19 nt, Artificial Sequence
  Description of Artificial Sequence: Synthetic oligonucleotide
  Antisense strand to SEQ ID NO: 1149046
uacuucaacgccuaccucu

SEQ ID NO: 1149048 - RNA, 19 nt, Artificial Sequence
  Description of Artificial Sequence: Synthetic oligonucleotide
  Sense strand starting at position 2472 of SEQ ID NO: 916341
gagguaggcguugaaguaa

SEQ ID NO: 1149049 - RNA, 19 nt, Artificial Sequence
  Description of Artificial Sequence: Synthetic oligonucleotide
  Antisense strand to SEQ ID NO: 1149048
uuacuucaacgccuaccuc

SEQ ID NO: 1149050 - RNA, 19 nt, Artificial Sequence
  Description of Artificial Sequence: Synthetic oligonucleotide
  Sense strand starting at position 2564 of SEQ ID NO: 916341
ggaggaugaucucgauuuc

SEQ ID NO: 1149051 - RNA, 19 nt, Artificial Sequence
  Description of Artificial Sequence: Synthetic oligonucleotide
  Antisense strand to SEQ ID NO: 1149050
gaaaucgagaucauccucc

SEQ ID NO: 1149052 - RNA, 19 nt, Artificial Sequence
  Description of Artificial Sequence: Synthetic oligonucleotide
  Sense strand starting at position 2573 of SEQ ID NO: 916341
ucucgauuucguuauguag

SEQ ID NO: 1149053 - RNA, 19 nt, Artificial Sequence
  Description of Artificial Sequence: Synthetic oligonucleotide
  Antisense strand to SEQ ID NO: 1149052
cuacauaacgaaaucgaga

SEQ ID NO: 1149054 - RNA, 19 nt, Artificial Sequence
  Description of Artificial Sequence: Synthetic oligonucleotide
  Sense strand starting at position 2576 of SEQ ID NO: 916341
cgauuucguuauguaguuu

SEQ ID NO: 1149055 - RNA, 19 nt, Artificial Sequence
  Description of Artificial Sequence: Synthetic oligonucleotide
  Antisense strand to SEQ ID NO: 1149054
aaacuacauaacgaaaucg

SEQ ID NO: 1149056 - RNA, 19 nt, Artificial Sequence
  Description of Artificial Sequence: Synthetic oligonucleotide
  Sense strand starting at position 2624 of SEQ ID NO: 916341
guacgcggcguuaaugaaa

SEQ ID NO: 1149057 - RNA, 19 nt, Artificial Sequence
  Description of Artificial Sequence: Synthetic oligonucleotide
  Antisense strand to SEQ ID NO: 1149056
uuucauuaacgccgcguac

SEQ ID NO: 1149058 - RNA, 19 nt, Artificial Sequence
  Description of Artificial Sequence: Synthetic oligonucleotide
  Sense strand starting at position 2859 of SEQ ID NO: 916341
gcuuguuuacguuuaaagc

SEQ ID NO: 1149059 - RNA, 19 nt, Artificial Sequence
  Description of Artificial Sequence: Synthetic oligonucleotide
  Antisense strand to SEQ ID NO: 1149058
gcuuuaaacguaaacaagc

SEQ ID NO: 1149060 - RNA, 19 nt, Artificial Sequence
  Description of Artificial Sequence: Synthetic oligonucleotide
  Sense strand starting at position 3084 of SEQ ID NO: 916341
cagagcaaaguuuguagaa

SEQ ID NO: 1149061 - RNA, 19 nt, Artificial Sequence
  Description of Artificial Sequence: Synthetic oligonucleotide
  Antisense strand to SEQ ID NO: 1149060
uucuacaaacuuugcucug

SEQ ID NO: 1149062 - RNA, 19 nt, Artificial Sequence
  Description of Artificial Sequence: Synthetic oligonucleotide
  Sense strand starting at position 3085 of SEQ ID NO: 916341
agagcaaaguuuguagaaa

SEQ ID NO: 1149063 - RNA, 19 nt, Artificial Sequence
  Description of Artificial Sequence: Synthetic oligonucleotide
  Antisense strand to SEQ ID NO: 1149062
uuucuacaaacuuugcucu

SEQ ID NO: 1149064 - RNA, 19 nt, Artificial Sequence
  Description of Artificial Sequence: Synthetic oligonucleotide
  Sense strand starting at position 3127 of SEQ ID NO: 916341
gaagcauguugugucaaau

SEQ ID NO: 1149065 - RNA, 19 nt, Artificial Sequence
  Description of Artificial Sequence: Synthetic oligonucleotide
  Antisense strand to SEQ ID NO: 1149064
auuugacacaacaugcuuc

SEQ ID NO: 1149066 - RNA, 19 nt, Artificial Sequence
  Description of Artificial Sequence: Synthetic oligonucleotide
  Sense strand starting at position 3138 of SEQ ID NO: 916341
ugucaaauugugcaacuga

SEQ ID NO: 1149067 - RNA, 19 nt, Artificial Sequence
  Description of Artificial Sequence: Synthetic oligonucleotide
  Antisense strand to SEQ ID NO: 1149066
ucaguugcacaauuugaca

SEQ ID NO: 1149068 - RNA, 19 nt, Artificial Sequence
  Description of Artificial Sequence: Synthetic oligonucleotide
  Sense strand starting at position 3164 of SEQ ID NO: 916341
guaacuuacagucagaugu

SEQ ID NO: 1149069 - RNA, 19 nt, Artificial Sequence
  Description of Artificial Sequence: Synthetic oligonucleotide
  Antisense strand to SEQ ID NO: 1149068
acaucugacuguaaguuac

SEQ ID NO: 1149070 - RNA, 19 nt, Artificial Sequence
  Description of Artificial Sequence: Synthetic oligonucleotide
  Sense strand starting at position 3171 of SEQ ID NO: 916341
acagucagaugucuuacau

SEQ ID NO: 1149071 - RNA, 19 nt, Artificial Sequence
  Description of Artificial Sequence: Synthetic oligonucleotide
  Antisense strand to SEQ ID NO: 1149070
auguaagacaucugacugu

SEQ ID NO: 1149072 - RNA, 19 nt, Artificial Sequence
  Description of Artificial Sequence: Synthetic oligonucleotide
  Sense strand starting at position 3205 of SEQ ID NO: 916341
gaugguuuagauugagacu

SEQ ID NO: 1149073 - RNA, 19 nt, Artificial Sequence
  Description of Artificial Sequence: Synthetic oligonucleotide
  Antisense strand to SEQ ID NO: 1149072
agucucaaucuaaaccauc

SEQ ID NO: 1149074 - RNA, 19 nt, Artificial Sequence
  Description of Artificial Sequence: Synthetic oligonucleotide
  Sense strand starting at position 3653 of SEQ ID NO: 916341
uggacccagucauuguaau

SEQ ID NO: 1149075 - RNA, 19 nt, Artificial Sequence
  Description of Artificial Sequence: Synthetic oligonucleotide
  Antisense strand to SEQ ID NO: 1149074
auuacaaugacugggucca

SEQ ID NO: 1149076 - RNA, 19 nt, Artificial Sequence
  Description of Artificial Sequence: Synthetic oligonucleotide
  Sense strand starting at position 3654 of SEQ ID NO: 916341
ggacccagucauuguaaua

SEQ ID NO: 1149077 - RNA, 19 nt, Artificial Sequence
  Description of Artificial Sequence: Synthetic oligonucleotide
  Antisense strand to SEQ ID NO: 1149076
uauuacaaugacugggucc

SEQ ID NO: 1149078 - RNA, 19 nt, Artificial Sequence
  Description of Artificial Sequence: Synthetic oligonucleotide
  Sense strand starting at position 3698 of SEQ ID NO: 916341
auguguccuucuuuguaaa

SEQ ID NO: 1149079 - RNA, 19 nt, Artificial Sequence
  Description of Artificial Sequence: Synthetic oligonucleotide
  Antisense strand to SEQ ID NO: 1149078
uuuacaaagaaggacacau

SEQ ID NO: 1149080 - RNA, 19 nt, Artificial Sequence
  Description of Artificial Sequence: Synthetic oligonucleotide
  Sense strand starting at position 3731 of SEQ ID NO: 916341
cuuagaaaugccuguuaca

SEQ ID NO: 1149081 - RNA, 19 nt, Artificial Sequence
  Description of Artificial Sequence: Synthetic oligonucleotide
  Antisense strand to SEQ ID NO: 1149080
uguaacaggcauuucuaag

SEQ ID NO: 1149082 - RNA, 19 nt, Artificial Sequence
  Description of Artificial Sequence: Synthetic oligonucleotide
  Sense strand starting at position 3845 of SEQ ID NO: 916341
cauagugacccuggaaaug

SEQ ID NO: 1149083 - RNA, 19 nt, Artificial Sequence
  Description of Artificial Sequence: Synthetic oligonucleotide
  Antisense strand to SEQ ID NO: 1149082
cauuuccagggucacuaug

SEQ ID NO: 1149084 - RNA, 19 nt, Artificial Sequence
  Description of Artificial Sequence: Synthetic oligonucleotide
  Sense strand starting at position 3861 of SEQ ID NO: 916341
auggaaguuucuguuuauc

SEQ ID NO: 1149085 - RNA, 19 nt, Artificial Sequence
  Description of Artificial Sequence: Synthetic oligonucleotide
  Antisense strand to SEQ ID NO: 1149084
gauaaacagaaacuuccau

SEQ ID NO: 1149086 - RNA, 19 nt, Artificial Sequence
  Description of Artificial Sequence: Synthetic oligonucleotide
  Sense strand starting at position 3867 of SEQ ID NO: 916341
guuucuguuuauccaagag

SEQ ID NO: 1149087 - RNA, 19 nt, Artificial Sequence
  Description of Artificial Sequence: Synthetic oligonucleotide
  Antisense strand to SEQ ID NO: 1149086
cucuuggauaaacagaaac

SEQ ID NO: 1149088 - RNA, 19 nt, Artificial Sequence
  Description of Artificial Sequence: Synthetic oligonucleotide
  Sense strand starting at position 3871 of SEQ ID NO: 916341
cuguuuauccaagagaucu

SEQ ID NO: 1149089 - RNA, 19 nt, Artificial Sequence
  Description of Artificial Sequence: Synthetic oligonucleotide
  Antisense strand to SEQ ID NO: 1149088
agaucucuuggauaaacag

SEQ ID NO: 1149090 - RNA, 19 nt, Artificial Sequence
  Description of Artificial Sequence: Synthetic oligonucleotide
  Sense strand starting at position 3879 of SEQ ID NO: 916341
ccaagagaucugugcauua

SEQ ID NO: 1149091 - RNA, 19 nt, Artificial Sequence
  Description of Artificial Sequence: Synthetic oligonucleotide
  Antisense strand to SEQ ID NO: 1149090
uaaugcacagaucucuugg

SEQ ID NO: 1149092 - RNA, 19 nt, Artificial Sequence
  Description of Artificial Sequence: Synthetic oligonucleotide
  Sense strand starting at position 3881 of SEQ ID NO: 916341
aagagaucugugcauuaca

SEQ ID NO: 1149093 - RNA, 19 nt, Artificial Sequence
  Description of Artificial Sequence: Synthetic oligonucleotide
  Antisense strand to SEQ ID NO: 1149092
uguaaugcacagaucucuu

SEQ ID NO: 1149094 - RNA, 19 nt, Artificial Sequence
  Description of Artificial Sequence: Synthetic oligonucleotide
  Sense strand starting at position 3932 of SEQ ID NO: 916341
gugcuauacauccagugga

SEQ ID NO: 1149095 - RNA, 19 nt, Artificial Sequence
  Description of Artificial Sequence: Synthetic oligonucleotide
  Antisense strand to SEQ ID NO: 1149094
uccacuggauguauagcac

SEQ ID NO: 1149096 - RNA, 19 nt, Artificial Sequence
  Description of Artificial Sequence: Synthetic oligonucleotide
  Sense strand starting at position 3942 of SEQ ID NO: 916341
uccaguggaugcucaauua

SEQ ID NO: 1149097 - RNA, 19 nt, Artificial Sequence
  Description of Artificial Sequence: Synthetic oligonucleotide
  Antisense strand to SEQ ID NO: 1149096
uaauugagcauccacugga

SEQ ID NO: 1149098 - RNA, 19 nt, Artificial Sequence
  Description of Artificial Sequence: Synthetic oligonucleotide
  Sense strand starting at position 3969 of SEQ ID NO: 916341
agucaugaaugaucuuugu

SEQ ID NO: 1149099 - RNA, 19 nt, Artificial Sequence
  Description of Artificial Sequence: Synthetic oligonucleotide
  Antisense strand to SEQ ID NO: 1149098
acaaagaucauucaugacu

SEQ ID NO: 1149100 - RNA, 19 nt, Artificial Sequence
  Description of Artificial Sequence: Synthetic oligonucleotide
  Sense strand starting at position 9 of SEQ ID NO: 916342
ugccaagucuggucuggaa

SEQ ID NO: 1149101 - RNA, 19 nt, Artificial Sequence
  Description of Artificial Sequence: Synthetic oligonucleotide
  Antisense strand to SEQ ID NO: 1149100
uuccagaccagacuuggca

SEQ ID NO: 1149102 - RNA, 19 nt, Artificial Sequence
  Description of Artificial Sequence: Synthetic oligonucleotide
  Sense strand starting at position 11 of SEQ ID NO: 916342
ccaagucuggucuggaacu

SEQ ID NO: 1149103 - RNA, 19 nt, Artificial Sequence
  Description of Artificial Sequence: Synthetic oligonucleotide
  Antisense strand to SEQ ID NO: 1149102
aguuccagaccagacuugg

SEQ ID NO: 1149104 - RNA, 19 nt, Artificial Sequence
  Description of Artificial Sequence: Synthetic oligonucleotide
  Sense strand starting at position 302 of SEQ ID NO: 916342
auggauaccuuugcauaca

SEQ ID NO: 1149105 - RNA, 19 nt, Artificial Sequence
  Description of Artificial Sequence: Synthetic oligonucleotide
  Antisense strand to SEQ ID NO: 1149104
uguaugcaaagguauccau

SEQ ID NO: 1149106 - RNA, 19 nt, Artificial Sequence
  Description of Artificial Sequence: Synthetic oligonucleotide
  Sense strand starting at position 303 of SEQ ID NO: 916342
uggauaccuuugcauacau

SEQ ID NO: 1149107 - RNA, 19 nt, Artificial Sequence
  Description of Artificial Sequence: Synthetic oligonucleotide
  Antisense strand to SEQ ID NO: 1149106
auguaugcaaagguaucca

SEQ ID NO: 1149108 - RNA, 19 nt, Artificial Sequence
  Description of Artificial Sequence: Synthetic oligonucleotide
  Sense strand starting at position 333 of SEQ ID NO: 916342
ugaagccucuuacagaaga

SEQ ID NO: 1149109 - RNA, 19 nt, Artificial Sequence
  Description of Artificial Sequence: Synthetic oligonucleotide
  Antisense strand to SEQ ID NO: 1149108
ucuucuguaagaggcuuca

SEQ ID NO: 1149110 - RNA, 19 nt, Artificial Sequence
  Description of Artificial Sequence: Synthetic oligonucleotide
  Sense strand starting at position 1058 of SEQ ID NO: 916342
ugcugaagcccgcaucaua

SEQ ID NO: 1149111 - RNA, 19 nt, Artificial Sequence
  Description of Artificial Sequence: Synthetic oligonucleotide
  Antisense strand to SEQ ID NO: 1149110
uaugaugcgggcuucagca

SEQ ID NO: 1149112 - RNA, 19 nt, Artificial Sequence
  Description of Artificial Sequence: Synthetic oligonucleotide
  Sense strand starting at position 1154 of SEQ ID NO: 916342
gcagcauugggacaucuuu

SEQ ID NO: 1149113 - RNA, 19 nt, Artificial Sequence
  Description of Artificial Sequence: Synthetic oligonucleotide
  Antisense strand to SEQ ID NO: 1149112
aaagaugucccaaugcugc

SEQ ID NO: 1149114 - RNA, 19 nt, Artificial Sequence
  Description of Artificial Sequence: Synthetic oligonucleotide
  Sense strand starting at position 1172 of SEQ ID NO: 916342
uuuccauucuucgucgaua

SEQ ID NO: 1149115 - RNA, 19 nt, Artificial Sequence
  Description of Artificial Sequence: Synthetic oligonucleotide
  Antisense strand to SEQ ID NO: 1149114
uaucgacgaagaauggaaa

SEQ ID NO: 1149116 - RNA, 19 nt, Artificial Sequence
  Description of Artificial Sequence: Synthetic oligonucleotide
  Sense strand starting at position 1173 of SEQ ID NO: 916342
uuccauucuucgucgauau

SEQ ID NO: 1149117 - RNA, 19 nt, Artificial Sequence
  Description of Artificial Sequence: Synthetic oligonucleotide
  Antisense strand to SEQ ID NO: 1149116
auaucgacgaagaauggaa

SEQ ID NO: 1149118 - RNA, 19 nt, Artificial Sequence
  Description of Artificial Sequence: Synthetic oligonucleotide
  Sense strand starting at position 1174 of SEQ ID NO: 916342
uccauucuucgucgauaua

SEQ ID NO: 1149119 - RNA, 19 nt, Artificial Sequence
  Description of Artificial Sequence: Synthetic oligonucleotide
  Antisense strand to SEQ ID NO: 1149118
uauaucgacgaagaaugga

SEQ ID NO: 1149120 - RNA, 19 nt, Artificial Sequence
  Description of Artificial Sequence: Synthetic oligonucleotide
  Sense strand starting at position 1175 of SEQ ID NO: 916342
ccauucuucgucgauauau

SEQ ID NO: 1149121 - RNA, 19 nt, Artificial Sequence
  Description of Artificial Sequence: Synthetic oligonucleotide
  Antisense strand to SEQ ID NO: 1149120
auauaucgacgaagaaugg

SEQ ID NO: 1149122 - RNA, 19 nt, Artificial Sequence
  Description of Artificial Sequence: Synthetic oligonucleotide
  Sense strand starting at position 1177 of SEQ ID NO: 916342
auucuucgucgauauauaa

SEQ ID NO: 1149123 - RNA, 19 nt, Artificial Sequence
  Description of Artificial Sequence: Synthetic oligonucleotide
  Antisense strand to SEQ ID NO: 1149122
uuauauaucgacgaagaau

SEQ ID NO: 1149124 - RNA, 19 nt, Artificial Sequence
  Description of Artificial Sequence: Synthetic oligonucleotide
  Sense strand starting at position 1184 of SEQ ID NO: 916342
gucgauauauaacuacacu

SEQ ID NO: 1149125 - RNA, 19 nt, Artificial Sequence
  Description of Artificial Sequence: Synthetic oligonucleotide
  Antisense strand to SEQ ID NO: 1149124
aguguaguuauauaucgac

SEQ ID NO: 1149126 - RNA, 19 nt, Artificial Sequence
  Description of Artificial Sequence: Synthetic oligonucleotide
  Sense strand starting at position 1203 of SEQ ID NO: 916342
gcuugaagggugcauucuu

SEQ ID NO: 1149127 - RNA, 19 nt, Artificial Sequence
  Description of Artificial Sequence: Synthetic oligonucleotide
  Antisense strand to SEQ ID NO: 1149126
aagaaugcacccuucaagc

SEQ ID NO: 1149128 - RNA, 19 nt, Artificial Sequence
  Description of Artificial Sequence: Synthetic oligonucleotide
  Sense strand starting at position 1458 of SEQ ID NO: 916342
gcggacaguuuccaaagga

SEQ ID NO: 1149129 - RNA, 19 nt, Artificial Sequence
  Description of Artificial Sequence: Synthetic oligonucleotide
  Antisense strand to SEQ ID NO: 1149128
uccuuuggaaacuguccgc

SEQ ID NO: 1149130 - RNA, 19 nt, Artificial Sequence
  Description of Artificial Sequence: Synthetic oligonucleotide
  Sense strand starting at position 1496 of SEQ ID NO: 916342
uaagguacgcuccguaagu

SEQ ID NO: 1149131 - RNA, 19 nt, Artificial Sequence
  Description of Artificial Sequence: Synthetic oligonucleotide
  Antisense strand to SEQ ID NO: 1149130
acuuacggagcguaccuua

SEQ ID NO: 1149132 - RNA, 19 nt, Artificial Sequence
  Description of Artificial Sequence: Synthetic oligonucleotide
  Sense strand starting at position 1839 of SEQ ID NO: 916342
acugcuuugaggcggagua

SEQ ID NO: 1149133 - RNA, 19 nt, Artificial Sequence
  Description of Artificial Sequence: Synthetic oligonucleotide
  Antisense strand to SEQ ID NO: 1149132
uacuccgccucaaagcagu

SEQ ID NO: 1149134 - RNA, 19 nt, Artificial Sequence
  Description of Artificial Sequence: Synthetic oligonucleotide
  Sense strand starting at position 1858 of SEQ ID NO: 916342
gcagcucugagcugacaaa

SEQ ID NO: 1149135 - RNA, 19 nt, Artificial Sequence
  Description of Artificial Sequence: Synthetic oligonucleotide
  Antisense strand to SEQ ID NO: 1149134
uuugucagcucagagcugc

SEQ ID NO: 1149136 - RNA, 19 nt, Artificial Sequence
  Description of Artificial Sequence: Synthetic oligonucleotide
  Sense strand starting at position 2217 of SEQ ID NO: 916342
gcggguugccagcuaauau

SEQ ID NO: 1149137 - RNA, 19 nt, Artificial Sequence
  Description of Artificial Sequence: Synthetic oligonucleotide
  Antisense strand to SEQ ID NO: 1149136
auauuagcuggcaacccgc

SEQ ID NO: 1149138 - RNA, 19 nt, Artificial Sequence
  Description of Artificial Sequence: Synthetic oligonucleotide
  Sense strand starting at position 2218 of SEQ ID NO: 916342
cggguugccagcuaauauu

SEQ ID NO: 1149139 - RNA, 19 nt, Artificial Sequence
  Description of Artificial Sequence: Synthetic oligonucleotide
  Antisense strand to SEQ ID NO: 1149138
aauauuagcuggcaacccg

SEQ ID NO: 1149140 - RNA, 19 nt, Artificial Sequence
  Description of Artificial Sequence: Synthetic oligonucleotide
  Sense strand starting at position 2667 of SEQ ID NO: 916342
gcuggaggaucacuguuua

SEQ ID NO: 1149141 - RNA, 19 nt, Artificial Sequence
  Description of Artificial Sequence: Synthetic oligonucleotide
  Antisense strand to SEQ ID NO: 1149140
uaaacagugauccuccagc

SEQ ID NO: 1149142 - RNA, 19 nt, Artificial Sequence
  Description of Artificial Sequence: Synthetic oligonucleotide
  Sense strand starting at position 2671 of SEQ ID NO: 916342
gaggaucacuguuuacaca

SEQ ID NO: 1149143 - RNA, 19 nt, Artificial Sequence
  Description of Artificial Sequence: Synthetic oligonucleotide
  Antisense strand to SEQ ID NO: 1149142
uguguaaacagugauccuc

SEQ ID NO: 1149144 - RNA, 19 nt, Artificial Sequence
  Description of Artificial Sequence: Synthetic oligonucleotide
  Sense strand starting at position 2778 of SEQ ID NO: 916342
uuuacugauucugggaauu

SEQ ID NO: 1149145 - RNA, 19 nt, Artificial Sequence
  Description of Artificial Sequence: Synthetic oligonucleotide
  Antisense strand to SEQ ID NO: 1149144
aauucccagaaucaguaaa

SEQ ID NO: 1149146 - RNA, 19 nt, Artificial Sequence
  Description of Artificial Sequence: Synthetic oligonucleotide
  Sense strand starting at position 2835 of SEQ ID NO: 916342
agagguacagguuaguauu

SEQ ID NO: 1149147 - RNA, 19 nt, Artificial Sequence
  Description of Artificial Sequence: Synthetic oligonucleotide
  Antisense strand to SEQ ID NO: 1149146
aauacuaaccuguaccucu

SEQ ID NO: 1149148 - RNA, 19 nt, Artificial Sequence
  Description of Artificial Sequence: Synthetic oligonucleotide
  Sense strand starting at position 2890 of SEQ ID NO: 916342
augggaccauagcuauuaa

SEQ ID NO: 1149149 - RNA, 19 nt, Artificial Sequence
  Description of Artificial Sequence: Synthetic oligonucleotide
  Antisense strand to SEQ ID NO: 1149148
uuaauagcuauggucccau

SEQ ID NO: 1149150 - RNA, 19 nt, Artificial Sequence
  Description of Artificial Sequence: Synthetic oligonucleotide
  Sense strand starting at position 2901 of SEQ ID NO: 916342
gcuauuaaaugggaaagga

SEQ ID NO: 1149151 - RNA, 19 nt, Artificial Sequence
  Description of Artificial Sequence: Synthetic oligonucleotide
  Antisense strand to SEQ ID NO: 1149150
uccuuucccauuuaauagc

SEQ ID NO: 1149152 - RNA, 19 nt, Artificial Sequence
  Description of Artificial Sequence: Synthetic oligonucleotide
  Sense strand starting at position 2961 of SEQ ID NO: 916342
ccucuuauauaguaaagag

SEQ ID NO: 1149153 - RNA, 19 nt, Artificial Sequence
  Description of Artificial Sequence: Synthetic oligonucleotide
  Antisense strand to SEQ ID NO: 1149152
cucuuuacuauauaagagg

SEQ ID NO: 1149154 - RNA, 19 nt, Artificial Sequence
  Description of Artificial Sequence: Synthetic oligonucleotide
  Sense strand starting at position 2985 of SEQ ID NO: 916342
gacugagaauaaggaaaua

SEQ ID NO: 1149155 - RNA, 19 nt, Artificial Sequence
  Description of Artificial Sequence: Synthetic oligonucleotide
  Antisense strand to SEQ ID NO: 1149154
uauuuccuuauucucaguc

SEQ ID NO: 1149156 - RNA, 19 nt, Artificial Sequence
  Description of Artificial Sequence: Synthetic oligonucleotide
  Sense strand starting at position 3034 of SEQ ID NO: 916342
cugugugcccugucuuuaa

SEQ ID NO: 1149157 - RNA, 19 nt, Artificial Sequence
  Description of Artificial Sequence: Synthetic oligonucleotide
  Antisense strand to SEQ ID NO: 1149156
uuaaagacagggcacacag

SEQ ID NO: 1149158 - RNA, 19 nt, Artificial Sequence
  Description of Artificial Sequence: Synthetic oligonucleotide
  Sense strand starting at position 3062 of SEQ ID NO: 916342
cuaaauaaugcagguauca

SEQ ID NO: 1149159 - RNA, 19 nt, Artificial Sequence
  Description of Artificial Sequence: Synthetic oligonucleotide
  Antisense strand to SEQ ID NO: 1149158
ugauaccugcauuauuuag

SEQ ID NO: 1149160 - RNA, 19 nt, Artificial Sequence
  Description of Artificial Sequence: Synthetic oligonucleotide
  Sense strand starting at position 3166 of SEQ ID NO: 916342
agaaaugauuccuagcuuu

SEQ ID NO: 1149161 - RNA, 19 nt, Artificial Sequence
  Description of Artificial Sequence: Synthetic oligonucleotide
  Antisense strand to SEQ ID NO: 1149160
aaagcuaggaaucauuucu

SEQ ID NO: 1149162 - RNA, 19 nt, Artificial Sequence
  Description of Artificial Sequence: Synthetic oligonucleotide
  Sense strand starting at position 3239 of SEQ ID NO: 916342
cugucaguuuaagaaagau

SEQ ID NO: 1149163 - RNA, 19 nt, Artificial Sequence
  Description of Artificial Sequence: Synthetic oligonucleotide
  Antisense strand to SEQ ID NO: 1149162
aucuuucuuaaacugacag

SEQ ID NO: 1149164 - RNA, 19 nt, Artificial Sequence
  Description of Artificial Sequence: Synthetic oligonucleotide
  Sense strand starting at position 3552 of SEQ ID NO: 916342
gcuguuuccagagacuaga

SEQ ID NO: 1149165 - RNA, 19 nt, Artificial Sequence
  Description of Artificial Sequence: Synthetic oligonucleotide
  Antisense strand to SEQ ID NO: 1149164
ucuagucucuggaaacagc

SEQ ID NO: 1149166 - RNA, 19 nt, Artificial Sequence
  Description of Artificial Sequence: Synthetic oligonucleotide
  Sense strand starting at position 3656 of SEQ ID NO: 916342
cccugcucucuuggaguga

SEQ ID NO: 1149167 - RNA, 19 nt, Artificial Sequence
  Description of Artificial Sequence: Synthetic oligonucleotide
  Antisense strand to SEQ ID NO: 1149166
ucacuccaagagagcaggg

SEQ ID NO: 1149168 - RNA, 19 nt, Artificial Sequence
  Description of Artificial Sequence: Synthetic oligonucleotide
  Sense strand starting at position 3660 of SEQ ID NO: 916342
gcucucuuggagugaacau

SEQ ID NO: 1149169 - RNA, 19 nt, Artificial Sequence
  Description of Artificial Sequence: Synthetic oligonucleotide
  Antisense strand to SEQ ID NO: 1149168
auguucacuccaagagagc

SEQ ID NO: 1149170 - RNA, 19 nt, Artificial Sequence
  Description of Artificial Sequence: Synthetic oligonucleotide
  Sense strand starting at position 3669 of SEQ ID NO: 916342
gagugaacauucuaggaua

SEQ ID NO: 1149171 - RNA, 19 nt, Artificial Sequence
  Description of Artificial Sequence: Synthetic oligonucleotide
  Antisense strand to SEQ ID NO: 1149170
uauccuagaauguucacuc

SEQ ID NO: 1149172 - RNA, 19 nt, Artificial Sequence
  Description of Artificial Sequence: Synthetic oligonucleotide
  Sense strand starting at position 3672 of SEQ ID NO: 916342
ugaacauucuaggauagcu

SEQ ID NO: 1149173 - RNA, 19 nt, Artificial Sequence
  Description of Artificial Sequence: Synthetic oligonucleotide
  Antisense strand to SEQ ID NO: 1149172
agcuauccuagaauguuca

SEQ ID NO: 1149174 - RNA, 19 nt, Artificial Sequence
  Description of Artificial Sequence: Synthetic oligonucleotide
  Sense strand starting at position 3680 of SEQ ID NO: 916342
cuaggauagcuuuggauua

SEQ ID NO: 1149175 - RNA, 19 nt, Artificial Sequence
  Description of Artificial Sequence: Synthetic oligonucleotide
  Antisense strand to SEQ ID NO: 1149174
uaauccaaagcuauccuag

SEQ ID NO: 1149176 - RNA, 19 nt, Artificial Sequence
  Description of Artificial Sequence: Synthetic oligonucleotide
  Sense strand starting at position 3691 of SEQ ID NO: 916342
uuggauuauggaugcaaua

SEQ ID NO: 1149177 - RNA, 19 nt, Artificial Sequence
  Description of Artificial Sequence: Synthetic oligonucleotide
  Antisense strand to SEQ ID NO: 1149176
uauugcauccauaauccaa

SEQ ID NO: 1149178 - RNA, 19 nt, Artificial Sequence
  Description of Artificial Sequence: Synthetic oligonucleotide
  Sense strand starting at position 3970 of SEQ ID NO: 916342
uacugaaggucuuaguuga

SEQ ID NO: 1149179 - RNA, 19 nt, Artificial Sequence
  Description of Artificial Sequence: Synthetic oligonucleotide
  Antisense strand to SEQ ID NO: 1149178
ucaacuaagaccuucagua

SEQ ID NO: 1149180 - RNA, 19 nt, Artificial Sequence
  Description of Artificial Sequence: Synthetic oligonucleotide
  Sense strand starting at position 1150 of SEQ ID NO: 916343
agaccucuagcuugagaaa

SEQ ID NO: 1149181 - RNA, 19 nt, Artificial Sequence
  Description of Artificial Sequence: Synthetic oligonucleotide
  Antisense strand to SEQ ID NO: 1149180
uuucucaagcuagaggucu

SEQ ID NO: 1149182 - RNA, 19 nt, Artificial Sequence
  Description of Artificial Sequence: Synthetic oligonucleotide
  Sense strand starting at position 1174 of SEQ ID NO: 916343
ggacguuugcuagggcuau

SEQ ID NO: 1149183 - RNA, 19 nt, Artificial Sequence
  Description of Artificial Sequence: Synthetic oligonucleotide
  Antisense strand to SEQ ID NO: 1149182
auagcccuagcaaacgucc

SEQ ID NO: 1149184 - RNA, 19 nt, Artificial Sequence
  Description of Artificial Sequence: Synthetic oligonucleotide
  Sense strand starting at position 1178 of SEQ ID NO: 916343
guuugcuagggcuaucaca

SEQ ID NO: 1149185 - RNA, 19 nt, Artificial Sequence
  Description of Artificial Sequence: Synthetic oligonucleotide
  Antisense strand to SEQ ID NO: 1149184
ugugauagcccuagcaaac

SEQ ID NO: 1149186 - RNA, 19 nt, Artificial Sequence
  Description of Artificial Sequence: Synthetic oligonucleotide
  Sense strand starting at position 1276 of SEQ ID NO: 916343
agccgaucuguuuacaacu

SEQ ID NO: 1149187 - RNA, 19 nt, Artificial Sequence
  Description of Artificial Sequence: Synthetic oligonucleotide
  Antisense strand to SEQ ID NO: 1149186
aguuguaaacagaucggcu

SEQ ID NO: 1149188 - RNA, 19 nt, Artificial Sequence
  Description of Artificial Sequence: Synthetic oligonucleotide
  Sense strand starting at position 1284 of SEQ ID NO: 916343
uguuuacaacuucguuaaa

SEQ ID NO: 1149189 - RNA, 19 nt, Artificial Sequence
  Description of Artificial Sequence: Synthetic oligonucleotide
  Antisense strand to SEQ ID NO: 1149188
uuuaacgaaguuguaaaca

SEQ ID NO: 1149190 - RNA, 19 nt, Artificial Sequence
  Description of Artificial Sequence: Synthetic oligonucleotide
  Sense strand starting at position 1285 of SEQ ID NO: 916343
guuuacaacuucguuaaac

SEQ ID NO: 1149191 - RNA, 19 nt, Artificial Sequence
  Description of Artificial Sequence: Synthetic oligonucleotide
  Antisense strand to SEQ ID NO: 1149190
guuuaacgaaguuguaaac

SEQ ID NO: 1149192 - RNA, 19 nt, Artificial Sequence
  Description of Artificial Sequence: Synthetic oligonucleotide
  Sense strand starting at position 1296 of SEQ ID NO: 916343
cguuaaacuagagaucgga

SEQ ID NO: 1149193 - RNA, 19 nt, Artificial Sequence
  Description of Artificial Sequence: Synthetic oligonucleotide
  Antisense strand to SEQ ID NO: 1149192
uccgaucucuaguuuaacg

SEQ ID NO: 1149194 - RNA, 19 nt, Artificial Sequence
  Description of Artificial Sequence: Synthetic oligonucleotide
  Sense strand starting at position 2008 of SEQ ID NO: 916343
gcugcaagaucagcagaaa

SEQ ID NO: 1149195 - RNA, 19 nt, Artificial Sequence
  Description of Artificial Sequence: Synthetic oligonucleotide
  Antisense strand to SEQ ID NO: 1149194
uuucugcugaucuugcagc

SEQ ID NO: 1149196 - RNA, 19 nt, Artificial Sequence
  Description of Artificial Sequence: Synthetic oligonucleotide
  Sense strand starting at position 2011 of SEQ ID NO: 916343
gcaagaucagcagaaaccu

SEQ ID NO: 1149197 - RNA, 19 nt, Artificial Sequence
  Description of Artificial Sequence: Synthetic oligonucleotide
  Antisense strand to SEQ ID NO: 1149196
agguuucugcugaucuugc

SEQ ID NO: 1149198 - RNA, 19 nt, Artificial Sequence
  Description of Artificial Sequence: Synthetic oligonucleotide
  Sense strand starting at position 2029 of SEQ ID NO: 916343
ugagaaagcgccuggaaua

SEQ ID NO: 1149199 - RNA, 19 nt, Artificial Sequence
  Description of Artificial Sequence: Synthetic oligonucleotide
  Antisense strand to SEQ ID NO: 1149198
uauuccaggcgcuuucuca

SEQ ID NO: 1149200 - RNA, 19 nt, Artificial Sequence
  Description of Artificial Sequence: Synthetic oligonucleotide
  Sense strand starting at position 2299 of SEQ ID NO: 916343
uggaaauggucagguccga

SEQ ID NO: 1149201 - RNA, 19 nt, Artificial Sequence
  Description of Artificial Sequence: Synthetic oligonucleotide
  Antisense strand to SEQ ID NO: 1149200
ucggaccugaccauuucca

SEQ ID NO: 1149202 - RNA, 19 nt, Artificial Sequence
  Description of Artificial Sequence: Synthetic oligonucleotide
  Sense strand starting at position 2522 of SEQ ID NO: 916343
ugaggaucccuggguuugu

SEQ ID NO: 1149203 - RNA, 19 nt, Artificial Sequence
  Description of Artificial Sequence: Synthetic oligonucleotide
  Antisense strand to SEQ ID NO: 1149202
acaaacccagggauccuca

SEQ ID NO: 1149204 - RNA, 19 nt, Artificial Sequence
  Description of Artificial Sequence: Synthetic oligonucleotide
  Sense strand starting at position 2533 of SEQ ID NO: 916343
ggguuuguuccauguaguu

SEQ ID NO: 1149205 - RNA, 19 nt, Artificial Sequence
  Description of Artificial Sequence: Synthetic oligonucleotide
  Antisense strand to SEQ ID NO: 1149204
aacuacauggaacaaaccc

SEQ ID NO: 1149206 - RNA, 19 nt, Artificial Sequence
  Description of Artificial Sequence: Synthetic oligonucleotide
  Sense strand starting at position 2595 of SEQ ID NO: 916343
uacgaugggacuugaaguu

SEQ ID NO: 1149207 - RNA, 19 nt, Artificial Sequence
  Description of Artificial Sequence: Synthetic oligonucleotide
  Antisense strand to SEQ ID NO: 1149206
aacuucaagucccaucgua

SEQ ID NO: 1149208 - RNA, 19 nt, Artificial Sequence
  Description of Artificial Sequence: Synthetic oligonucleotide
  Sense strand starting at position 2614 of SEQ ID NO: 916343
uucuuacgauccgauuauu

SEQ ID NO: 1149209 - RNA, 19 nt, Artificial Sequence
  Description of Artificial Sequence: Synthetic oligonucleotide
  Antisense strand to SEQ ID NO: 1149208
aauaaucggaucguaagaa

SEQ ID NO: 1149210 - RNA, 19 nt, Artificial Sequence
  Description of Artificial Sequence: Synthetic oligonucleotide
  Sense strand starting at position 2620 of SEQ ID NO: 916343
cgauccgauuauucugaaa

SEQ ID NO: 1149211 - RNA, 19 nt, Artificial Sequence
  Description of Artificial Sequence: Synthetic oligonucleotide
  Antisense strand to SEQ ID NO: 1149210
uuucagaauaaucggaucg

SEQ ID NO: 1149212 - RNA, 19 nt, Artificial Sequence
  Description of Artificial Sequence: Synthetic oligonucleotide
  Sense strand starting at position 2622 of SEQ ID NO: 916343
auccgauuauucugaaaua

SEQ ID NO: 1149213 - RNA, 19 nt, Artificial Sequence
  Description of Artificial Sequence: Synthetic oligonucleotide
  Antisense strand to SEQ ID NO: 1149212
uauuucagaauaaucggau

SEQ ID NO: 1149214 - RNA, 19 nt, Artificial Sequence
  Description of Artificial Sequence: Synthetic oligonucleotide
  Sense strand starting at position 2623 of SEQ ID NO: 916343
uccgauuauucugaaauac

SEQ ID NO: 1149215 - RNA, 19 nt, Artificial Sequence
  Description of Artificial Sequence: Synthetic oligonucleotide
  Antisense strand to SEQ ID NO: 1149214
guauuucagaauaaucgga

SEQ ID NO: 1149216 - RNA, 19 nt, Artificial Sequence
  Description of Artificial Sequence: Synthetic oligonucleotide
  Sense strand starting at position 2700 of SEQ ID NO: 916343
cuuggugcuaauugggaau

SEQ ID NO: 1149217 - RNA, 19 nt, Artificial Sequence
  Description of Artificial Sequence: Synthetic oligonucleotide
  Antisense strand to SEQ ID NO: 1149216
auucccaauuagcaccaag

SEQ ID NO: 1149218 - RNA, 19 nt, Artificial Sequence
  Description of Artificial Sequence: Synthetic oligonucleotide
  Sense strand starting at position 2702 of SEQ ID NO: 916343
uggugcuaauugggaauaa

SEQ ID NO: 1149219 - RNA, 19 nt, Artificial Sequence
  Description of Artificial Sequence: Synthetic oligonucleotide
  Antisense strand to SEQ ID NO: 1149218
uuauucccaauuagcacca

SEQ ID NO: 1149220 - RNA, 19 nt, Artificial Sequence
  Description of Artificial Sequence: Synthetic oligonucleotide
  Sense strand starting at position 2703 of SEQ ID NO: 916343
ggugcuaauugggaauaau

SEQ ID NO: 1149221 - RNA, 19 nt, Artificial Sequence
  Description of Artificial Sequence: Synthetic oligonucleotide
  Antisense strand to SEQ ID NO: 1149220
auuauucccaauuagcacc

SEQ ID NO: 1149222 - RNA, 19 nt, Artificial Sequence
  Description of Artificial Sequence: Synthetic oligonucleotide
  Sense strand starting at position 2714 of SEQ ID NO: 916343
ggaauaaucugagaagcaa

SEQ ID NO: 1149223 - RNA, 19 nt, Artificial Sequence
  Description of Artificial Sequence: Synthetic oligonucleotide
  Antisense strand to SEQ ID NO: 1149222
uugcuucucagauuauucc

SEQ ID NO: 1149224 - RNA, 19 nt, Artificial Sequence
  Description of Artificial Sequence: Synthetic oligonucleotide
  Sense strand starting at position 3010 of SEQ ID NO: 916343
cccagagucgccgcugauu

SEQ ID NO: 1149225 - RNA, 19 nt, Artificial Sequence
  Description of Artificial Sequence: Synthetic oligonucleotide
  Antisense strand to SEQ ID NO: 1149224
aaucagcggcgacucuggg

SEQ ID NO: 1149226 - RNA, 19 nt, Artificial Sequence
  Description of Artificial Sequence: Synthetic oligonucleotide
  Sense strand starting at position 3116 of SEQ ID NO: 916343
gcauccuucccgcucuauu

SEQ ID NO: 1149227 - RNA, 19 nt, Artificial Sequence
  Description of Artificial Sequence: Synthetic oligonucleotide
  Antisense strand to SEQ ID NO: 1149226
aauagagcgggaaggaugc

SEQ ID NO: 1149228 - RNA, 19 nt, Artificial Sequence
  Description of Artificial Sequence: Synthetic oligonucleotide
  Sense strand starting at position 3161 of SEQ ID NO: 916343
gcgggauugcccaggcagu

SEQ ID NO: 1149229 - RNA, 19 nt, Artificial Sequence
  Description of Artificial Sequence: Synthetic oligonucleotide
  Antisense strand to SEQ ID NO: 1149228
acugccugggcaaucccgc

SEQ ID NO: 1149230 - RNA, 19 nt, Artificial Sequence
  Description of Artificial Sequence: Synthetic oligonucleotide
  Sense strand starting at position 3312 of SEQ ID NO: 916343
ugaguucucuuauacuccu

SEQ ID NO: 1149231 - RNA, 19 nt, Artificial Sequence
  Description of Artificial Sequence: Synthetic oligonucleotide
  Antisense strand to SEQ ID NO: 1149230
aggaguauaagagaacuca

SEQ ID NO: 1149232 - RNA, 19 nt, Artificial Sequence
  Description of Artificial Sequence: Synthetic oligonucleotide
  Sense strand starting at position 3385 of SEQ ID NO: 916343
ucucaauagcuccagggau

SEQ ID NO: 1149233 - RNA, 19 nt, Artificial Sequence
  Description of Artificial Sequence: Synthetic oligonucleotide
  Antisense strand to SEQ ID NO: 1149232
aucccuggagcuauugaga

SEQ ID NO: 1149234 - RNA, 19 nt, Artificial Sequence
  Description of Artificial Sequence: Synthetic oligonucleotide
  Sense strand starting at position 3557 of SEQ ID NO: 916343
ggauaacccuacgagacaa

SEQ ID NO: 1149235 - RNA, 19 nt, Artificial Sequence
  Description of Artificial Sequence: Synthetic oligonucleotide
  Antisense strand to SEQ ID NO: 1149234
uugucucguaggguuaucc

SEQ ID NO: 1149236 - RNA, 19 nt, Artificial Sequence
  Description of Artificial Sequence: Synthetic oligonucleotide
  Sense strand starting at position 3699 of SEQ ID NO: 916343
cuuccuagcuucuugugaa

SEQ ID NO: 1149237 - RNA, 19 nt, Artificial Sequence
  Description of Artificial Sequence: Synthetic oligonucleotide
  Antisense strand to SEQ ID NO: 1149236
uucacaagaagcuaggaag

SEQ ID NO: 1149238 - RNA, 19 nt, Artificial Sequence
  Description of Artificial Sequence: Synthetic oligonucleotide
  Sense strand starting at position 3706 of SEQ ID NO: 916343
gcuucuugugaaugcaugu

SEQ ID NO: 1149239 - RNA, 19 nt, Artificial Sequence
  Description of Artificial Sequence: Synthetic oligonucleotide
  Antisense strand to SEQ ID NO: 1149238
acaugcauucacaagaagc

SEQ ID NO: 1149240 - RNA, 19 nt, Artificial Sequence
  Description of Artificial Sequence: Synthetic oligonucleotide
  Sense strand starting at position 3730 of SEQ ID NO: 916343
gacucagcauuaggagauu

SEQ ID NO: 1149241 - RNA, 19 nt, Artificial Sequence
  Description of Artificial Sequence: Synthetic oligonucleotide
  Antisense strand to SEQ ID NO: 1149240
aaucuccuaaugcugaguc

SEQ ID NO: 1149242 - RNA, 19 nt, Artificial Sequence
  Description of Artificial Sequence: Synthetic oligonucleotide
  Sense strand starting at position 3736 of SEQ ID NO: 916343
gcauuaggagauugccuua

SEQ ID NO: 1149243 - RNA, 19 nt, Artificial Sequence
  Description of Artificial Sequence: Synthetic oligonucleotide
  Antisense strand to SEQ ID NO: 1149242
uaaggcaaucuccuaaugc

SEQ ID NO: 1149244 - RNA, 19 nt, Artificial Sequence
  Description of Artificial Sequence: Synthetic oligonucleotide
  Sense strand starting at position 3739 of SEQ ID NO: 916343
uuaggagauugccuuacua

SEQ ID NO: 1149245 - RNA, 19 nt, Artificial Sequence
  Description of Artificial Sequence: Synthetic oligonucleotide
  Antisense strand to SEQ ID NO: 1149244
uaguaaggcaaucuccuaa

SEQ ID NO: 1149246 - RNA, 19 nt, Artificial Sequence
  Description of Artificial Sequence: Synthetic oligonucleotide
  Sense strand starting at position 3834 of SEQ ID NO: 916343
ccacaucucugauagaugu

SEQ ID NO: 1149247 - RNA, 19 nt, Artificial Sequence
  Description of Artificial Sequence: Synthetic oligonucleotide
  Antisense strand to SEQ ID NO: 1149246
acaucuaucagagaugugg

SEQ ID NO: 1149248 - RNA, 19 nt, Artificial Sequence
  Description of Artificial Sequence: Synthetic oligonucleotide
  Sense strand starting at position 3841 of SEQ ID NO: 916343
ucugauagauguguuuaca

SEQ ID NO: 1149249 - RNA, 19 nt, Artificial Sequence
  Description of Artificial Sequence: Synthetic oligonucleotide
  Antisense strand to SEQ ID NO: 1149248
uguaaacacaucuaucaga

SEQ ID NO: 1149250 - RNA, 19 nt, Artificial Sequence
  Description of Artificial Sequence: Synthetic oligonucleotide
  Sense strand starting at position 3844 of SEQ ID NO: 916343
gauagauguguuuacagca

SEQ ID NO: 1149251 - RNA, 19 nt, Artificial Sequence
  Description of Artificial Sequence: Synthetic oligonucleotide
  Antisense strand to SEQ ID NO: 1149250
ugcuguaaacacaucuauc

SEQ ID NO: 1149252 - RNA, 19 nt, Artificial Sequence
  Description of Artificial Sequence: Synthetic oligonucleotide
  Sense strand starting at position 3849 of SEQ ID NO: 916343
auguguuuacagcaggacu

SEQ ID NO: 1149253 - RNA, 19 nt, Artificial Sequence
  Description of Artificial Sequence: Synthetic oligonucleotide
  Antisense strand to SEQ ID NO: 1149252
aguccugcuguaaacacau

SEQ ID NO: 1149254 - RNA, 19 nt, Artificial Sequence
  Description of Artificial Sequence: Synthetic oligonucleotide
  Sense strand starting at position 3954 of SEQ ID NO: 916343
ucuuguucuucuuugagac

SEQ ID NO: 1149255 - RNA, 19 nt, Artificial Sequence
  Description of Artificial Sequence: Synthetic oligonucleotide
  Antisense strand to SEQ ID NO: 1149254
gucucaaagaagaacaaga

SEQ ID NO: 1149256 - RNA, 19 nt, Artificial Sequence
  Description of Artificial Sequence: Synthetic oligonucleotide
  Sense strand starting at position 3955 of SEQ ID NO: 916343
cuuguucuucuuugagaca

SEQ ID NO: 1149257 - RNA, 19 nt, Artificial Sequence
  Description of Artificial Sequence: Synthetic oligonucleotide
  Antisense strand to SEQ ID NO: 1149256
ugucucaaagaagaacaag

SEQ ID NO: 1149258 - RNA, 19 nt, Artificial Sequence
  Description of Artificial Sequence: Synthetic oligonucleotide
  Sense strand starting at position 3962 of SEQ ID NO: 916343
uucuuugagacagagugua

SEQ ID NO: 1149259 - RNA, 19 nt, Artificial Sequence
  Description of Artificial Sequence: Synthetic oligonucleotide
  Antisense strand to SEQ ID NO: 1149258
uacacucugucucaaagaa

SEQ ID NO: 1149260 - RNA, 19 nt, Artificial Sequence
  Description of Artificial Sequence: Synthetic oligonucleotide
  Sense strand starting at position 2260 of SEQ ID NO: 916344
cugaaauucccagggcaac

SEQ ID NO: 1149261 - RNA, 19 nt, Artificial Sequence
  Description of Artificial Sequence: Synthetic oligonucleotide
  Antisense strand to SEQ ID NO: 1149260
guugcccugggaauuucag

SEQ ID NO: 1149262 - RNA, 19 nt, Artificial Sequence
  Description of Artificial Sequence: Synthetic oligonucleotide
  Sense strand starting at position 2383 of SEQ ID NO: 916344
gcugagucggaguaugaga

SEQ ID NO: 1149263 - RNA, 19 nt, Artificial Sequence
  Description of Artificial Sequence: Synthetic oligonucleotide
  Antisense strand to SEQ ID NO: 1149262
ucucauacuccgacucagc

SEQ ID NO: 1149264 - RNA, 19 nt, Artificial Sequence
  Description of Artificial Sequence: Synthetic oligonucleotide
  Sense strand starting at position 2447 of SEQ ID NO: 916344
gguauuucuuugggaagga

SEQ ID NO: 1149265 - RNA, 19 nt, Artificial Sequence
  Description of Artificial Sequence: Synthetic oligonucleotide
  Antisense strand to SEQ ID NO: 1149264
uccuucccaaagaaauacc

SEQ ID NO: 1149266 - RNA, 19 nt, Artificial Sequence
  Description of Artificial Sequence: Synthetic oligonucleotide
  Sense strand starting at position 2448 of SEQ ID NO: 916344
guauuucuuugggaaggau

SEQ ID NO: 1149267 - RNA, 19 nt, Artificial Sequence
  Description of Artificial Sequence: Synthetic oligonucleotide
  Antisense strand to SEQ ID NO: 1149266
auccuucccaaagaaauac

SEQ ID NO: 1149268 - RNA, 19 nt, Artificial Sequence
  Description of Artificial Sequence: Synthetic oligonucleotide
  Sense strand starting at position 2490 of SEQ ID NO: 916344
aguuacggaccuugaaaua

SEQ ID NO: 1149269 - RNA, 19 nt, Artificial Sequence
  Description of Artificial Sequence: Synthetic oligonucleotide
  Antisense strand to SEQ ID NO: 1149268
uauuucaagguccguaacu

SEQ ID NO: 1149270 - RNA, 19 nt, Artificial Sequence
  Description of Artificial Sequence: Synthetic oligonucleotide
  Sense strand starting at position 2574 of SEQ ID NO: 916344
guuggaacccugcaggauu

SEQ ID NO: 1149271 - RNA, 19 nt, Artificial Sequence
  Description of Artificial Sequence: Synthetic oligonucleotide
  Antisense strand to SEQ ID NO: 1149270
aauccugcaggguuccaac

SEQ ID NO: 1149272 - RNA, 19 nt, Artificial Sequence
  Description of Artificial Sequence: Synthetic oligonucleotide
  Sense strand starting at position 2585 of SEQ ID NO: 916344
gcaggauucccaugcccua

SEQ ID NO: 1149273 - RNA, 19 nt, Artificial Sequence
  Description of Artificial Sequence: Synthetic oligonucleotide
  Antisense strand to SEQ ID NO: 1149272
uagggcaugggaauccugc

SEQ ID NO: 1149274 - RNA, 19 nt, Artificial Sequence
  Description of Artificial Sequence: Synthetic oligonucleotide
  Sense strand starting at position 2604 of SEQ ID NO: 916344
gccuguuuccaguacagac

SEQ ID NO: 1149275 - RNA, 19 nt, Artificial Sequence
  Description of Artificial Sequence: Synthetic oligonucleotide
  Antisense strand to SEQ ID NO: 1149274
gucuguacuggaaacaggc

SEQ ID NO: 1149276 - RNA, 19 nt, Artificial Sequence
  Description of Artificial Sequence: Synthetic oligonucleotide
  Sense strand starting at position 2770 of SEQ ID NO: 916344
cuaauccugccuggugaau

SEQ ID NO: 1149277 - RNA, 19 nt, Artificial Sequence
  Description of Artificial Sequence: Synthetic oligonucleotide
  Antisense strand to SEQ ID NO: 1149276
auucaccaggcaggauuag

SEQ ID NO: 1149278 - RNA, 19 nt, Artificial Sequence
  Description of Artificial Sequence: Synthetic oligonucleotide
  Sense strand starting at position 2784 of SEQ ID NO: 916344
ugaaucuuggaccgagcaa

SEQ ID NO: 1149279 - RNA, 19 nt, Artificial Sequence
  Description of Artificial Sequence: Synthetic oligonucleotide
  Antisense strand to SEQ ID NO: 1149278
uugcucgguccaagauuca

SEQ ID NO: 1149280 - RNA, 19 nt, Artificial Sequence
  Description of Artificial Sequence: Synthetic oligonucleotide
  Sense strand starting at position 2806 of SEQ ID NO: 916344
caucuagguccaugaagga

SEQ ID NO: 1149281 - RNA, 19 nt, Artificial Sequence
  Description of Artificial Sequence: Synthetic oligonucleotide
  Antisense strand to SEQ ID NO: 1149280
uccuucauggaccuagaug

SEQ ID NO: 1149282 - RNA, 19 nt, Artificial Sequence
  Description of Artificial Sequence: Synthetic oligonucleotide
  Sense strand starting at position 2833 of SEQ ID NO: 916344
guggagguggcuuaugaga

SEQ ID NO: 1149283 - RNA, 19 nt, Artificial Sequence
  Description of Artificial Sequence: Synthetic oligonucleotide
  Antisense strand to SEQ ID NO: 1149282
ucucauaagccaccuccac

SEQ ID NO: 1149284 - RNA, 19 nt, Artificial Sequence
  Description of Artificial Sequence: Synthetic oligonucleotide
  Sense strand starting at position 2882 of SEQ ID NO: 916344
gcuggagcauucccaagaa

SEQ ID NO: 1149285 - RNA, 19 nt, Artificial Sequence
  Description of Artificial Sequence: Synthetic oligonucleotide
  Antisense strand to SEQ ID NO: 1149284
uucuugggaaugcuccagc

SEQ ID NO: 1149286 - RNA, 19 nt, Artificial Sequence
  Description of Artificial Sequence: Synthetic oligonucleotide
  Sense strand starting at position 2978 of SEQ ID NO: 916344
uguguauuccuacagcaac

SEQ ID NO: 1149287 - RNA, 19 nt, Artificial Sequence
  Description of Artificial Sequence: Synthetic oligonucleotide
  Antisense strand to SEQ ID NO: 1149286
guugcuguaggaauacaca

SEQ ID NO: 1149288 - RNA, 19 nt, Artificial Sequence
  Description of Artificial Sequence: Synthetic oligonucleotide
  Sense strand starting at position 3073 of SEQ ID NO: 916344
caggcuuaugcagguggaa

SEQ ID NO: 1149289 - RNA, 19 nt, Artificial Sequence
  Description of Artificial Sequence: Synthetic oligonucleotide
  Antisense strand to SEQ ID NO: 1149288
uuccaccugcauaagccug

SEQ ID NO: 1149290 - RNA, 19 nt, Artificial Sequence
  Description of Artificial Sequence: Synthetic oligonucleotide
  Sense strand starting at position 3075 of SEQ ID NO: 916344
ggcuuaugcagguggaaac

SEQ ID NO: 1149291 - RNA, 19 nt, Artificial Sequence
  Description of Artificial Sequence: Synthetic oligonucleotide
  Antisense strand to SEQ ID NO: 1149290
guuuccaccugcauaagcc

SEQ ID NO: 1149292 - RNA, 19 nt, Artificial Sequence
  Description of Artificial Sequence: Synthetic oligonucleotide
  Sense strand starting at position 3205 of SEQ ID NO: 916344
uccaacaucuggccugaga

SEQ ID NO: 1149293 - RNA, 19 nt, Artificial Sequence
  Description of Artificial Sequence: Synthetic oligonucleotide
  Antisense strand to SEQ ID NO: 1149292
ucucaggccagauguugga

SEQ ID NO: 1149294 - RNA, 19 nt, Artificial Sequence
  Description of Artificial Sequence: Synthetic oligonucleotide
  Sense strand starting at position 3247 of SEQ ID NO: 916344
gcaggaugauggcugauau

SEQ ID NO: 1149295 - RNA, 19 nt, Artificial Sequence
  Description of Artificial Sequence: Synthetic oligonucleotide
  Antisense strand to SEQ ID NO: 1149294
auaucagccaucauccugc

SEQ ID NO: 1149296 - RNA, 19 nt, Artificial Sequence
  Description of Artificial Sequence: Synthetic oligonucleotide
  Sense strand starting at position 3248 of SEQ ID NO: 916344
caggaugauggcugauaua

SEQ ID NO: 1149297 - RNA, 19 nt, Artificial Sequence
  Description of Artificial Sequence: Synthetic oligonucleotide
  Antisense strand to SEQ ID NO: 1149296
uauaucagccaucauccug

SEQ ID NO: 1149298 - RNA, 19 nt, Artificial Sequence
  Description of Artificial Sequence: Synthetic oligonucleotide
  Sense strand starting at position 3273 of SEQ ID NO: 916344
uaaucuuucuagguuggga

SEQ ID NO: 1149299 - RNA, 19 nt, Artificial Sequence
  Description of Artificial Sequence: Synthetic oligonucleotide
  Antisense strand to SEQ ID NO: 1149298
ucccaaccuagaaagauua

SEQ ID NO: 1149300 - RNA, 19 nt, Artificial Sequence
  Description of Artificial Sequence: Synthetic oligonucleotide
  Sense strand starting at position 3403 of SEQ ID NO: 916344
uccagaaguuucuugguuu

SEQ ID NO: 1149301 - RNA, 19 nt, Artificial Sequence
  Description of Artificial Sequence: Synthetic oligonucleotide
  Antisense strand to SEQ ID NO: 1149300
aaaccaagaaacuucugga

SEQ ID NO: 1149302 - RNA, 19 nt, Artificial Sequence
  Description of Artificial Sequence: Synthetic oligonucleotide
  Sense strand starting at position 3495 of SEQ ID NO: 916344
agauuuauaugcgugaagu

SEQ ID NO: 1149303 - RNA, 19 nt, Artificial Sequence
  Description of Artificial Sequence: Synthetic oligonucleotide
  Antisense strand to SEQ ID NO: 1149302
acuucacgcauauaaaucu

SEQ ID NO: 1149304 - RNA, 19 nt, Artificial Sequence
  Description of Artificial Sequence: Synthetic oligonucleotide
  Sense strand starting at position 3496 of SEQ ID NO: 916344
gauuuauaugcgugaaguu

SEQ ID NO: 1149305 - RNA, 19 nt, Artificial Sequence
  Description of Artificial Sequence: Synthetic oligonucleotide
  Antisense strand to SEQ ID NO: 1149304
aacuucacgcauauaaauc

SEQ ID NO: 1149306 - RNA, 19 nt, Artificial Sequence
  Description of Artificial Sequence: Synthetic oligonucleotide
  Sense strand starting at position 3514 of SEQ ID NO: 916344
uaggaccucuugucaauga

SEQ ID NO: 1149307 - RNA, 19 nt, Artificial Sequence
  Description of Artificial Sequence: Synthetic oligonucleotide
  Antisense strand to SEQ ID NO: 1149306
ucauugacaagagguccua

SEQ ID NO: 1149308 - RNA, 19 nt, Artificial Sequence
  Description of Artificial Sequence: Synthetic oligonucleotide
  Sense strand starting at position 3518 of SEQ ID NO: 916344
accucuugucaaugaaugu

SEQ ID NO: 1149309 - RNA, 19 nt, Artificial Sequence
  Description of Artificial Sequence: Synthetic oligonucleotide
  Antisense strand to SEQ ID NO: 1149308
acauucauugacaagaggu

SEQ ID NO: 1149310 - RNA, 19 nt, Artificial Sequence
  Description of Artificial Sequence: Synthetic oligonucleotide
  Sense strand starting at position 3539 of SEQ ID NO: 916344
cuauccaaagggugugauu

SEQ ID NO: 1149311 - RNA, 19 nt, Artificial Sequence
  Description of Artificial Sequence: Synthetic oligonucleotide
  Antisense strand to SEQ ID NO: 1149310
aaucacacccuuuggauag

SEQ ID NO: 1149312 - RNA, 19 nt, Artificial Sequence
  Description of Artificial Sequence: Synthetic oligonucleotide
  Sense strand starting at position 3548 of SEQ ID NO: 916344
gggugugauuuggaaacuu

SEQ ID NO: 1149313 - RNA, 19 nt, Artificial Sequence
  Description of Artificial Sequence: Synthetic oligonucleotide
  Antisense strand to SEQ ID NO: 1149312
aaguuuccaaaucacaccc

SEQ ID NO: 1149314 - RNA, 19 nt, Artificial Sequence
  Description of Artificial Sequence: Synthetic oligonucleotide
  Sense strand starting at position 3632 of SEQ ID NO: 916344
ugagaaguaugugugcaua

SEQ ID NO: 1149315 - RNA, 19 nt, Artificial Sequence
  Description of Artificial Sequence: Synthetic oligonucleotide
  Antisense strand to SEQ ID NO: 1149314
uaugcacacauacuucuca

SEQ ID NO: 1149316 - RNA, 19 nt, Artificial Sequence
  Description of Artificial Sequence: Synthetic oligonucleotide
  Sense strand starting at position 3634 of SEQ ID NO: 916344
agaaguaugugugcauaug

SEQ ID NO: 1149317 - RNA, 19 nt, Artificial Sequence
  Description of Artificial Sequence: Synthetic oligonucleotide
  Antisense strand to SEQ ID NO: 1149316
cauaugcacacauacuucu

SEQ ID NO: 1149318 - RNA, 19 nt, Artificial Sequence
  Description of Artificial Sequence: Synthetic oligonucleotide
  Sense strand starting at position 3661 of SEQ ID NO: 916344
agaguuuauaugugaaggu

SEQ ID NO: 1149319 - RNA, 19 nt, Artificial Sequence
  Description of Artificial Sequence: Synthetic oligonucleotide
  Antisense strand to SEQ ID NO: 1149318
accuucacauauaaacucu

SEQ ID NO: 1149320 - RNA, 19 nt, Artificial Sequence
  Description of Artificial Sequence: Synthetic oligonucleotide
  Sense strand starting at position 3665 of SEQ ID NO: 916344
uuuauaugugaagguggau

SEQ ID NO: 1149321 - RNA, 19 nt, Artificial Sequence
  Description of Artificial Sequence: Synthetic oligonucleotide
  Antisense strand to SEQ ID NO: 1149320
auccaccuucacauauaaa

SEQ ID NO: 1149322 - RNA, 19 nt, Artificial Sequence
  Description of Artificial Sequence: Synthetic oligonucleotide
  Sense strand starting at position 3671 of SEQ ID NO: 916344
ugugaagguggaugugaau

SEQ ID NO: 1149323 - RNA, 19 nt, Artificial Sequence
  Description of Artificial Sequence: Synthetic oligonucleotide
  Antisense strand to SEQ ID NO: 1149322
auucacauccaccuucaca

SEQ ID NO: 1149324 - RNA, 19 nt, Artificial Sequence
  Description of Artificial Sequence: Synthetic oligonucleotide
  Sense strand starting at position 3684 of SEQ ID NO: 916344
gugaauuuggugugcguaa

SEQ ID NO: 1149325 - RNA, 19 nt, Artificial Sequence
  Description of Artificial Sequence: Synthetic oligonucleotide
  Antisense strand to SEQ ID NO: 1149324
uuacgcacaccaaauucac

SEQ ID NO: 1149326 - RNA, 19 nt, Artificial Sequence
  Description of Artificial Sequence: Synthetic oligonucleotide
  Sense strand starting at position 3686 of SEQ ID NO: 916344
gaauuuggugugcguaagu

SEQ ID NO: 1149327 - RNA, 19 nt, Artificial Sequence
  Description of Artificial Sequence: Synthetic oligonucleotide
  Antisense strand to SEQ ID NO: 1149326
acuuacgcacaccaaauuc

SEQ ID NO: 1149328 - RNA, 19 nt, Artificial Sequence
  Description of Artificial Sequence: Synthetic oligonucleotide
  Sense strand starting at position 3689 of SEQ ID NO: 916344
uuuggugugcguaaguauu

SEQ ID NO: 1149329 - RNA, 19 nt, Artificial Sequence
  Description of Artificial Sequence: Synthetic oligonucleotide
  Antisense strand to SEQ ID NO: 1149328
aauacuuacgcacaccaaa

SEQ ID NO: 1149330 - RNA, 19 nt, Artificial Sequence
  Description of Artificial Sequence: Synthetic oligonucleotide
  Sense strand starting at position 3785 of SEQ ID NO: 916344
ucaguaugugaaggcauca

SEQ ID NO: 1149331 - RNA, 19 nt, Artificial Sequence
  Description of Artificial Sequence: Synthetic oligonucleotide
  Antisense strand to SEQ ID NO: 1149330
ugaugccuucacauacuga

SEQ ID NO: 1149332 - RNA, 19 nt, Artificial Sequence
  Description of Artificial Sequence: Synthetic oligonucleotide
  Sense strand starting at position 3796 of SEQ ID NO: 916344
aggcaucacugguuaacca

SEQ ID NO: 1149333 - RNA, 19 nt, Artificial Sequence
  Description of Artificial Sequence: Synthetic oligonucleotide
  Antisense strand to SEQ ID NO: 1149332
ugguuaaccagugaugccu

SEQ ID NO: 1149334 - RNA, 19 nt, Artificial Sequence
  Description of Artificial Sequence: Synthetic oligonucleotide
  Sense strand starting at position 3935 of SEQ ID NO: 916344
gggacuuacugagcuugca

SEQ ID NO: 1149335 - RNA, 19 nt, Artificial Sequence
  Description of Artificial Sequence: Synthetic oligonucleotide
  Antisense strand to SEQ ID NO: 1149334
ugcaagcucaguaaguccc

SEQ ID NO: 1149336 - RNA, 19 nt, Artificial Sequence
  Description of Artificial Sequence: Synthetic oligonucleotide
  Sense strand starting at position 3963 of SEQ ID NO: 916344
gucagagacccaugacagu

SEQ ID NO: 1149337 - RNA, 19 nt, Artificial Sequence
  Description of Artificial Sequence: Synthetic oligonucleotide
  Antisense strand to SEQ ID NO: 1149336
acugucaugggucucugac

SEQ ID NO: 1149338 - RNA, 19 nt, Artificial Sequence
  Description of Artificial Sequence: Synthetic oligonucleotide
  Sense strand starting at position 3976 of SEQ ID NO: 916344
gacagucuugucuacugau

SEQ ID NO: 1149339 - RNA, 19 nt, Artificial Sequence
  Description of Artificial Sequence: Synthetic oligonucleotide
  Antisense strand to SEQ ID NO: 1149338
aucaguagacaagacuguc

SEQ ID NO: 1149340 - RNA, 19 nt, Artificial Sequence
  Description of Artificial Sequence: Synthetic oligonucleotide
  Sense strand starting at position 2330 of SEQ ID NO: 916345
uugagagcuuccgauuuaa

SEQ ID NO: 1149341 - RNA, 19 nt, Artificial Sequence
  Description of Artificial Sequence: Synthetic oligonucleotide
  Antisense strand to SEQ ID NO: 1149340
uuaaaucggaagcucucaa

SEQ ID NO: 1149342 - RNA, 19 nt, Artificial Sequence
  Description of Artificial Sequence: Synthetic oligonucleotide
  Sense strand starting at position 2454 of SEQ ID NO: 916345
ugccuuucccaucagaaga

SEQ ID NO: 1149343 - RNA, 19 nt, Artificial Sequence
  Description of Artificial Sequence: Synthetic oligonucleotide
  Antisense strand to SEQ ID NO: 1149342
ucuucugaugggaaaggca

SEQ ID NO: 1149344 - RNA, 19 nt, Artificial Sequence
  Description of Artificial Sequence: Synthetic oligonucleotide
  Sense strand starting at position 2623 of SEQ ID NO: 916345
cugcuuauugggugaccaa

SEQ ID NO: 1149345 - RNA, 19 nt, Artificial Sequence
  Description of Artificial Sequence: Synthetic oligonucleotide
  Antisense strand to SEQ ID NO: 1149344
uuggucacccaauaagcag

SEQ ID NO: 1149346 - RNA, 19 nt, Artificial Sequence
  Description of Artificial Sequence: Synthetic oligonucleotide
  Sense strand starting at position 2624 of SEQ ID NO: 916345
ugcuuauugggugaccaaa

SEQ ID NO: 1149347 - RNA, 19 nt, Artificial Sequence
  Description of Artificial Sequence: Synthetic oligonucleotide
  Antisense strand to SEQ ID NO: 1149346
uuuggucacccaauaagca

SEQ ID NO: 1149348 - RNA, 19 nt, Artificial Sequence
  Description of Artificial Sequence: Synthetic oligonucleotide
  Sense strand starting at position 2710 of SEQ ID NO: 916345
uuuacugggcauugaauau

SEQ ID NO: 1149349 - RNA, 19 nt, Artificial Sequence
  Description of Artificial Sequence: Synthetic oligonucleotide
  Antisense strand to SEQ ID NO: 1149348
auauucaaugcccaguaaa

SEQ ID NO: 1149350 - RNA, 19 nt, Artificial Sequence
  Description of Artificial Sequence: Synthetic oligonucleotide
  Sense strand starting at position 2743 of SEQ ID NO: 916345
cuaggugcuuucccagaaa

SEQ ID NO: 1149351 - RNA, 19 nt, Artificial Sequence
  Description of Artificial Sequence: Synthetic oligonucleotide
  Antisense strand to SEQ ID NO: 1149350
uuucugggaaagcaccuag

SEQ ID NO: 1149352 - RNA, 19 nt, Artificial Sequence
  Description of Artificial Sequence: Synthetic oligonucleotide
  Sense strand starting at position 2746 of SEQ ID NO: 916345
ggugcuuucccagaaagau

SEQ ID NO: 1149353 - RNA, 19 nt, Artificial Sequence
  Description of Artificial Sequence: Synthetic oligonucleotide
  Antisense strand to SEQ ID NO: 1149352
aucuuucugggaaagcacc

SEQ ID NO: 1149354 - RNA, 19 nt, Artificial Sequence
  Description of Artificial Sequence: Synthetic oligonucleotide
  Sense strand starting at position 2772 of SEQ ID NO: 916345
ccuuguaggccauguuaca

SEQ ID NO: 1149355 - RNA, 19 nt, Artificial Sequence
  Description of Artificial Sequence: Synthetic oligonucleotide
  Antisense strand to SEQ ID NO: 1149354
uguaacauggccuacaagg

SEQ ID NO: 1149356 - RNA, 19 nt, Artificial Sequence
  Description of Artificial Sequence: Synthetic oligonucleotide
  Sense strand starting at position 2819 of SEQ ID NO: 916345
agggcaaaguuuguuguua

SEQ ID NO: 1149357 - RNA, 19 nt, Artificial Sequence
  Description of Artificial Sequence: Synthetic oligonucleotide
  Antisense strand to SEQ ID NO: 1149356
uaacaacaaacuuugcccu

SEQ ID NO: 1149358 - RNA, 19 nt, Artificial Sequence
  Description of Artificial Sequence: Synthetic oligonucleotide
  Sense strand starting at position 2820 of SEQ ID NO: 916345
gggcaaaguuuguuguuag

SEQ ID NO: 1149359 - RNA, 19 nt, Artificial Sequence
  Description of Artificial Sequence: Synthetic oligonucleotide
  Antisense strand to SEQ ID NO: 1149358
cuaacaacaaacuuugccc

SEQ ID NO: 1149360 - RNA, 19 nt, Artificial Sequence
  Description of Artificial Sequence: Synthetic oligonucleotide
  Sense strand starting at position 2823 of SEQ ID NO: 916345
caaaguuuguuguuaggga

SEQ ID NO: 1149361 - RNA, 19 nt, Artificial Sequence
  Description of Artificial Sequence: Synthetic oligonucleotide
  Antisense strand to SEQ ID NO: 1149360
ucccuaacaacaaacuuug

SEQ ID NO: 1149362 - RNA, 19 nt, Artificial Sequence
  Description of Artificial Sequence: Synthetic oligonucleotide
  Sense strand starting at position 2868 of SEQ ID NO: 916345
gcaagaaggugauaagaau

SEQ ID NO: 1149363 - RNA, 19 nt, Artificial Sequence
  Description of Artificial Sequence: Synthetic oligonucleotide
  Antisense strand to SEQ ID NO: 1149362
auucuuaucaccuucuugc

SEQ ID NO: 1149364 - RNA, 19 nt, Artificial Sequence
  Description of Artificial Sequence: Synthetic oligonucleotide
  Sense strand starting at position 3079 of SEQ ID NO: 916345
uagcuucuggugcauauua

SEQ ID NO: 1149365 - RNA, 19 nt, Artificial Sequence
  Description of Artificial Sequence: Synthetic oligonucleotide
  Antisense strand to SEQ ID NO: 1149364
uaauaugcaccagaagcua

SEQ ID NO: 1149366 - RNA, 19 nt, Artificial Sequence
  Description of Artificial Sequence: Synthetic oligonucleotide
  Sense strand starting at position 3081 of SEQ ID NO: 916345
gcuucuggugcauauuaga

SEQ ID NO: 1149367 - RNA, 19 nt, Artificial Sequence
  Description of Artificial Sequence: Synthetic oligonucleotide
  Antisense strand to SEQ ID NO: 1149366
ucuaauaugcaccagaagc

SEQ ID NO: 1149368 - RNA, 19 nt, Artificial Sequence
  Description of Artificial Sequence: Synthetic oligonucleotide
  Sense strand starting at position 3089 of SEQ ID NO: 916345
ugcauauuagaucauuagu

SEQ ID NO: 1149369 - RNA, 19 nt, Artificial Sequence
  Description of Artificial Sequence: Synthetic oligonucleotide
  Antisense strand to SEQ ID NO: 1149368
acuaaugaucuaauaugca

SEQ ID NO: 1149370 - RNA, 19 nt, Artificial Sequence
  Description of Artificial Sequence: Synthetic oligonucleotide
  Sense strand starting at position 3094 of SEQ ID NO: 916345
auuagaucauuaguaugca

SEQ ID NO: 1149371 - RNA, 19 nt, Artificial Sequence
  Description of Artificial Sequence: Synthetic oligonucleotide
  Antisense strand to SEQ ID NO: 1149370
ugcauacuaaugaucuaau

SEQ ID NO: 1149372 - RNA, 19 nt, Artificial Sequence
  Description of Artificial Sequence: Synthetic oligonucleotide
  Sense strand starting at position 3121 of SEQ ID NO: 916345
gguuaaugaugagaaugac

SEQ ID NO: 1149373 - RNA, 19 nt, Artificial Sequence
  Description of Artificial Sequence: Synthetic oligonucleotide
  Antisense strand to SEQ ID NO: 1149372
gucauucucaucauuaacc

SEQ ID NO: 1149374 - RNA, 19 nt, Artificial Sequence
  Description of Artificial Sequence: Synthetic oligonucleotide
  Sense strand starting at position 3127 of SEQ ID NO: 916345
ugaugagaaugacacauaa

SEQ ID NO: 1149375 - RNA, 19 nt, Artificial Sequence
  Description of Artificial Sequence: Synthetic oligonucleotide
  Antisense strand to SEQ ID NO: 1149374
uuaugugucauucucauca

SEQ ID NO: 1149376 - RNA, 19 nt, Artificial Sequence
  Description of Artificial Sequence: Synthetic oligonucleotide
  Sense strand starting at position 3140 of SEQ ID NO: 916345
acauaaaggugcucucaaa

SEQ ID NO: 1149377 - RNA, 19 nt, Artificial Sequence
  Description of Artificial Sequence: Synthetic oligonucleotide
  Antisense strand to SEQ ID NO: 1149376
uuugagagcaccuuuaugu

SEQ ID NO: 1149378 - RNA, 19 nt, Artificial Sequence
  Description of Artificial Sequence: Synthetic oligonucleotide
  Sense strand starting at position 3161 of SEQ ID NO: 916345
acaggaugcaucugagagu

SEQ ID NO: 1149379 - RNA, 19 nt, Artificial Sequence
  Description of Artificial Sequence: Synthetic oligonucleotide
  Antisense strand to SEQ ID NO: 1149378
acucucagaugcauccugu

SEQ ID NO: 1149380 - RNA, 19 nt, Artificial Sequence
  Description of Artificial Sequence: Synthetic oligonucleotide
  Sense strand starting at position 3170 of SEQ ID NO: 916345
aucugagaguucuuuguau

SEQ ID NO: 1149381 - RNA, 19 nt, Artificial Sequence
  Description of Artificial Sequence: Synthetic oligonucleotide
  Antisense strand to SEQ ID NO: 1149380
auacaaagaacucucagau

SEQ ID NO: 1149382 - RNA, 19 nt, Artificial Sequence
  Description of Artificial Sequence: Synthetic oligonucleotide
  Sense strand starting at position 3172 of SEQ ID NO: 916345
cugagaguucuuuguauug

SEQ ID NO: 1149383 - RNA, 19 nt, Artificial Sequence
  Description of Artificial Sequence: Synthetic oligonucleotide
  Antisense strand to SEQ ID NO: 1149382
caauacaaagaacucucag

SEQ ID NO: 1149384 - RNA, 19 nt, Artificial Sequence
  Description of Artificial Sequence: Synthetic oligonucleotide
  Sense strand starting at position 3181 of SEQ ID NO: 916345
cuuuguauugcacggagua

SEQ ID NO: 1149385 - RNA, 19 nt, Artificial Sequence
  Description of Artificial Sequence: Synthetic oligonucleotide
  Antisense strand to SEQ ID NO: 1149384
uacuccgugcaauacaaag

SEQ ID NO: 1149386 - RNA, 19 nt, Artificial Sequence
  Description of Artificial Sequence: Synthetic oligonucleotide
  Sense strand starting at position 3183 of SEQ ID NO: 916345
uuguauugcacggaguauu

SEQ ID NO: 1149387 - RNA, 19 nt, Artificial Sequence
  Description of Artificial Sequence: Synthetic oligonucleotide
  Antisense strand to SEQ ID NO: 1149386
aauacuccgugcaauacaa

SEQ ID NO: 1149388 - RNA, 19 nt, Artificial Sequence
  Description of Artificial Sequence: Synthetic oligonucleotide
  Sense strand starting at position 3212 of SEQ ID NO: 916345
agugguucucagcagcauu

SEQ ID NO: 1149389 - RNA, 19 nt, Artificial Sequence
  Description of Artificial Sequence: Synthetic oligonucleotide
  Antisense strand to SEQ ID NO: 1149388
aaugcugcugagaaccacu

SEQ ID NO: 1149390 - RNA, 19 nt, Artificial Sequence
  Description of Artificial Sequence: Synthetic oligonucleotide
  Sense strand starting at position 3271 of SEQ ID NO: 916345
uggaugugucgggaaggga

SEQ ID NO: 1149391 - RNA, 19 nt, Artificial Sequence
  Description of Artificial Sequence: Synthetic oligonucleotide
  Antisense strand to SEQ ID NO: 1149390
ucccuucccgacacaucca

SEQ ID NO: 1149392 - RNA, 19 nt, Artificial Sequence
  Description of Artificial Sequence: Synthetic oligonucleotide
  Sense strand starting at position 3290 of SEQ ID NO: 916345
ucagguguugaguggguaa

SEQ ID NO: 1149393 - RNA, 19 nt, Artificial Sequence
  Description of Artificial Sequence: Synthetic oligonucleotide
  Antisense strand to SEQ ID NO: 1149392
uuacccacucaacaccuga

SEQ ID NO: 1149394 - RNA, 19 nt, Artificial Sequence
  Description of Artificial Sequence: Synthetic oligonucleotide
  Sense strand starting at position 3292 of SEQ ID NO: 916345
agguguugaguggguaaga

SEQ ID NO: 1149395 - RNA, 19 nt, Artificial Sequence
  Description of Artificial Sequence: Synthetic oligonucleotide
  Antisense strand to SEQ ID NO: 1149394
ucuuacccacucaacaccu

SEQ ID NO: 1149396 - RNA, 19 nt, Artificial Sequence
  Description of Artificial Sequence: Synthetic oligonucleotide
  Sense strand starting at position 3293 of SEQ ID NO: 916345
gguguugaguggguaagaa

SEQ ID NO: 1149397 - RNA, 19 nt, Artificial Sequence
  Description of Artificial Sequence: Synthetic oligonucleotide
  Antisense strand to SEQ ID NO: 1149396
uucuuacccacucaacacc

SEQ ID NO: 1149398 - RNA, 19 nt, Artificial Sequence
  Description of Artificial Sequence: Synthetic oligonucleotide
  Sense strand starting at position 3301 of SEQ ID NO: 916345
guggguaagaaaugugcua

SEQ ID NO: 1149399 - RNA, 19 nt, Artificial Sequence
  Description of Artificial Sequence: Synthetic oligonucleotide
  Antisense strand to SEQ ID NO: 1149398
uagcacauuucuuacccac

SEQ ID NO: 1149400 - RNA, 19 nt, Artificial Sequence
  Description of Artificial Sequence: Synthetic oligonucleotide
  Sense strand starting at position 3303 of SEQ ID NO: 916345
ggguaagaaaugugcuagu

SEQ ID NO: 1149401 - RNA, 19 nt, Artificial Sequence
  Description of Artificial Sequence: Synthetic oligonucleotide
  Antisense strand to SEQ ID NO: 1149400
acuagcacauuucuuaccc

SEQ ID NO: 1149402 - RNA, 19 nt, Artificial Sequence
  Description of Artificial Sequence: Synthetic oligonucleotide
  Sense strand starting at position 3411 of SEQ ID NO: 916345
gcugauuucuggcaccaac

SEQ ID NO: 1149403 - RNA, 19 nt, Artificial Sequence
  Description of Artificial Sequence: Synthetic oligonucleotide
  Antisense strand to SEQ ID NO: 1149402
guuggugccagaaaucagc

SEQ ID NO: 1149404 - RNA, 19 nt, Artificial Sequence
  Description of Artificial Sequence: Synthetic oligonucleotide
  Sense strand starting at position 3759 of SEQ ID NO: 916345
gaaaguuaagccuagcuag

SEQ ID NO: 1149405 - RNA, 19 nt, Artificial Sequence
  Description of Artificial Sequence: Synthetic oligonucleotide
  Antisense strand to SEQ ID NO: 1149404
cuagcuaggcuuaacuuuc

SEQ ID NO: 1149406 - RNA, 19 nt, Artificial Sequence
  Description of Artificial Sequence: Synthetic oligonucleotide
  Sense strand starting at position 3790 of SEQ ID NO: 916345
ucagaaagguccuuaguuc

SEQ ID NO: 1149407 - RNA, 19 nt, Artificial Sequence
  Description of Artificial Sequence: Synthetic oligonucleotide
  Antisense strand to SEQ ID NO: 1149406
gaacuaaggaccuuucuga

SEQ ID NO: 1149408 - RNA, 19 nt, Artificial Sequence
  Description of Artificial Sequence: Synthetic oligonucleotide
  Sense strand starting at position 3791 of SEQ ID NO: 916345
cagaaagguccuuaguucu

SEQ ID NO: 1149409 - RNA, 19 nt, Artificial Sequence
  Description of Artificial Sequence: Synthetic oligonucleotide
  Antisense strand to SEQ ID NO: 1149408
agaacuaaggaccuuucug

SEQ ID NO: 1149410 - RNA, 19 nt, Artificial Sequence
  Description of Artificial Sequence: Synthetic oligonucleotide
  Sense strand starting at position 3797 of SEQ ID NO: 916345
gguccuuaguucucuaaag

SEQ ID NO: 1149411 - RNA, 19 nt, Artificial Sequence
  Description of Artificial Sequence: Synthetic oligonucleotide
  Antisense strand to SEQ ID NO: 1149410
cuuuagagaacuaaggacc

SEQ ID NO: 1149412 - RNA, 19 nt, Artificial Sequence
  Description of Artificial Sequence: Synthetic oligonucleotide
  Sense strand starting at position 3798 of SEQ ID NO: 916345
guccuuaguucucuaaagc

SEQ ID NO: 1149413 - RNA, 19 nt, Artificial Sequence
  Description of Artificial Sequence: Synthetic oligonucleotide
  Antisense strand to SEQ ID NO: 1149412
gcuuuagagaacuaaggac

SEQ ID NO: 1149414 - RNA, 19 nt, Artificial Sequence
  Description of Artificial Sequence: Synthetic oligonucleotide
  Sense strand starting at position 3821 of SEQ ID NO: 916345
gguuaauuaauuugugguu

SEQ ID NO: 1149415 - RNA, 19 nt, Artificial Sequence
  Description of Artificial Sequence: Synthetic oligonucleotide
  Antisense strand to SEQ ID NO: 1149414
aaccacaaauuaauuaacc

SEQ ID NO: 1149416 - RNA, 19 nt, Artificial Sequence
  Description of Artificial Sequence: Synthetic oligonucleotide
  Sense strand starting at position 3874 of SEQ ID NO: 916345
ggaguuacagcuugaguaa

SEQ ID NO: 1149417 - RNA, 19 nt, Artificial Sequence
  Description of Artificial Sequence: Synthetic oligonucleotide
  Antisense strand to SEQ ID NO: 1149416
uuacucaagcuguaacucc

SEQ ID NO: 1149418 - RNA, 19 nt, Artificial Sequence
  Description of Artificial Sequence: Synthetic oligonucleotide
  Sense strand starting at position 3875 of SEQ ID NO: 916345
gaguuacagcuugaguaaa

SEQ ID NO: 1149419 - RNA, 19 nt, Artificial Sequence
  Description of Artificial Sequence: Synthetic oligonucleotide
  Antisense strand to SEQ ID NO: 1149418
uuuacucaagcuguaacuc

SEQ ID NO: 1149420 - RNA, 19 nt, Artificial Sequence
  Description of Artificial Sequence: Synthetic oligonucleotide
  Sense strand starting at position 275 of SEQ ID NO: 916346
cgccgaguuaaagaucuua

SEQ ID NO: 1149421 - RNA, 19 nt, Artificial Sequence
  Description of Artificial Sequence: Synthetic oligonucleotide
  Antisense strand to SEQ ID NO: 1149420
uaagaucuuuaacucggcg

SEQ ID NO: 1149422 - RNA, 19 nt, Artificial Sequence
  Description of Artificial Sequence: Synthetic oligonucleotide
  Sense strand starting at position 283 of SEQ ID NO: 916346
uaaagaucuuagccgucaa

SEQ ID NO: 1149423 - RNA, 19 nt, Artificial Sequence
  Description of Artificial Sequence: Synthetic oligonucleotide
  Antisense strand to SEQ ID NO: 1149422
uugacggcuaagaucuuua

SEQ ID NO: 1149424 - RNA, 19 nt, Artificial Sequence
  Description of Artificial Sequence: Synthetic oligonucleotide
  Sense strand starting at position 287 of SEQ ID NO: 916346
gaucuuagccgucaaagac

SEQ ID NO: 1149425 - RNA, 19 nt, Artificial Sequence
  Description of Artificial Sequence: Synthetic oligonucleotide
  Antisense strand to SEQ ID NO: 1149424
gucuuugacggcuaagauc

SEQ ID NO: 1149426 - RNA, 19 nt, Artificial Sequence
  Description of Artificial Sequence: Synthetic oligonucleotide
  Sense strand starting at position 920 of SEQ ID NO: 916346
ugagcaaccuguucuagga

SEQ ID NO: 1149427 - RNA, 19 nt, Artificial Sequence
  Description of Artificial Sequence: Synthetic oligonucleotide
  Antisense strand to SEQ ID NO: 1149426
uccuagaacagguugcuca

SEQ ID NO: 1149428 - RNA, 19 nt, Artificial Sequence
  Description of Artificial Sequence: Synthetic oligonucleotide
  Sense strand starting at position 1022 of SEQ ID NO: 916346
cuaggagaccucugacuua

SEQ ID NO: 1149429 - RNA, 19 nt, Artificial Sequence
  Description of Artificial Sequence: Synthetic oligonucleotide
  Antisense strand to SEQ ID NO: 1149428
uaagucagaggucuccuag

SEQ ID NO: 1149430 - RNA, 19 nt, Artificial Sequence
  Description of Artificial Sequence: Synthetic oligonucleotide
  Sense strand starting at position 1270 of SEQ ID NO: 916346
cugggucccugagcugaaa

SEQ ID NO: 1149431 - RNA, 19 nt, Artificial Sequence
  Description of Artificial Sequence: Synthetic oligonucleotide
  Antisense strand to SEQ ID NO: 1149430
uuucagcucagggacccag

SEQ ID NO: 1149432 - RNA, 19 nt, Artificial Sequence
  Description of Artificial Sequence: Synthetic oligonucleotide
  Sense strand starting at position 1404 of SEQ ID NO: 916346
augcccuuuccaggaaauc

SEQ ID NO: 1149433 - RNA, 19 nt, Artificial Sequence
  Description of Artificial Sequence: Synthetic oligonucleotide
  Antisense strand to SEQ ID NO: 1149432
gauuuccuggaaagggcau

SEQ ID NO: 1149434 - RNA, 19 nt, Artificial Sequence
  Description of Artificial Sequence: Synthetic oligonucleotide
  Sense strand starting at position 1589 of SEQ ID NO: 916346
uccggauucaggugguuga

SEQ ID NO: 1149435 - RNA, 19 nt, Artificial Sequence
  Description of Artificial Sequence: Synthetic oligonucleotide
  Antisense strand to SEQ ID NO: 1149434
ucaaccaccugaauccgga

SEQ ID NO: 1149436 - RNA, 19 nt, Artificial Sequence
  Description of Artificial Sequence: Synthetic oligonucleotide
  Sense strand starting at position 1677 of SEQ ID NO: 916346
uucugugaucugcggauuu

SEQ ID NO: 1149437 - RNA, 19 nt, Artificial Sequence
  Description of Artificial Sequence: Synthetic oligonucleotide
  Antisense strand to SEQ ID NO: 1149436
aaauccgcagaucacagaa

SEQ ID NO: 1149438 - RNA, 19 nt, Artificial Sequence
  Description of Artificial Sequence: Synthetic oligonucleotide
  Sense strand starting at position 1882 of SEQ ID NO: 916346
cggauuccaucugcagauu

SEQ ID NO: 1149439 - RNA, 19 nt, Artificial Sequence
  Description of Artificial Sequence: Synthetic oligonucleotide
  Antisense strand to SEQ ID NO: 1149438
aaucugcagauggaauccg

SEQ ID NO: 1149440 - RNA, 19 nt, Artificial Sequence
  Description of Artificial Sequence: Synthetic oligonucleotide
  Sense strand starting at position 2015 of SEQ ID NO: 916346
ggagaagcuauguguacca

SEQ ID NO: 1149441 - RNA, 19 nt, Artificial Sequence
  Description of Artificial Sequence: Synthetic oligonucleotide
  Antisense strand to SEQ ID NO: 1149440
ugguacacauagcuucucc

SEQ ID NO: 1149442 - RNA, 19 nt, Artificial Sequence
  Description of Artificial Sequence: Synthetic oligonucleotide
  Sense strand starting at position 2230 of SEQ ID NO: 916346
ggucuacuaacaggugaca

SEQ ID NO: 1149443 - RNA, 19 nt, Artificial Sequence
  Description of Artificial Sequence: Synthetic oligonucleotide
  Antisense strand to SEQ ID NO: 1149442
ugucaccuguuaguagacc

SEQ ID NO: 1149444 - RNA, 19 nt, Artificial Sequence
  Description of Artificial Sequence: Synthetic oligonucleotide
  Sense strand starting at position 2357 of SEQ ID NO: 916346
aaguuuaucccaggaagau

SEQ ID NO: 1149445 - RNA, 19 nt, Artificial Sequence
  Description of Artificial Sequence: Synthetic oligonucleotide
  Antisense strand to SEQ ID NO: 1149444
aucuuccugggauaaacuu

SEQ ID NO: 1149446 - RNA, 19 nt, Artificial Sequence
  Description of Artificial Sequence: Synthetic oligonucleotide
  Sense strand starting at position 2369 of SEQ ID NO: 916346
ggaagauagugcuuuacaa

SEQ ID NO: 1149447 - RNA, 19 nt, Artificial Sequence
  Description of Artificial Sequence: Synthetic oligonucleotide
  Antisense strand to SEQ ID NO: 1149446
uuguaaagcacuaucuucc

SEQ ID NO: 1149448 - RNA, 19 nt, Artificial Sequence
  Description of Artificial Sequence: Synthetic oligonucleotide
  Sense strand starting at position 2552 of SEQ ID NO: 916346
guggcuuaacagcagaaau

SEQ ID NO: 1149449 - RNA, 19 nt, Artificial Sequence
  Description of Artificial Sequence: Synthetic oligonucleotide
  Antisense strand to SEQ ID NO: 1149448
auuucugcuguuaagccac

SEQ ID NO: 1149450 - RNA, 19 nt, Artificial Sequence
  Description of Artificial Sequence: Synthetic oligonucleotide
  Sense strand starting at position 2554 of SEQ ID NO: 916346
ggcuuaacagcagaaaugu

SEQ ID NO: 1149451 - RNA, 19 nt, Artificial Sequence
  Description of Artificial Sequence: Synthetic oligonucleotide
  Antisense strand to SEQ ID NO: 1149450
acauuucugcuguuaagcc

SEQ ID NO: 1149452 - RNA, 19 nt, Artificial Sequence
  Description of Artificial Sequence: Synthetic oligonucleotide
  Sense strand starting at position 2649 of SEQ ID NO: 916346
ggaagaauauguuccaguc

SEQ ID NO: 1149453 - RNA, 19 nt, Artificial Sequence
  Description of Artificial Sequence: Synthetic oligonucleotide
  Antisense strand to SEQ ID NO: 1149452
gacuggaacauauucuucc

SEQ ID NO: 1149454 - RNA, 19 nt, Artificial Sequence
  Description of Artificial Sequence: Synthetic oligonucleotide
  Sense strand starting at position 2739 of SEQ ID NO: 916346
ugucucuguguccaaacau

SEQ ID NO: 1149455 - RNA, 19 nt, Artificial Sequence
  Description of Artificial Sequence: Synthetic oligonucleotide
  Antisense strand to SEQ ID NO: 1149454
auguuuggacacagagaca

SEQ ID NO: 1149456 - RNA, 19 nt, Artificial Sequence
  Description of Artificial Sequence: Synthetic oligonucleotide
  Sense strand starting at position 2999 of SEQ ID NO: 916346
gugcauauuccaugaaaga

SEQ ID NO: 1149457 - RNA, 19 nt, Artificial Sequence
  Description of Artificial Sequence: Synthetic oligonucleotide
  Antisense strand to SEQ ID NO: 1149456
ucuuucauggaauaugcac

SEQ ID NO: 1149458 - RNA, 19 nt, Artificial Sequence
  Description of Artificial Sequence: Synthetic oligonucleotide
  Sense strand starting at position 3107 of SEQ ID NO: 916346
acaggcauaguuuguuaga

SEQ ID NO: 1149459 - RNA, 19 nt, Artificial Sequence
  Description of Artificial Sequence: Synthetic oligonucleotide
  Antisense strand to SEQ ID NO: 1149458
ucuaacaaacuaugccugu

SEQ ID NO: 1149460 - RNA, 19 nt, Artificial Sequence
  Description of Artificial Sequence: Synthetic oligonucleotide
  Sense strand starting at position 3108 of SEQ ID NO: 916346
caggcauaguuuguuagaa

SEQ ID NO: 1149461 - RNA, 19 nt, Artificial Sequence
  Description of Artificial Sequence: Synthetic oligonucleotide
  Antisense strand to SEQ ID NO: 1149460
uucuaacaaacuaugccug

SEQ ID NO: 1149462 - RNA, 19 nt, Artificial Sequence
  Description of Artificial Sequence: Synthetic oligonucleotide
  Sense strand starting at position 3109 of SEQ ID NO: 916346
aggcauaguuuguuagaau

SEQ ID NO: 1149463 - RNA, 19 nt, Artificial Sequence
  Description of Artificial Sequence: Synthetic oligonucleotide
  Antisense strand to SEQ ID NO: 1149462
auucuaacaaacuaugccu

SEQ ID NO: 1149464 - RNA, 19 nt, Artificial Sequence
  Description of Artificial Sequence: Synthetic oligonucleotide
  Sense strand starting at position 3116 of SEQ ID NO: 916346
guuuguuagaauugaaguc

SEQ ID NO: 1149465 - RNA, 19 nt, Artificial Sequence
  Description of Artificial Sequence: Synthetic oligonucleotide
  Antisense strand to SEQ ID NO: 1149464
gacuucaauucuaacaaac

SEQ ID NO: 1149466 - RNA, 19 nt, Artificial Sequence
  Description of Artificial Sequence: Synthetic oligonucleotide
  Sense strand starting at position 3153 of SEQ ID NO: 916346
ccagguccucuguggaaga

SEQ ID NO: 1149467 - RNA, 19 nt, Artificial Sequence
  Description of Artificial Sequence: Synthetic oligonucleotide
  Antisense strand to SEQ ID NO: 1149466
ucuuccacagaggaccugg

SEQ ID NO: 1149468 - RNA, 19 nt, Artificial Sequence
  Description of Artificial Sequence: Synthetic oligonucleotide
  Sense strand starting at position 3172 of SEQ ID NO: 916346
agauuucuuugauaaacag

SEQ ID NO: 1149469 - RNA, 19 nt, Artificial Sequence
  Description of Artificial Sequence: Synthetic oligonucleotide
  Antisense strand to SEQ ID NO: 1149468
cuguuuaucaaagaaaucu

SEQ ID NO: 1149470 - RNA, 19 nt, Artificial Sequence
  Description of Artificial Sequence: Synthetic oligonucleotide
  Sense strand starting at position 3199 of SEQ ID NO: 916346
augauacuauggcuuagaa

SEQ ID NO: 1149471 - RNA, 19 nt, Artificial Sequence
  Description of Artificial Sequence: Synthetic oligonucleotide
  Antisense strand to SEQ ID NO: 1149470
uucuaagccauaguaucau

SEQ ID NO: 1149472 - RNA, 19 nt, Artificial Sequence
  Description of Artificial Sequence: Synthetic oligonucleotide
  Sense strand starting at position 3266 of SEQ ID NO: 916346
agugauaagacagguagua

SEQ ID NO: 1149473 - RNA, 19 nt, Artificial Sequence
  Description of Artificial Sequence: Synthetic oligonucleotide
  Antisense strand to SEQ ID NO: 1149472
uacuaccugucuuaucacu

SEQ ID NO: 1149474 - RNA, 19 nt, Artificial Sequence
  Description of Artificial Sequence: Synthetic oligonucleotide
  Sense strand starting at position 3304 of SEQ ID NO: 916346
aaacgucuaucuguuauga

SEQ ID NO: 1149475 - RNA, 19 nt, Artificial Sequence
  Description of Artificial Sequence: Synthetic oligonucleotide
  Antisense strand to SEQ ID NO: 1149474
ucauaacagauagacguuu

SEQ ID NO: 1149476 - RNA, 19 nt, Artificial Sequence
  Description of Artificial Sequence: Synthetic oligonucleotide
  Sense strand starting at position 3357 of SEQ ID NO: 916346
aggucuuuggaaggucauu

SEQ ID NO: 1149477 - RNA, 19 nt, Artificial Sequence
  Description of Artificial Sequence: Synthetic oligonucleotide
  Antisense strand to SEQ ID NO: 1149476
aaugaccuuccaaagaccu

SEQ ID NO: 1149478 - RNA, 19 nt, Artificial Sequence
  Description of Artificial Sequence: Synthetic oligonucleotide
  Sense strand starting at position 3362 of SEQ ID NO: 916346
uuuggaaggucauugaugu

SEQ ID NO: 1149479 - RNA, 19 nt, Artificial Sequence
  Description of Artificial Sequence: Synthetic oligonucleotide
  Antisense strand to SEQ ID NO: 1149478
acaucaaugaccuuccaaa

SEQ ID NO: 1149480 - RNA, 19 nt, Artificial Sequence
  Description of Artificial Sequence: Synthetic oligonucleotide
  Sense strand starting at position 3369 of SEQ ID NO: 916346
ggucauugaugucuagaaa

SEQ ID NO: 1149481 - RNA, 19 nt, Artificial Sequence
  Description of Artificial Sequence: Synthetic oligonucleotide
  Antisense strand to SEQ ID NO: 1149480
uuucuagacaucaaugacc

SEQ ID NO: 1149482 - RNA, 19 nt, Artificial Sequence
  Description of Artificial Sequence: Synthetic oligonucleotide
  Sense strand starting at position 3441 of SEQ ID NO: 916346
uacaguaaauguguaaaga

SEQ ID NO: 1149483 - RNA, 19 nt, Artificial Sequence
  Description of Artificial Sequence: Synthetic oligonucleotide
  Antisense strand to SEQ ID NO: 1149482
ucuuuacacauuuacugua

SEQ ID NO: 1149484 - RNA, 19 nt, Artificial Sequence
  Description of Artificial Sequence: Synthetic oligonucleotide
  Sense strand starting at position 3458 of SEQ ID NO: 916346
gacaauguguacccagcau

SEQ ID NO: 1149485 - RNA, 19 nt, Artificial Sequence
  Description of Artificial Sequence: Synthetic oligonucleotide
  Antisense strand to SEQ ID NO: 1149484
augcuggguacacauuguc

SEQ ID NO: 1149486 - RNA, 19 nt, Artificial Sequence
  Description of Artificial Sequence: Synthetic oligonucleotide
  Sense strand starting at position 3545 of SEQ ID NO: 916346
auuaucaaucacugaggua

SEQ ID NO: 1149487 - RNA, 19 nt, Artificial Sequence
  Description of Artificial Sequence: Synthetic oligonucleotide
  Antisense strand to SEQ ID NO: 1149486
uaccucagugauugauaau

SEQ ID NO: 1149488 - RNA, 19 nt, Artificial Sequence
  Description of Artificial Sequence: Synthetic oligonucleotide
  Sense strand starting at position 3643 of SEQ ID NO: 916346
auucuuccauugucuagau

SEQ ID NO: 1149489 - RNA, 19 nt, Artificial Sequence
  Description of Artificial Sequence: Synthetic oligonucleotide
  Antisense strand to SEQ ID NO: 1149488
aucuagacaauggaagaau

SEQ ID NO: 1149490 - RNA, 19 nt, Artificial Sequence
  Description of Artificial Sequence: Synthetic oligonucleotide
  Sense strand starting at position 3647 of SEQ ID NO: 916346
uuccauugucuagauggua

SEQ ID NO: 1149491 - RNA, 19 nt, Artificial Sequence
  Description of Artificial Sequence: Synthetic oligonucleotide
  Antisense strand to SEQ ID NO: 1149490
uaccaucuagacaauggaa

SEQ ID NO: 1149492 - RNA, 19 nt, Artificial Sequence
  Description of Artificial Sequence: Synthetic oligonucleotide
  Sense strand starting at position 3708 of SEQ ID NO: 916346
ugugguuugcuuuagaaua

SEQ ID NO: 1149493 - RNA, 19 nt, Artificial Sequence
  Description of Artificial Sequence: Synthetic oligonucleotide
  Antisense strand to SEQ ID NO: 1149492
uauucuaaagcaaaccaca

SEQ ID NO: 1149494 - RNA, 19 nt, Artificial Sequence
  Description of Artificial Sequence: Synthetic oligonucleotide
  Sense strand starting at position 3768 of SEQ ID NO: 916346
gguauuuacugagauccua

SEQ ID NO: 1149495 - RNA, 19 nt, Artificial Sequence
  Description of Artificial Sequence: Synthetic oligonucleotide
  Antisense strand to SEQ ID NO: 1149494
uaggaucucaguaaauacc

SEQ ID NO: 1149496 - RNA, 19 nt, Artificial Sequence
  Description of Artificial Sequence: Synthetic oligonucleotide
  Sense strand starting at position 3848 of SEQ ID NO: 916346
auuaaauugcaagacugua

SEQ ID NO: 1149497 - RNA, 19 nt, Artificial Sequence
  Description of Artificial Sequence: Synthetic oligonucleotide
  Antisense strand to SEQ ID NO: 1149496
uacagucuugcaauuuaau

SEQ ID NO: 1149498 - RNA, 19 nt, Artificial Sequence
  Description of Artificial Sequence: Synthetic oligonucleotide
  Sense strand starting at position 3877 of SEQ ID NO: 916346
ucauacagaugauaggaau

SEQ ID NO: 1149499 - RNA, 19 nt, Artificial Sequence
  Description of Artificial Sequence: Synthetic oligonucleotide
  Antisense strand to SEQ ID NO: 1149498
auuccuaucaucuguauga

SEQ ID NO: 1149500 - RNA, 19 nt, Artificial Sequence
  Description of Artificial Sequence: Synthetic oligonucleotide
  Sense strand starting at position 248 of SEQ ID NO: 916347
cgaaguuacugucugcaag

SEQ ID NO: 1149501 - RNA, 19 nt, Artificial Sequence
  Description of Artificial Sequence: Synthetic oligonucleotide
  Antisense strand to SEQ ID NO: 1149500
cuugcagacaguaacuucg

SEQ ID NO: 1149502 - RNA, 19 nt, Artificial Sequence
  Description of Artificial Sequence: Synthetic oligonucleotide
  Sense strand starting at position 249 of SEQ ID NO: 916347
gaaguuacugucugcaaga

SEQ ID NO: 1149503 - RNA, 19 nt, Artificial Sequence
  Description of Artificial Sequence: Synthetic oligonucleotide
  Antisense strand to SEQ ID NO: 1149502
ucuugcagacaguaacuuc

SEQ ID NO: 1149504 - RNA, 19 nt, Artificial Sequence
  Description of Artificial Sequence: Synthetic oligonucleotide
  Sense strand starting at position 250 of SEQ ID NO: 916347
aaguuacugucugcaagag

SEQ ID NO: 1149505 - RNA, 19 nt, Artificial Sequence
  Description of Artificial Sequence: Synthetic oligonucleotide
  Antisense strand to SEQ ID NO: 1149504
cucuugcagacaguaacuu

SEQ ID NO: 1149506 - RNA, 19 nt, Artificial Sequence
  Description of Artificial Sequence: Synthetic oligonucleotide
  Sense strand starting at position 251 of SEQ ID NO: 916347
aguuacugucugcaagaga

SEQ ID NO: 1149507 - RNA, 19 nt, Artificial Sequence
  Description of Artificial Sequence: Synthetic oligonucleotide
  Antisense strand to SEQ ID NO: 1149506
ucucuugcagacaguaacu

SEQ ID NO: 1149508 - RNA, 19 nt, Artificial Sequence
  Description of Artificial Sequence: Synthetic oligonucleotide
  Sense strand starting at position 266 of SEQ ID NO: 916347
gagagcacuucucagagga

SEQ ID NO: 1149509 - RNA, 19 nt, Artificial Sequence
  Description of Artificial Sequence: Synthetic oligonucleotide
  Antisense strand to SEQ ID NO: 1149508
uccucugagaagugcucuc

SEQ ID NO: 1149510 - RNA, 19 nt, Artificial Sequence
  Description of Artificial Sequence: Synthetic oligonucleotide
  Sense strand starting at position 364 of SEQ ID NO: 916347
ccaggaauccugcgugugu

SEQ ID NO: 1149511 - RNA, 19 nt, Artificial Sequence
  Description of Artificial Sequence: Synthetic oligonucleotide
  Antisense strand to SEQ ID NO: 1149510
acacacgcaggauuccugg

SEQ ID NO: 1149512 - RNA, 19 nt, Artificial Sequence
  Description of Artificial Sequence: Synthetic oligonucleotide
  Sense strand starting at position 365 of SEQ ID NO: 916347
caggaauccugcguguguu

SEQ ID NO: 1149513 - RNA, 19 nt, Artificial Sequence
  Description of Artificial Sequence: Synthetic oligonucleotide
  Antisense strand to SEQ ID NO: 1149512
aacacacgcaggauuccug

SEQ ID NO: 1149514 - RNA, 19 nt, Artificial Sequence
  Description of Artificial Sequence: Synthetic oligonucleotide
  Sense strand starting at position 366 of SEQ ID NO: 916347
aggaauccugcguguguua

SEQ ID NO: 1149515 - RNA, 19 nt, Artificial Sequence
  Description of Artificial Sequence: Synthetic oligonucleotide
  Antisense strand to SEQ ID NO: 1149514
uaacacacgcaggauuccu

SEQ ID NO: 1149516 - RNA, 19 nt, Artificial Sequence
  Description of Artificial Sequence: Synthetic oligonucleotide
  Sense strand starting at position 368 of SEQ ID NO: 916347
gaauccugcguguguuaag

SEQ ID NO: 1149517 - RNA, 19 nt, Artificial Sequence
  Description of Artificial Sequence: Synthetic oligonucleotide
  Antisense strand to SEQ ID NO: 1149516
cuuaacacacgcaggauuc

SEQ ID NO: 1149518 - RNA, 19 nt, Artificial Sequence
  Description of Artificial Sequence: Synthetic oligonucleotide
  Sense strand starting at position 392 of SEQ ID NO: 916347
gcuguuuaugaauagcaau

SEQ ID NO: 1149519 - RNA, 19 nt, Artificial Sequence
  Description of Artificial Sequence: Synthetic oligonucleotide
  Antisense strand to SEQ ID NO: 1149518
auugcuauucauaaacagc

SEQ ID NO: 1149520 - RNA, 19 nt, Artificial Sequence
  Description of Artificial Sequence: Synthetic oligonucleotide
  Sense strand starting at position 415 of SEQ ID NO: 916347
gugugucaccuguuuguca

SEQ ID NO: 1149521 - RNA, 19 nt, Artificial Sequence
  Description of Artificial Sequence: Synthetic oligonucleotide
  Antisense strand to SEQ ID NO: 1149520
ugacaaacaggugacacac

SEQ ID NO: 1149522 - RNA, 19 nt, Artificial Sequence
  Description of Artificial Sequence: Synthetic oligonucleotide
  Sense strand starting at position 417 of SEQ ID NO: 916347
gugucaccuguuugucagu

SEQ ID NO: 1149523 - RNA, 19 nt, Artificial Sequence
  Description of Artificial Sequence: Synthetic oligonucleotide
  Antisense strand to SEQ ID NO: 1149522
acugacaaacaggugacac

SEQ ID NO: 1149524 - RNA, 19 nt, Artificial Sequence
  Description of Artificial Sequence: Synthetic oligonucleotide
  Sense strand starting at position 477 of SEQ ID NO: 916347
ugaacugaggucggugaau

SEQ ID NO: 1149525 - RNA, 19 nt, Artificial Sequence
  Description of Artificial Sequence: Synthetic oligonucleotide
  Antisense strand to SEQ ID NO: 1149524
auucaccgaccucaguuca

SEQ ID NO: 1149526 - RNA, 19 nt, Artificial Sequence
  Description of Artificial Sequence: Synthetic oligonucleotide
  Sense strand starting at position 479 of SEQ ID NO: 916347
aacugaggucggugaauga

SEQ ID NO: 1149527 - RNA, 19 nt, Artificial Sequence
  Description of Artificial Sequence: Synthetic oligonucleotide
  Antisense strand to SEQ ID NO: 1149526
ucauucaccgaccucaguu

SEQ ID NO: 1149528 - RNA, 19 nt, Artificial Sequence
  Description of Artificial Sequence: Synthetic oligonucleotide
  Sense strand starting at position 668 of SEQ ID NO: 916347
ggcuucucccacugagaca

SEQ ID NO: 1149529 - RNA, 19 nt, Artificial Sequence
  Description of Artificial Sequence: Synthetic oligonucleotide
  Antisense strand to SEQ ID NO: 1149528
ugucucagugggagaagcc

SEQ ID NO: 1149530 - RNA, 19 nt, Artificial Sequence
  Description of Artificial Sequence: Synthetic oligonucleotide
  Sense strand starting at position 765 of SEQ ID NO: 916347
ggaauuagugaaugugauc

SEQ ID NO: 1149531 - RNA, 19 nt, Artificial Sequence
  Description of Artificial Sequence: Synthetic oligonucleotide
  Antisense strand to SEQ ID NO: 1149530
gaucacauucacuaauucc

SEQ ID NO: 1149532 - RNA, 19 nt, Artificial Sequence
  Description of Artificial Sequence: Synthetic oligonucleotide
  Sense strand starting at position 768 of SEQ ID NO: 916347
auuagugaaugugaucaag

SEQ ID NO: 1149533 - RNA, 19 nt, Artificial Sequence
  Description of Artificial Sequence: Synthetic oligonucleotide
  Antisense strand to SEQ ID NO: 1149532
cuugaucacauucacuaau

SEQ ID NO: 1149534 - RNA, 19 nt, Artificial Sequence
  Description of Artificial Sequence: Synthetic oligonucleotide
  Sense strand starting at position 770 of SEQ ID NO: 916347
uagugaaugugaucaagaa

SEQ ID NO: 1149535 - RNA, 19 nt, Artificial Sequence
  Description of Artificial Sequence: Synthetic oligonucleotide
  Antisense strand to SEQ ID NO: 1149534
uucuugaucacauucacua

SEQ ID NO: 1149536 - RNA, 19 nt, Artificial Sequence
  Description of Artificial Sequence: Synthetic oligonucleotide
  Sense strand starting at position 792 of SEQ ID NO: 916347
ggguguaagaauggugacu

SEQ ID NO: 1149537 - RNA, 19 nt, Artificial Sequence
  Description of Artificial Sequence: Synthetic oligonucleotide
  Antisense strand to SEQ ID NO: 1149536
agucaccauucuuacaccc

SEQ ID NO: 1149538 - RNA, 19 nt, Artificial Sequence
  Description of Artificial Sequence: Synthetic oligonucleotide
  Sense strand starting at position 794 of SEQ ID NO: 916347
guguaagaauggugacuga

SEQ ID NO: 1149539 - RNA, 19 nt, Artificial Sequence
  Description of Artificial Sequence: Synthetic oligonucleotide
  Antisense strand to SEQ ID NO: 1149538
ucagucaccauucuuacac

SEQ ID NO: 1149540 - RNA, 19 nt, Artificial Sequence
  Description of Artificial Sequence: Synthetic oligonucleotide
  Sense strand starting at position 1086 of SEQ ID NO: 916347
gggcgccuucuccaaacuu

SEQ ID NO: 1149541 - RNA, 19 nt, Artificial Sequence
  Description of Artificial Sequence: Synthetic oligonucleotide
  Antisense strand to SEQ ID NO: 1149540
aaguuuggagaaggcgccc

SEQ ID NO: 1149542 - RNA, 19 nt, Artificial Sequence
  Description of Artificial Sequence: Synthetic oligonucleotide
  Sense strand starting at position 1169 of SEQ ID NO: 916347
ggguucaggcuaugagaca

SEQ ID NO: 1149543 - RNA, 19 nt, Artificial Sequence
  Description of Artificial Sequence: Synthetic oligonucleotide
  Antisense strand to SEQ ID NO: 1149542
ugucucauagccugaaccc

SEQ ID NO: 1149544 - RNA, 19 nt, Artificial Sequence
  Description of Artificial Sequence: Synthetic oligonucleotide
  Sense strand starting at position 1226 of SEQ ID NO: 916347
acucuuaucuccguuugca

SEQ ID NO: 1149545 - RNA, 19 nt, Artificial Sequence
  Description of Artificial Sequence: Synthetic oligonucleotide
  Antisense strand to SEQ ID NO: 1149544
ugcaaacggagauaagagu

SEQ ID NO: 1149546 - RNA, 19 nt, Artificial Sequence
  Description of Artificial Sequence: Synthetic oligonucleotide
  Sense strand starting at position 1229 of SEQ ID NO: 916347
cuuaucuccguuugcaaau

SEQ ID NO: 1149547 - RNA, 19 nt, Artificial Sequence
  Description of Artificial Sequence: Synthetic oligonucleotide
  Antisense strand to SEQ ID NO: 1149546
auuugcaaacggagauaag

SEQ ID NO: 1149548 - RNA, 19 nt, Artificial Sequence
  Description of Artificial Sequence: Synthetic oligonucleotide
  Sense strand starting at position 2476 of SEQ ID NO: 916347
ggacgcaugcuguggaaga

SEQ ID NO: 1149549 - RNA, 19 nt, Artificial Sequence
  Description of Artificial Sequence: Synthetic oligonucleotide
  Antisense strand to SEQ ID NO: 1149548
ucuuccacagcaugcgucc

SEQ ID NO: 1149550 - RNA, 19 nt, Artificial Sequence
  Description of Artificial Sequence: Synthetic oligonucleotide
  Sense strand starting at position 2477 of SEQ ID NO: 916347
gacgcaugcuguggaagau

SEQ ID NO: 1149551 - RNA, 19 nt, Artificial Sequence
  Description of Artificial Sequence: Synthetic oligonucleotide
  Antisense strand to SEQ ID NO: 1149550
aucuuccacagcaugcguc

SEQ ID NO: 1149552 - RNA, 19 nt, Artificial Sequence
  Description of Artificial Sequence: Synthetic oligonucleotide
  Sense strand starting at position 2713 of SEQ ID NO: 916347
ugaggugucuccgcaagca

SEQ ID NO: 1149553 - RNA, 19 nt, Artificial Sequence
  Description of Artificial Sequence: Synthetic oligonucleotide
  Antisense strand to SEQ ID NO: 1149552
ugcuugcggagacaccuca

SEQ ID NO: 1149554 - RNA, 19 nt, Artificial Sequence
  Description of Artificial Sequence: Synthetic oligonucleotide
  Sense strand starting at position 2753 of SEQ ID NO: 916347
gguggguagcccuaggagu

SEQ ID NO: 1149555 - RNA, 19 nt, Artificial Sequence
  Description of Artificial Sequence: Synthetic oligonucleotide
  Antisense strand to SEQ ID NO: 1149554
acuccuagggcuacccacc

SEQ ID NO: 1149556 - RNA, 19 nt, Artificial Sequence
  Description of Artificial Sequence: Synthetic oligonucleotide
  Sense strand starting at position 2755 of SEQ ID NO: 916347
uggguagcccuaggaguaa

SEQ ID NO: 1149557 - RNA, 19 nt, Artificial Sequence
  Description of Artificial Sequence: Synthetic oligonucleotide
  Antisense strand to SEQ ID NO: 1149556
uuacuccuagggcuaccca

SEQ ID NO: 1149558 - RNA, 19 nt, Artificial Sequence
  Description of Artificial Sequence: Synthetic oligonucleotide
  Sense strand starting at position 3261 of SEQ ID NO: 916347
gcaauuuguucccuaacga

SEQ ID NO: 1149559 - RNA, 19 nt, Artificial Sequence
  Description of Artificial Sequence: Synthetic oligonucleotide
  Antisense strand to SEQ ID NO: 1149558
ucguuagggaacaaauugc

SEQ ID NO: 1149560 - RNA, 19 nt, Artificial Sequence
  Description of Artificial Sequence: Synthetic oligonucleotide
  Sense strand starting at position 3327 of SEQ ID NO: 916347
ucaccagcaucagaaagau

SEQ ID NO: 1149561 - RNA, 19 nt, Artificial Sequence
  Description of Artificial Sequence: Synthetic oligonucleotide
  Antisense strand to SEQ ID NO: 1149560
aucuuucugaugcugguga

SEQ ID NO: 1149562 - RNA, 19 nt, Artificial Sequence
  Description of Artificial Sequence: Synthetic oligonucleotide
  Sense strand starting at position 3508 of SEQ ID NO: 916347
gggagauccuacucccauc

SEQ ID NO: 1149563 - RNA, 19 nt, Artificial Sequence
  Description of Artificial Sequence: Synthetic oligonucleotide
  Antisense strand to SEQ ID NO: 1149562
gaugggaguaggaucuccc

SEQ ID NO: 1149564 - RNA, 19 nt, Artificial Sequence
  Description of Artificial Sequence: Synthetic oligonucleotide
  Sense strand starting at position 3542 of SEQ ID NO: 916347
gcuggauccuggcuguaaa

SEQ ID NO: 1149565 - RNA, 19 nt, Artificial Sequence
  Description of Artificial Sequence: Synthetic oligonucleotide
  Antisense strand to SEQ ID NO: 1149564
uuuacagccaggauccagc

SEQ ID NO: 1149566 - RNA, 19 nt, Artificial Sequence
  Description of Artificial Sequence: Synthetic oligonucleotide
  Sense strand starting at position 3545 of SEQ ID NO: 916347
ggauccuggcuguaaagua

SEQ ID NO: 1149567 - RNA, 19 nt, Artificial Sequence
  Description of Artificial Sequence: Synthetic oligonucleotide
  Antisense strand to SEQ ID NO: 1149566
uacuuuacagccaggaucc

SEQ ID NO: 1149568 - RNA, 19 nt, Artificial Sequence
  Description of Artificial Sequence: Synthetic oligonucleotide
  Sense strand starting at position 3604 of SEQ ID NO: 916347
cgguccagcugucuacuaa

SEQ ID NO: 1149569 - RNA, 19 nt, Artificial Sequence
  Description of Artificial Sequence: Synthetic oligonucleotide
  Antisense strand to SEQ ID NO: 1149568
uuaguagacagcuggaccg

SEQ ID NO: 1149570 - RNA, 19 nt, Artificial Sequence
  Description of Artificial Sequence: Synthetic oligonucleotide
  Sense strand starting at position 3605 of SEQ ID NO: 916347
gguccagcugucuacuaaa

SEQ ID NO: 1149571 - RNA, 19 nt, Artificial Sequence
  Description of Artificial Sequence: Synthetic oligonucleotide
  Antisense strand to SEQ ID NO: 1149570
uuuaguagacagcuggacc

SEQ ID NO: 1149572 - RNA, 19 nt, Artificial Sequence
  Description of Artificial Sequence: Synthetic oligonucleotide
  Sense strand starting at position 3711 of SEQ ID NO: 916347
acuugcugucccugugauu

SEQ ID NO: 1149573 - RNA, 19 nt, Artificial Sequence
  Description of Artificial Sequence: Synthetic oligonucleotide
  Antisense strand to SEQ ID NO: 1149572
aaucacagggacagcaagu

SEQ ID NO: 1149574 - RNA, 19 nt, Artificial Sequence
  Description of Artificial Sequence: Synthetic oligonucleotide
  Sense strand starting at position 3714 of SEQ ID NO: 916347
ugcugucccugugauuaaa

SEQ ID NO: 1149575 - RNA, 19 nt, Artificial Sequence
  Description of Artificial Sequence: Synthetic oligonucleotide
  Antisense strand to SEQ ID NO: 1149574
uuuaaucacagggacagca

SEQ ID NO: 1149576 - RNA, 19 nt, Artificial Sequence
  Description of Artificial Sequence: Synthetic oligonucleotide
  Sense strand starting at position 3716 of SEQ ID NO: 916347
cugucccugugauuaaauu

SEQ ID NO: 1149577 - RNA, 19 nt, Artificial Sequence
  Description of Artificial Sequence: Synthetic oligonucleotide
  Antisense strand to SEQ ID NO: 1149576
aauuuaaucacagggacag

SEQ ID NO: 1149578 - RNA, 19 nt, Artificial Sequence
  Description of Artificial Sequence: Synthetic oligonucleotide
  Sense strand starting at position 3819 of SEQ ID NO: 916347
gugcauuggagcuaucucu

SEQ ID NO: 1149579 - RNA, 19 nt, Artificial Sequence
  Description of Artificial Sequence: Synthetic oligonucleotide
  Antisense strand to SEQ ID NO: 1149578
agagauagcuccaaugcac

SEQ ID NO: 1149580 - RNA, 19 nt, Artificial Sequence
  Description of Artificial Sequence: Synthetic oligonucleotide
  Sense strand starting at position 261 of SEQ ID NO: 916348
guguuagguguuguucuuu

SEQ ID NO: 1149581 - RNA, 19 nt, Artificial Sequence
  Description of Artificial Sequence: Synthetic oligonucleotide
  Antisense strand to SEQ ID NO: 1149580
aaagaacaacaccuaacac

SEQ ID NO: 1149582 - RNA, 19 nt, Artificial Sequence
  Description of Artificial Sequence: Synthetic oligonucleotide
  Sense strand starting at position 290 of SEQ ID NO: 916348
uuuguuucugaagauucua

SEQ ID NO: 1149583 - RNA, 19 nt, Artificial Sequence
  Description of Artificial Sequence: Synthetic oligonucleotide
  Antisense strand to SEQ ID NO: 1149582
uagaaucuucagaaacaaa

SEQ ID NO: 1149584 - RNA, 19 nt, Artificial Sequence
  Description of Artificial Sequence: Synthetic oligonucleotide
  Sense strand starting at position 339 of SEQ ID NO: 916348
auaacagaaugauaagaga

SEQ ID NO: 1149585 - RNA, 19 nt, Artificial Sequence
  Description of Artificial Sequence: Synthetic oligonucleotide
  Antisense strand to SEQ ID NO: 1149584
ucucuuaucauucuguuau

SEQ ID NO: 1149586 - RNA, 19 nt, Artificial Sequence
  Description of Artificial Sequence: Synthetic oligonucleotide
  Sense strand starting at position 420 of SEQ ID NO: 916348
accugacauuagucacaca

SEQ ID NO: 1149587 - RNA, 19 nt, Artificial Sequence
  Description of Artificial Sequence: Synthetic oligonucleotide
  Antisense strand to SEQ ID NO: 1149586
ugugugacuaaugucaggu

SEQ ID NO: 1149588 - RNA, 19 nt, Artificial Sequence
  Description of Artificial Sequence: Synthetic oligonucleotide
  Sense strand starting at position 759 of SEQ ID NO: 916348
cauacuccuccgggaugau

SEQ ID NO: 1149589 - RNA, 19 nt, Artificial Sequence
  Description of Artificial Sequence: Synthetic oligonucleotide
  Antisense strand to SEQ ID NO: 1149588
aucaucccggaggaguaug

SEQ ID NO: 1149590 - RNA, 19 nt, Artificial Sequence
  Description of Artificial Sequence: Synthetic oligonucleotide
  Sense strand starting at position 922 of SEQ ID NO: 916348
ggguccuuguauucaagga

SEQ ID NO: 1149591 - RNA, 19 nt, Artificial Sequence
  Description of Artificial Sequence: Synthetic oligonucleotide
  Antisense strand to SEQ ID NO: 1149590
uccuugaauacaaggaccc

SEQ ID NO: 1149592 - RNA, 19 nt, Artificial Sequence
  Description of Artificial Sequence: Synthetic oligonucleotide
  Sense strand starting at position 935 of SEQ ID NO: 916348
caaggauaugucuguacau

SEQ ID NO: 1149593 - RNA, 19 nt, Artificial Sequence
  Description of Artificial Sequence: Synthetic oligonucleotide
  Antisense strand to SEQ ID NO: 1149592
auguacagacauauccuug

SEQ ID NO: 1149594 - RNA, 19 nt, Artificial Sequence
  Description of Artificial Sequence: Synthetic oligonucleotide
  Sense strand starting at position 936 of SEQ ID NO: 916348
aaggauaugucuguacaug

SEQ ID NO: 1149595 - RNA, 19 nt, Artificial Sequence
  Description of Artificial Sequence: Synthetic oligonucleotide
  Antisense strand to SEQ ID NO: 1149594
cauguacagacauauccuu

SEQ ID NO: 1149596 - RNA, 19 nt, Artificial Sequence
  Description of Artificial Sequence: Synthetic oligonucleotide
  Sense strand starting at position 937 of SEQ ID NO: 916348
aggauaugucuguacaugu

SEQ ID NO: 1149597 - RNA, 19 nt, Artificial Sequence
  Description of Artificial Sequence: Synthetic oligonucleotide
  Antisense strand to SEQ ID NO: 1149596
acauguacagacauauccu

SEQ ID NO: 1149598 - RNA, 19 nt, Artificial Sequence
  Description of Artificial Sequence: Synthetic oligonucleotide
  Sense strand starting at position 1079 of SEQ ID NO: 916348
uucuuauucugaguacaua

SEQ ID NO: 1149599 - RNA, 19 nt, Artificial Sequence
  Description of Artificial Sequence: Synthetic oligonucleotide
  Antisense strand to SEQ ID NO: 1149598
uauguacucagaauaagaa

SEQ ID NO: 1149600 - RNA, 19 nt, Artificial Sequence
  Description of Artificial Sequence: Synthetic oligonucleotide
  Sense strand starting at position 1080 of SEQ ID NO: 916348
ucuuauucugaguacauau

SEQ ID NO: 1149601 - RNA, 19 nt, Artificial Sequence
  Description of Artificial Sequence: Synthetic oligonucleotide
  Antisense strand to SEQ ID NO: 1149600
auauguacucagaauaaga

SEQ ID NO: 1149602 - RNA, 19 nt, Artificial Sequence
  Description of Artificial Sequence: Synthetic oligonucleotide
  Sense strand starting at position 1098 of SEQ ID NO: 916348
uggacauagccuuaguuaa

SEQ ID NO: 1149603 - RNA, 19 nt, Artificial Sequence
  Description of Artificial Sequence: Synthetic oligonucleotide
  Antisense strand to SEQ ID NO: 1149602
uuaacuaaggcuaugucca

SEQ ID NO: 1149604 - RNA, 19 nt, Artificial Sequence
  Description of Artificial Sequence: Synthetic oligonucleotide
  Sense strand starting at position 1126 of SEQ ID NO: 916348
ggagccuuccgguaaacag

SEQ ID NO: 1149605 - RNA, 19 nt, Artificial Sequence
  Description of Artificial Sequence: Synthetic oligonucleotide
  Antisense strand to SEQ ID NO: 1149604
cuguuuaccggaaggcucc

SEQ ID NO: 1149606 - RNA, 19 nt, Artificial Sequence
  Description of Artificial Sequence: Synthetic oligonucleotide
  Sense strand starting at position 1167 of SEQ ID NO: 916348
cgauuaaccgcgucuguaa

SEQ ID NO: 1149607 - RNA, 19 nt, Artificial Sequence
  Description of Artificial Sequence: Synthetic oligonucleotide
  Antisense strand to SEQ ID NO: 1149606
uuacagacgcgguuaaucg

SEQ ID NO: 1149608 - RNA, 19 nt, Artificial Sequence
  Description of Artificial Sequence: Synthetic oligonucleotide
  Sense strand starting at position 1244 of SEQ ID NO: 916348
acgaucuacuuauuaaagu

SEQ ID NO: 1149609 - RNA, 19 nt, Artificial Sequence
  Description of Artificial Sequence: Synthetic oligonucleotide
  Antisense strand to SEQ ID NO: 1149608
acuuuaauaaguagaucgu

SEQ ID NO: 1149610 - RNA, 19 nt, Artificial Sequence
  Description of Artificial Sequence: Synthetic oligonucleotide
  Sense strand starting at position 1356 of SEQ ID NO: 916348
cuaaauaacguguaaucug

SEQ ID NO: 1149611 - RNA, 19 nt, Artificial Sequence
  Description of Artificial Sequence: Synthetic oligonucleotide
  Antisense strand to SEQ ID NO: 1149610
cagauuacacguuauuuag

SEQ ID NO: 1149612 - RNA, 19 nt, Artificial Sequence
  Description of Artificial Sequence: Synthetic oligonucleotide
  Sense strand starting at position 1359 of SEQ ID NO: 916348
aauaacguguaaucugaca

SEQ ID NO: 1149613 - RNA, 19 nt, Artificial Sequence
  Description of Artificial Sequence: Synthetic oligonucleotide
  Antisense strand to SEQ ID NO: 1149612
ugucagauuacacguuauu

SEQ ID NO: 1149614 - RNA, 19 nt, Artificial Sequence
  Description of Artificial Sequence: Synthetic oligonucleotide
  Sense strand starting at position 1428 of SEQ ID NO: 916348
uuaaaugcgaaagaaguau

SEQ ID NO: 1149615 - RNA, 19 nt, Artificial Sequence
  Description of Artificial Sequence: Synthetic oligonucleotide
  Antisense strand to SEQ ID NO: 1149614
auacuucuuucgcauuuaa

SEQ ID NO: 1149616 - RNA, 19 nt, Artificial Sequence
  Description of Artificial Sequence: Synthetic oligonucleotide
  Sense strand starting at position 1432 of SEQ ID NO: 916348
augcgaaagaaguaugagu

SEQ ID NO: 1149617 - RNA, 19 nt, Artificial Sequence
  Description of Artificial Sequence: Synthetic oligonucleotide
  Antisense strand to SEQ ID NO: 1149616
acucauacuucuuucgcau

SEQ ID NO: 1149618 - RNA, 19 nt, Artificial Sequence
  Description of Artificial Sequence: Synthetic oligonucleotide
  Sense strand starting at position 1856 of SEQ ID NO: 916348
gcguguccuaaggagaaga

SEQ ID NO: 1149619 - RNA, 19 nt, Artificial Sequence
  Description of Artificial Sequence: Synthetic oligonucleotide
  Antisense strand to SEQ ID NO: 1149618
ucuucuccuuaggacacgc

SEQ ID NO: 1149620 - RNA, 19 nt, Artificial Sequence
  Description of Artificial Sequence: Synthetic oligonucleotide
  Sense strand starting at position 1858 of SEQ ID NO: 916348
guguccuaaggagaagagu

SEQ ID NO: 1149621 - RNA, 19 nt, Artificial Sequence
  Description of Artificial Sequence: Synthetic oligonucleotide
  Antisense strand to SEQ ID NO: 1149620
acucuucuccuuaggacac

SEQ ID NO: 1149622 - RNA, 19 nt, Artificial Sequence
  Description of Artificial Sequence: Synthetic oligonucleotide
  Sense strand starting at position 2330 of SEQ ID NO: 916348
uuuguaaucuagguagaua

SEQ ID NO: 1149623 - RNA, 19 nt, Artificial Sequence
  Description of Artificial Sequence: Synthetic oligonucleotide
  Antisense strand to SEQ ID NO: 1149622
uaucuaccuagauuacaaa

SEQ ID NO: 1149624 - RNA, 19 nt, Artificial Sequence
  Description of Artificial Sequence: Synthetic oligonucleotide
  Sense strand starting at position 2360 of SEQ ID NO: 916348
ucaugauaacugggcuacu

SEQ ID NO: 1149625 - RNA, 19 nt, Artificial Sequence
  Description of Artificial Sequence: Synthetic oligonucleotide
  Antisense strand to SEQ ID NO: 1149624
aguagcccaguuaucauga

SEQ ID NO: 1149626 - RNA, 19 nt, Artificial Sequence
  Description of Artificial Sequence: Synthetic oligonucleotide
  Sense strand starting at position 2486 of SEQ ID NO: 916348
gguggaagauguucugaaa

SEQ ID NO: 1149627 - RNA, 19 nt, Artificial Sequence
  Description of Artificial Sequence: Synthetic oligonucleotide
  Antisense strand to SEQ ID NO: 1149626
uuucagaacaucuuccacc

SEQ ID NO: 1149628 - RNA, 19 nt, Artificial Sequence
  Description of Artificial Sequence: Synthetic oligonucleotide
  Sense strand starting at position 2640 of SEQ ID NO: 916348
acuggcucccaaugaagaa

SEQ ID NO: 1149629 - RNA, 19 nt, Artificial Sequence
  Description of Artificial Sequence: Synthetic oligonucleotide
  Antisense strand to SEQ ID NO: 1149628
uucuucauugggagccagu

SEQ ID NO: 1149630 - RNA, 19 nt, Artificial Sequence
  Description of Artificial Sequence: Synthetic oligonucleotide
  Sense strand starting at position 2767 of SEQ ID NO: 916348
ucuagaugggucugaauga

SEQ ID NO: 1149631 - RNA, 19 nt, Artificial Sequence
  Description of Artificial Sequence: Synthetic oligonucleotide
  Antisense strand to SEQ ID NO: 1149630
ucauucagacccaucuaga

SEQ ID NO: 1149632 - RNA, 19 nt, Artificial Sequence
  Description of Artificial Sequence: Synthetic oligonucleotide
  Sense strand starting at position 2917 of SEQ ID NO: 916348
acuuuaauucuuggaaguu

SEQ ID NO: 1149633 - RNA, 19 nt, Artificial Sequence
  Description of Artificial Sequence: Synthetic oligonucleotide
  Antisense strand to SEQ ID NO: 1149632
aacuuccaagaauuaaagu

SEQ ID NO: 1149634 - RNA, 19 nt, Artificial Sequence
  Description of Artificial Sequence: Synthetic oligonucleotide
  Sense strand starting at position 2927 of SEQ ID NO: 916348
uuggaaguuccacguauuu

SEQ ID NO: 1149635 - RNA, 19 nt, Artificial Sequence
  Description of Artificial Sequence: Synthetic oligonucleotide
  Antisense strand to SEQ ID NO: 1149634
aaauacguggaacuuccaa

SEQ ID NO: 1149636 - RNA, 19 nt, Artificial Sequence
  Description of Artificial Sequence: Synthetic oligonucleotide
  Sense strand starting at position 2965 of SEQ ID NO: 916348
guguauggagcauaaacaa

SEQ ID NO: 1149637 - RNA, 19 nt, Artificial Sequence
  Description of Artificial Sequence: Synthetic oligonucleotide
  Antisense strand to SEQ ID NO: 1149636
uuguuuaugcuccauacac

SEQ ID NO: 1149638 - RNA, 19 nt, Artificial Sequence
  Description of Artificial Sequence: Synthetic oligonucleotide
  Sense strand starting at position 3018 of SEQ ID NO: 916348
gucuuuaaugaaggcaaau

SEQ ID NO: 1149639 - RNA, 19 nt, Artificial Sequence
  Description of Artificial Sequence: Synthetic oligonucleotide
  Antisense strand to SEQ ID NO: 1149638
auuugccuucauuaaagac

SEQ ID NO: 1149640 - RNA, 19 nt, Artificial Sequence
  Description of Artificial Sequence: Synthetic oligonucleotide
  Sense strand starting at position 3141 of SEQ ID NO: 916348
gcaguaauuuauguaguau

SEQ ID NO: 1149641 - RNA, 19 nt, Artificial Sequence
  Description of Artificial Sequence: Synthetic oligonucleotide
  Antisense strand to SEQ ID NO: 1149640
auacuacauaaauuacugc

SEQ ID NO: 1149642 - RNA, 19 nt, Artificial Sequence
  Description of Artificial Sequence: Synthetic oligonucleotide
  Sense strand starting at position 3176 of SEQ ID NO: 916348
uaugaagaaucaguuugua

SEQ ID NO: 1149643 - RNA, 19 nt, Artificial Sequence
  Description of Artificial Sequence: Synthetic oligonucleotide
  Antisense strand to SEQ ID NO: 1149642
uacaaacugauucuucaua

SEQ ID NO: 1149644 - RNA, 19 nt, Artificial Sequence
  Description of Artificial Sequence: Synthetic oligonucleotide
  Sense strand starting at position 3179 of SEQ ID NO: 916348
gaagaaucaguuuguauag

SEQ ID NO: 1149645 - RNA, 19 nt, Artificial Sequence
  Description of Artificial Sequence: Synthetic oligonucleotide
  Antisense strand to SEQ ID NO: 1149644
cuauacaaacugauucuuc

SEQ ID NO: 1149646 - RNA, 19 nt, Artificial Sequence
  Description of Artificial Sequence: Synthetic oligonucleotide
  Sense strand starting at position 3223 of SEQ ID NO: 916348
accuuugacuuuguacaca

SEQ ID NO: 1149647 - RNA, 19 nt, Artificial Sequence
  Description of Artificial Sequence: Synthetic oligonucleotide
  Antisense strand to SEQ ID NO: 1149646
uguguacaaagucaaaggu

SEQ ID NO: 1149648 - RNA, 19 nt, Artificial Sequence
  Description of Artificial Sequence: Synthetic oligonucleotide
  Sense strand starting at position 3226 of SEQ ID NO: 916348
uuugacuuuguacacauua

SEQ ID NO: 1149649 - RNA, 19 nt, Artificial Sequence
  Description of Artificial Sequence: Synthetic oligonucleotide
  Antisense strand to SEQ ID NO: 1149648
uaauguguacaaagucaaa

SEQ ID NO: 1149650 - RNA, 19 nt, Artificial Sequence
  Description of Artificial Sequence: Synthetic oligonucleotide
  Sense strand starting at position 3302 of SEQ ID NO: 916348
gguuuaugugucuagagau

SEQ ID NO: 1149651 - RNA, 19 nt, Artificial Sequence
  Description of Artificial Sequence: Synthetic oligonucleotide
  Antisense strand to SEQ ID NO: 1149650
aucucuagacacauaaacc

SEQ ID NO: 1149652 - RNA, 19 nt, Artificial Sequence
  Description of Artificial Sequence: Synthetic oligonucleotide
  Sense strand starting at position 3514 of SEQ ID NO: 916348
uuuguaagccuagauauau

SEQ ID NO: 1149653 - RNA, 19 nt, Artificial Sequence
  Description of Artificial Sequence: Synthetic oligonucleotide
  Antisense strand to SEQ ID NO: 1149652
auauaucuaggcuuacaaa

SEQ ID NO: 1149654 - RNA, 19 nt, Artificial Sequence
  Description of Artificial Sequence: Synthetic oligonucleotide
  Sense strand starting at position 3915 of SEQ ID NO: 916348
aggaguccucaguauguag

SEQ ID NO: 1149655 - RNA, 19 nt, Artificial Sequence
  Description of Artificial Sequence: Synthetic oligonucleotide
  Antisense strand to SEQ ID NO: 1149654
cuacauacugaggacuccu

SEQ ID NO: 1149656 - RNA, 19 nt, Artificial Sequence
  Description of Artificial Sequence: Synthetic oligonucleotide
  Sense strand starting at position 3932 of SEQ ID NO: 916348
agugguaagccauggaaag

SEQ ID NO: 1149657 - RNA, 19 nt, Artificial Sequence
  Description of Artificial Sequence: Synthetic oligonucleotide
  Antisense strand to SEQ ID NO: 1149656
cuuuccauggcuuaccacu

SEQ ID NO: 1149658 - RNA, 19 nt, Artificial Sequence
  Description of Artificial Sequence: Synthetic oligonucleotide
  Sense strand starting at position 3933 of SEQ ID NO: 916348
gugguaagccauggaaaga

SEQ ID NO: 1149659 - RNA, 19 nt, Artificial Sequence
  Description of Artificial Sequence: Synthetic oligonucleotide
  Antisense strand to SEQ ID NO: 1149658
ucuuuccauggcuuaccac

SEQ ID NO: 1149660 - RNA, 19 nt, Artificial Sequence
  Description of Artificial Sequence: Synthetic oligonucleotide
  Sense strand starting at position 191 of SEQ ID NO: 916349
auacauaccuuugauaguu

SEQ ID NO: 1149661 - RNA, 19 nt, Artificial Sequence
  Description of Artificial Sequence: Synthetic oligonucleotide
  Antisense strand to SEQ ID NO: 1149660
aacuaucaaagguauguau

SEQ ID NO: 1149662 - RNA, 19 nt, Artificial Sequence
  Description of Artificial Sequence: Synthetic oligonucleotide
  Sense strand starting at position 200 of SEQ ID NO: 916349
uuugauaguuaagcaacaa

SEQ ID NO: 1149663 - RNA, 19 nt, Artificial Sequence
  Description of Artificial Sequence: Synthetic oligonucleotide
  Antisense strand to SEQ ID NO: 1149662
uuguugcuuaacuaucaaa

SEQ ID NO: 1149664 - RNA, 19 nt, Artificial Sequence
  Description of Artificial Sequence: Synthetic oligonucleotide
  Sense strand starting at position 375 of SEQ ID NO: 916349
gggaguccuaaccagguuu

SEQ ID NO: 1149665 - RNA, 19 nt, Artificial Sequence
  Description of Artificial Sequence: Synthetic oligonucleotide
  Antisense strand to SEQ ID NO: 1149664
aaaccugguuaggacuccc

SEQ ID NO: 1149666 - RNA, 19 nt, Artificial Sequence
  Description of Artificial Sequence: Synthetic oligonucleotide
  Sense strand starting at position 428 of SEQ ID NO: 916349
gcuugcuuucgagaccaau

SEQ ID NO: 1149667 - RNA, 19 nt, Artificial Sequence
  Description of Artificial Sequence: Synthetic oligonucleotide
  Antisense strand to SEQ ID NO: 1149666
auuggucucgaaagcaagc

SEQ ID NO: 1149668 - RNA, 19 nt, Artificial Sequence
  Description of Artificial Sequence: Synthetic oligonucleotide
  Sense strand starting at position 431 of SEQ ID NO: 916349
ugcuuucgagaccaauaga

SEQ ID NO: 1149669 - RNA, 19 nt, Artificial Sequence
  Description of Artificial Sequence: Synthetic oligonucleotide
  Antisense strand to SEQ ID NO: 1149668
ucuauuggucucgaaagca

SEQ ID NO: 1149670 - RNA, 19 nt, Artificial Sequence
  Description of Artificial Sequence: Synthetic oligonucleotide
  Sense strand starting at position 444 of SEQ ID NO: 916349
aauagaaguugucagagaa

SEQ ID NO: 1149671 - RNA, 19 nt, Artificial Sequence
  Description of Artificial Sequence: Synthetic oligonucleotide
  Antisense strand to SEQ ID NO: 1149670
uucucugacaacuucuauu

SEQ ID NO: 1149672 - RNA, 19 nt, Artificial Sequence
  Description of Artificial Sequence: Synthetic oligonucleotide
  Sense strand starting at position 448 of SEQ ID NO: 916349
gaaguugucagagaaguca

SEQ ID NO: 1149673 - RNA, 19 nt, Artificial Sequence
  Description of Artificial Sequence: Synthetic oligonucleotide
  Antisense strand to SEQ ID NO: 1149672
ugacuucucugacaacuuc

SEQ ID NO: 1149674 - RNA, 19 nt, Artificial Sequence
  Description of Artificial Sequence: Synthetic oligonucleotide
  Sense strand starting at position 509 of SEQ ID NO: 916349
uuuacuguucuccagacga

SEQ ID NO: 1149675 - RNA, 19 nt, Artificial Sequence
  Description of Artificial Sequence: Synthetic oligonucleotide
  Antisense strand to SEQ ID NO: 1149674
ucgucuggagaacaguaaa

SEQ ID NO: 1149676 - RNA, 19 nt, Artificial Sequence
  Description of Artificial Sequence: Synthetic oligonucleotide
  Sense strand starting at position 511 of SEQ ID NO: 916349
uacuguucuccagacgacu

SEQ ID NO: 1149677 - RNA, 19 nt, Artificial Sequence
  Description of Artificial Sequence: Synthetic oligonucleotide
  Antisense strand to SEQ ID NO: 1149676
agucgucuggagaacagua

SEQ ID NO: 1149678 - RNA, 19 nt, Artificial Sequence
  Description of Artificial Sequence: Synthetic oligonucleotide
  Sense strand starting at position 601 of SEQ ID NO: 916349
cuaggagcccucuguacuu

SEQ ID NO: 1149679 - RNA, 19 nt, Artificial Sequence
  Description of Artificial Sequence: Synthetic oligonucleotide
  Antisense strand to SEQ ID NO: 1149678
aaguacagagggcuccuag

SEQ ID NO: 1149680 - RNA, 19 nt, Artificial Sequence
  Description of Artificial Sequence: Synthetic oligonucleotide
  Sense strand starting at position 783 of SEQ ID NO: 916349
ccaucugaguucuagauga

SEQ ID NO: 1149681 - RNA, 19 nt, Artificial Sequence
  Description of Artificial Sequence: Synthetic oligonucleotide
  Antisense strand to SEQ ID NO: 1149680
ucaucuagaacucagaugg

SEQ ID NO: 1149682 - RNA, 19 nt, Artificial Sequence
  Description of Artificial Sequence: Synthetic oligonucleotide
  Sense strand starting at position 787 of SEQ ID NO: 916349
cugaguucuagaugagacc

SEQ ID NO: 1149683 - RNA, 19 nt, Artificial Sequence
  Description of Artificial Sequence: Synthetic oligonucleotide
  Antisense strand to SEQ ID NO: 1149682
ggucucaucuagaacucag

SEQ ID NO: 1149684 - RNA, 19 nt, Artificial Sequence
  Description of Artificial Sequence: Synthetic oligonucleotide
  Sense strand starting at position 852 of SEQ ID NO: 916349
gcuaaccacuggcuuuaaa

SEQ ID NO: 1149685 - RNA, 19 nt, Artificial Sequence
  Description of Artificial Sequence: Synthetic oligonucleotide
  Antisense strand to SEQ ID NO: 1149684
uuuaaagccagugguuagc

SEQ ID NO: 1149686 - RNA, 19 nt, Artificial Sequence
  Description of Artificial Sequence: Synthetic oligonucleotide
  Sense strand starting at position 860 of SEQ ID NO: 916349
cuggcuuuaaauggaggaa

SEQ ID NO: 1149687 - RNA, 19 nt, Artificial Sequence
  Description of Artificial Sequence: Synthetic oligonucleotide
  Antisense strand to SEQ ID NO: 1149686
uuccuccauuuaaagccag

SEQ ID NO: 1149688 - RNA, 19 nt, Artificial Sequence
  Description of Artificial Sequence: Synthetic oligonucleotide
  Sense strand starting at position 1061 of SEQ ID NO: 916349
guagucauuccugguuuga

SEQ ID NO: 1149689 - RNA, 19 nt, Artificial Sequence
  Description of Artificial Sequence: Synthetic oligonucleotide
  Antisense strand to SEQ ID NO: 1149688
ucaaaccaggaaugacuac

SEQ ID NO: 1149690 - RNA, 19 nt, Artificial Sequence
  Description of Artificial Sequence: Synthetic oligonucleotide
  Sense strand starting at position 2150 of SEQ ID NO: 916349
gcgacuugcaaucggaauc

SEQ ID NO: 1149691 - RNA, 19 nt, Artificial Sequence
  Description of Artificial Sequence: Synthetic oligonucleotide
  Antisense strand to SEQ ID NO: 1149690
gauuccgauugcaagucgc

SEQ ID NO: 1149692 - RNA, 19 nt, Artificial Sequence
  Description of Artificial Sequence: Synthetic oligonucleotide
  Sense strand starting at position 2160 of SEQ ID NO: 916349
aucggaaucuucgcucacu

SEQ ID NO: 1149693 - RNA, 19 nt, Artificial Sequence
  Description of Artificial Sequence: Synthetic oligonucleotide
  Antisense strand to SEQ ID NO: 1149692
agugagcgaagauuccgau

SEQ ID NO: 1149694 - RNA, 19 nt, Artificial Sequence
  Description of Artificial Sequence: Synthetic oligonucleotide
  Sense strand starting at position 2189 of SEQ ID NO: 916349
ggacguccgagaugaaaga

SEQ ID NO: 1149695 - RNA, 19 nt, Artificial Sequence
  Description of Artificial Sequence: Synthetic oligonucleotide
  Antisense strand to SEQ ID NO: 1149694
ucuuucaucucggacgucc

SEQ ID NO: 1149696 - RNA, 19 nt, Artificial Sequence
  Description of Artificial Sequence: Synthetic oligonucleotide
  Sense strand starting at position 2675 of SEQ ID NO: 916349
agcugagucagguggaguu

SEQ ID NO: 1149697 - RNA, 19 nt, Artificial Sequence
  Description of Artificial Sequence: Synthetic oligonucleotide
  Antisense strand to SEQ ID NO: 1149696
aacuccaccugacucagcu

SEQ ID NO: 1149698 - RNA, 19 nt, Artificial Sequence
  Description of Artificial Sequence: Synthetic oligonucleotide
  Sense strand starting at position 2733 of SEQ ID NO: 916349
gaaggaaacuugcugcuua

SEQ ID NO: 1149699 - RNA, 19 nt, Artificial Sequence
  Description of Artificial Sequence: Synthetic oligonucleotide
  Antisense strand to SEQ ID NO: 1149698
uaagcagcaaguuuccuuc

SEQ ID NO: 1149700 - RNA, 19 nt, Artificial Sequence
  Description of Artificial Sequence: Synthetic oligonucleotide
  Sense strand starting at position 2931 of SEQ ID NO: 916349
cagaaucauuucugucguu

SEQ ID NO: 1149701 - RNA, 19 nt, Artificial Sequence
  Description of Artificial Sequence: Synthetic oligonucleotide
  Antisense strand to SEQ ID NO: 1149700
aacgacagaaaugauucug

SEQ ID NO: 1149702 - RNA, 19 nt, Artificial Sequence
  Description of Artificial Sequence: Synthetic oligonucleotide
  Sense strand starting at position 2932 of SEQ ID NO: 916349
agaaucauuucugucguuu

SEQ ID NO: 1149703 - RNA, 19 nt, Artificial Sequence
  Description of Artificial Sequence: Synthetic oligonucleotide
  Antisense strand to SEQ ID NO: 1149702
aaacgacagaaaugauucu

SEQ ID NO: 1149704 - RNA, 19 nt, Artificial Sequence
  Description of Artificial Sequence: Synthetic oligonucleotide
  Sense strand starting at position 3226 of SEQ ID NO: 916349
auauguacauuucgaagaa

SEQ ID NO: 1149705 - RNA, 19 nt, Artificial Sequence
  Description of Artificial Sequence: Synthetic oligonucleotide
  Antisense strand to SEQ ID NO: 1149704
uucuucgaaauguacauau

SEQ ID NO: 1149706 - RNA, 19 nt, Artificial Sequence
  Description of Artificial Sequence: Synthetic oligonucleotide
  Sense strand starting at position 3227 of SEQ ID NO: 916349
uauguacauuucgaagaau

SEQ ID NO: 1149707 - RNA, 19 nt, Artificial Sequence
  Description of Artificial Sequence: Synthetic oligonucleotide
  Antisense strand to SEQ ID NO: 1149706
auucuucgaaauguacaua

SEQ ID NO: 1149708 - RNA, 19 nt, Artificial Sequence
  Description of Artificial Sequence: Synthetic oligonucleotide
  Sense strand starting at position 3322 of SEQ ID NO: 916349
uuaauuauguuccugauga

SEQ ID NO: 1149709 - RNA, 19 nt, Artificial Sequence
  Description of Artificial Sequence: Synthetic oligonucleotide
  Antisense strand to SEQ ID NO: 1149708
ucaucaggaacauaauuaa

SEQ ID NO: 1149710 - RNA, 19 nt, Artificial Sequence
  Description of Artificial Sequence: Synthetic oligonucleotide
  Sense strand starting at position 3333 of SEQ ID NO: 916349
ccugaugaauacggaaaca

SEQ ID NO: 1149711 - RNA, 19 nt, Artificial Sequence
  Description of Artificial Sequence: Synthetic oligonucleotide
  Antisense strand to SEQ ID NO: 1149710
uguuuccguauucaucagg

SEQ ID NO: 1149712 - RNA, 19 nt, Artificial Sequence
  Description of Artificial Sequence: Synthetic oligonucleotide
  Sense strand starting at position 3396 of SEQ ID NO: 916349
uuacuuaacugguauugag

SEQ ID NO: 1149713 - RNA, 19 nt, Artificial Sequence
  Description of Artificial Sequence: Synthetic oligonucleotide
  Antisense strand to SEQ ID NO: 1149712
cucaauaccaguuaaguaa

SEQ ID NO: 1149714 - RNA, 19 nt, Artificial Sequence
  Description of Artificial Sequence: Synthetic oligonucleotide
  Sense strand starting at position 3403 of SEQ ID NO: 916349
acugguauugaguaccuuu

SEQ ID NO: 1149715 - RNA, 19 nt, Artificial Sequence
  Description of Artificial Sequence: Synthetic oligonucleotide
  Antisense strand to SEQ ID NO: 1149714
aaagguacucaauaccagu

SEQ ID NO: 1149716 - RNA, 19 nt, Artificial Sequence
  Description of Artificial Sequence: Synthetic oligonucleotide
  Sense strand starting at position 3406 of SEQ ID NO: 916349
gguauugaguaccuuucga

SEQ ID NO: 1149717 - RNA, 19 nt, Artificial Sequence
  Description of Artificial Sequence: Synthetic oligonucleotide
  Antisense strand to SEQ ID NO: 1149716
ucgaaagguacucaauacc

SEQ ID NO: 1149718 - RNA, 19 nt, Artificial Sequence
  Description of Artificial Sequence: Synthetic oligonucleotide
  Sense strand starting at position 3414 of SEQ ID NO: 916349
guaccuuucgacugcaguu

SEQ ID NO: 1149719 - RNA, 19 nt, Artificial Sequence
  Description of Artificial Sequence: Synthetic oligonucleotide
  Antisense strand to SEQ ID NO: 1149718
aacugcagucgaaagguac

SEQ ID NO: 1149720 - RNA, 19 nt, Artificial Sequence
  Description of Artificial Sequence: Synthetic oligonucleotide
  Sense strand starting at position 3454 of SEQ ID NO: 916349
acuacauuaugacagguaa

SEQ ID NO: 1149721 - RNA, 19 nt, Artificial Sequence
  Description of Artificial Sequence: Synthetic oligonucleotide
  Antisense strand to SEQ ID NO: 1149720
uuaccugucauaauguagu

SEQ ID NO: 1149722 - RNA, 19 nt, Artificial Sequence
  Description of Artificial Sequence: Synthetic oligonucleotide
  Sense strand starting at position 3504 of SEQ ID NO: 916349
acaggaagauccuaagugu

SEQ ID NO: 1149723 - RNA, 19 nt, Artificial Sequence
  Description of Artificial Sequence: Synthetic oligonucleotide
  Antisense strand to SEQ ID NO: 1149722
acacuuaggaucuuccugu

SEQ ID NO: 1149724 - RNA, 19 nt, Artificial Sequence
  Description of Artificial Sequence: Synthetic oligonucleotide
  Sense strand starting at position 3507 of SEQ ID NO: 916349
ggaagauccuaagugucuu

SEQ ID NO: 1149725 - RNA, 19 nt, Artificial Sequence
  Description of Artificial Sequence: Synthetic oligonucleotide
  Antisense strand to SEQ ID NO: 1149724
aagacacuuaggaucuucc

SEQ ID NO: 1149726 - RNA, 19 nt, Artificial Sequence
  Description of Artificial Sequence: Synthetic oligonucleotide
  Sense strand starting at position 3574 of SEQ ID NO: 916349
ggaagaugcuuuguucucu

SEQ ID NO: 1149727 - RNA, 19 nt, Artificial Sequence
  Description of Artificial Sequence: Synthetic oligonucleotide
  Antisense strand to SEQ ID NO: 1149726
agagaacaaagcaucuucc

SEQ ID NO: 1149728 - RNA, 19 nt, Artificial Sequence
  Description of Artificial Sequence: Synthetic oligonucleotide
  Sense strand starting at position 3575 of SEQ ID NO: 916349
gaagaugcuuuguucucua

SEQ ID NO: 1149729 - RNA, 19 nt, Artificial Sequence
  Description of Artificial Sequence: Synthetic oligonucleotide
  Antisense strand to SEQ ID NO: 1149728
uagagaacaaagcaucuuc

SEQ ID NO: 1149730 - RNA, 19 nt, Artificial Sequence
  Description of Artificial Sequence: Synthetic oligonucleotide
  Sense strand starting at position 3667 of SEQ ID NO: 916349
agacaauugugauuacauu

SEQ ID NO: 1149731 - RNA, 19 nt, Artificial Sequence
  Description of Artificial Sequence: Synthetic oligonucleotide
  Antisense strand to SEQ ID NO: 1149730
aauguaaucacaauugucu

SEQ ID NO: 1149732 - RNA, 19 nt, Artificial Sequence
  Description of Artificial Sequence: Synthetic oligonucleotide
  Sense strand starting at position 3673 of SEQ ID NO: 916349
uugugauuacauugcuuaa

SEQ ID NO: 1149733 - RNA, 19 nt, Artificial Sequence
  Description of Artificial Sequence: Synthetic oligonucleotide
  Antisense strand to SEQ ID NO: 1149732
uuaagcaauguaaucacaa

SEQ ID NO: 1149734 - RNA, 19 nt, Artificial Sequence
  Description of Artificial Sequence: Synthetic oligonucleotide
  Sense strand starting at position 3834 of SEQ ID NO: 916349
agcuaugucuaagaucuga

SEQ ID NO: 1149735 - RNA, 19 nt, Artificial Sequence
  Description of Artificial Sequence: Synthetic oligonucleotide
  Antisense strand to SEQ ID NO: 1149734
ucagaucuuagacauagcu

SEQ ID NO: 1149736 - RNA, 19 nt, Artificial Sequence
  Description of Artificial Sequence: Synthetic oligonucleotide
  Sense strand starting at position 3839 of SEQ ID NO: 916349
ugucuaagaucugaagcaa

SEQ ID NO: 1149737 - RNA, 19 nt, Artificial Sequence
  Description of Artificial Sequence: Synthetic oligonucleotide
  Antisense strand to SEQ ID NO: 1149736
uugcuucagaucuuagaca

SEQ ID NO: 1149738 - RNA, 19 nt, Artificial Sequence
  Description of Artificial Sequence: Synthetic oligonucleotide
  Sense strand starting at position 3968 of SEQ ID NO: 916349
uaaugaauaugguucguuu

SEQ ID NO: 1149739 - RNA, 19 nt, Artificial Sequence
  Description of Artificial Sequence: Synthetic oligonucleotide
  Antisense strand to SEQ ID NO: 1149738
aaacgaaccauauucauua

SEQ ID NO: 1149740 - RNA, 19 nt, Artificial Sequence
  Description of Artificial Sequence: Synthetic oligonucleotide
  Sense strand starting at position 59 of SEQ ID NO: 916350
ugaggcuuuagugagccaa

SEQ ID NO: 1149741 - RNA, 19 nt, Artificial Sequence
  Description of Artificial Sequence: Synthetic oligonucleotide
  Antisense strand to SEQ ID NO: 1149740
uuggcucacuaaagccuca

SEQ ID NO: 1149742 - RNA, 19 nt, Artificial Sequence
  Description of Artificial Sequence: Synthetic oligonucleotide
  Sense strand starting at position 215 of SEQ ID NO: 916350
gguggcugaucagucacua

SEQ ID NO: 1149743 - RNA, 19 nt, Artificial Sequence
  Description of Artificial Sequence: Synthetic oligonucleotide
  Antisense strand to SEQ ID NO: 1149742
uagugacugaucagccacc

SEQ ID NO: 1149744 - RNA, 19 nt, Artificial Sequence
  Description of Artificial Sequence: Synthetic oligonucleotide
  Sense strand starting at position 220 of SEQ ID NO: 916350
cugaucagucacuaguguu

SEQ ID NO: 1149745 - RNA, 19 nt, Artificial Sequence
  Description of Artificial Sequence: Synthetic oligonucleotide
  Antisense strand to SEQ ID NO: 1149744
aacacuagugacugaucag

SEQ ID NO: 1149746 - RNA, 19 nt, Artificial Sequence
  Description of Artificial Sequence: Synthetic oligonucleotide
  Sense strand starting at position 388 of SEQ ID NO: 916350
uguauugaggcuuguauaa

SEQ ID NO: 1149747 - RNA, 19 nt, Artificial Sequence
  Description of Artificial Sequence: Synthetic oligonucleotide
  Antisense strand to SEQ ID NO: 1149746
uuauacaagccucaauaca

SEQ ID NO: 1149748 - RNA, 19 nt, Artificial Sequence
  Description of Artificial Sequence: Synthetic oligonucleotide
  Sense strand starting at position 550 of SEQ ID NO: 916350
acauucucucccuguguuu

SEQ ID NO: 1149749 - RNA, 19 nt, Artificial Sequence
  Description of Artificial Sequence: Synthetic oligonucleotide
  Antisense strand to SEQ ID NO: 1149748
aaacacagggagagaaugu

SEQ ID NO: 1149750 - RNA, 19 nt, Artificial Sequence
  Description of Artificial Sequence: Synthetic oligonucleotide
  Sense strand starting at position 552 of SEQ ID NO: 916350
auucucucccuguguuuaa

SEQ ID NO: 1149751 - RNA, 19 nt, Artificial Sequence
  Description of Artificial Sequence: Synthetic oligonucleotide
  Antisense strand to SEQ ID NO: 1149750
uuaaacacagggagagaau

SEQ ID NO: 1149752 - RNA, 19 nt, Artificial Sequence
  Description of Artificial Sequence: Synthetic oligonucleotide
  Sense strand starting at position 553 of SEQ ID NO: 916350
uucucucccuguguuuaau

SEQ ID NO: 1149753 - RNA, 19 nt, Artificial Sequence
  Description of Artificial Sequence: Synthetic oligonucleotide
  Antisense strand to SEQ ID NO: 1149752
auuaaacacagggagagaa

SEQ ID NO: 1149754 - RNA, 19 nt, Artificial Sequence
  Description of Artificial Sequence: Synthetic oligonucleotide
  Sense strand starting at position 556 of SEQ ID NO: 916350
ucucccuguguuuaauaca

SEQ ID NO: 1149755 - RNA, 19 nt, Artificial Sequence
  Description of Artificial Sequence: Synthetic oligonucleotide
  Antisense strand to SEQ ID NO: 1149754
uguauuaaacacagggaga

SEQ ID NO: 1149756 - RNA, 19 nt, Artificial Sequence
  Description of Artificial Sequence: Synthetic oligonucleotide
  Sense strand starting at position 608 of SEQ ID NO: 916350
ugagaaagauguuuaucau

SEQ ID NO: 1149757 - RNA, 19 nt, Artificial Sequence
  Description of Artificial Sequence: Synthetic oligonucleotide
  Antisense strand to SEQ ID NO: 1149756
augauaaacaucuuucuca

SEQ ID NO: 1149758 - RNA, 19 nt, Artificial Sequence
  Description of Artificial Sequence: Synthetic oligonucleotide
  Sense strand starting at position 805 of SEQ ID NO: 916350
ucugacagggcuugaaauu

SEQ ID NO: 1149759 - RNA, 19 nt, Artificial Sequence
  Description of Artificial Sequence: Synthetic oligonucleotide
  Antisense strand to SEQ ID NO: 1149758
aauuucaagcccugucaga

SEQ ID NO: 1149760 - RNA, 19 nt, Artificial Sequence
  Description of Artificial Sequence: Synthetic oligonucleotide
  Sense strand starting at position 948 of SEQ ID NO: 916350
caacgucagcuacaggaua

SEQ ID NO: 1149761 - RNA, 19 nt, Artificial Sequence
  Description of Artificial Sequence: Synthetic oligonucleotide
  Antisense strand to SEQ ID NO: 1149760
uauccuguagcugacguug

SEQ ID NO: 1149762 - RNA, 19 nt, Artificial Sequence
  Description of Artificial Sequence: Synthetic oligonucleotide
  Sense strand starting at position 1016 of SEQ ID NO: 916350
gcacuuuccagggacguga

SEQ ID NO: 1149763 - RNA, 19 nt, Artificial Sequence
  Description of Artificial Sequence: Synthetic oligonucleotide
  Antisense strand to SEQ ID NO: 1149762
ucacgucccuggaaagugc

SEQ ID NO: 1149764 - RNA, 19 nt, Artificial Sequence
  Description of Artificial Sequence: Synthetic oligonucleotide
  Sense strand starting at position 1066 of SEQ ID NO: 916350
ggccaaucuuuggucaucu

SEQ ID NO: 1149765 - RNA, 19 nt, Artificial Sequence
  Description of Artificial Sequence: Synthetic oligonucleotide
  Antisense strand to SEQ ID NO: 1149764
agaugaccaaagauuggcc

SEQ ID NO: 1149766 - RNA, 19 nt, Artificial Sequence
  Description of Artificial Sequence: Synthetic oligonucleotide
  Sense strand starting at position 1081 of SEQ ID NO: 916350
aucucuacccagggacaau

SEQ ID NO: 1149767 - RNA, 19 nt, Artificial Sequence
  Description of Artificial Sequence: Synthetic oligonucleotide
  Antisense strand to SEQ ID NO: 1149766
auugucccuggguagagau

SEQ ID NO: 1149768 - RNA, 19 nt, Artificial Sequence
  Description of Artificial Sequence: Synthetic oligonucleotide
  Sense strand starting at position 1155 of SEQ ID NO: 916350
agagacagaucuugaaaca

SEQ ID NO: 1149769 - RNA, 19 nt, Artificial Sequence
  Description of Artificial Sequence: Synthetic oligonucleotide
  Antisense strand to SEQ ID NO: 1149768
uguuucaagaucugucucu

SEQ ID NO: 1149770 - RNA, 19 nt, Artificial Sequence
  Description of Artificial Sequence: Synthetic oligonucleotide
  Sense strand starting at position 1554 of SEQ ID NO: 916350
auugauaucucuuuguucu

SEQ ID NO: 1149771 - RNA, 19 nt, Artificial Sequence
  Description of Artificial Sequence: Synthetic oligonucleotide
  Antisense strand to SEQ ID NO: 1149770
agaacaaagagauaucaau

SEQ ID NO: 1149772 - RNA, 19 nt, Artificial Sequence
  Description of Artificial Sequence: Synthetic oligonucleotide
  Sense strand starting at position 1555 of SEQ ID NO: 916350
uugauaucucuuuguucuc

SEQ ID NO: 1149773 - RNA, 19 nt, Artificial Sequence
  Description of Artificial Sequence: Synthetic oligonucleotide
  Antisense strand to SEQ ID NO: 1149772
gagaacaaagagauaucaa

SEQ ID NO: 1149774 - RNA, 19 nt, Artificial Sequence
  Description of Artificial Sequence: Synthetic oligonucleotide
  Sense strand starting at position 1644 of SEQ ID NO: 916350
acacguaucuacuccgcaa

SEQ ID NO: 1149775 - RNA, 19 nt, Artificial Sequence
  Description of Artificial Sequence: Synthetic oligonucleotide
  Antisense strand to SEQ ID NO: 1149774
uugcggaguagauacgugu

SEQ ID NO: 1149776 - RNA, 19 nt, Artificial Sequence
  Description of Artificial Sequence: Synthetic oligonucleotide
  Sense strand starting at position 2004 of SEQ ID NO: 916350
gagcgauaacuuccgcugu

SEQ ID NO: 1149777 - RNA, 19 nt, Artificial Sequence
  Description of Artificial Sequence: Synthetic oligonucleotide
  Antisense strand to SEQ ID NO: 1149776
acagcggaaguuaucgcuc

SEQ ID NO: 1149778 - RNA, 19 nt, Artificial Sequence
  Description of Artificial Sequence: Synthetic oligonucleotide
  Sense strand starting at position 2787 of SEQ ID NO: 916350
aguuuccuucuguguaaau

SEQ ID NO: 1149779 - RNA, 19 nt, Artificial Sequence
  Description of Artificial Sequence: Synthetic oligonucleotide
  Antisense strand to SEQ ID NO: 1149778
auuuacacagaaggaaacu

SEQ ID NO: 1149780 - RNA, 19 nt, Artificial Sequence
  Description of Artificial Sequence: Synthetic oligonucleotide
  Sense strand starting at position 2788 of SEQ ID NO: 916350
guuuccuucuguguaaaug

SEQ ID NO: 1149781 - RNA, 19 nt, Artificial Sequence
  Description of Artificial Sequence: Synthetic oligonucleotide
  Antisense strand to SEQ ID NO: 1149780
cauuuacacagaaggaaac

SEQ ID NO: 1149782 - RNA, 19 nt, Artificial Sequence
  Description of Artificial Sequence: Synthetic oligonucleotide
  Sense strand starting at position 2798 of SEQ ID NO: 916350
guguaaauggaguaauuag

SEQ ID NO: 1149783 - RNA, 19 nt, Artificial Sequence
  Description of Artificial Sequence: Synthetic oligonucleotide
  Antisense strand to SEQ ID NO: 1149782
cuaauuacuccauuuacac

SEQ ID NO: 1149784 - RNA, 19 nt, Artificial Sequence
  Description of Artificial Sequence: Synthetic oligonucleotide
  Sense strand starting at position 2856 of SEQ ID NO: 916350
ccugacaccuaguucugaa

SEQ ID NO: 1149785 - RNA, 19 nt, Artificial Sequence
  Description of Artificial Sequence: Synthetic oligonucleotide
  Antisense strand to SEQ ID NO: 1149784
uucagaacuaggugucagg

SEQ ID NO: 1149786 - RNA, 19 nt, Artificial Sequence
  Description of Artificial Sequence: Synthetic oligonucleotide
  Sense strand starting at position 3093 of SEQ ID NO: 916350
ugaauagucucuuuaaguc

SEQ ID NO: 1149787 - RNA, 19 nt, Artificial Sequence
  Description of Artificial Sequence: Synthetic oligonucleotide
  Antisense strand to SEQ ID NO: 1149786
gacuuaaagagacuauuca

SEQ ID NO: 1149788 - RNA, 19 nt, Artificial Sequence
  Description of Artificial Sequence: Synthetic oligonucleotide
  Sense strand starting at position 3102 of SEQ ID NO: 916350
ucuuuaagucguguuuccu

SEQ ID NO: 1149789 - RNA, 19 nt, Artificial Sequence
  Description of Artificial Sequence: Synthetic oligonucleotide
  Antisense strand to SEQ ID NO: 1149788
aggaaacacgacuuaaaga

SEQ ID NO: 1149790 - RNA, 19 nt, Artificial Sequence
  Description of Artificial Sequence: Synthetic oligonucleotide
  Sense strand starting at position 3481 of SEQ ID NO: 916350
gguuaaauaaucugugcag

SEQ ID NO: 1149791 - RNA, 19 nt, Artificial Sequence
  Description of Artificial Sequence: Synthetic oligonucleotide
  Antisense strand to SEQ ID NO: 1149790
cugcacagauuauuuaacc

SEQ ID NO: 1149792 - RNA, 19 nt, Artificial Sequence
  Description of Artificial Sequence: Synthetic oligonucleotide
  Sense strand starting at position 3482 of SEQ ID NO: 916350
guuaaauaaucugugcagu

SEQ ID NO: 1149793 - RNA, 19 nt, Artificial Sequence
  Description of Artificial Sequence: Synthetic oligonucleotide
  Antisense strand to SEQ ID NO: 1149792
acugcacagauuauuuaac

SEQ ID NO: 1149794 - RNA, 19 nt, Artificial Sequence
  Description of Artificial Sequence: Synthetic oligonucleotide
  Sense strand starting at position 3484 of SEQ ID NO: 916350
uaaauaaucugugcagugu

SEQ ID NO: 1149795 - RNA, 19 nt, Artificial Sequence
  Description of Artificial Sequence: Synthetic oligonucleotide
  Antisense strand to SEQ ID NO: 1149794
acacugcacagauuauuua

SEQ ID NO: 1149796 - RNA, 19 nt, Artificial Sequence
  Description of Artificial Sequence: Synthetic oligonucleotide
  Sense strand starting at position 3492 of SEQ ID NO: 916350
cugugcagugucugauaca

SEQ ID NO: 1149797 - RNA, 19 nt, Artificial Sequence
  Description of Artificial Sequence: Synthetic oligonucleotide
  Antisense strand to SEQ ID NO: 1149796
uguaucagacacugcacag

SEQ ID NO: 1149798 - RNA, 19 nt, Artificial Sequence
  Description of Artificial Sequence: Synthetic oligonucleotide
  Sense strand starting at position 3527 of SEQ ID NO: 916350
aguggugguggucauuaaa

SEQ ID NO: 1149799 - RNA, 19 nt, Artificial Sequence
  Description of Artificial Sequence: Synthetic oligonucleotide
  Antisense strand to SEQ ID NO: 1149798
uuuaaugaccaccaccacu

SEQ ID NO: 1149800 - RNA, 19 nt, Artificial Sequence
  Description of Artificial Sequence: Synthetic oligonucleotide
  Sense strand starting at position 3530 of SEQ ID NO: 916350
ggugguggucauuaaaccu

SEQ ID NO: 1149801 - RNA, 19 nt, Artificial Sequence
  Description of Artificial Sequence: Synthetic oligonucleotide
  Antisense strand to SEQ ID NO: 1149800
agguuuaaugaccaccacc

SEQ ID NO: 1149802 - RNA, 19 nt, Artificial Sequence
  Description of Artificial Sequence: Synthetic oligonucleotide
  Sense strand starting at position 3592 of SEQ ID NO: 916350
uuagucagcaguugguauu

SEQ ID NO: 1149803 - RNA, 19 nt, Artificial Sequence
  Description of Artificial Sequence: Synthetic oligonucleotide
  Antisense strand to SEQ ID NO: 1149802
aauaccaacugcugacuaa

SEQ ID NO: 1149804 - RNA, 19 nt, Artificial Sequence
  Description of Artificial Sequence: Synthetic oligonucleotide
  Sense strand starting at position 3643 of SEQ ID NO: 916350
agacaagagucugaauccu

SEQ ID NO: 1149805 - RNA, 19 nt, Artificial Sequence
  Description of Artificial Sequence: Synthetic oligonucleotide
  Antisense strand to SEQ ID NO: 1149804
aggauucagacucuugucu

SEQ ID NO: 1149806 - RNA, 19 nt, Artificial Sequence
  Description of Artificial Sequence: Synthetic oligonucleotide
  Sense strand starting at position 3658 of SEQ ID NO: 916350
uccugccucuuaguuauua

SEQ ID NO: 1149807 - RNA, 19 nt, Artificial Sequence
  Description of Artificial Sequence: Synthetic oligonucleotide
  Antisense strand to SEQ ID NO: 1149806
uaauaacuaagaggcagga

SEQ ID NO: 1149808 - RNA, 19 nt, Artificial Sequence
  Description of Artificial Sequence: Synthetic oligonucleotide
  Sense strand starting at position 3700 of SEQ ID NO: 916350
aauggucuagacuggagua

SEQ ID NO: 1149809 - RNA, 19 nt, Artificial Sequence
  Description of Artificial Sequence: Synthetic oligonucleotide
  Antisense strand to SEQ ID NO: 1149808
uacuccagucuagaccauu

SEQ ID NO: 1149810 - RNA, 19 nt, Artificial Sequence
  Description of Artificial Sequence: Synthetic oligonucleotide
  Sense strand starting at position 3757 of SEQ ID NO: 916350
cuuauuagaugagaucacu

SEQ ID NO: 1149811 - RNA, 19 nt, Artificial Sequence
  Description of Artificial Sequence: Synthetic oligonucleotide
  Antisense strand to SEQ ID NO: 1149810
agugaucucaucuaauaag

SEQ ID NO: 1149812 - RNA, 19 nt, Artificial Sequence
  Description of Artificial Sequence: Synthetic oligonucleotide
  Sense strand starting at position 3766 of SEQ ID NO: 916350
ugagaucacuuauaaagga

SEQ ID NO: 1149813 - RNA, 19 nt, Artificial Sequence
  Description of Artificial Sequence: Synthetic oligonucleotide
  Antisense strand to SEQ ID NO: 1149812
uccuuuauaagugaucuca

SEQ ID NO: 1149814 - RNA, 19 nt, Artificial Sequence
  Description of Artificial Sequence: Synthetic oligonucleotide
  Sense strand starting at position 3816 of SEQ ID NO: 916350
uuaaaugaucuugguuauc

SEQ ID NO: 1149815 - RNA, 19 nt, Artificial Sequence
  Description of Artificial Sequence: Synthetic oligonucleotide
  Antisense strand to SEQ ID NO: 1149814
gauaaccaagaucauuuaa

SEQ ID NO: 1149816 - RNA, 19 nt, Artificial Sequence
  Description of Artificial Sequence: Synthetic oligonucleotide
  Sense strand starting at position 3821 of SEQ ID NO: 916350
ugaucuugguuaucaccaa

SEQ ID NO: 1149817 - RNA, 19 nt, Artificial Sequence
  Description of Artificial Sequence: Synthetic oligonucleotide
  Antisense strand to SEQ ID NO: 1149816
uuggugauaaccaagauca

SEQ ID NO: 1149818 - RNA, 19 nt, Artificial Sequence
  Description of Artificial Sequence: Synthetic oligonucleotide
  Sense strand starting at position 3866 of SEQ ID NO: 916350
auaugauucuuguuucccu

SEQ ID NO: 1149819 - RNA, 19 nt, Artificial Sequence
  Description of Artificial Sequence: Synthetic oligonucleotide
  Antisense strand to SEQ ID NO: 1149818
agggaaacaagaaucauau

SEQ ID NO: 1149820 - RNA, 19 nt, Artificial Sequence
  Description of Artificial Sequence: Synthetic oligonucleotide
  Sense strand starting at position 712 of SEQ ID NO: 916351
cggugucuucggaagcacu

SEQ ID NO: 1149821 - RNA, 19 nt, Artificial Sequence
  Description of Artificial Sequence: Synthetic oligonucleotide
  Antisense strand to SEQ ID NO: 1149820
agugcuuccgaagacaccg

SEQ ID NO: 1149822 - RNA, 19 nt, Artificial Sequence
  Description of Artificial Sequence: Synthetic oligonucleotide
  Sense strand starting at position 797 of SEQ ID NO: 916351
ccgggagccugguuaugua

SEQ ID NO: 1149823 - RNA, 19 nt, Artificial Sequence
  Description of Artificial Sequence: Synthetic oligonucleotide
  Antisense strand to SEQ ID NO: 1149822
uacauaaccaggcucccgg

SEQ ID NO: 1149824 - RNA, 19 nt, Artificial Sequence
  Description of Artificial Sequence: Synthetic oligonucleotide
  Sense strand starting at position 1342 of SEQ ID NO: 916351
cacuuaagugucugagacu

SEQ ID NO: 1149825 - RNA, 19 nt, Artificial Sequence
  Description of Artificial Sequence: Synthetic oligonucleotide
  Antisense strand to SEQ ID NO: 1149824
agucucagacacuuaagug

SEQ ID NO: 1149826 - RNA, 19 nt, Artificial Sequence
  Description of Artificial Sequence: Synthetic oligonucleotide
  Sense strand starting at position 1345 of SEQ ID NO: 916351
uuaagugucugagacucua

SEQ ID NO: 1149827 - RNA, 19 nt, Artificial Sequence
  Description of Artificial Sequence: Synthetic oligonucleotide
  Antisense strand to SEQ ID NO: 1149826
uagagucucagacacuuaa

SEQ ID NO: 1149828 - RNA, 19 nt, Artificial Sequence
  Description of Artificial Sequence: Synthetic oligonucleotide
  Sense strand starting at position 1714 of SEQ ID NO: 916351
agccgagaucuacaaaguu

SEQ ID NO: 1149829 - RNA, 19 nt, Artificial Sequence
  Description of Artificial Sequence: Synthetic oligonucleotide
  Antisense strand to SEQ ID NO: 1149828
aacuuuguagaucucggcu

SEQ ID NO: 1149830 - RNA, 19 nt, Artificial Sequence
  Description of Artificial Sequence: Synthetic oligonucleotide
  Sense strand starting at position 1748 of SEQ ID NO: 916351
ggcagauccguuugcaaag

SEQ ID NO: 1149831 - RNA, 19 nt, Artificial Sequence
  Description of Artificial Sequence: Synthetic oligonucleotide
  Antisense strand to SEQ ID NO: 1149830
cuuugcaaacggaucugcc

SEQ ID NO: 1149832 - RNA, 19 nt, Artificial Sequence
  Description of Artificial Sequence: Synthetic oligonucleotide
  Sense strand starting at position 1749 of SEQ ID NO: 916351
gcagauccguuugcaaagu

SEQ ID NO: 1149833 - RNA, 19 nt, Artificial Sequence
  Description of Artificial Sequence: Synthetic oligonucleotide
  Antisense strand to SEQ ID NO: 1149832
acuuugcaaacggaucugc

SEQ ID NO: 1149834 - RNA, 19 nt, Artificial Sequence
  Description of Artificial Sequence: Synthetic oligonucleotide
  Sense strand starting at position 1758 of SEQ ID NO: 916351
uuugcaaaguccuaggaaa

SEQ ID NO: 1149835 - RNA, 19 nt, Artificial Sequence
  Description of Artificial Sequence: Synthetic oligonucleotide
  Antisense strand to SEQ ID NO: 1149834
uuuccuaggacuuugcaaa

SEQ ID NO: 1149836 - RNA, 19 nt, Artificial Sequence
  Description of Artificial Sequence: Synthetic oligonucleotide
  Sense strand starting at position 1801 of SEQ ID NO: 916351
gggaggcgucgacgucaua

SEQ ID NO: 1149837 - RNA, 19 nt, Artificial Sequence
  Description of Artificial Sequence: Synthetic oligonucleotide
  Antisense strand to SEQ ID NO: 1149836
uaugacgucgacgccuccc

SEQ ID NO: 1149838 - RNA, 19 nt, Artificial Sequence
  Description of Artificial Sequence: Synthetic oligonucleotide
  Sense strand starting at position 2041 of SEQ ID NO: 916351
gggaguugugugcagagcu

SEQ ID NO: 1149839 - RNA, 19 nt, Artificial Sequence
  Description of Artificial Sequence: Synthetic oligonucleotide
  Antisense strand to SEQ ID NO: 1149838
agcucugcacacaacuccc

SEQ ID NO: 1149840 - RNA, 19 nt, Artificial Sequence
  Description of Artificial Sequence: Synthetic oligonucleotide
  Sense strand starting at position 2412 of SEQ ID NO: 916351
gggugauccucugcagauc

SEQ ID NO: 1149841 - RNA, 19 nt, Artificial Sequence
  Description of Artificial Sequence: Synthetic oligonucleotide
  Antisense strand to SEQ ID NO: 1149840
gaucugcagaggaucaccc

SEQ ID NO: 1149842 - RNA, 19 nt, Artificial Sequence
  Description of Artificial Sequence: Synthetic oligonucleotide
  Sense strand starting at position 2482 of SEQ ID NO: 916351
gaaauuagcucggcuucca

SEQ ID NO: 1149843 - RNA, 19 nt, Artificial Sequence
  Description of Artificial Sequence: Synthetic oligonucleotide
  Antisense strand to SEQ ID NO: 1149842
uggaagccgagcuaauuuc

SEQ ID NO: 1149844 - RNA, 19 nt, Artificial Sequence
  Description of Artificial Sequence: Synthetic oligonucleotide
  Sense strand starting at position 2609 of SEQ ID NO: 916351
ggaagacguugccuuucau

SEQ ID NO: 1149845 - RNA, 19 nt, Artificial Sequence
  Description of Artificial Sequence: Synthetic oligonucleotide
  Antisense strand to SEQ ID NO: 1149844
augaaaggcaacgucuucc

SEQ ID NO: 1149846 - RNA, 19 nt, Artificial Sequence
  Description of Artificial Sequence: Synthetic oligonucleotide
  Sense strand starting at position 2730 of SEQ ID NO: 916351
gauagaugcucaggagcga

SEQ ID NO: 1149847 - RNA, 19 nt, Artificial Sequence
  Description of Artificial Sequence: Synthetic oligonucleotide
  Antisense strand to SEQ ID NO: 1149846
ucgcuccugagcaucuauc

SEQ ID NO: 1149848 - RNA, 19 nt, Artificial Sequence
  Description of Artificial Sequence: Synthetic oligonucleotide
  Sense strand starting at position 2745 of SEQ ID NO: 916351
gcgaaagacgcagagaauu

SEQ ID NO: 1149849 - RNA, 19 nt, Artificial Sequence
  Description of Artificial Sequence: Synthetic oligonucleotide
  Antisense strand to SEQ ID NO: 1149848
aauucucugcgucuuucgc

SEQ ID NO: 1149850 - RNA, 19 nt, Artificial Sequence
  Description of Artificial Sequence: Synthetic oligonucleotide
  Sense strand starting at position 2815 of SEQ ID NO: 916351
guugguaguuuauagaaga

SEQ ID NO: 1149851 - RNA, 19 nt, Artificial Sequence
  Description of Artificial Sequence: Synthetic oligonucleotide
  Antisense strand to SEQ ID NO: 1149850
ucuucuauaaacuaccaac

SEQ ID NO: 1149852 - RNA, 19 nt, Artificial Sequence
  Description of Artificial Sequence: Synthetic oligonucleotide
  Sense strand starting at position 2829 of SEQ ID NO: 916351
gaagacaagucgguggaaa

SEQ ID NO: 1149853 - RNA, 19 nt, Artificial Sequence
  Description of Artificial Sequence: Synthetic oligonucleotide
  Antisense strand to SEQ ID NO: 1149852
uuuccaccgacuugucuuc

SEQ ID NO: 1149854 - RNA, 19 nt, Artificial Sequence
  Description of Artificial Sequence: Synthetic oligonucleotide
  Sense strand starting at position 2830 of SEQ ID NO: 916351
aagacaagucgguggaaag

SEQ ID NO: 1149855 - RNA, 19 nt, Artificial Sequence
  Description of Artificial Sequence: Synthetic oligonucleotide
  Antisense strand to SEQ ID NO: 1149854
cuuuccaccgacuugucuu

SEQ ID NO: 1149856 - RNA, 19 nt, Artificial Sequence
  Description of Artificial Sequence: Synthetic oligonucleotide
  Sense strand starting at position 2877 of SEQ ID NO: 916351
gaacucuagugcccuugau

SEQ ID NO: 1149857 - RNA, 19 nt, Artificial Sequence
  Description of Artificial Sequence: Synthetic oligonucleotide
  Antisense strand to SEQ ID NO: 1149856
aucaagggcacuagaguuc

SEQ ID NO: 1149858 - RNA, 19 nt, Artificial Sequence
  Description of Artificial Sequence: Synthetic oligonucleotide
  Sense strand starting at position 2908 of SEQ ID NO: 916351
gggcuucuuagcggaggua

SEQ ID NO: 1149859 - RNA, 19 nt, Artificial Sequence
  Description of Artificial Sequence: Synthetic oligonucleotide
  Antisense strand to SEQ ID NO: 1149858
uaccuccgcuaagaagccc

SEQ ID NO: 1149860 - RNA, 19 nt, Artificial Sequence
  Description of Artificial Sequence: Synthetic oligonucleotide
  Sense strand starting at position 2909 of SEQ ID NO: 916351
ggcuucuuagcggagguau

SEQ ID NO: 1149861 - RNA, 19 nt, Artificial Sequence
  Description of Artificial Sequence: Synthetic oligonucleotide
  Antisense strand to SEQ ID NO: 1149860
auaccuccgcuaagaagcc

SEQ ID NO: 1149862 - RNA, 19 nt, Artificial Sequence
  Description of Artificial Sequence: Synthetic oligonucleotide
  Sense strand starting at position 2940 of SEQ ID NO: 916351
uacauacaugggugucauu

SEQ ID NO: 1149863 - RNA, 19 nt, Artificial Sequence
  Description of Artificial Sequence: Synthetic oligonucleotide
  Antisense strand to SEQ ID NO: 1149862
aaugacacccauguaugua

SEQ ID NO: 1149864 - RNA, 19 nt, Artificial Sequence
  Description of Artificial Sequence: Synthetic oligonucleotide
  Sense strand starting at position 3044 of SEQ ID NO: 916351
gucgacuuggcuugagaaa

SEQ ID NO: 1149865 - RNA, 19 nt, Artificial Sequence
  Description of Artificial Sequence: Synthetic oligonucleotide
  Antisense strand to SEQ ID NO: 1149864
uuucucaagccaagucgac

SEQ ID NO: 1149866 - RNA, 19 nt, Artificial Sequence
  Description of Artificial Sequence: Synthetic oligonucleotide
  Sense strand starting at position 3111 of SEQ ID NO: 916351
ccugaucuugcggguaaag

SEQ ID NO: 1149867 - RNA, 19 nt, Artificial Sequence
  Description of Artificial Sequence: Synthetic oligonucleotide
  Antisense strand to SEQ ID NO: 1149866
cuuuacccgcaagaucagg

SEQ ID NO: 1149868 - RNA, 19 nt, Artificial Sequence
  Description of Artificial Sequence: Synthetic oligonucleotide
  Sense strand starting at position 3113 of SEQ ID NO: 916351
ugaucuugcggguaaagau

SEQ ID NO: 1149869 - RNA, 19 nt, Artificial Sequence
  Description of Artificial Sequence: Synthetic oligonucleotide
  Antisense strand to SEQ ID NO: 1149868
aucuuuacccgcaagauca

SEQ ID NO: 1149870 - RNA, 19 nt, Artificial Sequence
  Description of Artificial Sequence: Synthetic oligonucleotide
  Sense strand starting at position 3122 of SEQ ID NO: 916351
ggguaaagaugcugauaaa

SEQ ID NO: 1149871 - RNA, 19 nt, Artificial Sequence
  Description of Artificial Sequence: Synthetic oligonucleotide
  Antisense strand to SEQ ID NO: 1149870
uuuaucagcaucuuuaccc

SEQ ID NO: 1149872 - RNA, 19 nt, Artificial Sequence
  Description of Artificial Sequence: Synthetic oligonucleotide
  Sense strand starting at position 3185 of SEQ ID NO: 916351
aggcuuugagccugacauu

SEQ ID NO: 1149873 - RNA, 19 nt, Artificial Sequence
  Description of Artificial Sequence: Synthetic oligonucleotide
  Antisense strand to SEQ ID NO: 1149872
aaugucaggcucaaagccu

SEQ ID NO: 1149874 - RNA, 19 nt, Artificial Sequence
  Description of Artificial Sequence: Synthetic oligonucleotide
  Sense strand starting at position 3212 of SEQ ID NO: 916351
gccauaacccugugggaua

SEQ ID NO: 1149875 - RNA, 19 nt, Artificial Sequence
  Description of Artificial Sequence: Synthetic oligonucleotide
  Antisense strand to SEQ ID NO: 1149874
uaucccacaggguuauggc

SEQ ID NO: 1149876 - RNA, 19 nt, Artificial Sequence
  Description of Artificial Sequence: Synthetic oligonucleotide
  Sense strand starting at position 3363 of SEQ ID NO: 916351
gagauacgaugucacuauc

SEQ ID NO: 1149877 - RNA, 19 nt, Artificial Sequence
  Description of Artificial Sequence: Synthetic oligonucleotide
  Antisense strand to SEQ ID NO: 1149876
gauagugacaucguaucuc

SEQ ID NO: 1149878 - RNA, 19 nt, Artificial Sequence
  Description of Artificial Sequence: Synthetic oligonucleotide
  Sense strand starting at position 3384 of SEQ ID NO: 916351
caucguauuggccguccua

SEQ ID NO: 1149879 - RNA, 19 nt, Artificial Sequence
  Description of Artificial Sequence: Synthetic oligonucleotide
  Antisense strand to SEQ ID NO: 1149878
uaggacggccaauacgaug

SEQ ID NO: 1149880 - RNA, 19 nt, Artificial Sequence
  Description of Artificial Sequence: Synthetic oligonucleotide
  Sense strand starting at position 3385 of SEQ ID NO: 916351
aucguauuggccguccuaa

SEQ ID NO: 1149881 - RNA, 19 nt, Artificial Sequence
  Description of Artificial Sequence: Synthetic oligonucleotide
  Antisense strand to SEQ ID NO: 1149880
uuaggacggccaauacgau

SEQ ID NO: 1149882 - RNA, 19 nt, Artificial Sequence
  Description of Artificial Sequence: Synthetic oligonucleotide
  Sense strand starting at position 3428 of SEQ ID NO: 916351
uuagaaguuuccuguccua

SEQ ID NO: 1149883 - RNA, 19 nt, Artificial Sequence
  Description of Artificial Sequence: Synthetic oligonucleotide
  Antisense strand to SEQ ID NO: 1149882
uaggacaggaaacuucuaa

SEQ ID NO: 1149884 - RNA, 19 nt, Artificial Sequence
  Description of Artificial Sequence: Synthetic oligonucleotide
  Sense strand starting at position 3440 of SEQ ID NO: 916351
uguccuaucugacuguagu

SEQ ID NO: 1149885 - RNA, 19 nt, Artificial Sequence
  Description of Artificial Sequence: Synthetic oligonucleotide
  Antisense strand to SEQ ID NO: 1149884
acuacagucagauaggaca

SEQ ID NO: 1149886 - RNA, 19 nt, Artificial Sequence
  Description of Artificial Sequence: Synthetic oligonucleotide
  Sense strand starting at position 3453 of SEQ ID NO: 916351
uguagucuuucccacccau

SEQ ID NO: 1149887 - RNA, 19 nt, Artificial Sequence
  Description of Artificial Sequence: Synthetic oligonucleotide
  Antisense strand to SEQ ID NO: 1149886
augggugggaaagacuaca

SEQ ID NO: 1149888 - RNA, 19 nt, Artificial Sequence
  Description of Artificial Sequence: Synthetic oligonucleotide
  Sense strand starting at position 3476 of SEQ ID NO: 916351
aaaggcuacucuuugaagu

SEQ ID NO: 1149889 - RNA, 19 nt, Artificial Sequence
  Description of Artificial Sequence: Synthetic oligonucleotide
  Antisense strand to SEQ ID NO: 1149888
acuucaaagaguagccuuu

SEQ ID NO: 1149890 - RNA, 19 nt, Artificial Sequence
  Description of Artificial Sequence: Synthetic oligonucleotide
  Sense strand starting at position 3478 of SEQ ID NO: 916351
aggcuacucuuugaaguuu

SEQ ID NO: 1149891 - RNA, 19 nt, Artificial Sequence
  Description of Artificial Sequence: Synthetic oligonucleotide
  Antisense strand to SEQ ID NO: 1149890
aaacuucaaagaguagccu

SEQ ID NO: 1149892 - RNA, 19 nt, Artificial Sequence
  Description of Artificial Sequence: Synthetic oligonucleotide
  Sense strand starting at position 3539 of SEQ ID NO: 916351
ggaugaggcugggaaacau

SEQ ID NO: 1149893 - RNA, 19 nt, Artificial Sequence
  Description of Artificial Sequence: Synthetic oligonucleotide
  Antisense strand to SEQ ID NO: 1149892
auguuucccagccucaucc

SEQ ID NO: 1149894 - RNA, 19 nt, Artificial Sequence
  Description of Artificial Sequence: Synthetic oligonucleotide
  Sense strand starting at position 3677 of SEQ ID NO: 916351
guuccugucuuucucacaa

SEQ ID NO: 1149895 - RNA, 19 nt, Artificial Sequence
  Description of Artificial Sequence: Synthetic oligonucleotide
  Antisense strand to SEQ ID NO: 1149894
uugugagaaagacaggaac

SEQ ID NO: 1149896 - RNA, 19 nt, Artificial Sequence
  Description of Artificial Sequence: Synthetic oligonucleotide
  Sense strand starting at position 3714 of SEQ ID NO: 916351
cgucuuguucguucccauu

SEQ ID NO: 1149897 - RNA, 19 nt, Artificial Sequence
  Description of Artificial Sequence: Synthetic oligonucleotide
  Antisense strand to SEQ ID NO: 1149896
aaugggaacgaacaagacg

SEQ ID NO: 1149898 - RNA, 19 nt, Artificial Sequence
  Description of Artificial Sequence: Synthetic oligonucleotide
  Sense strand starting at position 3947 of SEQ ID NO: 916351
cgcaaagugaauuaaguga

SEQ ID NO: 1149899 - RNA, 19 nt, Artificial Sequence
  Description of Artificial Sequence: Synthetic oligonucleotide
  Antisense strand to SEQ ID NO: 1149898
ucacuuaauucacuuugcg

SEQ ID NO: 1149900 - RNA, 19 nt, Artificial Sequence
  Description of Artificial Sequence: Synthetic oligonucleotide
  Sense strand starting at position 156 of SEQ ID NO: 916352
cggugucuucggaagcacu

SEQ ID NO: 1149901 - RNA, 19 nt, Artificial Sequence
  Description of Artificial Sequence: Synthetic oligonucleotide
  Antisense strand to SEQ ID NO: 1149900
agugcuuccgaagacaccg

SEQ ID NO: 1149902 - RNA, 19 nt, Artificial Sequence
  Description of Artificial Sequence: Synthetic oligonucleotide
  Sense strand starting at position 241 of SEQ ID NO: 916352
ccgggagccugguuaugua

SEQ ID NO: 1149903 - RNA, 19 nt, Artificial Sequence
  Description of Artificial Sequence: Synthetic oligonucleotide
  Antisense strand to SEQ ID NO: 1149902
uacauaaccaggcucccgg

SEQ ID NO: 1149904 - RNA, 19 nt, Artificial Sequence
  Description of Artificial Sequence: Synthetic oligonucleotide
  Sense strand starting at position 786 of SEQ ID NO: 916352
cacuuaagugucugagacu

SEQ ID NO: 1149905 - RNA, 19 nt, Artificial Sequence
  Description of Artificial Sequence: Synthetic oligonucleotide
  Antisense strand to SEQ ID NO: 1149904
agucucagacacuuaagug

SEQ ID NO: 1149906 - RNA, 19 nt, Artificial Sequence
  Description of Artificial Sequence: Synthetic oligonucleotide
  Sense strand starting at position 1158 of SEQ ID NO: 916352
agccgagaucuacaaaguu

SEQ ID NO: 1149907 - RNA, 19 nt, Artificial Sequence
  Description of Artificial Sequence: Synthetic oligonucleotide
  Antisense strand to SEQ ID NO: 1149906
aacuuuguagaucucggcu

SEQ ID NO: 1149908 - RNA, 19 nt, Artificial Sequence
  Description of Artificial Sequence: Synthetic oligonucleotide
  Sense strand starting at position 1192 of SEQ ID NO: 916352
ggcagauccguuugcaaag

SEQ ID NO: 1149909 - RNA, 19 nt, Artificial Sequence
  Description of Artificial Sequence: Synthetic oligonucleotide
  Antisense strand to SEQ ID NO: 1149908
cuuugcaaacggaucugcc

SEQ ID NO: 1149910 - RNA, 19 nt, Artificial Sequence
  Description of Artificial Sequence: Synthetic oligonucleotide
  Sense strand starting at position 1485 of SEQ ID NO: 916352
gggaguugugugcagagcu

SEQ ID NO: 1149911 - RNA, 19 nt, Artificial Sequence
  Description of Artificial Sequence: Synthetic oligonucleotide
  Antisense strand to SEQ ID NO: 1149910
agcucugcacacaacuccc

SEQ ID NO: 1149912 - RNA, 19 nt, Artificial Sequence
  Description of Artificial Sequence: Synthetic oligonucleotide
  Sense strand starting at position 1856 of SEQ ID NO: 916352
gggugauccucugcagauc

SEQ ID NO: 1149913 - RNA, 19 nt, Artificial Sequence
  Description of Artificial Sequence: Synthetic oligonucleotide
  Antisense strand to SEQ ID NO: 1149912
gaucugcagaggaucaccc

SEQ ID NO: 1149914 - RNA, 19 nt, Artificial Sequence
  Description of Artificial Sequence: Synthetic oligonucleotide
  Sense strand starting at position 1926 of SEQ ID NO: 916352
gaaauuagcucggcuucca

SEQ ID NO: 1149915 - RNA, 19 nt, Artificial Sequence
  Description of Artificial Sequence: Synthetic oligonucleotide
  Antisense strand to SEQ ID NO: 1149914
uggaagccgagcuaauuuc

SEQ ID NO: 1149916 - RNA, 19 nt, Artificial Sequence
  Description of Artificial Sequence: Synthetic oligonucleotide
  Sense strand starting at position 2053 of SEQ ID NO: 916352
ggaagacguugccuuucau

SEQ ID NO: 1149917 - RNA, 19 nt, Artificial Sequence
  Description of Artificial Sequence: Synthetic oligonucleotide
  Antisense strand to SEQ ID NO: 1149916
augaaaggcaacgucuucc

SEQ ID NO: 1149918 - RNA, 19 nt, Artificial Sequence
  Description of Artificial Sequence: Synthetic oligonucleotide
  Sense strand starting at position 2189 of SEQ ID NO: 916352
gcgaaagacgcagagaauu

SEQ ID NO: 1149919 - RNA, 19 nt, Artificial Sequence
  Description of Artificial Sequence: Synthetic oligonucleotide
  Antisense strand to SEQ ID NO: 1149918
aauucucugcgucuuucgc

SEQ ID NO: 1149920 - RNA, 19 nt, Artificial Sequence
  Description of Artificial Sequence: Synthetic oligonucleotide
  Sense strand starting at position 2273 of SEQ ID NO: 916352
gaagacaagucgguggaaa

SEQ ID NO: 1149921 - RNA, 19 nt, Artificial Sequence
  Description of Artificial Sequence: Synthetic oligonucleotide
  Antisense strand to SEQ ID NO: 1149920
uuuccaccgacuugucuuc

SEQ ID NO: 1149922 - RNA, 19 nt, Artificial Sequence
  Description of Artificial Sequence: Synthetic oligonucleotide
  Sense strand starting at position 2274 of SEQ ID NO: 916352
aagacaagucgguggaaag

SEQ ID NO: 1149923 - RNA, 19 nt, Artificial Sequence
  Description of Artificial Sequence: Synthetic oligonucleotide
  Antisense strand to SEQ ID NO: 1149922
cuuuccaccgacuugucuu

SEQ ID NO: 1149924 - RNA, 19 nt, Artificial Sequence
  Description of Artificial Sequence: Synthetic oligonucleotide
  Sense strand starting at position 2321 of SEQ ID NO: 916352
gaacucuagugcccuugau

SEQ ID NO: 1149925 - RNA, 19 nt, Artificial Sequence
  Description of Artificial Sequence: Synthetic oligonucleotide
  Antisense strand to SEQ ID NO: 1149924
aucaagggcacuagaguuc

SEQ ID NO: 1149926 - RNA, 19 nt, Artificial Sequence
  Description of Artificial Sequence: Synthetic oligonucleotide
  Sense strand starting at position 2352 of SEQ ID NO: 916352
gggcuucuuagcggaggua

SEQ ID NO: 1149927 - RNA, 19 nt, Artificial Sequence
  Description of Artificial Sequence: Synthetic oligonucleotide
  Antisense strand to SEQ ID NO: 1149926
uaccuccgcuaagaagccc

SEQ ID NO: 1149928 - RNA, 19 nt, Artificial Sequence
  Description of Artificial Sequence: Synthetic oligonucleotide
  Sense strand starting at position 2353 of SEQ ID NO: 916352
ggcuucuuagcggagguau

SEQ ID NO: 1149929 - RNA, 19 nt, Artificial Sequence
  Description of Artificial Sequence: Synthetic oligonucleotide
  Antisense strand to SEQ ID NO: 1149928
auaccuccgcuaagaagcc

SEQ ID NO: 1149930 - RNA, 19 nt, Artificial Sequence
  Description of Artificial Sequence: Synthetic oligonucleotide
  Sense strand starting at position 2384 of SEQ ID NO: 916352
uacauacaugggugucauu

SEQ ID NO: 1149931 - RNA, 19 nt, Artificial Sequence
  Description of Artificial Sequence: Synthetic oligonucleotide
  Antisense strand to SEQ ID NO: 1149930
aaugacacccauguaugua

SEQ ID NO: 1149932 - RNA, 19 nt, Artificial Sequence
  Description of Artificial Sequence: Synthetic oligonucleotide
  Sense strand starting at position 2488 of SEQ ID NO: 916352
gucgacuuggcuugagaaa

SEQ ID NO: 1149933 - RNA, 19 nt, Artificial Sequence
  Description of Artificial Sequence: Synthetic oligonucleotide
  Antisense strand to SEQ ID NO: 1149932
uuucucaagccaagucgac

SEQ ID NO: 1149934 - RNA, 19 nt, Artificial Sequence
  Description of Artificial Sequence: Synthetic oligonucleotide
  Sense strand starting at position 2555 of SEQ ID NO: 916352
ccugaucuugcggguaaag

SEQ ID NO: 1149935 - RNA, 19 nt, Artificial Sequence
  Description of Artificial Sequence: Synthetic oligonucleotide
  Antisense strand to SEQ ID NO: 1149934
cuuuacccgcaagaucagg

SEQ ID NO: 1149936 - RNA, 19 nt, Artificial Sequence
  Description of Artificial Sequence: Synthetic oligonucleotide
  Sense strand starting at position 2557 of SEQ ID NO: 916352
ugaucuugcggguaaagau

SEQ ID NO: 1149937 - RNA, 19 nt, Artificial Sequence
  Description of Artificial Sequence: Synthetic oligonucleotide
  Antisense strand to SEQ ID NO: 1149936
aucuuuacccgcaagauca

SEQ ID NO: 1149938 - RNA, 19 nt, Artificial Sequence
  Description of Artificial Sequence: Synthetic oligonucleotide
  Sense strand starting at position 2629 of SEQ ID NO: 916352
aggcuuugagccugacauu

SEQ ID NO: 1149939 - RNA, 19 nt, Artificial Sequence
  Description of Artificial Sequence: Synthetic oligonucleotide
  Antisense strand to SEQ ID NO: 1149938
aaugucaggcucaaagccu

SEQ ID NO: 1149940 - RNA, 19 nt, Artificial Sequence
  Description of Artificial Sequence: Synthetic oligonucleotide
  Sense strand starting at position 2656 of SEQ ID NO: 916352
gccauaacccugugggaua

SEQ ID NO: 1149941 - RNA, 19 nt, Artificial Sequence
  Description of Artificial Sequence: Synthetic oligonucleotide
  Antisense strand to SEQ ID NO: 1149940
uaucccacaggguuauggc

SEQ ID NO: 1149942 - RNA, 19 nt, Artificial Sequence
  Description of Artificial Sequence: Synthetic oligonucleotide
  Sense strand starting at position 2829 of SEQ ID NO: 916352
aucguauuggccguccuaa

SEQ ID NO: 1149943 - RNA, 19 nt, Artificial Sequence
  Description of Artificial Sequence: Synthetic oligonucleotide
  Antisense strand to SEQ ID NO: 1149942
uuaggacggccaauacgau

SEQ ID NO: 1149944 - RNA, 19 nt, Artificial Sequence
  Description of Artificial Sequence: Synthetic oligonucleotide
  Sense strand starting at position 2884 of SEQ ID NO: 916352
uguccuaucugacuguagu

SEQ ID NO: 1149945 - RNA, 19 nt, Artificial Sequence
  Description of Artificial Sequence: Synthetic oligonucleotide
  Antisense strand to SEQ ID NO: 1149944
acuacagucagauaggaca

SEQ ID NO: 1149946 - RNA, 19 nt, Artificial Sequence
  Description of Artificial Sequence: Synthetic oligonucleotide
  Sense strand starting at position 2920 of SEQ ID NO: 916352
aaaggcuacucuuugaagu

SEQ ID NO: 1149947 - RNA, 19 nt, Artificial Sequence
  Description of Artificial Sequence: Synthetic oligonucleotide
  Antisense strand to SEQ ID NO: 1149946
acuucaaagaguagccuuu

SEQ ID NO: 1149948 - RNA, 19 nt, Artificial Sequence
  Description of Artificial Sequence: Synthetic oligonucleotide
  Sense strand starting at position 2983 of SEQ ID NO: 916352
ggaugaggcugggaaacau

SEQ ID NO: 1149949 - RNA, 19 nt, Artificial Sequence
  Description of Artificial Sequence: Synthetic oligonucleotide
  Antisense strand to SEQ ID NO: 1149948
auguuucccagccucaucc

SEQ ID NO: 1149950 - RNA, 19 nt, Artificial Sequence
  Description of Artificial Sequence: Synthetic oligonucleotide
  Sense strand starting at position 3121 of SEQ ID NO: 916352
guuccugucuuucucacaa

SEQ ID NO: 1149951 - RNA, 19 nt, Artificial Sequence
  Description of Artificial Sequence: Synthetic oligonucleotide
  Antisense strand to SEQ ID NO: 1149950
uugugagaaagacaggaac

SEQ ID NO: 1149952 - RNA, 19 nt, Artificial Sequence
  Description of Artificial Sequence: Synthetic oligonucleotide
  Sense strand starting at position 3158 of SEQ ID NO: 916352
cgucuuguucguucccauu

SEQ ID NO: 1149953 - RNA, 19 nt, Artificial Sequence
  Description of Artificial Sequence: Synthetic oligonucleotide
  Antisense strand to SEQ ID NO: 1149952
aaugggaacgaacaagacg

SEQ ID NO: 1149954 - RNA, 19 nt, Artificial Sequence
  Description of Artificial Sequence: Synthetic oligonucleotide
  Sense strand starting at position 3391 of SEQ ID NO: 916352
cgcaaagugaauuaaguga

SEQ ID NO: 1149955 - RNA, 19 nt, Artificial Sequence
  Description of Artificial Sequence: Synthetic oligonucleotide
  Antisense strand to SEQ ID NO: 1149954
ucacuuaauucacuuugcg

SEQ ID NO: 1149956 - RNA, 19 nt, Artificial Sequence
  Description of Artificial Sequence: Synthetic oligonucleotide
  Sense strand starting at position 3536 of SEQ ID NO: 916352
gcagccaccuuaguauaaa

SEQ ID NO: 1149957 - RNA, 19 nt, Artificial Sequence
  Description of Artificial Sequence: Synthetic oligonucleotide
  Antisense strand to SEQ ID NO: 1149956
uuuauacuaagguggcugc

SEQ ID NO: 1149958 - RNA, 19 nt, Artificial Sequence
  Description of Artificial Sequence: Synthetic oligonucleotide
  Sense strand starting at position 3586 of SEQ ID NO: 916352
gaguuccuggccugucaga

SEQ ID NO: 1149959 - RNA, 19 nt, Artificial Sequence
  Description of Artificial Sequence: Synthetic oligonucleotide
  Antisense strand to SEQ ID NO: 1149958
ucugacaggccaggaacuc

SEQ ID NO: 1149960 - RNA, 19 nt, Artificial Sequence
  Description of Artificial Sequence: Synthetic oligonucleotide
  Sense strand starting at position 3645 of SEQ ID NO: 916352
cuuuacaaaccucgaggaa

SEQ ID NO: 1149961 - RNA, 19 nt, Artificial Sequence
  Description of Artificial Sequence: Synthetic oligonucleotide
  Antisense strand to SEQ ID NO: 1149960
uuccucgagguuuguaaag

SEQ ID NO: 1149962 - RNA, 19 nt, Artificial Sequence
  Description of Artificial Sequence: Synthetic oligonucleotide
  Sense strand starting at position 3838 of SEQ ID NO: 916352
aaggcuuuguccuccaguu

SEQ ID NO: 1149963 - RNA, 19 nt, Artificial Sequence
  Description of Artificial Sequence: Synthetic oligonucleotide
  Antisense strand to SEQ ID NO: 1149962
aacuggaggacaaagccuu

SEQ ID NO: 1149964 - RNA, 19 nt, Artificial Sequence
  Description of Artificial Sequence: Synthetic oligonucleotide
  Sense strand starting at position 3840 of SEQ ID NO: 916352
ggcuuuguccuccaguuga

SEQ ID NO: 1149965 - RNA, 19 nt, Artificial Sequence
  Description of Artificial Sequence: Synthetic oligonucleotide
  Antisense strand to SEQ ID NO: 1149964
ucaacuggaggacaaagcc

SEQ ID NO: 1149966 - RNA, 19 nt, Artificial Sequence
  Description of Artificial Sequence: Synthetic oligonucleotide
  Sense strand starting at position 3845 of SEQ ID NO: 916352
uguccuccaguugaaagaa

SEQ ID NO: 1149967 - RNA, 19 nt, Artificial Sequence
  Description of Artificial Sequence: Synthetic oligonucleotide
  Antisense strand to SEQ ID NO: 1149966
uucuuucaacuggaggaca

SEQ ID NO: 1149968 - RNA, 19 nt, Artificial Sequence
  Description of Artificial Sequence: Synthetic oligonucleotide
  Sense strand starting at position 3866 of SEQ ID NO: 916352
ccaagcauuugcucaaagu

SEQ ID NO: 1149969 - RNA, 19 nt, Artificial Sequence
  Description of Artificial Sequence: Synthetic oligonucleotide
  Antisense strand to SEQ ID NO: 1149968
acuuugagcaaaugcuugg

SEQ ID NO: 1149970 - RNA, 19 nt, Artificial Sequence
  Description of Artificial Sequence: Synthetic oligonucleotide
  Sense strand starting at position 3934 of SEQ ID NO: 916352
gcucccaguguugacuaau

SEQ ID NO: 1149971 - RNA, 19 nt, Artificial Sequence
  Description of Artificial Sequence: Synthetic oligonucleotide
  Antisense strand to SEQ ID NO: 1149970
auuagucaacacugggagc

SEQ ID NO: 1149972 - RNA, 19 nt, Artificial Sequence
  Description of Artificial Sequence: Synthetic oligonucleotide
  Sense strand starting at position 3937 of SEQ ID NO: 916352
cccaguguugacuaauugu

SEQ ID NO: 1149973 - RNA, 19 nt, Artificial Sequence
  Description of Artificial Sequence: Synthetic oligonucleotide
  Antisense strand to SEQ ID NO: 1149972
acaauuagucaacacuggg

SEQ ID NO: 1149974 - RNA, 19 nt, Artificial Sequence
  Description of Artificial Sequence: Synthetic oligonucleotide
  Sense strand starting at position 3943 of SEQ ID NO: 916352
guugacuaauugucccaga

SEQ ID NO: 1149975 - RNA, 19 nt, Artificial Sequence
  Description of Artificial Sequence: Synthetic oligonucleotide
  Antisense strand to SEQ ID NO: 1149974
ucugggacaauuagucaac

SEQ ID NO: 1149976 - RNA, 19 nt, Artificial Sequence
  Description of Artificial Sequence: Synthetic oligonucleotide
  Sense strand starting at position 3946 of SEQ ID NO: 916352
gacuaauugucccagagaa

SEQ ID NO: 1149977 - RNA, 19 nt, Artificial Sequence
  Description of Artificial Sequence: Synthetic oligonucleotide
  Antisense strand to SEQ ID NO: 1149976
uucucugggacaauuaguc

SEQ ID NO: 1149978 - RNA, 19 nt, Artificial Sequence
  Description of Artificial Sequence: Synthetic oligonucleotide
  Sense strand starting at position 3948 of SEQ ID NO: 916352
cuaauugucccagagaagu

SEQ ID NO: 1149979 - RNA, 19 nt, Artificial Sequence
  Description of Artificial Sequence: Synthetic oligonucleotide
  Antisense strand to SEQ ID NO: 1149978
acuucucugggacaauuag

SEQ ID NO: 1149980 - RNA, 19 nt, Artificial Sequence
  Description of Artificial Sequence: Synthetic oligonucleotide
  Sense strand starting at position 106 of SEQ ID NO: 916353
gcuugaaaugaguagucua

SEQ ID NO: 1149981 - RNA, 19 nt, Artificial Sequence
  Description of Artificial Sequence: Synthetic oligonucleotide
  Antisense strand to SEQ ID NO: 1149980
uagacuacucauuucaagc

SEQ ID NO: 1149982 - RNA, 19 nt, Artificial Sequence
  Description of Artificial Sequence: Synthetic oligonucleotide
  Sense strand starting at position 109 of SEQ ID NO: 916353
ugaaaugaguagucuauaa

SEQ ID NO: 1149983 - RNA, 19 nt, Artificial Sequence
  Description of Artificial Sequence: Synthetic oligonucleotide
  Antisense strand to SEQ ID NO: 1149982
uuauagacuacucauuuca

SEQ ID NO: 1149984 - RNA, 19 nt, Artificial Sequence
  Description of Artificial Sequence: Synthetic oligonucleotide
  Sense strand starting at position 113 of SEQ ID NO: 916353
augaguagucuauaaccuu

SEQ ID NO: 1149985 - RNA, 19 nt, Artificial Sequence
  Description of Artificial Sequence: Synthetic oligonucleotide
  Antisense strand to SEQ ID NO: 1149984
aagguuauagacuacucau

SEQ ID NO: 1149986 - RNA, 19 nt, Artificial Sequence
  Description of Artificial Sequence: Synthetic oligonucleotide
  Sense strand starting at position 116 of SEQ ID NO: 916353
aguagucuauaaccuuaaa

SEQ ID NO: 1149987 - RNA, 19 nt, Artificial Sequence
  Description of Artificial Sequence: Synthetic oligonucleotide
  Antisense strand to SEQ ID NO: 1149986
uuuaagguuauagacuacu

SEQ ID NO: 1149988 - RNA, 19 nt, Artificial Sequence
  Description of Artificial Sequence: Synthetic oligonucleotide
  Sense strand starting at position 252 of SEQ ID NO: 916353
ccagauuagccucaucugu

SEQ ID NO: 1149989 - RNA, 19 nt, Artificial Sequence
  Description of Artificial Sequence: Synthetic oligonucleotide
  Antisense strand to SEQ ID NO: 1149988
acagaugaggcuaaucugg

SEQ ID NO: 1149990 - RNA, 19 nt, Artificial Sequence
  Description of Artificial Sequence: Synthetic oligonucleotide
  Sense strand starting at position 254 of SEQ ID NO: 916353
agauuagccucaucuguaa

SEQ ID NO: 1149991 - RNA, 19 nt, Artificial Sequence
  Description of Artificial Sequence: Synthetic oligonucleotide
  Antisense strand to SEQ ID NO: 1149990
uuacagaugaggcuaaucu

SEQ ID NO: 1149992 - RNA, 19 nt, Artificial Sequence
  Description of Artificial Sequence: Synthetic oligonucleotide
  Sense strand starting at position 433 of SEQ ID NO: 916353
acugguuaacagugcuuaa

SEQ ID NO: 1149993 - RNA, 19 nt, Artificial Sequence
  Description of Artificial Sequence: Synthetic oligonucleotide
  Antisense strand to SEQ ID NO: 1149992
uuaagcacuguuaaccagu

SEQ ID NO: 1149994 - RNA, 19 nt, Artificial Sequence
  Description of Artificial Sequence: Synthetic oligonucleotide
  Sense strand starting at position 436 of SEQ ID NO: 916353
gguuaacagugcuuaauau

SEQ ID NO: 1149995 - RNA, 19 nt, Artificial Sequence
  Description of Artificial Sequence: Synthetic oligonucleotide
  Antisense strand to SEQ ID NO: 1149994
auauuaagcacuguuaacc

SEQ ID NO: 1149996 - RNA, 19 nt, Artificial Sequence
  Description of Artificial Sequence: Synthetic oligonucleotide
  Sense strand starting at position 437 of SEQ ID NO: 916353
guuaacagugcuuaauauu

SEQ ID NO: 1149997 - RNA, 19 nt, Artificial Sequence
  Description of Artificial Sequence: Synthetic oligonucleotide
  Antisense strand to SEQ ID NO: 1149996
aauauuaagcacuguuaac

SEQ ID NO: 1149998 - RNA, 19 nt, Artificial Sequence
  Description of Artificial Sequence: Synthetic oligonucleotide
  Sense strand starting at position 555 of SEQ ID NO: 916353
ugagacuaguugcuagaaa

SEQ ID NO: 1149999 - RNA, 19 nt, Artificial Sequence
  Description of Artificial Sequence: Synthetic oligonucleotide
  Antisense strand to SEQ ID NO: 1149998
uuucuagcaacuagucuca

SEQ ID NO: 1150000 - RNA, 19 nt, Artificial Sequence
  Description of Artificial Sequence: Synthetic oligonucleotide
  Sense strand starting at position 675 of SEQ ID NO: 916353
cuggucuaaugaguaaaga

SEQ ID NO: 1150001 - RNA, 19 nt, Artificial Sequence
  Description of Artificial Sequence: Synthetic oligonucleotide
  Antisense strand to SEQ ID NO: 1150000
ucuuuacucauuagaccag

SEQ ID NO: 1150002 - RNA, 19 nt, Artificial Sequence
  Description of Artificial Sequence: Synthetic oligonucleotide
  Sense strand starting at position 699 of SEQ ID NO: 916353
accuuugaccuugaguaau

SEQ ID NO: 1150003 - RNA, 19 nt, Artificial Sequence
  Description of Artificial Sequence: Synthetic oligonucleotide
  Antisense strand to SEQ ID NO: 1150002
auuacucaaggucaaaggu

SEQ ID NO: 1150004 - RNA, 19 nt, Artificial Sequence
  Description of Artificial Sequence: Synthetic oligonucleotide
  Sense strand starting at position 701 of SEQ ID NO: 916353
cuuugaccuugaguaauca

SEQ ID NO: 1150005 - RNA, 19 nt, Artificial Sequence
  Description of Artificial Sequence: Synthetic oligonucleotide
  Antisense strand to SEQ ID NO: 1150004
ugauuacucaaggucaaag

SEQ ID NO: 1150006 - RNA, 19 nt, Artificial Sequence
  Description of Artificial Sequence: Synthetic oligonucleotide
  Sense strand starting at position 785 of SEQ ID NO: 916353
gugagauuauaauuaaccu

SEQ ID NO: 1150007 - RNA, 19 nt, Artificial Sequence
  Description of Artificial Sequence: Synthetic oligonucleotide
  Antisense strand to SEQ ID NO: 1150006
agguuaauuauaaucucac

SEQ ID NO: 1150008 - RNA, 19 nt, Artificial Sequence
  Description of Artificial Sequence: Synthetic oligonucleotide
  Sense strand starting at position 817 of SEQ ID NO: 916353
aguuaucugcaauaacugu

SEQ ID NO: 1150009 - RNA, 19 nt, Artificial Sequence
  Description of Artificial Sequence: Synthetic oligonucleotide
  Antisense strand to SEQ ID NO: 1150008
acaguuauugcagauaacu

SEQ ID NO: 1150010 - RNA, 19 nt, Artificial Sequence
  Description of Artificial Sequence: Synthetic oligonucleotide
  Sense strand starting at position 823 of SEQ ID NO: 916353
cugcaauaacugugauucu

SEQ ID NO: 1150011 - RNA, 19 nt, Artificial Sequence
  Description of Artificial Sequence: Synthetic oligonucleotide
  Antisense strand to SEQ ID NO: 1150010
agaaucacaguuauugcag

SEQ ID NO: 1150012 - RNA, 19 nt, Artificial Sequence
  Description of Artificial Sequence: Synthetic oligonucleotide
  Sense strand starting at position 853 of SEQ ID NO: 916353
ucuugaguucccuacguca

SEQ ID NO: 1150013 - RNA, 19 nt, Artificial Sequence
  Description of Artificial Sequence: Synthetic oligonucleotide
  Antisense strand to SEQ ID NO: 1150012
ugacguagggaacucaaga

SEQ ID NO: 1150014 - RNA, 19 nt, Artificial Sequence
  Description of Artificial Sequence: Synthetic oligonucleotide
  Sense strand starting at position 856 of SEQ ID NO: 916353
ugaguucccuacgucaaga

SEQ ID NO: 1150015 - RNA, 19 nt, Artificial Sequence
  Description of Artificial Sequence: Synthetic oligonucleotide
  Antisense strand to SEQ ID NO: 1150014
ucuugacguagggaacuca

SEQ ID NO: 1150016 - RNA, 19 nt, Artificial Sequence
  Description of Artificial Sequence: Synthetic oligonucleotide
  Sense strand starting at position 985 of SEQ ID NO: 916353
caauaauuagucuggaguu

SEQ ID NO: 1150017 - RNA, 19 nt, Artificial Sequence
  Description of Artificial Sequence: Synthetic oligonucleotide
  Antisense strand to SEQ ID NO: 1150016
aacuccagacuaauuauug

SEQ ID NO: 1150018 - RNA, 19 nt, Artificial Sequence
  Description of Artificial Sequence: Synthetic oligonucleotide
  Sense strand starting at position 987 of SEQ ID NO: 916353
auaauuagucuggaguucu

SEQ ID NO: 1150019 - RNA, 19 nt, Artificial Sequence
  Description of Artificial Sequence: Synthetic oligonucleotide
  Antisense strand to SEQ ID NO: 1150018
agaacuccagacuaauuau

SEQ ID NO: 1150020 - RNA, 19 nt, Artificial Sequence
  Description of Artificial Sequence: Synthetic oligonucleotide
  Sense strand starting at position 997 of SEQ ID NO: 916353
uggaguucuugucuaguaa

SEQ ID NO: 1150021 - RNA, 19 nt, Artificial Sequence
  Description of Artificial Sequence: Synthetic oligonucleotide
  Antisense strand to SEQ ID NO: 1150020
uuacuagacaagaacucca

SEQ ID NO: 1150022 - RNA, 19 nt, Artificial Sequence
  Description of Artificial Sequence: Synthetic oligonucleotide
  Sense strand starting at position 998 of SEQ ID NO: 916353
ggaguucuugucuaguaau

SEQ ID NO: 1150023 - RNA, 19 nt, Artificial Sequence
  Description of Artificial Sequence: Synthetic oligonucleotide
  Antisense strand to SEQ ID NO: 1150022
auuacuagacaagaacucc

SEQ ID NO: 1150024 - RNA, 19 nt, Artificial Sequence
  Description of Artificial Sequence: Synthetic oligonucleotide
  Sense strand starting at position 1014 of SEQ ID NO: 916353
aauaccauccggugagacu

SEQ ID NO: 1150025 - RNA, 19 nt, Artificial Sequence
  Description of Artificial Sequence: Synthetic oligonucleotide
  Antisense strand to SEQ ID NO: 1150024
agucucaccggaugguauu

SEQ ID NO: 1150026 - RNA, 19 nt, Artificial Sequence
  Description of Artificial Sequence: Synthetic oligonucleotide
  Sense strand starting at position 1015 of SEQ ID NO: 916353
auaccauccggugagacua

SEQ ID NO: 1150027 - RNA, 19 nt, Artificial Sequence
  Description of Artificial Sequence: Synthetic oligonucleotide
  Antisense strand to SEQ ID NO: 1150026
uagucucaccggaugguau

SEQ ID NO: 1150028 - RNA, 19 nt, Artificial Sequence
  Description of Artificial Sequence: Synthetic oligonucleotide
  Sense strand starting at position 1067 of SEQ ID NO: 916353
ugagaugaggccugcaaau

SEQ ID NO: 1150029 - RNA, 19 nt, Artificial Sequence
  Description of Artificial Sequence: Synthetic oligonucleotide
  Antisense strand to SEQ ID NO: 1150028
auuugcaggccucaucuca

SEQ ID NO: 1150030 - RNA, 19 nt, Artificial Sequence
  Description of Artificial Sequence: Synthetic oligonucleotide
  Sense strand starting at position 1069 of SEQ ID NO: 916353
agaugaggccugcaaauau

SEQ ID NO: 1150031 - RNA, 19 nt, Artificial Sequence
  Description of Artificial Sequence: Synthetic oligonucleotide
  Antisense strand to SEQ ID NO: 1150030
auauuugcaggccucaucu

SEQ ID NO: 1150032 - RNA, 19 nt, Artificial Sequence
  Description of Artificial Sequence: Synthetic oligonucleotide
  Sense strand starting at position 1152 of SEQ ID NO: 916353
ggaagaauacgucacguca

SEQ ID NO: 1150033 - RNA, 19 nt, Artificial Sequence
  Description of Artificial Sequence: Synthetic oligonucleotide
  Antisense strand to SEQ ID NO: 1150032
ugacgugacguauucuucc

SEQ ID NO: 1150034 - RNA, 19 nt, Artificial Sequence
  Description of Artificial Sequence: Synthetic oligonucleotide
  Sense strand starting at position 1167 of SEQ ID NO: 916353
gucauaauacuguacuuua

SEQ ID NO: 1150035 - RNA, 19 nt, Artificial Sequence
  Description of Artificial Sequence: Synthetic oligonucleotide
  Antisense strand to SEQ ID NO: 1150034
uaaaguacaguauuaugac

SEQ ID NO: 1150036 - RNA, 19 nt, Artificial Sequence
  Description of Artificial Sequence: Synthetic oligonucleotide
  Sense strand starting at position 1188 of SEQ ID NO: 916353
caccauaucggcuaacgaa

SEQ ID NO: 1150037 - RNA, 19 nt, Artificial Sequence
  Description of Artificial Sequence: Synthetic oligonucleotide
  Antisense strand to SEQ ID NO: 1150036
uucguuagccgauauggug

SEQ ID NO: 1150038 - RNA, 19 nt, Artificial Sequence
  Description of Artificial Sequence: Synthetic oligonucleotide
  Sense strand starting at position 1245 of SEQ ID NO: 916353
ccaaguucuaggcggaaga

SEQ ID NO: 1150039 - RNA, 19 nt, Artificial Sequence
  Description of Artificial Sequence: Synthetic oligonucleotide
  Antisense strand to SEQ ID NO: 1150038
ucuuccgccuagaacuugg

SEQ ID NO: 1150040 - RNA, 19 nt, Artificial Sequence
  Description of Artificial Sequence: Synthetic oligonucleotide
  Sense strand starting at position 1285 of SEQ ID NO: 916353
ucgcuuucagacgugucua

SEQ ID NO: 1150041 - RNA, 19 nt, Artificial Sequence
  Description of Artificial Sequence: Synthetic oligonucleotide
  Antisense strand to SEQ ID NO: 1150040
uagacacgucugaaagcga

SEQ ID NO: 1150042 - RNA, 19 nt, Artificial Sequence
  Description of Artificial Sequence: Synthetic oligonucleotide
  Sense strand starting at position 1370 of SEQ ID NO: 916353
guacauaugaaacgagaca

SEQ ID NO: 1150043 - RNA, 19 nt, Artificial Sequence
  Description of Artificial Sequence: Synthetic oligonucleotide
  Antisense strand to SEQ ID NO: 1150042
ugucucguuucauauguac

SEQ ID NO: 1150044 - RNA, 19 nt, Artificial Sequence
  Description of Artificial Sequence: Synthetic oligonucleotide
  Sense strand starting at position 1852 of SEQ ID NO: 916353
guuaccgugcugucaaauc

SEQ ID NO: 1150045 - RNA, 19 nt, Artificial Sequence
  Description of Artificial Sequence: Synthetic oligonucleotide
  Antisense strand to SEQ ID NO: 1150044
gauuugacagcacgguaac

SEQ ID NO: 1150046 - RNA, 19 nt, Artificial Sequence
  Description of Artificial Sequence: Synthetic oligonucleotide
  Sense strand starting at position 2624 of SEQ ID NO: 916353
ccugguuuccauuaaugac

SEQ ID NO: 1150047 - RNA, 19 nt, Artificial Sequence
  Description of Artificial Sequence: Synthetic oligonucleotide
  Antisense strand to SEQ ID NO: 1150046
gucauuaauggaaaccagg

SEQ ID NO: 1150048 - RNA, 19 nt, Artificial Sequence
  Description of Artificial Sequence: Synthetic oligonucleotide
  Sense strand starting at position 2832 of SEQ ID NO: 916353
uuggauugcuuugucuaaa

SEQ ID NO: 1150049 - RNA, 19 nt, Artificial Sequence
  Description of Artificial Sequence: Synthetic oligonucleotide
  Antisense strand to SEQ ID NO: 1150048
uuuagacaaagcaauccaa

SEQ ID NO: 1150050 - RNA, 19 nt, Artificial Sequence
  Description of Artificial Sequence: Synthetic oligonucleotide
  Sense strand starting at position 3325 of SEQ ID NO: 916353
ucuggagaaccgugaauac

SEQ ID NO: 1150051 - RNA, 19 nt, Artificial Sequence
  Description of Artificial Sequence: Synthetic oligonucleotide
  Antisense strand to SEQ ID NO: 1150050
guauucacgguucuccaga

SEQ ID NO: 1150052 - RNA, 19 nt, Artificial Sequence
  Description of Artificial Sequence: Synthetic oligonucleotide
  Sense strand starting at position 3335 of SEQ ID NO: 916353
cgugaauacaucuaggguu

SEQ ID NO: 1150053 - RNA, 19 nt, Artificial Sequence
  Description of Artificial Sequence: Synthetic oligonucleotide
  Antisense strand to SEQ ID NO: 1150052
aacccuagauguauucacg

SEQ ID NO: 1150054 - RNA, 19 nt, Artificial Sequence
  Description of Artificial Sequence: Synthetic oligonucleotide
  Sense strand starting at position 3414 of SEQ ID NO: 916353
agucuuaguucuccacaug

SEQ ID NO: 1150055 - RNA, 19 nt, Artificial Sequence
  Description of Artificial Sequence: Synthetic oligonucleotide
  Antisense strand to SEQ ID NO: 1150054
cauguggagaacuaagacu

SEQ ID NO: 1150056 - RNA, 19 nt, Artificial Sequence
  Description of Artificial Sequence: Synthetic oligonucleotide
  Sense strand starting at position 3417 of SEQ ID NO: 916353
cuuaguucuccacauggcu

SEQ ID NO: 1150057 - RNA, 19 nt, Artificial Sequence
  Description of Artificial Sequence: Synthetic oligonucleotide
  Antisense strand to SEQ ID NO: 1150056
agccauguggagaacuaag

SEQ ID NO: 1150058 - RNA, 19 nt, Artificial Sequence
  Description of Artificial Sequence: Synthetic oligonucleotide
  Sense strand starting at position 3708 of SEQ ID NO: 916353
gauuuauguccaggugcag

SEQ ID NO: 1150059 - RNA, 19 nt, Artificial Sequence
  Description of Artificial Sequence: Synthetic oligonucleotide
  Antisense strand to SEQ ID NO: 1150058
cugcaccuggacauaaauc

SEQ ID NO: 1150060 - RNA, 19 nt, Artificial Sequence
  Description of Artificial Sequence: Synthetic oligonucleotide
  Sense strand starting at position 254 of SEQ ID NO: 916354
ugaaaccaguaguugaaua

SEQ ID NO: 1150061 - RNA, 19 nt, Artificial Sequence
  Description of Artificial Sequence: Synthetic oligonucleotide
  Antisense strand to SEQ ID NO: 1150060
uauucaacuacugguuuca

SEQ ID NO: 1150062 - RNA, 19 nt, Artificial Sequence
  Description of Artificial Sequence: Synthetic oligonucleotide
  Sense strand starting at position 261 of SEQ ID NO: 916354
aguaguugaauaugagagu

SEQ ID NO: 1150063 - RNA, 19 nt, Artificial Sequence
  Description of Artificial Sequence: Synthetic oligonucleotide
  Antisense strand to SEQ ID NO: 1150062
acucucauauucaacuacu

SEQ ID NO: 1150064 - RNA, 19 nt, Artificial Sequence
  Description of Artificial Sequence: Synthetic oligonucleotide
  Sense strand starting at position 318 of SEQ ID NO: 916354
uguguuguuccugagagga

SEQ ID NO: 1150065 - RNA, 19 nt, Artificial Sequence
  Description of Artificial Sequence: Synthetic oligonucleotide
  Antisense strand to SEQ ID NO: 1150064
uccucucaggaacaacaca

SEQ ID NO: 1150066 - RNA, 19 nt, Artificial Sequence
  Description of Artificial Sequence: Synthetic oligonucleotide
  Sense strand starting at position 464 of SEQ ID NO: 916354
gguucuaggaucugaauaa

SEQ ID NO: 1150067 - RNA, 19 nt, Artificial Sequence
  Description of Artificial Sequence: Synthetic oligonucleotide
  Antisense strand to SEQ ID NO: 1150066
uuauucagauccuagaacc

SEQ ID NO: 1150068 - RNA, 19 nt, Artificial Sequence
  Description of Artificial Sequence: Synthetic oligonucleotide
  Sense strand starting at position 641 of SEQ ID NO: 916354
cucagagaauauguauauu

SEQ ID NO: 1150069 - RNA, 19 nt, Artificial Sequence
  Description of Artificial Sequence: Synthetic oligonucleotide
  Antisense strand to SEQ ID NO: 1150068
aauauacauauucucugag

SEQ ID NO: 1150070 - RNA, 19 nt, Artificial Sequence
  Description of Artificial Sequence: Synthetic oligonucleotide
  Sense strand starting at position 714 of SEQ ID NO: 916354
aguugaauacauugugaug

SEQ ID NO: 1150071 - RNA, 19 nt, Artificial Sequence
  Description of Artificial Sequence: Synthetic oligonucleotide
  Antisense strand to SEQ ID NO: 1150070
caucacaauguauucaacu

SEQ ID NO: 1150072 - RNA, 19 nt, Artificial Sequence
  Description of Artificial Sequence: Synthetic oligonucleotide
  Sense strand starting at position 723 of SEQ ID NO: 916354
cauugugauguauagcaca

SEQ ID NO: 1150073 - RNA, 19 nt, Artificial Sequence
  Description of Artificial Sequence: Synthetic oligonucleotide
  Antisense strand to SEQ ID NO: 1150072
ugugcuauacaucacaaug

SEQ ID NO: 1150074 - RNA, 19 nt, Artificial Sequence
  Description of Artificial Sequence: Synthetic oligonucleotide
  Sense strand starting at position 737 of SEQ ID NO: 916354
gcacaaguacaugaguauu

SEQ ID NO: 1150075 - RNA, 19 nt, Artificial Sequence
  Description of Artificial Sequence: Synthetic oligonucleotide
  Antisense strand to SEQ ID NO: 1150074
aauacucauguacuugugc

SEQ ID NO: 1150076 - RNA, 19 nt, Artificial Sequence
  Description of Artificial Sequence: Synthetic oligonucleotide
  Sense strand starting at position 740 of SEQ ID NO: 916354
caaguacaugaguauugua

SEQ ID NO: 1150077 - RNA, 19 nt, Artificial Sequence
  Description of Artificial Sequence: Synthetic oligonucleotide
  Antisense strand to SEQ ID NO: 1150076
uacaauacucauguacuug

SEQ ID NO: 1150078 - RNA, 19 nt, Artificial Sequence
  Description of Artificial Sequence: Synthetic oligonucleotide
  Sense strand starting at position 769 of SEQ ID NO: 916354
ccauuauuaugguugauaa

SEQ ID NO: 1150079 - RNA, 19 nt, Artificial Sequence
  Description of Artificial Sequence: Synthetic oligonucleotide
  Antisense strand to SEQ ID NO: 1150078
uuaucaaccauaauaaugg

SEQ ID NO: 1150080 - RNA, 19 nt, Artificial Sequence
  Description of Artificial Sequence: Synthetic oligonucleotide
  Sense strand starting at position 770 of SEQ ID NO: 916354
cauuauuaugguugauaag

SEQ ID NO: 1150081 - RNA, 19 nt, Artificial Sequence
  Description of Artificial Sequence: Synthetic oligonucleotide
  Antisense strand to SEQ ID NO: 1150080
cuuaucaaccauaauaaug

SEQ ID NO: 1150082 - RNA, 19 nt, Artificial Sequence
  Description of Artificial Sequence: Synthetic oligonucleotide
  Sense strand starting at position 813 of SEQ ID NO: 916354
uuaggauacggguggagaa

SEQ ID NO: 1150083 - RNA, 19 nt, Artificial Sequence
  Description of Artificial Sequence: Synthetic oligonucleotide
  Antisense strand to SEQ ID NO: 1150082
uucuccacccguauccuaa

SEQ ID NO: 1150084 - RNA, 19 nt, Artificial Sequence
  Description of Artificial Sequence: Synthetic oligonucleotide
  Sense strand starting at position 843 of SEQ ID NO: 916354
ucauauuaucaguguggau

SEQ ID NO: 1150085 - RNA, 19 nt, Artificial Sequence
  Description of Artificial Sequence: Synthetic oligonucleotide
  Antisense strand to SEQ ID NO: 1150084
auccacacugauaauauga

SEQ ID NO: 1150086 - RNA, 19 nt, Artificial Sequence
  Description of Artificial Sequence: Synthetic oligonucleotide
  Sense strand starting at position 845 of SEQ ID NO: 916354
auauuaucaguguggauaa

SEQ ID NO: 1150087 - RNA, 19 nt, Artificial Sequence
  Description of Artificial Sequence: Synthetic oligonucleotide
  Antisense strand to SEQ ID NO: 1150086
uuauccacacugauaauau

SEQ ID NO: 1150088 - RNA, 19 nt, Artificial Sequence
  Description of Artificial Sequence: Synthetic oligonucleotide
  Sense strand starting at position 1042 of SEQ ID NO: 916354
guaacauucugaccaaugu

SEQ ID NO: 1150089 - RNA, 19 nt, Artificial Sequence
  Description of Artificial Sequence: Synthetic oligonucleotide
  Antisense strand to SEQ ID NO: 1150088
acauuggucagaauguuac

SEQ ID NO: 1150090 - RNA, 19 nt, Artificial Sequence
  Description of Artificial Sequence: Synthetic oligonucleotide
  Sense strand starting at position 1075 of SEQ ID NO: 916354
gauugauaauaggaugaaa

SEQ ID NO: 1150091 - RNA, 19 nt, Artificial Sequence
  Description of Artificial Sequence: Synthetic oligonucleotide
  Antisense strand to SEQ ID NO: 1150090
uuucauccuauuaucaauc

SEQ ID NO: 1150092 - RNA, 19 nt, Artificial Sequence
  Description of Artificial Sequence: Synthetic oligonucleotide
  Sense strand starting at position 1099 of SEQ ID NO: 916354
uuuacugauuccuuaggaa

SEQ ID NO: 1150093 - RNA, 19 nt, Artificial Sequence
  Description of Artificial Sequence: Synthetic oligonucleotide
  Antisense strand to SEQ ID NO: 1150092
uuccuaaggaaucaguaaa

SEQ ID NO: 1150094 - RNA, 19 nt, Artificial Sequence
  Description of Artificial Sequence: Synthetic oligonucleotide
  Sense strand starting at position 1137 of SEQ ID NO: 916354
uuaugaaaugcugaucauu

SEQ ID NO: 1150095 - RNA, 19 nt, Artificial Sequence
  Description of Artificial Sequence: Synthetic oligonucleotide
  Antisense strand to SEQ ID NO: 1150094
aaugaucagcauuucauaa

SEQ ID NO: 1150096 - RNA, 19 nt, Artificial Sequence
  Description of Artificial Sequence: Synthetic oligonucleotide
  Sense strand starting at position 1298 of SEQ ID NO: 916354
gguuuaguuauugaaguug

SEQ ID NO: 1150097 - RNA, 19 nt, Artificial Sequence
  Description of Artificial Sequence: Synthetic oligonucleotide
  Antisense strand to SEQ ID NO: 1150096
caacuucaauaacuaaacc

SEQ ID NO: 1150098 - RNA, 19 nt, Artificial Sequence
  Description of Artificial Sequence: Synthetic oligonucleotide
  Sense strand starting at position 1331 of SEQ ID NO: 916354
uugaauaaguacuuugcau

SEQ ID NO: 1150099 - RNA, 19 nt, Artificial Sequence
  Description of Artificial Sequence: Synthetic oligonucleotide
  Antisense strand to SEQ ID NO: 1150098
augcaaaguacuuauucaa

SEQ ID NO: 1150100 - RNA, 19 nt, Artificial Sequence
  Description of Artificial Sequence: Synthetic oligonucleotide
  Sense strand starting at position 1390 of SEQ ID NO: 916354
cuugccuuccaggaauaca

SEQ ID NO: 1150101 - RNA, 19 nt, Artificial Sequence
  Description of Artificial Sequence: Synthetic oligonucleotide
  Antisense strand to SEQ ID NO: 1150100
uguauuccuggaaggcaag

SEQ ID NO: 1150102 - RNA, 19 nt, Artificial Sequence
  Description of Artificial Sequence: Synthetic oligonucleotide
  Sense strand starting at position 1503 of SEQ ID NO: 916354
ugucaagucgucuaugaga

SEQ ID NO: 1150103 - RNA, 19 nt, Artificial Sequence
  Description of Artificial Sequence: Synthetic oligonucleotide
  Antisense strand to SEQ ID NO: 1150102
ucucauagacgacuugaca

SEQ ID NO: 1150104 - RNA, 19 nt, Artificial Sequence
  Description of Artificial Sequence: Synthetic oligonucleotide
  Sense strand starting at position 1505 of SEQ ID NO: 916354
ucaagucgucuaugagaaa

SEQ ID NO: 1150105 - RNA, 19 nt, Artificial Sequence
  Description of Artificial Sequence: Synthetic oligonucleotide
  Antisense strand to SEQ ID NO: 1150104
uuucucauagacgacuuga

SEQ ID NO: 1150106 - RNA, 19 nt, Artificial Sequence
  Description of Artificial Sequence: Synthetic oligonucleotide
  Sense strand starting at position 2256 of SEQ ID NO: 916354
ccugcuaaggugggauaau

SEQ ID NO: 1150107 - RNA, 19 nt, Artificial Sequence
  Description of Artificial Sequence: Synthetic oligonucleotide
  Antisense strand to SEQ ID NO: 1150106
auuaucccaccuuagcagg

SEQ ID NO: 1150108 - RNA, 19 nt, Artificial Sequence
  Description of Artificial Sequence: Synthetic oligonucleotide
  Sense strand starting at position 2320 of SEQ ID NO: 916354
augagacauucuguuacac

SEQ ID NO: 1150109 - RNA, 19 nt, Artificial Sequence
  Description of Artificial Sequence: Synthetic oligonucleotide
  Antisense strand to SEQ ID NO: 1150108
guguaacagaaugucucau

SEQ ID NO: 1150110 - RNA, 19 nt, Artificial Sequence
  Description of Artificial Sequence: Synthetic oligonucleotide
  Sense strand starting at position 2454 of SEQ ID NO: 916354
uguuauuauguggauugau

SEQ ID NO: 1150111 - RNA, 19 nt, Artificial Sequence
  Description of Artificial Sequence: Synthetic oligonucleotide
  Antisense strand to SEQ ID NO: 1150110
aucaauccacauaauaaca

SEQ ID NO: 1150112 - RNA, 19 nt, Artificial Sequence
  Description of Artificial Sequence: Synthetic oligonucleotide
  Sense strand starting at position 2457 of SEQ ID NO: 916354
uauuauguggauugauugu

SEQ ID NO: 1150113 - RNA, 19 nt, Artificial Sequence
  Description of Artificial Sequence: Synthetic oligonucleotide
  Antisense strand to SEQ ID NO: 1150112
acaaucaauccacauaaua

SEQ ID NO: 1150114 - RNA, 19 nt, Artificial Sequence
  Description of Artificial Sequence: Synthetic oligonucleotide
  Sense strand starting at position 2543 of SEQ ID NO: 916354
acaugaguauugucaaaga

SEQ ID NO: 1150115 - RNA, 19 nt, Artificial Sequence
  Description of Artificial Sequence: Synthetic oligonucleotide
  Antisense strand to SEQ ID NO: 1150114
ucuuugacaauacucaugu

SEQ ID NO: 1150116 - RNA, 19 nt, Artificial Sequence
  Description of Artificial Sequence: Synthetic oligonucleotide
  Sense strand starting at position 2566 of SEQ ID NO: 916354
cgugaagaggauuaagcau

SEQ ID NO: 1150117 - RNA, 19 nt, Artificial Sequence
  Description of Artificial Sequence: Synthetic oligonucleotide
  Antisense strand to SEQ ID NO: 1150116
augcuuaauccucuucacg

SEQ ID NO: 1150118 - RNA, 19 nt, Artificial Sequence
  Description of Artificial Sequence: Synthetic oligonucleotide
  Sense strand starting at position 2692 of SEQ ID NO: 916354
cagaguuaggucuaguuug

SEQ ID NO: 1150119 - RNA, 19 nt, Artificial Sequence
  Description of Artificial Sequence: Synthetic oligonucleotide
  Antisense strand to SEQ ID NO: 1150118
caaacuagaccuaacucug

SEQ ID NO: 1150120 - RNA, 19 nt, Artificial Sequence
  Description of Artificial Sequence: Synthetic oligonucleotide
  Sense strand starting at position 2828 of SEQ ID NO: 916354
uuacuaguccuauagguau

SEQ ID NO: 1150121 - RNA, 19 nt, Artificial Sequence
  Description of Artificial Sequence: Synthetic oligonucleotide
  Antisense strand to SEQ ID NO: 1150120
auaccuauaggacuaguaa

SEQ ID NO: 1150122 - RNA, 19 nt, Artificial Sequence
  Description of Artificial Sequence: Synthetic oligonucleotide
  Sense strand starting at position 3267 of SEQ ID NO: 916354
auacuuggccuuugacaau

SEQ ID NO: 1150123 - RNA, 19 nt, Artificial Sequence
  Description of Artificial Sequence: Synthetic oligonucleotide
  Antisense strand to SEQ ID NO: 1150122
auugucaaaggccaaguau

SEQ ID NO: 1150124 - RNA, 19 nt, Artificial Sequence
  Description of Artificial Sequence: Synthetic oligonucleotide
  Sense strand starting at position 3437 of SEQ ID NO: 916354
uuuggaacccuuugagauu

SEQ ID NO: 1150125 - RNA, 19 nt, Artificial Sequence
  Description of Artificial Sequence: Synthetic oligonucleotide
  Antisense strand to SEQ ID NO: 1150124
aaucucaaaggguuccaaa

SEQ ID NO: 1150126 - RNA, 19 nt, Artificial Sequence
  Description of Artificial Sequence: Synthetic oligonucleotide
  Sense strand starting at position 3864 of SEQ ID NO: 916354
auaucauuguuuccagacu

SEQ ID NO: 1150127 - RNA, 19 nt, Artificial Sequence
  Description of Artificial Sequence: Synthetic oligonucleotide
  Antisense strand to SEQ ID NO: 1150126
agucuggaaacaaugauau

SEQ ID NO: 1150128 - RNA, 19 nt, Artificial Sequence
  Description of Artificial Sequence: Synthetic oligonucleotide
  Sense strand starting at position 3889 of SEQ ID NO: 916354
auagaauuguuuccacugu

SEQ ID NO: 1150129 - RNA, 19 nt, Artificial Sequence
  Description of Artificial Sequence: Synthetic oligonucleotide
  Antisense strand to SEQ ID NO: 1150128
acaguggaaacaauucuau

SEQ ID NO: 1150130 - RNA, 19 nt, Artificial Sequence
  Description of Artificial Sequence: Synthetic oligonucleotide
  Sense strand starting at position 3904 of SEQ ID NO: 916354
cugucaggguaaucacuau

SEQ ID NO: 1150131 - RNA, 19 nt, Artificial Sequence
  Description of Artificial Sequence: Synthetic oligonucleotide
  Antisense strand to SEQ ID NO: 1150130
auagugauuacccugacag

SEQ ID NO: 1150132 - RNA, 19 nt, Artificial Sequence
  Description of Artificial Sequence: Synthetic oligonucleotide
  Sense strand starting at position 3908 of SEQ ID NO: 916354
caggguaaucacuaucugu

SEQ ID NO: 1150133 - RNA, 19 nt, Artificial Sequence
  Description of Artificial Sequence: Synthetic oligonucleotide
  Antisense strand to SEQ ID NO: 1150132
acagauagugauuacccug

SEQ ID NO: 1150134 - RNA, 19 nt, Artificial Sequence
  Description of Artificial Sequence: Synthetic oligonucleotide
  Sense strand starting at position 3964 of SEQ ID NO: 916354
uucgauuauugauucuuga

SEQ ID NO: 1150135 - RNA, 19 nt, Artificial Sequence
  Description of Artificial Sequence: Synthetic oligonucleotide
  Antisense strand to SEQ ID NO: 1150134
ucaagaaucaauaaucgaa

SEQ ID NO: 1150136 - RNA, 19 nt, Artificial Sequence
  Description of Artificial Sequence: Synthetic oligonucleotide
  Sense strand starting at position 3978 of SEQ ID NO: 916354
cuugaagaguggguacuuu

SEQ ID NO: 1150137 - RNA, 19 nt, Artificial Sequence
  Description of Artificial Sequence: Synthetic oligonucleotide
  Antisense strand to SEQ ID NO: 1150136
aaaguacccacucuucaag

SEQ ID NO: 1150138 - RNA, 19 nt, Artificial Sequence
  Description of Artificial Sequence: Synthetic oligonucleotide
  Sense strand starting at position 3982 of SEQ ID NO: 916354
aagaguggguacuuuaacu

SEQ ID NO: 1150139 - RNA, 19 nt, Artificial Sequence
  Description of Artificial Sequence: Synthetic oligonucleotide
  Antisense strand to SEQ ID NO: 1150138
aguuaaaguacccacucuu

SEQ ID NO: 1150140 - RNA, 19 nt, Artificial Sequence
  Description of Artificial Sequence: Synthetic oligonucleotide
  Sense strand starting at position 169 of SEQ ID NO: 916355
cugacaauaaacgguugua

SEQ ID NO: 1150141 - RNA, 19 nt, Artificial Sequence
  Description of Artificial Sequence: Synthetic oligonucleotide
  Antisense strand to SEQ ID NO: 1150140
uacaaccguuuauugucag

SEQ ID NO: 1150142 - RNA, 19 nt, Artificial Sequence
  Description of Artificial Sequence: Synthetic oligonucleotide
  Sense strand starting at position 445 of SEQ ID NO: 916355
auaccaguucgucaucuuu

SEQ ID NO: 1150143 - RNA, 19 nt, Artificial Sequence
  Description of Artificial Sequence: Synthetic oligonucleotide
  Antisense strand to SEQ ID NO: 1150142
aaagaugacgaacugguau

SEQ ID NO: 1150144 - RNA, 19 nt, Artificial Sequence
  Description of Artificial Sequence: Synthetic oligonucleotide
  Sense strand starting at position 544 of SEQ ID NO: 916355
uugucauuaucuccaaggu

SEQ ID NO: 1150145 - RNA, 19 nt, Artificial Sequence
  Description of Artificial Sequence: Synthetic oligonucleotide
  Antisense strand to SEQ ID NO: 1150144
accuuggagauaaugacaa

SEQ ID NO: 1150146 - RNA, 19 nt, Artificial Sequence
  Description of Artificial Sequence: Synthetic oligonucleotide
  Sense strand starting at position 545 of SEQ ID NO: 916355
ugucauuaucuccaagguu

SEQ ID NO: 1150147 - RNA, 19 nt, Artificial Sequence
  Description of Artificial Sequence: Synthetic oligonucleotide
  Antisense strand to SEQ ID NO: 1150146
aaccuuggagauaaugaca

SEQ ID NO: 1150148 - RNA, 19 nt, Artificial Sequence
  Description of Artificial Sequence: Synthetic oligonucleotide
  Sense strand starting at position 782 of SEQ ID NO: 916355
uccugaccucaggaauguu

SEQ ID NO: 1150149 - RNA, 19 nt, Artificial Sequence
  Description of Artificial Sequence: Synthetic oligonucleotide
  Antisense strand to SEQ ID NO: 1150148
aacauuccugaggucagga

SEQ ID NO: 1150150 - RNA, 19 nt, Artificial Sequence
  Description of Artificial Sequence: Synthetic oligonucleotide
  Sense strand starting at position 831 of SEQ ID NO: 916355
agcucacucuucucugaga

SEQ ID NO: 1150151 - RNA, 19 nt, Artificial Sequence
  Description of Artificial Sequence: Synthetic oligonucleotide
  Antisense strand to SEQ ID NO: 1150150
ucucagagaagagugagcu

SEQ ID NO: 1150152 - RNA, 19 nt, Artificial Sequence
  Description of Artificial Sequence: Synthetic oligonucleotide
  Sense strand starting at position 833 of SEQ ID NO: 916355
cucacucuucucugagaga

SEQ ID NO: 1150153 - RNA, 19 nt, Artificial Sequence
  Description of Artificial Sequence: Synthetic oligonucleotide
  Antisense strand to SEQ ID NO: 1150152
ucucucagagaagagugag

SEQ ID NO: 1150154 - RNA, 19 nt, Artificial Sequence
  Description of Artificial Sequence: Synthetic oligonucleotide
  Sense strand starting at position 882 of SEQ ID NO: 916355
ggcauuagucucucuucgu

SEQ ID NO: 1150155 - RNA, 19 nt, Artificial Sequence
  Description of Artificial Sequence: Synthetic oligonucleotide
  Antisense strand to SEQ ID NO: 1150154
acgaagagagacuaaugcc

SEQ ID NO: 1150156 - RNA, 19 nt, Artificial Sequence
  Description of Artificial Sequence: Synthetic oligonucleotide
  Sense strand starting at position 1124 of SEQ ID NO: 916355
auuuguuuauuucgggaua

SEQ ID NO: 1150157 - RNA, 19 nt, Artificial Sequence
  Description of Artificial Sequence: Synthetic oligonucleotide
  Antisense strand to SEQ ID NO: 1150156
uaucccgaaauaaacaaau

SEQ ID NO: 1150158 - RNA, 19 nt, Artificial Sequence
  Description of Artificial Sequence: Synthetic oligonucleotide
  Sense strand starting at position 1214 of SEQ ID NO: 916355
ccuuuauaacugcgaugga

SEQ ID NO: 1150159 - RNA, 19 nt, Artificial Sequence
  Description of Artificial Sequence: Synthetic oligonucleotide
  Antisense strand to SEQ ID NO: 1150158
uccaucgcaguuauaaagg

SEQ ID NO: 1150160 - RNA, 19 nt, Artificial Sequence
  Description of Artificial Sequence: Synthetic oligonucleotide
  Sense strand starting at position 1217 of SEQ ID NO: 916355
uuauaacugcgauggaaac

SEQ ID NO: 1150161 - RNA, 19 nt, Artificial Sequence
  Description of Artificial Sequence: Synthetic oligonucleotide
  Antisense strand to SEQ ID NO: 1150160
guuuccaucgcaguuauaa

SEQ ID NO: 1150162 - RNA, 19 nt, Artificial Sequence
  Description of Artificial Sequence: Synthetic oligonucleotide
  Sense strand starting at position 1392 of SEQ ID NO: 916355
aaaguugauuugggaggaa

SEQ ID NO: 1150163 - RNA, 19 nt, Artificial Sequence
  Description of Artificial Sequence: Synthetic oligonucleotide
  Antisense strand to SEQ ID NO: 1150162
uuccucccaaaucaacuuu

SEQ ID NO: 1150164 - RNA, 19 nt, Artificial Sequence
  Description of Artificial Sequence: Synthetic oligonucleotide
  Sense strand starting at position 1734 of SEQ ID NO: 916355
ugaagugucccgcaccaga

SEQ ID NO: 1150165 - RNA, 19 nt, Artificial Sequence
  Description of Artificial Sequence: Synthetic oligonucleotide
  Antisense strand to SEQ ID NO: 1150164
ucuggugcgggacacuuca

SEQ ID NO: 1150166 - RNA, 19 nt, Artificial Sequence
  Description of Artificial Sequence: Synthetic oligonucleotide
  Sense strand starting at position 2299 of SEQ ID NO: 916355
aaggcaugauccucgagga

SEQ ID NO: 1150167 - RNA, 19 nt, Artificial Sequence
  Description of Artificial Sequence: Synthetic oligonucleotide
  Antisense strand to SEQ ID NO: 1150166
uccucgaggaucaugccuu

SEQ ID NO: 1150168 - RNA, 19 nt, Artificial Sequence
  Description of Artificial Sequence: Synthetic oligonucleotide
  Sense strand starting at position 2300 of SEQ ID NO: 916355
aggcaugauccucgaggau

SEQ ID NO: 1150169 - RNA, 19 nt, Artificial Sequence
  Description of Artificial Sequence: Synthetic oligonucleotide
  Antisense strand to SEQ ID NO: 1150168
auccucgaggaucaugccu

SEQ ID NO: 1150170 - RNA, 19 nt, Artificial Sequence
  Description of Artificial Sequence: Synthetic oligonucleotide
  Sense strand starting at position 2303 of SEQ ID NO: 916355
caugauccucgaggauaac

SEQ ID NO: 1150171 - RNA, 19 nt, Artificial Sequence
  Description of Artificial Sequence: Synthetic oligonucleotide
  Antisense strand to SEQ ID NO: 1150170
guuauccucgaggaucaug

SEQ ID NO: 1150172 - RNA, 19 nt, Artificial Sequence
  Description of Artificial Sequence: Synthetic oligonucleotide
  Sense strand starting at position 2428 of SEQ ID NO: 916355
cguucugugcgagaggaga

SEQ ID NO: 1150173 - RNA, 19 nt, Artificial Sequence
  Description of Artificial Sequence: Synthetic oligonucleotide
  Antisense strand to SEQ ID NO: 1150172
ucuccucucgcacagaacg

SEQ ID NO: 1150174 - RNA, 19 nt, Artificial Sequence
  Description of Artificial Sequence: Synthetic oligonucleotide
  Sense strand starting at position 2588 of SEQ ID NO: 916355
gagaaucgggaucggugua

SEQ ID NO: 1150175 - RNA, 19 nt, Artificial Sequence
  Description of Artificial Sequence: Synthetic oligonucleotide
  Antisense strand to SEQ ID NO: 1150174
uacaccgaucccgauucuc

SEQ ID NO: 1150176 - RNA, 19 nt, Artificial Sequence
  Description of Artificial Sequence: Synthetic oligonucleotide
  Sense strand starting at position 2641 of SEQ ID NO: 916355
uauuuauagcaacgugguu

SEQ ID NO: 1150177 - RNA, 19 nt, Artificial Sequence
  Description of Artificial Sequence: Synthetic oligonucleotide
  Antisense strand to SEQ ID NO: 1150176
aaccacguugcuauaaaua

SEQ ID NO: 1150178 - RNA, 19 nt, Artificial Sequence
  Description of Artificial Sequence: Synthetic oligonucleotide
  Sense strand starting at position 2763 of SEQ ID NO: 916355
uuuauaauggcaugaacaa

SEQ ID NO: 1150179 - RNA, 19 nt, Artificial Sequence
  Description of Artificial Sequence: Synthetic oligonucleotide
  Antisense strand to SEQ ID NO: 1150178
uuguucaugccauuauaaa

SEQ ID NO: 1150180 - RNA, 19 nt, Artificial Sequence
  Description of Artificial Sequence: Synthetic oligonucleotide
  Sense strand starting at position 2789 of SEQ ID NO: 916355
aagacaguugcagaguaau

SEQ ID NO: 1150181 - RNA, 19 nt, Artificial Sequence
  Description of Artificial Sequence: Synthetic oligonucleotide
  Antisense strand to SEQ ID NO: 1150180
auuacucugcaacugucuu

SEQ ID NO: 1150182 - RNA, 19 nt, Artificial Sequence
  Description of Artificial Sequence: Synthetic oligonucleotide
  Sense strand starting at position 2802 of SEQ ID NO: 916355
aguaauguguauuugugau

SEQ ID NO: 1150183 - RNA, 19 nt, Artificial Sequence
  Description of Artificial Sequence: Synthetic oligonucleotide
  Antisense strand to SEQ ID NO: 1150182
aucacaaauacacauuacu

SEQ ID NO: 1150184 - RNA, 19 nt, Artificial Sequence
  Description of Artificial Sequence: Synthetic oligonucleotide
  Sense strand starting at position 2808 of SEQ ID NO: 916355
guguauuugugauuacauu

SEQ ID NO: 1150185 - RNA, 19 nt, Artificial Sequence
  Description of Artificial Sequence: Synthetic oligonucleotide
  Antisense strand to SEQ ID NO: 1150184
aauguaaucacaaauacac

SEQ ID NO: 1150186 - RNA, 19 nt, Artificial Sequence
  Description of Artificial Sequence: Synthetic oligonucleotide
  Sense strand starting at position 2987 of SEQ ID NO: 916355
augagaauuuauuaggguu

SEQ ID NO: 1150187 - RNA, 19 nt, Artificial Sequence
  Description of Artificial Sequence: Synthetic oligonucleotide
  Antisense strand to SEQ ID NO: 1150186
aacccuaauaaauucucau

SEQ ID NO: 1150188 - RNA, 19 nt, Artificial Sequence
  Description of Artificial Sequence: Synthetic oligonucleotide
  Sense strand starting at position 3058 of SEQ ID NO: 916355
aggucuauugaagagcauu

SEQ ID NO: 1150189 - RNA, 19 nt, Artificial Sequence
  Description of Artificial Sequence: Synthetic oligonucleotide
  Antisense strand to SEQ ID NO: 1150188
aaugcucuucaauagaccu

SEQ ID NO: 1150190 - RNA, 19 nt, Artificial Sequence
  Description of Artificial Sequence: Synthetic oligonucleotide
  Sense strand starting at position 3089 of SEQ ID NO: 916355
uuggaucugcccugaguua

SEQ ID NO: 1150191 - RNA, 19 nt, Artificial Sequence
  Description of Artificial Sequence: Synthetic oligonucleotide
  Antisense strand to SEQ ID NO: 1150190
uaacucagggcagauccaa

SEQ ID NO: 1150192 - RNA, 19 nt, Artificial Sequence
  Description of Artificial Sequence: Synthetic oligonucleotide
  Sense strand starting at position 3090 of SEQ ID NO: 916355
uggaucugcccugaguuaa

SEQ ID NO: 1150193 - RNA, 19 nt, Artificial Sequence
  Description of Artificial Sequence: Synthetic oligonucleotide
  Antisense strand to SEQ ID NO: 1150192
uuaacucagggcagaucca

SEQ ID NO: 1150194 - RNA, 19 nt, Artificial Sequence
  Description of Artificial Sequence: Synthetic oligonucleotide
  Sense strand starting at position 3104 of SEQ ID NO: 916355
guuaaauguuuauugagug

SEQ ID NO: 1150195 - RNA, 19 nt, Artificial Sequence
  Description of Artificial Sequence: Synthetic oligonucleotide
  Antisense strand to SEQ ID NO: 1150194
cacucaauaaacauuuaac

SEQ ID NO: 1150196 - RNA, 19 nt, Artificial Sequence
  Description of Artificial Sequence: Synthetic oligonucleotide
  Sense strand starting at position 3257 of SEQ ID NO: 916355
gggucuaauggcugacaaa

SEQ ID NO: 1150197 - RNA, 19 nt, Artificial Sequence
  Description of Artificial Sequence: Synthetic oligonucleotide
  Antisense strand to SEQ ID NO: 1150196
uuugucagccauuagaccc

SEQ ID NO: 1150198 - RNA, 19 nt, Artificial Sequence
  Description of Artificial Sequence: Synthetic oligonucleotide
  Sense strand starting at position 3258 of SEQ ID NO: 916355
ggucuaauggcugacaaac

SEQ ID NO: 1150199 - RNA, 19 nt, Artificial Sequence
  Description of Artificial Sequence: Synthetic oligonucleotide
  Antisense strand to SEQ ID NO: 1150198
guuugucagccauuagacc

SEQ ID NO: 1150200 - RNA, 19 nt, Artificial Sequence
  Description of Artificial Sequence: Synthetic oligonucleotide
  Sense strand starting at position 3298 of SEQ ID NO: 916355
ugaccaugaguuugacuuu

SEQ ID NO: 1150201 - RNA, 19 nt, Artificial Sequence
  Description of Artificial Sequence: Synthetic oligonucleotide
  Antisense strand to SEQ ID NO: 1150200
aaagucaaacucaugguca

SEQ ID NO: 1150202 - RNA, 19 nt, Artificial Sequence
  Description of Artificial Sequence: Synthetic oligonucleotide
  Sense strand starting at position 3301 of SEQ ID NO: 916355
ccaugaguuugacuuuccu

SEQ ID NO: 1150203 - RNA, 19 nt, Artificial Sequence
  Description of Artificial Sequence: Synthetic oligonucleotide
  Antisense strand to SEQ ID NO: 1150202
aggaaagucaaacucaugg

SEQ ID NO: 1150204 - RNA, 19 nt, Artificial Sequence
  Description of Artificial Sequence: Synthetic oligonucleotide
  Sense strand starting at position 3309 of SEQ ID NO: 916355
uugacuuuccuggauucuu

SEQ ID NO: 1150205 - RNA, 19 nt, Artificial Sequence
  Description of Artificial Sequence: Synthetic oligonucleotide
  Antisense strand to SEQ ID NO: 1150204
aagaauccaggaaagucaa

SEQ ID NO: 1150206 - RNA, 19 nt, Artificial Sequence
  Description of Artificial Sequence: Synthetic oligonucleotide
  Sense strand starting at position 3434 of SEQ ID NO: 916355
guuaauagauuaguagcaa

SEQ ID NO: 1150207 - RNA, 19 nt, Artificial Sequence
  Description of Artificial Sequence: Synthetic oligonucleotide
  Antisense strand to SEQ ID NO: 1150206
uugcuacuaaucuauuaac

SEQ ID NO: 1150208 - RNA, 19 nt, Artificial Sequence
  Description of Artificial Sequence: Synthetic oligonucleotide
  Sense strand starting at position 3455 of SEQ ID NO: 916355
ggcagugucauguaauaau

SEQ ID NO: 1150209 - RNA, 19 nt, Artificial Sequence
  Description of Artificial Sequence: Synthetic oligonucleotide
  Antisense strand to SEQ ID NO: 1150208
auuauuacaugacacugcc

SEQ ID NO: 1150210 - RNA, 19 nt, Artificial Sequence
  Description of Artificial Sequence: Synthetic oligonucleotide
  Sense strand starting at position 3494 of SEQ ID NO: 916355
ccaaauugccuagguccaa

SEQ ID NO: 1150211 - RNA, 19 nt, Artificial Sequence
  Description of Artificial Sequence: Synthetic oligonucleotide
  Antisense strand to SEQ ID NO: 1150210
uuggaccuaggcaauuugg

SEQ ID NO: 1150212 - RNA, 19 nt, Artificial Sequence
  Description of Artificial Sequence: Synthetic oligonucleotide
  Sense strand starting at position 3540 of SEQ ID NO: 916355
gugaucuugggucacguaa

SEQ ID NO: 1150213 - RNA, 19 nt, Artificial Sequence
  Description of Artificial Sequence: Synthetic oligonucleotide
  Antisense strand to SEQ ID NO: 1150212
uuacgugacccaagaucac

SEQ ID NO: 1150214 - RNA, 19 nt, Artificial Sequence
  Description of Artificial Sequence: Synthetic oligonucleotide
  Sense strand starting at position 3610 of SEQ ID NO: 916355
uaguaaacaccuuguggga

SEQ ID NO: 1150215 - RNA, 19 nt, Artificial Sequence
  Description of Artificial Sequence: Synthetic oligonucleotide
  Antisense strand to SEQ ID NO: 1150214
ucccacaagguguuuacua

SEQ ID NO: 1150216 - RNA, 19 nt, Artificial Sequence
  Description of Artificial Sequence: Synthetic oligonucleotide
  Sense strand starting at position 3626 of SEQ ID NO: 916355
ggauucuuacgaggacuaa

SEQ ID NO: 1150217 - RNA, 19 nt, Artificial Sequence
  Description of Artificial Sequence: Synthetic oligonucleotide
  Antisense strand to SEQ ID NO: 1150216
uuaguccucguaagaaucc

SEQ ID NO: 1150218 - RNA, 19 nt, Artificial Sequence
  Description of Artificial Sequence: Synthetic oligonucleotide
  Sense strand starting at position 3950 of SEQ ID NO: 916355
aggaaagucgucugagcca

SEQ ID NO: 1150219 - RNA, 19 nt, Artificial Sequence
  Description of Artificial Sequence: Synthetic oligonucleotide
  Antisense strand to SEQ ID NO: 1150218
uggcucagacgacuuuccu

SEQ ID NO: 1150220 - RNA, 19 nt, Artificial Sequence
  Description of Artificial Sequence: Synthetic oligonucleotide
  Sense strand starting at position 279 of SEQ ID NO: 916356
cuacuauaucugggccuaa

SEQ ID NO: 1150221 - RNA, 19 nt, Artificial Sequence
  Description of Artificial Sequence: Synthetic oligonucleotide
  Antisense strand to SEQ ID NO: 1150220
uuaggcccagauauaguag

SEQ ID NO: 1150222 - RNA, 19 nt, Artificial Sequence
  Description of Artificial Sequence: Synthetic oligonucleotide
  Sense strand starting at position 390 of SEQ ID NO: 916356
acuaauacuccagggagua

SEQ ID NO: 1150223 - RNA, 19 nt, Artificial Sequence
  Description of Artificial Sequence: Synthetic oligonucleotide
  Antisense strand to SEQ ID NO: 1150222
uacucccuggaguauuagu

SEQ ID NO: 1150224 - RNA, 19 nt, Artificial Sequence
  Description of Artificial Sequence: Synthetic oligonucleotide
  Sense strand starting at position 391 of SEQ ID NO: 916356
cuaauacuccagggaguaa

SEQ ID NO: 1150225 - RNA, 19 nt, Artificial Sequence
  Description of Artificial Sequence: Synthetic oligonucleotide
  Antisense strand to SEQ ID NO: 1150224
uuacucccuggaguauuag

SEQ ID NO: 1150226 - RNA, 19 nt, Artificial Sequence
  Description of Artificial Sequence: Synthetic oligonucleotide
  Sense strand starting at position 476 of SEQ ID NO: 916356
gcauucucauucuuagaga

SEQ ID NO: 1150227 - RNA, 19 nt, Artificial Sequence
  Description of Artificial Sequence: Synthetic oligonucleotide
  Antisense strand to SEQ ID NO: 1150226
ucucuaagaaugagaaugc

SEQ ID NO: 1150228 - RNA, 19 nt, Artificial Sequence
  Description of Artificial Sequence: Synthetic oligonucleotide
  Sense strand starting at position 755 of SEQ ID NO: 916356
auaauaaucugucugaggu

SEQ ID NO: 1150229 - RNA, 19 nt, Artificial Sequence
  Description of Artificial Sequence: Synthetic oligonucleotide
  Antisense strand to SEQ ID NO: 1150228
accucagacagauuauuau

SEQ ID NO: 1150230 - RNA, 19 nt, Artificial Sequence
  Description of Artificial Sequence: Synthetic oligonucleotide
  Sense strand starting at position 756 of SEQ ID NO: 916356
uaauaaucugucugagguc

SEQ ID NO: 1150231 - RNA, 19 nt, Artificial Sequence
  Description of Artificial Sequence: Synthetic oligonucleotide
  Antisense strand to SEQ ID NO: 1150230
gaccucagacagauuauua

SEQ ID NO: 1150232 - RNA, 19 nt, Artificial Sequence
  Description of Artificial Sequence: Synthetic oligonucleotide
  Sense strand starting at position 765 of SEQ ID NO: 916356
gucugaggucaugaagucu

SEQ ID NO: 1150233 - RNA, 19 nt, Artificial Sequence
  Description of Artificial Sequence: Synthetic oligonucleotide
  Antisense strand to SEQ ID NO: 1150232
agacuucaugaccucagac

SEQ ID NO: 1150234 - RNA, 19 nt, Artificial Sequence
  Description of Artificial Sequence: Synthetic oligonucleotide
  Sense strand starting at position 855 of SEQ ID NO: 916356
cuggaagcuccuugagaac

SEQ ID NO: 1150235 - RNA, 19 nt, Artificial Sequence
  Description of Artificial Sequence: Synthetic oligonucleotide
  Antisense strand to SEQ ID NO: 1150234
guucucaaggagcuuccag

SEQ ID NO: 1150236 - RNA, 19 nt, Artificial Sequence
  Description of Artificial Sequence: Synthetic oligonucleotide
  Sense strand starting at position 939 of SEQ ID NO: 916356
uagagauagcuaugaaagc

SEQ ID NO: 1150237 - RNA, 19 nt, Artificial Sequence
  Description of Artificial Sequence: Synthetic oligonucleotide
  Antisense strand to SEQ ID NO: 1150236
gcuuucauagcuaucucua

SEQ ID NO: 1150238 - RNA, 19 nt, Artificial Sequence
  Description of Artificial Sequence: Synthetic oligonucleotide
  Sense strand starting at position 1194 of SEQ ID NO: 916356
cugaaucagcucuggaagu

SEQ ID NO: 1150239 - RNA, 19 nt, Artificial Sequence
  Description of Artificial Sequence: Synthetic oligonucleotide
  Antisense strand to SEQ ID NO: 1150238
acuuccagagcugauucag

SEQ ID NO: 1150240 - RNA, 19 nt, Artificial Sequence
  Description of Artificial Sequence: Synthetic oligonucleotide
  Sense strand starting at position 1196 of SEQ ID NO: 916356
gaaucagcucuggaaguug

SEQ ID NO: 1150241 - RNA, 19 nt, Artificial Sequence
  Description of Artificial Sequence: Synthetic oligonucleotide
  Antisense strand to SEQ ID NO: 1150240
caacuuccagagcugauuc

SEQ ID NO: 1150242 - RNA, 19 nt, Artificial Sequence
  Description of Artificial Sequence: Synthetic oligonucleotide
  Sense strand starting at position 1388 of SEQ ID NO: 916356
uugugagaccuuggacaau

SEQ ID NO: 1150243 - RNA, 19 nt, Artificial Sequence
  Description of Artificial Sequence: Synthetic oligonucleotide
  Antisense strand to SEQ ID NO: 1150242
auuguccaaggucucacaa

SEQ ID NO: 1150244 - RNA, 19 nt, Artificial Sequence
  Description of Artificial Sequence: Synthetic oligonucleotide
  Sense strand starting at position 2011 of SEQ ID NO: 916356
cguucugccgggaagugua

SEQ ID NO: 1150245 - RNA, 19 nt, Artificial Sequence
  Description of Artificial Sequence: Synthetic oligonucleotide
  Antisense strand to SEQ ID NO: 1150244
uacacuucccggcagaacg

SEQ ID NO: 1150246 - RNA, 19 nt, Artificial Sequence
  Description of Artificial Sequence: Synthetic oligonucleotide
  Sense strand starting at position 2304 of SEQ ID NO: 916356
uuugaauccugccugaauc

SEQ ID NO: 1150247 - RNA, 19 nt, Artificial Sequence
  Description of Artificial Sequence: Synthetic oligonucleotide
  Antisense strand to SEQ ID NO: 1150246
gauucaggcaggauucaaa

SEQ ID NO: 1150248 - RNA, 19 nt, Artificial Sequence
  Description of Artificial Sequence: Synthetic oligonucleotide
  Sense strand starting at position 2305 of SEQ ID NO: 916356
uugaauccugccugaauca

SEQ ID NO: 1150249 - RNA, 19 nt, Artificial Sequence
  Description of Artificial Sequence: Synthetic oligonucleotide
  Antisense strand to SEQ ID NO: 1150248
ugauucaggcaggauucaa

SEQ ID NO: 1150250 - RNA, 19 nt, Artificial Sequence
  Description of Artificial Sequence: Synthetic oligonucleotide
  Sense strand starting at position 2411 of SEQ ID NO: 916356
acaagcuugcaaugagaau

SEQ ID NO: 1150251 - RNA, 19 nt, Artificial Sequence
  Description of Artificial Sequence: Synthetic oligonucleotide
  Antisense strand to SEQ ID NO: 1150250
auucucauugcaagcuugu

SEQ ID NO: 1150252 - RNA, 19 nt, Artificial Sequence
  Description of Artificial Sequence: Synthetic oligonucleotide
  Sense strand starting at position 2536 of SEQ ID NO: 916356
cucauuuauugcucccagu

SEQ ID NO: 1150253 - RNA, 19 nt, Artificial Sequence
  Description of Artificial Sequence: Synthetic oligonucleotide
  Antisense strand to SEQ ID NO: 1150252
acugggagcaauaaaugag

SEQ ID NO: 1150254 - RNA, 19 nt, Artificial Sequence
  Description of Artificial Sequence: Synthetic oligonucleotide
  Sense strand starting at position 2594 of SEQ ID NO: 916356
cuaguugaaggguguagaa

SEQ ID NO: 1150255 - RNA, 19 nt, Artificial Sequence
  Description of Artificial Sequence: Synthetic oligonucleotide
  Antisense strand to SEQ ID NO: 1150254
uucuacacccuucaacuag

SEQ ID NO: 1150256 - RNA, 19 nt, Artificial Sequence
  Description of Artificial Sequence: Synthetic oligonucleotide
  Sense strand starting at position 2613 of SEQ ID NO: 916356
ggaggauccgacuguguac

SEQ ID NO: 1150257 - RNA, 19 nt, Artificial Sequence
  Description of Artificial Sequence: Synthetic oligonucleotide
  Antisense strand to SEQ ID NO: 1150256
guacacagucggauccucc

SEQ ID NO: 1150258 - RNA, 19 nt, Artificial Sequence
  Description of Artificial Sequence: Synthetic oligonucleotide
  Sense strand starting at position 2616 of SEQ ID NO: 916356
ggauccgacuguguacaua

SEQ ID NO: 1150259 - RNA, 19 nt, Artificial Sequence
  Description of Artificial Sequence: Synthetic oligonucleotide
  Antisense strand to SEQ ID NO: 1150258
uauguacacagucggaucc

SEQ ID NO: 1150260 - RNA, 19 nt, Artificial Sequence
  Description of Artificial Sequence: Synthetic oligonucleotide
  Sense strand starting at position 2716 of SEQ ID NO: 916356
ccagcuuugccugaaugau

SEQ ID NO: 1150261 - RNA, 19 nt, Artificial Sequence
  Description of Artificial Sequence: Synthetic oligonucleotide
  Antisense strand to SEQ ID NO: 1150260
aucauucaggcaaagcugg

SEQ ID NO: 1150262 - RNA, 19 nt, Artificial Sequence
  Description of Artificial Sequence: Synthetic oligonucleotide
  Sense strand starting at position 2993 of SEQ ID NO: 916356
ucuagcuacugaguggaau

SEQ ID NO: 1150263 - RNA, 19 nt, Artificial Sequence
  Description of Artificial Sequence: Synthetic oligonucleotide
  Antisense strand to SEQ ID NO: 1150262
auuccacucaguagcuaga

SEQ ID NO: 1150264 - RNA, 19 nt, Artificial Sequence
  Description of Artificial Sequence: Synthetic oligonucleotide
  Sense strand starting at position 2999 of SEQ ID NO: 916356
uacugaguggaaugugaau

SEQ ID NO: 1150265 - RNA, 19 nt, Artificial Sequence
  Description of Artificial Sequence: Synthetic oligonucleotide
  Antisense strand to SEQ ID NO: 1150264
auucacauuccacucagua

SEQ ID NO: 1150266 - RNA, 19 nt, Artificial Sequence
  Description of Artificial Sequence: Synthetic oligonucleotide
  Sense strand starting at position 3279 of SEQ ID NO: 916356
aagguaauguaacuucuga

SEQ ID NO: 1150267 - RNA, 19 nt, Artificial Sequence
  Description of Artificial Sequence: Synthetic oligonucleotide
  Antisense strand to SEQ ID NO: 1150266
ucagaaguuacauuaccuu

SEQ ID NO: 1150268 - RNA, 19 nt, Artificial Sequence
  Description of Artificial Sequence: Synthetic oligonucleotide
  Sense strand starting at position 3341 of SEQ ID NO: 916356
ccuaauucccgugagaaac

SEQ ID NO: 1150269 - RNA, 19 nt, Artificial Sequence
  Description of Artificial Sequence: Synthetic oligonucleotide
  Antisense strand to SEQ ID NO: 1150268
guuucucacgggaauuagg

SEQ ID NO: 1150270 - RNA, 19 nt, Artificial Sequence
  Description of Artificial Sequence: Synthetic oligonucleotide
  Sense strand starting at position 3367 of SEQ ID NO: 916356
aggacuauccugugggagu

SEQ ID NO: 1150271 - RNA, 19 nt, Artificial Sequence
  Description of Artificial Sequence: Synthetic oligonucleotide
  Antisense strand to SEQ ID NO: 1150270
acucccacaggauaguccu

SEQ ID NO: 1150272 - RNA, 19 nt, Artificial Sequence
  Description of Artificial Sequence: Synthetic oligonucleotide
  Sense strand starting at position 3369 of SEQ ID NO: 916356
gacuauccugugggaguaa

SEQ ID NO: 1150273 - RNA, 19 nt, Artificial Sequence
  Description of Artificial Sequence: Synthetic oligonucleotide
  Antisense strand to SEQ ID NO: 1150272
uuacucccacaggauaguc

SEQ ID NO: 1150274 - RNA, 19 nt, Artificial Sequence
  Description of Artificial Sequence: Synthetic oligonucleotide
  Sense strand starting at position 3378 of SEQ ID NO: 916356
gugggaguaaucugagagu

SEQ ID NO: 1150275 - RNA, 19 nt, Artificial Sequence
  Description of Artificial Sequence: Synthetic oligonucleotide
  Antisense strand to SEQ ID NO: 1150274
acucucagauuacucccac

SEQ ID NO: 1150276 - RNA, 19 nt, Artificial Sequence
  Description of Artificial Sequence: Synthetic oligonucleotide
  Sense strand starting at position 3387 of SEQ ID NO: 916356
aucugagagucuccagcaa

SEQ ID NO: 1150277 - RNA, 19 nt, Artificial Sequence
  Description of Artificial Sequence: Synthetic oligonucleotide
  Antisense strand to SEQ ID NO: 1150276
uugcuggagacucucagau

SEQ ID NO: 1150278 - RNA, 19 nt, Artificial Sequence
  Description of Artificial Sequence: Synthetic oligonucleotide
  Sense strand starting at position 3391 of SEQ ID NO: 916356
gagagucuccagcaaucag

SEQ ID NO: 1150279 - RNA, 19 nt, Artificial Sequence
  Description of Artificial Sequence: Synthetic oligonucleotide
  Antisense strand to SEQ ID NO: 1150278
cugauugcuggagacucuc

SEQ ID NO: 1150280 - RNA, 19 nt, Artificial Sequence
  Description of Artificial Sequence: Synthetic oligonucleotide
  Sense strand starting at position 3442 of SEQ ID NO: 916356
augucauugucucugauag

SEQ ID NO: 1150281 - RNA, 19 nt, Artificial Sequence
  Description of Artificial Sequence: Synthetic oligonucleotide
  Antisense strand to SEQ ID NO: 1150280
cuaucagagacaaugacau

SEQ ID NO: 1150282 - RNA, 19 nt, Artificial Sequence
  Description of Artificial Sequence: Synthetic oligonucleotide
  Sense strand starting at position 3443 of SEQ ID NO: 916356
ugucauugucucugauaga

SEQ ID NO: 1150283 - RNA, 19 nt, Artificial Sequence
  Description of Artificial Sequence: Synthetic oligonucleotide
  Antisense strand to SEQ ID NO: 1150282
ucuaucagagacaaugaca

SEQ ID NO: 1150284 - RNA, 19 nt, Artificial Sequence
  Description of Artificial Sequence: Synthetic oligonucleotide
  Sense strand starting at position 3485 of SEQ ID NO: 916356
caggccucccgagaucaaa

SEQ ID NO: 1150285 - RNA, 19 nt, Artificial Sequence
  Description of Artificial Sequence: Synthetic oligonucleotide
  Antisense strand to SEQ ID NO: 1150284
uuugaucucgggaggccug

SEQ ID NO: 1150286 - RNA, 19 nt, Artificial Sequence
  Description of Artificial Sequence: Synthetic oligonucleotide
  Sense strand starting at position 3537 of SEQ ID NO: 916356
aggguuaguugcuuaauuu

SEQ ID NO: 1150287 - RNA, 19 nt, Artificial Sequence
  Description of Artificial Sequence: Synthetic oligonucleotide
  Antisense strand to SEQ ID NO: 1150286
aaauuaagcaacuaacccu

SEQ ID NO: 1150288 - RNA, 19 nt, Artificial Sequence
  Description of Artificial Sequence: Synthetic oligonucleotide
  Sense strand starting at position 3844 of SEQ ID NO: 916356
gccacuucucuggaggcau

SEQ ID NO: 1150289 - RNA, 19 nt, Artificial Sequence
  Description of Artificial Sequence: Synthetic oligonucleotide
  Antisense strand to SEQ ID NO: 1150288
augccuccagagaaguggc

SEQ ID NO: 1150290 - RNA, 19 nt, Artificial Sequence
  Description of Artificial Sequence: Synthetic oligonucleotide
  Sense strand starting at position 3848 of SEQ ID NO: 916356
cuucucuggaggcaugauu

SEQ ID NO: 1150291 - RNA, 19 nt, Artificial Sequence
  Description of Artificial Sequence: Synthetic oligonucleotide
  Antisense strand to SEQ ID NO: 1150290
aaucaugccuccagagaag

SEQ ID NO: 1150292 - RNA, 19 nt, Artificial Sequence
  Description of Artificial Sequence: Synthetic oligonucleotide
  Sense strand starting at position 3883 of SEQ ID NO: 916356
aucuauguaggucaucuaa

SEQ ID NO: 1150293 - RNA, 19 nt, Artificial Sequence
  Description of Artificial Sequence: Synthetic oligonucleotide
  Antisense strand to SEQ ID NO: 1150292
uuagaugaccuacauagau

SEQ ID NO: 1150294 - RNA, 19 nt, Artificial Sequence
  Description of Artificial Sequence: Synthetic oligonucleotide
  Sense strand starting at position 3919 of SEQ ID NO: 916356
gucacaaugagccaguagu

SEQ ID NO: 1150295 - RNA, 19 nt, Artificial Sequence
  Description of Artificial Sequence: Synthetic oligonucleotide
  Antisense strand to SEQ ID NO: 1150294
acuacuggcucauugugac

SEQ ID NO: 1150296 - RNA, 19 nt, Artificial Sequence
  Description of Artificial Sequence: Synthetic oligonucleotide
  Sense strand starting at position 3935 of SEQ ID NO: 916356
aguagcuugccugauauca

SEQ ID NO: 1150297 - RNA, 19 nt, Artificial Sequence
  Description of Artificial Sequence: Synthetic oligonucleotide
  Antisense strand to SEQ ID NO: 1150296
ugauaucaggcaagcuacu

SEQ ID NO: 1150298 - RNA, 19 nt, Artificial Sequence
  Description of Artificial Sequence: Synthetic oligonucleotide
  Sense strand starting at position 3965 of SEQ ID NO: 916356
uggaacgcauuccugaaau

SEQ ID NO: 1150299 - RNA, 19 nt, Artificial Sequence
  Description of Artificial Sequence: Synthetic oligonucleotide
  Antisense strand to SEQ ID NO: 1150298
auuucaggaaugcguucca

SEQ ID NO: 1150300 - RNA, 19 nt, Artificial Sequence
  Description of Artificial Sequence: Synthetic oligonucleotide
  Sense strand starting at position 76 of SEQ ID NO: 916357
cagggaccauggucuuaau

SEQ ID NO: 1150301 - RNA, 19 nt, Artificial Sequence
  Description of Artificial Sequence: Synthetic oligonucleotide
  Antisense strand to SEQ ID NO: 1150300
auuaagaccauggucccug

SEQ ID NO: 1150302 - RNA, 19 nt, Artificial Sequence
  Description of Artificial Sequence: Synthetic oligonucleotide
  Sense strand starting at position 86 of SEQ ID NO: 916357
ggucuuaaucauuagguga

SEQ ID NO: 1150303 - RNA, 19 nt, Artificial Sequence
  Description of Artificial Sequence: Synthetic oligonucleotide
  Antisense strand to SEQ ID NO: 1150302
ucaccuaaugauuaagacc

SEQ ID NO: 1150304 - RNA, 19 nt, Artificial Sequence
  Description of Artificial Sequence: Synthetic oligonucleotide
  Sense strand starting at position 99 of SEQ ID NO: 916357
aggugagacuuccuaacac

SEQ ID NO: 1150305 - RNA, 19 nt, Artificial Sequence
  Description of Artificial Sequence: Synthetic oligonucleotide
  Antisense strand to SEQ ID NO: 1150304
guguuaggaagucucaccu

SEQ ID NO: 1150306 - RNA, 19 nt, Artificial Sequence
  Description of Artificial Sequence: Synthetic oligonucleotide
  Sense strand starting at position 115 of SEQ ID NO: 916357
cacacuuugugguuacaga

SEQ ID NO: 1150307 - RNA, 19 nt, Artificial Sequence
  Description of Artificial Sequence: Synthetic oligonucleotide
  Antisense strand to SEQ ID NO: 1150306
ucuguaaccacaaagugug

SEQ ID NO: 1150308 - RNA, 19 nt, Artificial Sequence
  Description of Artificial Sequence: Synthetic oligonucleotide
  Sense strand starting at position 116 of SEQ ID NO: 916357
acacuuugugguuacagau

SEQ ID NO: 1150309 - RNA, 19 nt, Artificial Sequence
  Description of Artificial Sequence: Synthetic oligonucleotide
  Antisense strand to SEQ ID NO: 1150308
aucuguaaccacaaagugu

SEQ ID NO: 1150310 - RNA, 19 nt, Artificial Sequence
  Description of Artificial Sequence: Synthetic oligonucleotide
  Sense strand starting at position 132 of SEQ ID NO: 916357
gaugaaagcccuggacaug

SEQ ID NO: 1150311 - RNA, 19 nt, Artificial Sequence
  Description of Artificial Sequence: Synthetic oligonucleotide
  Antisense strand to SEQ ID NO: 1150310
cauguccagggcuuucauc

SEQ ID NO: 1150312 - RNA, 19 nt, Artificial Sequence
  Description of Artificial Sequence: Synthetic oligonucleotide
  Sense strand starting at position 462 of SEQ ID NO: 916357
uucgguaauaggugaauua

SEQ ID NO: 1150313 - RNA, 19 nt, Artificial Sequence
  Description of Artificial Sequence: Synthetic oligonucleotide
  Antisense strand to SEQ ID NO: 1150312
uaauucaccuauuaccgaa

SEQ ID NO: 1150314 - RNA, 19 nt, Artificial Sequence
  Description of Artificial Sequence: Synthetic oligonucleotide
  Sense strand starting at position 463 of SEQ ID NO: 916357
ucgguaauaggugaauuac

SEQ ID NO: 1150315 - RNA, 19 nt, Artificial Sequence
  Description of Artificial Sequence: Synthetic oligonucleotide
  Antisense strand to SEQ ID NO: 1150314
guaauucaccuauuaccga

SEQ ID NO: 1150316 - RNA, 19 nt, Artificial Sequence
  Description of Artificial Sequence: Synthetic oligonucleotide
  Sense strand starting at position 469 of SEQ ID NO: 916357
auaggugaauuacuccaua

SEQ ID NO: 1150317 - RNA, 19 nt, Artificial Sequence
  Description of Artificial Sequence: Synthetic oligonucleotide
  Antisense strand to SEQ ID NO: 1150316
uauggaguaauucaccuau

SEQ ID NO: 1150318 - RNA, 19 nt, Artificial Sequence
  Description of Artificial Sequence: Synthetic oligonucleotide
  Sense strand starting at position 484 of SEQ ID NO: 916357
cauaguugagugugaauaa

SEQ ID NO: 1150319 - RNA, 19 nt, Artificial Sequence
  Description of Artificial Sequence: Synthetic oligonucleotide
  Antisense strand to SEQ ID NO: 1150318
uuauucacacucaacuaug

SEQ ID NO: 1150320 - RNA, 19 nt, Artificial Sequence
  Description of Artificial Sequence: Synthetic oligonucleotide
  Sense strand starting at position 523 of SEQ ID NO: 916357
ggguuucuuagaggugaua

SEQ ID NO: 1150321 - RNA, 19 nt, Artificial Sequence
  Description of Artificial Sequence: Synthetic oligonucleotide
  Antisense strand to SEQ ID NO: 1150320
uaucaccucuaagaaaccc

SEQ ID NO: 1150322 - RNA, 19 nt, Artificial Sequence
  Description of Artificial Sequence: Synthetic oligonucleotide
  Sense strand starting at position 525 of SEQ ID NO: 916357
guuucuuagaggugauaca

SEQ ID NO: 1150323 - RNA, 19 nt, Artificial Sequence
  Description of Artificial Sequence: Synthetic oligonucleotide
  Antisense strand to SEQ ID NO: 1150322
uguaucaccucuaagaaac

SEQ ID NO: 1150324 - RNA, 19 nt, Artificial Sequence
  Description of Artificial Sequence: Synthetic oligonucleotide
  Sense strand starting at position 534 of SEQ ID NO: 916357
aggugauacacuuaccguu

SEQ ID NO: 1150325 - RNA, 19 nt, Artificial Sequence
  Description of Artificial Sequence: Synthetic oligonucleotide
  Antisense strand to SEQ ID NO: 1150324
aacgguaaguguaucaccu

SEQ ID NO: 1150326 - RNA, 19 nt, Artificial Sequence
  Description of Artificial Sequence: Synthetic oligonucleotide
  Sense strand starting at position 683 of SEQ ID NO: 916357
ugcuaauguguuuacuaga

SEQ ID NO: 1150327 - RNA, 19 nt, Artificial Sequence
  Description of Artificial Sequence: Synthetic oligonucleotide
  Antisense strand to SEQ ID NO: 1150326
ucuaguaaacacauuagca

SEQ ID NO: 1150328 - RNA, 19 nt, Artificial Sequence
  Description of Artificial Sequence: Synthetic oligonucleotide
  Sense strand starting at position 688 of SEQ ID NO: 916357
auguguuuacuagauauga

SEQ ID NO: 1150329 - RNA, 19 nt, Artificial Sequence
  Description of Artificial Sequence: Synthetic oligonucleotide
  Antisense strand to SEQ ID NO: 1150328
ucauaucuaguaaacacau

SEQ ID NO: 1150330 - RNA, 19 nt, Artificial Sequence
  Description of Artificial Sequence: Synthetic oligonucleotide
  Sense strand starting at position 749 of SEQ ID NO: 916357
gcaugcuaaguuuacugaa

SEQ ID NO: 1150331 - RNA, 19 nt, Artificial Sequence
  Description of Artificial Sequence: Synthetic oligonucleotide
  Antisense strand to SEQ ID NO: 1150330
uucaguaaacuuagcaugc

SEQ ID NO: 1150332 - RNA, 19 nt, Artificial Sequence
  Description of Artificial Sequence: Synthetic oligonucleotide
  Sense strand starting at position 751 of SEQ ID NO: 916357
augcuaaguuuacugaauu

SEQ ID NO: 1150333 - RNA, 19 nt, Artificial Sequence
  Description of Artificial Sequence: Synthetic oligonucleotide
  Antisense strand to SEQ ID NO: 1150332
aauucaguaaacuuagcau

SEQ ID NO: 1150334 - RNA, 19 nt, Artificial Sequence
  Description of Artificial Sequence: Synthetic oligonucleotide
  Sense strand starting at position 762 of SEQ ID NO: 916357
acugaauucuuauuaagug

SEQ ID NO: 1150335 - RNA, 19 nt, Artificial Sequence
  Description of Artificial Sequence: Synthetic oligonucleotide
  Antisense strand to SEQ ID NO: 1150334
cacuuaauaagaauucagu

SEQ ID NO: 1150336 - RNA, 19 nt, Artificial Sequence
  Description of Artificial Sequence: Synthetic oligonucleotide
  Sense strand starting at position 905 of SEQ ID NO: 916357
ugcacuugucuuuauugga

SEQ ID NO: 1150337 - RNA, 19 nt, Artificial Sequence
  Description of Artificial Sequence: Synthetic oligonucleotide
  Antisense strand to SEQ ID NO: 1150336
uccaauaaagacaagugca

SEQ ID NO: 1150338 - RNA, 19 nt, Artificial Sequence
  Description of Artificial Sequence: Synthetic oligonucleotide
  Sense strand starting at position 987 of SEQ ID NO: 916357
gcacauuaacagugacuga

SEQ ID NO: 1150339 - RNA, 19 nt, Artificial Sequence
  Description of Artificial Sequence: Synthetic oligonucleotide
  Antisense strand to SEQ ID NO: 1150338
ucagucacuguuaaugugc

SEQ ID NO: 1150340 - RNA, 19 nt, Artificial Sequence
  Description of Artificial Sequence: Synthetic oligonucleotide
  Sense strand starting at position 1362 of SEQ ID NO: 916357
gauagaugccaguacagca

SEQ ID NO: 1150341 - RNA, 19 nt, Artificial Sequence
  Description of Artificial Sequence: Synthetic oligonucleotide
  Antisense strand to SEQ ID NO: 1150340
ugcuguacuggcaucuauc

SEQ ID NO: 1150342 - RNA, 19 nt, Artificial Sequence
  Description of Artificial Sequence: Synthetic oligonucleotide
  Sense strand starting at position 1376 of SEQ ID NO: 916357
cagcaauucuguuccagga

SEQ ID NO: 1150343 - RNA, 19 nt, Artificial Sequence
  Description of Artificial Sequence: Synthetic oligonucleotide
  Antisense strand to SEQ ID NO: 1150342
uccuggaacagaauugcug

SEQ ID NO: 1150344 - RNA, 19 nt, Artificial Sequence
  Description of Artificial Sequence: Synthetic oligonucleotide
  Sense strand starting at position 2192 of SEQ ID NO: 916357
ggaaaucuccugcagcgau

SEQ ID NO: 1150345 - RNA, 19 nt, Artificial Sequence
  Description of Artificial Sequence: Synthetic oligonucleotide
  Antisense strand to SEQ ID NO: 1150344
aucgcugcaggagauuucc

SEQ ID NO: 1150346 - RNA, 19 nt, Artificial Sequence
  Description of Artificial Sequence: Synthetic oligonucleotide
  Sense strand starting at position 2411 of SEQ ID NO: 916357
agagauuguuaacccuuaa

SEQ ID NO: 1150347 - RNA, 19 nt, Artificial Sequence
  Description of Artificial Sequence: Synthetic oligonucleotide
  Antisense strand to SEQ ID NO: 1150346
uuaaggguuaacaaucucu

SEQ ID NO: 1150348 - RNA, 19 nt, Artificial Sequence
  Description of Artificial Sequence: Synthetic oligonucleotide
  Sense strand starting at position 2466 of SEQ ID NO: 916357
ggcaaauaagugugaaaga

SEQ ID NO: 1150349 - RNA, 19 nt, Artificial Sequence
  Description of Artificial Sequence: Synthetic oligonucleotide
  Antisense strand to SEQ ID NO: 1150348
ucuuucacacuuauuugcc

SEQ ID NO: 1150350 - RNA, 19 nt, Artificial Sequence
  Description of Artificial Sequence: Synthetic oligonucleotide
  Sense strand starting at position 2508 of SEQ ID NO: 916357
ucugaaagucccugaggaa

SEQ ID NO: 1150351 - RNA, 19 nt, Artificial Sequence
  Description of Artificial Sequence: Synthetic oligonucleotide
  Antisense strand to SEQ ID NO: 1150350
uuccucagggacuuucaga

SEQ ID NO: 1150352 - RNA, 19 nt, Artificial Sequence
  Description of Artificial Sequence: Synthetic oligonucleotide
  Sense strand starting at position 2622 of SEQ ID NO: 916357
ccagauggcaucugagaua

SEQ ID NO: 1150353 - RNA, 19 nt, Artificial Sequence
  Description of Artificial Sequence: Synthetic oligonucleotide
  Antisense strand to SEQ ID NO: 1150352
uaucucagaugccaucugg

SEQ ID NO: 1150354 - RNA, 19 nt, Artificial Sequence
  Description of Artificial Sequence: Synthetic oligonucleotide
  Sense strand starting at position 2656 of SEQ ID NO: 916357
aagauaaaugaccgcuuga

SEQ ID NO: 1150355 - RNA, 19 nt, Artificial Sequence
  Description of Artificial Sequence: Synthetic oligonucleotide
  Antisense strand to SEQ ID NO: 1150354
ucaagcggucauuuaucuu

SEQ ID NO: 1150356 - RNA, 19 nt, Artificial Sequence
  Description of Artificial Sequence: Synthetic oligonucleotide
  Sense strand starting at position 2811 of SEQ ID NO: 916357
guaaacgacccucaaacuu

SEQ ID NO: 1150357 - RNA, 19 nt, Artificial Sequence
  Description of Artificial Sequence: Synthetic oligonucleotide
  Antisense strand to SEQ ID NO: 1150356
aaguuugagggucguuuac

SEQ ID NO: 1150358 - RNA, 19 nt, Artificial Sequence
  Description of Artificial Sequence: Synthetic oligonucleotide
  Sense strand starting at position 2933 of SEQ ID NO: 916357
cgaaucucauuauuaaggu

SEQ ID NO: 1150359 - RNA, 19 nt, Artificial Sequence
  Description of Artificial Sequence: Synthetic oligonucleotide
  Antisense strand to SEQ ID NO: 1150358
accuuaauaaugagauucg

SEQ ID NO: 1150360 - RNA, 19 nt, Artificial Sequence
  Description of Artificial Sequence: Synthetic oligonucleotide
  Sense strand starting at position 3027 of SEQ ID NO: 916357
aagggagcuuauguuuaua

SEQ ID NO: 1150361 - RNA, 19 nt, Artificial Sequence
  Description of Artificial Sequence: Synthetic oligonucleotide
  Antisense strand to SEQ ID NO: 1150360
uauaaacauaagcucccuu

SEQ ID NO: 1150362 - RNA, 19 nt, Artificial Sequence
  Description of Artificial Sequence: Synthetic oligonucleotide
  Sense strand starting at position 3030 of SEQ ID NO: 916357
ggagcuuauguuuauagga

SEQ ID NO: 1150363 - RNA, 19 nt, Artificial Sequence
  Description of Artificial Sequence: Synthetic oligonucleotide
  Antisense strand to SEQ ID NO: 1150362
uccuauaaacauaagcucc

SEQ ID NO: 1150364 - RNA, 19 nt, Artificial Sequence
  Description of Artificial Sequence: Synthetic oligonucleotide
  Sense strand starting at position 3096 of SEQ ID NO: 916357
cgaagaagucuuuagucau

SEQ ID NO: 1150365 - RNA, 19 nt, Artificial Sequence
  Description of Artificial Sequence: Synthetic oligonucleotide
  Antisense strand to SEQ ID NO: 1150364
augacuaaagacuucuucg

SEQ ID NO: 1150366 - RNA, 19 nt, Artificial Sequence
  Description of Artificial Sequence: Synthetic oligonucleotide
  Sense strand starting at position 3099 of SEQ ID NO: 916357
agaagucuuuagucauuac

SEQ ID NO: 1150367 - RNA, 19 nt, Artificial Sequence
  Description of Artificial Sequence: Synthetic oligonucleotide
  Antisense strand to SEQ ID NO: 1150366
guaaugacuaaagacuucu

SEQ ID NO: 1150368 - RNA, 19 nt, Artificial Sequence
  Description of Artificial Sequence: Synthetic oligonucleotide
  Sense strand starting at position 3102 of SEQ ID NO: 916357
agucuuuagucauuacuag

SEQ ID NO: 1150369 - RNA, 19 nt, Artificial Sequence
  Description of Artificial Sequence: Synthetic oligonucleotide
  Antisense strand to SEQ ID NO: 1150368
cuaguaaugacuaaagacu

SEQ ID NO: 1150370 - RNA, 19 nt, Artificial Sequence
  Description of Artificial Sequence: Synthetic oligonucleotide
  Sense strand starting at position 3103 of SEQ ID NO: 916357
gucuuuagucauuacuaga

SEQ ID NO: 1150371 - RNA, 19 nt, Artificial Sequence
  Description of Artificial Sequence: Synthetic oligonucleotide
  Antisense strand to SEQ ID NO: 1150370
ucuaguaaugacuaaagac

SEQ ID NO: 1150372 - RNA, 19 nt, Artificial Sequence
  Description of Artificial Sequence: Synthetic oligonucleotide
  Sense strand starting at position 3468 of SEQ ID NO: 916357
cggccagaauauucuuaaa

SEQ ID NO: 1150373 - RNA, 19 nt, Artificial Sequence
  Description of Artificial Sequence: Synthetic oligonucleotide
  Antisense strand to SEQ ID NO: 1150372
uuuaagaauauucuggccg

SEQ ID NO: 1150374 - RNA, 19 nt, Artificial Sequence
  Description of Artificial Sequence: Synthetic oligonucleotide
  Sense strand starting at position 3470 of SEQ ID NO: 916357
gccagaauauucuuaaaga

SEQ ID NO: 1150375 - RNA, 19 nt, Artificial Sequence
  Description of Artificial Sequence: Synthetic oligonucleotide
  Antisense strand to SEQ ID NO: 1150374
ucuuuaagaauauucuggc

SEQ ID NO: 1150376 - RNA, 19 nt, Artificial Sequence
  Description of Artificial Sequence: Synthetic oligonucleotide
  Sense strand starting at position 3686 of SEQ ID NO: 916357
agaggcuccgcggaacaau

SEQ ID NO: 1150377 - RNA, 19 nt, Artificial Sequence
  Description of Artificial Sequence: Synthetic oligonucleotide
  Antisense strand to SEQ ID NO: 1150376
auuguuccgcggagccucu

SEQ ID NO: 1150378 - RNA, 19 nt, Artificial Sequence
  Description of Artificial Sequence: Synthetic oligonucleotide
  Sense strand starting at position 3859 of SEQ ID NO: 916357
auacauugaucuguuagga

SEQ ID NO: 1150379 - RNA, 19 nt, Artificial Sequence
  Description of Artificial Sequence: Synthetic oligonucleotide
  Antisense strand to SEQ ID NO: 1150378
uccuaacagaucaauguau

SEQ ID NO: 1150380 - RNA, 19 nt, Artificial Sequence
  Description of Artificial Sequence: Synthetic oligonucleotide
  Sense strand starting at position 90 of SEQ ID NO: 916358
ugcagucauuaacugguau

SEQ ID NO: 1150381 - RNA, 19 nt, Artificial Sequence
  Description of Artificial Sequence: Synthetic oligonucleotide
  Antisense strand to SEQ ID NO: 1150380
auaccaguuaaugacugca

SEQ ID NO: 1150382 - RNA, 19 nt, Artificial Sequence
  Description of Artificial Sequence: Synthetic oligonucleotide
  Sense strand starting at position 102 of SEQ ID NO: 916358
cugguauuaaagggccaaa

SEQ ID NO: 1150383 - RNA, 19 nt, Artificial Sequence
  Description of Artificial Sequence: Synthetic oligonucleotide
  Antisense strand to SEQ ID NO: 1150382
uuuggcccuuuaauaccag

SEQ ID NO: 1150384 - RNA, 19 nt, Artificial Sequence
  Description of Artificial Sequence: Synthetic oligonucleotide
  Sense strand starting at position 227 of SEQ ID NO: 916358
aggugauucuaaccaguca

SEQ ID NO: 1150385 - RNA, 19 nt, Artificial Sequence
  Description of Artificial Sequence: Synthetic oligonucleotide
  Antisense strand to SEQ ID NO: 1150384
ugacugguuagaaucaccu

SEQ ID NO: 1150386 - RNA, 19 nt, Artificial Sequence
  Description of Artificial Sequence: Synthetic oligonucleotide
  Sense strand starting at position 363 of SEQ ID NO: 916358
gacccaagaugugucacua

SEQ ID NO: 1150387 - RNA, 19 nt, Artificial Sequence
  Description of Artificial Sequence: Synthetic oligonucleotide
  Antisense strand to SEQ ID NO: 1150386
uagugacacaucuuggguc

SEQ ID NO: 1150388 - RNA, 19 nt, Artificial Sequence
  Description of Artificial Sequence: Synthetic oligonucleotide
  Sense strand starting at position 458 of SEQ ID NO: 916358
uguuaauaguuccuaauuc

SEQ ID NO: 1150389 - RNA, 19 nt, Artificial Sequence
  Description of Artificial Sequence: Synthetic oligonucleotide
  Antisense strand to SEQ ID NO: 1150388
gaauuaggaacuauuaaca

SEQ ID NO: 1150390 - RNA, 19 nt, Artificial Sequence
  Description of Artificial Sequence: Synthetic oligonucleotide
  Sense strand starting at position 466 of SEQ ID NO: 916358
guuccuaauuccuuggagu

SEQ ID NO: 1150391 - RNA, 19 nt, Artificial Sequence
  Description of Artificial Sequence: Synthetic oligonucleotide
  Antisense strand to SEQ ID NO: 1150390
acuccaaggaauuaggaac

SEQ ID NO: 1150392 - RNA, 19 nt, Artificial Sequence
  Description of Artificial Sequence: Synthetic oligonucleotide
  Sense strand starting at position 467 of SEQ ID NO: 916358
uuccuaauuccuuggagug

SEQ ID NO: 1150393 - RNA, 19 nt, Artificial Sequence
  Description of Artificial Sequence: Synthetic oligonucleotide
  Antisense strand to SEQ ID NO: 1150392
cacuccaaggaauuaggaa

SEQ ID NO: 1150394 - RNA, 19 nt, Artificial Sequence
  Description of Artificial Sequence: Synthetic oligonucleotide
  Sense strand starting at position 468 of SEQ ID NO: 916358
uccuaauuccuuggagugu

SEQ ID NO: 1150395 - RNA, 19 nt, Artificial Sequence
  Description of Artificial Sequence: Synthetic oligonucleotide
  Antisense strand to SEQ ID NO: 1150394
acacuccaaggaauuagga

SEQ ID NO: 1150396 - RNA, 19 nt, Artificial Sequence
  Description of Artificial Sequence: Synthetic oligonucleotide
  Sense strand starting at position 472 of SEQ ID NO: 916358
aauuccuuggaguguagau

SEQ ID NO: 1150397 - RNA, 19 nt, Artificial Sequence
  Description of Artificial Sequence: Synthetic oligonucleotide
  Antisense strand to SEQ ID NO: 1150396
aucuacacuccaaggaauu

SEQ ID NO: 1150398 - RNA, 19 nt, Artificial Sequence
  Description of Artificial Sequence: Synthetic oligonucleotide
  Sense strand starting at position 474 of SEQ ID NO: 916358
uuccuuggaguguagauua

SEQ ID NO: 1150399 - RNA, 19 nt, Artificial Sequence
  Description of Artificial Sequence: Synthetic oligonucleotide
  Antisense strand to SEQ ID NO: 1150398
uaaucuacacuccaaggaa

SEQ ID NO: 1150400 - RNA, 19 nt, Artificial Sequence
  Description of Artificial Sequence: Synthetic oligonucleotide
  Sense strand starting at position 564 of SEQ ID NO: 916358
gcacuuacucuaggaugaa

SEQ ID NO: 1150401 - RNA, 19 nt, Artificial Sequence
  Description of Artificial Sequence: Synthetic oligonucleotide
  Antisense strand to SEQ ID NO: 1150400
uucauccuagaguaagugc

SEQ ID NO: 1150402 - RNA, 19 nt, Artificial Sequence
  Description of Artificial Sequence: Synthetic oligonucleotide
  Sense strand starting at position 644 of SEQ ID NO: 916358
gcuuuccuucuugauaagu

SEQ ID NO: 1150403 - RNA, 19 nt, Artificial Sequence
  Description of Artificial Sequence: Synthetic oligonucleotide
  Antisense strand to SEQ ID NO: 1150402
acuuaucaagaaggaaagc

SEQ ID NO: 1150404 - RNA, 19 nt, Artificial Sequence
  Description of Artificial Sequence: Synthetic oligonucleotide
  Sense strand starting at position 673 of SEQ ID NO: 916358
ccgaaauuacaucgaauac

SEQ ID NO: 1150405 - RNA, 19 nt, Artificial Sequence
  Description of Artificial Sequence: Synthetic oligonucleotide
  Antisense strand to SEQ ID NO: 1150404
guauucgauguaauuucgg

SEQ ID NO: 1150406 - RNA, 19 nt, Artificial Sequence
  Description of Artificial Sequence: Synthetic oligonucleotide
  Sense strand starting at position 685 of SEQ ID NO: 916358
cgaauacucgugccuguca

SEQ ID NO: 1150407 - RNA, 19 nt, Artificial Sequence
  Description of Artificial Sequence: Synthetic oligonucleotide
  Antisense strand to SEQ ID NO: 1150406
ugacaggcacgaguauucg

SEQ ID NO: 1150408 - RNA, 19 nt, Artificial Sequence
  Description of Artificial Sequence: Synthetic oligonucleotide
  Sense strand starting at position 697 of SEQ ID NO: 916358
ccugucauuggccgaaaua

SEQ ID NO: 1150409 - RNA, 19 nt, Artificial Sequence
  Description of Artificial Sequence: Synthetic oligonucleotide
  Antisense strand to SEQ ID NO: 1150408
uauuucggccaaugacagg

SEQ ID NO: 1150410 - RNA, 19 nt, Artificial Sequence
  Description of Artificial Sequence: Synthetic oligonucleotide
  Sense strand starting at position 698 of SEQ ID NO: 916358
cugucauuggccgaaauau

SEQ ID NO: 1150411 - RNA, 19 nt, Artificial Sequence
  Description of Artificial Sequence: Synthetic oligonucleotide
  Antisense strand to SEQ ID NO: 1150410
auauuucggccaaugacag

SEQ ID NO: 1150412 - RNA, 19 nt, Artificial Sequence
  Description of Artificial Sequence: Synthetic oligonucleotide
  Sense strand starting at position 837 of SEQ ID NO: 916358
cccuuccucuggcuaaaga

SEQ ID NO: 1150413 - RNA, 19 nt, Artificial Sequence
  Description of Artificial Sequence: Synthetic oligonucleotide
  Antisense strand to SEQ ID NO: 1150412
ucuuuagccagaggaaggg

SEQ ID NO: 1150414 - RNA, 19 nt, Artificial Sequence
  Description of Artificial Sequence: Synthetic oligonucleotide
  Sense strand starting at position 1056 of SEQ ID NO: 916358
cugauagucagaugcuuug

SEQ ID NO: 1150415 - RNA, 19 nt, Artificial Sequence
  Description of Artificial Sequence: Synthetic oligonucleotide
  Antisense strand to SEQ ID NO: 1150414
caaagcaucugacuaucag

SEQ ID NO: 1150416 - RNA, 19 nt, Artificial Sequence
  Description of Artificial Sequence: Synthetic oligonucleotide
  Sense strand starting at position 2483 of SEQ ID NO: 916358
ucgggugggauauggaaau

SEQ ID NO: 1150417 - RNA, 19 nt, Artificial Sequence
  Description of Artificial Sequence: Synthetic oligonucleotide
  Antisense strand to SEQ ID NO: 1150416
auuuccauaucccacccga

SEQ ID NO: 1150418 - RNA, 19 nt, Artificial Sequence
  Description of Artificial Sequence: Synthetic oligonucleotide
  Sense strand starting at position 2575 of SEQ ID NO: 916358
ugccaaguguucccagaac

SEQ ID NO: 1150419 - RNA, 19 nt, Artificial Sequence
  Description of Artificial Sequence: Synthetic oligonucleotide
  Antisense strand to SEQ ID NO: 1150418
guucugggaacacuuggca

SEQ ID NO: 1150420 - RNA, 19 nt, Artificial Sequence
  Description of Artificial Sequence: Synthetic oligonucleotide
  Sense strand starting at position 2607 of SEQ ID NO: 916358
caagaccugcuguguagua

SEQ ID NO: 1150421 - RNA, 19 nt, Artificial Sequence
  Description of Artificial Sequence: Synthetic oligonucleotide
  Antisense strand to SEQ ID NO: 1150420
uacuacacagcaggucuug

SEQ ID NO: 1150422 - RNA, 19 nt, Artificial Sequence
  Description of Artificial Sequence: Synthetic oligonucleotide
  Sense strand starting at position 2608 of SEQ ID NO: 916358
aagaccugcuguguaguaa

SEQ ID NO: 1150423 - RNA, 19 nt, Artificial Sequence
  Description of Artificial Sequence: Synthetic oligonucleotide
  Antisense strand to SEQ ID NO: 1150422
uuacuacacagcaggucuu

SEQ ID NO: 1150424 - RNA, 19 nt, Artificial Sequence
  Description of Artificial Sequence: Synthetic oligonucleotide
  Sense strand starting at position 2609 of SEQ ID NO: 916358
agaccugcuguguaguaaa

SEQ ID NO: 1150425 - RNA, 19 nt, Artificial Sequence
  Description of Artificial Sequence: Synthetic oligonucleotide
  Antisense strand to SEQ ID NO: 1150424
uuuacuacacagcaggucu

SEQ ID NO: 1150426 - RNA, 19 nt, Artificial Sequence
  Description of Artificial Sequence: Synthetic oligonucleotide
  Sense strand starting at position 2619 of SEQ ID NO: 916358
uguaguaaauccuuccaaa

SEQ ID NO: 1150427 - RNA, 19 nt, Artificial Sequence
  Description of Artificial Sequence: Synthetic oligonucleotide
  Antisense strand to SEQ ID NO: 1150426
uuuggaaggauuuacuaca

SEQ ID NO: 1150428 - RNA, 19 nt, Artificial Sequence
  Description of Artificial Sequence: Synthetic oligonucleotide
  Sense strand starting at position 2701 of SEQ ID NO: 916358
gacccauugugguuucugu

SEQ ID NO: 1150429 - RNA, 19 nt, Artificial Sequence
  Description of Artificial Sequence: Synthetic oligonucleotide
  Antisense strand to SEQ ID NO: 1150428
acagaaaccacaauggguc

SEQ ID NO: 1150430 - RNA, 19 nt, Artificial Sequence
  Description of Artificial Sequence: Synthetic oligonucleotide
  Sense strand starting at position 2723 of SEQ ID NO: 916358
ucacuauugugcuuccaca

SEQ ID NO: 1150431 - RNA, 19 nt, Artificial Sequence
  Description of Artificial Sequence: Synthetic oligonucleotide
  Antisense strand to SEQ ID NO: 1150430
uguggaagcacaauaguga

SEQ ID NO: 1150432 - RNA, 19 nt, Artificial Sequence
  Description of Artificial Sequence: Synthetic oligonucleotide
  Sense strand starting at position 2772 of SEQ ID NO: 916358
uuauuagcuuugccacaga

SEQ ID NO: 1150433 - RNA, 19 nt, Artificial Sequence
  Description of Artificial Sequence: Synthetic oligonucleotide
  Antisense strand to SEQ ID NO: 1150432
ucuguggcaaagcuaauaa

SEQ ID NO: 1150434 - RNA, 19 nt, Artificial Sequence
  Description of Artificial Sequence: Synthetic oligonucleotide
  Sense strand starting at position 2775 of SEQ ID NO: 916358
uuagcuuugccacagagua

SEQ ID NO: 1150435 - RNA, 19 nt, Artificial Sequence
  Description of Artificial Sequence: Synthetic oligonucleotide
  Antisense strand to SEQ ID NO: 1150434
uacucuguggcaaagcuaa

SEQ ID NO: 1150436 - RNA, 19 nt, Artificial Sequence
  Description of Artificial Sequence: Synthetic oligonucleotide
  Sense strand starting at position 2799 of SEQ ID NO: 916358
uguggacugcuccauacau

SEQ ID NO: 1150437 - RNA, 19 nt, Artificial Sequence
  Description of Artificial Sequence: Synthetic oligonucleotide
  Antisense strand to SEQ ID NO: 1150436
auguauggagcaguccaca

SEQ ID NO: 1150438 - RNA, 19 nt, Artificial Sequence
  Description of Artificial Sequence: Synthetic oligonucleotide
  Sense strand starting at position 2801 of SEQ ID NO: 916358
uggacugcuccauacaucu

SEQ ID NO: 1150439 - RNA, 19 nt, Artificial Sequence
  Description of Artificial Sequence: Synthetic oligonucleotide
  Antisense strand to SEQ ID NO: 1150438
agauguauggagcagucca

SEQ ID NO: 1150440 - RNA, 19 nt, Artificial Sequence
  Description of Artificial Sequence: Synthetic oligonucleotide
  Sense strand starting at position 2969 of SEQ ID NO: 916358
gcugcaacacuaugggaaa

SEQ ID NO: 1150441 - RNA, 19 nt, Artificial Sequence
  Description of Artificial Sequence: Synthetic oligonucleotide
  Antisense strand to SEQ ID NO: 1150440
uuucccauaguguugcagc

SEQ ID NO: 1150442 - RNA, 19 nt, Artificial Sequence
  Description of Artificial Sequence: Synthetic oligonucleotide
  Sense strand starting at position 2992 of SEQ ID NO: 916358
agaaguguuugaugauuua

SEQ ID NO: 1150443 - RNA, 19 nt, Artificial Sequence
  Description of Artificial Sequence: Synthetic oligonucleotide
  Antisense strand to SEQ ID NO: 1150442
uaaaucaucaaacacuucu

SEQ ID NO: 1150444 - RNA, 19 nt, Artificial Sequence
  Description of Artificial Sequence: Synthetic oligonucleotide
  Sense strand starting at position 3125 of SEQ ID NO: 916358
cagagaugcugaguauccu

SEQ ID NO: 1150445 - RNA, 19 nt, Artificial Sequence
  Description of Artificial Sequence: Synthetic oligonucleotide
  Antisense strand to SEQ ID NO: 1150444
aggauacucagcaucucug

SEQ ID NO: 1150446 - RNA, 19 nt, Artificial Sequence
  Description of Artificial Sequence: Synthetic oligonucleotide
  Sense strand starting at position 3129 of SEQ ID NO: 916358
gaugcugaguauccuucua

SEQ ID NO: 1150447 - RNA, 19 nt, Artificial Sequence
  Description of Artificial Sequence: Synthetic oligonucleotide
  Antisense strand to SEQ ID NO: 1150446
uagaaggauacucagcauc

SEQ ID NO: 1150448 - RNA, 19 nt, Artificial Sequence
  Description of Artificial Sequence: Synthetic oligonucleotide
  Sense strand starting at position 3131 of SEQ ID NO: 916358
ugcugaguauccuucuaua

SEQ ID NO: 1150449 - RNA, 19 nt, Artificial Sequence
  Description of Artificial Sequence: Synthetic oligonucleotide
  Antisense strand to SEQ ID NO: 1150448
uauagaaggauacucagca

SEQ ID NO: 1150450 - RNA, 19 nt, Artificial Sequence
  Description of Artificial Sequence: Synthetic oligonucleotide
  Sense strand starting at position 3193 of SEQ ID NO: 916358
ggccuuuccuagccucaaa

SEQ ID NO: 1150451 - RNA, 19 nt, Artificial Sequence
  Description of Artificial Sequence: Synthetic oligonucleotide
  Antisense strand to SEQ ID NO: 1150450
uuugaggcuaggaaaggcc

SEQ ID NO: 1150452 - RNA, 19 nt, Artificial Sequence
  Description of Artificial Sequence: Synthetic oligonucleotide
  Sense strand starting at position 3258 of SEQ ID NO: 916358
agcccauaucuggguggau

SEQ ID NO: 1150453 - RNA, 19 nt, Artificial Sequence
  Description of Artificial Sequence: Synthetic oligonucleotide
  Antisense strand to SEQ ID NO: 1150452
auccacccagauaugggcu

SEQ ID NO: 1150454 - RNA, 19 nt, Artificial Sequence
  Description of Artificial Sequence: Synthetic oligonucleotide
  Sense strand starting at position 3259 of SEQ ID NO: 916358
gcccauaucuggguggauc

SEQ ID NO: 1150455 - RNA, 19 nt, Artificial Sequence
  Description of Artificial Sequence: Synthetic oligonucleotide
  Antisense strand to SEQ ID NO: 1150454
gauccacccagauaugggc

SEQ ID NO: 1150456 - RNA, 19 nt, Artificial Sequence
  Description of Artificial Sequence: Synthetic oligonucleotide
  Sense strand starting at position 3260 of SEQ ID NO: 916358
cccauaucuggguggaucu

SEQ ID NO: 1150457 - RNA, 19 nt, Artificial Sequence
  Description of Artificial Sequence: Synthetic oligonucleotide
  Antisense strand to SEQ ID NO: 1150456
agauccacccagauauggg

SEQ ID NO: 1150458 - RNA, 19 nt, Artificial Sequence
  Description of Artificial Sequence: Synthetic oligonucleotide
  Sense strand starting at position 3324 of SEQ ID NO: 916358
gcaagaauggcccagcaca

SEQ ID NO: 1150459 - RNA, 19 nt, Artificial Sequence
  Description of Artificial Sequence: Synthetic oligonucleotide
  Antisense strand to SEQ ID NO: 1150458
ugugcugggccauucuugc

SEQ ID NO: 1150460 - RNA, 19 nt, Artificial Sequence
  Description of Artificial Sequence: Synthetic oligonucleotide
  Sense strand starting at position 13 of SEQ ID NO: 916359
agaguugauccaggaguug

SEQ ID NO: 1150461 - RNA, 19 nt, Artificial Sequence
  Description of Artificial Sequence: Synthetic oligonucleotide
  Antisense strand to SEQ ID NO: 1150460
caacuccuggaucaacucu

SEQ ID NO: 1150462 - RNA, 19 nt, Artificial Sequence
  Description of Artificial Sequence: Synthetic oligonucleotide
  Sense strand starting at position 570 of SEQ ID NO: 916359
gugggcaaggccuagaauu

SEQ ID NO: 1150463 - RNA, 19 nt, Artificial Sequence
  Description of Artificial Sequence: Synthetic oligonucleotide
  Antisense strand to SEQ ID NO: 1150462
aauucuaggccuugcccac

SEQ ID NO: 1150464 - RNA, 19 nt, Artificial Sequence
  Description of Artificial Sequence: Synthetic oligonucleotide
  Sense strand starting at position 629 of SEQ ID NO: 916359
cuggguaggcaaugugaua

SEQ ID NO: 1150465 - RNA, 19 nt, Artificial Sequence
  Description of Artificial Sequence: Synthetic oligonucleotide
  Antisense strand to SEQ ID NO: 1150464
uaucacauugccuacccag

SEQ ID NO: 1150466 - RNA, 19 nt, Artificial Sequence
  Description of Artificial Sequence: Synthetic oligonucleotide
  Sense strand starting at position 658 of SEQ ID NO: 916359
gagguuugcagucacagau

SEQ ID NO: 1150467 - RNA, 19 nt, Artificial Sequence
  Description of Artificial Sequence: Synthetic oligonucleotide
  Antisense strand to SEQ ID NO: 1150466
aucugugacugcaaaccuc

SEQ ID NO: 1150468 - RNA, 19 nt, Artificial Sequence
  Description of Artificial Sequence: Synthetic oligonucleotide
  Sense strand starting at position 680 of SEQ ID NO: 916359
gguucagauccauggauga

SEQ ID NO: 1150469 - RNA, 19 nt, Artificial Sequence
  Description of Artificial Sequence: Synthetic oligonucleotide
  Antisense strand to SEQ ID NO: 1150468
ucauccauggaucugaacc

SEQ ID NO: 1150470 - RNA, 19 nt, Artificial Sequence
  Description of Artificial Sequence: Synthetic oligonucleotide
  Sense strand starting at position 693 of SEQ ID NO: 916359
ggaugaauagcaugaccuu

SEQ ID NO: 1150471 - RNA, 19 nt, Artificial Sequence
  Description of Artificial Sequence: Synthetic oligonucleotide
  Antisense strand to SEQ ID NO: 1150470
aaggucaugcuauucaucc

SEQ ID NO: 1150472 - RNA, 19 nt, Artificial Sequence
  Description of Artificial Sequence: Synthetic oligonucleotide
  Sense strand starting at position 699 of SEQ ID NO: 916359
auagcaugaccuugagaaa

SEQ ID NO: 1150473 - RNA, 19 nt, Artificial Sequence
  Description of Artificial Sequence: Synthetic oligonucleotide
  Antisense strand to SEQ ID NO: 1150472
uuucucaaggucaugcuau

SEQ ID NO: 1150474 - RNA, 19 nt, Artificial Sequence
  Description of Artificial Sequence: Synthetic oligonucleotide
  Sense strand starting at position 760 of SEQ ID NO: 916359
uggaaauauugauacuacu

SEQ ID NO: 1150475 - RNA, 19 nt, Artificial Sequence
  Description of Artificial Sequence: Synthetic oligonucleotide
  Antisense strand to SEQ ID NO: 1150474
aguaguaucaauauuucca

SEQ ID NO: 1150476 - RNA, 19 nt, Artificial Sequence
  Description of Artificial Sequence: Synthetic oligonucleotide
  Sense strand starting at position 803 of SEQ ID NO: 916359
auaauauacguagaguaac

SEQ ID NO: 1150477 - RNA, 19 nt, Artificial Sequence
  Description of Artificial Sequence: Synthetic oligonucleotide
  Antisense strand to SEQ ID NO: 1150476
guuacucuacguauauuau

SEQ ID NO: 1150478 - RNA, 19 nt, Artificial Sequence
  Description of Artificial Sequence: Synthetic oligonucleotide
  Sense strand starting at position 849 of SEQ ID NO: 916359
aagauauccuccuugggua

SEQ ID NO: 1150479 - RNA, 19 nt, Artificial Sequence
  Description of Artificial Sequence: Synthetic oligonucleotide
  Antisense strand to SEQ ID NO: 1150478
uacccaaggaggauaucuu

SEQ ID NO: 1150480 - RNA, 19 nt, Artificial Sequence
  Description of Artificial Sequence: Synthetic oligonucleotide
  Sense strand starting at position 904 of SEQ ID NO: 916359
ucuauuggauccucaagag

SEQ ID NO: 1150481 - RNA, 19 nt, Artificial Sequence
  Description of Artificial Sequence: Synthetic oligonucleotide
  Antisense strand to SEQ ID NO: 1150480
cucuugaggauccaauaga

SEQ ID NO: 1150482 - RNA, 19 nt, Artificial Sequence
  Description of Artificial Sequence: Synthetic oligonucleotide
  Sense strand starting at position 1424 of SEQ ID NO: 916359
guuggaucucccgaaggua

SEQ ID NO: 1150483 - RNA, 19 nt, Artificial Sequence
  Description of Artificial Sequence: Synthetic oligonucleotide
  Antisense strand to SEQ ID NO: 1150482
uaccuucgggagauccaac

SEQ ID NO: 1150484 - RNA, 19 nt, Artificial Sequence
  Description of Artificial Sequence: Synthetic oligonucleotide
  Sense strand starting at position 2496 of SEQ ID NO: 916359
ccuguacuccuaugaaguu

SEQ ID NO: 1150485 - RNA, 19 nt, Artificial Sequence
  Description of Artificial Sequence: Synthetic oligonucleotide
  Antisense strand to SEQ ID NO: 1150484
aacuucauaggaguacagg

SEQ ID NO: 1150486 - RNA, 19 nt, Artificial Sequence
  Description of Artificial Sequence: Synthetic oligonucleotide
  Sense strand starting at position 2704 of SEQ ID NO: 916359
ugggaaacaucuuugcaag

SEQ ID NO: 1150487 - RNA, 19 nt, Artificial Sequence
  Description of Artificial Sequence: Synthetic oligonucleotide
  Antisense strand to SEQ ID NO: 1150486
cuugcaaagauguuuccca

SEQ ID NO: 1150488 - RNA, 19 nt, Artificial Sequence
  Description of Artificial Sequence: Synthetic oligonucleotide
  Sense strand starting at position 2705 of SEQ ID NO: 916359
gggaaacaucuuugcaaga

SEQ ID NO: 1150489 - RNA, 19 nt, Artificial Sequence
  Description of Artificial Sequence: Synthetic oligonucleotide
  Antisense strand to SEQ ID NO: 1150488
ucuugcaaagauguuuccc

SEQ ID NO: 1150490 - RNA, 19 nt, Artificial Sequence
  Description of Artificial Sequence: Synthetic oligonucleotide
  Sense strand starting at position 2706 of SEQ ID NO: 916359
ggaaacaucuuugcaagag

SEQ ID NO: 1150491 - RNA, 19 nt, Artificial Sequence
  Description of Artificial Sequence: Synthetic oligonucleotide
  Antisense strand to SEQ ID NO: 1150490
cucuugcaaagauguuucc

SEQ ID NO: 1150492 - RNA, 19 nt, Artificial Sequence
  Description of Artificial Sequence: Synthetic oligonucleotide
  Sense strand starting at position 2783 of SEQ ID NO: 916359
gacuuugaagucugaggca

SEQ ID NO: 1150493 - RNA, 19 nt, Artificial Sequence
  Description of Artificial Sequence: Synthetic oligonucleotide
  Antisense strand to SEQ ID NO: 1150492
ugccucagacuucaaaguc

SEQ ID NO: 1150494 - RNA, 19 nt, Artificial Sequence
  Description of Artificial Sequence: Synthetic oligonucleotide
  Sense strand starting at position 2828 of SEQ ID NO: 916359
uucagauaccuacgggagu

SEQ ID NO: 1150495 - RNA, 19 nt, Artificial Sequence
  Description of Artificial Sequence: Synthetic oligonucleotide
  Antisense strand to SEQ ID NO: 1150494
acucccguagguaucugaa

SEQ ID NO: 1150496 - RNA, 19 nt, Artificial Sequence
  Description of Artificial Sequence: Synthetic oligonucleotide
  Sense strand starting at position 2860 of SEQ ID NO: 916359
cucaguaaccauuggagga

SEQ ID NO: 1150497 - RNA, 19 nt, Artificial Sequence
  Description of Artificial Sequence: Synthetic oligonucleotide
  Antisense strand to SEQ ID NO: 1150496
uccuccaaugguuacugag

SEQ ID NO: 1150498 - RNA, 19 nt, Artificial Sequence
  Description of Artificial Sequence: Synthetic oligonucleotide
  Sense strand starting at position 2861 of SEQ ID NO: 916359
ucaguaaccauuggaggau

SEQ ID NO: 1150499 - RNA, 19 nt, Artificial Sequence
  Description of Artificial Sequence: Synthetic oligonucleotide
  Antisense strand to SEQ ID NO: 1150498
auccuccaaugguuacuga

SEQ ID NO: 1150500 - RNA, 19 nt, Artificial Sequence
  Description of Artificial Sequence: Synthetic oligonucleotide
  Sense strand starting at position 2958 of SEQ ID NO: 916359
cccagagauuccuuguccu

SEQ ID NO: 1150501 - RNA, 19 nt, Artificial Sequence
  Description of Artificial Sequence: Synthetic oligonucleotide
  Antisense strand to SEQ ID NO: 1150500
aggacaaggaaucucuggg

SEQ ID NO: 1150502 - RNA, 19 nt, Artificial Sequence
  Description of Artificial Sequence: Synthetic oligonucleotide
  Sense strand starting at position 3023 of SEQ ID NO: 916359
ccaagaagcuggccaaauu

SEQ ID NO: 1150503 - RNA, 19 nt, Artificial Sequence
  Description of Artificial Sequence: Synthetic oligonucleotide
  Antisense strand to SEQ ID NO: 1150502
aauuuggccagcuucuugg

SEQ ID NO: 1150504 - RNA, 19 nt, Artificial Sequence
  Description of Artificial Sequence: Synthetic oligonucleotide
  Sense strand starting at position 3153 of SEQ ID NO: 916359
gaaaguucugcucagcaac

SEQ ID NO: 1150505 - RNA, 19 nt, Artificial Sequence
  Description of Artificial Sequence: Synthetic oligonucleotide
  Antisense strand to SEQ ID NO: 1150504
guugcugagcagaacuuuc

SEQ ID NO: 1150506 - RNA, 19 nt, Artificial Sequence
  Description of Artificial Sequence: Synthetic oligonucleotide
  Sense strand starting at position 3174 of SEQ ID NO: 916359
ucuggugagugguuaaggu

SEQ ID NO: 1150507 - RNA, 19 nt, Artificial Sequence
  Description of Artificial Sequence: Synthetic oligonucleotide
  Antisense strand to SEQ ID NO: 1150506
accuuaaccacucaccaga

SEQ ID NO: 1150508 - RNA, 19 nt, Artificial Sequence
  Description of Artificial Sequence: Synthetic oligonucleotide
  Sense strand starting at position 3181 of SEQ ID NO: 916359
agugguuaaggucacuuaa

SEQ ID NO: 1150509 - RNA, 19 nt, Artificial Sequence
  Description of Artificial Sequence: Synthetic oligonucleotide
  Antisense strand to SEQ ID NO: 1150508
uuaagugaccuuaaccacu

SEQ ID NO: 1150510 - RNA, 19 nt, Artificial Sequence
  Description of Artificial Sequence: Synthetic oligonucleotide
  Sense strand starting at position 3183 of SEQ ID NO: 916359
ugguuaaggucacuuaaga

SEQ ID NO: 1150511 - RNA, 19 nt, Artificial Sequence
  Description of Artificial Sequence: Synthetic oligonucleotide
  Antisense strand to SEQ ID NO: 1150510
ucuuaagugaccuuaacca

SEQ ID NO: 1150512 - RNA, 19 nt, Artificial Sequence
  Description of Artificial Sequence: Synthetic oligonucleotide
  Sense strand starting at position 3223 of SEQ ID NO: 916359
ggcugauagccuggccaga

SEQ ID NO: 1150513 - RNA, 19 nt, Artificial Sequence
  Description of Artificial Sequence: Synthetic oligonucleotide
  Antisense strand to SEQ ID NO: 1150512
ucuggccaggcuaucagcc

SEQ ID NO: 1150514 - RNA, 19 nt, Artificial Sequence
  Description of Artificial Sequence: Synthetic oligonucleotide
  Sense strand starting at position 3283 of SEQ ID NO: 916359
gggcuacaccucuaaccua

SEQ ID NO: 1150515 - RNA, 19 nt, Artificial Sequence
  Description of Artificial Sequence: Synthetic oligonucleotide
  Antisense strand to SEQ ID NO: 1150514
uagguuagagguguagccc

SEQ ID NO: 1150516 - RNA, 19 nt, Artificial Sequence
  Description of Artificial Sequence: Synthetic oligonucleotide
  Sense strand starting at position 3354 of SEQ ID NO: 916359
aggaaagcuguaggacuau

SEQ ID NO: 1150517 - RNA, 19 nt, Artificial Sequence
  Description of Artificial Sequence: Synthetic oligonucleotide
  Antisense strand to SEQ ID NO: 1150516
auaguccuacagcuuuccu

SEQ ID NO: 1150518 - RNA, 19 nt, Artificial Sequence
  Description of Artificial Sequence: Synthetic oligonucleotide
  Sense strand starting at position 3360 of SEQ ID NO: 916359
gcuguaggacuauggagaa

SEQ ID NO: 1150519 - RNA, 19 nt, Artificial Sequence
  Description of Artificial Sequence: Synthetic oligonucleotide
  Antisense strand to SEQ ID NO: 1150518
uucuccauaguccuacagc

SEQ ID NO: 1150520 - RNA, 19 nt, Artificial Sequence
  Description of Artificial Sequence: Synthetic oligonucleotide
  Sense strand starting at position 3448 of SEQ ID NO: 916359
ucacuugguuuggcacaau

SEQ ID NO: 1150521 - RNA, 19 nt, Artificial Sequence
  Description of Artificial Sequence: Synthetic oligonucleotide
  Antisense strand to SEQ ID NO: 1150520
auugugccaaaccaaguga

SEQ ID NO: 1150522 - RNA, 19 nt, Artificial Sequence
  Description of Artificial Sequence: Synthetic oligonucleotide
  Sense strand starting at position 3486 of SEQ ID NO: 916359
cugcaagcucaggaaacau

SEQ ID NO: 1150523 - RNA, 19 nt, Artificial Sequence
  Description of Artificial Sequence: Synthetic oligonucleotide
  Antisense strand to SEQ ID NO: 1150522
auguuuccugagcuugcag

SEQ ID NO: 1150524 - RNA, 19 nt, Artificial Sequence
  Description of Artificial Sequence: Synthetic oligonucleotide
  Sense strand starting at position 3495 of SEQ ID NO: 916359
caggaaacauccugggaaa

SEQ ID NO: 1150525 - RNA, 19 nt, Artificial Sequence
  Description of Artificial Sequence: Synthetic oligonucleotide
  Antisense strand to SEQ ID NO: 1150524
uuucccaggauguuuccug

SEQ ID NO: 1150526 - RNA, 19 nt, Artificial Sequence
  Description of Artificial Sequence: Synthetic oligonucleotide
  Sense strand starting at position 3587 of SEQ ID NO: 916359
gagggucacuggucagaga

SEQ ID NO: 1150527 - RNA, 19 nt, Artificial Sequence
  Description of Artificial Sequence: Synthetic oligonucleotide
  Antisense strand to SEQ ID NO: 1150526
ucucugaccagugacccuc

SEQ ID NO: 1150528 - RNA, 19 nt, Artificial Sequence
  Description of Artificial Sequence: Synthetic oligonucleotide
  Sense strand starting at position 3667 of SEQ ID NO: 916359
aaagauggauuugauaagu

SEQ ID NO: 1150529 - RNA, 19 nt, Artificial Sequence
  Description of Artificial Sequence: Synthetic oligonucleotide
  Antisense strand to SEQ ID NO: 1150528
acuuaucaaauccaucuuu

SEQ ID NO: 1150530 - RNA, 19 nt, Artificial Sequence
  Description of Artificial Sequence: Synthetic oligonucleotide
  Sense strand starting at position 3733 of SEQ ID NO: 916359
ccaaguaaugauggugaca

SEQ ID NO: 1150531 - RNA, 19 nt, Artificial Sequence
  Description of Artificial Sequence: Synthetic oligonucleotide
  Antisense strand to SEQ ID NO: 1150530
ugucaccaucauuacuugg

SEQ ID NO: 1150532 - RNA, 19 nt, Artificial Sequence
  Description of Artificial Sequence: Synthetic oligonucleotide
  Sense strand starting at position 3736 of SEQ ID NO: 916359
aguaaugauggugacagua

SEQ ID NO: 1150533 - RNA, 19 nt, Artificial Sequence
  Description of Artificial Sequence: Synthetic oligonucleotide
  Antisense strand to SEQ ID NO: 1150532
uacugucaccaucauuacu

SEQ ID NO: 1150534 - RNA, 19 nt, Artificial Sequence
  Description of Artificial Sequence: Synthetic oligonucleotide
  Sense strand starting at position 3869 of SEQ ID NO: 916359
gaagguaagguuggugaau

SEQ ID NO: 1150535 - RNA, 19 nt, Artificial Sequence
  Description of Artificial Sequence: Synthetic oligonucleotide
  Antisense strand to SEQ ID NO: 1150534
auucaccaaccuuaccuuc

SEQ ID NO: 1150536 - RNA, 19 nt, Artificial Sequence
  Description of Artificial Sequence: Synthetic oligonucleotide
  Sense strand starting at position 3870 of SEQ ID NO: 916359
aagguaagguuggugaaua

SEQ ID NO: 1150537 - RNA, 19 nt, Artificial Sequence
  Description of Artificial Sequence: Synthetic oligonucleotide
  Antisense strand to SEQ ID NO: 1150536
uauucaccaaccuuaccuu

SEQ ID NO: 1150538 - RNA, 19 nt, Artificial Sequence
  Description of Artificial Sequence: Synthetic oligonucleotide
  Sense strand starting at position 3878 of SEQ ID NO: 916359
guuggugaauagguacaaa

SEQ ID NO: 1150539 - RNA, 19 nt, Artificial Sequence
  Description of Artificial Sequence: Synthetic oligonucleotide
  Antisense strand to SEQ ID NO: 1150538
uuuguaccuauucaccaac

SEQ ID NO: 1150540 - RNA, 19 nt, Artificial Sequence
  Description of Artificial Sequence: Synthetic oligonucleotide
  Sense strand starting at position 16 of SEQ ID NO: 916360
agacuagauugaccucuuu

SEQ ID NO: 1150541 - RNA, 19 nt, Artificial Sequence
  Description of Artificial Sequence: Synthetic oligonucleotide
  Antisense strand to SEQ ID NO: 1150540
aaagaggucaaucuagucu

SEQ ID NO: 1150542 - RNA, 19 nt, Artificial Sequence
  Description of Artificial Sequence: Synthetic oligonucleotide
  Sense strand starting at position 47 of SEQ ID NO: 916360
ggaauuauuccauguaauc

SEQ ID NO: 1150543 - RNA, 19 nt, Artificial Sequence
  Description of Artificial Sequence: Synthetic oligonucleotide
  Antisense strand to SEQ ID NO: 1150542
gauuacauggaauaauucc

SEQ ID NO: 1150544 - RNA, 19 nt, Artificial Sequence
  Description of Artificial Sequence: Synthetic oligonucleotide
  Sense strand starting at position 162 of SEQ ID NO: 916360
cucucaaagugacuugaua

SEQ ID NO: 1150545 - RNA, 19 nt, Artificial Sequence
  Description of Artificial Sequence: Synthetic oligonucleotide
  Antisense strand to SEQ ID NO: 1150544
uaucaagucacuuugagag

SEQ ID NO: 1150546 - RNA, 19 nt, Artificial Sequence
  Description of Artificial Sequence: Synthetic oligonucleotide
  Sense strand starting at position 197 of SEQ ID NO: 916360
uggaguguuggacauuaac

SEQ ID NO: 1150547 - RNA, 19 nt, Artificial Sequence
  Description of Artificial Sequence: Synthetic oligonucleotide
  Antisense strand to SEQ ID NO: 1150546
guuaauguccaacacucca

SEQ ID NO: 1150548 - RNA, 19 nt, Artificial Sequence
  Description of Artificial Sequence: Synthetic oligonucleotide
  Sense strand starting at position 206 of SEQ ID NO: 916360
ggacauuaaccuuaucugu

SEQ ID NO: 1150549 - RNA, 19 nt, Artificial Sequence
  Description of Artificial Sequence: Synthetic oligonucleotide
  Antisense strand to SEQ ID NO: 1150548
acagauaagguuaaugucc

SEQ ID NO: 1150550 - RNA, 19 nt, Artificial Sequence
  Description of Artificial Sequence: Synthetic oligonucleotide
  Sense strand starting at position 229 of SEQ ID NO: 916360
uguguucuuguuuaaauag

SEQ ID NO: 1150551 - RNA, 19 nt, Artificial Sequence
  Description of Artificial Sequence: Synthetic oligonucleotide
  Antisense strand to SEQ ID NO: 1150550
cuauuuaaacaagaacaca

SEQ ID NO: 1150552 - RNA, 19 nt, Artificial Sequence
  Description of Artificial Sequence: Synthetic oligonucleotide
  Sense strand starting at position 339 of SEQ ID NO: 916360
ggaauaggucucuacccuu

SEQ ID NO: 1150553 - RNA, 19 nt, Artificial Sequence
  Description of Artificial Sequence: Synthetic oligonucleotide
  Antisense strand to SEQ ID NO: 1150552
aaggguagagaccuauucc

SEQ ID NO: 1150554 - RNA, 19 nt, Artificial Sequence
  Description of Artificial Sequence: Synthetic oligonucleotide
  Sense strand starting at position 358 of SEQ ID NO: 916360
cuuauaauuucgcagaaag

SEQ ID NO: 1150555 - RNA, 19 nt, Artificial Sequence
  Description of Artificial Sequence: Synthetic oligonucleotide
  Antisense strand to SEQ ID NO: 1150554
cuuucugcgaaauuauaag

SEQ ID NO: 1150556 - RNA, 19 nt, Artificial Sequence
  Description of Artificial Sequence: Synthetic oligonucleotide
  Sense strand starting at position 369 of SEQ ID NO: 916360
gcagaaagcuugucuaaau

SEQ ID NO: 1150557 - RNA, 19 nt, Artificial Sequence
  Description of Artificial Sequence: Synthetic oligonucleotide
  Antisense strand to SEQ ID NO: 1150556
auuuagacaagcuuucugc

SEQ ID NO: 1150558 - RNA, 19 nt, Artificial Sequence
  Description of Artificial Sequence: Synthetic oligonucleotide
  Sense strand starting at position 539 of SEQ ID NO: 916360
ucucuuagagagugcucua

SEQ ID NO: 1150559 - RNA, 19 nt, Artificial Sequence
  Description of Artificial Sequence: Synthetic oligonucleotide
  Antisense strand to SEQ ID NO: 1150558
uagagcacucucuaagaga

SEQ ID NO: 1150560 - RNA, 19 nt, Artificial Sequence
  Description of Artificial Sequence: Synthetic oligonucleotide
  Sense strand starting at position 542 of SEQ ID NO: 916360
cuuagagagugcucuagag

SEQ ID NO: 1150561 - RNA, 19 nt, Artificial Sequence
  Description of Artificial Sequence: Synthetic oligonucleotide
  Antisense strand to SEQ ID NO: 1150560
cucuagagcacucucuaag

SEQ ID NO: 1150562 - RNA, 19 nt, Artificial Sequence
  Description of Artificial Sequence: Synthetic oligonucleotide
  Sense strand starting at position 551 of SEQ ID NO: 916360
ugcucuagagacuaugcaa

SEQ ID NO: 1150563 - RNA, 19 nt, Artificial Sequence
  Description of Artificial Sequence: Synthetic oligonucleotide
  Antisense strand to SEQ ID NO: 1150562
uugcauagucucuagagca

SEQ ID NO: 1150564 - RNA, 19 nt, Artificial Sequence
  Description of Artificial Sequence: Synthetic oligonucleotide
  Sense strand starting at position 651 of SEQ ID NO: 916360
aggccuagauaucuguuua

SEQ ID NO: 1150565 - RNA, 19 nt, Artificial Sequence
  Description of Artificial Sequence: Synthetic oligonucleotide
  Antisense strand to SEQ ID NO: 1150564
uaaacagauaucuaggccu

SEQ ID NO: 1150566 - RNA, 19 nt, Artificial Sequence
  Description of Artificial Sequence: Synthetic oligonucleotide
  Sense strand starting at position 685 of SEQ ID NO: 916360
caggucauuugauaaagca

SEQ ID NO: 1150567 - RNA, 19 nt, Artificial Sequence
  Description of Artificial Sequence: Synthetic oligonucleotide
  Antisense strand to SEQ ID NO: 1150566
ugcuuuaucaaaugaccug

SEQ ID NO: 1150568 - RNA, 19 nt, Artificial Sequence
  Description of Artificial Sequence: Synthetic oligonucleotide
  Sense strand starting at position 919 of SEQ ID NO: 916360
ggugaagagaacuguggau

SEQ ID NO: 1150569 - RNA, 19 nt, Artificial Sequence
  Description of Artificial Sequence: Synthetic oligonucleotide
  Antisense strand to SEQ ID NO: 1150568
auccacaguucucuucacc

SEQ ID NO: 1150570 - RNA, 19 nt, Artificial Sequence
  Description of Artificial Sequence: Synthetic oligonucleotide
  Sense strand starting at position 1029 of SEQ ID NO: 916360
cccacagugcuuuauguau

SEQ ID NO: 1150571 - RNA, 19 nt, Artificial Sequence
  Description of Artificial Sequence: Synthetic oligonucleotide
  Antisense strand to SEQ ID NO: 1150570
auacauaaagcacuguggg

SEQ ID NO: 1150572 - RNA, 19 nt, Artificial Sequence
  Description of Artificial Sequence: Synthetic oligonucleotide
  Sense strand starting at position 1454 of SEQ ID NO: 916360
augccuucccgugauaacu

SEQ ID NO: 1150573 - RNA, 19 nt, Artificial Sequence
  Description of Artificial Sequence: Synthetic oligonucleotide
  Antisense strand to SEQ ID NO: 1150572
aguuaucacgggaaggcau

SEQ ID NO: 1150574 - RNA, 19 nt, Artificial Sequence
  Description of Artificial Sequence: Synthetic oligonucleotide
  Sense strand starting at position 2146 of SEQ ID NO: 916360
cccagaaguuuggcagauu

SEQ ID NO: 1150575 - RNA, 19 nt, Artificial Sequence
  Description of Artificial Sequence: Synthetic oligonucleotide
  Antisense strand to SEQ ID NO: 1150574
aaucugccaaacuucuggg

SEQ ID NO: 1150576 - RNA, 19 nt, Artificial Sequence
  Description of Artificial Sequence: Synthetic oligonucleotide
  Sense strand starting at position 2157 of SEQ ID NO: 916360
ggcagauuaggccaaccuu

SEQ ID NO: 1150577 - RNA, 19 nt, Artificial Sequence
  Description of Artificial Sequence: Synthetic oligonucleotide
  Antisense strand to SEQ ID NO: 1150576
aagguuggccuaaucugcc

SEQ ID NO: 1150578 - RNA, 19 nt, Artificial Sequence
  Description of Artificial Sequence: Synthetic oligonucleotide
  Sense strand starting at position 2396 of SEQ ID NO: 916360
gagaggaguccgggagguu

SEQ ID NO: 1150579 - RNA, 19 nt, Artificial Sequence
  Description of Artificial Sequence: Synthetic oligonucleotide
  Antisense strand to SEQ ID NO: 1150578
aaccucccggacuccucuc

SEQ ID NO: 1150580 - RNA, 19 nt, Artificial Sequence
  Description of Artificial Sequence: Synthetic oligonucleotide
  Sense strand starting at position 2555 of SEQ ID NO: 916360
uugacucaagguuaaguau

SEQ ID NO: 1150581 - RNA, 19 nt, Artificial Sequence
  Description of Artificial Sequence: Synthetic oligonucleotide
  Antisense strand to SEQ ID NO: 1150580
auacuuaaccuugagucaa

SEQ ID NO: 1150582 - RNA, 19 nt, Artificial Sequence
  Description of Artificial Sequence: Synthetic oligonucleotide
  Sense strand starting at position 2606 of SEQ ID NO: 916360
guuacugugucuuuagaaa

SEQ ID NO: 1150583 - RNA, 19 nt, Artificial Sequence
  Description of Artificial Sequence: Synthetic oligonucleotide
  Antisense strand to SEQ ID NO: 1150582
uuucuaaagacacaguaac

SEQ ID NO: 1150584 - RNA, 19 nt, Artificial Sequence
  Description of Artificial Sequence: Synthetic oligonucleotide
  Sense strand starting at position 2641 of SEQ ID NO: 916360
agcgauagauuauuaaacu

SEQ ID NO: 1150585 - RNA, 19 nt, Artificial Sequence
  Description of Artificial Sequence: Synthetic oligonucleotide
  Antisense strand to SEQ ID NO: 1150584
aguuuaauaaucuaucgcu

SEQ ID NO: 1150586 - RNA, 19 nt, Artificial Sequence
  Description of Artificial Sequence: Synthetic oligonucleotide
  Sense strand starting at position 2673 of SEQ ID NO: 916360
acagcaaggcuuugaaagu

SEQ ID NO: 1150587 - RNA, 19 nt, Artificial Sequence
  Description of Artificial Sequence: Synthetic oligonucleotide
  Antisense strand to SEQ ID NO: 1150586
acuuucaaagccuugcugu

SEQ ID NO: 1150588 - RNA, 19 nt, Artificial Sequence
  Description of Artificial Sequence: Synthetic oligonucleotide
  Sense strand starting at position 2735 of SEQ ID NO: 916360
agcuaacaucauuauguga

SEQ ID NO: 1150589 - RNA, 19 nt, Artificial Sequence
  Description of Artificial Sequence: Synthetic oligonucleotide
  Antisense strand to SEQ ID NO: 1150588
ucacauaaugauguuagcu

SEQ ID NO: 1150590 - RNA, 19 nt, Artificial Sequence
  Description of Artificial Sequence: Synthetic oligonucleotide
  Sense strand starting at position 2792 of SEQ ID NO: 916360
cgcauagauuaucucauua

SEQ ID NO: 1150591 - RNA, 19 nt, Artificial Sequence
  Description of Artificial Sequence: Synthetic oligonucleotide
  Antisense strand to SEQ ID NO: 1150590
uaaugagauaaucuaugcg

SEQ ID NO: 1150592 - RNA, 19 nt, Artificial Sequence
  Description of Artificial Sequence: Synthetic oligonucleotide
  Sense strand starting at position 2821 of SEQ ID NO: 916360
ucaaaucuauuaguguaga

SEQ ID NO: 1150593 - RNA, 19 nt, Artificial Sequence
  Description of Artificial Sequence: Synthetic oligonucleotide
  Antisense strand to SEQ ID NO: 1150592
ucuacacuaauagauuuga

SEQ ID NO: 1150594 - RNA, 19 nt, Artificial Sequence
  Description of Artificial Sequence: Synthetic oligonucleotide
  Sense strand starting at position 2826 of SEQ ID NO: 916360
ucuauuaguguagaucuua

SEQ ID NO: 1150595 - RNA, 19 nt, Artificial Sequence
  Description of Artificial Sequence: Synthetic oligonucleotide
  Antisense strand to SEQ ID NO: 1150594
uaagaucuacacuaauaga

SEQ ID NO: 1150596 - RNA, 19 nt, Artificial Sequence
  Description of Artificial Sequence: Synthetic oligonucleotide
  Sense strand starting at position 3006 of SEQ ID NO: 916360
uuguuuguauaacuggaga

SEQ ID NO: 1150597 - RNA, 19 nt, Artificial Sequence
  Description of Artificial Sequence: Synthetic oligonucleotide
  Antisense strand to SEQ ID NO: 1150596
ucuccaguuauacaaacaa

SEQ ID NO: 1150598 - RNA, 19 nt, Artificial Sequence
  Description of Artificial Sequence: Synthetic oligonucleotide
  Sense strand starting at position 3008 of SEQ ID NO: 916360
guuuguauaacuggagaac

SEQ ID NO: 1150599 - RNA, 19 nt, Artificial Sequence
  Description of Artificial Sequence: Synthetic oligonucleotide
  Antisense strand to SEQ ID NO: 1150598
guucuccaguuauacaaac

SEQ ID NO: 1150600 - RNA, 19 nt, Artificial Sequence
  Description of Artificial Sequence: Synthetic oligonucleotide
  Sense strand starting at position 3163 of SEQ ID NO: 916360
uaauuaguuccggugcguu

SEQ ID NO: 1150601 - RNA, 19 nt, Artificial Sequence
  Description of Artificial Sequence: Synthetic oligonucleotide
  Antisense strand to SEQ ID NO: 1150600
aacgcaccggaacuaauua

SEQ ID NO: 1150602 - RNA, 19 nt, Artificial Sequence
  Description of Artificial Sequence: Synthetic oligonucleotide
  Sense strand starting at position 3177 of SEQ ID NO: 916360
gcguuuguuaaacaugaau

SEQ ID NO: 1150603 - RNA, 19 nt, Artificial Sequence
  Description of Artificial Sequence: Synthetic oligonucleotide
  Antisense strand to SEQ ID NO: 1150602
auucauguuuaacaaacgc

SEQ ID NO: 1150604 - RNA, 19 nt, Artificial Sequence
  Description of Artificial Sequence: Synthetic oligonucleotide
  Sense strand starting at position 3214 of SEQ ID NO: 916360
gggcgaagcuuguuuauuu

SEQ ID NO: 1150605 - RNA, 19 nt, Artificial Sequence
  Description of Artificial Sequence: Synthetic oligonucleotide
  Antisense strand to SEQ ID NO: 1150604
aaauaaacaagcuucgccc

SEQ ID NO: 1150606 - RNA, 19 nt, Artificial Sequence
  Description of Artificial Sequence: Synthetic oligonucleotide
  Sense strand starting at position 3215 of SEQ ID NO: 916360
ggcgaagcuuguuuauuuc

SEQ ID NO: 1150607 - RNA, 19 nt, Artificial Sequence
  Description of Artificial Sequence: Synthetic oligonucleotide
  Antisense strand to SEQ ID NO: 1150606
gaaauaaacaagcuucgcc

SEQ ID NO: 1150608 - RNA, 19 nt, Artificial Sequence
  Description of Artificial Sequence: Synthetic oligonucleotide
  Sense strand starting at position 3244 of SEQ ID NO: 916360
ugcugacuucugugauuuc

SEQ ID NO: 1150609 - RNA, 19 nt, Artificial Sequence
  Description of Artificial Sequence: Synthetic oligonucleotide
  Antisense strand to SEQ ID NO: 1150608
gaaaucacagaagucagca

SEQ ID NO: 1150610 - RNA, 19 nt, Artificial Sequence
  Description of Artificial Sequence: Synthetic oligonucleotide
  Sense strand starting at position 3366 of SEQ ID NO: 916360
aguugauaguugcuuagaa

SEQ ID NO: 1150611 - RNA, 19 nt, Artificial Sequence
  Description of Artificial Sequence: Synthetic oligonucleotide
  Antisense strand to SEQ ID NO: 1150610
uucuaagcaacuaucaacu

SEQ ID NO: 1150612 - RNA, 19 nt, Artificial Sequence
  Description of Artificial Sequence: Synthetic oligonucleotide
  Sense strand starting at position 3367 of SEQ ID NO: 916360
guugauaguugcuuagaaa

SEQ ID NO: 1150613 - RNA, 19 nt, Artificial Sequence
  Description of Artificial Sequence: Synthetic oligonucleotide
  Antisense strand to SEQ ID NO: 1150612
uuucuaagcaacuaucaac

SEQ ID NO: 1150614 - RNA, 19 nt, Artificial Sequence
  Description of Artificial Sequence: Synthetic oligonucleotide
  Sense strand starting at position 3368 of SEQ ID NO: 916360
uugauaguugcuuagaaag

SEQ ID NO: 1150615 - RNA, 19 nt, Artificial Sequence
  Description of Artificial Sequence: Synthetic oligonucleotide
  Antisense strand to SEQ ID NO: 1150614
cuuucuaagcaacuaucaa

SEQ ID NO: 1150616 - RNA, 19 nt, Artificial Sequence
  Description of Artificial Sequence: Synthetic oligonucleotide
  Sense strand starting at position 3402 of SEQ ID NO: 916360
guacucuuaguacaaauau

SEQ ID NO: 1150617 - RNA, 19 nt, Artificial Sequence
  Description of Artificial Sequence: Synthetic oligonucleotide
  Antisense strand to SEQ ID NO: 1150616
auauuuguacuaagaguac

SEQ ID NO: 1150618 - RNA, 19 nt, Artificial Sequence
  Description of Artificial Sequence: Synthetic oligonucleotide
  Sense strand starting at position 3952 of SEQ ID NO: 916360
ggcuaaauaguauauccau

SEQ ID NO: 1150619 - RNA, 19 nt, Artificial Sequence
  Description of Artificial Sequence: Synthetic oligonucleotide
  Antisense strand to SEQ ID NO: 1150618
auggauauacuauuuagcc

SEQ ID NO: 1150620 - RNA, 19 nt, Artificial Sequence
  Description of Artificial Sequence: Synthetic oligonucleotide
  Sense strand starting at position 36 of SEQ ID NO: 916361
aaaggauucucuguuacug

SEQ ID NO: 1150621 - RNA, 19 nt, Artificial Sequence
  Description of Artificial Sequence: Synthetic oligonucleotide
  Antisense strand to SEQ ID NO: 1150620
caguaacagagaauccuuu

SEQ ID NO: 1150622 - RNA, 19 nt, Artificial Sequence
  Description of Artificial Sequence: Synthetic oligonucleotide
  Sense strand starting at position 120 of SEQ ID NO: 916361
cugugaggauugagaugga

SEQ ID NO: 1150623 - RNA, 19 nt, Artificial Sequence
  Description of Artificial Sequence: Synthetic oligonucleotide
  Antisense strand to SEQ ID NO: 1150622
uccaucucaauccucacag

SEQ ID NO: 1150624 - RNA, 19 nt, Artificial Sequence
  Description of Artificial Sequence: Synthetic oligonucleotide
  Sense strand starting at position 169 of SEQ ID NO: 916361
auccuuucuugaguuacau

SEQ ID NO: 1150625 - RNA, 19 nt, Artificial Sequence
  Description of Artificial Sequence: Synthetic oligonucleotide
  Antisense strand to SEQ ID NO: 1150624
auguaacucaagaaaggau

SEQ ID NO: 1150626 - RNA, 19 nt, Artificial Sequence
  Description of Artificial Sequence: Synthetic oligonucleotide
  Sense strand starting at position 287 of SEQ ID NO: 916361
ugauauuccuucccugguu

SEQ ID NO: 1150627 - RNA, 19 nt, Artificial Sequence
  Description of Artificial Sequence: Synthetic oligonucleotide
  Antisense strand to SEQ ID NO: 1150626
aaccagggaaggaauauca

SEQ ID NO: 1150628 - RNA, 19 nt, Artificial Sequence
  Description of Artificial Sequence: Synthetic oligonucleotide
  Sense strand starting at position 359 of SEQ ID NO: 916361
ucaagucacccuuguugga

SEQ ID NO: 1150629 - RNA, 19 nt, Artificial Sequence
  Description of Artificial Sequence: Synthetic oligonucleotide
  Antisense strand to SEQ ID NO: 1150628
uccaacaagggugacuuga

SEQ ID NO: 1150630 - RNA, 19 nt, Artificial Sequence
  Description of Artificial Sequence: Synthetic oligonucleotide
  Sense strand starting at position 406 of SEQ ID NO: 916361
ggagaagguugcguaaaug

SEQ ID NO: 1150631 - RNA, 19 nt, Artificial Sequence
  Description of Artificial Sequence: Synthetic oligonucleotide
  Antisense strand to SEQ ID NO: 1150630
cauuuacgcaaccuucucc

SEQ ID NO: 1150632 - RNA, 19 nt, Artificial Sequence
  Description of Artificial Sequence: Synthetic oligonucleotide
  Sense strand starting at position 430 of SEQ ID NO: 916361
auuccaauucuguaguuga

SEQ ID NO: 1150633 - RNA, 19 nt, Artificial Sequence
  Description of Artificial Sequence: Synthetic oligonucleotide
  Antisense strand to SEQ ID NO: 1150632
ucaacuacagaauuggaau

SEQ ID NO: 1150634 - RNA, 19 nt, Artificial Sequence
  Description of Artificial Sequence: Synthetic oligonucleotide
  Sense strand starting at position 433 of SEQ ID NO: 916361
ccaauucuguaguugaaca

SEQ ID NO: 1150635 - RNA, 19 nt, Artificial Sequence
  Description of Artificial Sequence: Synthetic oligonucleotide
  Antisense strand to SEQ ID NO: 1150634
uguucaacuacagaauugg

SEQ ID NO: 1150636 - RNA, 19 nt, Artificial Sequence
  Description of Artificial Sequence: Synthetic oligonucleotide
  Sense strand starting at position 558 of SEQ ID NO: 916361
uccagugauuaucucuuga

SEQ ID NO: 1150637 - RNA, 19 nt, Artificial Sequence
  Description of Artificial Sequence: Synthetic oligonucleotide
  Antisense strand to SEQ ID NO: 1150636
ucaagagauaaucacugga

SEQ ID NO: 1150638 - RNA, 19 nt, Artificial Sequence
  Description of Artificial Sequence: Synthetic oligonucleotide
  Sense strand starting at position 573 of SEQ ID NO: 916361
uugaucaugauggguauca

SEQ ID NO: 1150639 - RNA, 19 nt, Artificial Sequence
  Description of Artificial Sequence: Synthetic oligonucleotide
  Antisense strand to SEQ ID NO: 1150638
ugauacccaucaugaucaa

SEQ ID NO: 1150640 - RNA, 19 nt, Artificial Sequence
  Description of Artificial Sequence: Synthetic oligonucleotide
  Sense strand starting at position 583 of SEQ ID NO: 916361
uggguaucacaguguggaa

SEQ ID NO: 1150641 - RNA, 19 nt, Artificial Sequence
  Description of Artificial Sequence: Synthetic oligonucleotide
  Antisense strand to SEQ ID NO: 1150640
uuccacacugugauaccca

SEQ ID NO: 1150642 - RNA, 19 nt, Artificial Sequence
  Description of Artificial Sequence: Synthetic oligonucleotide
  Sense strand starting at position 585 of SEQ ID NO: 916361
gguaucacaguguggaaga

SEQ ID NO: 1150643 - RNA, 19 nt, Artificial Sequence
  Description of Artificial Sequence: Synthetic oligonucleotide
  Antisense strand to SEQ ID NO: 1150642
ucuuccacacugugauacc

SEQ ID NO: 1150644 - RNA, 19 nt, Artificial Sequence
  Description of Artificial Sequence: Synthetic oligonucleotide
  Sense strand starting at position 596 of SEQ ID NO: 916361
guggaagacucuguuguca

SEQ ID NO: 1150645 - RNA, 19 nt, Artificial Sequence
  Description of Artificial Sequence: Synthetic oligonucleotide
  Antisense strand to SEQ ID NO: 1150644
ugacaacagagucuuccac

SEQ ID NO: 1150646 - RNA, 19 nt, Artificial Sequence
  Description of Artificial Sequence: Synthetic oligonucleotide
  Sense strand starting at position 647 of SEQ ID NO: 916361
gucaguguuacagguuacu

SEQ ID NO: 1150647 - RNA, 19 nt, Artificial Sequence
  Description of Artificial Sequence: Synthetic oligonucleotide
  Antisense strand to SEQ ID NO: 1150646
aguaaccuguaacacugac

SEQ ID NO: 1150648 - RNA, 19 nt, Artificial Sequence
  Description of Artificial Sequence: Synthetic oligonucleotide
  Sense strand starting at position 657 of SEQ ID NO: 916361
cagguuacuguccagugua

SEQ ID NO: 1150649 - RNA, 19 nt, Artificial Sequence
  Description of Artificial Sequence: Synthetic oligonucleotide
  Antisense strand to SEQ ID NO: 1150648
uacacuggacaguaaccug

SEQ ID NO: 1150650 - RNA, 19 nt, Artificial Sequence
  Description of Artificial Sequence: Synthetic oligonucleotide
  Sense strand starting at position 660 of SEQ ID NO: 916361
guuacuguccaguguauca

SEQ ID NO: 1150651 - RNA, 19 nt, Artificial Sequence
  Description of Artificial Sequence: Synthetic oligonucleotide
  Antisense strand to SEQ ID NO: 1150650
ugauacacuggacaguaac

SEQ ID NO: 1150652 - RNA, 19 nt, Artificial Sequence
  Description of Artificial Sequence: Synthetic oligonucleotide
  Sense strand starting at position 662 of SEQ ID NO: 916361
uacuguccaguguaucauu

SEQ ID NO: 1150653 - RNA, 19 nt, Artificial Sequence
  Description of Artificial Sequence: Synthetic oligonucleotide
  Antisense strand to SEQ ID NO: 1150652
aaugauacacuggacagua

SEQ ID NO: 1150654 - RNA, 19 nt, Artificial Sequence
  Description of Artificial Sequence: Synthetic oligonucleotide
  Sense strand starting at position 667 of SEQ ID NO: 916361
uccaguguaucauuaucau

SEQ ID NO: 1150655 - RNA, 19 nt, Artificial Sequence
  Description of Artificial Sequence: Synthetic oligonucleotide
  Antisense strand to SEQ ID NO: 1150654
augauaaugauacacugga

SEQ ID NO: 1150656 - RNA, 19 nt, Artificial Sequence
  Description of Artificial Sequence: Synthetic oligonucleotide
  Sense strand starting at position 673 of SEQ ID NO: 916361
guaucauuaucaucaggau

SEQ ID NO: 1150657 - RNA, 19 nt, Artificial Sequence
  Description of Artificial Sequence: Synthetic oligonucleotide
  Antisense strand to SEQ ID NO: 1150656
auccugaugauaaugauac

SEQ ID NO: 1150658 - RNA, 19 nt, Artificial Sequence
  Description of Artificial Sequence: Synthetic oligonucleotide
  Sense strand starting at position 933 of SEQ ID NO: 916361
agaugucauuuccaccaca

SEQ ID NO: 1150659 - RNA, 19 nt, Artificial Sequence
  Description of Artificial Sequence: Synthetic oligonucleotide
  Antisense strand to SEQ ID NO: 1150658
ugugguggaaaugacaucu

SEQ ID NO: 1150660 - RNA, 19 nt, Artificial Sequence
  Description of Artificial Sequence: Synthetic oligonucleotide
  Sense strand starting at position 963 of SEQ ID NO: 916361
ccuauuuacuggcucagua

SEQ ID NO: 1150661 - RNA, 19 nt, Artificial Sequence
  Description of Artificial Sequence: Synthetic oligonucleotide
  Antisense strand to SEQ ID NO: 1150660
uacugagccaguaaauagg

SEQ ID NO: 1150662 - RNA, 19 nt, Artificial Sequence
  Description of Artificial Sequence: Synthetic oligonucleotide
  Sense strand starting at position 967 of SEQ ID NO: 916361
uuuacuggcucaguaaaca

SEQ ID NO: 1150663 - RNA, 19 nt, Artificial Sequence
  Description of Artificial Sequence: Synthetic oligonucleotide
  Antisense strand to SEQ ID NO: 1150662
uguuuacugagccaguaaa

SEQ ID NO: 1150664 - RNA, 19 nt, Artificial Sequence
  Description of Artificial Sequence: Synthetic oligonucleotide
  Sense strand starting at position 2503 of SEQ ID NO: 916361
cugcuuuacacgggcuaaa

SEQ ID NO: 1150665 - RNA, 19 nt, Artificial Sequence
  Description of Artificial Sequence: Synthetic oligonucleotide
  Antisense strand to SEQ ID NO: 1150664
uuuagcccguguaaagcag

SEQ ID NO: 1150666 - RNA, 19 nt, Artificial Sequence
  Description of Artificial Sequence: Synthetic oligonucleotide
  Sense strand starting at position 2650 of SEQ ID NO: 916361
aggcgaucuauggacaguu

SEQ ID NO: 1150667 - RNA, 19 nt, Artificial Sequence
  Description of Artificial Sequence: Synthetic oligonucleotide
  Antisense strand to SEQ ID NO: 1150666
aacuguccauagaucgccu

SEQ ID NO: 1150668 - RNA, 19 nt, Artificial Sequence
  Description of Artificial Sequence: Synthetic oligonucleotide
  Sense strand starting at position 2690 of SEQ ID NO: 916361
uagagcugauucucuggua

SEQ ID NO: 1150669 - RNA, 19 nt, Artificial Sequence
  Description of Artificial Sequence: Synthetic oligonucleotide
  Antisense strand to SEQ ID NO: 1150668
uaccagagaaucagcucua

SEQ ID NO: 1150670 - RNA, 19 nt, Artificial Sequence
  Description of Artificial Sequence: Synthetic oligonucleotide
  Sense strand starting at position 2715 of SEQ ID NO: 916361
ucgcguaggagccaucuua

SEQ ID NO: 1150671 - RNA, 19 nt, Artificial Sequence
  Description of Artificial Sequence: Synthetic oligonucleotide
  Antisense strand to SEQ ID NO: 1150670
uaagauggcuccuacgcga

SEQ ID NO: 1150672 - RNA, 19 nt, Artificial Sequence
  Description of Artificial Sequence: Synthetic oligonucleotide
  Sense strand starting at position 2933 of SEQ ID NO: 916361
aguccaguccauuacggaa

SEQ ID NO: 1150673 - RNA, 19 nt, Artificial Sequence
  Description of Artificial Sequence: Synthetic oligonucleotide
  Antisense strand to SEQ ID NO: 1150672
uuccguaauggacuggacu

SEQ ID NO: 1150674 - RNA, 19 nt, Artificial Sequence
  Description of Artificial Sequence: Synthetic oligonucleotide
  Sense strand starting at position 2940 of SEQ ID NO: 916361
uccauuacggaauguuauc

SEQ ID NO: 1150675 - RNA, 19 nt, Artificial Sequence
  Description of Artificial Sequence: Synthetic oligonucleotide
  Antisense strand to SEQ ID NO: 1150674
gauaacauuccguaaugga

SEQ ID NO: 1150676 - RNA, 19 nt, Artificial Sequence
  Description of Artificial Sequence: Synthetic oligonucleotide
  Sense strand starting at position 2949 of SEQ ID NO: 916361
gaauguuauccuggcgcaa

SEQ ID NO: 1150677 - RNA, 19 nt, Artificial Sequence
  Description of Artificial Sequence: Synthetic oligonucleotide
  Antisense strand to SEQ ID NO: 1150676
uugcgccaggauaacauuc

SEQ ID NO: 1150678 - RNA, 19 nt, Artificial Sequence
  Description of Artificial Sequence: Synthetic oligonucleotide
  Sense strand starting at position 2986 of SEQ ID NO: 916361
cucauaaaugucugcaaga

SEQ ID NO: 1150679 - RNA, 19 nt, Artificial Sequence
  Description of Artificial Sequence: Synthetic oligonucleotide
  Antisense strand to SEQ ID NO: 1150678
ucuugcagacauuuaugag

SEQ ID NO: 1150680 - RNA, 19 nt, Artificial Sequence
  Description of Artificial Sequence: Synthetic oligonucleotide
  Sense strand starting at position 2991 of SEQ ID NO: 916361
aaaugucugcaagaaguag

SEQ ID NO: 1150681 - RNA, 19 nt, Artificial Sequence
  Description of Artificial Sequence: Synthetic oligonucleotide
  Antisense strand to SEQ ID NO: 1150680
cuacuucuugcagacauuu

SEQ ID NO: 1150682 - RNA, 19 nt, Artificial Sequence
  Description of Artificial Sequence: Synthetic oligonucleotide
  Sense strand starting at position 3509 of SEQ ID NO: 916361
uuuggauuaucuuugggua

SEQ ID NO: 1150683 - RNA, 19 nt, Artificial Sequence
  Description of Artificial Sequence: Synthetic oligonucleotide
  Antisense strand to SEQ ID NO: 1150682
uacccaaagauaauccaaa

SEQ ID NO: 1150684 - RNA, 19 nt, Artificial Sequence
  Description of Artificial Sequence: Synthetic oligonucleotide
  Sense strand starting at position 3510 of SEQ ID NO: 916361
uuggauuaucuuuggguag

SEQ ID NO: 1150685 - RNA, 19 nt, Artificial Sequence
  Description of Artificial Sequence: Synthetic oligonucleotide
  Antisense strand to SEQ ID NO: 1150684
cuacccaaagauaauccaa

SEQ ID NO: 1150686 - RNA, 19 nt, Artificial Sequence
  Description of Artificial Sequence: Synthetic oligonucleotide
  Sense strand starting at position 3648 of SEQ ID NO: 916361
aguccuuaacuuggagaga

SEQ ID NO: 1150687 - RNA, 19 nt, Artificial Sequence
  Description of Artificial Sequence: Synthetic oligonucleotide
  Antisense strand to SEQ ID NO: 1150686
ucucuccaaguuaaggacu

SEQ ID NO: 1150688 - RNA, 19 nt, Artificial Sequence
  Description of Artificial Sequence: Synthetic oligonucleotide
  Sense strand starting at position 3661 of SEQ ID NO: 916361
gagagaauauguguuuggu

SEQ ID NO: 1150689 - RNA, 19 nt, Artificial Sequence
  Description of Artificial Sequence: Synthetic oligonucleotide
  Antisense strand to SEQ ID NO: 1150688
accaaacacauauucucuc

SEQ ID NO: 1150690 - RNA, 19 nt, Artificial Sequence
  Description of Artificial Sequence: Synthetic oligonucleotide
  Sense strand starting at position 3703 of SEQ ID NO: 916361
ucagcuuucuucuugaaug

SEQ ID NO: 1150691 - RNA, 19 nt, Artificial Sequence
  Description of Artificial Sequence: Synthetic oligonucleotide
  Antisense strand to SEQ ID NO: 1150690
cauucaagaagaaagcuga

SEQ ID NO: 1150692 - RNA, 19 nt, Artificial Sequence
  Description of Artificial Sequence: Synthetic oligonucleotide
  Sense strand starting at position 3705 of SEQ ID NO: 916361
agcuuucuucuugaaugac

SEQ ID NO: 1150693 - RNA, 19 nt, Artificial Sequence
  Description of Artificial Sequence: Synthetic oligonucleotide
  Antisense strand to SEQ ID NO: 1150692
gucauucaagaagaaagcu

SEQ ID NO: 1150694 - RNA, 19 nt, Artificial Sequence
  Description of Artificial Sequence: Synthetic oligonucleotide
  Sense strand starting at position 3708 of SEQ ID NO: 916361
uuucuucuugaaugacaga

SEQ ID NO: 1150695 - RNA, 19 nt, Artificial Sequence
  Description of Artificial Sequence: Synthetic oligonucleotide
  Antisense strand to SEQ ID NO: 1150694
ucugucauucaagaagaaa

SEQ ID NO: 1150696 - RNA, 19 nt, Artificial Sequence
  Description of Artificial Sequence: Synthetic oligonucleotide
  Sense strand starting at position 3894 of SEQ ID NO: 916361
ugguucuuacuacgaaauu

SEQ ID NO: 1150697 - RNA, 19 nt, Artificial Sequence
  Description of Artificial Sequence: Synthetic oligonucleotide
  Antisense strand to SEQ ID NO: 1150696
aauuucguaguaagaacca

SEQ ID NO: 1150698 - RNA, 19 nt, Artificial Sequence
  Description of Artificial Sequence: Synthetic oligonucleotide
  Sense strand starting at position 3895 of SEQ ID NO: 916361
gguucuuacuacgaaauuu

SEQ ID NO: 1150699 - RNA, 19 nt, Artificial Sequence
  Description of Artificial Sequence: Synthetic oligonucleotide
  Antisense strand to SEQ ID NO: 1150698
aaauuucguaguaagaacc

SEQ ID NO: 1150700 - RNA, 19 nt, Artificial Sequence
  Description of Artificial Sequence: Synthetic oligonucleotide
  Sense strand starting at position 204 of SEQ ID NO: 916362
aauugacggcucuaagacu

SEQ ID NO: 1150701 - RNA, 19 nt, Artificial Sequence
  Description of Artificial Sequence: Synthetic oligonucleotide
  Antisense strand to SEQ ID NO: 1150700
agucuuagagccgucaauu

SEQ ID NO: 1150702 - RNA, 19 nt, Artificial Sequence
  Description of Artificial Sequence: Synthetic oligonucleotide
  Sense strand starting at position 288 of SEQ ID NO: 916362
agucaaaugcuuggcauga

SEQ ID NO: 1150703 - RNA, 19 nt, Artificial Sequence
  Description of Artificial Sequence: Synthetic oligonucleotide
  Antisense strand to SEQ ID NO: 1150702
ucaugccaagcauuugacu

SEQ ID NO: 1150704 - RNA, 19 nt, Artificial Sequence
  Description of Artificial Sequence: Synthetic oligonucleotide
  Sense strand starting at position 450 of SEQ ID NO: 916362
aggccaugcuauccaucau

SEQ ID NO: 1150705 - RNA, 19 nt, Artificial Sequence
  Description of Artificial Sequence: Synthetic oligonucleotide
  Antisense strand to SEQ ID NO: 1150704
augauggauagcauggccu

SEQ ID NO: 1150706 - RNA, 19 nt, Artificial Sequence
  Description of Artificial Sequence: Synthetic oligonucleotide
  Sense strand starting at position 570 of SEQ ID NO: 916362
uacugauaugcucgaguau

SEQ ID NO: 1150707 - RNA, 19 nt, Artificial Sequence
  Description of Artificial Sequence: Synthetic oligonucleotide
  Antisense strand to SEQ ID NO: 1150706
auacucgagcauaucagua

SEQ ID NO: 1150708 - RNA, 19 nt, Artificial Sequence
  Description of Artificial Sequence: Synthetic oligonucleotide
  Sense strand starting at position 571 of SEQ ID NO: 916362
acugauaugcucgaguauu

SEQ ID NO: 1150709 - RNA, 19 nt, Artificial Sequence
  Description of Artificial Sequence: Synthetic oligonucleotide
  Antisense strand to SEQ ID NO: 1150708
aauacucgagcauaucagu

SEQ ID NO: 1150710 - RNA, 19 nt, Artificial Sequence
  Description of Artificial Sequence: Synthetic oligonucleotide
  Sense strand starting at position 604 of SEQ ID NO: 916362
cuuucuaagcugugauacu

SEQ ID NO: 1150711 - RNA, 19 nt, Artificial Sequence
  Description of Artificial Sequence: Synthetic oligonucleotide
  Antisense strand to SEQ ID NO: 1150710
aguaucacagcuuagaaag

SEQ ID NO: 1150712 - RNA, 19 nt, Artificial Sequence
  Description of Artificial Sequence: Synthetic oligonucleotide
  Sense strand starting at position 713 of SEQ ID NO: 916362
gagagugaaguauguuacu

SEQ ID NO: 1150713 - RNA, 19 nt, Artificial Sequence
  Description of Artificial Sequence: Synthetic oligonucleotide
  Antisense strand to SEQ ID NO: 1150712
aguaacauacuucacucuc

SEQ ID NO: 1150714 - RNA, 19 nt, Artificial Sequence
  Description of Artificial Sequence: Synthetic oligonucleotide
  Sense strand starting at position 718 of SEQ ID NO: 916362
ugaaguauguuacucauua

SEQ ID NO: 1150715 - RNA, 19 nt, Artificial Sequence
  Description of Artificial Sequence: Synthetic oligonucleotide
  Antisense strand to SEQ ID NO: 1150714
uaaugaguaacauacuuca

SEQ ID NO: 1150716 - RNA, 19 nt, Artificial Sequence
  Description of Artificial Sequence: Synthetic oligonucleotide
  Sense strand starting at position 1168 of SEQ ID NO: 916362
aaaggaauauuauggauga

SEQ ID NO: 1150717 - RNA, 19 nt, Artificial Sequence
  Description of Artificial Sequence: Synthetic oligonucleotide
  Antisense strand to SEQ ID NO: 1150716
ucauccauaauauuccuuu

SEQ ID NO: 1150718 - RNA, 19 nt, Artificial Sequence
  Description of Artificial Sequence: Synthetic oligonucleotide
  Sense strand starting at position 1169 of SEQ ID NO: 916362
aaggaauauuauggaugaa

SEQ ID NO: 1150719 - RNA, 19 nt, Artificial Sequence
  Description of Artificial Sequence: Synthetic oligonucleotide
  Antisense strand to SEQ ID NO: 1150718
uucauccauaauauuccuu

SEQ ID NO: 1150720 - RNA, 19 nt, Artificial Sequence
  Description of Artificial Sequence: Synthetic oligonucleotide
  Sense strand starting at position 1235 of SEQ ID NO: 916362
ggaauaacguagguuguua

SEQ ID NO: 1150721 - RNA, 19 nt, Artificial Sequence
  Description of Artificial Sequence: Synthetic oligonucleotide
  Antisense strand to SEQ ID NO: 1150720
uaacaaccuacguuauucc

SEQ ID NO: 1150722 - RNA, 19 nt, Artificial Sequence
  Description of Artificial Sequence: Synthetic oligonucleotide
  Sense strand starting at position 1248 of SEQ ID NO: 916362
uuguuauuacagcaaguuu

SEQ ID NO: 1150723 - RNA, 19 nt, Artificial Sequence
  Description of Artificial Sequence: Synthetic oligonucleotide
  Antisense strand to SEQ ID NO: 1150722
aaacuugcuguaauaacaa

SEQ ID NO: 1150724 - RNA, 19 nt, Artificial Sequence
  Description of Artificial Sequence: Synthetic oligonucleotide
  Sense strand starting at position 1640 of SEQ ID NO: 916362
ucaugcuaacuugauugaa

SEQ ID NO: 1150725 - RNA, 19 nt, Artificial Sequence
  Description of Artificial Sequence: Synthetic oligonucleotide
  Antisense strand to SEQ ID NO: 1150724
uucaaucaaguuagcauga

SEQ ID NO: 1150726 - RNA, 19 nt, Artificial Sequence
  Description of Artificial Sequence: Synthetic oligonucleotide
  Sense strand starting at position 1699 of SEQ ID NO: 916362
ugugauuaucuacaggcaa

SEQ ID NO: 1150727 - RNA, 19 nt, Artificial Sequence
  Description of Artificial Sequence: Synthetic oligonucleotide
  Antisense strand to SEQ ID NO: 1150726
uugccuguagauaaucaca

SEQ ID NO: 1150728 - RNA, 19 nt, Artificial Sequence
  Description of Artificial Sequence: Synthetic oligonucleotide
  Sense strand starting at position 1722 of SEQ ID NO: 916362
ugcaacacccguuaaacau

SEQ ID NO: 1150729 - RNA, 19 nt, Artificial Sequence
  Description of Artificial Sequence: Synthetic oligonucleotide
  Antisense strand to SEQ ID NO: 1150728
auguuuaacggguguugca

SEQ ID NO: 1150730 - RNA, 19 nt, Artificial Sequence
  Description of Artificial Sequence: Synthetic oligonucleotide
  Sense strand starting at position 1891 of SEQ ID NO: 916362
ugagucuguggguaaguuu

SEQ ID NO: 1150731 - RNA, 19 nt, Artificial Sequence
  Description of Artificial Sequence: Synthetic oligonucleotide
  Antisense strand to SEQ ID NO: 1150730
aaacuuacccacagacuca

SEQ ID NO: 1150732 - RNA, 19 nt, Artificial Sequence
  Description of Artificial Sequence: Synthetic oligonucleotide
  Sense strand starting at position 1900 of SEQ ID NO: 916362
ggguaaguuuaacucagca

SEQ ID NO: 1150733 - RNA, 19 nt, Artificial Sequence
  Description of Artificial Sequence: Synthetic oligonucleotide
  Antisense strand to SEQ ID NO: 1150732
ugcugaguuaaacuuaccc

SEQ ID NO: 1150734 - RNA, 19 nt, Artificial Sequence
  Description of Artificial Sequence: Synthetic oligonucleotide
  Sense strand starting at position 1958 of SEQ ID NO: 916362
cauuaaacuuguguguaag

SEQ ID NO: 1150735 - RNA, 19 nt, Artificial Sequence
  Description of Artificial Sequence: Synthetic oligonucleotide
  Antisense strand to SEQ ID NO: 1150734
cuuacacacaaguuuaaug

SEQ ID NO: 1150736 - RNA, 19 nt, Artificial Sequence
  Description of Artificial Sequence: Synthetic oligonucleotide
  Sense strand starting at position 1959 of SEQ ID NO: 916362
auuaaacuuguguguaaga

SEQ ID NO: 1150737 - RNA, 19 nt, Artificial Sequence
  Description of Artificial Sequence: Synthetic oligonucleotide
  Antisense strand to SEQ ID NO: 1150736
ucuuacacacaaguuuaau

SEQ ID NO: 1150738 - RNA, 19 nt, Artificial Sequence
  Description of Artificial Sequence: Synthetic oligonucleotide
  Sense strand starting at position 1960 of SEQ ID NO: 916362
uuaaacuuguguguaagaa

SEQ ID NO: 1150739 - RNA, 19 nt, Artificial Sequence
  Description of Artificial Sequence: Synthetic oligonucleotide
  Antisense strand to SEQ ID NO: 1150738
uucuuacacacaaguuuaa

SEQ ID NO: 1150740 - RNA, 19 nt, Artificial Sequence
  Description of Artificial Sequence: Synthetic oligonucleotide
  Sense strand starting at position 1961 of SEQ ID NO: 916362
uaaacuuguguguaagaac

SEQ ID NO: 1150741 - RNA, 19 nt, Artificial Sequence
  Description of Artificial Sequence: Synthetic oligonucleotide
  Antisense strand to SEQ ID NO: 1150740
guucuuacacacaaguuua

SEQ ID NO: 1150742 - RNA, 19 nt, Artificial Sequence
  Description of Artificial Sequence: Synthetic oligonucleotide
  Sense strand starting at position 1983 of SEQ ID NO: 916362
cucucaauucugugaggca

SEQ ID NO: 1150743 - RNA, 19 nt, Artificial Sequence
  Description of Artificial Sequence: Synthetic oligonucleotide
  Antisense strand to SEQ ID NO: 1150742
ugccucacagaauugagag

SEQ ID NO: 1150744 - RNA, 19 nt, Artificial Sequence
  Description of Artificial Sequence: Synthetic oligonucleotide
  Sense strand starting at position 2079 of SEQ ID NO: 916362
ggugguuaucuccauaaau

SEQ ID NO: 1150745 - RNA, 19 nt, Artificial Sequence
  Description of Artificial Sequence: Synthetic oligonucleotide
  Antisense strand to SEQ ID NO: 1150744
auuuauggagauaaccacc

SEQ ID NO: 1150746 - RNA, 19 nt, Artificial Sequence
  Description of Artificial Sequence: Synthetic oligonucleotide
  Sense strand starting at position 2167 of SEQ ID NO: 916362
uggccuguuguuugagaaa

SEQ ID NO: 1150747 - RNA, 19 nt, Artificial Sequence
  Description of Artificial Sequence: Synthetic oligonucleotide
  Antisense strand to SEQ ID NO: 1150746
uuucucaaacaacaggcca

SEQ ID NO: 1150748 - RNA, 19 nt, Artificial Sequence
  Description of Artificial Sequence: Synthetic oligonucleotide
  Sense strand starting at position 2410 of SEQ ID NO: 916362
cugaaauaucugugcucca

SEQ ID NO: 1150749 - RNA, 19 nt, Artificial Sequence
  Description of Artificial Sequence: Synthetic oligonucleotide
  Antisense strand to SEQ ID NO: 1150748
uggagcacagauauuucag

SEQ ID NO: 1150750 - RNA, 19 nt, Artificial Sequence
  Description of Artificial Sequence: Synthetic oligonucleotide
  Sense strand starting at position 2411 of SEQ ID NO: 916362
ugaaauaucugugcuccaa

SEQ ID NO: 1150751 - RNA, 19 nt, Artificial Sequence
  Description of Artificial Sequence: Synthetic oligonucleotide
  Antisense strand to SEQ ID NO: 1150750
uuggagcacagauauuuca

SEQ ID NO: 1150752 - RNA, 19 nt, Artificial Sequence
  Description of Artificial Sequence: Synthetic oligonucleotide
  Sense strand starting at position 2415 of SEQ ID NO: 916362
auaucugugcuccaaagaa

SEQ ID NO: 1150753 - RNA, 19 nt, Artificial Sequence
  Description of Artificial Sequence: Synthetic oligonucleotide
  Antisense strand to SEQ ID NO: 1150752
uucuuuggagcacagauau

SEQ ID NO: 1150754 - RNA, 19 nt, Artificial Sequence
  Description of Artificial Sequence: Synthetic oligonucleotide
  Sense strand starting at position 2507 of SEQ ID NO: 916362
gcuaaagaucaguagccua

SEQ ID NO: 1150755 - RNA, 19 nt, Artificial Sequence
  Description of Artificial Sequence: Synthetic oligonucleotide
  Antisense strand to SEQ ID NO: 1150754
uaggcuacugaucuuuagc

SEQ ID NO: 1150756 - RNA, 19 nt, Artificial Sequence
  Description of Artificial Sequence: Synthetic oligonucleotide
  Sense strand starting at position 2512 of SEQ ID NO: 916362
agaucaguagccuacuguu

SEQ ID NO: 1150757 - RNA, 19 nt, Artificial Sequence
  Description of Artificial Sequence: Synthetic oligonucleotide
  Antisense strand to SEQ ID NO: 1150756
aacaguaggcuacugaucu

SEQ ID NO: 1150758 - RNA, 19 nt, Artificial Sequence
  Description of Artificial Sequence: Synthetic oligonucleotide
  Sense strand starting at position 2589 of SEQ ID NO: 916362
uggaaacugccagaauugu

SEQ ID NO: 1150759 - RNA, 19 nt, Artificial Sequence
  Description of Artificial Sequence: Synthetic oligonucleotide
  Antisense strand to SEQ ID NO: 1150758
acaauucuggcaguuucca

SEQ ID NO: 1150760 - RNA, 19 nt, Artificial Sequence
  Description of Artificial Sequence: Synthetic oligonucleotide
  Sense strand starting at position 2597 of SEQ ID NO: 916362
gccagaauuguaggaagug

SEQ ID NO: 1150761 - RNA, 19 nt, Artificial Sequence
  Description of Artificial Sequence: Synthetic oligonucleotide
  Antisense strand to SEQ ID NO: 1150760
cacuuccuacaauucuggc

SEQ ID NO: 1150762 - RNA, 19 nt, Artificial Sequence
  Description of Artificial Sequence: Synthetic oligonucleotide
  Sense strand starting at position 2612 of SEQ ID NO: 916362
aguggaguauauggaauuu

SEQ ID NO: 1150763 - RNA, 19 nt, Artificial Sequence
  Description of Artificial Sequence: Synthetic oligonucleotide
  Antisense strand to SEQ ID NO: 1150762
aaauuccauauacuccacu

SEQ ID NO: 1150764 - RNA, 19 nt, Artificial Sequence
  Description of Artificial Sequence: Synthetic oligonucleotide
  Sense strand starting at position 2667 of SEQ ID NO: 916362
ugauuauaguaugugucua

SEQ ID NO: 1150765 - RNA, 19 nt, Artificial Sequence
  Description of Artificial Sequence: Synthetic oligonucleotide
  Antisense strand to SEQ ID NO: 1150764
uagacacauacuauaauca

SEQ ID NO: 1150766 - RNA, 19 nt, Artificial Sequence
  Description of Artificial Sequence: Synthetic oligonucleotide
  Sense strand starting at position 2876 of SEQ ID NO: 916362
cccucccuguguccaaaua

SEQ ID NO: 1150767 - RNA, 19 nt, Artificial Sequence
  Description of Artificial Sequence: Synthetic oligonucleotide
  Antisense strand to SEQ ID NO: 1150766
uauuuggacacagggaggg

SEQ ID NO: 1150768 - RNA, 19 nt, Artificial Sequence
  Description of Artificial Sequence: Synthetic oligonucleotide
  Sense strand starting at position 2877 of SEQ ID NO: 916362
ccucccuguguccaaauau

SEQ ID NO: 1150769 - RNA, 19 nt, Artificial Sequence
  Description of Artificial Sequence: Synthetic oligonucleotide
  Antisense strand to SEQ ID NO: 1150768
auauuuggacacagggagg

SEQ ID NO: 1150770 - RNA, 19 nt, Artificial Sequence
  Description of Artificial Sequence: Synthetic oligonucleotide
  Sense strand starting at position 3052 of SEQ ID NO: 916362
gcauaugugccauauauuc

SEQ ID NO: 1150771 - RNA, 19 nt, Artificial Sequence
  Description of Artificial Sequence: Synthetic oligonucleotide
  Antisense strand to SEQ ID NO: 1150770
gaauauauggcacauaugc

SEQ ID NO: 1150772 - RNA, 19 nt, Artificial Sequence
  Description of Artificial Sequence: Synthetic oligonucleotide
  Sense strand starting at position 3221 of SEQ ID NO: 916362
gucaaauucuaguucuagu

SEQ ID NO: 1150773 - RNA, 19 nt, Artificial Sequence
  Description of Artificial Sequence: Synthetic oligonucleotide
  Antisense strand to SEQ ID NO: 1150772
acuagaacuagaauuugac

SEQ ID NO: 1150774 - RNA, 19 nt, Artificial Sequence
  Description of Artificial Sequence: Synthetic oligonucleotide
  Sense strand starting at position 3232 of SEQ ID NO: 916362
guucuagucccucgaggaa

SEQ ID NO: 1150775 - RNA, 19 nt, Artificial Sequence
  Description of Artificial Sequence: Synthetic oligonucleotide
  Antisense strand to SEQ ID NO: 1150774
uuccucgagggacuagaac

SEQ ID NO: 1150776 - RNA, 19 nt, Artificial Sequence
  Description of Artificial Sequence: Synthetic oligonucleotide
  Sense strand starting at position 3551 of SEQ ID NO: 916362
uuauguaaguucuuuguag

SEQ ID NO: 1150777 - RNA, 19 nt, Artificial Sequence
  Description of Artificial Sequence: Synthetic oligonucleotide
  Antisense strand to SEQ ID NO: 1150776
cuacaaagaacuuacauaa

SEQ ID NO: 1150778 - RNA, 19 nt, Artificial Sequence
  Description of Artificial Sequence: Synthetic oligonucleotide
  Sense strand starting at position 3552 of SEQ ID NO: 916362
uauguaaguucuuuguaga

SEQ ID NO: 1150779 - RNA, 19 nt, Artificial Sequence
  Description of Artificial Sequence: Synthetic oligonucleotide
  Antisense strand to SEQ ID NO: 1150778
ucuacaaagaacuuacaua

SEQ ID NO: 1150780 - RNA, 19 nt, Artificial Sequence
  Description of Artificial Sequence: Synthetic oligonucleotide
  Sense strand starting at position 124 of SEQ ID NO: 916363
aaaguagucgggcaugaug

SEQ ID NO: 1150781 - RNA, 19 nt, Artificial Sequence
  Description of Artificial Sequence: Synthetic oligonucleotide
  Antisense strand to SEQ ID NO: 1150780
caucaugcccgacuacuuu

SEQ ID NO: 1150782 - RNA, 19 nt, Artificial Sequence
  Description of Artificial Sequence: Synthetic oligonucleotide
  Sense strand starting at position 461 of SEQ ID NO: 916363
uuugaaauccaguaauggu

SEQ ID NO: 1150783 - RNA, 19 nt, Artificial Sequence
  Description of Artificial Sequence: Synthetic oligonucleotide
  Antisense strand to SEQ ID NO: 1150782
accauuacuggauuucaaa

SEQ ID NO: 1150784 - RNA, 19 nt, Artificial Sequence
  Description of Artificial Sequence: Synthetic oligonucleotide
  Sense strand starting at position 468 of SEQ ID NO: 916363
uccaguaaugguuaagacu

SEQ ID NO: 1150785 - RNA, 19 nt, Artificial Sequence
  Description of Artificial Sequence: Synthetic oligonucleotide
  Antisense strand to SEQ ID NO: 1150784
agucuuaaccauuacugga

SEQ ID NO: 1150786 - RNA, 19 nt, Artificial Sequence
  Description of Artificial Sequence: Synthetic oligonucleotide
  Sense strand starting at position 485 of SEQ ID NO: 916363
cuauguggucugcacauga

SEQ ID NO: 1150787 - RNA, 19 nt, Artificial Sequence
  Description of Artificial Sequence: Synthetic oligonucleotide
  Antisense strand to SEQ ID NO: 1150786
ucaugugcagaccacauag

SEQ ID NO: 1150788 - RNA, 19 nt, Artificial Sequence
  Description of Artificial Sequence: Synthetic oligonucleotide
  Sense strand starting at position 490 of SEQ ID NO: 916363
uggucugcacaugaguaau

SEQ ID NO: 1150789 - RNA, 19 nt, Artificial Sequence
  Description of Artificial Sequence: Synthetic oligonucleotide
  Antisense strand to SEQ ID NO: 1150788
auuacucaugugcagacca

SEQ ID NO: 1150790 - RNA, 19 nt, Artificial Sequence
  Description of Artificial Sequence: Synthetic oligonucleotide
  Sense strand starting at position 493 of SEQ ID NO: 916363
ucugcacaugaguaauagu

SEQ ID NO: 1150791 - RNA, 19 nt, Artificial Sequence
  Description of Artificial Sequence: Synthetic oligonucleotide
  Antisense strand to SEQ ID NO: 1150790
acuauuacucaugugcaga

SEQ ID NO: 1150792 - RNA, 19 nt, Artificial Sequence
  Description of Artificial Sequence: Synthetic oligonucleotide
  Sense strand starting at position 613 of SEQ ID NO: 916363
uuucuuaauggcugaaaug

SEQ ID NO: 1150793 - RNA, 19 nt, Artificial Sequence
  Description of Artificial Sequence: Synthetic oligonucleotide
  Antisense strand to SEQ ID NO: 1150792
cauuucagccauuaagaaa

SEQ ID NO: 1150794 - RNA, 19 nt, Artificial Sequence
  Description of Artificial Sequence: Synthetic oligonucleotide
  Sense strand starting at position 614 of SEQ ID NO: 916363
uucuuaauggcugaaaugu

SEQ ID NO: 1150795 - RNA, 19 nt, Artificial Sequence
  Description of Artificial Sequence: Synthetic oligonucleotide
  Antisense strand to SEQ ID NO: 1150794
acauuucagccauuaagaa

SEQ ID NO: 1150796 - RNA, 19 nt, Artificial Sequence
  Description of Artificial Sequence: Synthetic oligonucleotide
  Sense strand starting at position 906 of SEQ ID NO: 916363
gguugucaaagugaguaaa

SEQ ID NO: 1150797 - RNA, 19 nt, Artificial Sequence
  Description of Artificial Sequence: Synthetic oligonucleotide
  Antisense strand to SEQ ID NO: 1150796
uuuacucacuuugacaacc

SEQ ID NO: 1150798 - RNA, 19 nt, Artificial Sequence
  Description of Artificial Sequence: Synthetic oligonucleotide
  Sense strand starting at position 916 of SEQ ID NO: 916363
gugaguaaaggccacuuua

SEQ ID NO: 1150799 - RNA, 19 nt, Artificial Sequence
  Description of Artificial Sequence: Synthetic oligonucleotide
  Antisense strand to SEQ ID NO: 1150798
uaaaguggccuuuacucac

SEQ ID NO: 1150800 - RNA, 19 nt, Artificial Sequence
  Description of Artificial Sequence: Synthetic oligonucleotide
  Sense strand starting at position 929 of SEQ ID NO: 916363
acuuuaguuguauaaguac

SEQ ID NO: 1150801 - RNA, 19 nt, Artificial Sequence
  Description of Artificial Sequence: Synthetic oligonucleotide
  Antisense strand to SEQ ID NO: 1150800
guacuuauacaacuaaagu

SEQ ID NO: 1150802 - RNA, 19 nt, Artificial Sequence
  Description of Artificial Sequence: Synthetic oligonucleotide
  Sense strand starting at position 993 of SEQ ID NO: 916363
ucuggagucagugagaucu

SEQ ID NO: 1150803 - RNA, 19 nt, Artificial Sequence
  Description of Artificial Sequence: Synthetic oligonucleotide
  Antisense strand to SEQ ID NO: 1150802
agaucucacugacuccaga

SEQ ID NO: 1150804 - RNA, 19 nt, Artificial Sequence
  Description of Artificial Sequence: Synthetic oligonucleotide
  Sense strand starting at position 1257 of SEQ ID NO: 916363
ucagauaagucuccuaugu

SEQ ID NO: 1150805 - RNA, 19 nt, Artificial Sequence
  Description of Artificial Sequence: Synthetic oligonucleotide
  Antisense strand to SEQ ID NO: 1150804
acauaggagacuuaucuga

SEQ ID NO: 1150806 - RNA, 19 nt, Artificial Sequence
  Description of Artificial Sequence: Synthetic oligonucleotide
  Sense strand starting at position 1410 of SEQ ID NO: 916363
aaucuacgugucugaggaa

SEQ ID NO: 1150807 - RNA, 19 nt, Artificial Sequence
  Description of Artificial Sequence: Synthetic oligonucleotide
  Antisense strand to SEQ ID NO: 1150806
uuccucagacacguagauu

SEQ ID NO: 1150808 - RNA, 19 nt, Artificial Sequence
  Description of Artificial Sequence: Synthetic oligonucleotide
  Sense strand starting at position 1472 of SEQ ID NO: 916363
uuuaauggcuaagcuaaau

SEQ ID NO: 1150809 - RNA, 19 nt, Artificial Sequence
  Description of Artificial Sequence: Synthetic oligonucleotide
  Antisense strand to SEQ ID NO: 1150808
auuuagcuuagccauuaaa

SEQ ID NO: 1150810 - RNA, 19 nt, Artificial Sequence
  Description of Artificial Sequence: Synthetic oligonucleotide
  Sense strand starting at position 1565 of SEQ ID NO: 916363
auagcuuucccuuaaacga

SEQ ID NO: 1150811 - RNA, 19 nt, Artificial Sequence
  Description of Artificial Sequence: Synthetic oligonucleotide
  Antisense strand to SEQ ID NO: 1150810
ucguuuaagggaaagcuau

SEQ ID NO: 1150812 - RNA, 19 nt, Artificial Sequence
  Description of Artificial Sequence: Synthetic oligonucleotide
  Sense strand starting at position 1793 of SEQ ID NO: 916363
agaguuggagaguagcaau

SEQ ID NO: 1150813 - RNA, 19 nt, Artificial Sequence
  Description of Artificial Sequence: Synthetic oligonucleotide
  Antisense strand to SEQ ID NO: 1150812
auugcuacucuccaacucu

SEQ ID NO: 1150814 - RNA, 19 nt, Artificial Sequence
  Description of Artificial Sequence: Synthetic oligonucleotide
  Sense strand starting at position 1977 of SEQ ID NO: 916363
cucagagugagucaagagu

SEQ ID NO: 1150815 - RNA, 19 nt, Artificial Sequence
  Description of Artificial Sequence: Synthetic oligonucleotide
  Antisense strand to SEQ ID NO: 1150814
acucuugacucacucugag

SEQ ID NO: 1150816 - RNA, 19 nt, Artificial Sequence
  Description of Artificial Sequence: Synthetic oligonucleotide
  Sense strand starting at position 2003 of SEQ ID NO: 916363
guagauuucucaucaacgu

SEQ ID NO: 1150817 - RNA, 19 nt, Artificial Sequence
  Description of Artificial Sequence: Synthetic oligonucleotide
  Antisense strand to SEQ ID NO: 1150816
acguugaugagaaaucuac

SEQ ID NO: 1150818 - RNA, 19 nt, Artificial Sequence
  Description of Artificial Sequence: Synthetic oligonucleotide
  Sense strand starting at position 2007 of SEQ ID NO: 916363
auuucucaucaacguguua

SEQ ID NO: 1150819 - RNA, 19 nt, Artificial Sequence
  Description of Artificial Sequence: Synthetic oligonucleotide
  Antisense strand to SEQ ID NO: 1150818
uaacacguugaugagaaau

SEQ ID NO: 1150820 - RNA, 19 nt, Artificial Sequence
  Description of Artificial Sequence: Synthetic oligonucleotide
  Sense strand starting at position 2100 of SEQ ID NO: 916363
auaggauacuuggucuauu

SEQ ID NO: 1150821 - RNA, 19 nt, Artificial Sequence
  Description of Artificial Sequence: Synthetic oligonucleotide
  Antisense strand to SEQ ID NO: 1150820
aauagaccaaguauccuau

SEQ ID NO: 1150822 - RNA, 19 nt, Artificial Sequence
  Description of Artificial Sequence: Synthetic oligonucleotide
  Sense strand starting at position 2101 of SEQ ID NO: 916363
uaggauacuuggucuauua

SEQ ID NO: 1150823 - RNA, 19 nt, Artificial Sequence
  Description of Artificial Sequence: Synthetic oligonucleotide
  Antisense strand to SEQ ID NO: 1150822
uaauagaccaaguauccua

SEQ ID NO: 1150824 - RNA, 19 nt, Artificial Sequence
  Description of Artificial Sequence: Synthetic oligonucleotide
  Sense strand starting at position 2123 of SEQ ID NO: 916363
guacaagguugacuuugaa

SEQ ID NO: 1150825 - RNA, 19 nt, Artificial Sequence
  Description of Artificial Sequence: Synthetic oligonucleotide
  Antisense strand to SEQ ID NO: 1150824
uucaaagucaaccuuguac

SEQ ID NO: 1150826 - RNA, 19 nt, Artificial Sequence
  Description of Artificial Sequence: Synthetic oligonucleotide
  Sense strand starting at position 2126 of SEQ ID NO: 916363
caagguugacuuugaaagu

SEQ ID NO: 1150827 - RNA, 19 nt, Artificial Sequence
  Description of Artificial Sequence: Synthetic oligonucleotide
  Antisense strand to SEQ ID NO: 1150826
acuuucaaagucaaccuug

SEQ ID NO: 1150828 - RNA, 19 nt, Artificial Sequence
  Description of Artificial Sequence: Synthetic oligonucleotide
  Sense strand starting at position 2135 of SEQ ID NO: 916363
cuuugaaagugugucauuu

SEQ ID NO: 1150829 - RNA, 19 nt, Artificial Sequence
  Description of Artificial Sequence: Synthetic oligonucleotide
  Antisense strand to SEQ ID NO: 1150828
aaaugacacacuuucaaag

SEQ ID NO: 1150830 - RNA, 19 nt, Artificial Sequence
  Description of Artificial Sequence: Synthetic oligonucleotide
  Sense strand starting at position 2139 of SEQ ID NO: 916363
gaaagugugucauuuaguu

SEQ ID NO: 1150831 - RNA, 19 nt, Artificial Sequence
  Description of Artificial Sequence: Synthetic oligonucleotide
  Antisense strand to SEQ ID NO: 1150830
aacuaaaugacacacuuuc

SEQ ID NO: 1150832 - RNA, 19 nt, Artificial Sequence
  Description of Artificial Sequence: Synthetic oligonucleotide
  Sense strand starting at position 2143 of SEQ ID NO: 916363
gugugucauuuaguugguu

SEQ ID NO: 1150833 - RNA, 19 nt, Artificial Sequence
  Description of Artificial Sequence: Synthetic oligonucleotide
  Antisense strand to SEQ ID NO: 1150832
aaccaacuaaaugacacac

SEQ ID NO: 1150834 - RNA, 19 nt, Artificial Sequence
  Description of Artificial Sequence: Synthetic oligonucleotide
  Sense strand starting at position 2198 of SEQ ID NO: 916363
ugucuugaucacgaacauu

SEQ ID NO: 1150835 - RNA, 19 nt, Artificial Sequence
  Description of Artificial Sequence: Synthetic oligonucleotide
  Antisense strand to SEQ ID NO: 1150834
aauguucgugaucaagaca

SEQ ID NO: 1150836 - RNA, 19 nt, Artificial Sequence
  Description of Artificial Sequence: Synthetic oligonucleotide
  Sense strand starting at position 2245 of SEQ ID NO: 916363
uuuagacuagguugcuaaa

SEQ ID NO: 1150837 - RNA, 19 nt, Artificial Sequence
  Description of Artificial Sequence: Synthetic oligonucleotide
  Antisense strand to SEQ ID NO: 1150836
uuuagcaaccuagucuaaa

SEQ ID NO: 1150838 - RNA, 19 nt, Artificial Sequence
  Description of Artificial Sequence: Synthetic oligonucleotide
  Sense strand starting at position 2401 of SEQ ID NO: 916363
ugcaguaauuacucaauug

SEQ ID NO: 1150839 - RNA, 19 nt, Artificial Sequence
  Description of Artificial Sequence: Synthetic oligonucleotide
  Antisense strand to SEQ ID NO: 1150838
caauugaguaauuacugca

SEQ ID NO: 1150840 - RNA, 19 nt, Artificial Sequence
  Description of Artificial Sequence: Synthetic oligonucleotide
  Sense strand starting at position 2758 of SEQ ID NO: 916363
gucaguaaauuggcagaau

SEQ ID NO: 1150841 - RNA, 19 nt, Artificial Sequence
  Description of Artificial Sequence: Synthetic oligonucleotide
  Antisense strand to SEQ ID NO: 1150840
auucugccaauuuacugac

SEQ ID NO: 1150842 - RNA, 19 nt, Artificial Sequence
  Description of Artificial Sequence: Synthetic oligonucleotide
  Sense strand starting at position 2839 of SEQ ID NO: 916363
aguuccuuugagggaguuu

SEQ ID NO: 1150843 - RNA, 19 nt, Artificial Sequence
  Description of Artificial Sequence: Synthetic oligonucleotide
  Antisense strand to SEQ ID NO: 1150842
aaacucccucaaaggaacu

SEQ ID NO: 1150844 - RNA, 19 nt, Artificial Sequence
  Description of Artificial Sequence: Synthetic oligonucleotide
  Sense strand starting at position 2920 of SEQ ID NO: 916363
ggaauagauuugcauccaa

SEQ ID NO: 1150845 - RNA, 19 nt, Artificial Sequence
  Description of Artificial Sequence: Synthetic oligonucleotide
  Antisense strand to SEQ ID NO: 1150844
uuggaugcaaaucuauucc

SEQ ID NO: 1150846 - RNA, 19 nt, Artificial Sequence
  Description of Artificial Sequence: Synthetic oligonucleotide
  Sense strand starting at position 3013 of SEQ ID NO: 916363
ccauuuaggccuuggucau

SEQ ID NO: 1150847 - RNA, 19 nt, Artificial Sequence
  Description of Artificial Sequence: Synthetic oligonucleotide
  Antisense strand to SEQ ID NO: 1150846
augaccaaggccuaaaugg

SEQ ID NO: 1150848 - RNA, 19 nt, Artificial Sequence
  Description of Artificial Sequence: Synthetic oligonucleotide
  Sense strand starting at position 3322 of SEQ ID NO: 916363
aggaaauugcugugagacu

SEQ ID NO: 1150849 - RNA, 19 nt, Artificial Sequence
  Description of Artificial Sequence: Synthetic oligonucleotide
  Antisense strand to SEQ ID NO: 1150848
agucucacagcaauuuccu

SEQ ID NO: 1150850 - RNA, 19 nt, Artificial Sequence
  Description of Artificial Sequence: Synthetic oligonucleotide
  Sense strand starting at position 3394 of SEQ ID NO: 916363
cugaaacagccuugaaucu

SEQ ID NO: 1150851 - RNA, 19 nt, Artificial Sequence
  Description of Artificial Sequence: Synthetic oligonucleotide
  Antisense strand to SEQ ID NO: 1150850
agauucaaggcuguuucag

SEQ ID NO: 1150852 - RNA, 19 nt, Artificial Sequence
  Description of Artificial Sequence: Synthetic oligonucleotide
  Sense strand starting at position 3473 of SEQ ID NO: 916363
ggaggacaugugcauccau

SEQ ID NO: 1150853 - RNA, 19 nt, Artificial Sequence
  Description of Artificial Sequence: Synthetic oligonucleotide
  Antisense strand to SEQ ID NO: 1150852
auggaugcacauguccucc

SEQ ID NO: 1150854 - RNA, 19 nt, Artificial Sequence
  Description of Artificial Sequence: Synthetic oligonucleotide
  Sense strand starting at position 3568 of SEQ ID NO: 916363
ucagcuaugcuagagagca

SEQ ID NO: 1150855 - RNA, 19 nt, Artificial Sequence
  Description of Artificial Sequence: Synthetic oligonucleotide
  Antisense strand to SEQ ID NO: 1150854
ugcucucuagcauagcuga

SEQ ID NO: 1150856 - RNA, 19 nt, Artificial Sequence
  Description of Artificial Sequence: Synthetic oligonucleotide
  Sense strand starting at position 3807 of SEQ ID NO: 916363
gaaaccuugugacuuagca

SEQ ID NO: 1150857 - RNA, 19 nt, Artificial Sequence
  Description of Artificial Sequence: Synthetic oligonucleotide
  Antisense strand to SEQ ID NO: 1150856
ugcuaagucacaagguuuc

SEQ ID NO: 1150858 - RNA, 19 nt, Artificial Sequence
  Description of Artificial Sequence: Synthetic oligonucleotide
  Sense strand starting at position 3973 of SEQ ID NO: 916363
agcccuauacaguaugauu

SEQ ID NO: 1150859 - RNA, 19 nt, Artificial Sequence
  Description of Artificial Sequence: Synthetic oligonucleotide
  Antisense strand to SEQ ID NO: 1150858
aaucauacuguauagggcu

SEQ ID NO: 1150860 - RNA, 19 nt, Artificial Sequence
  Description of Artificial Sequence: Synthetic oligonucleotide
  Sense strand starting at position 21 of SEQ ID NO: 916364
ucagauaagucuccuaugu

SEQ ID NO: 1150861 - RNA, 19 nt, Artificial Sequence
  Description of Artificial Sequence: Synthetic oligonucleotide
  Antisense strand to SEQ ID NO: 1150860
acauaggagacuuaucuga

SEQ ID NO: 1150862 - RNA, 19 nt, Artificial Sequence
  Description of Artificial Sequence: Synthetic oligonucleotide
  Sense strand starting at position 173 of SEQ ID NO: 916364
uaaucuacgugucugagga

SEQ ID NO: 1150863 - RNA, 19 nt, Artificial Sequence
  Description of Artificial Sequence: Synthetic oligonucleotide
  Antisense strand to SEQ ID NO: 1150862
uccucagacacguagauua

SEQ ID NO: 1150864 - RNA, 19 nt, Artificial Sequence
  Description of Artificial Sequence: Synthetic oligonucleotide
  Sense strand starting at position 174 of SEQ ID NO: 916364
aaucuacgugucugaggaa

SEQ ID NO: 1150865 - RNA, 19 nt, Artificial Sequence
  Description of Artificial Sequence: Synthetic oligonucleotide
  Antisense strand to SEQ ID NO: 1150864
uuccucagacacguagauu

SEQ ID NO: 1150866 - RNA, 19 nt, Artificial Sequence
  Description of Artificial Sequence: Synthetic oligonucleotide
  Sense strand starting at position 236 of SEQ ID NO: 916364
uuuaauggcuaagcuaaau

SEQ ID NO: 1150867 - RNA, 19 nt, Artificial Sequence
  Description of Artificial Sequence: Synthetic oligonucleotide
  Antisense strand to SEQ ID NO: 1150866
auuuagcuuagccauuaaa

SEQ ID NO: 1150868 - RNA, 19 nt, Artificial Sequence
  Description of Artificial Sequence: Synthetic oligonucleotide
  Sense strand starting at position 329 of SEQ ID NO: 916364
auagcuuucccuuaaacga

SEQ ID NO: 1150869 - RNA, 19 nt, Artificial Sequence
  Description of Artificial Sequence: Synthetic oligonucleotide
  Antisense strand to SEQ ID NO: 1150868
ucguuuaagggaaagcuau

SEQ ID NO: 1150870 - RNA, 19 nt, Artificial Sequence
  Description of Artificial Sequence: Synthetic oligonucleotide
  Sense strand starting at position 557 of SEQ ID NO: 916364
agaguuggagaguagcaau

SEQ ID NO: 1150871 - RNA, 19 nt, Artificial Sequence
  Description of Artificial Sequence: Synthetic oligonucleotide
  Antisense strand to SEQ ID NO: 1150870
auugcuacucuccaacucu

SEQ ID NO: 1150872 - RNA, 19 nt, Artificial Sequence
  Description of Artificial Sequence: Synthetic oligonucleotide
  Sense strand starting at position 647 of SEQ ID NO: 916364
gcuauagcuguguaauaaa

SEQ ID NO: 1150873 - RNA, 19 nt, Artificial Sequence
  Description of Artificial Sequence: Synthetic oligonucleotide
  Antisense strand to SEQ ID NO: 1150872
uuuauuacacagcuauagc

SEQ ID NO: 1150874 - RNA, 19 nt, Artificial Sequence
  Description of Artificial Sequence: Synthetic oligonucleotide
  Sense strand starting at position 741 of SEQ ID NO: 916364
cucagagugagucaagagu

SEQ ID NO: 1150875 - RNA, 19 nt, Artificial Sequence
  Description of Artificial Sequence: Synthetic oligonucleotide
  Antisense strand to SEQ ID NO: 1150874
acucuugacucacucugag

SEQ ID NO: 1150876 - RNA, 19 nt, Artificial Sequence
  Description of Artificial Sequence: Synthetic oligonucleotide
  Sense strand starting at position 767 of SEQ ID NO: 916364
guagauuucucaucaacgu

SEQ ID NO: 1150877 - RNA, 19 nt, Artificial Sequence
  Description of Artificial Sequence: Synthetic oligonucleotide
  Antisense strand to SEQ ID NO: 1150876
acguugaugagaaaucuac

SEQ ID NO: 1150878 - RNA, 19 nt, Artificial Sequence
  Description of Artificial Sequence: Synthetic oligonucleotide
  Sense strand starting at position 771 of SEQ ID NO: 916364
auuucucaucaacguguua

SEQ ID NO: 1150879 - RNA, 19 nt, Artificial Sequence
  Description of Artificial Sequence: Synthetic oligonucleotide
  Antisense strand to SEQ ID NO: 1150878
uaacacguugaugagaaau

SEQ ID NO: 1150880 - RNA, 19 nt, Artificial Sequence
  Description of Artificial Sequence: Synthetic oligonucleotide
  Sense strand starting at position 864 of SEQ ID NO: 916364
auaggauacuuggucuauu

SEQ ID NO: 1150881 - RNA, 19 nt, Artificial Sequence
  Description of Artificial Sequence: Synthetic oligonucleotide
  Antisense strand to SEQ ID NO: 1150880
aauagaccaaguauccuau

SEQ ID NO: 1150882 - RNA, 19 nt, Artificial Sequence
  Description of Artificial Sequence: Synthetic oligonucleotide
  Sense strand starting at position 865 of SEQ ID NO: 916364
uaggauacuuggucuauua

SEQ ID NO: 1150883 - RNA, 19 nt, Artificial Sequence
  Description of Artificial Sequence: Synthetic oligonucleotide
  Antisense strand to SEQ ID NO: 1150882
uaauagaccaaguauccua

SEQ ID NO: 1150884 - RNA, 19 nt, Artificial Sequence
  Description of Artificial Sequence: Synthetic oligonucleotide
  Sense strand starting at position 887 of SEQ ID NO: 916364
guacaagguugacuuugaa

SEQ ID NO: 1150885 - RNA, 19 nt, Artificial Sequence
  Description of Artificial Sequence: Synthetic oligonucleotide
  Antisense strand to SEQ ID NO: 1150884
uucaaagucaaccuuguac

SEQ ID NO: 1150886 - RNA, 19 nt, Artificial Sequence
  Description of Artificial Sequence: Synthetic oligonucleotide
  Sense strand starting at position 890 of SEQ ID NO: 916364
caagguugacuuugaaagu

SEQ ID NO: 1150887 - RNA, 19 nt, Artificial Sequence
  Description of Artificial Sequence: Synthetic oligonucleotide
  Antisense strand to SEQ ID NO: 1150886
acuuucaaagucaaccuug

SEQ ID NO: 1150888 - RNA, 19 nt, Artificial Sequence
  Description of Artificial Sequence: Synthetic oligonucleotide
  Sense strand starting at position 899 of SEQ ID NO: 916364
cuuugaaagugugucauuu

SEQ ID NO: 1150889 - RNA, 19 nt, Artificial Sequence
  Description of Artificial Sequence: Synthetic oligonucleotide
  Antisense strand to SEQ ID NO: 1150888
aaaugacacacuuucaaag

SEQ ID NO: 1150890 - RNA, 19 nt, Artificial Sequence
  Description of Artificial Sequence: Synthetic oligonucleotide
  Sense strand starting at position 903 of SEQ ID NO: 916364
gaaagugugucauuuaguu

SEQ ID NO: 1150891 - RNA, 19 nt, Artificial Sequence
  Description of Artificial Sequence: Synthetic oligonucleotide
  Antisense strand to SEQ ID NO: 1150890
aacuaaaugacacacuuuc

SEQ ID NO: 1150892 - RNA, 19 nt, Artificial Sequence
  Description of Artificial Sequence: Synthetic oligonucleotide
  Sense strand starting at position 907 of SEQ ID NO: 916364
gugugucauuuaguugguu

SEQ ID NO: 1150893 - RNA, 19 nt, Artificial Sequence
  Description of Artificial Sequence: Synthetic oligonucleotide
  Antisense strand to SEQ ID NO: 1150892
aaccaacuaaaugacacac

SEQ ID NO: 1150894 - RNA, 19 nt, Artificial Sequence
  Description of Artificial Sequence: Synthetic oligonucleotide
  Sense strand starting at position 962 of SEQ ID NO: 916364
ugucuugaucacgaacauu

SEQ ID NO: 1150895 - RNA, 19 nt, Artificial Sequence
  Description of Artificial Sequence: Synthetic oligonucleotide
  Antisense strand to SEQ ID NO: 1150894
aauguucgugaucaagaca

SEQ ID NO: 1150896 - RNA, 19 nt, Artificial Sequence
  Description of Artificial Sequence: Synthetic oligonucleotide
  Sense strand starting at position 1009 of SEQ ID NO: 916364
uuuagacuagguugcuaaa

SEQ ID NO: 1150897 - RNA, 19 nt, Artificial Sequence
  Description of Artificial Sequence: Synthetic oligonucleotide
  Antisense strand to SEQ ID NO: 1150896
uuuagcaaccuagucuaaa

SEQ ID NO: 1150898 - RNA, 19 nt, Artificial Sequence
  Description of Artificial Sequence: Synthetic oligonucleotide
  Sense strand starting at position 1165 of SEQ ID NO: 916364
ugcaguaauuacucaauug

SEQ ID NO: 1150899 - RNA, 19 nt, Artificial Sequence
  Description of Artificial Sequence: Synthetic oligonucleotide
  Antisense strand to SEQ ID NO: 1150898
caauugaguaauuacugca

SEQ ID NO: 1150900 - RNA, 19 nt, Artificial Sequence
  Description of Artificial Sequence: Synthetic oligonucleotide
  Sense strand starting at position 1522 of SEQ ID NO: 916364
gucaguaaauuggcagaau

SEQ ID NO: 1150901 - RNA, 19 nt, Artificial Sequence
  Description of Artificial Sequence: Synthetic oligonucleotide
  Antisense strand to SEQ ID NO: 1150900
auucugccaauuuacugac

SEQ ID NO: 1150902 - RNA, 19 nt, Artificial Sequence
  Description of Artificial Sequence: Synthetic oligonucleotide
  Sense strand starting at position 1603 of SEQ ID NO: 916364
aguuccuuugagggaguuu

SEQ ID NO: 1150903 - RNA, 19 nt, Artificial Sequence
  Description of Artificial Sequence: Synthetic oligonucleotide
  Antisense strand to SEQ ID NO: 1150902
aaacucccucaaaggaacu

SEQ ID NO: 1150904 - RNA, 19 nt, Artificial Sequence
  Description of Artificial Sequence: Synthetic oligonucleotide
  Sense strand starting at position 1684 of SEQ ID NO: 916364
ggaauagauuugcauccaa

SEQ ID NO: 1150905 - RNA, 19 nt, Artificial Sequence
  Description of Artificial Sequence: Synthetic oligonucleotide
  Antisense strand to SEQ ID NO: 1150904
uuggaugcaaaucuauucc

SEQ ID NO: 1150906 - RNA, 19 nt, Artificial Sequence
  Description of Artificial Sequence: Synthetic oligonucleotide
  Sense strand starting at position 1777 of SEQ ID NO: 916364
ccauuuaggccuuggucau

SEQ ID NO: 1150907 - RNA, 19 nt, Artificial Sequence
  Description of Artificial Sequence: Synthetic oligonucleotide
  Antisense strand to SEQ ID NO: 1150906
augaccaaggccuaaaugg

SEQ ID NO: 1150908 - RNA, 19 nt, Artificial Sequence
  Description of Artificial Sequence: Synthetic oligonucleotide
  Sense strand starting at position 2086 of SEQ ID NO: 916364
aggaaauugcugugagacu

SEQ ID NO: 1150909 - RNA, 19 nt, Artificial Sequence
  Description of Artificial Sequence: Synthetic oligonucleotide
  Antisense strand to SEQ ID NO: 1150908
agucucacagcaauuuccu

SEQ ID NO: 1150910 - RNA, 19 nt, Artificial Sequence
  Description of Artificial Sequence: Synthetic oligonucleotide
  Sense strand starting at position 2158 of SEQ ID NO: 916364
cugaaacagccuugaaucu

SEQ ID NO: 1150911 - RNA, 19 nt, Artificial Sequence
  Description of Artificial Sequence: Synthetic oligonucleotide
  Antisense strand to SEQ ID NO: 1150910
agauucaaggcuguuucag

SEQ ID NO: 1150912 - RNA, 19 nt, Artificial Sequence
  Description of Artificial Sequence: Synthetic oligonucleotide
  Sense strand starting at position 2237 of SEQ ID NO: 916364
ggaggacaugugcauccau

SEQ ID NO: 1150913 - RNA, 19 nt, Artificial Sequence
  Description of Artificial Sequence: Synthetic oligonucleotide
  Antisense strand to SEQ ID NO: 1150912
auggaugcacauguccucc

SEQ ID NO: 1150914 - RNA, 19 nt, Artificial Sequence
  Description of Artificial Sequence: Synthetic oligonucleotide
  Sense strand starting at position 2332 of SEQ ID NO: 916364
ucagcuaugcuagagagca

SEQ ID NO: 1150915 - RNA, 19 nt, Artificial Sequence
  Description of Artificial Sequence: Synthetic oligonucleotide
  Antisense strand to SEQ ID NO: 1150914
ugcucucuagcauagcuga

SEQ ID NO: 1150916 - RNA, 19 nt, Artificial Sequence
  Description of Artificial Sequence: Synthetic oligonucleotide
  Sense strand starting at position 2571 of SEQ ID NO: 916364
gaaaccuugugacuuagca

SEQ ID NO: 1150917 - RNA, 19 nt, Artificial Sequence
  Description of Artificial Sequence: Synthetic oligonucleotide
  Antisense strand to SEQ ID NO: 1150916
ugcuaagucacaagguuuc

SEQ ID NO: 1150918 - RNA, 19 nt, Artificial Sequence
  Description of Artificial Sequence: Synthetic oligonucleotide
  Sense strand starting at position 2575 of SEQ ID NO: 916364
ccuugugacuuagcacuaa

SEQ ID NO: 1150919 - RNA, 19 nt, Artificial Sequence
  Description of Artificial Sequence: Synthetic oligonucleotide
  Antisense strand to SEQ ID NO: 1150918
uuagugcuaagucacaagg

SEQ ID NO: 1150920 - RNA, 19 nt, Artificial Sequence
  Description of Artificial Sequence: Synthetic oligonucleotide
  Sense strand starting at position 2737 of SEQ ID NO: 916364
agcccuauacaguaugauu

SEQ ID NO: 1150921 - RNA, 19 nt, Artificial Sequence
  Description of Artificial Sequence: Synthetic oligonucleotide
  Antisense strand to SEQ ID NO: 1150920
aaucauacuguauagggcu

SEQ ID NO: 1150922 - RNA, 19 nt, Artificial Sequence
  Description of Artificial Sequence: Synthetic oligonucleotide
  Sense strand starting at position 2789 of SEQ ID NO: 916364
aggauacaagccugcuaga

SEQ ID NO: 1150923 - RNA, 19 nt, Artificial Sequence
  Description of Artificial Sequence: Synthetic oligonucleotide
  Antisense strand to SEQ ID NO: 1150922
ucuagcaggcuuguauccu

SEQ ID NO: 1150924 - RNA, 19 nt, Artificial Sequence
  Description of Artificial Sequence: Synthetic oligonucleotide
  Sense strand starting at position 2951 of SEQ ID NO: 916364
cgaaaccagucuguaaaga

SEQ ID NO: 1150925 - RNA, 19 nt, Artificial Sequence
  Description of Artificial Sequence: Synthetic oligonucleotide
  Antisense strand to SEQ ID NO: 1150924
ucuuuacagacugguuucg

SEQ ID NO: 1150926 - RNA, 19 nt, Artificial Sequence
  Description of Artificial Sequence: Synthetic oligonucleotide
  Sense strand starting at position 2972 of SEQ ID NO: 916364
gaaagagagucugcucuuu

SEQ ID NO: 1150927 - RNA, 19 nt, Artificial Sequence
  Description of Artificial Sequence: Synthetic oligonucleotide
  Antisense strand to SEQ ID NO: 1150926
aaagagcagacucucuuuc

SEQ ID NO: 1150928 - RNA, 19 nt, Artificial Sequence
  Description of Artificial Sequence: Synthetic oligonucleotide
  Sense strand starting at position 3419 of SEQ ID NO: 916364
gcaugagaccuuugagaca

SEQ ID NO: 1150929 - RNA, 19 nt, Artificial Sequence
  Description of Artificial Sequence: Synthetic oligonucleotide
  Antisense strand to SEQ ID NO: 1150928
ugucucaaaggucucaugc

SEQ ID NO: 1150930 - RNA, 19 nt, Artificial Sequence
  Description of Artificial Sequence: Synthetic oligonucleotide
  Sense strand starting at position 3774 of SEQ ID NO: 916364
agucaacuguccuugagaa

SEQ ID NO: 1150931 - RNA, 19 nt, Artificial Sequence
  Description of Artificial Sequence: Synthetic oligonucleotide
  Antisense strand to SEQ ID NO: 1150930
uucucaaggacaguugacu

SEQ ID NO: 1150932 - RNA, 19 nt, Artificial Sequence
  Description of Artificial Sequence: Synthetic oligonucleotide
  Sense strand starting at position 3775 of SEQ ID NO: 916364
gucaacuguccuugagaau

SEQ ID NO: 1150933 - RNA, 19 nt, Artificial Sequence
  Description of Artificial Sequence: Synthetic oligonucleotide
  Antisense strand to SEQ ID NO: 1150932
auucucaaggacaguugac

SEQ ID NO: 1150934 - RNA, 19 nt, Artificial Sequence
  Description of Artificial Sequence: Synthetic oligonucleotide
  Sense strand starting at position 3776 of SEQ ID NO: 916364
ucaacuguccuugagaauu

SEQ ID NO: 1150935 - RNA, 19 nt, Artificial Sequence
  Description of Artificial Sequence: Synthetic oligonucleotide
  Antisense strand to SEQ ID NO: 1150934
aauucucaaggacaguuga

SEQ ID NO: 1150936 - RNA, 19 nt, Artificial Sequence
  Description of Artificial Sequence: Synthetic oligonucleotide
  Sense strand starting at position 3874 of SEQ ID NO: 916364
ccagaauagugaguauaau

SEQ ID NO: 1150937 - RNA, 19 nt, Artificial Sequence
  Description of Artificial Sequence: Synthetic oligonucleotide
  Antisense strand to SEQ ID NO: 1150936
auuauacucacuauucugg

SEQ ID NO: 1150938 - RNA, 19 nt, Artificial Sequence
  Description of Artificial Sequence: Synthetic oligonucleotide
  Sense strand starting at position 3880 of SEQ ID NO: 916364
uagugaguauaauccaaag

SEQ ID NO: 1150939 - RNA, 19 nt, Artificial Sequence
  Description of Artificial Sequence: Synthetic oligonucleotide
  Antisense strand to SEQ ID NO: 1150938
cuuuggauuauacucacua

SEQ ID NO: 1150940 - RNA, 19 nt, Artificial Sequence
  Description of Artificial Sequence: Synthetic oligonucleotide
  Sense strand starting at position 60 of SEQ ID NO: 916365
cuuacaggcuuauaaaugu

SEQ ID NO: 1150941 - RNA, 19 nt, Artificial Sequence
  Description of Artificial Sequence: Synthetic oligonucleotide
  Antisense strand to SEQ ID NO: 1150940
acauuuauaagccuguaag

SEQ ID NO: 1150942 - RNA, 19 nt, Artificial Sequence
  Description of Artificial Sequence: Synthetic oligonucleotide
  Sense strand starting at position 186 of SEQ ID NO: 916365
cuacacauguguugaacau

SEQ ID NO: 1150943 - RNA, 19 nt, Artificial Sequence
  Description of Artificial Sequence: Synthetic oligonucleotide
  Antisense strand to SEQ ID NO: 1150942
auguucaacacauguguag

SEQ ID NO: 1150944 - RNA, 19 nt, Artificial Sequence
  Description of Artificial Sequence: Synthetic oligonucleotide
  Sense strand starting at position 193 of SEQ ID NO: 916365
uguguugaacaucgcugau

SEQ ID NO: 1150945 - RNA, 19 nt, Artificial Sequence
  Description of Artificial Sequence: Synthetic oligonucleotide
  Antisense strand to SEQ ID NO: 1150944
aucagcgauguucaacaca

SEQ ID NO: 1150946 - RNA, 19 nt, Artificial Sequence
  Description of Artificial Sequence: Synthetic oligonucleotide
  Sense strand starting at position 196 of SEQ ID NO: 916365
guugaacaucgcugauaca

SEQ ID NO: 1150947 - RNA, 19 nt, Artificial Sequence
  Description of Artificial Sequence: Synthetic oligonucleotide
  Antisense strand to SEQ ID NO: 1150946
uguaucagcgauguucaac

SEQ ID NO: 1150948 - RNA, 19 nt, Artificial Sequence
  Description of Artificial Sequence: Synthetic oligonucleotide
  Sense strand starting at position 267 of SEQ ID NO: 916365
guaggaaaccucuguuaau

SEQ ID NO: 1150949 - RNA, 19 nt, Artificial Sequence
  Description of Artificial Sequence: Synthetic oligonucleotide
  Antisense strand to SEQ ID NO: 1150948
auuaacagagguuuccuac

SEQ ID NO: 1150950 - RNA, 19 nt, Artificial Sequence
  Description of Artificial Sequence: Synthetic oligonucleotide
  Sense strand starting at position 274 of SEQ ID NO: 916365
accucuguuaauugggaga

SEQ ID NO: 1150951 - RNA, 19 nt, Artificial Sequence
  Description of Artificial Sequence: Synthetic oligonucleotide
  Antisense strand to SEQ ID NO: 1150950
ucucccaauuaacagaggu

SEQ ID NO: 1150952 - RNA, 19 nt, Artificial Sequence
  Description of Artificial Sequence: Synthetic oligonucleotide
  Sense strand starting at position 276 of SEQ ID NO: 916365
cucuguuaauugggagaaa

SEQ ID NO: 1150953 - RNA, 19 nt, Artificial Sequence
  Description of Artificial Sequence: Synthetic oligonucleotide
  Antisense strand to SEQ ID NO: 1150952
uuucucccaauuaacagag

SEQ ID NO: 1150954 - RNA, 19 nt, Artificial Sequence
  Description of Artificial Sequence: Synthetic oligonucleotide
  Sense strand starting at position 491 of SEQ ID NO: 916365
accuuucugcguucuugua

SEQ ID NO: 1150955 - RNA, 19 nt, Artificial Sequence
  Description of Artificial Sequence: Synthetic oligonucleotide
  Antisense strand to SEQ ID NO: 1150954
uacaagaacgcagaaaggu

SEQ ID NO: 1150956 - RNA, 19 nt, Artificial Sequence
  Description of Artificial Sequence: Synthetic oligonucleotide
  Sense strand starting at position 493 of SEQ ID NO: 916365
cuuucugcguucuuguauu

SEQ ID NO: 1150957 - RNA, 19 nt, Artificial Sequence
  Description of Artificial Sequence: Synthetic oligonucleotide
  Antisense strand to SEQ ID NO: 1150956
aauacaagaacgcagaaag

SEQ ID NO: 1150958 - RNA, 19 nt, Artificial Sequence
  Description of Artificial Sequence: Synthetic oligonucleotide
  Sense strand starting at position 583 of SEQ ID NO: 916365
gauaaaccauaacgaguuu

SEQ ID NO: 1150959 - RNA, 19 nt, Artificial Sequence
  Description of Artificial Sequence: Synthetic oligonucleotide
  Antisense strand to SEQ ID NO: 1150958
aaacucguuaugguuuauc

SEQ ID NO: 1150960 - RNA, 19 nt, Artificial Sequence
  Description of Artificial Sequence: Synthetic oligonucleotide
  Sense strand starting at position 592 of SEQ ID NO: 916365
uaacgaguuuaguuucuua

SEQ ID NO: 1150961 - RNA, 19 nt, Artificial Sequence
  Description of Artificial Sequence: Synthetic oligonucleotide
  Antisense strand to SEQ ID NO: 1150960
uaagaaacuaaacucguua

SEQ ID NO: 1150962 - RNA, 19 nt, Artificial Sequence
  Description of Artificial Sequence: Synthetic oligonucleotide
  Sense strand starting at position 595 of SEQ ID NO: 916365
cgaguuuaguuucuuacuu

SEQ ID NO: 1150963 - RNA, 19 nt, Artificial Sequence
  Description of Artificial Sequence: Synthetic oligonucleotide
  Antisense strand to SEQ ID NO: 1150962
aaguaagaaacuaaacucg

SEQ ID NO: 1150964 - RNA, 19 nt, Artificial Sequence
  Description of Artificial Sequence: Synthetic oligonucleotide
  Sense strand starting at position 1038 of SEQ ID NO: 916365
gcuccaggacuguaacaga

SEQ ID NO: 1150965 - RNA, 19 nt, Artificial Sequence
  Description of Artificial Sequence: Synthetic oligonucleotide
  Antisense strand to SEQ ID NO: 1150964
ucuguuacaguccuggagc

SEQ ID NO: 1150966 - RNA, 19 nt, Artificial Sequence
  Description of Artificial Sequence: Synthetic oligonucleotide
  Sense strand starting at position 1614 of SEQ ID NO: 916365
augaguggaccgcagauua

SEQ ID NO: 1150967 - RNA, 19 nt, Artificial Sequence
  Description of Artificial Sequence: Synthetic oligonucleotide
  Antisense strand to SEQ ID NO: 1150966
uaaucugcgguccacucau

SEQ ID NO: 1150968 - RNA, 19 nt, Artificial Sequence
  Description of Artificial Sequence: Synthetic oligonucleotide
  Sense strand starting at position 1635 of SEQ ID NO: 916365
guugaacaaugcccgaaua

SEQ ID NO: 1150969 - RNA, 19 nt, Artificial Sequence
  Description of Artificial Sequence: Synthetic oligonucleotide
  Antisense strand to SEQ ID NO: 1150968
uauucgggcauuguucaac

SEQ ID NO: 1150970 - RNA, 19 nt, Artificial Sequence
  Description of Artificial Sequence: Synthetic oligonucleotide
  Sense strand starting at position 1636 of SEQ ID NO: 916365
uugaacaaugcccgaauaa

SEQ ID NO: 1150971 - RNA, 19 nt, Artificial Sequence
  Description of Artificial Sequence: Synthetic oligonucleotide
  Antisense strand to SEQ ID NO: 1150970
uuauucgggcauuguucaa

SEQ ID NO: 1150972 - RNA, 19 nt, Artificial Sequence
  Description of Artificial Sequence: Synthetic oligonucleotide
  Sense strand starting at position 2406 of SEQ ID NO: 916365
agucauugaugguuaagga

SEQ ID NO: 1150973 - RNA, 19 nt, Artificial Sequence
  Description of Artificial Sequence: Synthetic oligonucleotide
  Antisense strand to SEQ ID NO: 1150972
uccuuaaccaucaaugacu

SEQ ID NO: 1150974 - RNA, 19 nt, Artificial Sequence
  Description of Artificial Sequence: Synthetic oligonucleotide
  Sense strand starting at position 2407 of SEQ ID NO: 916365
gucauugaugguuaaggau

SEQ ID NO: 1150975 - RNA, 19 nt, Artificial Sequence
  Description of Artificial Sequence: Synthetic oligonucleotide
  Antisense strand to SEQ ID NO: 1150974
auccuuaaccaucaaugac

SEQ ID NO: 1150976 - RNA, 19 nt, Artificial Sequence
  Description of Artificial Sequence: Synthetic oligonucleotide
  Sense strand starting at position 2419 of SEQ ID NO: 916365
uaaggauugugugccauaa

SEQ ID NO: 1150977 - RNA, 19 nt, Artificial Sequence
  Description of Artificial Sequence: Synthetic oligonucleotide
  Antisense strand to SEQ ID NO: 1150976
uuauggcacacaauccuua

SEQ ID NO: 1150978 - RNA, 19 nt, Artificial Sequence
  Description of Artificial Sequence: Synthetic oligonucleotide
  Sense strand starting at position 2421 of SEQ ID NO: 916365
aggauugugugccauaaga

SEQ ID NO: 1150979 - RNA, 19 nt, Artificial Sequence
  Description of Artificial Sequence: Synthetic oligonucleotide
  Antisense strand to SEQ ID NO: 1150978
ucuuauggcacacaauccu

SEQ ID NO: 1150980 - RNA, 19 nt, Artificial Sequence
  Description of Artificial Sequence: Synthetic oligonucleotide
  Sense strand starting at position 2444 of SEQ ID NO: 916365
auaguucugucagcauaua

SEQ ID NO: 1150981 - RNA, 19 nt, Artificial Sequence
  Description of Artificial Sequence: Synthetic oligonucleotide
  Antisense strand to SEQ ID NO: 1150980
uauaugcugacagaacuau

SEQ ID NO: 1150982 - RNA, 19 nt, Artificial Sequence
  Description of Artificial Sequence: Synthetic oligonucleotide
  Sense strand starting at position 2462 of SEQ ID NO: 916365
agaguaucuucuuauacua

SEQ ID NO: 1150983 - RNA, 19 nt, Artificial Sequence
  Description of Artificial Sequence: Synthetic oligonucleotide
  Antisense strand to SEQ ID NO: 1150982
uaguauaagaagauacucu

SEQ ID NO: 1150984 - RNA, 19 nt, Artificial Sequence
  Description of Artificial Sequence: Synthetic oligonucleotide
  Sense strand starting at position 2483 of SEQ ID NO: 916365
auacauuguuagugacuua

SEQ ID NO: 1150985 - RNA, 19 nt, Artificial Sequence
  Description of Artificial Sequence: Synthetic oligonucleotide
  Antisense strand to SEQ ID NO: 1150984
uaagucacuaacaauguau

SEQ ID NO: 1150986 - RNA, 19 nt, Artificial Sequence
  Description of Artificial Sequence: Synthetic oligonucleotide
  Sense strand starting at position 2782 of SEQ ID NO: 916365
guauaagucagugaggguu

SEQ ID NO: 1150987 - RNA, 19 nt, Artificial Sequence
  Description of Artificial Sequence: Synthetic oligonucleotide
  Antisense strand to SEQ ID NO: 1150986
aacccucacugacuuauac

SEQ ID NO: 1150988 - RNA, 19 nt, Artificial Sequence
  Description of Artificial Sequence: Synthetic oligonucleotide
  Sense strand starting at position 2794 of SEQ ID NO: 916365
gaggguugcuuugguugua

SEQ ID NO: 1150989 - RNA, 19 nt, Artificial Sequence
  Description of Artificial Sequence: Synthetic oligonucleotide
  Antisense strand to SEQ ID NO: 1150988
uacaaccaaagcaacccuc

SEQ ID NO: 1150990 - RNA, 19 nt, Artificial Sequence
  Description of Artificial Sequence: Synthetic oligonucleotide
  Sense strand starting at position 2797 of SEQ ID NO: 916365
gguugcuuugguuguauaa

SEQ ID NO: 1150991 - RNA, 19 nt, Artificial Sequence
  Description of Artificial Sequence: Synthetic oligonucleotide
  Antisense strand to SEQ ID NO: 1150990
uuauacaaccaaagcaacc

SEQ ID NO: 1150992 - RNA, 19 nt, Artificial Sequence
  Description of Artificial Sequence: Synthetic oligonucleotide
  Sense strand starting at position 2799 of SEQ ID NO: 916365
uugcuuugguuguauaagu

SEQ ID NO: 1150993 - RNA, 19 nt, Artificial Sequence
  Description of Artificial Sequence: Synthetic oligonucleotide
  Antisense strand to SEQ ID NO: 1150992
acuuauacaaccaaagcaa

SEQ ID NO: 1150994 - RNA, 19 nt, Artificial Sequence
  Description of Artificial Sequence: Synthetic oligonucleotide
  Sense strand starting at position 3022 of SEQ ID NO: 916365
ggcacauguuaccacugaa

SEQ ID NO: 1150995 - RNA, 19 nt, Artificial Sequence
  Description of Artificial Sequence: Synthetic oligonucleotide
  Antisense strand to SEQ ID NO: 1150994
uucagugguaacaugugcc

SEQ ID NO: 1150996 - RNA, 19 nt, Artificial Sequence
  Description of Artificial Sequence: Synthetic oligonucleotide
  Sense strand starting at position 13 of SEQ ID NO: 916366
uccuuacaggcuuauaagu

SEQ ID NO: 1150997 - RNA, 19 nt, Artificial Sequence
  Description of Artificial Sequence: Synthetic oligonucleotide
  Antisense strand to SEQ ID NO: 1150996
acuuauaagccuguaagga

SEQ ID NO: 1150998 - RNA, 19 nt, Artificial Sequence
  Description of Artificial Sequence: Synthetic oligonucleotide
  Sense strand starting at position 15 of SEQ ID NO: 916366
cuuacaggcuuauaaguau

SEQ ID NO: 1150999 - RNA, 19 nt, Artificial Sequence
  Description of Artificial Sequence: Synthetic oligonucleotide
  Antisense strand to SEQ ID NO: 1150998
auacuuauaagccuguaag

SEQ ID NO: 1151000 - RNA, 19 nt, Artificial Sequence
  Description of Artificial Sequence: Synthetic oligonucleotide
  Sense strand starting at position 18 of SEQ ID NO: 916366
acaggcuuauaaguauaua

SEQ ID NO: 1151001 - RNA, 19 nt, Artificial Sequence
  Description of Artificial Sequence: Synthetic oligonucleotide
  Antisense strand to SEQ ID NO: 1151000
uauauacuuauaagccugu

SEQ ID NO: 1151002 - RNA, 19 nt, Artificial Sequence
  Description of Artificial Sequence: Synthetic oligonucleotide
  Sense strand starting at position 149 of SEQ ID NO: 916366
ugucuugaaccucacugau

SEQ ID NO: 1151003 - RNA, 19 nt, Artificial Sequence
  Description of Artificial Sequence: Synthetic oligonucleotide
  Antisense strand to SEQ ID NO: 1151002
aucagugagguucaagaca

SEQ ID NO: 1151004 - RNA, 19 nt, Artificial Sequence
  Description of Artificial Sequence: Synthetic oligonucleotide
  Sense strand starting at position 223 of SEQ ID NO: 916366
guaggagacuucuguuaau

SEQ ID NO: 1151005 - RNA, 19 nt, Artificial Sequence
  Description of Artificial Sequence: Synthetic oligonucleotide
  Antisense strand to SEQ ID NO: 1151004
auuaacagaagucuccuac

SEQ ID NO: 1151006 - RNA, 19 nt, Artificial Sequence
  Description of Artificial Sequence: Synthetic oligonucleotide
  Sense strand starting at position 226 of SEQ ID NO: 916366
ggagacuucuguuaauugg

SEQ ID NO: 1151007 - RNA, 19 nt, Artificial Sequence
  Description of Artificial Sequence: Synthetic oligonucleotide
  Antisense strand to SEQ ID NO: 1151006
ccaauuaacagaagucucc

SEQ ID NO: 1151008 - RNA, 19 nt, Artificial Sequence
  Description of Artificial Sequence: Synthetic oligonucleotide
  Sense strand starting at position 230 of SEQ ID NO: 916366
acuucuguuaauugggaga

SEQ ID NO: 1151009 - RNA, 19 nt, Artificial Sequence
  Description of Artificial Sequence: Synthetic oligonucleotide
  Antisense strand to SEQ ID NO: 1151008
ucucccaauuaacagaagu

SEQ ID NO: 1151010 - RNA, 19 nt, Artificial Sequence
  Description of Artificial Sequence: Synthetic oligonucleotide
  Sense strand starting at position 232 of SEQ ID NO: 916366
uucuguuaauugggagaaa

SEQ ID NO: 1151011 - RNA, 19 nt, Artificial Sequence
  Description of Artificial Sequence: Synthetic oligonucleotide
  Antisense strand to SEQ ID NO: 1151010
uuucucccaauuaacagaa

SEQ ID NO: 1151012 - RNA, 19 nt, Artificial Sequence
  Description of Artificial Sequence: Synthetic oligonucleotide
  Sense strand starting at position 276 of SEQ ID NO: 916366
auuucuacuuacuggagaa

SEQ ID NO: 1151013 - RNA, 19 nt, Artificial Sequence
  Description of Artificial Sequence: Synthetic oligonucleotide
  Antisense strand to SEQ ID NO: 1151012
uucuccaguaaguagaaau

SEQ ID NO: 1151014 - RNA, 19 nt, Artificial Sequence
  Description of Artificial Sequence: Synthetic oligonucleotide
  Sense strand starting at position 414 of SEQ ID NO: 916366
guacuaauaucagagcauu

SEQ ID NO: 1151015 - RNA, 19 nt, Artificial Sequence
  Description of Artificial Sequence: Synthetic oligonucleotide
  Antisense strand to SEQ ID NO: 1151014
aaugcucugauauuaguac

SEQ ID NO: 1151016 - RNA, 19 nt, Artificial Sequence
  Description of Artificial Sequence: Synthetic oligonucleotide
  Sense strand starting at position 1479 of SEQ ID NO: 916366
gauaaacucuggccgcuaa

SEQ ID NO: 1151017 - RNA, 19 nt, Artificial Sequence
  Description of Artificial Sequence: Synthetic oligonucleotide
  Antisense strand to SEQ ID NO: 1151016
uuagcggccagaguuuauc

SEQ ID NO: 1151018 - RNA, 19 nt, Artificial Sequence
  Description of Artificial Sequence: Synthetic oligonucleotide
  Sense strand starting at position 1553 of SEQ ID NO: 916366
aauguaauguuccaugagu

SEQ ID NO: 1151019 - RNA, 19 nt, Artificial Sequence
  Description of Artificial Sequence: Synthetic oligonucleotide
  Antisense strand to SEQ ID NO: 1151018
acucauggaacauuacauu

SEQ ID NO: 1151020 - RNA, 19 nt, Artificial Sequence
  Description of Artificial Sequence: Synthetic oligonucleotide
  Sense strand starting at position 1555 of SEQ ID NO: 916366
uguaauguuccaugagugg

SEQ ID NO: 1151021 - RNA, 19 nt, Artificial Sequence
  Description of Artificial Sequence: Synthetic oligonucleotide
  Antisense strand to SEQ ID NO: 1151020
ccacucauggaacauuaca

SEQ ID NO: 1151022 - RNA, 19 nt, Artificial Sequence
  Description of Artificial Sequence: Synthetic oligonucleotide
  Sense strand starting at position 1558 of SEQ ID NO: 916366
aauguuccaugaguggauu

SEQ ID NO: 1151023 - RNA, 19 nt, Artificial Sequence
  Description of Artificial Sequence: Synthetic oligonucleotide
  Antisense strand to SEQ ID NO: 1151022
aauccacucauggaacauu

SEQ ID NO: 1151024 - RNA, 19 nt, Artificial Sequence
  Description of Artificial Sequence: Synthetic oligonucleotide
  Sense strand starting at position 1564 of SEQ ID NO: 916366
ccaugaguggauugcagau

SEQ ID NO: 1151025 - RNA, 19 nt, Artificial Sequence
  Description of Artificial Sequence: Synthetic oligonucleotide
  Antisense strand to SEQ ID NO: 1151024
aucugcaauccacucaugg

SEQ ID NO: 1151026 - RNA, 19 nt, Artificial Sequence
  Description of Artificial Sequence: Synthetic oligonucleotide
  Sense strand starting at position 1566 of SEQ ID NO: 916366
augaguggauugcagauua

SEQ ID NO: 1151027 - RNA, 19 nt, Artificial Sequence
  Description of Artificial Sequence: Synthetic oligonucleotide
  Antisense strand to SEQ ID NO: 1151026
uaaucugcaauccacucau

SEQ ID NO: 1151028 - RNA, 19 nt, Artificial Sequence
  Description of Artificial Sequence: Synthetic oligonucleotide
  Sense strand starting at position 1580 of SEQ ID NO: 916366
gauuacaguugauuacagu

SEQ ID NO: 1151029 - RNA, 19 nt, Artificial Sequence
  Description of Artificial Sequence: Synthetic oligonucleotide
  Antisense strand to SEQ ID NO: 1151028
acuguaaucaacuguaauc

SEQ ID NO: 1151030 - RNA, 19 nt, Artificial Sequence
  Description of Artificial Sequence: Synthetic oligonucleotide
  Sense strand starting at position 1597 of SEQ ID NO: 916366
guugaacaaugccugaaua

SEQ ID NO: 1151031 - RNA, 19 nt, Artificial Sequence
  Description of Artificial Sequence: Synthetic oligonucleotide
  Antisense strand to SEQ ID NO: 1151030
uauucaggcauuguucaac

SEQ ID NO: 1151032 - RNA, 19 nt, Artificial Sequence
  Description of Artificial Sequence: Synthetic oligonucleotide
  Sense strand starting at position 1664 of SEQ ID NO: 916366
cucugauucucacaagugu

SEQ ID NO: 1151033 - RNA, 19 nt, Artificial Sequence
  Description of Artificial Sequence: Synthetic oligonucleotide
  Antisense strand to SEQ ID NO: 1151032
acacuugugagaaucagag

SEQ ID NO: 1151034 - RNA, 19 nt, Artificial Sequence
  Description of Artificial Sequence: Synthetic oligonucleotide
  Sense strand starting at position 2218 of SEQ ID NO: 916366
acauuaaacuugugagaac

SEQ ID NO: 1151035 - RNA, 19 nt, Artificial Sequence
  Description of Artificial Sequence: Synthetic oligonucleotide
  Antisense strand to SEQ ID NO: 1151034
guucucacaaguuuaaugu

SEQ ID NO: 1151036 - RNA, 19 nt, Artificial Sequence
  Description of Artificial Sequence: Synthetic oligonucleotide
  Sense strand starting at position 2227 of SEQ ID NO: 916366
uugugagaacuaggaaguu

SEQ ID NO: 1151037 - RNA, 19 nt, Artificial Sequence
  Description of Artificial Sequence: Synthetic oligonucleotide
  Antisense strand to SEQ ID NO: 1151036
aacuuccuaguucucacaa

SEQ ID NO: 1151038 - RNA, 19 nt, Artificial Sequence
  Description of Artificial Sequence: Synthetic oligonucleotide
  Sense strand starting at position 2368 of SEQ ID NO: 916366
agagucauugaugguuaau

SEQ ID NO: 1151039 - RNA, 19 nt, Artificial Sequence
  Description of Artificial Sequence: Synthetic oligonucleotide
  Antisense strand to SEQ ID NO: 1151038
auuaaccaucaaugacucu

SEQ ID NO: 1151040 - RNA, 19 nt, Artificial Sequence
  Description of Artificial Sequence: Synthetic oligonucleotide
  Sense strand starting at position 2370 of SEQ ID NO: 916366
agucauugaugguuaauga

SEQ ID NO: 1151041 - RNA, 19 nt, Artificial Sequence
  Description of Artificial Sequence: Synthetic oligonucleotide
  Antisense strand to SEQ ID NO: 1151040
ucauuaaccaucaaugacu

SEQ ID NO: 1151042 - RNA, 19 nt, Artificial Sequence
  Description of Artificial Sequence: Synthetic oligonucleotide
  Sense strand starting at position 2371 of SEQ ID NO: 916366
gucauugaugguuaaugau

SEQ ID NO: 1151043 - RNA, 19 nt, Artificial Sequence
  Description of Artificial Sequence: Synthetic oligonucleotide
  Antisense strand to SEQ ID NO: 1151042
aucauuaaccaucaaugac

SEQ ID NO: 1151044 - RNA, 19 nt, Artificial Sequence
  Description of Artificial Sequence: Synthetic oligonucleotide
  Sense strand starting at position 2380 of SEQ ID NO: 916366
gguuaaugauugugugcca

SEQ ID NO: 1151045 - RNA, 19 nt, Artificial Sequence
  Description of Artificial Sequence: Synthetic oligonucleotide
  Antisense strand to SEQ ID NO: 1151044
uggcacacaaucauuaacc

SEQ ID NO: 1151046 - RNA, 19 nt, Artificial Sequence
  Description of Artificial Sequence: Synthetic oligonucleotide
  Sense strand starting at position 2381 of SEQ ID NO: 916366
guuaaugauugugugccau

SEQ ID NO: 1151047 - RNA, 19 nt, Artificial Sequence
  Description of Artificial Sequence: Synthetic oligonucleotide
  Antisense strand to SEQ ID NO: 1151046
auggcacacaaucauuaac

SEQ ID NO: 1151048 - RNA, 19 nt, Artificial Sequence
  Description of Artificial Sequence: Synthetic oligonucleotide
  Sense strand starting at position 2383 of SEQ ID NO: 916366
uaaugauugugugccauaa

SEQ ID NO: 1151049 - RNA, 19 nt, Artificial Sequence
  Description of Artificial Sequence: Synthetic oligonucleotide
  Antisense strand to SEQ ID NO: 1151048
uuauggcacacaaucauua

SEQ ID NO: 1151050 - RNA, 19 nt, Artificial Sequence
  Description of Artificial Sequence: Synthetic oligonucleotide
  Sense strand starting at position 2385 of SEQ ID NO: 916366
augauugugugccauaaga

SEQ ID NO: 1151051 - RNA, 19 nt, Artificial Sequence
  Description of Artificial Sequence: Synthetic oligonucleotide
  Antisense strand to SEQ ID NO: 1151050
ucuuauggcacacaaucau

SEQ ID NO: 1151052 - RNA, 19 nt, Artificial Sequence
  Description of Artificial Sequence: Synthetic oligonucleotide
  Sense strand starting at position 2408 of SEQ ID NO: 916366
auaguucugucagcauaca

SEQ ID NO: 1151053 - RNA, 19 nt, Artificial Sequence
  Description of Artificial Sequence: Synthetic oligonucleotide
  Antisense strand to SEQ ID NO: 1151052
uguaugcugacagaacuau

SEQ ID NO: 1151054 - RNA, 19 nt, Artificial Sequence
  Description of Artificial Sequence: Synthetic oligonucleotide
  Sense strand starting at position 2446 of SEQ ID NO: 916366
cauacauuguuagugaguu

SEQ ID NO: 1151055 - RNA, 19 nt, Artificial Sequence
  Description of Artificial Sequence: Synthetic oligonucleotide
  Antisense strand to SEQ ID NO: 1151054
aacucacuaacaauguaug

SEQ ID NO: 1151056 - RNA, 19 nt, Artificial Sequence
  Description of Artificial Sequence: Synthetic oligonucleotide
  Sense strand starting at position 2447 of SEQ ID NO: 916366
auacauuguuagugaguua

SEQ ID NO: 1151057 - RNA, 19 nt, Artificial Sequence
  Description of Artificial Sequence: Synthetic oligonucleotide
  Antisense strand to SEQ ID NO: 1151056
uaacucacuaacaauguau

SEQ ID NO: 1151058 - RNA, 19 nt, Artificial Sequence
  Description of Artificial Sequence: Synthetic oligonucleotide
  Sense strand starting at position 2450 of SEQ ID NO: 916366
cauuguuagugaguuacau

SEQ ID NO: 1151059 - RNA, 19 nt, Artificial Sequence
  Description of Artificial Sequence: Synthetic oligonucleotide
  Antisense strand to SEQ ID NO: 1151058
auguaacucacuaacaaug

SEQ ID NO: 1151060 - RNA, 19 nt, Artificial Sequence
  Description of Artificial Sequence: Synthetic oligonucleotide
  Sense strand starting at position 2452 of SEQ ID NO: 916366
uuguuagugaguuacauuc

SEQ ID NO: 1151061 - RNA, 19 nt, Artificial Sequence
  Description of Artificial Sequence: Synthetic oligonucleotide
  Antisense strand to SEQ ID NO: 1151060
gaauguaacucacuaacaa

SEQ ID NO: 1151062 - RNA, 19 nt, Artificial Sequence
  Description of Artificial Sequence: Synthetic oligonucleotide
  Sense strand starting at position 2751 of SEQ ID NO: 916366
guauaagucagugaggguc

SEQ ID NO: 1151063 - RNA, 19 nt, Artificial Sequence
  Description of Artificial Sequence: Synthetic oligonucleotide
  Antisense strand to SEQ ID NO: 1151062
gacccucacugacuuauac

SEQ ID NO: 1151064 - RNA, 19 nt, Artificial Sequence
  Description of Artificial Sequence: Synthetic oligonucleotide
  Sense strand starting at position 2766 of SEQ ID NO: 916366
ggucgcuuugguuguauaa

SEQ ID NO: 1151065 - RNA, 19 nt, Artificial Sequence
  Description of Artificial Sequence: Synthetic oligonucleotide
  Antisense strand to SEQ ID NO: 1151064
uuauacaaccaaagcgacc

SEQ ID NO: 1151066 - RNA, 19 nt, Artificial Sequence
  Description of Artificial Sequence: Synthetic oligonucleotide
  Sense strand starting at position 2768 of SEQ ID NO: 916366
ucgcuuugguuguauaagu

SEQ ID NO: 1151067 - RNA, 19 nt, Artificial Sequence
  Description of Artificial Sequence: Synthetic oligonucleotide
  Antisense strand to SEQ ID NO: 1151066
acuuauacaaccaaagcga

SEQ ID NO: 1151068 - RNA, 19 nt, Artificial Sequence
  Description of Artificial Sequence: Synthetic oligonucleotide
  Sense strand starting at position 2991 of SEQ ID NO: 916366
ggcacauauuagcacugaa

SEQ ID NO: 1151069 - RNA, 19 nt, Artificial Sequence
  Description of Artificial Sequence: Synthetic oligonucleotide
  Antisense strand to SEQ ID NO: 1151068
uucagugcuaauaugugcc

SEQ ID NO: 1151070 - RNA, 19 nt, Artificial Sequence
  Description of Artificial Sequence: Synthetic oligonucleotide
  Sense strand starting at position 136 of SEQ ID NO: 916367
ccucauaaguuguuaaaua

SEQ ID NO: 1151071 - RNA, 19 nt, Artificial Sequence
  Description of Artificial Sequence: Synthetic oligonucleotide
  Antisense strand to SEQ ID NO: 1151070
uauuuaacaacuuaugagg

SEQ ID NO: 1151072 - RNA, 19 nt, Artificial Sequence
  Description of Artificial Sequence: Synthetic oligonucleotide
  Sense strand starting at position 218 of SEQ ID NO: 916367
uuaauuguguucccauaca

SEQ ID NO: 1151073 - RNA, 19 nt, Artificial Sequence
  Description of Artificial Sequence: Synthetic oligonucleotide
  Antisense strand to SEQ ID NO: 1151072
uguaugggaacacaauuaa

SEQ ID NO: 1151074 - RNA, 19 nt, Artificial Sequence
  Description of Artificial Sequence: Synthetic oligonucleotide
  Sense strand starting at position 333 of SEQ ID NO: 916367
cuuauaguaguaggaaauu

SEQ ID NO: 1151075 - RNA, 19 nt, Artificial Sequence
  Description of Artificial Sequence: Synthetic oligonucleotide
  Antisense strand to SEQ ID NO: 1151074
aauuuccuacuacuauaag

SEQ ID NO: 1151076 - RNA, 19 nt, Artificial Sequence
  Description of Artificial Sequence: Synthetic oligonucleotide
  Sense strand starting at position 400 of SEQ ID NO: 916367
uucuacuuauuauuggaga

SEQ ID NO: 1151077 - RNA, 19 nt, Artificial Sequence
  Description of Artificial Sequence: Synthetic oligonucleotide
  Antisense strand to SEQ ID NO: 1151076
ucuccaauaauaaguagaa

SEQ ID NO: 1151078 - RNA, 19 nt, Artificial Sequence
  Description of Artificial Sequence: Synthetic oligonucleotide
  Sense strand starting at position 456 of SEQ ID NO: 916367
auuuauggcucauuguuau

SEQ ID NO: 1151079 - RNA, 19 nt, Artificial Sequence
  Description of Artificial Sequence: Synthetic oligonucleotide
  Antisense strand to SEQ ID NO: 1151078
auaacaaugagccauaaau

SEQ ID NO: 1151080 - RNA, 19 nt, Artificial Sequence
  Description of Artificial Sequence: Synthetic oligonucleotide
  Sense strand starting at position 506 of SEQ ID NO: 916367
uuugcaucccuuuagagac

SEQ ID NO: 1151081 - RNA, 19 nt, Artificial Sequence
  Description of Artificial Sequence: Synthetic oligonucleotide
  Antisense strand to SEQ ID NO: 1151080
gucucuaaagggaugcaaa

SEQ ID NO: 1151082 - RNA, 19 nt, Artificial Sequence
  Description of Artificial Sequence: Synthetic oligonucleotide
  Sense strand starting at position 682 of SEQ ID NO: 916367
ucaguugcuuacuuugaaa

SEQ ID NO: 1151083 - RNA, 19 nt, Artificial Sequence
  Description of Artificial Sequence: Synthetic oligonucleotide
  Antisense strand to SEQ ID NO: 1151082
uuucaaaguaagcaacuga

SEQ ID NO: 1151084 - RNA, 19 nt, Artificial Sequence
  Description of Artificial Sequence: Synthetic oligonucleotide
  Sense strand starting at position 684 of SEQ ID NO: 916367
aguugcuuacuuugaaaua

SEQ ID NO: 1151085 - RNA, 19 nt, Artificial Sequence
  Description of Artificial Sequence: Synthetic oligonucleotide
  Antisense strand to SEQ ID NO: 1151084
uauuucaaaguaagcaacu

SEQ ID NO: 1151086 - RNA, 19 nt, Artificial Sequence
  Description of Artificial Sequence: Synthetic oligonucleotide
  Sense strand starting at position 887 of SEQ ID NO: 916367
acaugucuuugagucauga

SEQ ID NO: 1151087 - RNA, 19 nt, Artificial Sequence
  Description of Artificial Sequence: Synthetic oligonucleotide
  Antisense strand to SEQ ID NO: 1151086
ucaugacucaaagacaugu

SEQ ID NO: 1151088 - RNA, 19 nt, Artificial Sequence
  Description of Artificial Sequence: Synthetic oligonucleotide
  Sense strand starting at position 1425 of SEQ ID NO: 916367
uauaaugcuccaugaguug

SEQ ID NO: 1151089 - RNA, 19 nt, Artificial Sequence
  Description of Artificial Sequence: Synthetic oligonucleotide
  Antisense strand to SEQ ID NO: 1151088
caacucauggagcauuaua

SEQ ID NO: 1151090 - RNA, 19 nt, Artificial Sequence
  Description of Artificial Sequence: Synthetic oligonucleotide
  Sense strand starting at position 1432 of SEQ ID NO: 916367
cuccaugaguuguuaauca

SEQ ID NO: 1151091 - RNA, 19 nt, Artificial Sequence
  Description of Artificial Sequence: Synthetic oligonucleotide
  Antisense strand to SEQ ID NO: 1151090
ugauuaacaacucauggag

SEQ ID NO: 1151092 - RNA, 19 nt, Artificial Sequence
  Description of Artificial Sequence: Synthetic oligonucleotide
  Sense strand starting at position 1436 of SEQ ID NO: 916367
augaguuguuaaucacaaa

SEQ ID NO: 1151093 - RNA, 19 nt, Artificial Sequence
  Description of Artificial Sequence: Synthetic oligonucleotide
  Antisense strand to SEQ ID NO: 1151092
uuugugauuaacaacucau

SEQ ID NO: 1151094 - RNA, 19 nt, Artificial Sequence
  Description of Artificial Sequence: Synthetic oligonucleotide
  Sense strand starting at position 1460 of SEQ ID NO: 916367
auugaacaaugccugaaua

SEQ ID NO: 1151095 - RNA, 19 nt, Artificial Sequence
  Description of Artificial Sequence: Synthetic oligonucleotide
  Antisense strand to SEQ ID NO: 1151094
uauucaggcauuguucaau

SEQ ID NO: 1151096 - RNA, 19 nt, Artificial Sequence
  Description of Artificial Sequence: Synthetic oligonucleotide
  Sense strand starting at position 1508 of SEQ ID NO: 916367
auuagauccugacuuugac

SEQ ID NO: 1151097 - RNA, 19 nt, Artificial Sequence
  Description of Artificial Sequence: Synthetic oligonucleotide
  Antisense strand to SEQ ID NO: 1151096
gucaaagucaggaucuaau

SEQ ID NO: 1151098 - RNA, 19 nt, Artificial Sequence
  Description of Artificial Sequence: Synthetic oligonucleotide
  Sense strand starting at position 1649 of SEQ ID NO: 916367
uugucauucccuugaugau

SEQ ID NO: 1151099 - RNA, 19 nt, Artificial Sequence
  Description of Artificial Sequence: Synthetic oligonucleotide
  Antisense strand to SEQ ID NO: 1151098
aucaucaagggaaugacaa

SEQ ID NO: 1151100 - RNA, 19 nt, Artificial Sequence
  Description of Artificial Sequence: Synthetic oligonucleotide
  Sense strand starting at position 1650 of SEQ ID NO: 916367
ugucauucccuugaugauc

SEQ ID NO: 1151101 - RNA, 19 nt, Artificial Sequence
  Description of Artificial Sequence: Synthetic oligonucleotide
  Antisense strand to SEQ ID NO: 1151100
gaucaucaagggaaugaca

SEQ ID NO: 1151102 - RNA, 19 nt, Artificial Sequence
  Description of Artificial Sequence: Synthetic oligonucleotide
  Sense strand starting at position 1716 of SEQ ID NO: 916367
ugguuccugaaauggagau

SEQ ID NO: 1151103 - RNA, 19 nt, Artificial Sequence
  Description of Artificial Sequence: Synthetic oligonucleotide
  Antisense strand to SEQ ID NO: 1151102
aucuccauuucaggaacca

SEQ ID NO: 1151104 - RNA, 19 nt, Artificial Sequence
  Description of Artificial Sequence: Synthetic oligonucleotide
  Sense strand starting at position 1717 of SEQ ID NO: 916367
gguuccugaaauggagauu

SEQ ID NO: 1151105 - RNA, 19 nt, Artificial Sequence
  Description of Artificial Sequence: Synthetic oligonucleotide
  Antisense strand to SEQ ID NO: 1151104
aaucuccauuucaggaacc

SEQ ID NO: 1151106 - RNA, 19 nt, Artificial Sequence
  Description of Artificial Sequence: Synthetic oligonucleotide
  Sense strand starting at position 1783 of SEQ ID NO: 916367
acucacuucugaguagguu

SEQ ID NO: 1151107 - RNA, 19 nt, Artificial Sequence
  Description of Artificial Sequence: Synthetic oligonucleotide
  Antisense strand to SEQ ID NO: 1151106
aaccuacucagaagugagu

SEQ ID NO: 1151108 - RNA, 19 nt, Artificial Sequence
  Description of Artificial Sequence: Synthetic oligonucleotide
  Sense strand starting at position 1952 of SEQ ID NO: 916367
uuugcuguugaccaauaua

SEQ ID NO: 1151109 - RNA, 19 nt, Artificial Sequence
  Description of Artificial Sequence: Synthetic oligonucleotide
  Antisense strand to SEQ ID NO: 1151108
uauauuggucaacagcaaa

SEQ ID NO: 1151110 - RNA, 19 nt, Artificial Sequence
  Description of Artificial Sequence: Synthetic oligonucleotide
  Sense strand starting at position 2169 of SEQ ID NO: 916367
ccaauagaauaccugugua

SEQ ID NO: 1151111 - RNA, 19 nt, Artificial Sequence
  Description of Artificial Sequence: Synthetic oligonucleotide
  Antisense strand to SEQ ID NO: 1151110
uacacagguauucuauugg

SEQ ID NO: 1151112 - RNA, 19 nt, Artificial Sequence
  Description of Artificial Sequence: Synthetic oligonucleotide
  Sense strand starting at position 2219 of SEQ ID NO: 916367
gcacuaauuguaugacaau

SEQ ID NO: 1151113 - RNA, 19 nt, Artificial Sequence
  Description of Artificial Sequence: Synthetic oligonucleotide
  Antisense strand to SEQ ID NO: 1151112
auugucauacaauuagugc

SEQ ID NO: 1151114 - RNA, 19 nt, Artificial Sequence
  Description of Artificial Sequence: Synthetic oligonucleotide
  Sense strand starting at position 2257 of SEQ ID NO: 916367
aggauugagcgcuaaagau

SEQ ID NO: 1151115 - RNA, 19 nt, Artificial Sequence
  Description of Artificial Sequence: Synthetic oligonucleotide
  Antisense strand to SEQ ID NO: 1151114
aucuuuagcgcucaauccu

SEQ ID NO: 1151116 - RNA, 19 nt, Artificial Sequence
  Description of Artificial Sequence: Synthetic oligonucleotide
  Sense strand starting at position 2265 of SEQ ID NO: 916367
gcgcuaaagauggaggaau

SEQ ID NO: 1151117 - RNA, 19 nt, Artificial Sequence
  Description of Artificial Sequence: Synthetic oligonucleotide
  Antisense strand to SEQ ID NO: 1151116
auuccuccaucuuuagcgc

SEQ ID NO: 1151118 - RNA, 19 nt, Artificial Sequence
  Description of Artificial Sequence: Synthetic oligonucleotide
  Sense strand starting at position 2325 of SEQ ID NO: 916367
uuaaguuagugacuuacau

SEQ ID NO: 1151119 - RNA, 19 nt, Artificial Sequence
  Description of Artificial Sequence: Synthetic oligonucleotide
  Antisense strand to SEQ ID NO: 1151118
auguaagucacuaacuuaa

SEQ ID NO: 1151120 - RNA, 19 nt, Artificial Sequence
  Description of Artificial Sequence: Synthetic oligonucleotide
  Sense strand starting at position 2511 of SEQ ID NO: 916367
uacagaauugauugguaau

SEQ ID NO: 1151121 - RNA, 19 nt, Artificial Sequence
  Description of Artificial Sequence: Synthetic oligonucleotide
  Antisense strand to SEQ ID NO: 1151120
auuaccaaucaauucugua

SEQ ID NO: 1151122 - RNA, 19 nt, Artificial Sequence
  Description of Artificial Sequence: Synthetic oligonucleotide
  Sense strand starting at position 2513 of SEQ ID NO: 916367
cagaauugauugguaauug

SEQ ID NO: 1151123 - RNA, 19 nt, Artificial Sequence
  Description of Artificial Sequence: Synthetic oligonucleotide
  Antisense strand to SEQ ID NO: 1151122
caauuaccaaucaauucug

SEQ ID NO: 1151124 - RNA, 19 nt, Artificial Sequence
  Description of Artificial Sequence: Synthetic oligonucleotide
  Sense strand starting at position 2785 of SEQ ID NO: 916367
uuacuuggugucuacaaca

SEQ ID NO: 1151125 - RNA, 19 nt, Artificial Sequence
  Description of Artificial Sequence: Synthetic oligonucleotide
  Antisense strand to SEQ ID NO: 1151124
uguuguagacaccaaguaa

SEQ ID NO: 1151126 - RNA, 19 nt, Artificial Sequence
  Description of Artificial Sequence: Synthetic oligonucleotide
  Sense strand starting at position 3047 of SEQ ID NO: 916367
gucguccuauuauuuauaa

SEQ ID NO: 1151127 - RNA, 19 nt, Artificial Sequence
  Description of Artificial Sequence: Synthetic oligonucleotide
  Antisense strand to SEQ ID NO: 1151126
uuauaaauaauaggacgac

SEQ ID NO: 1151128 - RNA, 19 nt, Artificial Sequence
  Description of Artificial Sequence: Synthetic oligonucleotide
  Sense strand starting at position 3144 of SEQ ID NO: 916367
uaaguauguguaugagaaa

SEQ ID NO: 1151129 - RNA, 19 nt, Artificial Sequence
  Description of Artificial Sequence: Synthetic oligonucleotide
  Antisense strand to SEQ ID NO: 1151128
uuucucauacacauacuua

SEQ ID NO: 1151130 - RNA, 19 nt, Artificial Sequence
  Description of Artificial Sequence: Synthetic oligonucleotide
  Sense strand starting at position 3155 of SEQ ID NO: 916367
augagaaauuauguuugac

SEQ ID NO: 1151131 - RNA, 19 nt, Artificial Sequence
  Description of Artificial Sequence: Synthetic oligonucleotide
  Antisense strand to SEQ ID NO: 1151130
gucaaacauaauuucucau

SEQ ID NO: 1151132 - RNA, 19 nt, Artificial Sequence
  Description of Artificial Sequence: Synthetic oligonucleotide
  Sense strand starting at position 3157 of SEQ ID NO: 916367
gagaaauuauguuugacau

SEQ ID NO: 1151133 - RNA, 19 nt, Artificial Sequence
  Description of Artificial Sequence: Synthetic oligonucleotide
  Antisense strand to SEQ ID NO: 1151132
augucaaacauaauuucuc

SEQ ID NO: 1151134 - RNA, 19 nt, Artificial Sequence
  Description of Artificial Sequence: Synthetic oligonucleotide
  Sense strand starting at position 3208 of SEQ ID NO: 916367
uuuaaagucugggcuaaau

SEQ ID NO: 1151135 - RNA, 19 nt, Artificial Sequence
  Description of Artificial Sequence: Synthetic oligonucleotide
  Antisense strand to SEQ ID NO: 1151134
auuuagcccagacuuuaaa

SEQ ID NO: 1151136 - RNA, 19 nt, Artificial Sequence
  Description of Artificial Sequence: Synthetic oligonucleotide
  Sense strand starting at position 3210 of SEQ ID NO: 916367
uaaagucugggcuaaauau

SEQ ID NO: 1151137 - RNA, 19 nt, Artificial Sequence
  Description of Artificial Sequence: Synthetic oligonucleotide
  Antisense strand to SEQ ID NO: 1151136
auauuuagcccagacuuua

SEQ ID NO: 1151138 - RNA, 19 nt, Artificial Sequence
  Description of Artificial Sequence: Synthetic oligonucleotide
  Sense strand starting at position 3280 of SEQ ID NO: 916367
ugucgugauauuuaucggu

SEQ ID NO: 1151139 - RNA, 19 nt, Artificial Sequence
  Description of Artificial Sequence: Synthetic oligonucleotide
  Antisense strand to SEQ ID NO: 1151138
accgauaaauaucacgaca

SEQ ID NO: 1151140 - RNA, 19 nt, Artificial Sequence
  Description of Artificial Sequence: Synthetic oligonucleotide
  Sense strand starting at position 3282 of SEQ ID NO: 916367
ucgugauauuuaucgguuu

SEQ ID NO: 1151141 - RNA, 19 nt, Artificial Sequence
  Description of Artificial Sequence: Synthetic oligonucleotide
  Antisense strand to SEQ ID NO: 1151140
aaaccgauaaauaucacga

SEQ ID NO: 1151142 - RNA, 19 nt, Artificial Sequence
  Description of Artificial Sequence: Synthetic oligonucleotide
  Sense strand starting at position 3340 of SEQ ID NO: 916367
augcaugugcuugacuaau

SEQ ID NO: 1151143 - RNA, 19 nt, Artificial Sequence
  Description of Artificial Sequence: Synthetic oligonucleotide
  Antisense strand to SEQ ID NO: 1151142
auuagucaagcacaugcau

SEQ ID NO: 1151144 - RNA, 19 nt, Artificial Sequence
  Description of Artificial Sequence: Synthetic oligonucleotide
  Sense strand starting at position 3636 of SEQ ID NO: 916367
acaucugugauccggugaa

SEQ ID NO: 1151145 - RNA, 19 nt, Artificial Sequence
  Description of Artificial Sequence: Synthetic oligonucleotide
  Antisense strand to SEQ ID NO: 1151144
uucaccggaucacagaugu

SEQ ID NO: 1151146 - RNA, 19 nt, Artificial Sequence
  Description of Artificial Sequence: Synthetic oligonucleotide
  Sense strand starting at position 3867 of SEQ ID NO: 916367
cacagacugcccugugaaa

SEQ ID NO: 1151147 - RNA, 19 nt, Artificial Sequence
  Description of Artificial Sequence: Synthetic oligonucleotide
  Antisense strand to SEQ ID NO: 1151146
uuucacagggcagucugug

SEQ ID NO: 1151148 - RNA, 19 nt, Artificial Sequence
  Description of Artificial Sequence: Synthetic oligonucleotide
  Sense strand starting at position 3913 of SEQ ID NO: 916367
gcagauuccucaucaaugu

SEQ ID NO: 1151149 - RNA, 19 nt, Artificial Sequence
  Description of Artificial Sequence: Synthetic oligonucleotide
  Antisense strand to SEQ ID NO: 1151148
acauugaugaggaaucugc

SEQ ID NO: 1151150 - RNA, 19 nt, Artificial Sequence
  Description of Artificial Sequence: Synthetic oligonucleotide
  Sense strand starting at position 11 of SEQ ID NO: 916368
uucuacuuauuauuggaga

SEQ ID NO: 1151151 - RNA, 19 nt, Artificial Sequence
  Description of Artificial Sequence: Synthetic oligonucleotide
  Antisense strand to SEQ ID NO: 1151150
ucuccaauaauaaguagaa

SEQ ID NO: 1151152 - RNA, 19 nt, Artificial Sequence
  Description of Artificial Sequence: Synthetic oligonucleotide
  Sense strand starting at position 67 of SEQ ID NO: 916368
auuuauggcucauuguuau

SEQ ID NO: 1151153 - RNA, 19 nt, Artificial Sequence
  Description of Artificial Sequence: Synthetic oligonucleotide
  Antisense strand to SEQ ID NO: 1151152
auaacaaugagccauaaau

SEQ ID NO: 1151154 - RNA, 19 nt, Artificial Sequence
  Description of Artificial Sequence: Synthetic oligonucleotide
  Sense strand starting at position 117 of SEQ ID NO: 916368
uuugcaucccuuuagagac

SEQ ID NO: 1151155 - RNA, 19 nt, Artificial Sequence
  Description of Artificial Sequence: Synthetic oligonucleotide
  Antisense strand to SEQ ID NO: 1151154
gucucuaaagggaugcaaa

SEQ ID NO: 1151156 - RNA, 19 nt, Artificial Sequence
  Description of Artificial Sequence: Synthetic oligonucleotide
  Sense strand starting at position 293 of SEQ ID NO: 916368
ucaguugcuuacuuugaaa

SEQ ID NO: 1151157 - RNA, 19 nt, Artificial Sequence
  Description of Artificial Sequence: Synthetic oligonucleotide
  Antisense strand to SEQ ID NO: 1151156
uuucaaaguaagcaacuga

SEQ ID NO: 1151158 - RNA, 19 nt, Artificial Sequence
  Description of Artificial Sequence: Synthetic oligonucleotide
  Sense strand starting at position 295 of SEQ ID NO: 916368
aguugcuuacuuugaaaua

SEQ ID NO: 1151159 - RNA, 19 nt, Artificial Sequence
  Description of Artificial Sequence: Synthetic oligonucleotide
  Antisense strand to SEQ ID NO: 1151158
uauuucaaaguaagcaacu

SEQ ID NO: 1151160 - RNA, 19 nt, Artificial Sequence
  Description of Artificial Sequence: Synthetic oligonucleotide
  Sense strand starting at position 498 of SEQ ID NO: 916368
acaugucuuugagucauga

SEQ ID NO: 1151161 - RNA, 19 nt, Artificial Sequence
  Description of Artificial Sequence: Synthetic oligonucleotide
  Antisense strand to SEQ ID NO: 1151160
ucaugacucaaagacaugu

SEQ ID NO: 1151162 - RNA, 19 nt, Artificial Sequence
  Description of Artificial Sequence: Synthetic oligonucleotide
  Sense strand starting at position 1036 of SEQ ID NO: 916368
uauaaugcuccaugaguug

SEQ ID NO: 1151163 - RNA, 19 nt, Artificial Sequence
  Description of Artificial Sequence: Synthetic oligonucleotide
  Antisense strand to SEQ ID NO: 1151162
caacucauggagcauuaua

SEQ ID NO: 1151164 - RNA, 19 nt, Artificial Sequence
  Description of Artificial Sequence: Synthetic oligonucleotide
  Sense strand starting at position 1043 of SEQ ID NO: 916368
cuccaugaguuguuaauca

SEQ ID NO: 1151165 - RNA, 19 nt, Artificial Sequence
  Description of Artificial Sequence: Synthetic oligonucleotide
  Antisense strand to SEQ ID NO: 1151164
ugauuaacaacucauggag

SEQ ID NO: 1151166 - RNA, 19 nt, Artificial Sequence
  Description of Artificial Sequence: Synthetic oligonucleotide
  Sense strand starting at position 1047 of SEQ ID NO: 916368
augaguuguuaaucacaaa

SEQ ID NO: 1151167 - RNA, 19 nt, Artificial Sequence
  Description of Artificial Sequence: Synthetic oligonucleotide
  Antisense strand to SEQ ID NO: 1151166
uuugugauuaacaacucau

SEQ ID NO: 1151168 - RNA, 19 nt, Artificial Sequence
  Description of Artificial Sequence: Synthetic oligonucleotide
  Sense strand starting at position 1071 of SEQ ID NO: 916368
auugaacaaugccugaaua

SEQ ID NO: 1151169 - RNA, 19 nt, Artificial Sequence
  Description of Artificial Sequence: Synthetic oligonucleotide
  Antisense strand to SEQ ID NO: 1151168
uauucaggcauuguucaau

SEQ ID NO: 1151170 - RNA, 19 nt, Artificial Sequence
  Description of Artificial Sequence: Synthetic oligonucleotide
  Sense strand starting at position 1119 of SEQ ID NO: 916368
auuagauccugacuuugac

SEQ ID NO: 1151171 - RNA, 19 nt, Artificial Sequence
  Description of Artificial Sequence: Synthetic oligonucleotide
  Antisense strand to SEQ ID NO: 1151170
gucaaagucaggaucuaau

SEQ ID NO: 1151172 - RNA, 19 nt, Artificial Sequence
  Description of Artificial Sequence: Synthetic oligonucleotide
  Sense strand starting at position 1260 of SEQ ID NO: 916368
uugucauucccuugaugau

SEQ ID NO: 1151173 - RNA, 19 nt, Artificial Sequence
  Description of Artificial Sequence: Synthetic oligonucleotide
  Antisense strand to SEQ ID NO: 1151172
aucaucaagggaaugacaa

SEQ ID NO: 1151174 - RNA, 19 nt, Artificial Sequence
  Description of Artificial Sequence: Synthetic oligonucleotide
  Sense strand starting at position 1261 of SEQ ID NO: 916368
ugucauucccuugaugauc

SEQ ID NO: 1151175 - RNA, 19 nt, Artificial Sequence
  Description of Artificial Sequence: Synthetic oligonucleotide
  Antisense strand to SEQ ID NO: 1151174
gaucaucaagggaaugaca

SEQ ID NO: 1151176 - RNA, 19 nt, Artificial Sequence
  Description of Artificial Sequence: Synthetic oligonucleotide
  Sense strand starting at position 1327 of SEQ ID NO: 916368
ugguuccugaaauggagau

SEQ ID NO: 1151177 - RNA, 19 nt, Artificial Sequence
  Description of Artificial Sequence: Synthetic oligonucleotide
  Antisense strand to SEQ ID NO: 1151176
aucuccauuucaggaacca

SEQ ID NO: 1151178 - RNA, 19 nt, Artificial Sequence
  Description of Artificial Sequence: Synthetic oligonucleotide
  Sense strand starting at position 1328 of SEQ ID NO: 916368
gguuccugaaauggagauu

SEQ ID NO: 1151179 - RNA, 19 nt, Artificial Sequence
  Description of Artificial Sequence: Synthetic oligonucleotide
  Antisense strand to SEQ ID NO: 1151178
aaucuccauuucaggaacc

SEQ ID NO: 1151180 - RNA, 19 nt, Artificial Sequence
  Description of Artificial Sequence: Synthetic oligonucleotide
  Sense strand starting at position 1394 of SEQ ID NO: 916368
acucacuucugaguagguu

SEQ ID NO: 1151181 - RNA, 19 nt, Artificial Sequence
  Description of Artificial Sequence: Synthetic oligonucleotide
  Antisense strand to SEQ ID NO: 1151180
aaccuacucagaagugagu

SEQ ID NO: 1151182 - RNA, 19 nt, Artificial Sequence
  Description of Artificial Sequence: Synthetic oligonucleotide
  Sense strand starting at position 1480 of SEQ ID NO: 916368
agaagcuauaaguggugua

SEQ ID NO: 1151183 - RNA, 19 nt, Artificial Sequence
  Description of Artificial Sequence: Synthetic oligonucleotide
  Antisense strand to SEQ ID NO: 1151182
uacaccacuuauagcuucu

SEQ ID NO: 1151184 - RNA, 19 nt, Artificial Sequence
  Description of Artificial Sequence: Synthetic oligonucleotide
  Sense strand starting at position 1563 of SEQ ID NO: 916368
uuugcuguugaccaauaua

SEQ ID NO: 1151185 - RNA, 19 nt, Artificial Sequence
  Description of Artificial Sequence: Synthetic oligonucleotide
  Antisense strand to SEQ ID NO: 1151184
uauauuggucaacagcaaa

SEQ ID NO: 1151186 - RNA, 19 nt, Artificial Sequence
  Description of Artificial Sequence: Synthetic oligonucleotide
  Sense strand starting at position 1780 of SEQ ID NO: 916368
ccaauagaauaccugugua

SEQ ID NO: 1151187 - RNA, 19 nt, Artificial Sequence
  Description of Artificial Sequence: Synthetic oligonucleotide
  Antisense strand to SEQ ID NO: 1151186
uacacagguauucuauugg

SEQ ID NO: 1151188 - RNA, 19 nt, Artificial Sequence
  Description of Artificial Sequence: Synthetic oligonucleotide
  Sense strand starting at position 1830 of SEQ ID NO: 916368
gcacuaauuguaugacaau

SEQ ID NO: 1151189 - RNA, 19 nt, Artificial Sequence
  Description of Artificial Sequence: Synthetic oligonucleotide
  Antisense strand to SEQ ID NO: 1151188
auugucauacaauuagugc

SEQ ID NO: 1151190 - RNA, 19 nt, Artificial Sequence
  Description of Artificial Sequence: Synthetic oligonucleotide
  Sense strand starting at position 1868 of SEQ ID NO: 916368
aggauugagcgcuaaagau

SEQ ID NO: 1151191 - RNA, 19 nt, Artificial Sequence
  Description of Artificial Sequence: Synthetic oligonucleotide
  Antisense strand to SEQ ID NO: 1151190
aucuuuagcgcucaauccu

SEQ ID NO: 1151192 - RNA, 19 nt, Artificial Sequence
  Description of Artificial Sequence: Synthetic oligonucleotide
  Sense strand starting at position 1876 of SEQ ID NO: 916368
gcgcuaaagauggaggaau

SEQ ID NO: 1151193 - RNA, 19 nt, Artificial Sequence
  Description of Artificial Sequence: Synthetic oligonucleotide
  Antisense strand to SEQ ID NO: 1151192
auuccuccaucuuuagcgc

SEQ ID NO: 1151194 - RNA, 19 nt, Artificial Sequence
  Description of Artificial Sequence: Synthetic oligonucleotide
  Sense strand starting at position 1936 of SEQ ID NO: 916368
uuaaguuagugacuuacau

SEQ ID NO: 1151195 - RNA, 19 nt, Artificial Sequence
  Description of Artificial Sequence: Synthetic oligonucleotide
  Antisense strand to SEQ ID NO: 1151194
auguaagucacuaacuuaa

SEQ ID NO: 1151196 - RNA, 19 nt, Artificial Sequence
  Description of Artificial Sequence: Synthetic oligonucleotide
  Sense strand starting at position 2122 of SEQ ID NO: 916368
uacagaauugauugguaau

SEQ ID NO: 1151197 - RNA, 19 nt, Artificial Sequence
  Description of Artificial Sequence: Synthetic oligonucleotide
  Antisense strand to SEQ ID NO: 1151196
auuaccaaucaauucugua

SEQ ID NO: 1151198 - RNA, 19 nt, Artificial Sequence
  Description of Artificial Sequence: Synthetic oligonucleotide
  Sense strand starting at position 2124 of SEQ ID NO: 916368
cagaauugauugguaauug

SEQ ID NO: 1151199 - RNA, 19 nt, Artificial Sequence
  Description of Artificial Sequence: Synthetic oligonucleotide
  Antisense strand to SEQ ID NO: 1151198
caauuaccaaucaauucug

SEQ ID NO: 1151200 - RNA, 19 nt, Artificial Sequence
  Description of Artificial Sequence: Synthetic oligonucleotide
  Sense strand starting at position 2396 of SEQ ID NO: 916368
uuacuuggugucuacaaca

SEQ ID NO: 1151201 - RNA, 19 nt, Artificial Sequence
  Description of Artificial Sequence: Synthetic oligonucleotide
  Antisense strand to SEQ ID NO: 1151200
uguuguagacaccaaguaa

SEQ ID NO: 1151202 - RNA, 19 nt, Artificial Sequence
  Description of Artificial Sequence: Synthetic oligonucleotide
  Sense strand starting at position 2658 of SEQ ID NO: 916368
gucguccuauuauuuauaa

SEQ ID NO: 1151203 - RNA, 19 nt, Artificial Sequence
  Description of Artificial Sequence: Synthetic oligonucleotide
  Antisense strand to SEQ ID NO: 1151202
uuauaaauaauaggacgac

SEQ ID NO: 1151204 - RNA, 19 nt, Artificial Sequence
  Description of Artificial Sequence: Synthetic oligonucleotide
  Sense strand starting at position 2755 of SEQ ID NO: 916368
uaaguauguguaugagaaa

SEQ ID NO: 1151205 - RNA, 19 nt, Artificial Sequence
  Description of Artificial Sequence: Synthetic oligonucleotide
  Antisense strand to SEQ ID NO: 1151204
uuucucauacacauacuua

SEQ ID NO: 1151206 - RNA, 19 nt, Artificial Sequence
  Description of Artificial Sequence: Synthetic oligonucleotide
  Sense strand starting at position 2766 of SEQ ID NO: 916368
augagaaauuauguuugac

SEQ ID NO: 1151207 - RNA, 19 nt, Artificial Sequence
  Description of Artificial Sequence: Synthetic oligonucleotide
  Antisense strand to SEQ ID NO: 1151206
gucaaacauaauuucucau

SEQ ID NO: 1151208 - RNA, 19 nt, Artificial Sequence
  Description of Artificial Sequence: Synthetic oligonucleotide
  Sense strand starting at position 2768 of SEQ ID NO: 916368
gagaaauuauguuugacau

SEQ ID NO: 1151209 - RNA, 19 nt, Artificial Sequence
  Description of Artificial Sequence: Synthetic oligonucleotide
  Antisense strand to SEQ ID NO: 1151208
augucaaacauaauuucuc

SEQ ID NO: 1151210 - RNA, 19 nt, Artificial Sequence
  Description of Artificial Sequence: Synthetic oligonucleotide
  Sense strand starting at position 2819 of SEQ ID NO: 916368
uuuaaagucugggcuaaau

SEQ ID NO: 1151211 - RNA, 19 nt, Artificial Sequence
  Description of Artificial Sequence: Synthetic oligonucleotide
  Antisense strand to SEQ ID NO: 1151210
auuuagcccagacuuuaaa

SEQ ID NO: 1151212 - RNA, 19 nt, Artificial Sequence
  Description of Artificial Sequence: Synthetic oligonucleotide
  Sense strand starting at position 2821 of SEQ ID NO: 916368
uaaagucugggcuaaauau

SEQ ID NO: 1151213 - RNA, 19 nt, Artificial Sequence
  Description of Artificial Sequence: Synthetic oligonucleotide
  Antisense strand to SEQ ID NO: 1151212
auauuuagcccagacuuua

SEQ ID NO: 1151214 - RNA, 19 nt, Artificial Sequence
  Description of Artificial Sequence: Synthetic oligonucleotide
  Sense strand starting at position 2891 of SEQ ID NO: 916368
ugucgugauauuuaucggu

SEQ ID NO: 1151215 - RNA, 19 nt, Artificial Sequence
  Description of Artificial Sequence: Synthetic oligonucleotide
  Antisense strand to SEQ ID NO: 1151214
accgauaaauaucacgaca

SEQ ID NO: 1151216 - RNA, 19 nt, Artificial Sequence
  Description of Artificial Sequence: Synthetic oligonucleotide
  Sense strand starting at position 2893 of SEQ ID NO: 916368
ucgugauauuuaucgguuu

SEQ ID NO: 1151217 - RNA, 19 nt, Artificial Sequence
  Description of Artificial Sequence: Synthetic oligonucleotide
  Antisense strand to SEQ ID NO: 1151216
aaaccgauaaauaucacga

SEQ ID NO: 1151218 - RNA, 19 nt, Artificial Sequence
  Description of Artificial Sequence: Synthetic oligonucleotide
  Sense strand starting at position 2951 of SEQ ID NO: 916368
augcaugugcuugacuaau

SEQ ID NO: 1151219 - RNA, 19 nt, Artificial Sequence
  Description of Artificial Sequence: Synthetic oligonucleotide
  Antisense strand to SEQ ID NO: 1151218
auuagucaagcacaugcau

SEQ ID NO: 1151220 - RNA, 19 nt, Artificial Sequence
  Description of Artificial Sequence: Synthetic oligonucleotide
  Sense strand starting at position 3247 of SEQ ID NO: 916368
acaucugugauccggugaa

SEQ ID NO: 1151221 - RNA, 19 nt, Artificial Sequence
  Description of Artificial Sequence: Synthetic oligonucleotide
  Antisense strand to SEQ ID NO: 1151220
uucaccggaucacagaugu

SEQ ID NO: 1151222 - RNA, 19 nt, Artificial Sequence
  Description of Artificial Sequence: Synthetic oligonucleotide
  Sense strand starting at position 3478 of SEQ ID NO: 916368
cacagacugcccugugaaa

SEQ ID NO: 1151223 - RNA, 19 nt, Artificial Sequence
  Description of Artificial Sequence: Synthetic oligonucleotide
  Antisense strand to SEQ ID NO: 1151222
uuucacagggcagucugug

SEQ ID NO: 1151224 - RNA, 19 nt, Artificial Sequence
  Description of Artificial Sequence: Synthetic oligonucleotide
  Sense strand starting at position 3524 of SEQ ID NO: 916368
gcagauuccucaucaaugu

SEQ ID NO: 1151225 - RNA, 19 nt, Artificial Sequence
  Description of Artificial Sequence: Synthetic oligonucleotide
  Antisense strand to SEQ ID NO: 1151224
acauugaugaggaaucugc

SEQ ID NO: 1151226 - RNA, 19 nt, Artificial Sequence
  Description of Artificial Sequence: Synthetic oligonucleotide
  Sense strand starting at position 3830 of SEQ ID NO: 916368
gggauuacguacuucuuua

SEQ ID NO: 1151227 - RNA, 19 nt, Artificial Sequence
  Description of Artificial Sequence: Synthetic oligonucleotide
  Antisense strand to SEQ ID NO: 1151226
uaaagaaguacguaauccc

SEQ ID NO: 1151228 - RNA, 19 nt, Artificial Sequence
  Description of Artificial Sequence: Synthetic oligonucleotide
  Sense strand starting at position 3931 of SEQ ID NO: 916368
gucacuaauuauucugaga

SEQ ID NO: 1151229 - RNA, 19 nt, Artificial Sequence
  Description of Artificial Sequence: Synthetic oligonucleotide
  Antisense strand to SEQ ID NO: 1151228
ucucagaauaauuagugac

SEQ ID NO: 1151230 - RNA, 19 nt, Artificial Sequence
  Description of Artificial Sequence: Synthetic oligonucleotide
  Sense strand starting at position 6 of SEQ ID NO: 916369
uuggaaguuagagguucua

SEQ ID NO: 1151231 - RNA, 19 nt, Artificial Sequence
  Description of Artificial Sequence: Synthetic oligonucleotide
  Antisense strand to SEQ ID NO: 1151230
uagaaccucuaacuuccaa

SEQ ID NO: 1151232 - RNA, 19 nt, Artificial Sequence
  Description of Artificial Sequence: Synthetic oligonucleotide
  Sense strand starting at position 33 of SEQ ID NO: 916369
gaacccuguuuggugagaa

SEQ ID NO: 1151233 - RNA, 19 nt, Artificial Sequence
  Description of Artificial Sequence: Synthetic oligonucleotide
  Antisense strand to SEQ ID NO: 1151232
uucucaccaaacaggguuc

SEQ ID NO: 1151234 - RNA, 19 nt, Artificial Sequence
  Description of Artificial Sequence: Synthetic oligonucleotide
  Sense strand starting at position 46 of SEQ ID NO: 916369
ugagaauacguccaucagu

SEQ ID NO: 1151235 - RNA, 19 nt, Artificial Sequence
  Description of Artificial Sequence: Synthetic oligonucleotide
  Antisense strand to SEQ ID NO: 1151234
acugauggacguauucuca

SEQ ID NO: 1151236 - RNA, 19 nt, Artificial Sequence
  Description of Artificial Sequence: Synthetic oligonucleotide
  Sense strand starting at position 49 of SEQ ID NO: 916369
gaauacguccaucagucau

SEQ ID NO: 1151237 - RNA, 19 nt, Artificial Sequence
  Description of Artificial Sequence: Synthetic oligonucleotide
  Antisense strand to SEQ ID NO: 1151236
augacugauggacguauuc

SEQ ID NO: 1151238 - RNA, 19 nt, Artificial Sequence
  Description of Artificial Sequence: Synthetic oligonucleotide
  Sense strand starting at position 131 of SEQ ID NO: 916369
ucaagaacuccaggcuuaa

SEQ ID NO: 1151239 - RNA, 19 nt, Artificial Sequence
  Description of Artificial Sequence: Synthetic oligonucleotide
  Antisense strand to SEQ ID NO: 1151238
uuaagccuggaguucuuga

SEQ ID NO: 1151240 - RNA, 19 nt, Artificial Sequence
  Description of Artificial Sequence: Synthetic oligonucleotide
  Sense strand starting at position 645 of SEQ ID NO: 916369
ccacuuguuccugaaguua

SEQ ID NO: 1151241 - RNA, 19 nt, Artificial Sequence
  Description of Artificial Sequence: Synthetic oligonucleotide
  Antisense strand to SEQ ID NO: 1151240
uaacuucaggaacaagugg

SEQ ID NO: 1151242 - RNA, 19 nt, Artificial Sequence
  Description of Artificial Sequence: Synthetic oligonucleotide
  Sense strand starting at position 660 of SEQ ID NO: 916369
guuaucauugccucgccua

SEQ ID NO: 1151243 - RNA, 19 nt, Artificial Sequence
  Description of Artificial Sequence: Synthetic oligonucleotide
  Antisense strand to SEQ ID NO: 1151242
uaggcgaggcaaugauaac

SEQ ID NO: 1151244 - RNA, 19 nt, Artificial Sequence
  Description of Artificial Sequence: Synthetic oligonucleotide
  Sense strand starting at position 782 of SEQ ID NO: 916369
cagacaugcuaauccggaa

SEQ ID NO: 1151245 - RNA, 19 nt, Artificial Sequence
  Description of Artificial Sequence: Synthetic oligonucleotide
  Antisense strand to SEQ ID NO: 1151244
uuccggauuagcaugucug

SEQ ID NO: 1151246 - RNA, 19 nt, Artificial Sequence
  Description of Artificial Sequence: Synthetic oligonucleotide
  Sense strand starting at position 794 of SEQ ID NO: 916369
uccggaagugcugaauaau

SEQ ID NO: 1151247 - RNA, 19 nt, Artificial Sequence
  Description of Artificial Sequence: Synthetic oligonucleotide
  Antisense strand to SEQ ID NO: 1151246
auuauucagcacuuccgga

SEQ ID NO: 1151248 - RNA, 19 nt, Artificial Sequence
  Description of Artificial Sequence: Synthetic oligonucleotide
  Sense strand starting at position 803 of SEQ ID NO: 916369
gcugaauaaucaucaccag

SEQ ID NO: 1151249 - RNA, 19 nt, Artificial Sequence
  Description of Artificial Sequence: Synthetic oligonucleotide
  Antisense strand to SEQ ID NO: 1151248
cuggugaugauuauucagc

SEQ ID NO: 1151250 - RNA, 19 nt, Artificial Sequence
  Description of Artificial Sequence: Synthetic oligonucleotide
  Sense strand starting at position 819 of SEQ ID NO: 916369
cagaaugggcgucaacaaa

SEQ ID NO: 1151251 - RNA, 19 nt, Artificial Sequence
  Description of Artificial Sequence: Synthetic oligonucleotide
  Antisense strand to SEQ ID NO: 1151250
uuuguugacgcccauucug

SEQ ID NO: 1151252 - RNA, 19 nt, Artificial Sequence
  Description of Artificial Sequence: Synthetic oligonucleotide
  Sense strand starting at position 838 of SEQ ID NO: 916369
cgaaucuugugauuugcua

SEQ ID NO: 1151253 - RNA, 19 nt, Artificial Sequence
  Description of Artificial Sequence: Synthetic oligonucleotide
  Antisense strand to SEQ ID NO: 1151252
uagcaaaucacaagauucg

SEQ ID NO: 1151254 - RNA, 19 nt, Artificial Sequence
  Description of Artificial Sequence: Synthetic oligonucleotide
  Sense strand starting at position 842 of SEQ ID NO: 916369
ucuugugauuugcuauaca

SEQ ID NO: 1151255 - RNA, 19 nt, Artificial Sequence
  Description of Artificial Sequence: Synthetic oligonucleotide
  Antisense strand to SEQ ID NO: 1151254
uguauagcaaaucacaaga

SEQ ID NO: 1151256 - RNA, 19 nt, Artificial Sequence
  Description of Artificial Sequence: Synthetic oligonucleotide
  Sense strand starting at position 880 of SEQ ID NO: 916369
aaagucagguaauucugaa

SEQ ID NO: 1151257 - RNA, 19 nt, Artificial Sequence
  Description of Artificial Sequence: Synthetic oligonucleotide
  Antisense strand to SEQ ID NO: 1151256
uucagaauuaccugacuuu

SEQ ID NO: 1151258 - RNA, 19 nt, Artificial Sequence
  Description of Artificial Sequence: Synthetic oligonucleotide
  Sense strand starting at position 921 of SEQ ID NO: 916369
agaauuacucaauaguguu

SEQ ID NO: 1151259 - RNA, 19 nt, Artificial Sequence
  Description of Artificial Sequence: Synthetic oligonucleotide
  Antisense strand to SEQ ID NO: 1151258
aacacuauugaguaauucu

SEQ ID NO: 1151260 - RNA, 19 nt, Artificial Sequence
  Description of Artificial Sequence: Synthetic oligonucleotide
  Sense strand starting at position 1102 of SEQ ID NO: 916369
agacuaaauuccgcugaaa

SEQ ID NO: 1151261 - RNA, 19 nt, Artificial Sequence
  Description of Artificial Sequence: Synthetic oligonucleotide
  Antisense strand to SEQ ID NO: 1151260
uuucagcggaauuuagucu

SEQ ID NO: 1151262 - RNA, 19 nt, Artificial Sequence
  Description of Artificial Sequence: Synthetic oligonucleotide
  Sense strand starting at position 1104 of SEQ ID NO: 916369
acuaaauuccgcugaaaua

SEQ ID NO: 1151263 - RNA, 19 nt, Artificial Sequence
  Description of Artificial Sequence: Synthetic oligonucleotide
  Antisense strand to SEQ ID NO: 1151262
uauuucagcggaauuuagu

SEQ ID NO: 1151264 - RNA, 19 nt, Artificial Sequence
  Description of Artificial Sequence: Synthetic oligonucleotide
  Sense strand starting at position 1105 of SEQ ID NO: 916369
cuaaauuccgcugaaauau

SEQ ID NO: 1151265 - RNA, 19 nt, Artificial Sequence
  Description of Artificial Sequence: Synthetic oligonucleotide
  Antisense strand to SEQ ID NO: 1151264
auauuucagcggaauuuag

SEQ ID NO: 1151266 - RNA, 19 nt, Artificial Sequence
  Description of Artificial Sequence: Synthetic oligonucleotide
  Sense strand starting at position 1210 of SEQ ID NO: 916369
guauccauugcaggaagau

SEQ ID NO: 1151267 - RNA, 19 nt, Artificial Sequence
  Description of Artificial Sequence: Synthetic oligonucleotide
  Antisense strand to SEQ ID NO: 1151266
aucuuccugcaauggauac

SEQ ID NO: 1151268 - RNA, 19 nt, Artificial Sequence
  Description of Artificial Sequence: Synthetic oligonucleotide
  Sense strand starting at position 1683 of SEQ ID NO: 916369
uuuagcaggauguauuaga

SEQ ID NO: 1151269 - RNA, 19 nt, Artificial Sequence
  Description of Artificial Sequence: Synthetic oligonucleotide
  Antisense strand to SEQ ID NO: 1151268
ucuaauacauccugcuaaa

SEQ ID NO: 1151270 - RNA, 19 nt, Artificial Sequence
  Description of Artificial Sequence: Synthetic oligonucleotide
  Sense strand starting at position 1691 of SEQ ID NO: 916369
gauguauuagauugucuaa

SEQ ID NO: 1151271 - RNA, 19 nt, Artificial Sequence
  Description of Artificial Sequence: Synthetic oligonucleotide
  Antisense strand to SEQ ID NO: 1151270
uuagacaaucuaauacauc

SEQ ID NO: 1151272 - RNA, 19 nt, Artificial Sequence
  Description of Artificial Sequence: Synthetic oligonucleotide
  Sense strand starting at position 2030 of SEQ ID NO: 916369
aaacuagaaucuguggguu

SEQ ID NO: 1151273 - RNA, 19 nt, Artificial Sequence
  Description of Artificial Sequence: Synthetic oligonucleotide
  Antisense strand to SEQ ID NO: 1151272
aacccacagauucuaguuu

SEQ ID NO: 1151274 - RNA, 19 nt, Artificial Sequence
  Description of Artificial Sequence: Synthetic oligonucleotide
  Sense strand starting at position 2080 of SEQ ID NO: 916369
auaagcuauguguaaccau

SEQ ID NO: 1151275 - RNA, 19 nt, Artificial Sequence
  Description of Artificial Sequence: Synthetic oligonucleotide
  Antisense strand to SEQ ID NO: 1151274
augguuacacauagcuuau

SEQ ID NO: 1151276 - RNA, 19 nt, Artificial Sequence
  Description of Artificial Sequence: Synthetic oligonucleotide
  Sense strand starting at position 2105 of SEQ ID NO: 916369
guaaccaucugaguauaaa

SEQ ID NO: 1151277 - RNA, 19 nt, Artificial Sequence
  Description of Artificial Sequence: Synthetic oligonucleotide
  Antisense strand to SEQ ID NO: 1151276
uuuauacucagaugguuac

SEQ ID NO: 1151278 - RNA, 19 nt, Artificial Sequence
  Description of Artificial Sequence: Synthetic oligonucleotide
  Sense strand starting at position 2324 of SEQ ID NO: 916369
augaguaaagcaugauacu

SEQ ID NO: 1151279 - RNA, 19 nt, Artificial Sequence
  Description of Artificial Sequence: Synthetic oligonucleotide
  Antisense strand to SEQ ID NO: 1151278
aguaucaugcuuuacucau

SEQ ID NO: 1151280 - RNA, 19 nt, Artificial Sequence
  Description of Artificial Sequence: Synthetic oligonucleotide
  Sense strand starting at position 2333 of SEQ ID NO: 916369
gcaugauacugggugaaau

SEQ ID NO: 1151281 - RNA, 19 nt, Artificial Sequence
  Description of Artificial Sequence: Synthetic oligonucleotide
  Antisense strand to SEQ ID NO: 1151280
auuucacccaguaucaugc

SEQ ID NO: 1151282 - RNA, 19 nt, Artificial Sequence
  Description of Artificial Sequence: Synthetic oligonucleotide
  Sense strand starting at position 2334 of SEQ ID NO: 916369
caugauacugggugaaauc

SEQ ID NO: 1151283 - RNA, 19 nt, Artificial Sequence
  Description of Artificial Sequence: Synthetic oligonucleotide
  Antisense strand to SEQ ID NO: 1151282
gauuucacccaguaucaug

SEQ ID NO: 1151284 - RNA, 19 nt, Artificial Sequence
  Description of Artificial Sequence: Synthetic oligonucleotide
  Sense strand starting at position 2343 of SEQ ID NO: 916369
gggugaaaucucugaggau

SEQ ID NO: 1151285 - RNA, 19 nt, Artificial Sequence
  Description of Artificial Sequence: Synthetic oligonucleotide
  Antisense strand to SEQ ID NO: 1151284
auccucagagauuucaccc

SEQ ID NO: 1151286 - RNA, 19 nt, Artificial Sequence
  Description of Artificial Sequence: Synthetic oligonucleotide
  Sense strand starting at position 2404 of SEQ ID NO: 916369
ucuugaagaacugguuaag

SEQ ID NO: 1151287 - RNA, 19 nt, Artificial Sequence
  Description of Artificial Sequence: Synthetic oligonucleotide
  Antisense strand to SEQ ID NO: 1151286
cuuaaccaguucuucaaga

SEQ ID NO: 1151288 - RNA, 19 nt, Artificial Sequence
  Description of Artificial Sequence: Synthetic oligonucleotide
  Sense strand starting at position 2792 of SEQ ID NO: 916369
auauuuaucuuuguuggca

SEQ ID NO: 1151289 - RNA, 19 nt, Artificial Sequence
  Description of Artificial Sequence: Synthetic oligonucleotide
  Antisense strand to SEQ ID NO: 1151288
ugccaacaaagauaaauau

SEQ ID NO: 1151290 - RNA, 19 nt, Artificial Sequence
  Description of Artificial Sequence: Synthetic oligonucleotide
  Sense strand starting at position 2845 of SEQ ID NO: 916369
acaagaguaggucauguga

SEQ ID NO: 1151291 - RNA, 19 nt, Artificial Sequence
  Description of Artificial Sequence: Synthetic oligonucleotide
  Antisense strand to SEQ ID NO: 1151290
ucacaugaccuacucuugu

SEQ ID NO: 1151292 - RNA, 19 nt, Artificial Sequence
  Description of Artificial Sequence: Synthetic oligonucleotide
  Sense strand starting at position 2939 of SEQ ID NO: 916369
agagcugcuccugaacaau

SEQ ID NO: 1151293 - RNA, 19 nt, Artificial Sequence
  Description of Artificial Sequence: Synthetic oligonucleotide
  Antisense strand to SEQ ID NO: 1151292
auuguucaggagcagcucu

SEQ ID NO: 1151294 - RNA, 19 nt, Artificial Sequence
  Description of Artificial Sequence: Synthetic oligonucleotide
  Sense strand starting at position 3213 of SEQ ID NO: 916369
ugaaauggugaaugagagu

SEQ ID NO: 1151295 - RNA, 19 nt, Artificial Sequence
  Description of Artificial Sequence: Synthetic oligonucleotide
  Antisense strand to SEQ ID NO: 1151294
acucucauucaccauuuca

SEQ ID NO: 1151296 - RNA, 19 nt, Artificial Sequence
  Description of Artificial Sequence: Synthetic oligonucleotide
  Sense strand starting at position 3326 of SEQ ID NO: 916369
gugagagaaaucuggcaua

SEQ ID NO: 1151297 - RNA, 19 nt, Artificial Sequence
  Description of Artificial Sequence: Synthetic oligonucleotide
  Antisense strand to SEQ ID NO: 1151296
uaugccagauuucucucac

SEQ ID NO: 1151298 - RNA, 19 nt, Artificial Sequence
  Description of Artificial Sequence: Synthetic oligonucleotide
  Sense strand starting at position 3370 of SEQ ID NO: 916369
ccaagcugacuugaucauu

SEQ ID NO: 1151299 - RNA, 19 nt, Artificial Sequence
  Description of Artificial Sequence: Synthetic oligonucleotide
  Antisense strand to SEQ ID NO: 1151298
aaugaucaagucagcuugg

SEQ ID NO: 1151300 - RNA, 19 nt, Artificial Sequence
  Description of Artificial Sequence: Synthetic oligonucleotide
  Sense strand starting at position 3373 of SEQ ID NO: 916369
agcugacuugaucauuacu

SEQ ID NO: 1151301 - RNA, 19 nt, Artificial Sequence
  Description of Artificial Sequence: Synthetic oligonucleotide
  Antisense strand to SEQ ID NO: 1151300
aguaaugaucaagucagcu

SEQ ID NO: 1151302 - RNA, 19 nt, Artificial Sequence
  Description of Artificial Sequence: Synthetic oligonucleotide
  Sense strand starting at position 3430 of SEQ ID NO: 916369
auaguuuaaccuuaaggca

SEQ ID NO: 1151303 - RNA, 19 nt, Artificial Sequence
  Description of Artificial Sequence: Synthetic oligonucleotide
  Antisense strand to SEQ ID NO: 1151302
ugccuuaagguuaaacuau

SEQ ID NO: 1151304 - RNA, 19 nt, Artificial Sequence
  Description of Artificial Sequence: Synthetic oligonucleotide
  Sense strand starting at position 3707 of SEQ ID NO: 916369
ggacuccuggcuuaugacu

SEQ ID NO: 1151305 - RNA, 19 nt, Artificial Sequence
  Description of Artificial Sequence: Synthetic oligonucleotide
  Antisense strand to SEQ ID NO: 1151304
agucauaagccaggagucc

SEQ ID NO: 1151306 - RNA, 19 nt, Artificial Sequence
  Description of Artificial Sequence: Synthetic oligonucleotide
  Sense strand starting at position 3777 of SEQ ID NO: 916369
uuucuauacccuuaugguu

SEQ ID NO: 1151307 - RNA, 19 nt, Artificial Sequence
  Description of Artificial Sequence: Synthetic oligonucleotide
  Antisense strand to SEQ ID NO: 1151306
aaccauaaggguauagaaa

SEQ ID NO: 1151308 - RNA, 19 nt, Artificial Sequence
  Description of Artificial Sequence: Synthetic oligonucleotide
  Sense strand starting at position 3964 of SEQ ID NO: 916369
ggugucucaguugauggau

SEQ ID NO: 1151309 - RNA, 19 nt, Artificial Sequence
  Description of Artificial Sequence: Synthetic oligonucleotide
  Antisense strand to SEQ ID NO: 1151308
auccaucaacugagacacc

SEQ ID NO: 1151310 - RNA, 19 nt, Artificial Sequence
  Description of Artificial Sequence: Synthetic oligonucleotide
  Sense strand starting at position 216 of SEQ ID NO: 916370
uguuuaauuagguaugggu

SEQ ID NO: 1151311 - RNA, 19 nt, Artificial Sequence
  Description of Artificial Sequence: Synthetic oligonucleotide
  Antisense strand to SEQ ID NO: 1151310
acccauaccuaauuaaaca

SEQ ID NO: 1151312 - RNA, 19 nt, Artificial Sequence
  Description of Artificial Sequence: Synthetic oligonucleotide
  Sense strand starting at position 312 of SEQ ID NO: 916370
uauggagacuugcuuagaa

SEQ ID NO: 1151313 - RNA, 19 nt, Artificial Sequence
  Description of Artificial Sequence: Synthetic oligonucleotide
  Antisense strand to SEQ ID NO: 1151312
uucuaagcaagucuccaua

SEQ ID NO: 1151314 - RNA, 19 nt, Artificial Sequence
  Description of Artificial Sequence: Synthetic oligonucleotide
  Sense strand starting at position 418 of SEQ ID NO: 916370
aguggucuuaaacacugua

SEQ ID NO: 1151315 - RNA, 19 nt, Artificial Sequence
  Description of Artificial Sequence: Synthetic oligonucleotide
  Antisense strand to SEQ ID NO: 1151314
uacaguguuuaagaccacu

SEQ ID NO: 1151316 - RNA, 19 nt, Artificial Sequence
  Description of Artificial Sequence: Synthetic oligonucleotide
  Sense strand starting at position 421 of SEQ ID NO: 916370
ggucuuaaacacuguagag

SEQ ID NO: 1151317 - RNA, 19 nt, Artificial Sequence
  Description of Artificial Sequence: Synthetic oligonucleotide
  Antisense strand to SEQ ID NO: 1151316
cucuacaguguuuaagacc

SEQ ID NO: 1151318 - RNA, 19 nt, Artificial Sequence
  Description of Artificial Sequence: Synthetic oligonucleotide
  Sense strand starting at position 542 of SEQ ID NO: 916370
ggagucaucuugccaauaa

SEQ ID NO: 1151319 - RNA, 19 nt, Artificial Sequence
  Description of Artificial Sequence: Synthetic oligonucleotide
  Antisense strand to SEQ ID NO: 1151318
uuauuggcaagaugacucc

SEQ ID NO: 1151320 - RNA, 19 nt, Artificial Sequence
  Description of Artificial Sequence: Synthetic oligonucleotide
  Sense strand starting at position 569 of SEQ ID NO: 916370
agacuuuccaaucgggacu

SEQ ID NO: 1151321 - RNA, 19 nt, Artificial Sequence
  Description of Artificial Sequence: Synthetic oligonucleotide
  Antisense strand to SEQ ID NO: 1151320
agucccgauuggaaagucu

SEQ ID NO: 1151322 - RNA, 19 nt, Artificial Sequence
  Description of Artificial Sequence: Synthetic oligonucleotide
  Sense strand starting at position 668 of SEQ ID NO: 916370
guugcaguaaagugaauuu

SEQ ID NO: 1151323 - RNA, 19 nt, Artificial Sequence
  Description of Artificial Sequence: Synthetic oligonucleotide
  Antisense strand to SEQ ID NO: 1151322
aaauucacuuuacugcaac

SEQ ID NO: 1151324 - RNA, 19 nt, Artificial Sequence
  Description of Artificial Sequence: Synthetic oligonucleotide
  Sense strand starting at position 704 of SEQ ID NO: 916370
ggcagaggugcuuaaagau

SEQ ID NO: 1151325 - RNA, 19 nt, Artificial Sequence
  Description of Artificial Sequence: Synthetic oligonucleotide
  Antisense strand to SEQ ID NO: 1151324
aucuuuaagcaccucugcc

SEQ ID NO: 1151326 - RNA, 19 nt, Artificial Sequence
  Description of Artificial Sequence: Synthetic oligonucleotide
  Sense strand starting at position 712 of SEQ ID NO: 916370
ugcuuaaagaucuggaggu

SEQ ID NO: 1151327 - RNA, 19 nt, Artificial Sequence
  Description of Artificial Sequence: Synthetic oligonucleotide
  Antisense strand to SEQ ID NO: 1151326
accuccagaucuuuaagca

SEQ ID NO: 1151328 - RNA, 19 nt, Artificial Sequence
  Description of Artificial Sequence: Synthetic oligonucleotide
  Sense strand starting at position 928 of SEQ ID NO: 916370
ugucuagcucaagaaucuu

SEQ ID NO: 1151329 - RNA, 19 nt, Artificial Sequence
  Description of Artificial Sequence: Synthetic oligonucleotide
  Antisense strand to SEQ ID NO: 1151328
aagauucuugagcuagaca

SEQ ID NO: 1151330 - RNA, 19 nt, Artificial Sequence
  Description of Artificial Sequence: Synthetic oligonucleotide
  Sense strand starting at position 1048 of SEQ ID NO: 916370
uugguucguagagauauua

SEQ ID NO: 1151331 - RNA, 19 nt, Artificial Sequence
  Description of Artificial Sequence: Synthetic oligonucleotide
  Antisense strand to SEQ ID NO: 1151330
uaauaucucuacgaaccaa

SEQ ID NO: 1151332 - RNA, 19 nt, Artificial Sequence
  Description of Artificial Sequence: Synthetic oligonucleotide
  Sense strand starting at position 1093 of SEQ ID NO: 916370
cuggacuuggugugauaac

SEQ ID NO: 1151333 - RNA, 19 nt, Artificial Sequence
  Description of Artificial Sequence: Synthetic oligonucleotide
  Antisense strand to SEQ ID NO: 1151332
guuaucacaccaaguccag

SEQ ID NO: 1151334 - RNA, 19 nt, Artificial Sequence
  Description of Artificial Sequence: Synthetic oligonucleotide
  Sense strand starting at position 1100 of SEQ ID NO: 916370
uggugugauaacugauaac

SEQ ID NO: 1151335 - RNA, 19 nt, Artificial Sequence
  Description of Artificial Sequence: Synthetic oligonucleotide
  Antisense strand to SEQ ID NO: 1151334
guuaucaguuaucacacca

SEQ ID NO: 1151336 - RNA, 19 nt, Artificial Sequence
  Description of Artificial Sequence: Synthetic oligonucleotide
  Sense strand starting at position 1541 of SEQ ID NO: 916370
augaaaucaugucuaaguu

SEQ ID NO: 1151337 - RNA, 19 nt, Artificial Sequence
  Description of Artificial Sequence: Synthetic oligonucleotide
  Antisense strand to SEQ ID NO: 1151336
aacuuagacaugauuucau

SEQ ID NO: 1151338 - RNA, 19 nt, Artificial Sequence
  Description of Artificial Sequence: Synthetic oligonucleotide
  Sense strand starting at position 1542 of SEQ ID NO: 916370
ugaaaucaugucuaaguua

SEQ ID NO: 1151339 - RNA, 19 nt, Artificial Sequence
  Description of Artificial Sequence: Synthetic oligonucleotide
  Antisense strand to SEQ ID NO: 1151338
uaacuuagacaugauuuca

SEQ ID NO: 1151340 - RNA, 19 nt, Artificial Sequence
  Description of Artificial Sequence: Synthetic oligonucleotide
  Sense strand starting at position 1729 of SEQ ID NO: 916370
acauaccugccaugagaaa

SEQ ID NO: 1151341 - RNA, 19 nt, Artificial Sequence
  Description of Artificial Sequence: Synthetic oligonucleotide
  Antisense strand to SEQ ID NO: 1151340
uuucucauggcagguaugu

SEQ ID NO: 1151342 - RNA, 19 nt, Artificial Sequence
  Description of Artificial Sequence: Synthetic oligonucleotide
  Sense strand starting at position 2031 of SEQ ID NO: 916370
acacuuuggcaaggacuaa

SEQ ID NO: 1151343 - RNA, 19 nt, Artificial Sequence
  Description of Artificial Sequence: Synthetic oligonucleotide
  Antisense strand to SEQ ID NO: 1151342
uuaguccuugccaaagugu

SEQ ID NO: 1151344 - RNA, 19 nt, Artificial Sequence
  Description of Artificial Sequence: Synthetic oligonucleotide
  Sense strand starting at position 2120 of SEQ ID NO: 916370
uuuaaaggguuaucuggaa

SEQ ID NO: 1151345 - RNA, 19 nt, Artificial Sequence
  Description of Artificial Sequence: Synthetic oligonucleotide
  Antisense strand to SEQ ID NO: 1151344
uuccagauaacccuuuaaa

SEQ ID NO: 1151346 - RNA, 19 nt, Artificial Sequence
  Description of Artificial Sequence: Synthetic oligonucleotide
  Sense strand starting at position 2154 of SEQ ID NO: 916370
gggcaaaccaaagguaaau

SEQ ID NO: 1151347 - RNA, 19 nt, Artificial Sequence
  Description of Artificial Sequence: Synthetic oligonucleotide
  Antisense strand to SEQ ID NO: 1151346
auuuaccuuugguuugccc

SEQ ID NO: 1151348 - RNA, 19 nt, Artificial Sequence
  Description of Artificial Sequence: Synthetic oligonucleotide
  Sense strand starting at position 2266 of SEQ ID NO: 916370
ggcauaucuuagcucauuu

SEQ ID NO: 1151349 - RNA, 19 nt, Artificial Sequence
  Description of Artificial Sequence: Synthetic oligonucleotide
  Antisense strand to SEQ ID NO: 1151348
aaaugagcuaagauaugcc

SEQ ID NO: 1151350 - RNA, 19 nt, Artificial Sequence
  Description of Artificial Sequence: Synthetic oligonucleotide
  Sense strand starting at position 2290 of SEQ ID NO: 916370
uguaaauggcuugauagua

SEQ ID NO: 1151351 - RNA, 19 nt, Artificial Sequence
  Description of Artificial Sequence: Synthetic oligonucleotide
  Antisense strand to SEQ ID NO: 1151350
uacuaucaagccauuuaca

SEQ ID NO: 1151352 - RNA, 19 nt, Artificial Sequence
  Description of Artificial Sequence: Synthetic oligonucleotide
  Sense strand starting at position 2350 of SEQ ID NO: 916370
ggcauacagagcuaaguaa

SEQ ID NO: 1151353 - RNA, 19 nt, Artificial Sequence
  Description of Artificial Sequence: Synthetic oligonucleotide
  Antisense strand to SEQ ID NO: 1151352
uuacuuagcucuguaugcc

SEQ ID NO: 1151354 - RNA, 19 nt, Artificial Sequence
  Description of Artificial Sequence: Synthetic oligonucleotide
  Sense strand starting at position 2378 of SEQ ID NO: 916370
ggucacauaaauugggauu

SEQ ID NO: 1151355 - RNA, 19 nt, Artificial Sequence
  Description of Artificial Sequence: Synthetic oligonucleotide
  Antisense strand to SEQ ID NO: 1151354
aaucccaauuuaugugacc

SEQ ID NO: 1151356 - RNA, 19 nt, Artificial Sequence
  Description of Artificial Sequence: Synthetic oligonucleotide
  Sense strand starting at position 2465 of SEQ ID NO: 916370
aguagaacuggauggguuu

SEQ ID NO: 1151357 - RNA, 19 nt, Artificial Sequence
  Description of Artificial Sequence: Synthetic oligonucleotide
  Antisense strand to SEQ ID NO: 1151356
aaacccauccaguucuacu

SEQ ID NO: 1151358 - RNA, 19 nt, Artificial Sequence
  Description of Artificial Sequence: Synthetic oligonucleotide
  Sense strand starting at position 2642 of SEQ ID NO: 916370
cuauacugauacuucgaua

SEQ ID NO: 1151359 - RNA, 19 nt, Artificial Sequence
  Description of Artificial Sequence: Synthetic oligonucleotide
  Antisense strand to SEQ ID NO: 1151358
uaucgaaguaucaguauag

SEQ ID NO: 1151360 - RNA, 19 nt, Artificial Sequence
  Description of Artificial Sequence: Synthetic oligonucleotide
  Sense strand starting at position 2676 of SEQ ID NO: 916370
acagaagaguaaccuuguu

SEQ ID NO: 1151361 - RNA, 19 nt, Artificial Sequence
  Description of Artificial Sequence: Synthetic oligonucleotide
  Antisense strand to SEQ ID NO: 1151360
aacaagguuacucuucugu

SEQ ID NO: 1151362 - RNA, 19 nt, Artificial Sequence
  Description of Artificial Sequence: Synthetic oligonucleotide
  Sense strand starting at position 2681 of SEQ ID NO: 916370
agaguaaccuuguuaauag

SEQ ID NO: 1151363 - RNA, 19 nt, Artificial Sequence
  Description of Artificial Sequence: Synthetic oligonucleotide
  Antisense strand to SEQ ID NO: 1151362
cuauuaacaagguuacucu

SEQ ID NO: 1151364 - RNA, 19 nt, Artificial Sequence
  Description of Artificial Sequence: Synthetic oligonucleotide
  Sense strand starting at position 2733 of SEQ ID NO: 916370
uguggaagagauuggcuau

SEQ ID NO: 1151365 - RNA, 19 nt, Artificial Sequence
  Description of Artificial Sequence: Synthetic oligonucleotide
  Antisense strand to SEQ ID NO: 1151364
auagccaaucucuuccaca

SEQ ID NO: 1151366 - RNA, 19 nt, Artificial Sequence
  Description of Artificial Sequence: Synthetic oligonucleotide
  Sense strand starting at position 2734 of SEQ ID NO: 916370
guggaagagauuggcuaua

SEQ ID NO: 1151367 - RNA, 19 nt, Artificial Sequence
  Description of Artificial Sequence: Synthetic oligonucleotide
  Antisense strand to SEQ ID NO: 1151366
uauagccaaucucuuccac

SEQ ID NO: 1151368 - RNA, 19 nt, Artificial Sequence
  Description of Artificial Sequence: Synthetic oligonucleotide
  Sense strand starting at position 2767 of SEQ ID NO: 916370
aggagagauuucgauccau

SEQ ID NO: 1151369 - RNA, 19 nt, Artificial Sequence
  Description of Artificial Sequence: Synthetic oligonucleotide
  Antisense strand to SEQ ID NO: 1151368
auggaucgaaaucucuccu

SEQ ID NO: 1151370 - RNA, 19 nt, Artificial Sequence
  Description of Artificial Sequence: Synthetic oligonucleotide
  Sense strand starting at position 3083 of SEQ ID NO: 916370
ugaagaauauaagcguaaa

SEQ ID NO: 1151371 - RNA, 19 nt, Artificial Sequence
  Description of Artificial Sequence: Synthetic oligonucleotide
  Antisense strand to SEQ ID NO: 1151370
uuuacgcuuauauucuuca

SEQ ID NO: 1151372 - RNA, 19 nt, Artificial Sequence
  Description of Artificial Sequence: Synthetic oligonucleotide
  Sense strand starting at position 3122 of SEQ ID NO: 916370
augcaaaucuuaguugaag

SEQ ID NO: 1151373 - RNA, 19 nt, Artificial Sequence
  Description of Artificial Sequence: Synthetic oligonucleotide
  Antisense strand to SEQ ID NO: 1151372
cuucaacuaagauuugcau

SEQ ID NO: 1151374 - RNA, 19 nt, Artificial Sequence
  Description of Artificial Sequence: Synthetic oligonucleotide
  Sense strand starting at position 3209 of SEQ ID NO: 916370
gaagaaaccugucugauac

SEQ ID NO: 1151375 - RNA, 19 nt, Artificial Sequence
  Description of Artificial Sequence: Synthetic oligonucleotide
  Antisense strand to SEQ ID NO: 1151374
guaucagacagguuucuuc

SEQ ID NO: 1151376 - RNA, 19 nt, Artificial Sequence
  Description of Artificial Sequence: Synthetic oligonucleotide
  Sense strand starting at position 3302 of SEQ ID NO: 916370
guacaaauuuaugacagaa

SEQ ID NO: 1151377 - RNA, 19 nt, Artificial Sequence
  Description of Artificial Sequence: Synthetic oligonucleotide
  Antisense strand to SEQ ID NO: 1151376
uucugucauaaauuuguac

SEQ ID NO: 1151378 - RNA, 19 nt, Artificial Sequence
  Description of Artificial Sequence: Synthetic oligonucleotide
  Sense strand starting at position 3320 of SEQ ID NO: 916370
augugcaauagggauuauu

SEQ ID NO: 1151379 - RNA, 19 nt, Artificial Sequence
  Description of Artificial Sequence: Synthetic oligonucleotide
  Antisense strand to SEQ ID NO: 1151378
aauaaucccuauugcacau

SEQ ID NO: 1151380 - RNA, 19 nt, Artificial Sequence
  Description of Artificial Sequence: Synthetic oligonucleotide
  Sense strand starting at position 3373 of SEQ ID NO: 916370
uuggaaguuagagguucua

SEQ ID NO: 1151381 - RNA, 19 nt, Artificial Sequence
  Description of Artificial Sequence: Synthetic oligonucleotide
  Antisense strand to SEQ ID NO: 1151380
uagaaccucuaacuuccaa

SEQ ID NO: 1151382 - RNA, 19 nt, Artificial Sequence
  Description of Artificial Sequence: Synthetic oligonucleotide
  Sense strand starting at position 3400 of SEQ ID NO: 916370
gaacccuguuuggugagaa

SEQ ID NO: 1151383 - RNA, 19 nt, Artificial Sequence
  Description of Artificial Sequence: Synthetic oligonucleotide
  Antisense strand to SEQ ID NO: 1151382
uucucaccaaacaggguuc

SEQ ID NO: 1151384 - RNA, 19 nt, Artificial Sequence
  Description of Artificial Sequence: Synthetic oligonucleotide
  Sense strand starting at position 3413 of SEQ ID NO: 916370
ugagaauacguccaucagu

SEQ ID NO: 1151385 - RNA, 19 nt, Artificial Sequence
  Description of Artificial Sequence: Synthetic oligonucleotide
  Antisense strand to SEQ ID NO: 1151384
acugauggacguauucuca

SEQ ID NO: 1151386 - RNA, 19 nt, Artificial Sequence
  Description of Artificial Sequence: Synthetic oligonucleotide
  Sense strand starting at position 3416 of SEQ ID NO: 916370
gaauacguccaucagucau

SEQ ID NO: 1151387 - RNA, 19 nt, Artificial Sequence
  Description of Artificial Sequence: Synthetic oligonucleotide
  Antisense strand to SEQ ID NO: 1151386
augacugauggacguauuc

SEQ ID NO: 1151388 - RNA, 19 nt, Artificial Sequence
  Description of Artificial Sequence: Synthetic oligonucleotide
  Sense strand starting at position 3498 of SEQ ID NO: 916370
ucaagaacuccaggcuuaa

SEQ ID NO: 1151389 - RNA, 19 nt, Artificial Sequence
  Description of Artificial Sequence: Synthetic oligonucleotide
  Antisense strand to SEQ ID NO: 1151388
uuaagccuggaguucuuga

SEQ ID NO: 1151390 - RNA, 19 nt, Artificial Sequence
  Description of Artificial Sequence: Synthetic oligonucleotide
  Sense strand starting at position 112 of SEQ ID NO: 916371
gaaucuaacuagguauugu

SEQ ID NO: 1151391 - RNA, 19 nt, Artificial Sequence
  Description of Artificial Sequence: Synthetic oligonucleotide
  Antisense strand to SEQ ID NO: 1151390
acaauaccuaguuagauuc

SEQ ID NO: 1151392 - RNA, 19 nt, Artificial Sequence
  Description of Artificial Sequence: Synthetic oligonucleotide
  Sense strand starting at position 187 of SEQ ID NO: 916371
gugcaugcucaauggaaua

SEQ ID NO: 1151393 - RNA, 19 nt, Artificial Sequence
  Description of Artificial Sequence: Synthetic oligonucleotide
  Antisense strand to SEQ ID NO: 1151392
uauuccauugagcaugcac

SEQ ID NO: 1151394 - RNA, 19 nt, Artificial Sequence
  Description of Artificial Sequence: Synthetic oligonucleotide
  Sense strand starting at position 199 of SEQ ID NO: 916371
uggaauauaucuuaaggau

SEQ ID NO: 1151395 - RNA, 19 nt, Artificial Sequence
  Description of Artificial Sequence: Synthetic oligonucleotide
  Antisense strand to SEQ ID NO: 1151394
auccuuaagauauauucca

SEQ ID NO: 1151396 - RNA, 19 nt, Artificial Sequence
  Description of Artificial Sequence: Synthetic oligonucleotide
  Sense strand starting at position 274 of SEQ ID NO: 916371
uuucuauagugauucugaa

SEQ ID NO: 1151397 - RNA, 19 nt, Artificial Sequence
  Description of Artificial Sequence: Synthetic oligonucleotide
  Antisense strand to SEQ ID NO: 1151396
uucagaaucacuauagaaa

SEQ ID NO: 1151398 - RNA, 19 nt, Artificial Sequence
  Description of Artificial Sequence: Synthetic oligonucleotide
  Sense strand starting at position 301 of SEQ ID NO: 916371
auauguauagugggauaga

SEQ ID NO: 1151399 - RNA, 19 nt, Artificial Sequence
  Description of Artificial Sequence: Synthetic oligonucleotide
  Antisense strand to SEQ ID NO: 1151398
ucuaucccacuauacauau

SEQ ID NO: 1151400 - RNA, 19 nt, Artificial Sequence
  Description of Artificial Sequence: Synthetic oligonucleotide
  Sense strand starting at position 517 of SEQ ID NO: 916371
auauuaguaugugucacuu

SEQ ID NO: 1151401 - RNA, 19 nt, Artificial Sequence
  Description of Artificial Sequence: Synthetic oligonucleotide
  Antisense strand to SEQ ID NO: 1151400
aagugacacauacuaauau

SEQ ID NO: 1151402 - RNA, 19 nt, Artificial Sequence
  Description of Artificial Sequence: Synthetic oligonucleotide
  Sense strand starting at position 575 of SEQ ID NO: 916371
gagagacauuuaugaacag

SEQ ID NO: 1151403 - RNA, 19 nt, Artificial Sequence
  Description of Artificial Sequence: Synthetic oligonucleotide
  Antisense strand to SEQ ID NO: 1151402
cuguucauaaaugucucuc

SEQ ID NO: 1151404 - RNA, 19 nt, Artificial Sequence
  Description of Artificial Sequence: Synthetic oligonucleotide
  Sense strand starting at position 899 of SEQ ID NO: 916371
cugugauuauuugugucuu

SEQ ID NO: 1151405 - RNA, 19 nt, Artificial Sequence
  Description of Artificial Sequence: Synthetic oligonucleotide
  Antisense strand to SEQ ID NO: 1151404
aagacacaaauaaucacag

SEQ ID NO: 1151406 - RNA, 19 nt, Artificial Sequence
  Description of Artificial Sequence: Synthetic oligonucleotide
  Sense strand starting at position 901 of SEQ ID NO: 916371
gugauuauuugugucuuua

SEQ ID NO: 1151407 - RNA, 19 nt, Artificial Sequence
  Description of Artificial Sequence: Synthetic oligonucleotide
  Antisense strand to SEQ ID NO: 1151406
uaaagacacaaauaaucac

SEQ ID NO: 1151408 - RNA, 19 nt, Artificial Sequence
  Description of Artificial Sequence: Synthetic oligonucleotide
  Sense strand starting at position 963 of SEQ ID NO: 916371
auggaauugcauuguguau

SEQ ID NO: 1151409 - RNA, 19 nt, Artificial Sequence
  Description of Artificial Sequence: Synthetic oligonucleotide
  Antisense strand to SEQ ID NO: 1151408
auacacaaugcaauuccau

SEQ ID NO: 1151410 - RNA, 19 nt, Artificial Sequence
  Description of Artificial Sequence: Synthetic oligonucleotide
  Sense strand starting at position 983 of SEQ ID NO: 916371
gaggguaugcuugaaguag

SEQ ID NO: 1151411 - RNA, 19 nt, Artificial Sequence
  Description of Artificial Sequence: Synthetic oligonucleotide
  Antisense strand to SEQ ID NO: 1151410
cuacuucaagcauacccuc

SEQ ID NO: 1151412 - RNA, 19 nt, Artificial Sequence
  Description of Artificial Sequence: Synthetic oligonucleotide
  Sense strand starting at position 987 of SEQ ID NO: 916371
guaugcuugaaguagcaaa

SEQ ID NO: 1151413 - RNA, 19 nt, Artificial Sequence
  Description of Artificial Sequence: Synthetic oligonucleotide
  Antisense strand to SEQ ID NO: 1151412
uuugcuacuucaagcauac

SEQ ID NO: 1151414 - RNA, 19 nt, Artificial Sequence
  Description of Artificial Sequence: Synthetic oligonucleotide
  Sense strand starting at position 1040 of SEQ ID NO: 916371
uugagucaacuuggugaaa

SEQ ID NO: 1151415 - RNA, 19 nt, Artificial Sequence
  Description of Artificial Sequence: Synthetic oligonucleotide
  Antisense strand to SEQ ID NO: 1151414
uuucaccaaguugacucaa

SEQ ID NO: 1151416 - RNA, 19 nt, Artificial Sequence
  Description of Artificial Sequence: Synthetic oligonucleotide
  Sense strand starting at position 1434 of SEQ ID NO: 916371
ggugaauggcagcaaauau

SEQ ID NO: 1151417 - RNA, 19 nt, Artificial Sequence
  Description of Artificial Sequence: Synthetic oligonucleotide
  Antisense strand to SEQ ID NO: 1151416
auauuugcugccauucacc

SEQ ID NO: 1151418 - RNA, 19 nt, Artificial Sequence
  Description of Artificial Sequence: Synthetic oligonucleotide
  Sense strand starting at position 1497 of SEQ ID NO: 916371
cucagagaauguccuuaag

SEQ ID NO: 1151419 - RNA, 19 nt, Artificial Sequence
  Description of Artificial Sequence: Synthetic oligonucleotide
  Antisense strand to SEQ ID NO: 1151418
cuuaaggacauucucugag

SEQ ID NO: 1151420 - RNA, 19 nt, Artificial Sequence
  Description of Artificial Sequence: Synthetic oligonucleotide
  Sense strand starting at position 1535 of SEQ ID NO: 916371
auuacaaguaaguguuagu

SEQ ID NO: 1151421 - RNA, 19 nt, Artificial Sequence
  Description of Artificial Sequence: Synthetic oligonucleotide
  Antisense strand to SEQ ID NO: 1151420
acuaacacuuacuuguaau

SEQ ID NO: 1151422 - RNA, 19 nt, Artificial Sequence
  Description of Artificial Sequence: Synthetic oligonucleotide
  Sense strand starting at position 1546 of SEQ ID NO: 916371
guguuaguuccacauugau

SEQ ID NO: 1151423 - RNA, 19 nt, Artificial Sequence
  Description of Artificial Sequence: Synthetic oligonucleotide
  Antisense strand to SEQ ID NO: 1151422
aucaauguggaacuaacac

SEQ ID NO: 1151424 - RNA, 19 nt, Artificial Sequence
  Description of Artificial Sequence: Synthetic oligonucleotide
  Sense strand starting at position 1636 of SEQ ID NO: 916371
uguauagugccggaaacug

SEQ ID NO: 1151425 - RNA, 19 nt, Artificial Sequence
  Description of Artificial Sequence: Synthetic oligonucleotide
  Antisense strand to SEQ ID NO: 1151424
caguuuccggcacuauaca

SEQ ID NO: 1151426 - RNA, 19 nt, Artificial Sequence
  Description of Artificial Sequence: Synthetic oligonucleotide
  Sense strand starting at position 1647 of SEQ ID NO: 916371
ggaaacugguguuucuuaa

SEQ ID NO: 1151427 - RNA, 19 nt, Artificial Sequence
  Description of Artificial Sequence: Synthetic oligonucleotide
  Antisense strand to SEQ ID NO: 1151426
uuaagaaacaccaguuucc

SEQ ID NO: 1151428 - RNA, 19 nt, Artificial Sequence
  Description of Artificial Sequence: Synthetic oligonucleotide
  Sense strand starting at position 1798 of SEQ ID NO: 916371
gggaaacuaccauguuaau

SEQ ID NO: 1151429 - RNA, 19 nt, Artificial Sequence
  Description of Artificial Sequence: Synthetic oligonucleotide
  Antisense strand to SEQ ID NO: 1151428
auuaacaugguaguuuccc

SEQ ID NO: 1151430 - RNA, 19 nt, Artificial Sequence
  Description of Artificial Sequence: Synthetic oligonucleotide
  Sense strand starting at position 2018 of SEQ ID NO: 916371
aucugcugcuaaucagaga

SEQ ID NO: 1151431 - RNA, 19 nt, Artificial Sequence
  Description of Artificial Sequence: Synthetic oligonucleotide
  Antisense strand to SEQ ID NO: 1151430
ucucugauuagcagcagau

SEQ ID NO: 1151432 - RNA, 19 nt, Artificial Sequence
  Description of Artificial Sequence: Synthetic oligonucleotide
  Sense strand starting at position 2128 of SEQ ID NO: 916371
guugcuuucccaugacaua

SEQ ID NO: 1151433 - RNA, 19 nt, Artificial Sequence
  Description of Artificial Sequence: Synthetic oligonucleotide
  Antisense strand to SEQ ID NO: 1151432
uaugucaugggaaagcaac

SEQ ID NO: 1151434 - RNA, 19 nt, Artificial Sequence
  Description of Artificial Sequence: Synthetic oligonucleotide
  Sense strand starting at position 2553 of SEQ ID NO: 916371
agacuaguacuacauaguu

SEQ ID NO: 1151435 - RNA, 19 nt, Artificial Sequence
  Description of Artificial Sequence: Synthetic oligonucleotide
  Antisense strand to SEQ ID NO: 1151434
aacuauguaguacuagucu

SEQ ID NO: 1151436 - RNA, 19 nt, Artificial Sequence
  Description of Artificial Sequence: Synthetic oligonucleotide
  Sense strand starting at position 2631 of SEQ ID NO: 916371
gucauucuccucuaugugu

SEQ ID NO: 1151437 - RNA, 19 nt, Artificial Sequence
  Description of Artificial Sequence: Synthetic oligonucleotide
  Antisense strand to SEQ ID NO: 1151436
acacauagaggagaaugac

SEQ ID NO: 1151438 - RNA, 19 nt, Artificial Sequence
  Description of Artificial Sequence: Synthetic oligonucleotide
  Sense strand starting at position 2714 of SEQ ID NO: 916371
ccuccauuaguuuguuaag

SEQ ID NO: 1151439 - RNA, 19 nt, Artificial Sequence
  Description of Artificial Sequence: Synthetic oligonucleotide
  Antisense strand to SEQ ID NO: 1151438
cuuaacaaacuaauggagg

SEQ ID NO: 1151440 - RNA, 19 nt, Artificial Sequence
  Description of Artificial Sequence: Synthetic oligonucleotide
  Sense strand starting at position 2809 of SEQ ID NO: 916371
uuuguauauguguaucaca

SEQ ID NO: 1151441 - RNA, 19 nt, Artificial Sequence
  Description of Artificial Sequence: Synthetic oligonucleotide
  Antisense strand to SEQ ID NO: 1151440
ugugauacacauauacaaa

SEQ ID NO: 1151442 - RNA, 19 nt, Artificial Sequence
  Description of Artificial Sequence: Synthetic oligonucleotide
  Sense strand starting at position 2892 of SEQ ID NO: 916371
cagugcugccaugaacaga

SEQ ID NO: 1151443 - RNA, 19 nt, Artificial Sequence
  Description of Artificial Sequence: Synthetic oligonucleotide
  Antisense strand to SEQ ID NO: 1151442
ucuguucauggcagcacug

SEQ ID NO: 1151444 - RNA, 19 nt, Artificial Sequence
  Description of Artificial Sequence: Synthetic oligonucleotide
  Sense strand starting at position 2920 of SEQ ID NO: 916371
gugucuuuaugauagauuu

SEQ ID NO: 1151445 - RNA, 19 nt, Artificial Sequence
  Description of Artificial Sequence: Synthetic oligonucleotide
  Antisense strand to SEQ ID NO: 1151444
aaaucuaucauaaagacac

SEQ ID NO: 1151446 - RNA, 19 nt, Artificial Sequence
  Description of Artificial Sequence: Synthetic oligonucleotide
  Sense strand starting at position 3050 of SEQ ID NO: 916371
ccaucaaagguguauaagu

SEQ ID NO: 1151447 - RNA, 19 nt, Artificial Sequence
  Description of Artificial Sequence: Synthetic oligonucleotide
  Antisense strand to SEQ ID NO: 1151446
acuuauacaccuuugaugg

SEQ ID NO: 1151448 - RNA, 19 nt, Artificial Sequence
  Description of Artificial Sequence: Synthetic oligonucleotide
  Sense strand starting at position 3124 of SEQ ID NO: 916371
uagccauucgacugguaug

SEQ ID NO: 1151449 - RNA, 19 nt, Artificial Sequence
  Description of Artificial Sequence: Synthetic oligonucleotide
  Antisense strand to SEQ ID NO: 1151448
cauaccagucgaauggcua

SEQ ID NO: 1151450 - RNA, 19 nt, Artificial Sequence
  Description of Artificial Sequence: Synthetic oligonucleotide
  Sense strand starting at position 3125 of SEQ ID NO: 916371
agccauucgacugguauga

SEQ ID NO: 1151451 - RNA, 19 nt, Artificial Sequence
  Description of Artificial Sequence: Synthetic oligonucleotide
  Antisense strand to SEQ ID NO: 1151450
ucauaccagucgaauggcu

SEQ ID NO: 1151452 - RNA, 19 nt, Artificial Sequence
  Description of Artificial Sequence: Synthetic oligonucleotide
  Sense strand starting at position 3129 of SEQ ID NO: 916371
auucgacugguaugagaug

SEQ ID NO: 1151453 - RNA, 19 nt, Artificial Sequence
  Description of Artificial Sequence: Synthetic oligonucleotide
  Antisense strand to SEQ ID NO: 1151452
caucucauaccagucgaau

SEQ ID NO: 1151454 - RNA, 19 nt, Artificial Sequence
  Description of Artificial Sequence: Synthetic oligonucleotide
  Sense strand starting at position 3182 of SEQ ID NO: 916371
augauuagugccuacugga

SEQ ID NO: 1151455 - RNA, 19 nt, Artificial Sequence
  Description of Artificial Sequence: Synthetic oligonucleotide
  Antisense strand to SEQ ID NO: 1151454
uccaguaggcacuaaucau

SEQ ID NO: 1151456 - RNA, 19 nt, Artificial Sequence
  Description of Artificial Sequence: Synthetic oligonucleotide
  Sense strand starting at position 3254 of SEQ ID NO: 916371
ggguuaauaccugggugaa

SEQ ID NO: 1151457 - RNA, 19 nt, Artificial Sequence
  Description of Artificial Sequence: Synthetic oligonucleotide
  Antisense strand to SEQ ID NO: 1151456
uucacccagguauuaaccc

SEQ ID NO: 1151458 - RNA, 19 nt, Artificial Sequence
  Description of Artificial Sequence: Synthetic oligonucleotide
  Sense strand starting at position 3255 of SEQ ID NO: 916371
gguuaauaccugggugaag

SEQ ID NO: 1151459 - RNA, 19 nt, Artificial Sequence
  Description of Artificial Sequence: Synthetic oligonucleotide
  Antisense strand to SEQ ID NO: 1151458
cuucacccagguauuaacc

SEQ ID NO: 1151460 - RNA, 19 nt, Artificial Sequence
  Description of Artificial Sequence: Synthetic oligonucleotide
  Sense strand starting at position 3256 of SEQ ID NO: 916371
guuaauaccugggugaaga

SEQ ID NO: 1151461 - RNA, 19 nt, Artificial Sequence
  Description of Artificial Sequence: Synthetic oligonucleotide
  Antisense strand to SEQ ID NO: 1151460
ucuucacccagguauuaac

SEQ ID NO: 1151462 - RNA, 19 nt, Artificial Sequence
  Description of Artificial Sequence: Synthetic oligonucleotide
  Sense strand starting at position 3887 of SEQ ID NO: 916371
cuguguccaggaugguaau

SEQ ID NO: 1151463 - RNA, 19 nt, Artificial Sequence
  Description of Artificial Sequence: Synthetic oligonucleotide
  Antisense strand to SEQ ID NO: 1151462
auuaccauccuggacacag

SEQ ID NO: 1151464 - RNA, 19 nt, Artificial Sequence
  Description of Artificial Sequence: Synthetic oligonucleotide
  Sense strand starting at position 3900 of SEQ ID NO: 916371
gguaauuccuagguuaucu

SEQ ID NO: 1151465 - RNA, 19 nt, Artificial Sequence
  Description of Artificial Sequence: Synthetic oligonucleotide
  Antisense strand to SEQ ID NO: 1151464
agauaaccuaggaauuacc

SEQ ID NO: 1151466 - RNA, 19 nt, Artificial Sequence
  Description of Artificial Sequence: Synthetic oligonucleotide
  Sense strand starting at position 3970 of SEQ ID NO: 916371
ugaguugagcuuuguauau

SEQ ID NO: 1151467 - RNA, 19 nt, Artificial Sequence
  Description of Artificial Sequence: Synthetic oligonucleotide
  Antisense strand to SEQ ID NO: 1151466
auauacaaagcucaacuca

SEQ ID NO: 1151468 - RNA, 19 nt, Artificial Sequence
  Description of Artificial Sequence: Synthetic oligonucleotide
  Sense strand starting at position 3974 of SEQ ID NO: 916371
uugagcuuuguauauggua

SEQ ID NO: 1151469 - RNA, 19 nt, Artificial Sequence
  Description of Artificial Sequence: Synthetic oligonucleotide
  Antisense strand to SEQ ID NO: 1151468
uaccauauacaaagcucaa

SEQ ID NO: 1151470 - RNA, 19 nt, Artificial Sequence
  Description of Artificial Sequence: Synthetic oligonucleotide
  Sense strand starting at position 182 of SEQ ID NO: 916372
uugcaagaacacuaauugu

SEQ ID NO: 1151471 - RNA, 19 nt, Artificial Sequence
  Description of Artificial Sequence: Synthetic oligonucleotide
  Antisense strand to SEQ ID NO: 1151470
acaauuaguguucuugcaa

SEQ ID NO: 1151472 - RNA, 19 nt, Artificial Sequence
  Description of Artificial Sequence: Synthetic oligonucleotide
  Sense strand starting at position 332 of SEQ ID NO: 916372
auucccuuaggucaguaau

SEQ ID NO: 1151473 - RNA, 19 nt, Artificial Sequence
  Description of Artificial Sequence: Synthetic oligonucleotide
  Antisense strand to SEQ ID NO: 1151472
auuacugaccuaagggaau

SEQ ID NO: 1151474 - RNA, 19 nt, Artificial Sequence
  Description of Artificial Sequence: Synthetic oligonucleotide
  Sense strand starting at position 334 of SEQ ID NO: 916372
ucccuuaggucaguaauaa

SEQ ID NO: 1151475 - RNA, 19 nt, Artificial Sequence
  Description of Artificial Sequence: Synthetic oligonucleotide
  Antisense strand to SEQ ID NO: 1151474
uuauuacugaccuaaggga

SEQ ID NO: 1151476 - RNA, 19 nt, Artificial Sequence
  Description of Artificial Sequence: Synthetic oligonucleotide
  Sense strand starting at position 335 of SEQ ID NO: 916372
cccuuaggucaguaauaac

SEQ ID NO: 1151477 - RNA, 19 nt, Artificial Sequence
  Description of Artificial Sequence: Synthetic oligonucleotide
  Antisense strand to SEQ ID NO: 1151476
guuauuacugaccuaaggg

SEQ ID NO: 1151478 - RNA, 19 nt, Artificial Sequence
  Description of Artificial Sequence: Synthetic oligonucleotide
  Sense strand starting at position 660 of SEQ ID NO: 916372
acauuuagucugugggcuu

SEQ ID NO: 1151479 - RNA, 19 nt, Artificial Sequence
  Description of Artificial Sequence: Synthetic oligonucleotide
  Antisense strand to SEQ ID NO: 1151478
aagcccacagacuaaaugu

SEQ ID NO: 1151480 - RNA, 19 nt, Artificial Sequence
  Description of Artificial Sequence: Synthetic oligonucleotide
  Sense strand starting at position 674 of SEQ ID NO: 916372
ggcuuuagggucugaauaa

SEQ ID NO: 1151481 - RNA, 19 nt, Artificial Sequence
  Description of Artificial Sequence: Synthetic oligonucleotide
  Antisense strand to SEQ ID NO: 1151480
uuauucagacccuaaagcc

SEQ ID NO: 1151482 - RNA, 19 nt, Artificial Sequence
  Description of Artificial Sequence: Synthetic oligonucleotide
  Sense strand starting at position 1039 of SEQ ID NO: 916372
ggaaguaaguuacuauuga

SEQ ID NO: 1151483 - RNA, 19 nt, Artificial Sequence
  Description of Artificial Sequence: Synthetic oligonucleotide
  Antisense strand to SEQ ID NO: 1151482
ucaauaguaacuuacuucc

SEQ ID NO: 1151484 - RNA, 19 nt, Artificial Sequence
  Description of Artificial Sequence: Synthetic oligonucleotide
  Sense strand starting at position 1157 of SEQ ID NO: 916372
aaguuugcauuugcuagau

SEQ ID NO: 1151485 - RNA, 19 nt, Artificial Sequence
  Description of Artificial Sequence: Synthetic oligonucleotide
  Antisense strand to SEQ ID NO: 1151484
aucuagcaaaugcaaacuu

SEQ ID NO: 1151486 - RNA, 19 nt, Artificial Sequence
  Description of Artificial Sequence: Synthetic oligonucleotide
  Sense strand starting at position 1182 of SEQ ID NO: 916372
ugagauuguacacgagaau

SEQ ID NO: 1151487 - RNA, 19 nt, Artificial Sequence
  Description of Artificial Sequence: Synthetic oligonucleotide
  Antisense strand to SEQ ID NO: 1151486
auucucguguacaaucuca

SEQ ID NO: 1151488 - RNA, 19 nt, Artificial Sequence
  Description of Artificial Sequence: Synthetic oligonucleotide
  Sense strand starting at position 1185 of SEQ ID NO: 916372
gauuguacacgagaauguu

SEQ ID NO: 1151489 - RNA, 19 nt, Artificial Sequence
  Description of Artificial Sequence: Synthetic oligonucleotide
  Antisense strand to SEQ ID NO: 1151488
aacauucucguguacaauc

SEQ ID NO: 1151490 - RNA, 19 nt, Artificial Sequence
  Description of Artificial Sequence: Synthetic oligonucleotide
  Sense strand starting at position 1242 of SEQ ID NO: 916372
cugaauuucuggccuaugu

SEQ ID NO: 1151491 - RNA, 19 nt, Artificial Sequence
  Description of Artificial Sequence: Synthetic oligonucleotide
  Antisense strand to SEQ ID NO: 1151490
acauaggccagaaauucag

SEQ ID NO: 1151492 - RNA, 19 nt, Artificial Sequence
  Description of Artificial Sequence: Synthetic oligonucleotide
  Sense strand starting at position 1597 of SEQ ID NO: 916372
aggauuacacaucgucaua

SEQ ID NO: 1151493 - RNA, 19 nt, Artificial Sequence
  Description of Artificial Sequence: Synthetic oligonucleotide
  Antisense strand to SEQ ID NO: 1151492
uaugacgauguguaauccu

SEQ ID NO: 1151494 - RNA, 19 nt, Artificial Sequence
  Description of Artificial Sequence: Synthetic oligonucleotide
  Sense strand starting at position 2057 of SEQ ID NO: 916372
acaggauguguugguaaau

SEQ ID NO: 1151495 - RNA, 19 nt, Artificial Sequence
  Description of Artificial Sequence: Synthetic oligonucleotide
  Antisense strand to SEQ ID NO: 1151494
auuuaccaacacauccugu

SEQ ID NO: 1151496 - RNA, 19 nt, Artificial Sequence
  Description of Artificial Sequence: Synthetic oligonucleotide
  Sense strand starting at position 2170 of SEQ ID NO: 916372
uuguguguuccugccacuu

SEQ ID NO: 1151497 - RNA, 19 nt, Artificial Sequence
  Description of Artificial Sequence: Synthetic oligonucleotide
  Antisense strand to SEQ ID NO: 1151496
aaguggcaggaacacacaa

SEQ ID NO: 1151498 - RNA, 19 nt, Artificial Sequence
  Description of Artificial Sequence: Synthetic oligonucleotide
  Sense strand starting at position 2283 of SEQ ID NO: 916372
cagaacaaaugucuaggua

SEQ ID NO: 1151499 - RNA, 19 nt, Artificial Sequence
  Description of Artificial Sequence: Synthetic oligonucleotide
  Antisense strand to SEQ ID NO: 1151498
uaccuagacauuuguucug

SEQ ID NO: 1151500 - RNA, 19 nt, Artificial Sequence
  Description of Artificial Sequence: Synthetic oligonucleotide
  Sense strand starting at position 2287 of SEQ ID NO: 916372
acaaaugucuagguaaaua

SEQ ID NO: 1151501 - RNA, 19 nt, Artificial Sequence
  Description of Artificial Sequence: Synthetic oligonucleotide
  Antisense strand to SEQ ID NO: 1151500
uauuuaccuagacauuugu

SEQ ID NO: 1151502 - RNA, 19 nt, Artificial Sequence
  Description of Artificial Sequence: Synthetic oligonucleotide
  Sense strand starting at position 2371 of SEQ ID NO: 916372
ccaaauaacgaugguuaga

SEQ ID NO: 1151503 - RNA, 19 nt, Artificial Sequence
  Description of Artificial Sequence: Synthetic oligonucleotide
  Antisense strand to SEQ ID NO: 1151502
ucuaaccaucguuauuugg

SEQ ID NO: 1151504 - RNA, 19 nt, Artificial Sequence
  Description of Artificial Sequence: Synthetic oligonucleotide
  Sense strand starting at position 2373 of SEQ ID NO: 916372
aaauaacgaugguuagaug

SEQ ID NO: 1151505 - RNA, 19 nt, Artificial Sequence
  Description of Artificial Sequence: Synthetic oligonucleotide
  Antisense strand to SEQ ID NO: 1151504
caucuaaccaucguuauuu

SEQ ID NO: 1151506 - RNA, 19 nt, Artificial Sequence
  Description of Artificial Sequence: Synthetic oligonucleotide
  Sense strand starting at position 2573 of SEQ ID NO: 916372
gaguccagauaguugauca

SEQ ID NO: 1151507 - RNA, 19 nt, Artificial Sequence
  Description of Artificial Sequence: Synthetic oligonucleotide
  Antisense strand to SEQ ID NO: 1151506
ugaucaacuaucuggacuc

SEQ ID NO: 1151508 - RNA, 19 nt, Artificial Sequence
  Description of Artificial Sequence: Synthetic oligonucleotide
  Sense strand starting at position 2577 of SEQ ID NO: 916372
ccagauaguugaucagaca

SEQ ID NO: 1151509 - RNA, 19 nt, Artificial Sequence
  Description of Artificial Sequence: Synthetic oligonucleotide
  Antisense strand to SEQ ID NO: 1151508
ugucugaucaacuaucugg

SEQ ID NO: 1151510 - RNA, 19 nt, Artificial Sequence
  Description of Artificial Sequence: Synthetic oligonucleotide
  Sense strand starting at position 2602 of SEQ ID NO: 916372
ugcuuauuucugugagggu

SEQ ID NO: 1151511 - RNA, 19 nt, Artificial Sequence
  Description of Artificial Sequence: Synthetic oligonucleotide
  Antisense strand to SEQ ID NO: 1151510
acccucacagaaauaagca

SEQ ID NO: 1151512 - RNA, 19 nt, Artificial Sequence
  Description of Artificial Sequence: Synthetic oligonucleotide
  Sense strand starting at position 2642 of SEQ ID NO: 916372
uuaaauaggugaccuuuga

SEQ ID NO: 1151513 - RNA, 19 nt, Artificial Sequence
  Description of Artificial Sequence: Synthetic oligonucleotide
  Antisense strand to SEQ ID NO: 1151512
ucaaaggucaccuauuuaa

SEQ ID NO: 1151514 - RNA, 19 nt, Artificial Sequence
  Description of Artificial Sequence: Synthetic oligonucleotide
  Sense strand starting at position 2650 of SEQ ID NO: 916372
gugaccuuugaguaaggca

SEQ ID NO: 1151515 - RNA, 19 nt, Artificial Sequence
  Description of Artificial Sequence: Synthetic oligonucleotide
  Antisense strand to SEQ ID NO: 1151514
ugccuuacucaaaggucac

SEQ ID NO: 1151516 - RNA, 19 nt, Artificial Sequence
  Description of Artificial Sequence: Synthetic oligonucleotide
  Sense strand starting at position 2668 of SEQ ID NO: 916372
agauuugccuccucuguaa

SEQ ID NO: 1151517 - RNA, 19 nt, Artificial Sequence
  Description of Artificial Sequence: Synthetic oligonucleotide
  Antisense strand to SEQ ID NO: 1151516
uuacagaggaggcaaaucu

SEQ ID NO: 1151518 - RNA, 19 nt, Artificial Sequence
  Description of Artificial Sequence: Synthetic oligonucleotide
  Sense strand starting at position 2994 of SEQ ID NO: 916372
guggccacucaauaucaau

SEQ ID NO: 1151519 - RNA, 19 nt, Artificial Sequence
  Description of Artificial Sequence: Synthetic oligonucleotide
  Antisense strand to SEQ ID NO: 1151518
auugauauugaguggccac

SEQ ID NO: 1151520 - RNA, 19 nt, Artificial Sequence
  Description of Artificial Sequence: Synthetic oligonucleotide
  Sense strand starting at position 3112 of SEQ ID NO: 916372
ugucacuugugaguauuua

SEQ ID NO: 1151521 - RNA, 19 nt, Artificial Sequence
  Description of Artificial Sequence: Synthetic oligonucleotide
  Antisense strand to SEQ ID NO: 1151520
uaaauacucacaagugaca

SEQ ID NO: 1151522 - RNA, 19 nt, Artificial Sequence
  Description of Artificial Sequence: Synthetic oligonucleotide
  Sense strand starting at position 3124 of SEQ ID NO: 916372
guauuuacaugggaaugaa

SEQ ID NO: 1151523 - RNA, 19 nt, Artificial Sequence
  Description of Artificial Sequence: Synthetic oligonucleotide
  Antisense strand to SEQ ID NO: 1151522
uucauucccauguaaauac

SEQ ID NO: 1151524 - RNA, 19 nt, Artificial Sequence
  Description of Artificial Sequence: Synthetic oligonucleotide
  Sense strand starting at position 3168 of SEQ ID NO: 916372
gcaugaucucuauauguac

SEQ ID NO: 1151525 - RNA, 19 nt, Artificial Sequence
  Description of Artificial Sequence: Synthetic oligonucleotide
  Antisense strand to SEQ ID NO: 1151524
guacauauagagaucaugc

SEQ ID NO: 1151526 - RNA, 19 nt, Artificial Sequence
  Description of Artificial Sequence: Synthetic oligonucleotide
  Sense strand starting at position 3224 of SEQ ID NO: 916372
uugaguuuccgacaaguca

SEQ ID NO: 1151527 - RNA, 19 nt, Artificial Sequence
  Description of Artificial Sequence: Synthetic oligonucleotide
  Antisense strand to SEQ ID NO: 1151526
ugacuugucggaaacucaa

SEQ ID NO: 1151528 - RNA, 19 nt, Artificial Sequence
  Description of Artificial Sequence: Synthetic oligonucleotide
  Sense strand starting at position 3275 of SEQ ID NO: 916372
gauguauuucucugagugc

SEQ ID NO: 1151529 - RNA, 19 nt, Artificial Sequence
  Description of Artificial Sequence: Synthetic oligonucleotide
  Antisense strand to SEQ ID NO: 1151528
gcacucagagaaauacauc

SEQ ID NO: 1151530 - RNA, 19 nt, Artificial Sequence
  Description of Artificial Sequence: Synthetic oligonucleotide
  Sense strand starting at position 3278 of SEQ ID NO: 916372
guauuucucugagugcuua

SEQ ID NO: 1151531 - RNA, 19 nt, Artificial Sequence
  Description of Artificial Sequence: Synthetic oligonucleotide
  Antisense strand to SEQ ID NO: 1151530
uaagcacucagagaaauac

SEQ ID NO: 1151532 - RNA, 19 nt, Artificial Sequence
  Description of Artificial Sequence: Synthetic oligonucleotide
  Sense strand starting at position 3522 of SEQ ID NO: 916372
uaugguugagguggagaua

SEQ ID NO: 1151533 - RNA, 19 nt, Artificial Sequence
  Description of Artificial Sequence: Synthetic oligonucleotide
  Antisense strand to SEQ ID NO: 1151532
uaucuccaccucaaccaua

SEQ ID NO: 1151534 - RNA, 19 nt, Artificial Sequence
  Description of Artificial Sequence: Synthetic oligonucleotide
  Sense strand starting at position 3686 of SEQ ID NO: 916372
gguucauugggucaaagug

SEQ ID NO: 1151535 - RNA, 19 nt, Artificial Sequence
  Description of Artificial Sequence: Synthetic oligonucleotide
  Antisense strand to SEQ ID NO: 1151534
cacuuugacccaaugaacc

SEQ ID NO: 1151536 - RNA, 19 nt, Artificial Sequence
  Description of Artificial Sequence: Synthetic oligonucleotide
  Sense strand starting at position 3701 of SEQ ID NO: 916372
aguggucaaguuggaucaa

SEQ ID NO: 1151537 - RNA, 19 nt, Artificial Sequence
  Description of Artificial Sequence: Synthetic oligonucleotide
  Antisense strand to SEQ ID NO: 1151536
uugauccaacuugaccacu

SEQ ID NO: 1151538 - RNA, 19 nt, Artificial Sequence
  Description of Artificial Sequence: Synthetic oligonucleotide
  Sense strand starting at position 3710 of SEQ ID NO: 916372
guuggaucaaguuaauggu

SEQ ID NO: 1151539 - RNA, 19 nt, Artificial Sequence
  Description of Artificial Sequence: Synthetic oligonucleotide
  Antisense strand to SEQ ID NO: 1151538
accauuaacuugauccaac

SEQ ID NO: 1151540 - RNA, 19 nt, Artificial Sequence
  Description of Artificial Sequence: Synthetic oligonucleotide
  Sense strand starting at position 3720 of SEQ ID NO: 916372
guuaaugguggugaacaua

SEQ ID NO: 1151541 - RNA, 19 nt, Artificial Sequence
  Description of Artificial Sequence: Synthetic oligonucleotide
  Antisense strand to SEQ ID NO: 1151540
uauguucaccaccauuaac

SEQ ID NO: 1151542 - RNA, 19 nt, Artificial Sequence
  Description of Artificial Sequence: Synthetic oligonucleotide
  Sense strand starting at position 3730 of SEQ ID NO: 916372
gugaacauaugucuuauaa

SEQ ID NO: 1151543 - RNA, 19 nt, Artificial Sequence
  Description of Artificial Sequence: Synthetic oligonucleotide
  Antisense strand to SEQ ID NO: 1151542
uuauaagacauauguucac

SEQ ID NO: 1151544 - RNA, 19 nt, Artificial Sequence
  Description of Artificial Sequence: Synthetic oligonucleotide
  Sense strand starting at position 3786 of SEQ ID NO: 916372
aacaguuggcaugauagca

SEQ ID NO: 1151545 - RNA, 19 nt, Artificial Sequence
  Description of Artificial Sequence: Synthetic oligonucleotide
  Antisense strand to SEQ ID NO: 1151544
ugcuaucaugccaacuguu

SEQ ID NO: 1151546 - RNA, 19 nt, Artificial Sequence
  Description of Artificial Sequence: Synthetic oligonucleotide
  Sense strand starting at position 3794 of SEQ ID NO: 916372
gcaugauagcaucaaugua

SEQ ID NO: 1151547 - RNA, 19 nt, Artificial Sequence
  Description of Artificial Sequence: Synthetic oligonucleotide
  Antisense strand to SEQ ID NO: 1151546
uacauugaugcuaucaugc

SEQ ID NO: 1151548 - RNA, 19 nt, Artificial Sequence
  Description of Artificial Sequence: Synthetic oligonucleotide
  Sense strand starting at position 3950 of SEQ ID NO: 916372
cuuguuauuucuguuugua

SEQ ID NO: 1151549 - RNA, 19 nt, Artificial Sequence
  Description of Artificial Sequence: Synthetic oligonucleotide
  Antisense strand to SEQ ID NO: 1151548
uacaaacagaaauaacaag

SEQ ID NO: 1151550 - RNA, 19 nt, Artificial Sequence
  Description of Artificial Sequence: Synthetic oligonucleotide
  Sense strand starting at position 246 of SEQ ID NO: 916373
guaaacugucguuauuaaa

SEQ ID NO: 1151551 - RNA, 19 nt, Artificial Sequence
  Description of Artificial Sequence: Synthetic oligonucleotide
  Antisense strand to SEQ ID NO: 1151550
uuuaauaacgacaguuuac

SEQ ID NO: 1151552 - RNA, 19 nt, Artificial Sequence
  Description of Artificial Sequence: Synthetic oligonucleotide
  Sense strand starting at position 283 of SEQ ID NO: 916373
ugaugccaaguuuaagaau

SEQ ID NO: 1151553 - RNA, 19 nt, Artificial Sequence
  Description of Artificial Sequence: Synthetic oligonucleotide
  Antisense strand to SEQ ID NO: 1151552
auucuuaaacuuggcauca

SEQ ID NO: 1151554 - RNA, 19 nt, Artificial Sequence
  Description of Artificial Sequence: Synthetic oligonucleotide
  Sense strand starting at position 315 of SEQ ID NO: 916373
auguuagcuguguugcaua

SEQ ID NO: 1151555 - RNA, 19 nt, Artificial Sequence
  Description of Artificial Sequence: Synthetic oligonucleotide
  Antisense strand to SEQ ID NO: 1151554
uaugcaacacagcuaacau

SEQ ID NO: 1151556 - RNA, 19 nt, Artificial Sequence
  Description of Artificial Sequence: Synthetic oligonucleotide
  Sense strand starting at position 317 of SEQ ID NO: 916373
guuagcuguguugcauaca

SEQ ID NO: 1151557 - RNA, 19 nt, Artificial Sequence
  Description of Artificial Sequence: Synthetic oligonucleotide
  Antisense strand to SEQ ID NO: 1151556
uguaugcaacacagcuaac

SEQ ID NO: 1151558 - RNA, 19 nt, Artificial Sequence
  Description of Artificial Sequence: Synthetic oligonucleotide
  Sense strand starting at position 408 of SEQ ID NO: 916373
cucauagugcaauagugua

SEQ ID NO: 1151559 - RNA, 19 nt, Artificial Sequence
  Description of Artificial Sequence: Synthetic oligonucleotide
  Antisense strand to SEQ ID NO: 1151558
uacacuauugcacuaugag

SEQ ID NO: 1151560 - RNA, 19 nt, Artificial Sequence
  Description of Artificial Sequence: Synthetic oligonucleotide
  Sense strand starting at position 413 of SEQ ID NO: 916373
agugcaauaguguagaaau

SEQ ID NO: 1151561 - RNA, 19 nt, Artificial Sequence
  Description of Artificial Sequence: Synthetic oligonucleotide
  Antisense strand to SEQ ID NO: 1151560
auuucuacacuauugcacu

SEQ ID NO: 1151562 - RNA, 19 nt, Artificial Sequence
  Description of Artificial Sequence: Synthetic oligonucleotide
  Sense strand starting at position 415 of SEQ ID NO: 916373
ugcaauaguguagaaauua

SEQ ID NO: 1151563 - RNA, 19 nt, Artificial Sequence
  Description of Artificial Sequence: Synthetic oligonucleotide
  Antisense strand to SEQ ID NO: 1151562
uaauuucuacacuauugca

SEQ ID NO: 1151564 - RNA, 19 nt, Artificial Sequence
  Description of Artificial Sequence: Synthetic oligonucleotide
  Sense strand starting at position 423 of SEQ ID NO: 916373
uguagaaauuacguguaac

SEQ ID NO: 1151565 - RNA, 19 nt, Artificial Sequence
  Description of Artificial Sequence: Synthetic oligonucleotide
  Antisense strand to SEQ ID NO: 1151564
guuacacguaauuucuaca

SEQ ID NO: 1151566 - RNA, 19 nt, Artificial Sequence
  Description of Artificial Sequence: Synthetic oligonucleotide
  Sense strand starting at position 426 of SEQ ID NO: 916373
agaaauuacguguaacgag

SEQ ID NO: 1151567 - RNA, 19 nt, Artificial Sequence
  Description of Artificial Sequence: Synthetic oligonucleotide
  Antisense strand to SEQ ID NO: 1151566
cucguuacacguaauuucu

SEQ ID NO: 1151568 - RNA, 19 nt, Artificial Sequence
  Description of Artificial Sequence: Synthetic oligonucleotide
  Sense strand starting at position 453 of SEQ ID NO: 916373
ugugaaguaagaugauauu

SEQ ID NO: 1151569 - RNA, 19 nt, Artificial Sequence
  Description of Artificial Sequence: Synthetic oligonucleotide
  Antisense strand to SEQ ID NO: 1151568
aauaucaucuuacuucaca

SEQ ID NO: 1151570 - RNA, 19 nt, Artificial Sequence
  Description of Artificial Sequence: Synthetic oligonucleotide
  Sense strand starting at position 577 of SEQ ID NO: 916373
auauguguguaucuaugga

SEQ ID NO: 1151571 - RNA, 19 nt, Artificial Sequence
  Description of Artificial Sequence: Synthetic oligonucleotide
  Antisense strand to SEQ ID NO: 1151570
uccauagauacacacauau

SEQ ID NO: 1151572 - RNA, 19 nt, Artificial Sequence
  Description of Artificial Sequence: Synthetic oligonucleotide
  Sense strand starting at position 582 of SEQ ID NO: 916373
uguguaucuauggaguauu

SEQ ID NO: 1151573 - RNA, 19 nt, Artificial Sequence
  Description of Artificial Sequence: Synthetic oligonucleotide
  Antisense strand to SEQ ID NO: 1151572
aauacuccauagauacaca

SEQ ID NO: 1151574 - RNA, 19 nt, Artificial Sequence
  Description of Artificial Sequence: Synthetic oligonucleotide
  Sense strand starting at position 725 of SEQ ID NO: 916373
acauuugcaucacaggaga

SEQ ID NO: 1151575 - RNA, 19 nt, Artificial Sequence
  Description of Artificial Sequence: Synthetic oligonucleotide
  Antisense strand to SEQ ID NO: 1151574
ucuccugugaugcaaaugu

SEQ ID NO: 1151576 - RNA, 19 nt, Artificial Sequence
  Description of Artificial Sequence: Synthetic oligonucleotide
  Sense strand starting at position 932 of SEQ ID NO: 916373
gugugugaccuugaacaua

SEQ ID NO: 1151577 - RNA, 19 nt, Artificial Sequence
  Description of Artificial Sequence: Synthetic oligonucleotide
  Antisense strand to SEQ ID NO: 1151576
uauguucaaggucacacac

SEQ ID NO: 1151578 - RNA, 19 nt, Artificial Sequence
  Description of Artificial Sequence: Synthetic oligonucleotide
  Sense strand starting at position 956 of SEQ ID NO: 916373
ugagauaugcauuacuucu

SEQ ID NO: 1151579 - RNA, 19 nt, Artificial Sequence
  Description of Artificial Sequence: Synthetic oligonucleotide
  Antisense strand to SEQ ID NO: 1151578
agaaguaaugcauaucuca

SEQ ID NO: 1151580 - RNA, 19 nt, Artificial Sequence
  Description of Artificial Sequence: Synthetic oligonucleotide
  Sense strand starting at position 1302 of SEQ ID NO: 916373
cucucagggcucuauguaa

SEQ ID NO: 1151581 - RNA, 19 nt, Artificial Sequence
  Description of Artificial Sequence: Synthetic oligonucleotide
  Antisense strand to SEQ ID NO: 1151580
uuacauagagcccugagag

SEQ ID NO: 1151582 - RNA, 19 nt, Artificial Sequence
  Description of Artificial Sequence: Synthetic oligonucleotide
  Sense strand starting at position 1354 of SEQ ID NO: 916373
agagacuauuaucuguagu

SEQ ID NO: 1151583 - RNA, 19 nt, Artificial Sequence
  Description of Artificial Sequence: Synthetic oligonucleotide
  Antisense strand to SEQ ID NO: 1151582
acuacagauaauagucucu

SEQ ID NO: 1151584 - RNA, 19 nt, Artificial Sequence
  Description of Artificial Sequence: Synthetic oligonucleotide
  Sense strand starting at position 1356 of SEQ ID NO: 916373
agacuauuaucuguaguuu

SEQ ID NO: 1151585 - RNA, 19 nt, Artificial Sequence
  Description of Artificial Sequence: Synthetic oligonucleotide
  Antisense strand to SEQ ID NO: 1151584
aaacuacagauaauagucu

SEQ ID NO: 1151586 - RNA, 19 nt, Artificial Sequence
  Description of Artificial Sequence: Synthetic oligonucleotide
  Sense strand starting at position 1364 of SEQ ID NO: 916373
aucuguaguuucuugauac

SEQ ID NO: 1151587 - RNA, 19 nt, Artificial Sequence
  Description of Artificial Sequence: Synthetic oligonucleotide
  Antisense strand to SEQ ID NO: 1151586
guaucaagaaacuacagau

SEQ ID NO: 1151588 - RNA, 19 nt, Artificial Sequence
  Description of Artificial Sequence: Synthetic oligonucleotide
  Sense strand starting at position 1454 of SEQ ID NO: 916373
aucaguuucuuuccugaca

SEQ ID NO: 1151589 - RNA, 19 nt, Artificial Sequence
  Description of Artificial Sequence: Synthetic oligonucleotide
  Antisense strand to SEQ ID NO: 1151588
ugucaggaaagaaacugau

SEQ ID NO: 1151590 - RNA, 19 nt, Artificial Sequence
  Description of Artificial Sequence: Synthetic oligonucleotide
  Sense strand starting at position 1481 of SEQ ID NO: 916373
acucguauccaccagcaaa

SEQ ID NO: 1151591 - RNA, 19 nt, Artificial Sequence
  Description of Artificial Sequence: Synthetic oligonucleotide
  Antisense strand to SEQ ID NO: 1151590
uuugcugguggauacgagu

SEQ ID NO: 1151592 - RNA, 19 nt, Artificial Sequence
  Description of Artificial Sequence: Synthetic oligonucleotide
  Sense strand starting at position 1657 of SEQ ID NO: 916373
uaaguuggguuucuaagau

SEQ ID NO: 1151593 - RNA, 19 nt, Artificial Sequence
  Description of Artificial Sequence: Synthetic oligonucleotide
  Antisense strand to SEQ ID NO: 1151592
aucuuagaaacccaacuua

SEQ ID NO: 1151594 - RNA, 19 nt, Artificial Sequence
  Description of Artificial Sequence: Synthetic oligonucleotide
  Sense strand starting at position 2040 of SEQ ID NO: 916373
ugugaagggauauguauca

SEQ ID NO: 1151595 - RNA, 19 nt, Artificial Sequence
  Description of Artificial Sequence: Synthetic oligonucleotide
  Antisense strand to SEQ ID NO: 1151594
ugauacauaucccuucaca

SEQ ID NO: 1151596 - RNA, 19 nt, Artificial Sequence
  Description of Artificial Sequence: Synthetic oligonucleotide
  Sense strand starting at position 2047 of SEQ ID NO: 916373
ggauauguaucagugagga

SEQ ID NO: 1151597 - RNA, 19 nt, Artificial Sequence
  Description of Artificial Sequence: Synthetic oligonucleotide
  Antisense strand to SEQ ID NO: 1151596
uccucacugauacauaucc

SEQ ID NO: 1151598 - RNA, 19 nt, Artificial Sequence
  Description of Artificial Sequence: Synthetic oligonucleotide
  Sense strand starting at position 2196 of SEQ ID NO: 916373
acuguagaugcucacuaaa

SEQ ID NO: 1151599 - RNA, 19 nt, Artificial Sequence
  Description of Artificial Sequence: Synthetic oligonucleotide
  Antisense strand to SEQ ID NO: 1151598
uuuagugagcaucuacagu

SEQ ID NO: 1151600 - RNA, 19 nt, Artificial Sequence
  Description of Artificial Sequence: Synthetic oligonucleotide
  Sense strand starting at position 2198 of SEQ ID NO: 916373
uguagaugcucacuaaaua

SEQ ID NO: 1151601 - RNA, 19 nt, Artificial Sequence
  Description of Artificial Sequence: Synthetic oligonucleotide
  Antisense strand to SEQ ID NO: 1151600
uauuuagugagcaucuaca

SEQ ID NO: 1151602 - RNA, 19 nt, Artificial Sequence
  Description of Artificial Sequence: Synthetic oligonucleotide
  Sense strand starting at position 2244 of SEQ ID NO: 916373
uaauucuguugagcaagga

SEQ ID NO: 1151603 - RNA, 19 nt, Artificial Sequence
  Description of Artificial Sequence: Synthetic oligonucleotide
  Antisense strand to SEQ ID NO: 1151602
uccuugcucaacagaauua

SEQ ID NO: 1151604 - RNA, 19 nt, Artificial Sequence
  Description of Artificial Sequence: Synthetic oligonucleotide
  Sense strand starting at position 2317 of SEQ ID NO: 916373
agugguuacuagcuaugaa

SEQ ID NO: 1151605 - RNA, 19 nt, Artificial Sequence
  Description of Artificial Sequence: Synthetic oligonucleotide
  Antisense strand to SEQ ID NO: 1151604
uucauagcuaguaaccacu

SEQ ID NO: 1151606 - RNA, 19 nt, Artificial Sequence
  Description of Artificial Sequence: Synthetic oligonucleotide
  Sense strand starting at position 2318 of SEQ ID NO: 916373
gugguuacuagcuaugaau

SEQ ID NO: 1151607 - RNA, 19 nt, Artificial Sequence
  Description of Artificial Sequence: Synthetic oligonucleotide
  Antisense strand to SEQ ID NO: 1151606
auucauagcuaguaaccac

SEQ ID NO: 1151608 - RNA, 19 nt, Artificial Sequence
  Description of Artificial Sequence: Synthetic oligonucleotide
  Sense strand starting at position 2376 of SEQ ID NO: 916373
aaaguagauguaugccaaa

SEQ ID NO: 1151609 - RNA, 19 nt, Artificial Sequence
  Description of Artificial Sequence: Synthetic oligonucleotide
  Antisense strand to SEQ ID NO: 1151608
uuuggcauacaucuacuuu

SEQ ID NO: 1151610 - RNA, 19 nt, Artificial Sequence
  Description of Artificial Sequence: Synthetic oligonucleotide
  Sense strand starting at position 2428 of SEQ ID NO: 916373
ggcagugauaagcaauaac

SEQ ID NO: 1151611 - RNA, 19 nt, Artificial Sequence
  Description of Artificial Sequence: Synthetic oligonucleotide
  Antisense strand to SEQ ID NO: 1151610
guuauugcuuaucacugcc

SEQ ID NO: 1151612 - RNA, 19 nt, Artificial Sequence
  Description of Artificial Sequence: Synthetic oligonucleotide
  Sense strand starting at position 2463 of SEQ ID NO: 916373
ugcauaugccuggaaucac

SEQ ID NO: 1151613 - RNA, 19 nt, Artificial Sequence
  Description of Artificial Sequence: Synthetic oligonucleotide
  Antisense strand to SEQ ID NO: 1151612
gugauuccaggcauaugca

SEQ ID NO: 1151614 - RNA, 19 nt, Artificial Sequence
  Description of Artificial Sequence: Synthetic oligonucleotide
  Sense strand starting at position 3134 of SEQ ID NO: 916373
cagggagugcuuuauauua

SEQ ID NO: 1151615 - RNA, 19 nt, Artificial Sequence
  Description of Artificial Sequence: Synthetic oligonucleotide
  Antisense strand to SEQ ID NO: 1151614
uaauauaaagcacucccug

SEQ ID NO: 1151616 - RNA, 19 nt, Artificial Sequence
  Description of Artificial Sequence: Synthetic oligonucleotide
  Sense strand starting at position 3288 of SEQ ID NO: 916373
cauugugauccuugagaga

SEQ ID NO: 1151617 - RNA, 19 nt, Artificial Sequence
  Description of Artificial Sequence: Synthetic oligonucleotide
  Antisense strand to SEQ ID NO: 1151616
ucucucaaggaucacaaug

SEQ ID NO: 1151618 - RNA, 19 nt, Artificial Sequence
  Description of Artificial Sequence: Synthetic oligonucleotide
  Sense strand starting at position 3307 of SEQ ID NO: 916373
auacaaaggugagugcaau

SEQ ID NO: 1151619 - RNA, 19 nt, Artificial Sequence
  Description of Artificial Sequence: Synthetic oligonucleotide
  Antisense strand to SEQ ID NO: 1151618
auugcacucaccuuuguau

SEQ ID NO: 1151620 - RNA, 19 nt, Artificial Sequence
  Description of Artificial Sequence: Synthetic oligonucleotide
  Sense strand starting at position 3317 of SEQ ID NO: 916373
gagugcaaugaucacccua

SEQ ID NO: 1151621 - RNA, 19 nt, Artificial Sequence
  Description of Artificial Sequence: Synthetic oligonucleotide
  Antisense strand to SEQ ID NO: 1151620
uagggugaucauugcacuc

SEQ ID NO: 1151622 - RNA, 19 nt, Artificial Sequence
  Description of Artificial Sequence: Synthetic oligonucleotide
  Sense strand starting at position 3414 of SEQ ID NO: 916373
gaggcagauauuggaguuu

SEQ ID NO: 1151623 - RNA, 19 nt, Artificial Sequence
  Description of Artificial Sequence: Synthetic oligonucleotide
  Antisense strand to SEQ ID NO: 1151622
aaacuccaauaucugccuc

SEQ ID NO: 1151624 - RNA, 19 nt, Artificial Sequence
  Description of Artificial Sequence: Synthetic oligonucleotide
  Sense strand starting at position 3438 of SEQ ID NO: 916373
ugcuuaaauggcuggaauu

SEQ ID NO: 1151625 - RNA, 19 nt, Artificial Sequence
  Description of Artificial Sequence: Synthetic oligonucleotide
  Antisense strand to SEQ ID NO: 1151624
aauuccagccauuuaagca

SEQ ID NO: 1151626 - RNA, 19 nt, Artificial Sequence
  Description of Artificial Sequence: Synthetic oligonucleotide
  Sense strand starting at position 3562 of SEQ ID NO: 916373
gcaaguccaagcugagaua

SEQ ID NO: 1151627 - RNA, 19 nt, Artificial Sequence
  Description of Artificial Sequence: Synthetic oligonucleotide
  Antisense strand to SEQ ID NO: 1151626
uaucucagcuuggacuugc

SEQ ID NO: 1151628 - RNA, 19 nt, Artificial Sequence
  Description of Artificial Sequence: Synthetic oligonucleotide
  Sense strand starting at position 3767 of SEQ ID NO: 916373
auggaauauuagucuuaga

SEQ ID NO: 1151629 - RNA, 19 nt, Artificial Sequence
  Description of Artificial Sequence: Synthetic oligonucleotide
  Antisense strand to SEQ ID NO: 1151628
ucuaagacuaauauuccau

SEQ ID NO: 1151630 - RNA, 19 nt, Artificial Sequence
  Description of Artificial Sequence: Synthetic oligonucleotide
  Sense strand starting at position 111 of SEQ ID NO: 916374
uguaauaccuaacucaguu

SEQ ID NO: 1151631 - RNA, 19 nt, Artificial Sequence
  Description of Artificial Sequence: Synthetic oligonucleotide
  Antisense strand to SEQ ID NO: 1151630
aacugaguuagguauuaca

SEQ ID NO: 1151632 - RNA, 19 nt, Artificial Sequence
  Description of Artificial Sequence: Synthetic oligonucleotide
  Sense strand starting at position 225 of SEQ ID NO: 916374
uguuaccaacugugaauaa

SEQ ID NO: 1151633 - RNA, 19 nt, Artificial Sequence
  Description of Artificial Sequence: Synthetic oligonucleotide
  Antisense strand to SEQ ID NO: 1151632
uuauucacaguugguaaca

SEQ ID NO: 1151634 - RNA, 19 nt, Artificial Sequence
  Description of Artificial Sequence: Synthetic oligonucleotide
  Sense strand starting at position 285 of SEQ ID NO: 916374
acauacaugucaguugauu

SEQ ID NO: 1151635 - RNA, 19 nt, Artificial Sequence
  Description of Artificial Sequence: Synthetic oligonucleotide
  Antisense strand to SEQ ID NO: 1151634
aaucaacugacauguaugu

SEQ ID NO: 1151636 - RNA, 19 nt, Artificial Sequence
  Description of Artificial Sequence: Synthetic oligonucleotide
  Sense strand starting at position 343 of SEQ ID NO: 916374
augccuguauuugauagaa

SEQ ID NO: 1151637 - RNA, 19 nt, Artificial Sequence
  Description of Artificial Sequence: Synthetic oligonucleotide
  Antisense strand to SEQ ID NO: 1151636
uucuaucaaauacaggcau

SEQ ID NO: 1151638 - RNA, 19 nt, Artificial Sequence
  Description of Artificial Sequence: Synthetic oligonucleotide
  Sense strand starting at position 407 of SEQ ID NO: 916374
aaaucuagagagcgguaaa

SEQ ID NO: 1151639 - RNA, 19 nt, Artificial Sequence
  Description of Artificial Sequence: Synthetic oligonucleotide
  Antisense strand to SEQ ID NO: 1151638
uuuaccgcucucuagauuu

SEQ ID NO: 1151640 - RNA, 19 nt, Artificial Sequence
  Description of Artificial Sequence: Synthetic oligonucleotide
  Sense strand starting at position 482 of SEQ ID NO: 916374
caaguugugagcgacuuua

SEQ ID NO: 1151641 - RNA, 19 nt, Artificial Sequence
  Description of Artificial Sequence: Synthetic oligonucleotide
  Antisense strand to SEQ ID NO: 1151640
uaaagucgcucacaacuug

SEQ ID NO: 1151642 - RNA, 19 nt, Artificial Sequence
  Description of Artificial Sequence: Synthetic oligonucleotide
  Sense strand starting at position 492 of SEQ ID NO: 916374
gcgacuuuaccauaauaua

SEQ ID NO: 1151643 - RNA, 19 nt, Artificial Sequence
  Description of Artificial Sequence: Synthetic oligonucleotide
  Antisense strand to SEQ ID NO: 1151642
uauauuaugguaaagucgc

SEQ ID NO: 1151644 - RNA, 19 nt, Artificial Sequence
  Description of Artificial Sequence: Synthetic oligonucleotide
  Sense strand starting at position 651 of SEQ ID NO: 916374
augaaauucuugguaucuu

SEQ ID NO: 1151645 - RNA, 19 nt, Artificial Sequence
  Description of Artificial Sequence: Synthetic oligonucleotide
  Antisense strand to SEQ ID NO: 1151644
aagauaccaagaauuucau

SEQ ID NO: 1151646 - RNA, 19 nt, Artificial Sequence
  Description of Artificial Sequence: Synthetic oligonucleotide
  Sense strand starting at position 919 of SEQ ID NO: 916374
ugugcaugccuuuaagaaa

SEQ ID NO: 1151647 - RNA, 19 nt, Artificial Sequence
  Description of Artificial Sequence: Synthetic oligonucleotide
  Antisense strand to SEQ ID NO: 1151646
uuucuuaaaggcaugcaca

SEQ ID NO: 1151648 - RNA, 19 nt, Artificial Sequence
  Description of Artificial Sequence: Synthetic oligonucleotide
  Sense strand starting at position 1166 of SEQ ID NO: 916374
gaucaaguguuuccaguug

SEQ ID NO: 1151649 - RNA, 19 nt, Artificial Sequence
  Description of Artificial Sequence: Synthetic oligonucleotide
  Antisense strand to SEQ ID NO: 1151648
caacuggaaacacuugauc

SEQ ID NO: 1151650 - RNA, 19 nt, Artificial Sequence
  Description of Artificial Sequence: Synthetic oligonucleotide
  Sense strand starting at position 1173 of SEQ ID NO: 916374
uguuuccaguuguuuauuu

SEQ ID NO: 1151651 - RNA, 19 nt, Artificial Sequence
  Description of Artificial Sequence: Synthetic oligonucleotide
  Antisense strand to SEQ ID NO: 1151650
aaauaaacaacuggaaaca

SEQ ID NO: 1151652 - RNA, 19 nt, Artificial Sequence
  Description of Artificial Sequence: Synthetic oligonucleotide
  Sense strand starting at position 1289 of SEQ ID NO: 916374
gugcccauaucaucaucau

SEQ ID NO: 1151653 - RNA, 19 nt, Artificial Sequence
  Description of Artificial Sequence: Synthetic oligonucleotide
  Antisense strand to SEQ ID NO: 1151652
augaugaugauaugggcac

SEQ ID NO: 1151654 - RNA, 19 nt, Artificial Sequence
  Description of Artificial Sequence: Synthetic oligonucleotide
  Sense strand starting at position 1505 of SEQ ID NO: 916374
auguaaagauguguaucaa

SEQ ID NO: 1151655 - RNA, 19 nt, Artificial Sequence
  Description of Artificial Sequence: Synthetic oligonucleotide
  Antisense strand to SEQ ID NO: 1151654
uugauacacaucuuuacau

SEQ ID NO: 1151656 - RNA, 19 nt, Artificial Sequence
  Description of Artificial Sequence: Synthetic oligonucleotide
  Sense strand starting at position 1506 of SEQ ID NO: 916374
uguaaagauguguaucaaa

SEQ ID NO: 1151657 - RNA, 19 nt, Artificial Sequence
  Description of Artificial Sequence: Synthetic oligonucleotide
  Antisense strand to SEQ ID NO: 1151656
uuugauacacaucuuuaca

SEQ ID NO: 1151658 - RNA, 19 nt, Artificial Sequence
  Description of Artificial Sequence: Synthetic oligonucleotide
  Sense strand starting at position 1513 of SEQ ID NO: 916374
auguguaucaaagguaagu

SEQ ID NO: 1151659 - RNA, 19 nt, Artificial Sequence
  Description of Artificial Sequence: Synthetic oligonucleotide
  Antisense strand to SEQ ID NO: 1151658
acuuaccuuugauacacau

SEQ ID NO: 1151660 - RNA, 19 nt, Artificial Sequence
  Description of Artificial Sequence: Synthetic oligonucleotide
  Sense strand starting at position 1633 of SEQ ID NO: 916374
agacaaggcuucuucuuau

SEQ ID NO: 1151661 - RNA, 19 nt, Artificial Sequence
  Description of Artificial Sequence: Synthetic oligonucleotide
  Antisense strand to SEQ ID NO: 1151660
auaagaagaagccuugucu

SEQ ID NO: 1151662 - RNA, 19 nt, Artificial Sequence
  Description of Artificial Sequence: Synthetic oligonucleotide
  Sense strand starting at position 1904 of SEQ ID NO: 916374
agaucuugauucuugugga

SEQ ID NO: 1151663 - RNA, 19 nt, Artificial Sequence
  Description of Artificial Sequence: Synthetic oligonucleotide
  Antisense strand to SEQ ID NO: 1151662
uccacaagaaucaagaucu

SEQ ID NO: 1151664 - RNA, 19 nt, Artificial Sequence
  Description of Artificial Sequence: Synthetic oligonucleotide
  Sense strand starting at position 1950 of SEQ ID NO: 916374
uuagauauguccucaguuc

SEQ ID NO: 1151665 - RNA, 19 nt, Artificial Sequence
  Description of Artificial Sequence: Synthetic oligonucleotide
  Antisense strand to SEQ ID NO: 1151664
gaacugaggacauaucuaa

SEQ ID NO: 1151666 - RNA, 19 nt, Artificial Sequence
  Description of Artificial Sequence: Synthetic oligonucleotide
  Sense strand starting at position 1961 of SEQ ID NO: 916374
cucaguuccugaucuagaa

SEQ ID NO: 1151667 - RNA, 19 nt, Artificial Sequence
  Description of Artificial Sequence: Synthetic oligonucleotide
  Antisense strand to SEQ ID NO: 1151666
uucuagaucaggaacugag

SEQ ID NO: 1151668 - RNA, 19 nt, Artificial Sequence
  Description of Artificial Sequence: Synthetic oligonucleotide
  Sense strand starting at position 1987 of SEQ ID NO: 916374
uggagauacuuagugaauu

SEQ ID NO: 1151669 - RNA, 19 nt, Artificial Sequence
  Description of Artificial Sequence: Synthetic oligonucleotide
  Antisense strand to SEQ ID NO: 1151668
aauucacuaaguaucucca

SEQ ID NO: 1151670 - RNA, 19 nt, Artificial Sequence
  Description of Artificial Sequence: Synthetic oligonucleotide
  Sense strand starting at position 1988 of SEQ ID NO: 916374
ggagauacuuagugaauuu

SEQ ID NO: 1151671 - RNA, 19 nt, Artificial Sequence
  Description of Artificial Sequence: Synthetic oligonucleotide
  Antisense strand to SEQ ID NO: 1151670
aaauucacuaaguaucucc

SEQ ID NO: 1151672 - RNA, 19 nt, Artificial Sequence
  Description of Artificial Sequence: Synthetic oligonucleotide
  Sense strand starting at position 2003 of SEQ ID NO: 916374
auuucuaucuuugagaaag

SEQ ID NO: 1151673 - RNA, 19 nt, Artificial Sequence
  Description of Artificial Sequence: Synthetic oligonucleotide
  Antisense strand to SEQ ID NO: 1151672
cuuucucaaagauagaaau

SEQ ID NO: 1151674 - RNA, 19 nt, Artificial Sequence
  Description of Artificial Sequence: Synthetic oligonucleotide
  Sense strand starting at position 2014 of SEQ ID NO: 916374
ugagaaagaugugacaaau

SEQ ID NO: 1151675 - RNA, 19 nt, Artificial Sequence
  Description of Artificial Sequence: Synthetic oligonucleotide
  Antisense strand to SEQ ID NO: 1151674
auuugucacaucuuucuca

SEQ ID NO: 1151676 - RNA, 19 nt, Artificial Sequence
  Description of Artificial Sequence: Synthetic oligonucleotide
  Sense strand starting at position 2126 of SEQ ID NO: 916374
ccacccauuguuggauaaa

SEQ ID NO: 1151677 - RNA, 19 nt, Artificial Sequence
  Description of Artificial Sequence: Synthetic oligonucleotide
  Antisense strand to SEQ ID NO: 1151676
uuuauccaacaaugggugg

SEQ ID NO: 1151678 - RNA, 19 nt, Artificial Sequence
  Description of Artificial Sequence: Synthetic oligonucleotide
  Sense strand starting at position 2129 of SEQ ID NO: 916374
cccauuguuggauaaaugu

SEQ ID NO: 1151679 - RNA, 19 nt, Artificial Sequence
  Description of Artificial Sequence: Synthetic oligonucleotide
  Antisense strand to SEQ ID NO: 1151678
acauuuauccaacaauggg

SEQ ID NO: 1151680 - RNA, 19 nt, Artificial Sequence
  Description of Artificial Sequence: Synthetic oligonucleotide
  Sense strand starting at position 2305 of SEQ ID NO: 916374
agcagaauucuacauguac

SEQ ID NO: 1151681 - RNA, 19 nt, Artificial Sequence
  Description of Artificial Sequence: Synthetic oligonucleotide
  Antisense strand to SEQ ID NO: 1151680
guacauguagaauucugcu

SEQ ID NO: 1151682 - RNA, 19 nt, Artificial Sequence
  Description of Artificial Sequence: Synthetic oligonucleotide
  Sense strand starting at position 2494 of SEQ ID NO: 916374
aagucaugugcauagauua

SEQ ID NO: 1151683 - RNA, 19 nt, Artificial Sequence
  Description of Artificial Sequence: Synthetic oligonucleotide
  Antisense strand to SEQ ID NO: 1151682
uaaucuaugcacaugacuu

SEQ ID NO: 1151684 - RNA, 19 nt, Artificial Sequence
  Description of Artificial Sequence: Synthetic oligonucleotide
  Sense strand starting at position 2531 of SEQ ID NO: 916374
ugcagauaaagugggaaau

SEQ ID NO: 1151685 - RNA, 19 nt, Artificial Sequence
  Description of Artificial Sequence: Synthetic oligonucleotide
  Antisense strand to SEQ ID NO: 1151684
auuucccacuuuaucugca

SEQ ID NO: 1151686 - RNA, 19 nt, Artificial Sequence
  Description of Artificial Sequence: Synthetic oligonucleotide
  Sense strand starting at position 2532 of SEQ ID NO: 916374
gcagauaaagugggaaauu

SEQ ID NO: 1151687 - RNA, 19 nt, Artificial Sequence
  Description of Artificial Sequence: Synthetic oligonucleotide
  Antisense strand to SEQ ID NO: 1151686
aauuucccacuuuaucugc

SEQ ID NO: 1151688 - RNA, 19 nt, Artificial Sequence
  Description of Artificial Sequence: Synthetic oligonucleotide
  Sense strand starting at position 2541 of SEQ ID NO: 916374
gugggaaauuagcuccuau

SEQ ID NO: 1151689 - RNA, 19 nt, Artificial Sequence
  Description of Artificial Sequence: Synthetic oligonucleotide
  Antisense strand to SEQ ID NO: 1151688
auaggagcuaauuucccac

SEQ ID NO: 1151690 - RNA, 19 nt, Artificial Sequence
  Description of Artificial Sequence: Synthetic oligonucleotide
  Sense strand starting at position 2673 of SEQ ID NO: 916374
acaucauaugcaggagaau

SEQ ID NO: 1151691 - RNA, 19 nt, Artificial Sequence
  Description of Artificial Sequence: Synthetic oligonucleotide
  Antisense strand to SEQ ID NO: 1151690
auucuccugcauaugaugu

SEQ ID NO: 1151692 - RNA, 19 nt, Artificial Sequence
  Description of Artificial Sequence: Synthetic oligonucleotide
  Sense strand starting at position 2734 of SEQ ID NO: 916374
augaauugauaccaaugaa

SEQ ID NO: 1151693 - RNA, 19 nt, Artificial Sequence
  Description of Artificial Sequence: Synthetic oligonucleotide
  Antisense strand to SEQ ID NO: 1151692
uucauugguaucaauucau

SEQ ID NO: 1151694 - RNA, 19 nt, Artificial Sequence
  Description of Artificial Sequence: Synthetic oligonucleotide
  Sense strand starting at position 2918 of SEQ ID NO: 916374
auguguuaaaguuggacaa

SEQ ID NO: 1151695 - RNA, 19 nt, Artificial Sequence
  Description of Artificial Sequence: Synthetic oligonucleotide
  Antisense strand to SEQ ID NO: 1151694
uuguccaacuuuaacacau

SEQ ID NO: 1151696 - RNA, 19 nt, Artificial Sequence
  Description of Artificial Sequence: Synthetic oligonucleotide
  Sense strand starting at position 2919 of SEQ ID NO: 916374
uguguuaaaguuggacaau

SEQ ID NO: 1151697 - RNA, 19 nt, Artificial Sequence
  Description of Artificial Sequence: Synthetic oligonucleotide
  Antisense strand to SEQ ID NO: 1151696
auuguccaacuuuaacaca

SEQ ID NO: 1151698 - RNA, 19 nt, Artificial Sequence
  Description of Artificial Sequence: Synthetic oligonucleotide
  Sense strand starting at position 2964 of SEQ ID NO: 916374
agcgaaugcuauuugcuau

SEQ ID NO: 1151699 - RNA, 19 nt, Artificial Sequence
  Description of Artificial Sequence: Synthetic oligonucleotide
  Antisense strand to SEQ ID NO: 1151698
auagcaaauagcauucgcu

SEQ ID NO: 1151700 - RNA, 19 nt, Artificial Sequence
  Description of Artificial Sequence: Synthetic oligonucleotide
  Sense strand starting at position 2965 of SEQ ID NO: 916374
gcgaaugcuauuugcuaug

SEQ ID NO: 1151701 - RNA, 19 nt, Artificial Sequence
  Description of Artificial Sequence: Synthetic oligonucleotide
  Antisense strand to SEQ ID NO: 1151700
cauagcaaauagcauucgc

SEQ ID NO: 1151702 - RNA, 19 nt, Artificial Sequence
  Description of Artificial Sequence: Synthetic oligonucleotide
  Sense strand starting at position 3548 of SEQ ID NO: 916374
ggaaauauaggcugauauu

SEQ ID NO: 1151703 - RNA, 19 nt, Artificial Sequence
  Description of Artificial Sequence: Synthetic oligonucleotide
  Antisense strand to SEQ ID NO: 1151702
aauaucagccuauauuucc

SEQ ID NO: 1151704 - RNA, 19 nt, Artificial Sequence
  Description of Artificial Sequence: Synthetic oligonucleotide
  Sense strand starting at position 3655 of SEQ ID NO: 916374
aucacaauuuccugaagag

SEQ ID NO: 1151705 - RNA, 19 nt, Artificial Sequence
  Description of Artificial Sequence: Synthetic oligonucleotide
  Antisense strand to SEQ ID NO: 1151704
cucuucaggaaauugugau

SEQ ID NO: 1151706 - RNA, 19 nt, Artificial Sequence
  Description of Artificial Sequence: Synthetic oligonucleotide
  Sense strand starting at position 3699 of SEQ ID NO: 916374
uugaauagagauugucucu

SEQ ID NO: 1151707 - RNA, 19 nt, Artificial Sequence
  Description of Artificial Sequence: Synthetic oligonucleotide
  Antisense strand to SEQ ID NO: 1151706
agagacaaucucuauucaa

SEQ ID NO: 1151708 - RNA, 19 nt, Artificial Sequence
  Description of Artificial Sequence: Synthetic oligonucleotide
  Sense strand starting at position 3777 of SEQ ID NO: 916374
cuaccuauuucguuuaguu

SEQ ID NO: 1151709 - RNA, 19 nt, Artificial Sequence
  Description of Artificial Sequence: Synthetic oligonucleotide
  Antisense strand to SEQ ID NO: 1151708
aacuaaacgaaauagguag

SEQ ID NO: 1151710 - RNA, 19 nt, Artificial Sequence
  Description of Artificial Sequence: Synthetic oligonucleotide
  Sense strand starting at position 109 of SEQ ID NO: 916375
cuguguugugccuaagacu

SEQ ID NO: 1151711 - RNA, 19 nt, Artificial Sequence
  Description of Artificial Sequence: Synthetic oligonucleotide
  Antisense strand to SEQ ID NO: 1151710
agucuuaggcacaacacag

SEQ ID NO: 1151712 - RNA, 19 nt, Artificial Sequence
  Description of Artificial Sequence: Synthetic oligonucleotide
  Sense strand starting at position 194 of SEQ ID NO: 916375
gcacguuugcgggcaguca

SEQ ID NO: 1151713 - RNA, 19 nt, Artificial Sequence
  Description of Artificial Sequence: Synthetic oligonucleotide
  Antisense strand to SEQ ID NO: 1151712
ugacugcccgcaaacgugc

SEQ ID NO: 1151714 - RNA, 19 nt, Artificial Sequence
  Description of Artificial Sequence: Synthetic oligonucleotide
  Sense strand starting at position 345 of SEQ ID NO: 916375
agcuauggauuccuuguaa

SEQ ID NO: 1151715 - RNA, 19 nt, Artificial Sequence
  Description of Artificial Sequence: Synthetic oligonucleotide
  Antisense strand to SEQ ID NO: 1151714
uuacaaggaauccauagcu

SEQ ID NO: 1151716 - RNA, 19 nt, Artificial Sequence
  Description of Artificial Sequence: Synthetic oligonucleotide
  Sense strand starting at position 356 of SEQ ID NO: 916375
ccuuguaagccucagcaca

SEQ ID NO: 1151717 - RNA, 19 nt, Artificial Sequence
  Description of Artificial Sequence: Synthetic oligonucleotide
  Antisense strand to SEQ ID NO: 1151716
ugugcugaggcuuacaagg

SEQ ID NO: 1151718 - RNA, 19 nt, Artificial Sequence
  Description of Artificial Sequence: Synthetic oligonucleotide
  Sense strand starting at position 358 of SEQ ID NO: 916375
uuguaagccucagcacauu

SEQ ID NO: 1151719 - RNA, 19 nt, Artificial Sequence
  Description of Artificial Sequence: Synthetic oligonucleotide
  Antisense strand to SEQ ID NO: 1151718
aaugugcugaggcuuacaa

SEQ ID NO: 1151720 - RNA, 19 nt, Artificial Sequence
  Description of Artificial Sequence: Synthetic oligonucleotide
  Sense strand starting at position 369 of SEQ ID NO: 916375
agcacauugcuguacacaa

SEQ ID NO: 1151721 - RNA, 19 nt, Artificial Sequence
  Description of Artificial Sequence: Synthetic oligonucleotide
  Antisense strand to SEQ ID NO: 1151720
uuguguacagcaaugugcu

SEQ ID NO: 1151722 - RNA, 19 nt, Artificial Sequence
  Description of Artificial Sequence: Synthetic oligonucleotide
  Sense strand starting at position 571 of SEQ ID NO: 916375
ugaucagugcucuguagag

SEQ ID NO: 1151723 - RNA, 19 nt, Artificial Sequence
  Description of Artificial Sequence: Synthetic oligonucleotide
  Antisense strand to SEQ ID NO: 1151722
cucuacagagcacugauca

SEQ ID NO: 1151724 - RNA, 19 nt, Artificial Sequence
  Description of Artificial Sequence: Synthetic oligonucleotide
  Sense strand starting at position 573 of SEQ ID NO: 916375
aucagugcucuguagagua

SEQ ID NO: 1151725 - RNA, 19 nt, Artificial Sequence
  Description of Artificial Sequence: Synthetic oligonucleotide
  Antisense strand to SEQ ID NO: 1151724
uacucuacagagcacugau

SEQ ID NO: 1151726 - RNA, 19 nt, Artificial Sequence
  Description of Artificial Sequence: Synthetic oligonucleotide
  Sense strand starting at position 575 of SEQ ID NO: 916375
cagugcucuguagaguaca

SEQ ID NO: 1151727 - RNA, 19 nt, Artificial Sequence
  Description of Artificial Sequence: Synthetic oligonucleotide
  Antisense strand to SEQ ID NO: 1151726
uguacucuacagagcacug

SEQ ID NO: 1151728 - RNA, 19 nt, Artificial Sequence
  Description of Artificial Sequence: Synthetic oligonucleotide
  Sense strand starting at position 622 of SEQ ID NO: 916375
uugcccuaugaccaaagau

SEQ ID NO: 1151729 - RNA, 19 nt, Artificial Sequence
  Description of Artificial Sequence: Synthetic oligonucleotide
  Antisense strand to SEQ ID NO: 1151728
aucuuuggucauagggcaa

SEQ ID NO: 1151730 - RNA, 19 nt, Artificial Sequence
  Description of Artificial Sequence: Synthetic oligonucleotide
  Sense strand starting at position 745 of SEQ ID NO: 916375
gugguaaagccguggacau

SEQ ID NO: 1151731 - RNA, 19 nt, Artificial Sequence
  Description of Artificial Sequence: Synthetic oligonucleotide
  Antisense strand to SEQ ID NO: 1151730
auguccacggcuuuaccac

SEQ ID NO: 1151732 - RNA, 19 nt, Artificial Sequence
  Description of Artificial Sequence: Synthetic oligonucleotide
  Sense strand starting at position 983 of SEQ ID NO: 916375
cugugagaucccugagaag

SEQ ID NO: 1151733 - RNA, 19 nt, Artificial Sequence
  Description of Artificial Sequence: Synthetic oligonucleotide
  Antisense strand to SEQ ID NO: 1151732
cuucucagggaucucacag

SEQ ID NO: 1151734 - RNA, 19 nt, Artificial Sequence
  Description of Artificial Sequence: Synthetic oligonucleotide
  Sense strand starting at position 986 of SEQ ID NO: 916375
ugagaucccugagaagaug

SEQ ID NO: 1151735 - RNA, 19 nt, Artificial Sequence
  Description of Artificial Sequence: Synthetic oligonucleotide
  Antisense strand to SEQ ID NO: 1151734
caucuucucagggaucuca

SEQ ID NO: 1151736 - RNA, 19 nt, Artificial Sequence
  Description of Artificial Sequence: Synthetic oligonucleotide
  Sense strand starting at position 1140 of SEQ ID NO: 916375
gaggauugcuggcucagga

SEQ ID NO: 1151737 - RNA, 19 nt, Artificial Sequence
  Description of Artificial Sequence: Synthetic oligonucleotide
  Antisense strand to SEQ ID NO: 1151736
uccugagccagcaauccuc

SEQ ID NO: 1151738 - RNA, 19 nt, Artificial Sequence
  Description of Artificial Sequence: Synthetic oligonucleotide
  Sense strand starting at position 1245 of SEQ ID NO: 916375
aaaccaaucugugauaggu

SEQ ID NO: 1151739 - RNA, 19 nt, Artificial Sequence
  Description of Artificial Sequence: Synthetic oligonucleotide
  Antisense strand to SEQ ID NO: 1151738
accuaucacagauugguuu

SEQ ID NO: 1151740 - RNA, 19 nt, Artificial Sequence
  Description of Artificial Sequence: Synthetic oligonucleotide
  Sense strand starting at position 1669 of SEQ ID NO: 916375
gcacuuggguccucagaag

SEQ ID NO: 1151741 - RNA, 19 nt, Artificial Sequence
  Description of Artificial Sequence: Synthetic oligonucleotide
  Antisense strand to SEQ ID NO: 1151740
cuucugaggacccaagugc

SEQ ID NO: 1151742 - RNA, 19 nt, Artificial Sequence
  Description of Artificial Sequence: Synthetic oligonucleotide
  Sense strand starting at position 1690 of SEQ ID NO: 916375
gcagguccaucagcugaau

SEQ ID NO: 1151743 - RNA, 19 nt, Artificial Sequence
  Description of Artificial Sequence: Synthetic oligonucleotide
  Antisense strand to SEQ ID NO: 1151742
auucagcugauggaccugc

SEQ ID NO: 1151744 - RNA, 19 nt, Artificial Sequence
  Description of Artificial Sequence: Synthetic oligonucleotide
  Sense strand starting at position 1693 of SEQ ID NO: 916375
gguccaucagcugaauaaa

SEQ ID NO: 1151745 - RNA, 19 nt, Artificial Sequence
  Description of Artificial Sequence: Synthetic oligonucleotide
  Antisense strand to SEQ ID NO: 1151744
uuuauucagcugauggacc

SEQ ID NO: 1151746 - RNA, 19 nt, Artificial Sequence
  Description of Artificial Sequence: Synthetic oligonucleotide
  Sense strand starting at position 1762 of SEQ ID NO: 916375
ucaccagacgcaugagauu

SEQ ID NO: 1151747 - RNA, 19 nt, Artificial Sequence
  Description of Artificial Sequence: Synthetic oligonucleotide
  Antisense strand to SEQ ID NO: 1151746
aaucucaugcgucugguga

SEQ ID NO: 1151748 - RNA, 19 nt, Artificial Sequence
  Description of Artificial Sequence: Synthetic oligonucleotide
  Sense strand starting at position 1768 of SEQ ID NO: 916375
gacgcaugagauuauccaa

SEQ ID NO: 1151749 - RNA, 19 nt, Artificial Sequence
  Description of Artificial Sequence: Synthetic oligonucleotide
  Antisense strand to SEQ ID NO: 1151748
uuggauaaucucaugcguc

SEQ ID NO: 1151750 - RNA, 19 nt, Artificial Sequence
  Description of Artificial Sequence: Synthetic oligonucleotide
  Sense strand starting at position 1790 of SEQ ID NO: 916375
cugaguggaucagagugau

SEQ ID NO: 1151751 - RNA, 19 nt, Artificial Sequence
  Description of Artificial Sequence: Synthetic oligonucleotide
  Antisense strand to SEQ ID NO: 1151750
aucacucugauccacucag

SEQ ID NO: 1151752 - RNA, 19 nt, Artificial Sequence
  Description of Artificial Sequence: Synthetic oligonucleotide
  Sense strand starting at position 1831 of SEQ ID NO: 916375
agaacaaaguuguuccauu

SEQ ID NO: 1151753 - RNA, 19 nt, Artificial Sequence
  Description of Artificial Sequence: Synthetic oligonucleotide
  Antisense strand to SEQ ID NO: 1151752
aauggaacaacuuuguucu

SEQ ID NO: 1151754 - RNA, 19 nt, Artificial Sequence
  Description of Artificial Sequence: Synthetic oligonucleotide
  Sense strand starting at position 1898 of SEQ ID NO: 916375
aauguaagguugccaauga

SEQ ID NO: 1151755 - RNA, 19 nt, Artificial Sequence
  Description of Artificial Sequence: Synthetic oligonucleotide
  Antisense strand to SEQ ID NO: 1151754
ucauuggcaaccuuacauu

SEQ ID NO: 1151756 - RNA, 19 nt, Artificial Sequence
  Description of Artificial Sequence: Synthetic oligonucleotide
  Sense strand starting at position 1957 of SEQ ID NO: 916375
gguucugaaucuuuauccu

SEQ ID NO: 1151757 - RNA, 19 nt, Artificial Sequence
  Description of Artificial Sequence: Synthetic oligonucleotide
  Antisense strand to SEQ ID NO: 1151756
aggauaaagauucagaacc

SEQ ID NO: 1151758 - RNA, 19 nt, Artificial Sequence
  Description of Artificial Sequence: Synthetic oligonucleotide
  Sense strand starting at position 2097 of SEQ ID NO: 916375
ccagaauccugggaagaag

SEQ ID NO: 1151759 - RNA, 19 nt, Artificial Sequence
  Description of Artificial Sequence: Synthetic oligonucleotide
  Antisense strand to SEQ ID NO: 1151758
cuucuucccaggauucugg

SEQ ID NO: 1151760 - RNA, 19 nt, Artificial Sequence
  Description of Artificial Sequence: Synthetic oligonucleotide
  Sense strand starting at position 2283 of SEQ ID NO: 916375
caggcuccucuguaagagu

SEQ ID NO: 1151761 - RNA, 19 nt, Artificial Sequence
  Description of Artificial Sequence: Synthetic oligonucleotide
  Antisense strand to SEQ ID NO: 1151760
acucuuacagaggagccug

SEQ ID NO: 1151762 - RNA, 19 nt, Artificial Sequence
  Description of Artificial Sequence: Synthetic oligonucleotide
  Sense strand starting at position 2596 of SEQ ID NO: 916375
uuguuucuacgaggacauc

SEQ ID NO: 1151763 - RNA, 19 nt, Artificial Sequence
  Description of Artificial Sequence: Synthetic oligonucleotide
  Antisense strand to SEQ ID NO: 1151762
gauguccucguagaaacaa

SEQ ID NO: 1151764 - RNA, 19 nt, Artificial Sequence
  Description of Artificial Sequence: Synthetic oligonucleotide
  Sense strand starting at position 2734 of SEQ ID NO: 916375
ggucauugcccuuagcaac

SEQ ID NO: 1151765 - RNA, 19 nt, Artificial Sequence
  Description of Artificial Sequence: Synthetic oligonucleotide
  Antisense strand to SEQ ID NO: 1151764
guugcuaagggcaaugacc

SEQ ID NO: 1151766 - RNA, 19 nt, Artificial Sequence
  Description of Artificial Sequence: Synthetic oligonucleotide
  Sense strand starting at position 2793 of SEQ ID NO: 916375
agaaguggaccuugagagu

SEQ ID NO: 1151767 - RNA, 19 nt, Artificial Sequence
  Description of Artificial Sequence: Synthetic oligonucleotide
  Antisense strand to SEQ ID NO: 1151766
acucucaagguccacuucu

SEQ ID NO: 1151768 - RNA, 19 nt, Artificial Sequence
  Description of Artificial Sequence: Synthetic oligonucleotide
  Sense strand starting at position 2804 of SEQ ID NO: 916375
uugagaguuacugagcaug

SEQ ID NO: 1151769 - RNA, 19 nt, Artificial Sequence
  Description of Artificial Sequence: Synthetic oligonucleotide
  Antisense strand to SEQ ID NO: 1151768
caugcucaguaacucucaa

SEQ ID NO: 1151770 - RNA, 19 nt, Artificial Sequence
  Description of Artificial Sequence: Synthetic oligonucleotide
  Sense strand starting at position 3009 of SEQ ID NO: 916375
cuaagaaaugcgugccugu

SEQ ID NO: 1151771 - RNA, 19 nt, Artificial Sequence
  Description of Artificial Sequence: Synthetic oligonucleotide
  Antisense strand to SEQ ID NO: 1151770
acaggcacgcauuucuuag

SEQ ID NO: 1151772 - RNA, 19 nt, Artificial Sequence
  Description of Artificial Sequence: Synthetic oligonucleotide
  Sense strand starting at position 3074 of SEQ ID NO: 916375
gacuuacaccuuugggcau

SEQ ID NO: 1151773 - RNA, 19 nt, Artificial Sequence
  Description of Artificial Sequence: Synthetic oligonucleotide
  Antisense strand to SEQ ID NO: 1151772
augcccaaagguguaaguc

SEQ ID NO: 1151774 - RNA, 19 nt, Artificial Sequence
  Description of Artificial Sequence: Synthetic oligonucleotide
  Sense strand starting at position 3211 of SEQ ID NO: 916375
gcagcuuguagugggaaau

SEQ ID NO: 1151775 - RNA, 19 nt, Artificial Sequence
  Description of Artificial Sequence: Synthetic oligonucleotide
  Antisense strand to SEQ ID NO: 1151774
auuucccacuacaagcugc

SEQ ID NO: 1151776 - RNA, 19 nt, Artificial Sequence
  Description of Artificial Sequence: Synthetic oligonucleotide
  Sense strand starting at position 3256 of SEQ ID NO: 916375
gguauacaguguuccuaga

SEQ ID NO: 1151777 - RNA, 19 nt, Artificial Sequence
  Description of Artificial Sequence: Synthetic oligonucleotide
  Antisense strand to SEQ ID NO: 1151776
ucuaggaacacuguauacc

SEQ ID NO: 1151778 - RNA, 19 nt, Artificial Sequence
  Description of Artificial Sequence: Synthetic oligonucleotide
  Sense strand starting at position 3258 of SEQ ID NO: 916375
uauacaguguuccuagaga

SEQ ID NO: 1151779 - RNA, 19 nt, Artificial Sequence
  Description of Artificial Sequence: Synthetic oligonucleotide
  Antisense strand to SEQ ID NO: 1151778
ucucuaggaacacuguaua

SEQ ID NO: 1151780 - RNA, 19 nt, Artificial Sequence
  Description of Artificial Sequence: Synthetic oligonucleotide
  Sense strand starting at position 3263 of SEQ ID NO: 916375
aguguuccuagagaaagug

SEQ ID NO: 1151781 - RNA, 19 nt, Artificial Sequence
  Description of Artificial Sequence: Synthetic oligonucleotide
  Antisense strand to SEQ ID NO: 1151780
cacuuucucuaggaacacu

SEQ ID NO: 1151782 - RNA, 19 nt, Artificial Sequence
  Description of Artificial Sequence: Synthetic oligonucleotide
  Sense strand starting at position 3442 of SEQ ID NO: 916375
gccacuuacgguugaauga

SEQ ID NO: 1151783 - RNA, 19 nt, Artificial Sequence
  Description of Artificial Sequence: Synthetic oligonucleotide
  Antisense strand to SEQ ID NO: 1151782
ucauucaaccguaaguggc

SEQ ID NO: 1151784 - RNA, 19 nt, Artificial Sequence
  Description of Artificial Sequence: Synthetic oligonucleotide
  Sense strand starting at position 3453 of SEQ ID NO: 916375
uugaaugacugggacagau

SEQ ID NO: 1151785 - RNA, 19 nt, Artificial Sequence
  Description of Artificial Sequence: Synthetic oligonucleotide
  Antisense strand to SEQ ID NO: 1151784
aucugucccagucauucaa

SEQ ID NO: 1151786 - RNA, 19 nt, Artificial Sequence
  Description of Artificial Sequence: Synthetic oligonucleotide
  Sense strand starting at position 3591 of SEQ ID NO: 916375
ggagacaugucacaggaaa

SEQ ID NO: 1151787 - RNA, 19 nt, Artificial Sequence
  Description of Artificial Sequence: Synthetic oligonucleotide
  Antisense strand to SEQ ID NO: 1151786
uuuccugugacaugucucc

SEQ ID NO: 1151788 - RNA, 19 nt, Artificial Sequence
  Description of Artificial Sequence: Synthetic oligonucleotide
  Sense strand starting at position 3654 of SEQ ID NO: 916375
aguaaagcaucaccugaua

SEQ ID NO: 1151789 - RNA, 19 nt, Artificial Sequence
  Description of Artificial Sequence: Synthetic oligonucleotide
  Antisense strand to SEQ ID NO: 1151788
uaucaggugaugcuuuacu

SEQ ID NO: 1151790 - RNA, 19 nt, Artificial Sequence
  Description of Artificial Sequence: Synthetic oligonucleotide
  Sense strand starting at position 424 of SEQ ID NO: 916376
acaguuugccgucaauauc

SEQ ID NO: 1151791 - RNA, 19 nt, Artificial Sequence
  Description of Artificial Sequence: Synthetic oligonucleotide
  Antisense strand to SEQ ID NO: 1151790
gauauugacggcaaacugu

SEQ ID NO: 1151792 - RNA, 19 nt, Artificial Sequence
  Description of Artificial Sequence: Synthetic oligonucleotide
  Sense strand starting at position 447 of SEQ ID NO: 916376
uguuccacaucccuagauu

SEQ ID NO: 1151793 - RNA, 19 nt, Artificial Sequence
  Description of Artificial Sequence: Synthetic oligonucleotide
  Antisense strand to SEQ ID NO: 1151792
aaucuagggauguggaaca

SEQ ID NO: 1151794 - RNA, 19 nt, Artificial Sequence
  Description of Artificial Sequence: Synthetic oligonucleotide
  Sense strand starting at position 487 of SEQ ID NO: 916376
uuacacuguuacgcaagau

SEQ ID NO: 1151795 - RNA, 19 nt, Artificial Sequence
  Description of Artificial Sequence: Synthetic oligonucleotide
  Antisense strand to SEQ ID NO: 1151794
aucuugcguaacaguguaa

SEQ ID NO: 1151796 - RNA, 19 nt, Artificial Sequence
  Description of Artificial Sequence: Synthetic oligonucleotide
  Sense strand starting at position 491 of SEQ ID NO: 916376
acuguuacgcaagauaaga

SEQ ID NO: 1151797 - RNA, 19 nt, Artificial Sequence
  Description of Artificial Sequence: Synthetic oligonucleotide
  Antisense strand to SEQ ID NO: 1151796
ucuuaucuugcguaacagu

SEQ ID NO: 1151798 - RNA, 19 nt, Artificial Sequence
  Description of Artificial Sequence: Synthetic oligonucleotide
  Sense strand starting at position 539 of SEQ ID NO: 916376
agauguuccuaggcuacau

SEQ ID NO: 1151799 - RNA, 19 nt, Artificial Sequence
  Description of Artificial Sequence: Synthetic oligonucleotide
  Antisense strand to SEQ ID NO: 1151798
auguagccuaggaacaucu

SEQ ID NO: 1151800 - RNA, 19 nt, Artificial Sequence
  Description of Artificial Sequence: Synthetic oligonucleotide
  Sense strand starting at position 819 of SEQ ID NO: 916376
cagaacaaugcuugguuga

SEQ ID NO: 1151801 - RNA, 19 nt, Artificial Sequence
  Description of Artificial Sequence: Synthetic oligonucleotide
  Antisense strand to SEQ ID NO: 1151800
ucaaccaagcauuguucug

SEQ ID NO: 1151802 - RNA, 19 nt, Artificial Sequence
  Description of Artificial Sequence: Synthetic oligonucleotide
  Sense strand starting at position 820 of SEQ ID NO: 916376
agaacaaugcuugguugau

SEQ ID NO: 1151803 - RNA, 19 nt, Artificial Sequence
  Description of Artificial Sequence: Synthetic oligonucleotide
  Antisense strand to SEQ ID NO: 1151802
aucaaccaagcauuguucu

SEQ ID NO: 1151804 - RNA, 19 nt, Artificial Sequence
  Description of Artificial Sequence: Synthetic oligonucleotide
  Sense strand starting at position 821 of SEQ ID NO: 916376
gaacaaugcuugguugaug

SEQ ID NO: 1151805 - RNA, 19 nt, Artificial Sequence
  Description of Artificial Sequence: Synthetic oligonucleotide
  Antisense strand to SEQ ID NO: 1151804
caucaaccaagcauuguuc

SEQ ID NO: 1151806 - RNA, 19 nt, Artificial Sequence
  Description of Artificial Sequence: Synthetic oligonucleotide
  Sense strand starting at position 857 of SEQ ID NO: 916376
gguguuagcuaauuuguua

SEQ ID NO: 1151807 - RNA, 19 nt, Artificial Sequence
  Description of Artificial Sequence: Synthetic oligonucleotide
  Antisense strand to SEQ ID NO: 1151806
uaacaaauuagcuaacacc

SEQ ID NO: 1151808 - RNA, 19 nt, Artificial Sequence
  Description of Artificial Sequence: Synthetic oligonucleotide
  Sense strand starting at position 870 of SEQ ID NO: 916376
uuguuauugggcugagaau

SEQ ID NO: 1151809 - RNA, 19 nt, Artificial Sequence
  Description of Artificial Sequence: Synthetic oligonucleotide
  Antisense strand to SEQ ID NO: 1151808
auucucagcccaauaacaa

SEQ ID NO: 1151810 - RNA, 19 nt, Artificial Sequence
  Description of Artificial Sequence: Synthetic oligonucleotide
  Sense strand starting at position 871 of SEQ ID NO: 916376
uguuauugggcugagaauu

SEQ ID NO: 1151811 - RNA, 19 nt, Artificial Sequence
  Description of Artificial Sequence: Synthetic oligonucleotide
  Antisense strand to SEQ ID NO: 1151810
aauucucagcccaauaaca

SEQ ID NO: 1151812 - RNA, 19 nt, Artificial Sequence
  Description of Artificial Sequence: Synthetic oligonucleotide
  Sense strand starting at position 877 of SEQ ID NO: 916376
ugggcugagaauugaagau

SEQ ID NO: 1151813 - RNA, 19 nt, Artificial Sequence
  Description of Artificial Sequence: Synthetic oligonucleotide
  Antisense strand to SEQ ID NO: 1151812
aucuucaauucucagccca

SEQ ID NO: 1151814 - RNA, 19 nt, Artificial Sequence
  Description of Artificial Sequence: Synthetic oligonucleotide
  Sense strand starting at position 1042 of SEQ ID NO: 916376
auaccuuuaugggucucaa

SEQ ID NO: 1151815 - RNA, 19 nt, Artificial Sequence
  Description of Artificial Sequence: Synthetic oligonucleotide
  Antisense strand to SEQ ID NO: 1151814
uugagacccauaaagguau

SEQ ID NO: 1151816 - RNA, 19 nt, Artificial Sequence
  Description of Artificial Sequence: Synthetic oligonucleotide
  Sense strand starting at position 1199 of SEQ ID NO: 916376
ugucuuugccauuaugaag

SEQ ID NO: 1151817 - RNA, 19 nt, Artificial Sequence
  Description of Artificial Sequence: Synthetic oligonucleotide
  Antisense strand to SEQ ID NO: 1151816
cuucauaauggcaaagaca

SEQ ID NO: 1151818 - RNA, 19 nt, Artificial Sequence
  Description of Artificial Sequence: Synthetic oligonucleotide
  Sense strand starting at position 1269 of SEQ ID NO: 916376
uuguuaugcuaccuccaca

SEQ ID NO: 1151819 - RNA, 19 nt, Artificial Sequence
  Description of Artificial Sequence: Synthetic oligonucleotide
  Antisense strand to SEQ ID NO: 1151818
uguggagguagcauaacaa

SEQ ID NO: 1151820 - RNA, 19 nt, Artificial Sequence
  Description of Artificial Sequence: Synthetic oligonucleotide
  Sense strand starting at position 1320 of SEQ ID NO: 916376
gcuaaaugauuugaaggaa

SEQ ID NO: 1151821 - RNA, 19 nt, Artificial Sequence
  Description of Artificial Sequence: Synthetic oligonucleotide
  Antisense strand to SEQ ID NO: 1151820
uuccuucaaaucauuuagc

SEQ ID NO: 1151822 - RNA, 19 nt, Artificial Sequence
  Description of Artificial Sequence: Synthetic oligonucleotide
  Sense strand starting at position 1378 of SEQ ID NO: 916376
ggauuuguuugggaaggga

SEQ ID NO: 1151823 - RNA, 19 nt, Artificial Sequence
  Description of Artificial Sequence: Synthetic oligonucleotide
  Antisense strand to SEQ ID NO: 1151822
ucccuucccaaacaaaucc

SEQ ID NO: 1151824 - RNA, 19 nt, Artificial Sequence
  Description of Artificial Sequence: Synthetic oligonucleotide
  Sense strand starting at position 1561 of SEQ ID NO: 916376
agcaguggaguccaauaaa

SEQ ID NO: 1151825 - RNA, 19 nt, Artificial Sequence
  Description of Artificial Sequence: Synthetic oligonucleotide
  Antisense strand to SEQ ID NO: 1151824
uuuauuggacuccacugcu

SEQ ID NO: 1151826 - RNA, 19 nt, Artificial Sequence
  Description of Artificial Sequence: Synthetic oligonucleotide
  Sense strand starting at position 1687 of SEQ ID NO: 916376
gcagaacagauucgcgaau

SEQ ID NO: 1151827 - RNA, 19 nt, Artificial Sequence
  Description of Artificial Sequence: Synthetic oligonucleotide
  Antisense strand to SEQ ID NO: 1151826
auucgcgaaucuguucugc

SEQ ID NO: 1151828 - RNA, 19 nt, Artificial Sequence
  Description of Artificial Sequence: Synthetic oligonucleotide
  Sense strand starting at position 1688 of SEQ ID NO: 916376
cagaacagauucgcgaaua

SEQ ID NO: 1151829 - RNA, 19 nt, Artificial Sequence
  Description of Artificial Sequence: Synthetic oligonucleotide
  Antisense strand to SEQ ID NO: 1151828
uauucgcgaaucuguucug

SEQ ID NO: 1151830 - RNA, 19 nt, Artificial Sequence
  Description of Artificial Sequence: Synthetic oligonucleotide
  Sense strand starting at position 1693 of SEQ ID NO: 916376
cagauucgcgaauacgaga

SEQ ID NO: 1151831 - RNA, 19 nt, Artificial Sequence
  Description of Artificial Sequence: Synthetic oligonucleotide
  Antisense strand to SEQ ID NO: 1151830
ucucguauucgcgaaucug

SEQ ID NO: 1151832 - RNA, 19 nt, Artificial Sequence
  Description of Artificial Sequence: Synthetic oligonucleotide
  Sense strand starting at position 1723 of SEQ ID NO: 916376
augaaacacuugucaguua

SEQ ID NO: 1151833 - RNA, 19 nt, Artificial Sequence
  Description of Artificial Sequence: Synthetic oligonucleotide
  Antisense strand to SEQ ID NO: 1151832
uaacugacaaguguuucau

SEQ ID NO: 1151834 - RNA, 19 nt, Artificial Sequence
  Description of Artificial Sequence: Synthetic oligonucleotide
  Sense strand starting at position 2006 of SEQ ID NO: 916376
gcuuaaauuggcgggagaa

SEQ ID NO: 1151835 - RNA, 19 nt, Artificial Sequence
  Description of Artificial Sequence: Synthetic oligonucleotide
  Antisense strand to SEQ ID NO: 1151834
uucucccgccaauuuaagc

SEQ ID NO: 1151836 - RNA, 19 nt, Artificial Sequence
  Description of Artificial Sequence: Synthetic oligonucleotide
  Sense strand starting at position 2007 of SEQ ID NO: 916376
cuuaaauuggcgggagaac

SEQ ID NO: 1151837 - RNA, 19 nt, Artificial Sequence
  Description of Artificial Sequence: Synthetic oligonucleotide
  Antisense strand to SEQ ID NO: 1151836
guucucccgccaauuuaag

SEQ ID NO: 1151838 - RNA, 19 nt, Artificial Sequence
  Description of Artificial Sequence: Synthetic oligonucleotide
  Sense strand starting at position 2210 of SEQ ID NO: 916376
ccucgaauugcguuguuau

SEQ ID NO: 1151839 - RNA, 19 nt, Artificial Sequence
  Description of Artificial Sequence: Synthetic oligonucleotide
  Antisense strand to SEQ ID NO: 1151838
auaacaacgcaauucgagg

SEQ ID NO: 1151840 - RNA, 19 nt, Artificial Sequence
  Description of Artificial Sequence: Synthetic oligonucleotide
  Sense strand starting at position 2218 of SEQ ID NO: 916376
ugcguuguuauagaaacuu

SEQ ID NO: 1151841 - RNA, 19 nt, Artificial Sequence
  Description of Artificial Sequence: Synthetic oligonucleotide
  Antisense strand to SEQ ID NO: 1151840
aaguuucuauaacaacgca

SEQ ID NO: 1151842 - RNA, 19 nt, Artificial Sequence
  Description of Artificial Sequence: Synthetic oligonucleotide
  Sense strand starting at position 2421 of SEQ ID NO: 916376
uaccgaaucugaguuuaaa

SEQ ID NO: 1151843 - RNA, 19 nt, Artificial Sequence
  Description of Artificial Sequence: Synthetic oligonucleotide
  Antisense strand to SEQ ID NO: 1151842
uuuaaacucagauucggua

SEQ ID NO: 1151844 - RNA, 19 nt, Artificial Sequence
  Description of Artificial Sequence: Synthetic oligonucleotide
  Sense strand starting at position 2432 of SEQ ID NO: 916376
aguuuaaagccagggauau

SEQ ID NO: 1151845 - RNA, 19 nt, Artificial Sequence
  Description of Artificial Sequence: Synthetic oligonucleotide
  Antisense strand to SEQ ID NO: 1151844
auaucccuggcuuuaaacu

SEQ ID NO: 1151846 - RNA, 19 nt, Artificial Sequence
  Description of Artificial Sequence: Synthetic oligonucleotide
  Sense strand starting at position 2433 of SEQ ID NO: 916376
guuuaaagccagggauauu

SEQ ID NO: 1151847 - RNA, 19 nt, Artificial Sequence
  Description of Artificial Sequence: Synthetic oligonucleotide
  Antisense strand to SEQ ID NO: 1151846
aauaucccuggcuuuaaac

SEQ ID NO: 1151848 - RNA, 19 nt, Artificial Sequence
  Description of Artificial Sequence: Synthetic oligonucleotide
  Sense strand starting at position 2501 of SEQ ID NO: 916376
uguguauguguguagacaa

SEQ ID NO: 1151849 - RNA, 19 nt, Artificial Sequence
  Description of Artificial Sequence: Synthetic oligonucleotide
  Antisense strand to SEQ ID NO: 1151848
uugucuacacacauacaca

SEQ ID NO: 1151850 - RNA, 19 nt, Artificial Sequence
  Description of Artificial Sequence: Synthetic oligonucleotide
  Sense strand starting at position 2666 of SEQ ID NO: 916376
uuccuuucgccucacugaa

SEQ ID NO: 1151851 - RNA, 19 nt, Artificial Sequence
  Description of Artificial Sequence: Synthetic oligonucleotide
  Antisense strand to SEQ ID NO: 1151850
uucagugaggcgaaaggaa

SEQ ID NO: 1151852 - RNA, 19 nt, Artificial Sequence
  Description of Artificial Sequence: Synthetic oligonucleotide
  Sense strand starting at position 2922 of SEQ ID NO: 916376
auuaguguucguccgugua

SEQ ID NO: 1151853 - RNA, 19 nt, Artificial Sequence
  Description of Artificial Sequence: Synthetic oligonucleotide
  Antisense strand to SEQ ID NO: 1151852
uacacggacgaacacuaau

SEQ ID NO: 1151854 - RNA, 19 nt, Artificial Sequence
  Description of Artificial Sequence: Synthetic oligonucleotide
  Sense strand starting at position 2934 of SEQ ID NO: 916376
ccguguaaaccuuauuauu

SEQ ID NO: 1151855 - RNA, 19 nt, Artificial Sequence
  Description of Artificial Sequence: Synthetic oligonucleotide
  Antisense strand to SEQ ID NO: 1151854
aauaauaagguuuacacgg

SEQ ID NO: 1151856 - RNA, 19 nt, Artificial Sequence
  Description of Artificial Sequence: Synthetic oligonucleotide
  Sense strand starting at position 2936 of SEQ ID NO: 916376
guguaaaccuuauuauugu

SEQ ID NO: 1151857 - RNA, 19 nt, Artificial Sequence
  Description of Artificial Sequence: Synthetic oligonucleotide
  Antisense strand to SEQ ID NO: 1151856
acaauaauaagguuuacac

SEQ ID NO: 1151858 - RNA, 19 nt, Artificial Sequence
  Description of Artificial Sequence: Synthetic oligonucleotide
  Sense strand starting at position 2955 of SEQ ID NO: 916376
guauuaacgagcuaggaag

SEQ ID NO: 1151859 - RNA, 19 nt, Artificial Sequence
  Description of Artificial Sequence: Synthetic oligonucleotide
  Antisense strand to SEQ ID NO: 1151858
cuuccuagcucguuaauac

SEQ ID NO: 1151860 - RNA, 19 nt, Artificial Sequence
  Description of Artificial Sequence: Synthetic oligonucleotide
  Sense strand starting at position 3093 of SEQ ID NO: 916376
aguuaagucuugucacuga

SEQ ID NO: 1151861 - RNA, 19 nt, Artificial Sequence
  Description of Artificial Sequence: Synthetic oligonucleotide
  Antisense strand to SEQ ID NO: 1151860
ucagugacaagacuuaacu

SEQ ID NO: 1151862 - RNA, 19 nt, Artificial Sequence
  Description of Artificial Sequence: Synthetic oligonucleotide
  Sense strand starting at position 3708 of SEQ ID NO: 916376
auuggaaugccugggauua

SEQ ID NO: 1151863 - RNA, 19 nt, Artificial Sequence
  Description of Artificial Sequence: Synthetic oligonucleotide
  Antisense strand to SEQ ID NO: 1151862
uaaucccaggcauuccaau

SEQ ID NO: 1151864 - RNA, 19 nt, Artificial Sequence
  Description of Artificial Sequence: Synthetic oligonucleotide
  Sense strand starting at position 3709 of SEQ ID NO: 916376
uuggaaugccugggauuag

SEQ ID NO: 1151865 - RNA, 19 nt, Artificial Sequence
  Description of Artificial Sequence: Synthetic oligonucleotide
  Antisense strand to SEQ ID NO: 1151864
cuaaucccaggcauuccaa

SEQ ID NO: 1151866 - RNA, 19 nt, Artificial Sequence
  Description of Artificial Sequence: Synthetic oligonucleotide
  Sense strand starting at position 3766 of SEQ ID NO: 916376
uuaggugauugaguuuaaa

SEQ ID NO: 1151867 - RNA, 19 nt, Artificial Sequence
  Description of Artificial Sequence: Synthetic oligonucleotide
  Antisense strand to SEQ ID NO: 1151866
uuuaaacucaaucaccuaa

SEQ ID NO: 1151868 - RNA, 19 nt, Artificial Sequence
  Description of Artificial Sequence: Synthetic oligonucleotide
  Sense strand starting at position 3824 of SEQ ID NO: 916376
gccucaguauacuuaaaga

SEQ ID NO: 1151869 - RNA, 19 nt, Artificial Sequence
  Description of Artificial Sequence: Synthetic oligonucleotide
  Antisense strand to SEQ ID NO: 1151868
ucuuuaaguauacugaggc

SEQ ID NO: 1151870 - RNA, 19 nt, Artificial Sequence
  Description of Artificial Sequence: Synthetic oligonucleotide
  Sense strand starting at position 45 of SEQ ID NO: 916377
gguuaauucugagcugaua

SEQ ID NO: 1151871 - RNA, 19 nt, Artificial Sequence
  Description of Artificial Sequence: Synthetic oligonucleotide
  Antisense strand to SEQ ID NO: 1151870
uaucagcucagaauuaacc

SEQ ID NO: 1151872 - RNA, 19 nt, Artificial Sequence
  Description of Artificial Sequence: Synthetic oligonucleotide
  Sense strand starting at position 53 of SEQ ID NO: 916377
cugagcugauaauuacaaa

SEQ ID NO: 1151873 - RNA, 19 nt, Artificial Sequence
  Description of Artificial Sequence: Synthetic oligonucleotide
  Antisense strand to SEQ ID NO: 1151872
uuuguaauuaucagcucag

SEQ ID NO: 1151874 - RNA, 19 nt, Artificial Sequence
  Description of Artificial Sequence: Synthetic oligonucleotide
  Sense strand starting at position 677 of SEQ ID NO: 916377
aggagaugcacauguuuaa

SEQ ID NO: 1151875 - RNA, 19 nt, Artificial Sequence
  Description of Artificial Sequence: Synthetic oligonucleotide
  Antisense strand to SEQ ID NO: 1151874
uuaaacaugugcaucuccu

SEQ ID NO: 1151876 - RNA, 19 nt, Artificial Sequence
  Description of Artificial Sequence: Synthetic oligonucleotide
  Sense strand starting at position 684 of SEQ ID NO: 916377
gcacauguuuaagucuauu

SEQ ID NO: 1151877 - RNA, 19 nt, Artificial Sequence
  Description of Artificial Sequence: Synthetic oligonucleotide
  Antisense strand to SEQ ID NO: 1151876
aauagacuuaaacaugugc

SEQ ID NO: 1151878 - RNA, 19 nt, Artificial Sequence
  Description of Artificial Sequence: Synthetic oligonucleotide
  Sense strand starting at position 714 of SEQ ID NO: 916377
gcugguggauugcuacaau

SEQ ID NO: 1151879 - RNA, 19 nt, Artificial Sequence
  Description of Artificial Sequence: Synthetic oligonucleotide
  Antisense strand to SEQ ID NO: 1151878
auuguagcaauccaccagc

SEQ ID NO: 1151880 - RNA, 19 nt, Artificial Sequence
  Description of Artificial Sequence: Synthetic oligonucleotide
  Sense strand starting at position 726 of SEQ ID NO: 916377
cuacaauuccucuguaagu

SEQ ID NO: 1151881 - RNA, 19 nt, Artificial Sequence
  Description of Artificial Sequence: Synthetic oligonucleotide
  Antisense strand to SEQ ID NO: 1151880
acuuacagaggaauuguag

SEQ ID NO: 1151882 - RNA, 19 nt, Artificial Sequence
  Description of Artificial Sequence: Synthetic oligonucleotide
  Sense strand starting at position 728 of SEQ ID NO: 916377
acaauuccucuguaaguuu

SEQ ID NO: 1151883 - RNA, 19 nt, Artificial Sequence
  Description of Artificial Sequence: Synthetic oligonucleotide
  Antisense strand to SEQ ID NO: 1151882
aaacuuacagaggaauugu

SEQ ID NO: 1151884 - RNA, 19 nt, Artificial Sequence
  Description of Artificial Sequence: Synthetic oligonucleotide
  Sense strand starting at position 731 of SEQ ID NO: 916377
auuccucuguaaguuuaaa

SEQ ID NO: 1151885 - RNA, 19 nt, Artificial Sequence
  Description of Artificial Sequence: Synthetic oligonucleotide
  Antisense strand to SEQ ID NO: 1151884
uuuaaacuuacagaggaau

SEQ ID NO: 1151886 - RNA, 19 nt, Artificial Sequence
  Description of Artificial Sequence: Synthetic oligonucleotide
  Sense strand starting at position 768 of SEQ ID NO: 916377
uuuggaguacuguaauaac

SEQ ID NO: 1151887 - RNA, 19 nt, Artificial Sequence
  Description of Artificial Sequence: Synthetic oligonucleotide
  Antisense strand to SEQ ID NO: 1151886
guuauuacaguacuccaaa

SEQ ID NO: 1151888 - RNA, 19 nt, Artificial Sequence
  Description of Artificial Sequence: Synthetic oligonucleotide
  Sense strand starting at position 779 of SEQ ID NO: 916377
guaauaacucuugagaugu

SEQ ID NO: 1151889 - RNA, 19 nt, Artificial Sequence
  Description of Artificial Sequence: Synthetic oligonucleotide
  Antisense strand to SEQ ID NO: 1151888
acaucucaagaguuauuac

SEQ ID NO: 1151890 - RNA, 19 nt, Artificial Sequence
  Description of Artificial Sequence: Synthetic oligonucleotide
  Sense strand starting at position 840 of SEQ ID NO: 916377
ggaugaggguaauacauaa

SEQ ID NO: 1151891 - RNA, 19 nt, Artificial Sequence
  Description of Artificial Sequence: Synthetic oligonucleotide
  Antisense strand to SEQ ID NO: 1151890
uuauguauuacccucaucc

SEQ ID NO: 1151892 - RNA, 19 nt, Artificial Sequence
  Description of Artificial Sequence: Synthetic oligonucleotide
  Sense strand starting at position 847 of SEQ ID NO: 916377
gguaauacauaagaaauag

SEQ ID NO: 1151893 - RNA, 19 nt, Artificial Sequence
  Description of Artificial Sequence: Synthetic oligonucleotide
  Antisense strand to SEQ ID NO: 1151892
cuauuucuuauguauuacc

SEQ ID NO: 1151894 - RNA, 19 nt, Artificial Sequence
  Description of Artificial Sequence: Synthetic oligonucleotide
  Sense strand starting at position 973 of SEQ ID NO: 916377
ucggguuuaacuugaccaa

SEQ ID NO: 1151895 - RNA, 19 nt, Artificial Sequence
  Description of Artificial Sequence: Synthetic oligonucleotide
  Antisense strand to SEQ ID NO: 1151894
uuggucaaguuaaacccga

SEQ ID NO: 1151896 - RNA, 19 nt, Artificial Sequence
  Description of Artificial Sequence: Synthetic oligonucleotide
  Sense strand starting at position 976 of SEQ ID NO: 916377
gguuuaacuugaccaagca

SEQ ID NO: 1151897 - RNA, 19 nt, Artificial Sequence
  Description of Artificial Sequence: Synthetic oligonucleotide
  Antisense strand to SEQ ID NO: 1151896
ugcuuggucaaguuaaacc

SEQ ID NO: 1151898 - RNA, 19 nt, Artificial Sequence
  Description of Artificial Sequence: Synthetic oligonucleotide
  Sense strand starting at position 977 of SEQ ID NO: 916377
guuuaacuugaccaagcaa

SEQ ID NO: 1151899 - RNA, 19 nt, Artificial Sequence
  Description of Artificial Sequence: Synthetic oligonucleotide
  Antisense strand to SEQ ID NO: 1151898
uugcuuggucaaguuaaac

SEQ ID NO: 1151900 - RNA, 19 nt, Artificial Sequence
  Description of Artificial Sequence: Synthetic oligonucleotide
  Sense strand starting at position 1317 of SEQ ID NO: 916377
uuuauaccuucguccuaga

SEQ ID NO: 1151901 - RNA, 19 nt, Artificial Sequence
  Description of Artificial Sequence: Synthetic oligonucleotide
  Antisense strand to SEQ ID NO: 1151900
ucuaggacgaagguauaaa

SEQ ID NO: 1151902 - RNA, 19 nt, Artificial Sequence
  Description of Artificial Sequence: Synthetic oligonucleotide
  Sense strand starting at position 1326 of SEQ ID NO: 916377
ucguccuagagaugccaaa

SEQ ID NO: 1151903 - RNA, 19 nt, Artificial Sequence
  Description of Artificial Sequence: Synthetic oligonucleotide
  Antisense strand to SEQ ID NO: 1151902
uuuggcaucucuaggacga

SEQ ID NO: 1151904 - RNA, 19 nt, Artificial Sequence
  Description of Artificial Sequence: Synthetic oligonucleotide
  Sense strand starting at position 2860 of SEQ ID NO: 916377
uagagauggccuugguagu

SEQ ID NO: 1151905 - RNA, 19 nt, Artificial Sequence
  Description of Artificial Sequence: Synthetic oligonucleotide
  Antisense strand to SEQ ID NO: 1151904
acuaccaaggccaucucua

SEQ ID NO: 1151906 - RNA, 19 nt, Artificial Sequence
  Description of Artificial Sequence: Synthetic oligonucleotide
  Sense strand starting at position 2861 of SEQ ID NO: 916377
agagauggccuugguaguu

SEQ ID NO: 1151907 - RNA, 19 nt, Artificial Sequence
  Description of Artificial Sequence: Synthetic oligonucleotide
  Antisense strand to SEQ ID NO: 1151906
aacuaccaaggccaucucu

SEQ ID NO: 1151908 - RNA, 19 nt, Artificial Sequence
  Description of Artificial Sequence: Synthetic oligonucleotide
  Sense strand starting at position 2874 of SEQ ID NO: 916377
guaguuuagaccugaggag

SEQ ID NO: 1151909 - RNA, 19 nt, Artificial Sequence
  Description of Artificial Sequence: Synthetic oligonucleotide
  Antisense strand to SEQ ID NO: 1151908
cuccucaggucuaaacuac

SEQ ID NO: 1151910 - RNA, 19 nt, Artificial Sequence
  Description of Artificial Sequence: Synthetic oligonucleotide
  Sense strand starting at position 2989 of SEQ ID NO: 916377
ggagucuguguugauaaac

SEQ ID NO: 1151911 - RNA, 19 nt, Artificial Sequence
  Description of Artificial Sequence: Synthetic oligonucleotide
  Antisense strand to SEQ ID NO: 1151910
guuuaucaacacagacucc

SEQ ID NO: 1151912 - RNA, 19 nt, Artificial Sequence
  Description of Artificial Sequence: Synthetic oligonucleotide
  Sense strand starting at position 3011 of SEQ ID NO: 916377
cuagaaauguaucuuggga

SEQ ID NO: 1151913 - RNA, 19 nt, Artificial Sequence
  Description of Artificial Sequence: Synthetic oligonucleotide
  Antisense strand to SEQ ID NO: 1151912
ucccaagauacauuucuag

SEQ ID NO: 1151914 - RNA, 19 nt, Artificial Sequence
  Description of Artificial Sequence: Synthetic oligonucleotide
  Sense strand starting at position 3018 of SEQ ID NO: 916377
uguaucuugggagagucuu

SEQ ID NO: 1151915 - RNA, 19 nt, Artificial Sequence
  Description of Artificial Sequence: Synthetic oligonucleotide
  Antisense strand to SEQ ID NO: 1151914
aagacucucccaagauaca

SEQ ID NO: 1151916 - RNA, 19 nt, Artificial Sequence
  Description of Artificial Sequence: Synthetic oligonucleotide
  Sense strand starting at position 3026 of SEQ ID NO: 916377
gggagagucuugaggauug

SEQ ID NO: 1151917 - RNA, 19 nt, Artificial Sequence
  Description of Artificial Sequence: Synthetic oligonucleotide
  Antisense strand to SEQ ID NO: 1151916
caauccucaagacucuccc

SEQ ID NO: 1151918 - RNA, 19 nt, Artificial Sequence
  Description of Artificial Sequence: Synthetic oligonucleotide
  Sense strand starting at position 3060 of SEQ ID NO: 916377
gcgccuguaccugauagga

SEQ ID NO: 1151919 - RNA, 19 nt, Artificial Sequence
  Description of Artificial Sequence: Synthetic oligonucleotide
  Antisense strand to SEQ ID NO: 1151918
uccuaucagguacaggcgc

SEQ ID NO: 1151920 - RNA, 19 nt, Artificial Sequence
  Description of Artificial Sequence: Synthetic oligonucleotide
  Sense strand starting at position 3102 of SEQ ID NO: 916377
guuccauuccucuagucca

SEQ ID NO: 1151921 - RNA, 19 nt, Artificial Sequence
  Description of Artificial Sequence: Synthetic oligonucleotide
  Antisense strand to SEQ ID NO: 1151920
uggacuagaggaauggaac

SEQ ID NO: 1151922 - RNA, 19 nt, Artificial Sequence
  Description of Artificial Sequence: Synthetic oligonucleotide
  Sense strand starting at position 3157 of SEQ ID NO: 916377
agcuauuaugucuguuaac

SEQ ID NO: 1151923 - RNA, 19 nt, Artificial Sequence
  Description of Artificial Sequence: Synthetic oligonucleotide
  Antisense strand to SEQ ID NO: 1151922
guuaacagacauaauagcu

SEQ ID NO: 1151924 - RNA, 19 nt, Artificial Sequence
  Description of Artificial Sequence: Synthetic oligonucleotide
  Sense strand starting at position 3167 of SEQ ID NO: 916377
ucuguuaaccaaggcuuua

SEQ ID NO: 1151925 - RNA, 19 nt, Artificial Sequence
  Description of Artificial Sequence: Synthetic oligonucleotide
  Antisense strand to SEQ ID NO: 1151924
uaaagccuugguuaacaga

SEQ ID NO: 1151926 - RNA, 19 nt, Artificial Sequence
  Description of Artificial Sequence: Synthetic oligonucleotide
  Sense strand starting at position 3222 of SEQ ID NO: 916377
ggcuguaaucugcaagguu

SEQ ID NO: 1151927 - RNA, 19 nt, Artificial Sequence
  Description of Artificial Sequence: Synthetic oligonucleotide
  Antisense strand to SEQ ID NO: 1151926
aaccuugcagauuacagcc

SEQ ID NO: 1151928 - RNA, 19 nt, Artificial Sequence
  Description of Artificial Sequence: Synthetic oligonucleotide
  Sense strand starting at position 3225 of SEQ ID NO: 916377
uguaaucugcaagguuuau

SEQ ID NO: 1151929 - RNA, 19 nt, Artificial Sequence
  Description of Artificial Sequence: Synthetic oligonucleotide
  Antisense strand to SEQ ID NO: 1151928
auaaaccuugcagauuaca

SEQ ID NO: 1151930 - RNA, 19 nt, Artificial Sequence
  Description of Artificial Sequence: Synthetic oligonucleotide
  Sense strand starting at position 3315 of SEQ ID NO: 916377
augugccuacucuauguua

SEQ ID NO: 1151931 - RNA, 19 nt, Artificial Sequence
  Description of Artificial Sequence: Synthetic oligonucleotide
  Antisense strand to SEQ ID NO: 1151930
uaacauagaguaggcacau

SEQ ID NO: 1151932 - RNA, 19 nt, Artificial Sequence
  Description of Artificial Sequence: Synthetic oligonucleotide
  Sense strand starting at position 3326 of SEQ ID NO: 916377
cuauguuaaguacaagcua

SEQ ID NO: 1151933 - RNA, 19 nt, Artificial Sequence
  Description of Artificial Sequence: Synthetic oligonucleotide
  Antisense strand to SEQ ID NO: 1151932
uagcuuguacuuaacauag

SEQ ID NO: 1151934 - RNA, 19 nt, Artificial Sequence
  Description of Artificial Sequence: Synthetic oligonucleotide
  Sense strand starting at position 3356 of SEQ ID NO: 916377
cuuaucguaucaucuuauu

SEQ ID NO: 1151935 - RNA, 19 nt, Artificial Sequence
  Description of Artificial Sequence: Synthetic oligonucleotide
  Antisense strand to SEQ ID NO: 1151934
aauaagaugauacgauaag

SEQ ID NO: 1151936 - RNA, 19 nt, Artificial Sequence
  Description of Artificial Sequence: Synthetic oligonucleotide
  Sense strand starting at position 3430 of SEQ ID NO: 916377
gaaacagauuuagagguua

SEQ ID NO: 1151937 - RNA, 19 nt, Artificial Sequence
  Description of Artificial Sequence: Synthetic oligonucleotide
  Antisense strand to SEQ ID NO: 1151936
uaaccucuaaaucuguuuc

SEQ ID NO: 1151938 - RNA, 19 nt, Artificial Sequence
  Description of Artificial Sequence: Synthetic oligonucleotide
  Sense strand starting at position 3499 of SEQ ID NO: 916377
ggaucauagucacucuacu

SEQ ID NO: 1151939 - RNA, 19 nt, Artificial Sequence
  Description of Artificial Sequence: Synthetic oligonucleotide
  Antisense strand to SEQ ID NO: 1151938
aguagagugacuaugaucc

SEQ ID NO: 1151940 - RNA, 19 nt, Artificial Sequence
  Description of Artificial Sequence: Synthetic oligonucleotide
  Sense strand starting at position 3645 of SEQ ID NO: 916377
uuccuuacuuacguagaua

SEQ ID NO: 1151941 - RNA, 19 nt, Artificial Sequence
  Description of Artificial Sequence: Synthetic oligonucleotide
  Antisense strand to SEQ ID NO: 1151940
uaucuacguaaguaaggaa

SEQ ID NO: 1151942 - RNA, 19 nt, Artificial Sequence
  Description of Artificial Sequence: Synthetic oligonucleotide
  Sense strand starting at position 3648 of SEQ ID NO: 916377
cuuacuuacguagauaaac

SEQ ID NO: 1151943 - RNA, 19 nt, Artificial Sequence
  Description of Artificial Sequence: Synthetic oligonucleotide
  Antisense strand to SEQ ID NO: 1151942
guuuaucuacguaaguaag

SEQ ID NO: 1151944 - RNA, 19 nt, Artificial Sequence
  Description of Artificial Sequence: Synthetic oligonucleotide
  Sense strand starting at position 3701 of SEQ ID NO: 916377
aggcgucuuccucagggaa

SEQ ID NO: 1151945 - RNA, 19 nt, Artificial Sequence
  Description of Artificial Sequence: Synthetic oligonucleotide
  Antisense strand to SEQ ID NO: 1151944
uucccugaggaagacgccu

SEQ ID NO: 1151946 - RNA, 19 nt, Artificial Sequence
  Description of Artificial Sequence: Synthetic oligonucleotide
  Sense strand starting at position 3704 of SEQ ID NO: 916377
cgucuuccucagggaauau

SEQ ID NO: 1151947 - RNA, 19 nt, Artificial Sequence
  Description of Artificial Sequence: Synthetic oligonucleotide
  Antisense strand to SEQ ID NO: 1151946
auauucccugaggaagacg

SEQ ID NO: 1151948 - RNA, 19 nt, Artificial Sequence
  Description of Artificial Sequence: Synthetic oligonucleotide
  Sense strand starting at position 3811 of SEQ ID NO: 916377
acuguaauuucgcccuugu

SEQ ID NO: 1151949 - RNA, 19 nt, Artificial Sequence
  Description of Artificial Sequence: Synthetic oligonucleotide
  Antisense strand to SEQ ID NO: 1151948
acaagggcgaaauuacagu

SEQ ID NO: 1151950 - RNA, 19 nt, Artificial Sequence
  Description of Artificial Sequence: Synthetic oligonucleotide
  Sense strand starting at position 256 of SEQ ID NO: 916378
caauguuuaccugacgaag

SEQ ID NO: 1151951 - RNA, 19 nt, Artificial Sequence
  Description of Artificial Sequence: Synthetic oligonucleotide
  Antisense strand to SEQ ID NO: 1151950
cuucgucagguaaacauug

SEQ ID NO: 1151952 - RNA, 19 nt, Artificial Sequence
  Description of Artificial Sequence: Synthetic oligonucleotide
  Sense strand starting at position 267 of SEQ ID NO: 916378
ugacgaagucccuauccaa

SEQ ID NO: 1151953 - RNA, 19 nt, Artificial Sequence
  Description of Artificial Sequence: Synthetic oligonucleotide
  Antisense strand to SEQ ID NO: 1151952
uuggauagggacuucguca

SEQ ID NO: 1151954 - RNA, 19 nt, Artificial Sequence
  Description of Artificial Sequence: Synthetic oligonucleotide
  Sense strand starting at position 418 of SEQ ID NO: 916378
ccucauaggugaucagaaa

SEQ ID NO: 1151955 - RNA, 19 nt, Artificial Sequence
  Description of Artificial Sequence: Synthetic oligonucleotide
  Antisense strand to SEQ ID NO: 1151954
uuucugaucaccuaugagg

SEQ ID NO: 1151956 - RNA, 19 nt, Artificial Sequence
  Description of Artificial Sequence: Synthetic oligonucleotide
  Sense strand starting at position 741 of SEQ ID NO: 916378
aauguccaccgauaguaaa

SEQ ID NO: 1151957 - RNA, 19 nt, Artificial Sequence
  Description of Artificial Sequence: Synthetic oligonucleotide
  Antisense strand to SEQ ID NO: 1151956
uuuacuaucgguggacauu

SEQ ID NO: 1151958 - RNA, 19 nt, Artificial Sequence
  Description of Artificial Sequence: Synthetic oligonucleotide
  Sense strand starting at position 1229 of SEQ ID NO: 916378
uccuauaagccugguugaa

SEQ ID NO: 1151959 - RNA, 19 nt, Artificial Sequence
  Description of Artificial Sequence: Synthetic oligonucleotide
  Antisense strand to SEQ ID NO: 1151958
uucaaccaggcuuauagga

SEQ ID NO: 1151960 - RNA, 19 nt, Artificial Sequence
  Description of Artificial Sequence: Synthetic oligonucleotide
  Sense strand starting at position 1231 of SEQ ID NO: 916378
cuauaagccugguugaaca

SEQ ID NO: 1151961 - RNA, 19 nt, Artificial Sequence
  Description of Artificial Sequence: Synthetic oligonucleotide
  Antisense strand to SEQ ID NO: 1151960
uguucaaccaggcuuauag

SEQ ID NO: 1151962 - RNA, 19 nt, Artificial Sequence
  Description of Artificial Sequence: Synthetic oligonucleotide
  Sense strand starting at position 1309 of SEQ ID NO: 916378
gacuacaacgcaggaguua

SEQ ID NO: 1151963 - RNA, 19 nt, Artificial Sequence
  Description of Artificial Sequence: Synthetic oligonucleotide
  Antisense strand to SEQ ID NO: 1151962
uaacuccugcguuguaguc

SEQ ID NO: 1151964 - RNA, 19 nt, Artificial Sequence
  Description of Artificial Sequence: Synthetic oligonucleotide
  Sense strand starting at position 1437 of SEQ ID NO: 916378
gagcuaaggacaugucgga

SEQ ID NO: 1151965 - RNA, 19 nt, Artificial Sequence
  Description of Artificial Sequence: Synthetic oligonucleotide
  Antisense strand to SEQ ID NO: 1151964
uccgacauguccuuagcuc

SEQ ID NO: 1151966 - RNA, 19 nt, Artificial Sequence
  Description of Artificial Sequence: Synthetic oligonucleotide
  Sense strand starting at position 1500 of SEQ ID NO: 916378
uguauaucaugacuaccua

SEQ ID NO: 1151967 - RNA, 19 nt, Artificial Sequence
  Description of Artificial Sequence: Synthetic oligonucleotide
  Antisense strand to SEQ ID NO: 1151966
uagguagucaugauauaca

SEQ ID NO: 1151968 - RNA, 19 nt, Artificial Sequence
  Description of Artificial Sequence: Synthetic oligonucleotide
  Sense strand starting at position 1790 of SEQ ID NO: 916378
uuuauaaguccacgaggaa

SEQ ID NO: 1151969 - RNA, 19 nt, Artificial Sequence
  Description of Artificial Sequence: Synthetic oligonucleotide
  Antisense strand to SEQ ID NO: 1151968
uuccucguggacuuauaaa

SEQ ID NO: 1151970 - RNA, 19 nt, Artificial Sequence
  Description of Artificial Sequence: Synthetic oligonucleotide
  Sense strand starting at position 1983 of SEQ ID NO: 916378
cggaaaugaaacuguucuu

SEQ ID NO: 1151971 - RNA, 19 nt, Artificial Sequence
  Description of Artificial Sequence: Synthetic oligonucleotide
  Antisense strand to SEQ ID NO: 1151970
aagaacaguuucauuuccg

SEQ ID NO: 1151972 - RNA, 19 nt, Artificial Sequence
  Description of Artificial Sequence: Synthetic oligonucleotide
  Sense strand starting at position 2145 of SEQ ID NO: 916378
cggagacuuucucccagua

SEQ ID NO: 1151973 - RNA, 19 nt, Artificial Sequence
  Description of Artificial Sequence: Synthetic oligonucleotide
  Antisense strand to SEQ ID NO: 1151972
uacugggagaaagucuccg

SEQ ID NO: 1151974 - RNA, 19 nt, Artificial Sequence
  Description of Artificial Sequence: Synthetic oligonucleotide
  Sense strand starting at position 2158 of SEQ ID NO: 916378
ccaguaugcccugaaacca

SEQ ID NO: 1151975 - RNA, 19 nt, Artificial Sequence
  Description of Artificial Sequence: Synthetic oligonucleotide
  Antisense strand to SEQ ID NO: 1151974
ugguuucagggcauacugg

SEQ ID NO: 1151976 - RNA, 19 nt, Artificial Sequence
  Description of Artificial Sequence: Synthetic oligonucleotide
  Sense strand starting at position 2166 of SEQ ID NO: 916378
cccugaaaccauggaguuu

SEQ ID NO: 1151977 - RNA, 19 nt, Artificial Sequence
  Description of Artificial Sequence: Synthetic oligonucleotide
  Antisense strand to SEQ ID NO: 1151976
aaacuccaugguuucaggg

SEQ ID NO: 1151978 - RNA, 19 nt, Artificial Sequence
  Description of Artificial Sequence: Synthetic oligonucleotide
  Sense strand starting at position 2337 of SEQ ID NO: 916378
uuuauauguuggccaaaua

SEQ ID NO: 1151979 - RNA, 19 nt, Artificial Sequence
  Description of Artificial Sequence: Synthetic oligonucleotide
  Antisense strand to SEQ ID NO: 1151978
uauuuggccaacauauaaa

SEQ ID NO: 1151980 - RNA, 19 nt, Artificial Sequence
  Description of Artificial Sequence: Synthetic oligonucleotide
  Sense strand starting at position 2338 of SEQ ID NO: 916378
uuauauguuggccaaauau

SEQ ID NO: 1151981 - RNA, 19 nt, Artificial Sequence
  Description of Artificial Sequence: Synthetic oligonucleotide
  Antisense strand to SEQ ID NO: 1151980
auauuuggccaacauauaa

SEQ ID NO: 1151982 - RNA, 19 nt, Artificial Sequence
  Description of Artificial Sequence: Synthetic oligonucleotide
  Sense strand starting at position 2428 of SEQ ID NO: 916378
aggaauagcuacuauuuau

SEQ ID NO: 1151983 - RNA, 19 nt, Artificial Sequence
  Description of Artificial Sequence: Synthetic oligonucleotide
  Antisense strand to SEQ ID NO: 1151982
auaaauaguagcuauuccu

SEQ ID NO: 1151984 - RNA, 19 nt, Artificial Sequence
  Description of Artificial Sequence: Synthetic oligonucleotide
  Sense strand starting at position 2438 of SEQ ID NO: 916378
acuauuuauugugagacua

SEQ ID NO: 1151985 - RNA, 19 nt, Artificial Sequence
  Description of Artificial Sequence: Synthetic oligonucleotide
  Antisense strand to SEQ ID NO: 1151984
uagucucacaauaaauagu

SEQ ID NO: 1151986 - RNA, 19 nt, Artificial Sequence
  Description of Artificial Sequence: Synthetic oligonucleotide
  Sense strand starting at position 2549 of SEQ ID NO: 916378
gaguguugguauuucucua

SEQ ID NO: 1151987 - RNA, 19 nt, Artificial Sequence
  Description of Artificial Sequence: Synthetic oligonucleotide
  Antisense strand to SEQ ID NO: 1151986
uagagaaauaccaacacuc

SEQ ID NO: 1151988 - RNA, 19 nt, Artificial Sequence
  Description of Artificial Sequence: Synthetic oligonucleotide
  Sense strand starting at position 2553 of SEQ ID NO: 916378
guugguauuucucuaaguc

SEQ ID NO: 1151989 - RNA, 19 nt, Artificial Sequence
  Description of Artificial Sequence: Synthetic oligonucleotide
  Antisense strand to SEQ ID NO: 1151988
gacuuagagaaauaccaac

SEQ ID NO: 1151990 - RNA, 19 nt, Artificial Sequence
  Description of Artificial Sequence: Synthetic oligonucleotide
  Sense strand starting at position 2567 of SEQ ID NO: 916378
aagucagagggaugguaau

SEQ ID NO: 1151991 - RNA, 19 nt, Artificial Sequence
  Description of Artificial Sequence: Synthetic oligonucleotide
  Antisense strand to SEQ ID NO: 1151990
auuaccaucccucugacuu

SEQ ID NO: 1151992 - RNA, 19 nt, Artificial Sequence
  Description of Artificial Sequence: Synthetic oligonucleotide
  Sense strand starting at position 2673 of SEQ ID NO: 916378
gggcuaagauguguagaga

SEQ ID NO: 1151993 - RNA, 19 nt, Artificial Sequence
  Description of Artificial Sequence: Synthetic oligonucleotide
  Antisense strand to SEQ ID NO: 1151992
ucucuacacaucuuagccc

SEQ ID NO: 1151994 - RNA, 19 nt, Artificial Sequence
  Description of Artificial Sequence: Synthetic oligonucleotide
  Sense strand starting at position 2674 of SEQ ID NO: 916378
ggcuaagauguguagagag

SEQ ID NO: 1151995 - RNA, 19 nt, Artificial Sequence
  Description of Artificial Sequence: Synthetic oligonucleotide
  Antisense strand to SEQ ID NO: 1151994
cucucuacacaucuuagcc

SEQ ID NO: 1151996 - RNA, 19 nt, Artificial Sequence
  Description of Artificial Sequence: Synthetic oligonucleotide
  Sense strand starting at position 2729 of SEQ ID NO: 916378
guauaagaguucuucgaca

SEQ ID NO: 1151997 - RNA, 19 nt, Artificial Sequence
  Description of Artificial Sequence: Synthetic oligonucleotide
  Antisense strand to SEQ ID NO: 1151996
ugucgaagaacucuuauac

SEQ ID NO: 1151998 - RNA, 19 nt, Artificial Sequence
  Description of Artificial Sequence: Synthetic oligonucleotide
  Sense strand starting at position 2731 of SEQ ID NO: 916378
auaagaguucuucgacaug

SEQ ID NO: 1151999 - RNA, 19 nt, Artificial Sequence
  Description of Artificial Sequence: Synthetic oligonucleotide
  Antisense strand to SEQ ID NO: 1151998
caugucgaagaacucuuau

SEQ ID NO: 1152000 - RNA, 19 nt, Artificial Sequence
  Description of Artificial Sequence: Synthetic oligonucleotide
  Sense strand starting at position 2734 of SEQ ID NO: 916378
agaguucuucgacaugcca

SEQ ID NO: 1152001 - RNA, 19 nt, Artificial Sequence
  Description of Artificial Sequence: Synthetic oligonucleotide
  Antisense strand to SEQ ID NO: 1152000
uggcaugucgaagaacucu

SEQ ID NO: 1152002 - RNA, 19 nt, Artificial Sequence
  Description of Artificial Sequence: Synthetic oligonucleotide
  Sense strand starting at position 2822 of SEQ ID NO: 916378
agucuuugauagguuaaau

SEQ ID NO: 1152003 - RNA, 19 nt, Artificial Sequence
  Description of Artificial Sequence: Synthetic oligonucleotide
  Antisense strand to SEQ ID NO: 1152002
auuuaaccuaucaaagacu

SEQ ID NO: 1152004 - RNA, 19 nt, Artificial Sequence
  Description of Artificial Sequence: Synthetic oligonucleotide
  Sense strand starting at position 2846 of SEQ ID NO: 916378
gcauuagugaaauacacgu

SEQ ID NO: 1152005 - RNA, 19 nt, Artificial Sequence
  Description of Artificial Sequence: Synthetic oligonucleotide
  Antisense strand to SEQ ID NO: 1152004
acguguauuucacuaaugc

SEQ ID NO: 1152006 - RNA, 19 nt, Artificial Sequence
  Description of Artificial Sequence: Synthetic oligonucleotide
  Sense strand starting at position 2854 of SEQ ID NO: 916378
gaaauacacguuugucuga

SEQ ID NO: 1152007 - RNA, 19 nt, Artificial Sequence
  Description of Artificial Sequence: Synthetic oligonucleotide
  Antisense strand to SEQ ID NO: 1152006
ucagacaaacguguauuuc

SEQ ID NO: 1152008 - RNA, 19 nt, Artificial Sequence
  Description of Artificial Sequence: Synthetic oligonucleotide
  Sense strand starting at position 3239 of SEQ ID NO: 916378
aaauguguuagagggcuga

SEQ ID NO: 1152009 - RNA, 19 nt, Artificial Sequence
  Description of Artificial Sequence: Synthetic oligonucleotide
  Antisense strand to SEQ ID NO: 1152008
ucagcccucuaacacauuu

SEQ ID NO: 1152010 - RNA, 19 nt, Artificial Sequence
  Description of Artificial Sequence: Synthetic oligonucleotide
  Sense strand starting at position 3344 of SEQ ID NO: 916378
cuucccauuuacguguaua

SEQ ID NO: 1152011 - RNA, 19 nt, Artificial Sequence
  Description of Artificial Sequence: Synthetic oligonucleotide
  Antisense strand to SEQ ID NO: 1152010
uauacacguaaaugggaag

SEQ ID NO: 1152012 - RNA, 19 nt, Artificial Sequence
  Description of Artificial Sequence: Synthetic oligonucleotide
  Sense strand starting at position 3378 of SEQ ID NO: 916378
uugcuauuauuugaggaau

SEQ ID NO: 1152013 - RNA, 19 nt, Artificial Sequence
  Description of Artificial Sequence: Synthetic oligonucleotide
  Antisense strand to SEQ ID NO: 1152012
auuccucaaauaauagcaa

SEQ ID NO: 1152014 - RNA, 19 nt, Artificial Sequence
  Description of Artificial Sequence: Synthetic oligonucleotide
  Sense strand starting at position 3390 of SEQ ID NO: 916378
gaggaauauugagaauaug

SEQ ID NO: 1152015 - RNA, 19 nt, Artificial Sequence
  Description of Artificial Sequence: Synthetic oligonucleotide
  Antisense strand to SEQ ID NO: 1152014
cauauucucaauauuccuc

SEQ ID NO: 1152016 - RNA, 19 nt, Artificial Sequence
  Description of Artificial Sequence: Synthetic oligonucleotide
  Sense strand starting at position 3576 of SEQ ID NO: 916378
cauggauaauaauugaguu

SEQ ID NO: 1152017 - RNA, 19 nt, Artificial Sequence
  Description of Artificial Sequence: Synthetic oligonucleotide
  Antisense strand to SEQ ID NO: 1152016
aacucaauuauuauccaug

SEQ ID NO: 1152018 - RNA, 19 nt, Artificial Sequence
  Description of Artificial Sequence: Synthetic oligonucleotide
  Sense strand starting at position 3593 of SEQ ID NO: 916378
uucuaagauucucuaacgu

SEQ ID NO: 1152019 - RNA, 19 nt, Artificial Sequence
  Description of Artificial Sequence: Synthetic oligonucleotide
  Antisense strand to SEQ ID NO: 1152018
acguuagagaaucuuagaa

SEQ ID NO: 1152020 - RNA, 19 nt, Artificial Sequence
  Description of Artificial Sequence: Synthetic oligonucleotide
  Sense strand starting at position 3602 of SEQ ID NO: 916378
ucucuaacguccucaagac

SEQ ID NO: 1152021 - RNA, 19 nt, Artificial Sequence
  Description of Artificial Sequence: Synthetic oligonucleotide
  Antisense strand to SEQ ID NO: 1152020
gucuugaggacguuagaga

SEQ ID NO: 1152022 - RNA, 19 nt, Artificial Sequence
  Description of Artificial Sequence: Synthetic oligonucleotide
  Sense strand starting at position 3680 of SEQ ID NO: 916378
aggcuccuacaauaaguua

SEQ ID NO: 1152023 - RNA, 19 nt, Artificial Sequence
  Description of Artificial Sequence: Synthetic oligonucleotide
  Antisense strand to SEQ ID NO: 1152022
uaacuuauuguaggagccu

SEQ ID NO: 1152024 - RNA, 19 nt, Artificial Sequence
  Description of Artificial Sequence: Synthetic oligonucleotide
  Sense strand starting at position 3703 of SEQ ID NO: 916378
aguauuaagugauucuuuc

SEQ ID NO: 1152025 - RNA, 19 nt, Artificial Sequence
  Description of Artificial Sequence: Synthetic oligonucleotide
  Antisense strand to SEQ ID NO: 1152024
gaaagaaucacuuaauacu

SEQ ID NO: 1152026 - RNA, 19 nt, Artificial Sequence
  Description of Artificial Sequence: Synthetic oligonucleotide
  Sense strand starting at position 3788 of SEQ ID NO: 916378
auuggaaguuaagugaauu

SEQ ID NO: 1152027 - RNA, 19 nt, Artificial Sequence
  Description of Artificial Sequence: Synthetic oligonucleotide
  Antisense strand to SEQ ID NO: 1152026
aauucacuuaacuuccaau

SEQ ID NO: 1152028 - RNA, 19 nt, Artificial Sequence
  Description of Artificial Sequence: Synthetic oligonucleotide
  Sense strand starting at position 3973 of SEQ ID NO: 916378
ucauauacugaaggguaua

SEQ ID NO: 1152029 - RNA, 19 nt, Artificial Sequence
  Description of Artificial Sequence: Synthetic oligonucleotide
  Antisense strand to SEQ ID NO: 1152028
uauacccuucaguauauga

SEQ ID NO: 1152030 - RNA, 19 nt, Artificial Sequence
  Description of Artificial Sequence: Synthetic oligonucleotide
  Sense strand starting at position 266 of SEQ ID NO: 916379
auggguucuaguggaggua

SEQ ID NO: 1152031 - RNA, 19 nt, Artificial Sequence
  Description of Artificial Sequence: Synthetic oligonucleotide
  Antisense strand to SEQ ID NO: 1152030
uaccuccacuagaacccau

SEQ ID NO: 1152032 - RNA, 19 nt, Artificial Sequence
  Description of Artificial Sequence: Synthetic oligonucleotide
  Sense strand starting at position 267 of SEQ ID NO: 916379
uggguucuaguggagguau

SEQ ID NO: 1152033 - RNA, 19 nt, Artificial Sequence
  Description of Artificial Sequence: Synthetic oligonucleotide
  Antisense strand to SEQ ID NO: 1152032
auaccuccacuagaaccca

SEQ ID NO: 1152034 - RNA, 19 nt, Artificial Sequence
  Description of Artificial Sequence: Synthetic oligonucleotide
  Sense strand starting at position 391 of SEQ ID NO: 916379
gucucauagccauggagaa

SEQ ID NO: 1152035 - RNA, 19 nt, Artificial Sequence
  Description of Artificial Sequence: Synthetic oligonucleotide
  Antisense strand to SEQ ID NO: 1152034
uucuccauggcuaugagac

SEQ ID NO: 1152036 - RNA, 19 nt, Artificial Sequence
  Description of Artificial Sequence: Synthetic oligonucleotide
  Sense strand starting at position 443 of SEQ ID NO: 916379
aucuucugaccaugacaga

SEQ ID NO: 1152037 - RNA, 19 nt, Artificial Sequence
  Description of Artificial Sequence: Synthetic oligonucleotide
  Antisense strand to SEQ ID NO: 1152036
ucugucauggucagaagau

SEQ ID NO: 1152038 - RNA, 19 nt, Artificial Sequence
  Description of Artificial Sequence: Synthetic oligonucleotide
  Sense strand starting at position 597 of SEQ ID NO: 916379
uugaaauaggugcauggua

SEQ ID NO: 1152039 - RNA, 19 nt, Artificial Sequence
  Description of Artificial Sequence: Synthetic oligonucleotide
  Antisense strand to SEQ ID NO: 1152038
uaccaugcaccuauuucaa

SEQ ID NO: 1152040 - RNA, 19 nt, Artificial Sequence
  Description of Artificial Sequence: Synthetic oligonucleotide
  Sense strand starting at position 751 of SEQ ID NO: 916379
uuggauuggcacuauuaau

SEQ ID NO: 1152041 - RNA, 19 nt, Artificial Sequence
  Description of Artificial Sequence: Synthetic oligonucleotide
  Antisense strand to SEQ ID NO: 1152040
auuaauagugccaauccaa

SEQ ID NO: 1152042 - RNA, 19 nt, Artificial Sequence
  Description of Artificial Sequence: Synthetic oligonucleotide
  Sense strand starting at position 979 of SEQ ID NO: 916379
cccuuucuaugguuaggaa

SEQ ID NO: 1152043 - RNA, 19 nt, Artificial Sequence
  Description of Artificial Sequence: Synthetic oligonucleotide
  Antisense strand to SEQ ID NO: 1152042
uuccuaaccauagaaaggg

SEQ ID NO: 1152044 - RNA, 19 nt, Artificial Sequence
  Description of Artificial Sequence: Synthetic oligonucleotide
  Sense strand starting at position 1016 of SEQ ID NO: 916379
acuugcacccuggaaaguu

SEQ ID NO: 1152045 - RNA, 19 nt, Artificial Sequence
  Description of Artificial Sequence: Synthetic oligonucleotide
  Antisense strand to SEQ ID NO: 1152044
aacuuuccagggugcaagu

SEQ ID NO: 1152046 - RNA, 19 nt, Artificial Sequence
  Description of Artificial Sequence: Synthetic oligonucleotide
  Sense strand starting at position 1086 of SEQ ID NO: 916379
cgcucaagagcugaauaaa

SEQ ID NO: 1152047 - RNA, 19 nt, Artificial Sequence
  Description of Artificial Sequence: Synthetic oligonucleotide
  Antisense strand to SEQ ID NO: 1152046
uuuauucagcucuugagcg

SEQ ID NO: 1152048 - RNA, 19 nt, Artificial Sequence
  Description of Artificial Sequence: Synthetic oligonucleotide
  Sense strand starting at position 1151 of SEQ ID NO: 916379
acgaacccuuugucaaaga

SEQ ID NO: 1152049 - RNA, 19 nt, Artificial Sequence
  Description of Artificial Sequence: Synthetic oligonucleotide
  Antisense strand to SEQ ID NO: 1152048
ucuuugacaaaggguucgu

SEQ ID NO: 1152050 - RNA, 19 nt, Artificial Sequence
  Description of Artificial Sequence: Synthetic oligonucleotide
  Sense strand starting at position 1323 of SEQ ID NO: 916379
cuaccagugcaaugagaga

SEQ ID NO: 1152051 - RNA, 19 nt, Artificial Sequence
  Description of Artificial Sequence: Synthetic oligonucleotide
  Antisense strand to SEQ ID NO: 1152050
ucucucauugcacugguag

SEQ ID NO: 1152052 - RNA, 19 nt, Artificial Sequence
  Description of Artificial Sequence: Synthetic oligonucleotide
  Sense strand starting at position 1419 of SEQ ID NO: 916379
uuuggaucucagggucaau

SEQ ID NO: 1152053 - RNA, 19 nt, Artificial Sequence
  Description of Artificial Sequence: Synthetic oligonucleotide
  Antisense strand to SEQ ID NO: 1152052
auugacccugagauccaaa

SEQ ID NO: 1152054 - RNA, 19 nt, Artificial Sequence
  Description of Artificial Sequence: Synthetic oligonucleotide
  Sense strand starting at position 1471 of SEQ ID NO: 916379
gauagugacuucuuguaug

SEQ ID NO: 1152055 - RNA, 19 nt, Artificial Sequence
  Description of Artificial Sequence: Synthetic oligonucleotide
  Antisense strand to SEQ ID NO: 1152054
cauacaagaagucacuauc

SEQ ID NO: 1152056 - RNA, 19 nt, Artificial Sequence
  Description of Artificial Sequence: Synthetic oligonucleotide
  Sense strand starting at position 1935 of SEQ ID NO: 916379
gacucauguugacuuagag

SEQ ID NO: 1152057 - RNA, 19 nt, Artificial Sequence
  Description of Artificial Sequence: Synthetic oligonucleotide
  Antisense strand to SEQ ID NO: 1152056
cucuaagucaacaugaguc

SEQ ID NO: 1152058 - RNA, 19 nt, Artificial Sequence
  Description of Artificial Sequence: Synthetic oligonucleotide
  Sense strand starting at position 2034 of SEQ ID NO: 916379
ggaagaaauugggcuuggu

SEQ ID NO: 1152059 - RNA, 19 nt, Artificial Sequence
  Description of Artificial Sequence: Synthetic oligonucleotide
  Antisense strand to SEQ ID NO: 1152058
accaagcccaauuucuucc

SEQ ID NO: 1152060 - RNA, 19 nt, Artificial Sequence
  Description of Artificial Sequence: Synthetic oligonucleotide
  Sense strand starting at position 2464 of SEQ ID NO: 916379
agagcucacucaguuacaa

SEQ ID NO: 1152061 - RNA, 19 nt, Artificial Sequence
  Description of Artificial Sequence: Synthetic oligonucleotide
  Antisense strand to SEQ ID NO: 1152060
uuguaacugagugagcucu

SEQ ID NO: 1152062 - RNA, 19 nt, Artificial Sequence
  Description of Artificial Sequence: Synthetic oligonucleotide
  Sense strand starting at position 2579 of SEQ ID NO: 916379
agaagcugucauugaacaa

SEQ ID NO: 1152063 - RNA, 19 nt, Artificial Sequence
  Description of Artificial Sequence: Synthetic oligonucleotide
  Antisense strand to SEQ ID NO: 1152062
uuguucaaugacagcuucu

SEQ ID NO: 1152064 - RNA, 19 nt, Artificial Sequence
  Description of Artificial Sequence: Synthetic oligonucleotide
  Sense strand starting at position 2603 of SEQ ID NO: 916379
augaguggguggucuggaa

SEQ ID NO: 1152065 - RNA, 19 nt, Artificial Sequence
  Description of Artificial Sequence: Synthetic oligonucleotide
  Antisense strand to SEQ ID NO: 1152064
uuccagaccacccacucau

SEQ ID NO: 1152066 - RNA, 19 nt, Artificial Sequence
  Description of Artificial Sequence: Synthetic oligonucleotide
  Sense strand starting at position 2793 of SEQ ID NO: 916379
auagaagcucuaggacauu

SEQ ID NO: 1152067 - RNA, 19 nt, Artificial Sequence
  Description of Artificial Sequence: Synthetic oligonucleotide
  Antisense strand to SEQ ID NO: 1152066
aauguccuagagcuucuau

SEQ ID NO: 1152068 - RNA, 19 nt, Artificial Sequence
  Description of Artificial Sequence: Synthetic oligonucleotide
  Sense strand starting at position 2834 of SEQ ID NO: 916379
ugaggcuugauaggugauu

SEQ ID NO: 1152069 - RNA, 19 nt, Artificial Sequence
  Description of Artificial Sequence: Synthetic oligonucleotide
  Antisense strand to SEQ ID NO: 1152068
aaucaccuaucaagccuca

SEQ ID NO: 1152070 - RNA, 19 nt, Artificial Sequence
  Description of Artificial Sequence: Synthetic oligonucleotide
  Sense strand starting at position 2943 of SEQ ID NO: 916379
aguuuaaauuguuucugga

SEQ ID NO: 1152071 - RNA, 19 nt, Artificial Sequence
  Description of Artificial Sequence: Synthetic oligonucleotide
  Antisense strand to SEQ ID NO: 1152070
uccagaaacaauuuaaacu

SEQ ID NO: 1152072 - RNA, 19 nt, Artificial Sequence
  Description of Artificial Sequence: Synthetic oligonucleotide
  Sense strand starting at position 2950 of SEQ ID NO: 916379
auuguuucuggaggugaua

SEQ ID NO: 1152073 - RNA, 19 nt, Artificial Sequence
  Description of Artificial Sequence: Synthetic oligonucleotide
  Antisense strand to SEQ ID NO: 1152072
uaucaccuccagaaacaau

SEQ ID NO: 1152074 - RNA, 19 nt, Artificial Sequence
  Description of Artificial Sequence: Synthetic oligonucleotide
  Sense strand starting at position 2952 of SEQ ID NO: 916379
uguuucuggaggugauaau

SEQ ID NO: 1152075 - RNA, 19 nt, Artificial Sequence
  Description of Artificial Sequence: Synthetic oligonucleotide
  Antisense strand to SEQ ID NO: 1152074
auuaucaccuccagaaaca

SEQ ID NO: 1152076 - RNA, 19 nt, Artificial Sequence
  Description of Artificial Sequence: Synthetic oligonucleotide
  Sense strand starting at position 2953 of SEQ ID NO: 916379
guuucuggaggugauaaua

SEQ ID NO: 1152077 - RNA, 19 nt, Artificial Sequence
  Description of Artificial Sequence: Synthetic oligonucleotide
  Antisense strand to SEQ ID NO: 1152076
uauuaucaccuccagaaac

SEQ ID NO: 1152078 - RNA, 19 nt, Artificial Sequence
  Description of Artificial Sequence: Synthetic oligonucleotide
  Sense strand starting at position 3120 of SEQ ID NO: 916379
gguugaauaacgugaucaa

SEQ ID NO: 1152079 - RNA, 19 nt, Artificial Sequence
  Description of Artificial Sequence: Synthetic oligonucleotide
  Antisense strand to SEQ ID NO: 1152078
uugaucacguuauucaacc

SEQ ID NO: 1152080 - RNA, 19 nt, Artificial Sequence
  Description of Artificial Sequence: Synthetic oligonucleotide
  Sense strand starting at position 3121 of SEQ ID NO: 916379
guugaauaacgugaucaag

SEQ ID NO: 1152081 - RNA, 19 nt, Artificial Sequence
  Description of Artificial Sequence: Synthetic oligonucleotide
  Antisense strand to SEQ ID NO: 1152080
cuugaucacguuauucaac

SEQ ID NO: 1152082 - RNA, 19 nt, Artificial Sequence
  Description of Artificial Sequence: Synthetic oligonucleotide
  Sense strand starting at position 3123 of SEQ ID NO: 916379
ugaauaacgugaucaaguc

SEQ ID NO: 1152083 - RNA, 19 nt, Artificial Sequence
  Description of Artificial Sequence: Synthetic oligonucleotide
  Antisense strand to SEQ ID NO: 1152082
gacuugaucacguuauuca

SEQ ID NO: 1152084 - RNA, 19 nt, Artificial Sequence
  Description of Artificial Sequence: Synthetic oligonucleotide
  Sense strand starting at position 3124 of SEQ ID NO: 916379
gaauaacgugaucaagucu

SEQ ID NO: 1152085 - RNA, 19 nt, Artificial Sequence
  Description of Artificial Sequence: Synthetic oligonucleotide
  Antisense strand to SEQ ID NO: 1152084
agacuugaucacguuauuc

SEQ ID NO: 1152086 - RNA, 19 nt, Artificial Sequence
  Description of Artificial Sequence: Synthetic oligonucleotide
  Sense strand starting at position 3132 of SEQ ID NO: 916379
ugaucaagucuacacaguu

SEQ ID NO: 1152087 - RNA, 19 nt, Artificial Sequence
  Description of Artificial Sequence: Synthetic oligonucleotide
  Antisense strand to SEQ ID NO: 1152086
aacuguguagacuugauca

SEQ ID NO: 1152088 - RNA, 19 nt, Artificial Sequence
  Description of Artificial Sequence: Synthetic oligonucleotide
  Sense strand starting at position 3189 of SEQ ID NO: 916379
agcuaucaugugcaagauc

SEQ ID NO: 1152089 - RNA, 19 nt, Artificial Sequence
  Description of Artificial Sequence: Synthetic oligonucleotide
  Antisense strand to SEQ ID NO: 1152088
gaucuugcacaugauagcu

SEQ ID NO: 1152090 - RNA, 19 nt, Artificial Sequence
  Description of Artificial Sequence: Synthetic oligonucleotide
  Sense strand starting at position 3455 of SEQ ID NO: 916379
aagaguacccagcaugcau

SEQ ID NO: 1152091 - RNA, 19 nt, Artificial Sequence
  Description of Artificial Sequence: Synthetic oligonucleotide
  Antisense strand to SEQ ID NO: 1152090
augcaugcuggguacucuu

SEQ ID NO: 1152092 - RNA, 19 nt, Artificial Sequence
  Description of Artificial Sequence: Synthetic oligonucleotide
  Sense strand starting at position 3509 of SEQ ID NO: 916379
agagcagcacuugaucaau

SEQ ID NO: 1152093 - RNA, 19 nt, Artificial Sequence
  Description of Artificial Sequence: Synthetic oligonucleotide
  Antisense strand to SEQ ID NO: 1152092
auugaucaagugcugcucu

SEQ ID NO: 1152094 - RNA, 19 nt, Artificial Sequence
  Description of Artificial Sequence: Synthetic oligonucleotide
  Sense strand starting at position 3511 of SEQ ID NO: 916379
agcagcacuugaucaauau

SEQ ID NO: 1152095 - RNA, 19 nt, Artificial Sequence
  Description of Artificial Sequence: Synthetic oligonucleotide
  Antisense strand to SEQ ID NO: 1152094
auauugaucaagugcugcu

SEQ ID NO: 1152096 - RNA, 19 nt, Artificial Sequence
  Description of Artificial Sequence: Synthetic oligonucleotide
  Sense strand starting at position 3512 of SEQ ID NO: 916379
gcagcacuugaucaauauc

SEQ ID NO: 1152097 - RNA, 19 nt, Artificial Sequence
  Description of Artificial Sequence: Synthetic oligonucleotide
  Antisense strand to SEQ ID NO: 1152096
gauauugaucaagugcugc

SEQ ID NO: 1152098 - RNA, 19 nt, Artificial Sequence
  Description of Artificial Sequence: Synthetic oligonucleotide
  Sense strand starting at position 3515 of SEQ ID NO: 916379
gcacuugaucaauaucagu

SEQ ID NO: 1152099 - RNA, 19 nt, Artificial Sequence
  Description of Artificial Sequence: Synthetic oligonucleotide
  Antisense strand to SEQ ID NO: 1152098
acugauauugaucaagugc

SEQ ID NO: 1152100 - RNA, 19 nt, Artificial Sequence
  Description of Artificial Sequence: Synthetic oligonucleotide
  Sense strand starting at position 3520 of SEQ ID NO: 916379
ugaucaauaucaguggaua

SEQ ID NO: 1152101 - RNA, 19 nt, Artificial Sequence
  Description of Artificial Sequence: Synthetic oligonucleotide
  Antisense strand to SEQ ID NO: 1152100
uauccacugauauugauca

SEQ ID NO: 1152102 - RNA, 19 nt, Artificial Sequence
  Description of Artificial Sequence: Synthetic oligonucleotide
  Sense strand starting at position 3587 of SEQ ID NO: 916379
uucgaagacuucuuagaag

SEQ ID NO: 1152103 - RNA, 19 nt, Artificial Sequence
  Description of Artificial Sequence: Synthetic oligonucleotide
  Antisense strand to SEQ ID NO: 1152102
cuucuaagaagucuucgaa

SEQ ID NO: 1152104 - RNA, 19 nt, Artificial Sequence
  Description of Artificial Sequence: Synthetic oligonucleotide
  Sense strand starting at position 3738 of SEQ ID NO: 916379
uauggugugcaagaucuau

SEQ ID NO: 1152105 - RNA, 19 nt, Artificial Sequence
  Description of Artificial Sequence: Synthetic oligonucleotide
  Antisense strand to SEQ ID NO: 1152104
auagaucuugcacaccaua

SEQ ID NO: 1152106 - RNA, 19 nt, Artificial Sequence
  Description of Artificial Sequence: Synthetic oligonucleotide
  Sense strand starting at position 3742 of SEQ ID NO: 916379
gugugcaagaucuauggga

SEQ ID NO: 1152107 - RNA, 19 nt, Artificial Sequence
  Description of Artificial Sequence: Synthetic oligonucleotide
  Antisense strand to SEQ ID NO: 1152106
ucccauagaucuugcacac

SEQ ID NO: 1152108 - RNA, 19 nt, Artificial Sequence
  Description of Artificial Sequence: Synthetic oligonucleotide
  Sense strand starting at position 3744 of SEQ ID NO: 916379
gugcaagaucuaugggaga

SEQ ID NO: 1152109 - RNA, 19 nt, Artificial Sequence
  Description of Artificial Sequence: Synthetic oligonucleotide
  Antisense strand to SEQ ID NO: 1152108
ucucccauagaucuugcac

SEQ ID NO: 1152110 - RNA, 19 nt, Artificial Sequence
  Description of Artificial Sequence: Synthetic oligonucleotide
  Sense strand starting at position 7 of SEQ ID NO: 916380
ucagaacggucuuauuuaa

SEQ ID NO: 1152111 - RNA, 19 nt, Artificial Sequence
  Description of Artificial Sequence: Synthetic oligonucleotide
  Antisense strand to SEQ ID NO: 1152110
uuaaauaagaccguucuga

SEQ ID NO: 1152112 - RNA, 19 nt, Artificial Sequence
  Description of Artificial Sequence: Synthetic oligonucleotide
  Sense strand starting at position 36 of SEQ ID NO: 916380
ggcugcuauuucuaaacgu

SEQ ID NO: 1152113 - RNA, 19 nt, Artificial Sequence
  Description of Artificial Sequence: Synthetic oligonucleotide
  Antisense strand to SEQ ID NO: 1152112
acguuuagaaauagcagcc

SEQ ID NO: 1152114 - RNA, 19 nt, Artificial Sequence
  Description of Artificial Sequence: Synthetic oligonucleotide
  Sense strand starting at position 85 of SEQ ID NO: 916380
uugucuauucuccgaccca

SEQ ID NO: 1152115 - RNA, 19 nt, Artificial Sequence
  Description of Artificial Sequence: Synthetic oligonucleotide
  Antisense strand to SEQ ID NO: 1152114
ugggucggagaauagacaa

SEQ ID NO: 1152116 - RNA, 19 nt, Artificial Sequence
  Description of Artificial Sequence: Synthetic oligonucleotide
  Sense strand starting at position 302 of SEQ ID NO: 916380
gucucauaccuauaggagu

SEQ ID NO: 1152117 - RNA, 19 nt, Artificial Sequence
  Description of Artificial Sequence: Synthetic oligonucleotide
  Antisense strand to SEQ ID NO: 1152116
acuccuauagguaugagac

SEQ ID NO: 1152118 - RNA, 19 nt, Artificial Sequence
  Description of Artificial Sequence: Synthetic oligonucleotide
  Sense strand starting at position 382 of SEQ ID NO: 916380
aagagaaguucugugccca

SEQ ID NO: 1152119 - RNA, 19 nt, Artificial Sequence
  Description of Artificial Sequence: Synthetic oligonucleotide
  Antisense strand to SEQ ID NO: 1152118
ugggcacagaacuucucuu

SEQ ID NO: 1152120 - RNA, 19 nt, Artificial Sequence
  Description of Artificial Sequence: Synthetic oligonucleotide
  Sense strand starting at position 383 of SEQ ID NO: 916380
agagaaguucugugcccau

SEQ ID NO: 1152121 - RNA, 19 nt, Artificial Sequence
  Description of Artificial Sequence: Synthetic oligonucleotide
  Antisense strand to SEQ ID NO: 1152120
augggcacagaacuucucu

SEQ ID NO: 1152122 - RNA, 19 nt, Artificial Sequence
  Description of Artificial Sequence: Synthetic oligonucleotide
  Sense strand starting at position 421 of SEQ ID NO: 916380
ucagcaauuaggugguaau

SEQ ID NO: 1152123 - RNA, 19 nt, Artificial Sequence
  Description of Artificial Sequence: Synthetic oligonucleotide
  Antisense strand to SEQ ID NO: 1152122
auuaccaccuaauugcuga

SEQ ID NO: 1152124 - RNA, 19 nt, Artificial Sequence
  Description of Artificial Sequence: Synthetic oligonucleotide
  Sense strand starting at position 422 of SEQ ID NO: 916380
cagcaauuaggugguaauc

SEQ ID NO: 1152125 - RNA, 19 nt, Artificial Sequence
  Description of Artificial Sequence: Synthetic oligonucleotide
  Antisense strand to SEQ ID NO: 1152124
gauuaccaccuaauugcug

SEQ ID NO: 1152126 - RNA, 19 nt, Artificial Sequence
  Description of Artificial Sequence: Synthetic oligonucleotide
  Sense strand starting at position 459 of SEQ ID NO: 916380
gcacuuggaggacaguauu

SEQ ID NO: 1152127 - RNA, 19 nt, Artificial Sequence
  Description of Artificial Sequence: Synthetic oligonucleotide
  Antisense strand to SEQ ID NO: 1152126
aauacuguccuccaagugc

SEQ ID NO: 1152128 - RNA, 19 nt, Artificial Sequence
  Description of Artificial Sequence: Synthetic oligonucleotide
  Sense strand starting at position 747 of SEQ ID NO: 916380
gagagagguuguuccauga

SEQ ID NO: 1152129 - RNA, 19 nt, Artificial Sequence
  Description of Artificial Sequence: Synthetic oligonucleotide
  Antisense strand to SEQ ID NO: 1152128
ucauggaacaaccucucuc

SEQ ID NO: 1152130 - RNA, 19 nt, Artificial Sequence
  Description of Artificial Sequence: Synthetic oligonucleotide
  Sense strand starting at position 751 of SEQ ID NO: 916380
gagguuguuccaugaauag

SEQ ID NO: 1152131 - RNA, 19 nt, Artificial Sequence
  Description of Artificial Sequence: Synthetic oligonucleotide
  Antisense strand to SEQ ID NO: 1152130
cuauucauggaacaaccuc

SEQ ID NO: 1152132 - RNA, 19 nt, Artificial Sequence
  Description of Artificial Sequence: Synthetic oligonucleotide
  Sense strand starting at position 803 of SEQ ID NO: 916380
aguguuauguauccuagug

SEQ ID NO: 1152133 - RNA, 19 nt, Artificial Sequence
  Description of Artificial Sequence: Synthetic oligonucleotide
  Antisense strand to SEQ ID NO: 1152132
cacuaggauacauaacacu

SEQ ID NO: 1152134 - RNA, 19 nt, Artificial Sequence
  Description of Artificial Sequence: Synthetic oligonucleotide
  Sense strand starting at position 825 of SEQ ID NO: 916380
acuuccuggucccaggaau

SEQ ID NO: 1152135 - RNA, 19 nt, Artificial Sequence
  Description of Artificial Sequence: Synthetic oligonucleotide
  Antisense strand to SEQ ID NO: 1152134
auuccugggaccaggaagu

SEQ ID NO: 1152136 - RNA, 19 nt, Artificial Sequence
  Description of Artificial Sequence: Synthetic oligonucleotide
  Sense strand starting at position 982 of SEQ ID NO: 916380
ccagaagugagucgcuacu

SEQ ID NO: 1152137 - RNA, 19 nt, Artificial Sequence
  Description of Artificial Sequence: Synthetic oligonucleotide
  Antisense strand to SEQ ID NO: 1152136
aguagcgacucacuucugg

SEQ ID NO: 1152138 - RNA, 19 nt, Artificial Sequence
  Description of Artificial Sequence: Synthetic oligonucleotide
  Sense strand starting at position 984 of SEQ ID NO: 916380
agaagugagucgcuacuaa

SEQ ID NO: 1152139 - RNA, 19 nt, Artificial Sequence
  Description of Artificial Sequence: Synthetic oligonucleotide
  Antisense strand to SEQ ID NO: 1152138
uuaguagcgacucacuucu

SEQ ID NO: 1152140 - RNA, 19 nt, Artificial Sequence
  Description of Artificial Sequence: Synthetic oligonucleotide
  Sense strand starting at position 1075 of SEQ ID NO: 916380
uggauuggcuccucccaaa

SEQ ID NO: 1152141 - RNA, 19 nt, Artificial Sequence
  Description of Artificial Sequence: Synthetic oligonucleotide
  Antisense strand to SEQ ID NO: 1152140
uuugggaggagccaaucca

SEQ ID NO: 1152142 - RNA, 19 nt, Artificial Sequence
  Description of Artificial Sequence: Synthetic oligonucleotide
  Sense strand starting at position 1100 of SEQ ID NO: 916380
ccucuuguuuacuccuaga

SEQ ID NO: 1152143 - RNA, 19 nt, Artificial Sequence
  Description of Artificial Sequence: Synthetic oligonucleotide
  Antisense strand to SEQ ID NO: 1152142
ucuaggaguaaacaagagg

SEQ ID NO: 1152144 - RNA, 19 nt, Artificial Sequence
  Description of Artificial Sequence: Synthetic oligonucleotide
  Sense strand starting at position 1103 of SEQ ID NO: 916380
cuuguuuacuccuagauga

SEQ ID NO: 1152145 - RNA, 19 nt, Artificial Sequence
  Description of Artificial Sequence: Synthetic oligonucleotide
  Antisense strand to SEQ ID NO: 1152144
ucaucuaggaguaaacaag

SEQ ID NO: 1152146 - RNA, 19 nt, Artificial Sequence
  Description of Artificial Sequence: Synthetic oligonucleotide
  Sense strand starting at position 1140 of SEQ ID NO: 916380
cgcuuaacccuccaauagu

SEQ ID NO: 1152147 - RNA, 19 nt, Artificial Sequence
  Description of Artificial Sequence: Synthetic oligonucleotide
  Antisense strand to SEQ ID NO: 1152146
acuauuggaggguuaagcg

SEQ ID NO: 1152148 - RNA, 19 nt, Artificial Sequence
  Description of Artificial Sequence: Synthetic oligonucleotide
  Sense strand starting at position 1221 of SEQ ID NO: 916380
cuguccacuuccucuguaa

SEQ ID NO: 1152149 - RNA, 19 nt, Artificial Sequence
  Description of Artificial Sequence: Synthetic oligonucleotide
  Antisense strand to SEQ ID NO: 1152148
uuacagaggaaguggacag

SEQ ID NO: 1152150 - RNA, 19 nt, Artificial Sequence
  Description of Artificial Sequence: Synthetic oligonucleotide
  Sense strand starting at position 1223 of SEQ ID NO: 916380
guccacuuccucuguaaag

SEQ ID NO: 1152151 - RNA, 19 nt, Artificial Sequence
  Description of Artificial Sequence: Synthetic oligonucleotide
  Antisense strand to SEQ ID NO: 1152150
cuuuacagaggaaguggac

SEQ ID NO: 1152152 - RNA, 19 nt, Artificial Sequence
  Description of Artificial Sequence: Synthetic oligonucleotide
  Sense strand starting at position 1263 of SEQ ID NO: 916380
cccucucuccugggaaaga

SEQ ID NO: 1152153 - RNA, 19 nt, Artificial Sequence
  Description of Artificial Sequence: Synthetic oligonucleotide
  Antisense strand to SEQ ID NO: 1152152
ucuuucccaggagagaggg

SEQ ID NO: 1152154 - RNA, 19 nt, Artificial Sequence
  Description of Artificial Sequence: Synthetic oligonucleotide
  Sense strand starting at position 1375 of SEQ ID NO: 916380
ggguugggugguuauggaa

SEQ ID NO: 1152155 - RNA, 19 nt, Artificial Sequence
  Description of Artificial Sequence: Synthetic oligonucleotide
  Antisense strand to SEQ ID NO: 1152154
uuccauaaccacccaaccc

SEQ ID NO: 1152156 - RNA, 19 nt, Artificial Sequence
  Description of Artificial Sequence: Synthetic oligonucleotide
  Sense strand starting at position 1382 of SEQ ID NO: 916380
gugguuauggaaugacgga

SEQ ID NO: 1152157 - RNA, 19 nt, Artificial Sequence
  Description of Artificial Sequence: Synthetic oligonucleotide
  Antisense strand to SEQ ID NO: 1152156
uccgucauuccauaaccac

SEQ ID NO: 1152158 - RNA, 19 nt, Artificial Sequence
  Description of Artificial Sequence: Synthetic oligonucleotide
  Sense strand starting at position 1405 of SEQ ID NO: 916380
ggcaaaggaguguauaauu

SEQ ID NO: 1152159 - RNA, 19 nt, Artificial Sequence
  Description of Artificial Sequence: Synthetic oligonucleotide
  Antisense strand to SEQ ID NO: 1152158
aauuauacacuccuuugcc

SEQ ID NO: 1152160 - RNA, 19 nt, Artificial Sequence
  Description of Artificial Sequence: Synthetic oligonucleotide
  Sense strand starting at position 1412 of SEQ ID NO: 916380
gaguguauaauuggagggu

SEQ ID NO: 1152161 - RNA, 19 nt, Artificial Sequence
  Description of Artificial Sequence: Synthetic oligonucleotide
  Antisense strand to SEQ ID NO: 1152160
acccuccaauuauacacuc

SEQ ID NO: 1152162 - RNA, 19 nt, Artificial Sequence
  Description of Artificial Sequence: Synthetic oligonucleotide
  Sense strand starting at position 1416 of SEQ ID NO: 916380
guauaauuggagggucaga

SEQ ID NO: 1152163 - RNA, 19 nt, Artificial Sequence
  Description of Artificial Sequence: Synthetic oligonucleotide
  Antisense strand to SEQ ID NO: 1152162
ucugacccuccaauuauac

SEQ ID NO: 1152164 - RNA, 19 nt, Artificial Sequence
  Description of Artificial Sequence: Synthetic oligonucleotide
  Sense strand starting at position 2243 of SEQ ID NO: 916380
gcuggcgaguuugaaauuu

SEQ ID NO: 1152165 - RNA, 19 nt, Artificial Sequence
  Description of Artificial Sequence: Synthetic oligonucleotide
  Antisense strand to SEQ ID NO: 1152164
aaauuucaaacucgccagc

SEQ ID NO: 1152166 - RNA, 19 nt, Artificial Sequence
  Description of Artificial Sequence: Synthetic oligonucleotide
  Sense strand starting at position 2251 of SEQ ID NO: 916380
guuugaaauuugggagucu

SEQ ID NO: 1152167 - RNA, 19 nt, Artificial Sequence
  Description of Artificial Sequence: Synthetic oligonucleotide
  Antisense strand to SEQ ID NO: 1152166
agacucccaaauuucaaac

SEQ ID NO: 1152168 - RNA, 19 nt, Artificial Sequence
  Description of Artificial Sequence: Synthetic oligonucleotide
  Sense strand starting at position 2252 of SEQ ID NO: 916380
uuugaaauuugggagucuu

SEQ ID NO: 1152169 - RNA, 19 nt, Artificial Sequence
  Description of Artificial Sequence: Synthetic oligonucleotide
  Antisense strand to SEQ ID NO: 1152168
aagacucccaaauuucaaa

SEQ ID NO: 1152170 - RNA, 19 nt, Artificial Sequence
  Description of Artificial Sequence: Synthetic oligonucleotide
  Sense strand starting at position 2599 of SEQ ID NO: 916380
gguggaauggccugugagu

SEQ ID NO: 1152171 - RNA, 19 nt, Artificial Sequence
  Description of Artificial Sequence: Synthetic oligonucleotide
  Antisense strand to SEQ ID NO: 1152170
acucacaggccauuccacc

SEQ ID NO: 1152172 - RNA, 19 nt, Artificial Sequence
  Description of Artificial Sequence: Synthetic oligonucleotide
  Sense strand starting at position 2750 of SEQ ID NO: 916380
ccucauagcugcuugcuua

SEQ ID NO: 1152173 - RNA, 19 nt, Artificial Sequence
  Description of Artificial Sequence: Synthetic oligonucleotide
  Antisense strand to SEQ ID NO: 1152172
uaagcaagcagcuaugagg

SEQ ID NO: 1152174 - RNA, 19 nt, Artificial Sequence
  Description of Artificial Sequence: Synthetic oligonucleotide
  Sense strand starting at position 3191 of SEQ ID NO: 916380
augauaaugugucccacau

SEQ ID NO: 1152175 - RNA, 19 nt, Artificial Sequence
  Description of Artificial Sequence: Synthetic oligonucleotide
  Antisense strand to SEQ ID NO: 1152174
augugggacacauuaucau

SEQ ID NO: 1152176 - RNA, 19 nt, Artificial Sequence
  Description of Artificial Sequence: Synthetic oligonucleotide
  Sense strand starting at position 3280 of SEQ ID NO: 916380
ucaagaguucgaugccacu

SEQ ID NO: 1152177 - RNA, 19 nt, Artificial Sequence
  Description of Artificial Sequence: Synthetic oligonucleotide
  Antisense strand to SEQ ID NO: 1152176
aguggcaucgaacucuuga

SEQ ID NO: 1152178 - RNA, 19 nt, Artificial Sequence
  Description of Artificial Sequence: Synthetic oligonucleotide
  Sense strand starting at position 3425 of SEQ ID NO: 916380
cacagugugugccuguaau

SEQ ID NO: 1152179 - RNA, 19 nt, Artificial Sequence
  Description of Artificial Sequence: Synthetic oligonucleotide
  Antisense strand to SEQ ID NO: 1152178
auuacaggcacacacugug

SEQ ID NO: 1152180 - RNA, 19 nt, Artificial Sequence
  Description of Artificial Sequence: Synthetic oligonucleotide
  Sense strand starting at position 3593 of SEQ ID NO: 916380
uaauguguccuacaucgca

SEQ ID NO: 1152181 - RNA, 19 nt, Artificial Sequence
  Description of Artificial Sequence: Synthetic oligonucleotide
  Antisense strand to SEQ ID NO: 1152180
ugcgauguaggacacauua

SEQ ID NO: 1152182 - RNA, 19 nt, Artificial Sequence
  Description of Artificial Sequence: Synthetic oligonucleotide
  Sense strand starting at position 3740 of SEQ ID NO: 916380
aagggcugucuggauuaga

SEQ ID NO: 1152183 - RNA, 19 nt, Artificial Sequence
  Description of Artificial Sequence: Synthetic oligonucleotide
  Antisense strand to SEQ ID NO: 1152182
ucuaauccagacagcccuu

SEQ ID NO: 1152184 - RNA, 19 nt, Artificial Sequence
  Description of Artificial Sequence: Synthetic oligonucleotide
  Sense strand starting at position 3772 of SEQ ID NO: 916380
gggacugcauccuccaaga

SEQ ID NO: 1152185 - RNA, 19 nt, Artificial Sequence
  Description of Artificial Sequence: Synthetic oligonucleotide
  Antisense strand to SEQ ID NO: 1152184
ucuuggaggaugcaguccc

SEQ ID NO: 1152186 - RNA, 19 nt, Artificial Sequence
  Description of Artificial Sequence: Synthetic oligonucleotide
  Sense strand starting at position 3802 of SEQ ID NO: 916380
gccucugugugagaaggau

SEQ ID NO: 1152187 - RNA, 19 nt, Artificial Sequence
  Description of Artificial Sequence: Synthetic oligonucleotide
  Antisense strand to SEQ ID NO: 1152186
auccuucucacacagaggc

SEQ ID NO: 1152188 - RNA, 19 nt, Artificial Sequence
  Description of Artificial Sequence: Synthetic oligonucleotide
  Sense strand starting at position 3964 of SEQ ID NO: 916380
gacacauuuggcuguguuc

SEQ ID NO: 1152189 - RNA, 19 nt, Artificial Sequence
  Description of Artificial Sequence: Synthetic oligonucleotide
  Antisense strand to SEQ ID NO: 1152188
gaacacagccaaauguguc

SEQ ID NO: 1152190 - RNA, 19 nt, Artificial Sequence
  Description of Artificial Sequence: Synthetic oligonucleotide
  Sense strand starting at position 114 of SEQ ID NO: 916381
gucucauaccuauaggagu

SEQ ID NO: 1152191 - RNA, 19 nt, Artificial Sequence
  Description of Artificial Sequence: Synthetic oligonucleotide
  Antisense strand to SEQ ID NO: 1152190
acuccuauagguaugagac

SEQ ID NO: 1152192 - RNA, 19 nt, Artificial Sequence
  Description of Artificial Sequence: Synthetic oligonucleotide
  Sense strand starting at position 194 of SEQ ID NO: 916381
aagagaaguucugugccca

SEQ ID NO: 1152193 - RNA, 19 nt, Artificial Sequence
  Description of Artificial Sequence: Synthetic oligonucleotide
  Antisense strand to SEQ ID NO: 1152192
ugggcacagaacuucucuu

SEQ ID NO: 1152194 - RNA, 19 nt, Artificial Sequence
  Description of Artificial Sequence: Synthetic oligonucleotide
  Sense strand starting at position 195 of SEQ ID NO: 916381
agagaaguucugugcccau

SEQ ID NO: 1152195 - RNA, 19 nt, Artificial Sequence
  Description of Artificial Sequence: Synthetic oligonucleotide
  Antisense strand to SEQ ID NO: 1152194
augggcacagaacuucucu

SEQ ID NO: 1152196 - RNA, 19 nt, Artificial Sequence
  Description of Artificial Sequence: Synthetic oligonucleotide
  Sense strand starting at position 233 of SEQ ID NO: 916381
ucagcaauuaggugguaau

SEQ ID NO: 1152197 - RNA, 19 nt, Artificial Sequence
  Description of Artificial Sequence: Synthetic oligonucleotide
  Antisense strand to SEQ ID NO: 1152196
auuaccaccuaauugcuga

SEQ ID NO: 1152198 - RNA, 19 nt, Artificial Sequence
  Description of Artificial Sequence: Synthetic oligonucleotide
  Sense strand starting at position 234 of SEQ ID NO: 916381
cagcaauuaggugguaauc

SEQ ID NO: 1152199 - RNA, 19 nt, Artificial Sequence
  Description of Artificial Sequence: Synthetic oligonucleotide
  Antisense strand to SEQ ID NO: 1152198
gauuaccaccuaauugcug

SEQ ID NO: 1152200 - RNA, 19 nt, Artificial Sequence
  Description of Artificial Sequence: Synthetic oligonucleotide
  Sense strand starting at position 271 of SEQ ID NO: 916381
gcacuuggaggacaguauu

SEQ ID NO: 1152201 - RNA, 19 nt, Artificial Sequence
  Description of Artificial Sequence: Synthetic oligonucleotide
  Antisense strand to SEQ ID NO: 1152200
aauacuguccuccaagugc

SEQ ID NO: 1152202 - RNA, 19 nt, Artificial Sequence
  Description of Artificial Sequence: Synthetic oligonucleotide
  Sense strand starting at position 559 of SEQ ID NO: 916381
gagagagguuguuccauga

SEQ ID NO: 1152203 - RNA, 19 nt, Artificial Sequence
  Description of Artificial Sequence: Synthetic oligonucleotide
  Antisense strand to SEQ ID NO: 1152202
ucauggaacaaccucucuc

SEQ ID NO: 1152204 - RNA, 19 nt, Artificial Sequence
  Description of Artificial Sequence: Synthetic oligonucleotide
  Sense strand starting at position 563 of SEQ ID NO: 916381
gagguuguuccaugaauag

SEQ ID NO: 1152205 - RNA, 19 nt, Artificial Sequence
  Description of Artificial Sequence: Synthetic oligonucleotide
  Antisense strand to SEQ ID NO: 1152204
cuauucauggaacaaccuc

SEQ ID NO: 1152206 - RNA, 19 nt, Artificial Sequence
  Description of Artificial Sequence: Synthetic oligonucleotide
  Sense strand starting at position 615 of SEQ ID NO: 916381
aguguuauguauccuagug

SEQ ID NO: 1152207 - RNA, 19 nt, Artificial Sequence
  Description of Artificial Sequence: Synthetic oligonucleotide
  Antisense strand to SEQ ID NO: 1152206
cacuaggauacauaacacu

SEQ ID NO: 1152208 - RNA, 19 nt, Artificial Sequence
  Description of Artificial Sequence: Synthetic oligonucleotide
  Sense strand starting at position 794 of SEQ ID NO: 916381
ccagaagugagucgcuacu

SEQ ID NO: 1152209 - RNA, 19 nt, Artificial Sequence
  Description of Artificial Sequence: Synthetic oligonucleotide
  Antisense strand to SEQ ID NO: 1152208
aguagcgacucacuucugg

SEQ ID NO: 1152210 - RNA, 19 nt, Artificial Sequence
  Description of Artificial Sequence: Synthetic oligonucleotide
  Sense strand starting at position 796 of SEQ ID NO: 916381
agaagugagucgcuacuaa

SEQ ID NO: 1152211 - RNA, 19 nt, Artificial Sequence
  Description of Artificial Sequence: Synthetic oligonucleotide
  Antisense strand to SEQ ID NO: 1152210
uuaguagcgacucacuucu

SEQ ID NO: 1152212 - RNA, 19 nt, Artificial Sequence
  Description of Artificial Sequence: Synthetic oligonucleotide
  Sense strand starting at position 887 of SEQ ID NO: 916381
uggauuggcuccucccaaa

SEQ ID NO: 1152213 - RNA, 19 nt, Artificial Sequence
  Description of Artificial Sequence: Synthetic oligonucleotide
  Antisense strand to SEQ ID NO: 1152212
uuugggaggagccaaucca

SEQ ID NO: 1152214 - RNA, 19 nt, Artificial Sequence
  Description of Artificial Sequence: Synthetic oligonucleotide
  Sense strand starting at position 912 of SEQ ID NO: 916381
ccucuuguuuacuccuaga

SEQ ID NO: 1152215 - RNA, 19 nt, Artificial Sequence
  Description of Artificial Sequence: Synthetic oligonucleotide
  Antisense strand to SEQ ID NO: 1152214
ucuaggaguaaacaagagg

SEQ ID NO: 1152216 - RNA, 19 nt, Artificial Sequence
  Description of Artificial Sequence: Synthetic oligonucleotide
  Sense strand starting at position 952 of SEQ ID NO: 916381
cgcuuaacccuccaauagu

SEQ ID NO: 1152217 - RNA, 19 nt, Artificial Sequence
  Description of Artificial Sequence: Synthetic oligonucleotide
  Antisense strand to SEQ ID NO: 1152216
acuauuggaggguuaagcg

SEQ ID NO: 1152218 - RNA, 19 nt, Artificial Sequence
  Description of Artificial Sequence: Synthetic oligonucleotide
  Sense strand starting at position 1033 of SEQ ID NO: 916381
cuguccacuuccucuguaa

SEQ ID NO: 1152219 - RNA, 19 nt, Artificial Sequence
  Description of Artificial Sequence: Synthetic oligonucleotide
  Antisense strand to SEQ ID NO: 1152218
uuacagaggaaguggacag

SEQ ID NO: 1152220 - RNA, 19 nt, Artificial Sequence
  Description of Artificial Sequence: Synthetic oligonucleotide
  Sense strand starting at position 1035 of SEQ ID NO: 916381
guccacuuccucuguaaag

SEQ ID NO: 1152221 - RNA, 19 nt, Artificial Sequence
  Description of Artificial Sequence: Synthetic oligonucleotide
  Antisense strand to SEQ ID NO: 1152220
cuuuacagaggaaguggac

SEQ ID NO: 1152222 - RNA, 19 nt, Artificial Sequence
  Description of Artificial Sequence: Synthetic oligonucleotide
  Sense strand starting at position 1075 of SEQ ID NO: 916381
cccucucuccugggaaaga

SEQ ID NO: 1152223 - RNA, 19 nt, Artificial Sequence
  Description of Artificial Sequence: Synthetic oligonucleotide
  Antisense strand to SEQ ID NO: 1152222
ucuuucccaggagagaggg

SEQ ID NO: 1152224 - RNA, 19 nt, Artificial Sequence
  Description of Artificial Sequence: Synthetic oligonucleotide
  Sense strand starting at position 1187 of SEQ ID NO: 916381
ggguugggugguuauggaa

SEQ ID NO: 1152225 - RNA, 19 nt, Artificial Sequence
  Description of Artificial Sequence: Synthetic oligonucleotide
  Antisense strand to SEQ ID NO: 1152224
uuccauaaccacccaaccc

SEQ ID NO: 1152226 - RNA, 19 nt, Artificial Sequence
  Description of Artificial Sequence: Synthetic oligonucleotide
  Sense strand starting at position 1194 of SEQ ID NO: 916381
gugguuauggaaugacgga

SEQ ID NO: 1152227 - RNA, 19 nt, Artificial Sequence
  Description of Artificial Sequence: Synthetic oligonucleotide
  Antisense strand to SEQ ID NO: 1152226
uccgucauuccauaaccac

SEQ ID NO: 1152228 - RNA, 19 nt, Artificial Sequence
  Description of Artificial Sequence: Synthetic oligonucleotide
  Sense strand starting at position 1217 of SEQ ID NO: 916381
ggcaaaggaguguauaauu

SEQ ID NO: 1152229 - RNA, 19 nt, Artificial Sequence
  Description of Artificial Sequence: Synthetic oligonucleotide
  Antisense strand to SEQ ID NO: 1152228
aauuauacacuccuuugcc

SEQ ID NO: 1152230 - RNA, 19 nt, Artificial Sequence
  Description of Artificial Sequence: Synthetic oligonucleotide
  Sense strand starting at position 1224 of SEQ ID NO: 916381
gaguguauaauuggagggu

SEQ ID NO: 1152231 - RNA, 19 nt, Artificial Sequence
  Description of Artificial Sequence: Synthetic oligonucleotide
  Antisense strand to SEQ ID NO: 1152230
acccuccaauuauacacuc

SEQ ID NO: 1152232 - RNA, 19 nt, Artificial Sequence
  Description of Artificial Sequence: Synthetic oligonucleotide
  Sense strand starting at position 1228 of SEQ ID NO: 916381
guauaauuggagggucaga

SEQ ID NO: 1152233 - RNA, 19 nt, Artificial Sequence
  Description of Artificial Sequence: Synthetic oligonucleotide
  Antisense strand to SEQ ID NO: 1152232
ucugacccuccaauuauac

SEQ ID NO: 1152234 - RNA, 19 nt, Artificial Sequence
  Description of Artificial Sequence: Synthetic oligonucleotide
  Sense strand starting at position 2063 of SEQ ID NO: 916381
guuugaaauuugggagucu

SEQ ID NO: 1152235 - RNA, 19 nt, Artificial Sequence
  Description of Artificial Sequence: Synthetic oligonucleotide
  Antisense strand to SEQ ID NO: 1152234
agacucccaaauuucaaac

SEQ ID NO: 1152236 - RNA, 19 nt, Artificial Sequence
  Description of Artificial Sequence: Synthetic oligonucleotide
  Sense strand starting at position 2064 of SEQ ID NO: 916381
uuugaaauuugggagucuu

SEQ ID NO: 1152237 - RNA, 19 nt, Artificial Sequence
  Description of Artificial Sequence: Synthetic oligonucleotide
  Antisense strand to SEQ ID NO: 1152236
aagacucccaaauuucaaa

SEQ ID NO: 1152238 - RNA, 19 nt, Artificial Sequence
  Description of Artificial Sequence: Synthetic oligonucleotide
  Sense strand starting at position 2411 of SEQ ID NO: 916381
gguggaauggccugugagu

SEQ ID NO: 1152239 - RNA, 19 nt, Artificial Sequence
  Description of Artificial Sequence: Synthetic oligonucleotide
  Antisense strand to SEQ ID NO: 1152238
acucacaggccauuccacc

SEQ ID NO: 1152240 - RNA, 19 nt, Artificial Sequence
  Description of Artificial Sequence: Synthetic oligonucleotide
  Sense strand starting at position 2562 of SEQ ID NO: 916381
ccucauagcugcuugcuua

SEQ ID NO: 1152241 - RNA, 19 nt, Artificial Sequence
  Description of Artificial Sequence: Synthetic oligonucleotide
  Antisense strand to SEQ ID NO: 1152240
uaagcaagcagcuaugagg

SEQ ID NO: 1152242 - RNA, 19 nt, Artificial Sequence
  Description of Artificial Sequence: Synthetic oligonucleotide
  Sense strand starting at position 3003 of SEQ ID NO: 916381
augauaaugugucccacau

SEQ ID NO: 1152243 - RNA, 19 nt, Artificial Sequence
  Description of Artificial Sequence: Synthetic oligonucleotide
  Antisense strand to SEQ ID NO: 1152242
augugggacacauuaucau

SEQ ID NO: 1152244 - RNA, 19 nt, Artificial Sequence
  Description of Artificial Sequence: Synthetic oligonucleotide
  Sense strand starting at position 3092 of SEQ ID NO: 916381
ucaagaguucgaugccacu

SEQ ID NO: 1152245 - RNA, 19 nt, Artificial Sequence
  Description of Artificial Sequence: Synthetic oligonucleotide
  Antisense strand to SEQ ID NO: 1152244
aguggcaucgaacucuuga

SEQ ID NO: 1152246 - RNA, 19 nt, Artificial Sequence
  Description of Artificial Sequence: Synthetic oligonucleotide
  Sense strand starting at position 3237 of SEQ ID NO: 916381
cacagugugugccuguaau

SEQ ID NO: 1152247 - RNA, 19 nt, Artificial Sequence
  Description of Artificial Sequence: Synthetic oligonucleotide
  Antisense strand to SEQ ID NO: 1152246
auuacaggcacacacugug

SEQ ID NO: 1152248 - RNA, 19 nt, Artificial Sequence
  Description of Artificial Sequence: Synthetic oligonucleotide
  Sense strand starting at position 3405 of SEQ ID NO: 916381
uaauguguccuacaucgca

SEQ ID NO: 1152249 - RNA, 19 nt, Artificial Sequence
  Description of Artificial Sequence: Synthetic oligonucleotide
  Antisense strand to SEQ ID NO: 1152248
ugcgauguaggacacauua

SEQ ID NO: 1152250 - RNA, 19 nt, Artificial Sequence
  Description of Artificial Sequence: Synthetic oligonucleotide
  Sense strand starting at position 3552 of SEQ ID NO: 916381
aagggcugucuggauuaga

SEQ ID NO: 1152251 - RNA, 19 nt, Artificial Sequence
  Description of Artificial Sequence: Synthetic oligonucleotide
  Antisense strand to SEQ ID NO: 1152250
ucuaauccagacagcccuu

SEQ ID NO: 1152252 - RNA, 19 nt, Artificial Sequence
  Description of Artificial Sequence: Synthetic oligonucleotide
  Sense strand starting at position 3584 of SEQ ID NO: 916381
gggacugcauccuccaaga

SEQ ID NO: 1152253 - RNA, 19 nt, Artificial Sequence
  Description of Artificial Sequence: Synthetic oligonucleotide
  Antisense strand to SEQ ID NO: 1152252
ucuuggaggaugcaguccc

SEQ ID NO: 1152254 - RNA, 19 nt, Artificial Sequence
  Description of Artificial Sequence: Synthetic oligonucleotide
  Sense strand starting at position 3776 of SEQ ID NO: 916381
gacacauuuggcuguguuc

SEQ ID NO: 1152255 - RNA, 19 nt, Artificial Sequence
  Description of Artificial Sequence: Synthetic oligonucleotide
  Antisense strand to SEQ ID NO: 1152254
gaacacagccaaauguguc

SEQ ID NO: 1152256 - RNA, 19 nt, Artificial Sequence
  Description of Artificial Sequence: Synthetic oligonucleotide
  Sense strand starting at position 3807 of SEQ ID NO: 916381
uggaccuauugauucuuau

SEQ ID NO: 1152257 - RNA, 19 nt, Artificial Sequence
  Description of Artificial Sequence: Synthetic oligonucleotide
  Antisense strand to SEQ ID NO: 1152256
auaagaaucaauaggucca

SEQ ID NO: 1152258 - RNA, 19 nt, Artificial Sequence
  Description of Artificial Sequence: Synthetic oligonucleotide
  Sense strand starting at position 3810 of SEQ ID NO: 916381
accuauugauucuuaucga

SEQ ID NO: 1152259 - RNA, 19 nt, Artificial Sequence
  Description of Artificial Sequence: Synthetic oligonucleotide
  Antisense strand to SEQ ID NO: 1152258
ucgauaagaaucaauaggu

SEQ ID NO: 1152260 - RNA, 19 nt, Artificial Sequence
  Description of Artificial Sequence: Synthetic oligonucleotide
  Sense strand starting at position 3813 of SEQ ID NO: 916381
uauugauucuuaucgagcu

SEQ ID NO: 1152261 - RNA, 19 nt, Artificial Sequence
  Description of Artificial Sequence: Synthetic oligonucleotide
  Antisense strand to SEQ ID NO: 1152260
agcucgauaagaaucaaua

SEQ ID NO: 1152262 - RNA, 19 nt, Artificial Sequence
  Description of Artificial Sequence: Synthetic oligonucleotide
  Sense strand starting at position 3952 of SEQ ID NO: 916381
ccuggauuguuccugaucu

SEQ ID NO: 1152263 - RNA, 19 nt, Artificial Sequence
  Description of Artificial Sequence: Synthetic oligonucleotide
  Antisense strand to SEQ ID NO: 1152262
agaucaggaacaauccagg

SEQ ID NO: 1152264 - RNA, 19 nt, Artificial Sequence
  Description of Artificial Sequence: Synthetic oligonucleotide
  Sense strand starting at position 3954 of SEQ ID NO: 916381
uggauuguuccugaucugu

SEQ ID NO: 1152265 - RNA, 19 nt, Artificial Sequence
  Description of Artificial Sequence: Synthetic oligonucleotide
  Antisense strand to SEQ ID NO: 1152264
acagaucaggaacaaucca

SEQ ID NO: 1152266 - RNA, 19 nt, Artificial Sequence
  Description of Artificial Sequence: Synthetic oligonucleotide
  Sense strand starting at position 3956 of SEQ ID NO: 916381
gauuguuccugaucuguca

SEQ ID NO: 1152267 - RNA, 19 nt, Artificial Sequence
  Description of Artificial Sequence: Synthetic oligonucleotide
  Antisense strand to SEQ ID NO: 1152266
ugacagaucaggaacaauc

SEQ ID NO: 1152268 - RNA, 19 nt, Artificial Sequence
  Description of Artificial Sequence: Synthetic oligonucleotide
  Sense strand starting at position 3963 of SEQ ID NO: 916381
ccugaucugucaccuaaug

SEQ ID NO: 1152269 - RNA, 19 nt, Artificial Sequence
  Description of Artificial Sequence: Synthetic oligonucleotide
  Antisense strand to SEQ ID NO: 1152268
cauuaggugacagaucagg

SEQ ID NO: 1152270 - RNA, 19 nt, Artificial Sequence
  Description of Artificial Sequence: Synthetic oligonucleotide
  Sense strand starting at position 79 of SEQ ID NO: 916382
cugggagaugaauggcuuu

SEQ ID NO: 1152271 - RNA, 19 nt, Artificial Sequence
  Description of Artificial Sequence: Synthetic oligonucleotide
  Antisense strand to SEQ ID NO: 1152270
aaagccauucaucucccag

SEQ ID NO: 1152272 - RNA, 19 nt, Artificial Sequence
  Description of Artificial Sequence: Synthetic oligonucleotide
  Sense strand starting at position 82 of SEQ ID NO: 916382
ggagaugaauggcuuucca

SEQ ID NO: 1152273 - RNA, 19 nt, Artificial Sequence
  Description of Artificial Sequence: Synthetic oligonucleotide
  Antisense strand to SEQ ID NO: 1152272
uggaaagccauucaucucc

SEQ ID NO: 1152274 - RNA, 19 nt, Artificial Sequence
  Description of Artificial Sequence: Synthetic oligonucleotide
  Sense strand starting at position 94 of SEQ ID NO: 916382
cuuuccagggagugaucaa

SEQ ID NO: 1152275 - RNA, 19 nt, Artificial Sequence
  Description of Artificial Sequence: Synthetic oligonucleotide
  Antisense strand to SEQ ID NO: 1152274
uugaucacucccuggaaag

SEQ ID NO: 1152276 - RNA, 19 nt, Artificial Sequence
  Description of Artificial Sequence: Synthetic oligonucleotide
  Sense strand starting at position 330 of SEQ ID NO: 916382
gcucccauuuggucuguaa

SEQ ID NO: 1152277 - RNA, 19 nt, Artificial Sequence
  Description of Artificial Sequence: Synthetic oligonucleotide
  Antisense strand to SEQ ID NO: 1152276
uuacagaccaaaugggagc

SEQ ID NO: 1152278 - RNA, 19 nt, Artificial Sequence
  Description of Artificial Sequence: Synthetic oligonucleotide
  Sense strand starting at position 404 of SEQ ID NO: 916382
ugaguucuagaucauccuu

SEQ ID NO: 1152279 - RNA, 19 nt, Artificial Sequence
  Description of Artificial Sequence: Synthetic oligonucleotide
  Antisense strand to SEQ ID NO: 1152278
aaggaugaucuagaacuca

SEQ ID NO: 1152280 - RNA, 19 nt, Artificial Sequence
  Description of Artificial Sequence: Synthetic oligonucleotide
  Sense strand starting at position 468 of SEQ ID NO: 916382
ucaggaccucgagaagugu

SEQ ID NO: 1152281 - RNA, 19 nt, Artificial Sequence
  Description of Artificial Sequence: Synthetic oligonucleotide
  Antisense strand to SEQ ID NO: 1152280
acacuucucgagguccuga

SEQ ID NO: 1152282 - RNA, 19 nt, Artificial Sequence
  Description of Artificial Sequence: Synthetic oligonucleotide
  Sense strand starting at position 668 of SEQ ID NO: 916382
ccgcauccugguugaauuu

SEQ ID NO: 1152283 - RNA, 19 nt, Artificial Sequence
  Description of Artificial Sequence: Synthetic oligonucleotide
  Antisense strand to SEQ ID NO: 1152282
aaauucaaccaggaugcgg

SEQ ID NO: 1152284 - RNA, 19 nt, Artificial Sequence
  Description of Artificial Sequence: Synthetic oligonucleotide
  Sense strand starting at position 749 of SEQ ID NO: 916382
aagggugcugaguaugaga

SEQ ID NO: 1152285 - RNA, 19 nt, Artificial Sequence
  Description of Artificial Sequence: Synthetic oligonucleotide
  Antisense strand to SEQ ID NO: 1152284
ucucauacucagcacccuu

SEQ ID NO: 1152286 - RNA, 19 nt, Artificial Sequence
  Description of Artificial Sequence: Synthetic oligonucleotide
  Sense strand starting at position 991 of SEQ ID NO: 916382
cuucccagaguuuaguaau

SEQ ID NO: 1152287 - RNA, 19 nt, Artificial Sequence
  Description of Artificial Sequence: Synthetic oligonucleotide
  Antisense strand to SEQ ID NO: 1152286
auuacuaaacucugggaag

SEQ ID NO: 1152288 - RNA, 19 nt, Artificial Sequence
  Description of Artificial Sequence: Synthetic oligonucleotide
  Sense strand starting at position 1178 of SEQ ID NO: 916382
gacaaaugcuuccuaagug

SEQ ID NO: 1152289 - RNA, 19 nt, Artificial Sequence
  Description of Artificial Sequence: Synthetic oligonucleotide
  Antisense strand to SEQ ID NO: 1152288
cacuuaggaagcauuuguc

SEQ ID NO: 1152290 - RNA, 19 nt, Artificial Sequence
  Description of Artificial Sequence: Synthetic oligonucleotide
  Sense strand starting at position 1197 of SEQ ID NO: 916382
caggcuguuaugggaaaug

SEQ ID NO: 1152291 - RNA, 19 nt, Artificial Sequence
  Description of Artificial Sequence: Synthetic oligonucleotide
  Antisense strand to SEQ ID NO: 1152290
cauuucccauaacagccug

SEQ ID NO: 1152292 - RNA, 19 nt, Artificial Sequence
  Description of Artificial Sequence: Synthetic oligonucleotide
  Sense strand starting at position 1375 of SEQ ID NO: 916382
agagucaccuugucaauga

SEQ ID NO: 1152293 - RNA, 19 nt, Artificial Sequence
  Description of Artificial Sequence: Synthetic oligonucleotide
  Antisense strand to SEQ ID NO: 1152292
ucauugacaaggugacucu

SEQ ID NO: 1152294 - RNA, 19 nt, Artificial Sequence
  Description of Artificial Sequence: Synthetic oligonucleotide
  Sense strand starting at position 1451 of SEQ ID NO: 916382
ucuggaucucugggucaac

SEQ ID NO: 1152295 - RNA, 19 nt, Artificial Sequence
  Description of Artificial Sequence: Synthetic oligonucleotide
  Antisense strand to SEQ ID NO: 1152294
guugacccagagauccaga

SEQ ID NO: 1152296 - RNA, 19 nt, Artificial Sequence
  Description of Artificial Sequence: Synthetic oligonucleotide
  Sense strand starting at position 1454 of SEQ ID NO: 916382
ggaucucugggucaacuuu

SEQ ID NO: 1152297 - RNA, 19 nt, Artificial Sequence
  Description of Artificial Sequence: Synthetic oligonucleotide
  Antisense strand to SEQ ID NO: 1152296
aaaguugacccagagaucc

SEQ ID NO: 1152298 - RNA, 19 nt, Artificial Sequence
  Description of Artificial Sequence: Synthetic oligonucleotide
  Sense strand starting at position 1490 of SEQ ID NO: 916382
ggaggcucugguugacaga

SEQ ID NO: 1152299 - RNA, 19 nt, Artificial Sequence
  Description of Artificial Sequence: Synthetic oligonucleotide
  Antisense strand to SEQ ID NO: 1152298
ucugucaaccagagccucc

SEQ ID NO: 1152300 - RNA, 19 nt, Artificial Sequence
  Description of Artificial Sequence: Synthetic oligonucleotide
  Sense strand starting at position 1503 of SEQ ID NO: 916382
gacagagacuucguggaug

SEQ ID NO: 1152301 - RNA, 19 nt, Artificial Sequence
  Description of Artificial Sequence: Synthetic oligonucleotide
  Antisense strand to SEQ ID NO: 1152300
cauccacgaagucucuguc

SEQ ID NO: 1152302 - RNA, 19 nt, Artificial Sequence
  Description of Artificial Sequence: Synthetic oligonucleotide
  Sense strand starting at position 2133 of SEQ ID NO: 916382
gcuauuccuggugcgugau

SEQ ID NO: 1152303 - RNA, 19 nt, Artificial Sequence
  Description of Artificial Sequence: Synthetic oligonucleotide
  Antisense strand to SEQ ID NO: 1152302
aucacgcaccaggaauagc

SEQ ID NO: 1152304 - RNA, 19 nt, Artificial Sequence
  Description of Artificial Sequence: Synthetic oligonucleotide
  Sense strand starting at position 2309 of SEQ ID NO: 916382
ggaccuucugcagaaugcu

SEQ ID NO: 1152305 - RNA, 19 nt, Artificial Sequence
  Description of Artificial Sequence: Synthetic oligonucleotide
  Antisense strand to SEQ ID NO: 1152304
agcauucugcagaaggucc

SEQ ID NO: 1152306 - RNA, 19 nt, Artificial Sequence
  Description of Artificial Sequence: Synthetic oligonucleotide
  Sense strand starting at position 2408 of SEQ ID NO: 916382
aagggaugguggguuuaga

SEQ ID NO: 1152307 - RNA, 19 nt, Artificial Sequence
  Description of Artificial Sequence: Synthetic oligonucleotide
  Antisense strand to SEQ ID NO: 1152306
ucuaaacccaccaucccuu

SEQ ID NO: 1152308 - RNA, 19 nt, Artificial Sequence
  Description of Artificial Sequence: Synthetic oligonucleotide
  Sense strand starting at position 2418 of SEQ ID NO: 916382
ggguuuagagacugcaaga

SEQ ID NO: 1152309 - RNA, 19 nt, Artificial Sequence
  Description of Artificial Sequence: Synthetic oligonucleotide
  Antisense strand to SEQ ID NO: 1152308
ucuugcagucucuaaaccc

SEQ ID NO: 1152310 - RNA, 19 nt, Artificial Sequence
  Description of Artificial Sequence: Synthetic oligonucleotide
  Sense strand starting at position 2509 of SEQ ID NO: 916382
ggagacugcaaaggucuua

SEQ ID NO: 1152311 - RNA, 19 nt, Artificial Sequence
  Description of Artificial Sequence: Synthetic oligonucleotide
  Antisense strand to SEQ ID NO: 1152310
uaagaccuuugcagucucc

SEQ ID NO: 1152312 - RNA, 19 nt, Artificial Sequence
  Description of Artificial Sequence: Synthetic oligonucleotide
  Sense strand starting at position 2521 of SEQ ID NO: 916382
ggucuuaaaugaccuuaaa

SEQ ID NO: 1152313 - RNA, 19 nt, Artificial Sequence
  Description of Artificial Sequence: Synthetic oligonucleotide
  Antisense strand to SEQ ID NO: 1152312
uuuaaggucauuuaagacc

SEQ ID NO: 1152314 - RNA, 19 nt, Artificial Sequence
  Description of Artificial Sequence: Synthetic oligonucleotide
  Sense strand starting at position 2534 of SEQ ID NO: 916382
cuuaaaugcuaauuggaaa

SEQ ID NO: 1152315 - RNA, 19 nt, Artificial Sequence
  Description of Artificial Sequence: Synthetic oligonucleotide
  Antisense strand to SEQ ID NO: 1152314
uuuccaauuagcauuuaag

SEQ ID NO: 1152316 - RNA, 19 nt, Artificial Sequence
  Description of Artificial Sequence: Synthetic oligonucleotide
  Sense strand starting at position 2691 of SEQ ID NO: 916382
ccaugaugguuuguauaac

SEQ ID NO: 1152317 - RNA, 19 nt, Artificial Sequence
  Description of Artificial Sequence: Synthetic oligonucleotide
  Antisense strand to SEQ ID NO: 1152316
guuauacaaaccaucaugg

SEQ ID NO: 1152318 - RNA, 19 nt, Artificial Sequence
  Description of Artificial Sequence: Synthetic oligonucleotide
  Sense strand starting at position 2697 of SEQ ID NO: 916382
ugguuuguauaaccaucaa

SEQ ID NO: 1152319 - RNA, 19 nt, Artificial Sequence
  Description of Artificial Sequence: Synthetic oligonucleotide
  Antisense strand to SEQ ID NO: 1152318
uugaugguuauacaaacca

SEQ ID NO: 1152320 - RNA, 19 nt, Artificial Sequence
  Description of Artificial Sequence: Synthetic oligonucleotide
  Sense strand starting at position 2701 of SEQ ID NO: 916382
uuguauaaccaucaacugu

SEQ ID NO: 1152321 - RNA, 19 nt, Artificial Sequence
  Description of Artificial Sequence: Synthetic oligonucleotide
  Antisense strand to SEQ ID NO: 1152320
acaguugaugguuauacaa

SEQ ID NO: 1152322 - RNA, 19 nt, Artificial Sequence
  Description of Artificial Sequence: Synthetic oligonucleotide
  Sense strand starting at position 2822 of SEQ ID NO: 916382
gauccaaguguauauugau

SEQ ID NO: 1152323 - RNA, 19 nt, Artificial Sequence
  Description of Artificial Sequence: Synthetic oligonucleotide
  Antisense strand to SEQ ID NO: 1152322
aucaauauacacuuggauc

SEQ ID NO: 1152324 - RNA, 19 nt, Artificial Sequence
  Description of Artificial Sequence: Synthetic oligonucleotide
  Sense strand starting at position 2913 of SEQ ID NO: 916382
uccacagaugcuugaggau

SEQ ID NO: 1152325 - RNA, 19 nt, Artificial Sequence
  Description of Artificial Sequence: Synthetic oligonucleotide
  Antisense strand to SEQ ID NO: 1152324
auccucaagcaucugugga

SEQ ID NO: 1152326 - RNA, 19 nt, Artificial Sequence
  Description of Artificial Sequence: Synthetic oligonucleotide
  Sense strand starting at position 3007 of SEQ ID NO: 916382
ugggagagguucuuggagu

SEQ ID NO: 1152327 - RNA, 19 nt, Artificial Sequence
  Description of Artificial Sequence: Synthetic oligonucleotide
  Antisense strand to SEQ ID NO: 1152326
acuccaagaaccucuccca

SEQ ID NO: 1152328 - RNA, 19 nt, Artificial Sequence
  Description of Artificial Sequence: Synthetic oligonucleotide
  Sense strand starting at position 3034 of SEQ ID NO: 916382
ugaauuuagucagaaauuc

SEQ ID NO: 1152329 - RNA, 19 nt, Artificial Sequence
  Description of Artificial Sequence: Synthetic oligonucleotide
  Antisense strand to SEQ ID NO: 1152328
gaauuucugacuaaauuca

SEQ ID NO: 1152330 - RNA, 19 nt, Artificial Sequence
  Description of Artificial Sequence: Synthetic oligonucleotide
  Sense strand starting at position 3043 of SEQ ID NO: 916382
ucagaaauucuggguuuga

SEQ ID NO: 1152331 - RNA, 19 nt, Artificial Sequence
  Description of Artificial Sequence: Synthetic oligonucleotide
  Antisense strand to SEQ ID NO: 1152330
ucaaacccagaauuucuga

SEQ ID NO: 1152332 - RNA, 19 nt, Artificial Sequence
  Description of Artificial Sequence: Synthetic oligonucleotide
  Sense strand starting at position 3044 of SEQ ID NO: 916382
cagaaauucuggguuugag

SEQ ID NO: 1152333 - RNA, 19 nt, Artificial Sequence
  Description of Artificial Sequence: Synthetic oligonucleotide
  Antisense strand to SEQ ID NO: 1152332
cucaaacccagaauuucug

SEQ ID NO: 1152334 - RNA, 19 nt, Artificial Sequence
  Description of Artificial Sequence: Synthetic oligonucleotide
  Sense strand starting at position 3072 of SEQ ID NO: 916382
ugcuauuuauuggcuguga

SEQ ID NO: 1152335 - RNA, 19 nt, Artificial Sequence
  Description of Artificial Sequence: Synthetic oligonucleotide
  Antisense strand to SEQ ID NO: 1152334
ucacagccaauaaauagca

SEQ ID NO: 1152336 - RNA, 19 nt, Artificial Sequence
  Description of Artificial Sequence: Synthetic oligonucleotide
  Sense strand starting at position 3136 of SEQ ID NO: 916382
gggaaauucguaugaagug

SEQ ID NO: 1152337 - RNA, 19 nt, Artificial Sequence
  Description of Artificial Sequence: Synthetic oligonucleotide
  Antisense strand to SEQ ID NO: 1152336
cacuucauacgaauuuccc

SEQ ID NO: 1152338 - RNA, 19 nt, Artificial Sequence
  Description of Artificial Sequence: Synthetic oligonucleotide
  Sense strand starting at position 3322 of SEQ ID NO: 916382
aguaccaaguuaucacaaa

SEQ ID NO: 1152339 - RNA, 19 nt, Artificial Sequence
  Description of Artificial Sequence: Synthetic oligonucleotide
  Antisense strand to SEQ ID NO: 1152338
uuugugauaacuugguacu

SEQ ID NO: 1152340 - RNA, 19 nt, Artificial Sequence
  Description of Artificial Sequence: Synthetic oligonucleotide
  Sense strand starting at position 3390 of SEQ ID NO: 916382
uuaguuaaaugaccucaga

SEQ ID NO: 1152341 - RNA, 19 nt, Artificial Sequence
  Description of Artificial Sequence: Synthetic oligonucleotide
  Antisense strand to SEQ ID NO: 1152340
ucugaggucauuuaacuaa

SEQ ID NO: 1152342 - RNA, 19 nt, Artificial Sequence
  Description of Artificial Sequence: Synthetic oligonucleotide
  Sense strand starting at position 3467 of SEQ ID NO: 916382
auaagaauauggcuacugu

SEQ ID NO: 1152343 - RNA, 19 nt, Artificial Sequence
  Description of Artificial Sequence: Synthetic oligonucleotide
  Antisense strand to SEQ ID NO: 1152342
acaguagccauauucuuau

SEQ ID NO: 1152344 - RNA, 19 nt, Artificial Sequence
  Description of Artificial Sequence: Synthetic oligonucleotide
  Sense strand starting at position 3759 of SEQ ID NO: 916382
augugucauuaucuacaga

SEQ ID NO: 1152345 - RNA, 19 nt, Artificial Sequence
  Description of Artificial Sequence: Synthetic oligonucleotide
  Antisense strand to SEQ ID NO: 1152344
ucuguagauaaugacacau

SEQ ID NO: 1152346 - RNA, 19 nt, Artificial Sequence
  Description of Artificial Sequence: Synthetic oligonucleotide
  Sense strand starting at position 3849 of SEQ ID NO: 916382
ucuuaaugccucuaugaag

SEQ ID NO: 1152347 - RNA, 19 nt, Artificial Sequence
  Description of Artificial Sequence: Synthetic oligonucleotide
  Antisense strand to SEQ ID NO: 1152346
cuucauagaggcauuaaga

SEQ ID NO: 1152348 - RNA, 19 nt, Artificial Sequence
  Description of Artificial Sequence: Synthetic oligonucleotide
  Sense strand starting at position 3855 of SEQ ID NO: 916382
ugccucuaugaaggaaauu

SEQ ID NO: 1152349 - RNA, 19 nt, Artificial Sequence
  Description of Artificial Sequence: Synthetic oligonucleotide
  Antisense strand to SEQ ID NO: 1152348
aauuuccuucauagaggca

SEQ ID NO: 1152350 - RNA, 19 nt, Artificial Sequence
  Description of Artificial Sequence: Synthetic oligonucleotide
  Sense strand starting at position 70 of SEQ ID NO: 916383
cgaggauguuguccaggua

SEQ ID NO: 1152351 - RNA, 19 nt, Artificial Sequence
  Description of Artificial Sequence: Synthetic oligonucleotide
  Antisense strand to SEQ ID NO: 1152350
uaccuggacaacauccucg

SEQ ID NO: 1152352 - RNA, 19 nt, Artificial Sequence
  Description of Artificial Sequence: Synthetic oligonucleotide
  Sense strand starting at position 356 of SEQ ID NO: 916383
cuccuacuguagucagaga

SEQ ID NO: 1152353 - RNA, 19 nt, Artificial Sequence
  Description of Artificial Sequence: Synthetic oligonucleotide
  Antisense strand to SEQ ID NO: 1152352
ucucugacuacaguaggag

SEQ ID NO: 1152354 - RNA, 19 nt, Artificial Sequence
  Description of Artificial Sequence: Synthetic oligonucleotide
  Sense strand starting at position 369 of SEQ ID NO: 916383
cagagagauuaugaucaga

SEQ ID NO: 1152355 - RNA, 19 nt, Artificial Sequence
  Description of Artificial Sequence: Synthetic oligonucleotide
  Antisense strand to SEQ ID NO: 1152354
ucugaucauaaucucucug

SEQ ID NO: 1152356 - RNA, 19 nt, Artificial Sequence
  Description of Artificial Sequence: Synthetic oligonucleotide
  Sense strand starting at position 482 of SEQ ID NO: 916383
cuuguuguuccugggaacu

SEQ ID NO: 1152357 - RNA, 19 nt, Artificial Sequence
  Description of Artificial Sequence: Synthetic oligonucleotide
  Antisense strand to SEQ ID NO: 1152356
aguucccaggaacaacaag

SEQ ID NO: 1152358 - RNA, 19 nt, Artificial Sequence
  Description of Artificial Sequence: Synthetic oligonucleotide
  Sense strand starting at position 716 of SEQ ID NO: 916383
acuguccuggucuggagaa

SEQ ID NO: 1152359 - RNA, 19 nt, Artificial Sequence
  Description of Artificial Sequence: Synthetic oligonucleotide
  Antisense strand to SEQ ID NO: 1152358
uucuccagaccaggacagu

SEQ ID NO: 1152360 - RNA, 19 nt, Artificial Sequence
  Description of Artificial Sequence: Synthetic oligonucleotide
  Sense strand starting at position 746 of SEQ ID NO: 916383
acucuugucuuccugacua

SEQ ID NO: 1152361 - RNA, 19 nt, Artificial Sequence
  Description of Artificial Sequence: Synthetic oligonucleotide
  Antisense strand to SEQ ID NO: 1152360
uagucaggaagacaagagu

SEQ ID NO: 1152362 - RNA, 19 nt, Artificial Sequence
  Description of Artificial Sequence: Synthetic oligonucleotide
  Sense strand starting at position 820 of SEQ ID NO: 916383
agguucuuaugcucuuaau

SEQ ID NO: 1152363 - RNA, 19 nt, Artificial Sequence
  Description of Artificial Sequence: Synthetic oligonucleotide
  Antisense strand to SEQ ID NO: 1152362
auuaagagcauaagaaccu

SEQ ID NO: 1152364 - RNA, 19 nt, Artificial Sequence
  Description of Artificial Sequence: Synthetic oligonucleotide
  Sense strand starting at position 1190 of SEQ ID NO: 916383
uccagucuggccuauccaa

SEQ ID NO: 1152365 - RNA, 19 nt, Artificial Sequence
  Description of Artificial Sequence: Synthetic oligonucleotide
  Antisense strand to SEQ ID NO: 1152364
uuggauaggccagacugga

SEQ ID NO: 1152366 - RNA, 19 nt, Artificial Sequence
  Description of Artificial Sequence: Synthetic oligonucleotide
  Sense strand starting at position 1286 of SEQ ID NO: 916383
uuaccuugucaaugaagga

SEQ ID NO: 1152367 - RNA, 19 nt, Artificial Sequence
  Description of Artificial Sequence: Synthetic oligonucleotide
  Antisense strand to SEQ ID NO: 1152366
uccuucauugacaagguaa

SEQ ID NO: 1152368 - RNA, 19 nt, Artificial Sequence
  Description of Artificial Sequence: Synthetic oligonucleotide
  Sense strand starting at position 1397 of SEQ ID NO: 916383
ggagacucugguugauagu

SEQ ID NO: 1152369 - RNA, 19 nt, Artificial Sequence
  Description of Artificial Sequence: Synthetic oligonucleotide
  Antisense strand to SEQ ID NO: 1152368
acuaucaaccagagucucc

SEQ ID NO: 1152370 - RNA, 19 nt, Artificial Sequence
  Description of Artificial Sequence: Synthetic oligonucleotide
  Sense strand starting at position 1949 of SEQ ID NO: 916383
cgaagagaagaguguaagu

SEQ ID NO: 1152371 - RNA, 19 nt, Artificial Sequence
  Description of Artificial Sequence: Synthetic oligonucleotide
  Antisense strand to SEQ ID NO: 1152370
acuuacacucuucucuucg

SEQ ID NO: 1152372 - RNA, 19 nt, Artificial Sequence
  Description of Artificial Sequence: Synthetic oligonucleotide
  Sense strand starting at position 2037 of SEQ ID NO: 916383
auauacauuugaggagguu

SEQ ID NO: 1152373 - RNA, 19 nt, Artificial Sequence
  Description of Artificial Sequence: Synthetic oligonucleotide
  Antisense strand to SEQ ID NO: 1152372
aaccuccucaaauguauau

SEQ ID NO: 1152374 - RNA, 19 nt, Artificial Sequence
  Description of Artificial Sequence: Synthetic oligonucleotide
  Sense strand starting at position 2049 of SEQ ID NO: 916383
ggagguuguugggcucaaa

SEQ ID NO: 1152375 - RNA, 19 nt, Artificial Sequence
  Description of Artificial Sequence: Synthetic oligonucleotide
  Antisense strand to SEQ ID NO: 1152374
uuugagcccaacaaccucc

SEQ ID NO: 1152376 - RNA, 19 nt, Artificial Sequence
  Description of Artificial Sequence: Synthetic oligonucleotide
  Sense strand starting at position 2052 of SEQ ID NO: 916383
gguuguugggcucaaacga

SEQ ID NO: 1152377 - RNA, 19 nt, Artificial Sequence
  Description of Artificial Sequence: Synthetic oligonucleotide
  Antisense strand to SEQ ID NO: 1152376
ucguuugagcccaacaacc

SEQ ID NO: 1152378 - RNA, 19 nt, Artificial Sequence
  Description of Artificial Sequence: Synthetic oligonucleotide
  Sense strand starting at position 2118 of SEQ ID NO: 916383
aggcaauaaguuuguucca

SEQ ID NO: 1152379 - RNA, 19 nt, Artificial Sequence
  Description of Artificial Sequence: Synthetic oligonucleotide
  Antisense strand to SEQ ID NO: 1152378
uggaacaaacuuauugccu

SEQ ID NO: 1152380 - RNA, 19 nt, Artificial Sequence
  Description of Artificial Sequence: Synthetic oligonucleotide
  Sense strand starting at position 2397 of SEQ ID NO: 916383
ugcuucucugaguagugga

SEQ ID NO: 1152381 - RNA, 19 nt, Artificial Sequence
  Description of Artificial Sequence: Synthetic oligonucleotide
  Antisense strand to SEQ ID NO: 1152380
uccacuacucagagaagca

SEQ ID NO: 1152382 - RNA, 19 nt, Artificial Sequence
  Description of Artificial Sequence: Synthetic oligonucleotide
  Sense strand starting at position 2430 of SEQ ID NO: 916383
cucacagcucugggaaagu

SEQ ID NO: 1152383 - RNA, 19 nt, Artificial Sequence
  Description of Artificial Sequence: Synthetic oligonucleotide
  Antisense strand to SEQ ID NO: 1152382
acuuucccagagcugugag

SEQ ID NO: 1152384 - RNA, 19 nt, Artificial Sequence
  Description of Artificial Sequence: Synthetic oligonucleotide
  Sense strand starting at position 2439 of SEQ ID NO: 916383
cugggaaaguaucuuaaug

SEQ ID NO: 1152385 - RNA, 19 nt, Artificial Sequence
  Description of Artificial Sequence: Synthetic oligonucleotide
  Antisense strand to SEQ ID NO: 1152384
cauuaagauacuuucccag

SEQ ID NO: 1152386 - RNA, 19 nt, Artificial Sequence
  Description of Artificial Sequence: Synthetic oligonucleotide
  Sense strand starting at position 2617 of SEQ ID NO: 916383
gcuuuaguucaggagguag

SEQ ID NO: 1152387 - RNA, 19 nt, Artificial Sequence
  Description of Artificial Sequence: Synthetic oligonucleotide
  Antisense strand to SEQ ID NO: 1152386
cuaccuccugaacuaaagc

SEQ ID NO: 1152388 - RNA, 19 nt, Artificial Sequence
  Description of Artificial Sequence: Synthetic oligonucleotide
  Sense strand starting at position 2642 of SEQ ID NO: 916383
uuugguuuaugacuaucuu

SEQ ID NO: 1152389 - RNA, 19 nt, Artificial Sequence
  Description of Artificial Sequence: Synthetic oligonucleotide
  Antisense strand to SEQ ID NO: 1152388
aagauagucauaaaccaaa

SEQ ID NO: 1152390 - RNA, 19 nt, Artificial Sequence
  Description of Artificial Sequence: Synthetic oligonucleotide
  Sense strand starting at position 2643 of SEQ ID NO: 916383
uugguuuaugacuaucuuu

SEQ ID NO: 1152391 - RNA, 19 nt, Artificial Sequence
  Description of Artificial Sequence: Synthetic oligonucleotide
  Antisense strand to SEQ ID NO: 1152390
aaagauagucauaaaccaa

SEQ ID NO: 1152392 - RNA, 19 nt, Artificial Sequence
  Description of Artificial Sequence: Synthetic oligonucleotide
  Sense strand starting at position 2646 of SEQ ID NO: 916383
guuuaugacuaucuuugga

SEQ ID NO: 1152393 - RNA, 19 nt, Artificial Sequence
  Description of Artificial Sequence: Synthetic oligonucleotide
  Antisense strand to SEQ ID NO: 1152392
uccaaagauagucauaaac

SEQ ID NO: 1152394 - RNA, 19 nt, Artificial Sequence
  Description of Artificial Sequence: Synthetic oligonucleotide
  Sense strand starting at position 2675 of SEQ ID NO: 916383
aguuaacaccuauguaugu

SEQ ID NO: 1152395 - RNA, 19 nt, Artificial Sequence
  Description of Artificial Sequence: Synthetic oligonucleotide
  Antisense strand to SEQ ID NO: 1152394
acauacauagguguuaacu

SEQ ID NO: 1152396 - RNA, 19 nt, Artificial Sequence
  Description of Artificial Sequence: Synthetic oligonucleotide
  Sense strand starting at position 2685 of SEQ ID NO: 916383
uauguauguugagcagaca

SEQ ID NO: 1152397 - RNA, 19 nt, Artificial Sequence
  Description of Artificial Sequence: Synthetic oligonucleotide
  Antisense strand to SEQ ID NO: 1152396
ugucugcucaacauacaua

SEQ ID NO: 1152398 - RNA, 19 nt, Artificial Sequence
  Description of Artificial Sequence: Synthetic oligonucleotide
  Sense strand starting at position 2836 of SEQ ID NO: 916383
uagcuuaaggccuagggaa

SEQ ID NO: 1152399 - RNA, 19 nt, Artificial Sequence
  Description of Artificial Sequence: Synthetic oligonucleotide
  Antisense strand to SEQ ID NO: 1152398
uucccuaggccuuaagcua

SEQ ID NO: 1152400 - RNA, 19 nt, Artificial Sequence
  Description of Artificial Sequence: Synthetic oligonucleotide
  Sense strand starting at position 3075 of SEQ ID NO: 916383
gaauaugucugacuccgaa

SEQ ID NO: 1152401 - RNA, 19 nt, Artificial Sequence
  Description of Artificial Sequence: Synthetic oligonucleotide
  Antisense strand to SEQ ID NO: 1152400
uucggagucagacauauuc

SEQ ID NO: 1152402 - RNA, 19 nt, Artificial Sequence
  Description of Artificial Sequence: Synthetic oligonucleotide
  Sense strand starting at position 3197 of SEQ ID NO: 916383
ugcuuaucucuccaggaca

SEQ ID NO: 1152403 - RNA, 19 nt, Artificial Sequence
  Description of Artificial Sequence: Synthetic oligonucleotide
  Antisense strand to SEQ ID NO: 1152402
uguccuggagagauaagca

SEQ ID NO: 1152404 - RNA, 19 nt, Artificial Sequence
  Description of Artificial Sequence: Synthetic oligonucleotide
  Sense strand starting at position 3279 of SEQ ID NO: 916383
gcaggagccuccuuagaau

SEQ ID NO: 1152405 - RNA, 19 nt, Artificial Sequence
  Description of Artificial Sequence: Synthetic oligonucleotide
  Antisense strand to SEQ ID NO: 1152404
auucuaaggaggcuccugc

SEQ ID NO: 1152406 - RNA, 19 nt, Artificial Sequence
  Description of Artificial Sequence: Synthetic oligonucleotide
  Sense strand starting at position 3469 of SEQ ID NO: 916383
ccauaagcucuccaggagu

SEQ ID NO: 1152407 - RNA, 19 nt, Artificial Sequence
  Description of Artificial Sequence: Synthetic oligonucleotide
  Antisense strand to SEQ ID NO: 1152406
acuccuggagagcuuaugg

SEQ ID NO: 1152408 - RNA, 19 nt, Artificial Sequence
  Description of Artificial Sequence: Synthetic oligonucleotide
  Sense strand starting at position 3471 of SEQ ID NO: 916383
auaagcucuccaggaguuu

SEQ ID NO: 1152409 - RNA, 19 nt, Artificial Sequence
  Description of Artificial Sequence: Synthetic oligonucleotide
  Antisense strand to SEQ ID NO: 1152408
aaacuccuggagagcuuau

SEQ ID NO: 1152410 - RNA, 19 nt, Artificial Sequence
  Description of Artificial Sequence: Synthetic oligonucleotide
  Sense strand starting at position 3487 of SEQ ID NO: 916383
uuuccagucuuguuaauau

SEQ ID NO: 1152411 - RNA, 19 nt, Artificial Sequence
  Description of Artificial Sequence: Synthetic oligonucleotide
  Antisense strand to SEQ ID NO: 1152410
auauuaacaagacuggaaa

SEQ ID NO: 1152412 - RNA, 19 nt, Artificial Sequence
  Description of Artificial Sequence: Synthetic oligonucleotide
  Sense strand starting at position 3531 of SEQ ID NO: 916383
gugcuuugccaauaguaag

SEQ ID NO: 1152413 - RNA, 19 nt, Artificial Sequence
  Description of Artificial Sequence: Synthetic oligonucleotide
  Antisense strand to SEQ ID NO: 1152412
cuuacuauuggcaaagcac

SEQ ID NO: 1152414 - RNA, 19 nt, Artificial Sequence
  Description of Artificial Sequence: Synthetic oligonucleotide
  Sense strand starting at position 3543 of SEQ ID NO: 916383
uaguaagugccauaaaguu

SEQ ID NO: 1152415 - RNA, 19 nt, Artificial Sequence
  Description of Artificial Sequence: Synthetic oligonucleotide
  Antisense strand to SEQ ID NO: 1152414
aacuuuauggcacuuacua

SEQ ID NO: 1152416 - RNA, 19 nt, Artificial Sequence
  Description of Artificial Sequence: Synthetic oligonucleotide
  Sense strand starting at position 3555 of SEQ ID NO: 916383
uaaaguuugguuuguugaa

SEQ ID NO: 1152417 - RNA, 19 nt, Artificial Sequence
  Description of Artificial Sequence: Synthetic oligonucleotide
  Antisense strand to SEQ ID NO: 1152416
uucaacaaaccaaacuuua

SEQ ID NO: 1152418 - RNA, 19 nt, Artificial Sequence
  Description of Artificial Sequence: Synthetic oligonucleotide
  Sense strand starting at position 3612 of SEQ ID NO: 916383
ugguuaagcccuuauacug

SEQ ID NO: 1152419 - RNA, 19 nt, Artificial Sequence
  Description of Artificial Sequence: Synthetic oligonucleotide
  Antisense strand to SEQ ID NO: 1152418
caguauaagggcuuaacca

SEQ ID NO: 1152420 - RNA, 19 nt, Artificial Sequence
  Description of Artificial Sequence: Synthetic oligonucleotide
  Sense strand starting at position 3619 of SEQ ID NO: 916383
gcccuuauacuggauuaca

SEQ ID NO: 1152421 - RNA, 19 nt, Artificial Sequence
  Description of Artificial Sequence: Synthetic oligonucleotide
  Antisense strand to SEQ ID NO: 1152420
uguaauccaguauaagggc

SEQ ID NO: 1152422 - RNA, 19 nt, Artificial Sequence
  Description of Artificial Sequence: Synthetic oligonucleotide
  Sense strand starting at position 3668 of SEQ ID NO: 916383
acucccauugcaugaggua

SEQ ID NO: 1152423 - RNA, 19 nt, Artificial Sequence
  Description of Artificial Sequence: Synthetic oligonucleotide
  Antisense strand to SEQ ID NO: 1152422
uaccucaugcaaugggagu

SEQ ID NO: 1152424 - RNA, 19 nt, Artificial Sequence
  Description of Artificial Sequence: Synthetic oligonucleotide
  Sense strand starting at position 3686 of SEQ ID NO: 916383
agcacaagcuaauugagau

SEQ ID NO: 1152425 - RNA, 19 nt, Artificial Sequence
  Description of Artificial Sequence: Synthetic oligonucleotide
  Antisense strand to SEQ ID NO: 1152424
aucucaauuagcuugugcu

SEQ ID NO: 1152426 - RNA, 19 nt, Artificial Sequence
  Description of Artificial Sequence: Synthetic oligonucleotide
  Sense strand starting at position 3858 of SEQ ID NO: 916383
guugaaguugacuggacau

SEQ ID NO: 1152427 - RNA, 19 nt, Artificial Sequence
  Description of Artificial Sequence: Synthetic oligonucleotide
  Antisense strand to SEQ ID NO: 1152426
auguccagucaacuucaac

SEQ ID NO: 1152428 - RNA, 19 nt, Artificial Sequence
  Description of Artificial Sequence: Synthetic oligonucleotide
  Sense strand starting at position 3953 of SEQ ID NO: 916383
gcaaguucugcccauggac

SEQ ID NO: 1152429 - RNA, 19 nt, Artificial Sequence
  Description of Artificial Sequence: Synthetic oligonucleotide
  Antisense strand to SEQ ID NO: 1152428
guccaugggcagaacuugc

SEQ ID NO: 1152430 - RNA, 19 nt, Artificial Sequence
  Description of Artificial Sequence: Synthetic oligonucleotide
  Sense strand starting at position 326 of SEQ ID NO: 916384
gugaacaacugaguauaga

SEQ ID NO: 1152431 - RNA, 19 nt, Artificial Sequence
  Description of Artificial Sequence: Synthetic oligonucleotide
  Antisense strand to SEQ ID NO: 1152430
ucuauacucaguuguucac

SEQ ID NO: 1152432 - RNA, 19 nt, Artificial Sequence
  Description of Artificial Sequence: Synthetic oligonucleotide
  Sense strand starting at position 479 of SEQ ID NO: 916384
uguuaugagccucagaauu

SEQ ID NO: 1152433 - RNA, 19 nt, Artificial Sequence
  Description of Artificial Sequence: Synthetic oligonucleotide
  Antisense strand to SEQ ID NO: 1152432
aauucugaggcucauaaca

SEQ ID NO: 1152434 - RNA, 19 nt, Artificial Sequence
  Description of Artificial Sequence: Synthetic oligonucleotide
  Sense strand starting at position 575 of SEQ ID NO: 916384
aucaaagagcccugaguuu

SEQ ID NO: 1152435 - RNA, 19 nt, Artificial Sequence
  Description of Artificial Sequence: Synthetic oligonucleotide
  Antisense strand to SEQ ID NO: 1152434
aaacucagggcucuuugau

SEQ ID NO: 1152436 - RNA, 19 nt, Artificial Sequence
  Description of Artificial Sequence: Synthetic oligonucleotide
  Sense strand starting at position 639 of SEQ ID NO: 916384
aaguuacuauggguuuauu

SEQ ID NO: 1152437 - RNA, 19 nt, Artificial Sequence
  Description of Artificial Sequence: Synthetic oligonucleotide
  Antisense strand to SEQ ID NO: 1152436
aauaaacccauaguaacuu

SEQ ID NO: 1152438 - RNA, 19 nt, Artificial Sequence
  Description of Artificial Sequence: Synthetic oligonucleotide
  Sense strand starting at position 738 of SEQ ID NO: 916384
agacuuugaugccugguga

SEQ ID NO: 1152439 - RNA, 19 nt, Artificial Sequence
  Description of Artificial Sequence: Synthetic oligonucleotide
  Antisense strand to SEQ ID NO: 1152438
ucaccaggcaucaaagucu

SEQ ID NO: 1152440 - RNA, 19 nt, Artificial Sequence
  Description of Artificial Sequence: Synthetic oligonucleotide
  Sense strand starting at position 739 of SEQ ID NO: 916384
gacuuugaugccuggugaa

SEQ ID NO: 1152441 - RNA, 19 nt, Artificial Sequence
  Description of Artificial Sequence: Synthetic oligonucleotide
  Antisense strand to SEQ ID NO: 1152440
uucaccaggcaucaaaguc

SEQ ID NO: 1152442 - RNA, 19 nt, Artificial Sequence
  Description of Artificial Sequence: Synthetic oligonucleotide
  Sense strand starting at position 797 of SEQ ID NO: 916384
agucaucaaucuuuggaug

SEQ ID NO: 1152443 - RNA, 19 nt, Artificial Sequence
  Description of Artificial Sequence: Synthetic oligonucleotide
  Antisense strand to SEQ ID NO: 1152442
cauccaaagauugaugacu

SEQ ID NO: 1152444 - RNA, 19 nt, Artificial Sequence
  Description of Artificial Sequence: Synthetic oligonucleotide
  Sense strand starting at position 798 of SEQ ID NO: 916384
gucaucaaucuuuggauga

SEQ ID NO: 1152445 - RNA, 19 nt, Artificial Sequence
  Description of Artificial Sequence: Synthetic oligonucleotide
  Antisense strand to SEQ ID NO: 1152444
ucauccaaagauugaugac

SEQ ID NO: 1152446 - RNA, 19 nt, Artificial Sequence
  Description of Artificial Sequence: Synthetic oligonucleotide
  Sense strand starting at position 981 of SEQ ID NO: 916384
uguccagucaaaggaauga

SEQ ID NO: 1152447 - RNA, 19 nt, Artificial Sequence
  Description of Artificial Sequence: Synthetic oligonucleotide
  Antisense strand to SEQ ID NO: 1152446
ucauuccuuugacuggaca

SEQ ID NO: 1152448 - RNA, 19 nt, Artificial Sequence
  Description of Artificial Sequence: Synthetic oligonucleotide
  Sense strand starting at position 1076 of SEQ ID NO: 916384
agcuuaguugucuucuguu

SEQ ID NO: 1152449 - RNA, 19 nt, Artificial Sequence
  Description of Artificial Sequence: Synthetic oligonucleotide
  Antisense strand to SEQ ID NO: 1152448
aacagaagacaacuaagcu

SEQ ID NO: 1152450 - RNA, 19 nt, Artificial Sequence
  Description of Artificial Sequence: Synthetic oligonucleotide
  Sense strand starting at position 1103 of SEQ ID NO: 916384
agaaguggccacuguuaag

SEQ ID NO: 1152451 - RNA, 19 nt, Artificial Sequence
  Description of Artificial Sequence: Synthetic oligonucleotide
  Antisense strand to SEQ ID NO: 1152450
cuuaacaguggccacuucu

SEQ ID NO: 1152452 - RNA, 19 nt, Artificial Sequence
  Description of Artificial Sequence: Synthetic oligonucleotide
  Sense strand starting at position 1109 of SEQ ID NO: 916384
ggccacuguuaagugauua

SEQ ID NO: 1152453 - RNA, 19 nt, Artificial Sequence
  Description of Artificial Sequence: Synthetic oligonucleotide
  Antisense strand to SEQ ID NO: 1152452
uaaucacuuaacaguggcc

SEQ ID NO: 1152454 - RNA, 19 nt, Artificial Sequence
  Description of Artificial Sequence: Synthetic oligonucleotide
  Sense strand starting at position 1132 of SEQ ID NO: 916384
gguuaacugcauuauauuc

SEQ ID NO: 1152455 - RNA, 19 nt, Artificial Sequence
  Description of Artificial Sequence: Synthetic oligonucleotide
  Antisense strand to SEQ ID NO: 1152454
gaauauaaugcaguuaacc

SEQ ID NO: 1152456 - RNA, 19 nt, Artificial Sequence
  Description of Artificial Sequence: Synthetic oligonucleotide
  Sense strand starting at position 1190 of SEQ ID NO: 916384
cccuuuauagcugggauga

SEQ ID NO: 1152457 - RNA, 19 nt, Artificial Sequence
  Description of Artificial Sequence: Synthetic oligonucleotide
  Antisense strand to SEQ ID NO: 1152456
ucaucccagcuauaaaggg

SEQ ID NO: 1152458 - RNA, 19 nt, Artificial Sequence
  Description of Artificial Sequence: Synthetic oligonucleotide
  Sense strand starting at position 1191 of SEQ ID NO: 916384
ccuuuauagcugggaugac

SEQ ID NO: 1152459 - RNA, 19 nt, Artificial Sequence
  Description of Artificial Sequence: Synthetic oligonucleotide
  Antisense strand to SEQ ID NO: 1152458
gucaucccagcuauaaagg

SEQ ID NO: 1152460 - RNA, 19 nt, Artificial Sequence
  Description of Artificial Sequence: Synthetic oligonucleotide
  Sense strand starting at position 1223 of SEQ ID NO: 916384
gccaaaugauuuguccagu

SEQ ID NO: 1152461 - RNA, 19 nt, Artificial Sequence
  Description of Artificial Sequence: Synthetic oligonucleotide
  Antisense strand to SEQ ID NO: 1152460
acuggacaaaucauuuggc

SEQ ID NO: 1152462 - RNA, 19 nt, Artificial Sequence
  Description of Artificial Sequence: Synthetic oligonucleotide
  Sense strand starting at position 1247 of SEQ ID NO: 916384
acagccugucuagggaauu

SEQ ID NO: 1152463 - RNA, 19 nt, Artificial Sequence
  Description of Artificial Sequence: Synthetic oligonucleotide
  Antisense strand to SEQ ID NO: 1152462
aauucccuagacaggcugu

SEQ ID NO: 1152464 - RNA, 19 nt, Artificial Sequence
  Description of Artificial Sequence: Synthetic oligonucleotide
  Sense strand starting at position 1272 of SEQ ID NO: 916384
acuuaacugccuugagcau

SEQ ID NO: 1152465 - RNA, 19 nt, Artificial Sequence
  Description of Artificial Sequence: Synthetic oligonucleotide
  Antisense strand to SEQ ID NO: 1152464
augcucaaggcaguuaagu

SEQ ID NO: 1152466 - RNA, 19 nt, Artificial Sequence
  Description of Artificial Sequence: Synthetic oligonucleotide
  Sense strand starting at position 1497 of SEQ ID NO: 916384
gcaaacuuguuguugagga

SEQ ID NO: 1152467 - RNA, 19 nt, Artificial Sequence
  Description of Artificial Sequence: Synthetic oligonucleotide
  Antisense strand to SEQ ID NO: 1152466
uccucaacaacaaguuugc

SEQ ID NO: 1152468 - RNA, 19 nt, Artificial Sequence
  Description of Artificial Sequence: Synthetic oligonucleotide
  Sense strand starting at position 1549 of SEQ ID NO: 916384
ucuggaucucagggucaau

SEQ ID NO: 1152469 - RNA, 19 nt, Artificial Sequence
  Description of Artificial Sequence: Synthetic oligonucleotide
  Antisense strand to SEQ ID NO: 1152468
auugacccugagauccaga

SEQ ID NO: 1152470 - RNA, 19 nt, Artificial Sequence
  Description of Artificial Sequence: Synthetic oligonucleotide
  Sense strand starting at position 1955 of SEQ ID NO: 916384
cgagcugggagcuaucaga

SEQ ID NO: 1152471 - RNA, 19 nt, Artificial Sequence
  Description of Artificial Sequence: Synthetic oligonucleotide
  Antisense strand to SEQ ID NO: 1152470
ucugauagcucccagcucg

SEQ ID NO: 1152472 - RNA, 19 nt, Artificial Sequence
  Description of Artificial Sequence: Synthetic oligonucleotide
  Sense strand starting at position 2024 of SEQ ID NO: 916384
cuuauauguccuggagcag

SEQ ID NO: 1152473 - RNA, 19 nt, Artificial Sequence
  Description of Artificial Sequence: Synthetic oligonucleotide
  Antisense strand to SEQ ID NO: 1152472
cugcuccaggacauauaag

SEQ ID NO: 1152474 - RNA, 19 nt, Artificial Sequence
  Description of Artificial Sequence: Synthetic oligonucleotide
  Sense strand starting at position 2077 of SEQ ID NO: 916384
cugaaacaucucugggcuu

SEQ ID NO: 1152475 - RNA, 19 nt, Artificial Sequence
  Description of Artificial Sequence: Synthetic oligonucleotide
  Antisense strand to SEQ ID NO: 1152474
aagcccagagauguuucag

SEQ ID NO: 1152476 - RNA, 19 nt, Artificial Sequence
  Description of Artificial Sequence: Synthetic oligonucleotide
  Sense strand starting at position 2130 of SEQ ID NO: 916384
uugagcaugucacuaaaca

SEQ ID NO: 1152477 - RNA, 19 nt, Artificial Sequence
  Description of Artificial Sequence: Synthetic oligonucleotide
  Antisense strand to SEQ ID NO: 1152476
uguuuagugacaugcucaa

SEQ ID NO: 1152478 - RNA, 19 nt, Artificial Sequence
  Description of Artificial Sequence: Synthetic oligonucleotide
  Sense strand starting at position 2193 of SEQ ID NO: 916384
cacacuacucucugggaga

SEQ ID NO: 1152479 - RNA, 19 nt, Artificial Sequence
  Description of Artificial Sequence: Synthetic oligonucleotide
  Antisense strand to SEQ ID NO: 1152478
ucucccagagaguagugug

SEQ ID NO: 1152480 - RNA, 19 nt, Artificial Sequence
  Description of Artificial Sequence: Synthetic oligonucleotide
  Sense strand starting at position 2229 of SEQ ID NO: 916384
agggcuuccuaaucagaag

SEQ ID NO: 1152481 - RNA, 19 nt, Artificial Sequence
  Description of Artificial Sequence: Synthetic oligonucleotide
  Antisense strand to SEQ ID NO: 1152480
cuucugauuaggaagcccu

SEQ ID NO: 1152482 - RNA, 19 nt, Artificial Sequence
  Description of Artificial Sequence: Synthetic oligonucleotide
  Sense strand starting at position 2452 of SEQ ID NO: 916384
uugcuuucccuguaaauug

SEQ ID NO: 1152483 - RNA, 19 nt, Artificial Sequence
  Description of Artificial Sequence: Synthetic oligonucleotide
  Antisense strand to SEQ ID NO: 1152482
caauuuacagggaaagcaa

SEQ ID NO: 1152484 - RNA, 19 nt, Artificial Sequence
  Description of Artificial Sequence: Synthetic oligonucleotide
  Sense strand starting at position 2506 of SEQ ID NO: 916384
gauagagugagcuagugau

SEQ ID NO: 1152485 - RNA, 19 nt, Artificial Sequence
  Description of Artificial Sequence: Synthetic oligonucleotide
  Antisense strand to SEQ ID NO: 1152484
aucacuagcucacucuauc

SEQ ID NO: 1152486 - RNA, 19 nt, Artificial Sequence
  Description of Artificial Sequence: Synthetic oligonucleotide
  Sense strand starting at position 2510 of SEQ ID NO: 916384
gagugagcuagugauuaau

SEQ ID NO: 1152487 - RNA, 19 nt, Artificial Sequence
  Description of Artificial Sequence: Synthetic oligonucleotide
  Antisense strand to SEQ ID NO: 1152486
auuaaucacuagcucacuc

SEQ ID NO: 1152488 - RNA, 19 nt, Artificial Sequence
  Description of Artificial Sequence: Synthetic oligonucleotide
  Sense strand starting at position 2526 of SEQ ID NO: 916384
aauggagugcucuguaaac

SEQ ID NO: 1152489 - RNA, 19 nt, Artificial Sequence
  Description of Artificial Sequence: Synthetic oligonucleotide
  Antisense strand to SEQ ID NO: 1152488
guuuacagagcacuccauu

SEQ ID NO: 1152490 - RNA, 19 nt, Artificial Sequence
  Description of Artificial Sequence: Synthetic oligonucleotide
  Sense strand starting at position 2528 of SEQ ID NO: 916384
uggagugcucuguaaacug

SEQ ID NO: 1152491 - RNA, 19 nt, Artificial Sequence
  Description of Artificial Sequence: Synthetic oligonucleotide
  Antisense strand to SEQ ID NO: 1152490
caguuuacagagcacucca

SEQ ID NO: 1152492 - RNA, 19 nt, Artificial Sequence
  Description of Artificial Sequence: Synthetic oligonucleotide
  Sense strand starting at position 2604 of SEQ ID NO: 916384
ggcuccauguaccuauaaa

SEQ ID NO: 1152493 - RNA, 19 nt, Artificial Sequence
  Description of Artificial Sequence: Synthetic oligonucleotide
  Antisense strand to SEQ ID NO: 1152492
uuuauagguacauggagcc

SEQ ID NO: 1152494 - RNA, 19 nt, Artificial Sequence
  Description of Artificial Sequence: Synthetic oligonucleotide
  Sense strand starting at position 2626 of SEQ ID NO: 916384
gggaaauauucuguauucc

SEQ ID NO: 1152495 - RNA, 19 nt, Artificial Sequence
  Description of Artificial Sequence: Synthetic oligonucleotide
  Antisense strand to SEQ ID NO: 1152494
ggaauacagaauauuuccc

SEQ ID NO: 1152496 - RNA, 19 nt, Artificial Sequence
  Description of Artificial Sequence: Synthetic oligonucleotide
  Sense strand starting at position 2931 of SEQ ID NO: 916384
ucuguaauggugcagaauu

SEQ ID NO: 1152497 - RNA, 19 nt, Artificial Sequence
  Description of Artificial Sequence: Synthetic oligonucleotide
  Antisense strand to SEQ ID NO: 1152496
aauucugcaccauuacaga

SEQ ID NO: 1152498 - RNA, 19 nt, Artificial Sequence
  Description of Artificial Sequence: Synthetic oligonucleotide
  Sense strand starting at position 2941 of SEQ ID NO: 916384
ugcagaauucagggcagga

SEQ ID NO: 1152499 - RNA, 19 nt, Artificial Sequence
  Description of Artificial Sequence: Synthetic oligonucleotide
  Antisense strand to SEQ ID NO: 1152498
uccugcccugaauucugca

SEQ ID NO: 1152500 - RNA, 19 nt, Artificial Sequence
  Description of Artificial Sequence: Synthetic oligonucleotide
  Sense strand starting at position 2985 of SEQ ID NO: 916384
aucccuuuggcagaaugau

SEQ ID NO: 1152501 - RNA, 19 nt, Artificial Sequence
  Description of Artificial Sequence: Synthetic oligonucleotide
  Antisense strand to SEQ ID NO: 1152500
aucauucugccaaagggau

SEQ ID NO: 1152502 - RNA, 19 nt, Artificial Sequence
  Description of Artificial Sequence: Synthetic oligonucleotide
  Sense strand starting at position 3329 of SEQ ID NO: 916384
gagaucugauguuuaauaa

SEQ ID NO: 1152503 - RNA, 19 nt, Artificial Sequence
  Description of Artificial Sequence: Synthetic oligonucleotide
  Antisense strand to SEQ ID NO: 1152502
uuauuaaacaucagaucuc

SEQ ID NO: 1152504 - RNA, 19 nt, Artificial Sequence
  Description of Artificial Sequence: Synthetic oligonucleotide
  Sense strand starting at position 3510 of SEQ ID NO: 916384
uuaucagcagcguaauaau

SEQ ID NO: 1152505 - RNA, 19 nt, Artificial Sequence
  Description of Artificial Sequence: Synthetic oligonucleotide
  Antisense strand to SEQ ID NO: 1152504
auuauuacgcugcugauaa

SEQ ID NO: 1152506 - RNA, 19 nt, Artificial Sequence
  Description of Artificial Sequence: Synthetic oligonucleotide
  Sense strand starting at position 3521 of SEQ ID NO: 916384
guaauaauggccuaauaca

SEQ ID NO: 1152507 - RNA, 19 nt, Artificial Sequence
  Description of Artificial Sequence: Synthetic oligonucleotide
  Antisense strand to SEQ ID NO: 1152506
uguauuaggccauuauuac

SEQ ID NO: 1152508 - RNA, 19 nt, Artificial Sequence
  Description of Artificial Sequence: Synthetic oligonucleotide
  Sense strand starting at position 3761 of SEQ ID NO: 916384
ucaccagcaccuggauaau

SEQ ID NO: 1152509 - RNA, 19 nt, Artificial Sequence
  Description of Artificial Sequence: Synthetic oligonucleotide
  Antisense strand to SEQ ID NO: 1152508
auuauccaggugcugguga

SEQ ID NO: 1152510 - RNA, 19 nt, Artificial Sequence
  Description of Artificial Sequence: Synthetic oligonucleotide
  Sense strand starting at position 205 of SEQ ID NO: 916385
gccuuacaucagggcagau

SEQ ID NO: 1152511 - RNA, 19 nt, Artificial Sequence
  Description of Artificial Sequence: Synthetic oligonucleotide
  Antisense strand to SEQ ID NO: 1152510
aucugcccugauguaaggc

SEQ ID NO: 1152512 - RNA, 19 nt, Artificial Sequence
  Description of Artificial Sequence: Synthetic oligonucleotide
  Sense strand starting at position 269 of SEQ ID NO: 916385
ugacuaaguuccuugcaga

SEQ ID NO: 1152513 - RNA, 19 nt, Artificial Sequence
  Description of Artificial Sequence: Synthetic oligonucleotide
  Antisense strand to SEQ ID NO: 1152512
ucugcaaggaacuuaguca

SEQ ID NO: 1152514 - RNA, 19 nt, Artificial Sequence
  Description of Artificial Sequence: Synthetic oligonucleotide
  Sense strand starting at position 270 of SEQ ID NO: 916385
gacuaaguuccuugcagag

SEQ ID NO: 1152515 - RNA, 19 nt, Artificial Sequence
  Description of Artificial Sequence: Synthetic oligonucleotide
  Antisense strand to SEQ ID NO: 1152514
cucugcaaggaacuuaguc

SEQ ID NO: 1152516 - RNA, 19 nt, Artificial Sequence
  Description of Artificial Sequence: Synthetic oligonucleotide
  Sense strand starting at position 360 of SEQ ID NO: 916385
ggagguguccauggaaggu

SEQ ID NO: 1152517 - RNA, 19 nt, Artificial Sequence
  Description of Artificial Sequence: Synthetic oligonucleotide
  Antisense strand to SEQ ID NO: 1152516
accuuccauggacaccucc

SEQ ID NO: 1152518 - RNA, 19 nt, Artificial Sequence
  Description of Artificial Sequence: Synthetic oligonucleotide
  Sense strand starting at position 364 of SEQ ID NO: 916385
guguccauggaagguauau

SEQ ID NO: 1152519 - RNA, 19 nt, Artificial Sequence
  Description of Artificial Sequence: Synthetic oligonucleotide
  Antisense strand to SEQ ID NO: 1152518
auauaccuuccauggacac

SEQ ID NO: 1152520 - RNA, 19 nt, Artificial Sequence
  Description of Artificial Sequence: Synthetic oligonucleotide
  Sense strand starting at position 483 of SEQ ID NO: 916385
ucacuuguucuugaagucu

SEQ ID NO: 1152521 - RNA, 19 nt, Artificial Sequence
  Description of Artificial Sequence: Synthetic oligonucleotide
  Antisense strand to SEQ ID NO: 1152520
agacuucaagaacaaguga

SEQ ID NO: 1152522 - RNA, 19 nt, Artificial Sequence
  Description of Artificial Sequence: Synthetic oligonucleotide
  Sense strand starting at position 515 of SEQ ID NO: 916385
gcauguuucucagcucuga

SEQ ID NO: 1152523 - RNA, 19 nt, Artificial Sequence
  Description of Artificial Sequence: Synthetic oligonucleotide
  Antisense strand to SEQ ID NO: 1152522
ucagagcugagaaacaugc

SEQ ID NO: 1152524 - RNA, 19 nt, Artificial Sequence
  Description of Artificial Sequence: Synthetic oligonucleotide
  Sense strand starting at position 708 of SEQ ID NO: 916385
gggagcaggguuugaagau

SEQ ID NO: 1152525 - RNA, 19 nt, Artificial Sequence
  Description of Artificial Sequence: Synthetic oligonucleotide
  Antisense strand to SEQ ID NO: 1152524
aucuucaaacccugcuccc

SEQ ID NO: 1152526 - RNA, 19 nt, Artificial Sequence
  Description of Artificial Sequence: Synthetic oligonucleotide
  Sense strand starting at position 709 of SEQ ID NO: 916385
ggagcaggguuugaagaua

SEQ ID NO: 1152527 - RNA, 19 nt, Artificial Sequence
  Description of Artificial Sequence: Synthetic oligonucleotide
  Antisense strand to SEQ ID NO: 1152526
uaucuucaaacccugcucc

SEQ ID NO: 1152528 - RNA, 19 nt, Artificial Sequence
  Description of Artificial Sequence: Synthetic oligonucleotide
  Sense strand starting at position 1074 of SEQ ID NO: 916385
accucugaaugggaagaaa

SEQ ID NO: 1152529 - RNA, 19 nt, Artificial Sequence
  Description of Artificial Sequence: Synthetic oligonucleotide
  Antisense strand to SEQ ID NO: 1152528
uuucuucccauucagaggu

SEQ ID NO: 1152530 - RNA, 19 nt, Artificial Sequence
  Description of Artificial Sequence: Synthetic oligonucleotide
  Sense strand starting at position 1123 of SEQ ID NO: 916385
ucagaacguguccacaaau

SEQ ID NO: 1152531 - RNA, 19 nt, Artificial Sequence
  Description of Artificial Sequence: Synthetic oligonucleotide
  Antisense strand to SEQ ID NO: 1152530
auuuguggacacguucuga

SEQ ID NO: 1152532 - RNA, 19 nt, Artificial Sequence
  Description of Artificial Sequence: Synthetic oligonucleotide
  Sense strand starting at position 1296 of SEQ ID NO: 916385
gaggcaaacuuauuguuga

SEQ ID NO: 1152533 - RNA, 19 nt, Artificial Sequence
  Description of Artificial Sequence: Synthetic oligonucleotide
  Antisense strand to SEQ ID NO: 1152532
ucaacaauaaguuugccuc

SEQ ID NO: 1152534 - RNA, 19 nt, Artificial Sequence
  Description of Artificial Sequence: Synthetic oligonucleotide
  Sense strand starting at position 1997 of SEQ ID NO: 916385
ucgagcugugaaugauuaa

SEQ ID NO: 1152535 - RNA, 19 nt, Artificial Sequence
  Description of Artificial Sequence: Synthetic oligonucleotide
  Antisense strand to SEQ ID NO: 1152534
uuaaucauucacagcucga

SEQ ID NO: 1152536 - RNA, 19 nt, Artificial Sequence
  Description of Artificial Sequence: Synthetic oligonucleotide
  Sense strand starting at position 1998 of SEQ ID NO: 916385
cgagcugugaaugauuaag

SEQ ID NO: 1152537 - RNA, 19 nt, Artificial Sequence
  Description of Artificial Sequence: Synthetic oligonucleotide
  Antisense strand to SEQ ID NO: 1152536
cuuaaucauucacagcucg

SEQ ID NO: 1152538 - RNA, 19 nt, Artificial Sequence
  Description of Artificial Sequence: Synthetic oligonucleotide
  Sense strand starting at position 2102 of SEQ ID NO: 916385
aggcucugcucaguuagaa

SEQ ID NO: 1152539 - RNA, 19 nt, Artificial Sequence
  Description of Artificial Sequence: Synthetic oligonucleotide
  Antisense strand to SEQ ID NO: 1152538
uucuaacugagcagagccu

SEQ ID NO: 1152540 - RNA, 19 nt, Artificial Sequence
  Description of Artificial Sequence: Synthetic oligonucleotide
  Sense strand starting at position 2138 of SEQ ID NO: 916385
cacugaucucuuggcagca

SEQ ID NO: 1152541 - RNA, 19 nt, Artificial Sequence
  Description of Artificial Sequence: Synthetic oligonucleotide
  Antisense strand to SEQ ID NO: 1152540
ugcugccaagagaucagug

SEQ ID NO: 1152542 - RNA, 19 nt, Artificial Sequence
  Description of Artificial Sequence: Synthetic oligonucleotide
  Sense strand starting at position 2139 of SEQ ID NO: 916385
acugaucucuuggcagcaa

SEQ ID NO: 1152543 - RNA, 19 nt, Artificial Sequence
  Description of Artificial Sequence: Synthetic oligonucleotide
  Antisense strand to SEQ ID NO: 1152542
uugcugccaagagaucagu

SEQ ID NO: 1152544 - RNA, 19 nt, Artificial Sequence
  Description of Artificial Sequence: Synthetic oligonucleotide
  Sense strand starting at position 2440 of SEQ ID NO: 916385
ggcaaucuguagccuuaua

SEQ ID NO: 1152545 - RNA, 19 nt, Artificial Sequence
  Description of Artificial Sequence: Synthetic oligonucleotide
  Antisense strand to SEQ ID NO: 1152544
uauaaggcuacagauugcc

SEQ ID NO: 1152546 - RNA, 19 nt, Artificial Sequence
  Description of Artificial Sequence: Synthetic oligonucleotide
  Sense strand starting at position 2450 of SEQ ID NO: 916385
agccuuauauucuugguua

SEQ ID NO: 1152547 - RNA, 19 nt, Artificial Sequence
  Description of Artificial Sequence: Synthetic oligonucleotide
  Antisense strand to SEQ ID NO: 1152546
uaaccaagaauauaaggcu

SEQ ID NO: 1152548 - RNA, 19 nt, Artificial Sequence
  Description of Artificial Sequence: Synthetic oligonucleotide
  Sense strand starting at position 2452 of SEQ ID NO: 916385
ccuuauauucuugguuaug

SEQ ID NO: 1152549 - RNA, 19 nt, Artificial Sequence
  Description of Artificial Sequence: Synthetic oligonucleotide
  Antisense strand to SEQ ID NO: 1152548
cauaaccaagaauauaagg

SEQ ID NO: 1152550 - RNA, 19 nt, Artificial Sequence
  Description of Artificial Sequence: Synthetic oligonucleotide
  Sense strand starting at position 2453 of SEQ ID NO: 916385
cuuauauucuugguuaugu

SEQ ID NO: 1152551 - RNA, 19 nt, Artificial Sequence
  Description of Artificial Sequence: Synthetic oligonucleotide
  Antisense strand to SEQ ID NO: 1152550
acauaaccaagaauauaag

SEQ ID NO: 1152552 - RNA, 19 nt, Artificial Sequence
  Description of Artificial Sequence: Synthetic oligonucleotide
  Sense strand starting at position 2464 of SEQ ID NO: 916385
gguuaugugcuagagggaa

SEQ ID NO: 1152553 - RNA, 19 nt, Artificial Sequence
  Description of Artificial Sequence: Synthetic oligonucleotide
  Antisense strand to SEQ ID NO: 1152552
uucccucuagcacauaacc

SEQ ID NO: 1152554 - RNA, 19 nt, Artificial Sequence
  Description of Artificial Sequence: Synthetic oligonucleotide
  Sense strand starting at position 2624 of SEQ ID NO: 916385
ucuuuaaggccagguuuau

SEQ ID NO: 1152555 - RNA, 19 nt, Artificial Sequence
  Description of Artificial Sequence: Synthetic oligonucleotide
  Antisense strand to SEQ ID NO: 1152554
auaaaccuggccuuaaaga

SEQ ID NO: 1152556 - RNA, 19 nt, Artificial Sequence
  Description of Artificial Sequence: Synthetic oligonucleotide
  Sense strand starting at position 2633 of SEQ ID NO: 916385
ccagguuuauccuuccaua

SEQ ID NO: 1152557 - RNA, 19 nt, Artificial Sequence
  Description of Artificial Sequence: Synthetic oligonucleotide
  Antisense strand to SEQ ID NO: 1152556
uauggaaggauaaaccugg

SEQ ID NO: 1152558 - RNA, 19 nt, Artificial Sequence
  Description of Artificial Sequence: Synthetic oligonucleotide
  Sense strand starting at position 2773 of SEQ ID NO: 916385
cugagacucaugggcuaua

SEQ ID NO: 1152559 - RNA, 19 nt, Artificial Sequence
  Description of Artificial Sequence: Synthetic oligonucleotide
  Antisense strand to SEQ ID NO: 1152558
uauagcccaugagucucag

SEQ ID NO: 1152560 - RNA, 19 nt, Artificial Sequence
  Description of Artificial Sequence: Synthetic oligonucleotide
  Sense strand starting at position 2854 of SEQ ID NO: 916385
gcucuauuccacuagggaa

SEQ ID NO: 1152561 - RNA, 19 nt, Artificial Sequence
  Description of Artificial Sequence: Synthetic oligonucleotide
  Antisense strand to SEQ ID NO: 1152560
uucccuaguggaauagagc

SEQ ID NO: 1152562 - RNA, 19 nt, Artificial Sequence
  Description of Artificial Sequence: Synthetic oligonucleotide
  Sense strand starting at position 2872 of SEQ ID NO: 916385
agaaaugagucaucguaug

SEQ ID NO: 1152563 - RNA, 19 nt, Artificial Sequence
  Description of Artificial Sequence: Synthetic oligonucleotide
  Antisense strand to SEQ ID NO: 1152562
cauacgaugacucauuucu

SEQ ID NO: 1152564 - RNA, 19 nt, Artificial Sequence
  Description of Artificial Sequence: Synthetic oligonucleotide
  Sense strand starting at position 2878 of SEQ ID NO: 916385
gagucaucguauguguuga

SEQ ID NO: 1152565 - RNA, 19 nt, Artificial Sequence
  Description of Artificial Sequence: Synthetic oligonucleotide
  Antisense strand to SEQ ID NO: 1152564
ucaacacauacgaugacuc

SEQ ID NO: 1152566 - RNA, 19 nt, Artificial Sequence
  Description of Artificial Sequence: Synthetic oligonucleotide
  Sense strand starting at position 2880 of SEQ ID NO: 916385
gucaucguauguguugaua

SEQ ID NO: 1152567 - RNA, 19 nt, Artificial Sequence
  Description of Artificial Sequence: Synthetic oligonucleotide
  Antisense strand to SEQ ID NO: 1152566
uaucaacacauacgaugac

SEQ ID NO: 1152568 - RNA, 19 nt, Artificial Sequence
  Description of Artificial Sequence: Synthetic oligonucleotide
  Sense strand starting at position 2889 of SEQ ID NO: 916385
uguguugauacaggcugaa

SEQ ID NO: 1152569 - RNA, 19 nt, Artificial Sequence
  Description of Artificial Sequence: Synthetic oligonucleotide
  Antisense strand to SEQ ID NO: 1152568
uucagccuguaucaacaca

SEQ ID NO: 1152570 - RNA, 19 nt, Artificial Sequence
  Description of Artificial Sequence: Synthetic oligonucleotide
  Sense strand starting at position 2975 of SEQ ID NO: 916385
cuguuauaacggcgaacca

SEQ ID NO: 1152571 - RNA, 19 nt, Artificial Sequence
  Description of Artificial Sequence: Synthetic oligonucleotide
  Antisense strand to SEQ ID NO: 1152570
ugguucgccguuauaacag

SEQ ID NO: 1152572 - RNA, 19 nt, Artificial Sequence
  Description of Artificial Sequence: Synthetic oligonucleotide
  Sense strand starting at position 3008 of SEQ ID NO: 916385
gcgggacuugcucugcuuu

SEQ ID NO: 1152573 - RNA, 19 nt, Artificial Sequence
  Description of Artificial Sequence: Synthetic oligonucleotide
  Antisense strand to SEQ ID NO: 1152572
aaagcagagcaagucccgc

SEQ ID NO: 1152574 - RNA, 19 nt, Artificial Sequence
  Description of Artificial Sequence: Synthetic oligonucleotide
  Sense strand starting at position 3074 of SEQ ID NO: 916385
acgggauucuaagucuaug

SEQ ID NO: 1152575 - RNA, 19 nt, Artificial Sequence
  Description of Artificial Sequence: Synthetic oligonucleotide
  Antisense strand to SEQ ID NO: 1152574
cauagacuuagaaucccgu

SEQ ID NO: 1152576 - RNA, 19 nt, Artificial Sequence
  Description of Artificial Sequence: Synthetic oligonucleotide
  Sense strand starting at position 3259 of SEQ ID NO: 916385
acacacgucuguucuaaac

SEQ ID NO: 1152577 - RNA, 19 nt, Artificial Sequence
  Description of Artificial Sequence: Synthetic oligonucleotide
  Antisense strand to SEQ ID NO: 1152576
guuuagaacagacgugugu

SEQ ID NO: 1152578 - RNA, 19 nt, Artificial Sequence
  Description of Artificial Sequence: Synthetic oligonucleotide
  Sense strand starting at position 3569 of SEQ ID NO: 916385
ugcugaggaucagcugaaa

SEQ ID NO: 1152579 - RNA, 19 nt, Artificial Sequence
  Description of Artificial Sequence: Synthetic oligonucleotide
  Antisense strand to SEQ ID NO: 1152578
uuucagcugauccucagca

SEQ ID NO: 1152580 - RNA, 19 nt, Artificial Sequence
  Description of Artificial Sequence: Synthetic oligonucleotide
  Sense strand starting at position 3631 of SEQ ID NO: 916385
aggucaaucucggcagaca

SEQ ID NO: 1152581 - RNA, 19 nt, Artificial Sequence
  Description of Artificial Sequence: Synthetic oligonucleotide
  Antisense strand to SEQ ID NO: 1152580
ugucugccgagauugaccu

SEQ ID NO: 1152582 - RNA, 19 nt, Artificial Sequence
  Description of Artificial Sequence: Synthetic oligonucleotide
  Sense strand starting at position 3670 of SEQ ID NO: 916385
cuuacaggucuugagcaaa

SEQ ID NO: 1152583 - RNA, 19 nt, Artificial Sequence
  Description of Artificial Sequence: Synthetic oligonucleotide
  Antisense strand to SEQ ID NO: 1152582
uuugcucaagaccuguaag

SEQ ID NO: 1152584 - RNA, 19 nt, Artificial Sequence
  Description of Artificial Sequence: Synthetic oligonucleotide
  Sense strand starting at position 3767 of SEQ ID NO: 916385
uuugguugcuuucuggaga

SEQ ID NO: 1152585 - RNA, 19 nt, Artificial Sequence
  Description of Artificial Sequence: Synthetic oligonucleotide
  Antisense strand to SEQ ID NO: 1152584
ucuccagaaagcaaccaaa

SEQ ID NO: 1152586 - RNA, 19 nt, Artificial Sequence
  Description of Artificial Sequence: Synthetic oligonucleotide
  Sense strand starting at position 3781 of SEQ ID NO: 916385
ggagaacagaugugagugu

SEQ ID NO: 1152587 - RNA, 19 nt, Artificial Sequence
  Description of Artificial Sequence: Synthetic oligonucleotide
  Antisense strand to SEQ ID NO: 1152586
acacucacaucuguucucc

SEQ ID NO: 1152588 - RNA, 19 nt, Artificial Sequence
  Description of Artificial Sequence: Synthetic oligonucleotide
  Sense strand starting at position 3860 of SEQ ID NO: 916385
gccugaagcaagugucuga

SEQ ID NO: 1152589 - RNA, 19 nt, Artificial Sequence
  Description of Artificial Sequence: Synthetic oligonucleotide
  Antisense strand to SEQ ID NO: 1152588
ucagacacuugcuucaggc

SEQ ID NO: 1152590 - RNA, 19 nt, Artificial Sequence
  Description of Artificial Sequence: Synthetic oligonucleotide
  Sense strand starting at position 89 of SEQ ID NO: 916386
gcaggaaacugaguccauu

SEQ ID NO: 1152591 - RNA, 19 nt, Artificial Sequence
  Description of Artificial Sequence: Synthetic oligonucleotide
  Antisense strand to SEQ ID NO: 1152590
aauggacucaguuuccugc

SEQ ID NO: 1152592 - RNA, 19 nt, Artificial Sequence
  Description of Artificial Sequence: Synthetic oligonucleotide
  Sense strand starting at position 525 of SEQ ID NO: 916386
ggaauugucccacggacca

SEQ ID NO: 1152593 - RNA, 19 nt, Artificial Sequence
  Description of Artificial Sequence: Synthetic oligonucleotide
  Antisense strand to SEQ ID NO: 1152592
ugguccgugggacaauucc

SEQ ID NO: 1152594 - RNA, 19 nt, Artificial Sequence
  Description of Artificial Sequence: Synthetic oligonucleotide
  Sense strand starting at position 551 of SEQ ID NO: 916386
guucucacucucuaaguua

SEQ ID NO: 1152595 - RNA, 19 nt, Artificial Sequence
  Description of Artificial Sequence: Synthetic oligonucleotide
  Antisense strand to SEQ ID NO: 1152594
uaacuuagagagugagaac

SEQ ID NO: 1152596 - RNA, 19 nt, Artificial Sequence
  Description of Artificial Sequence: Synthetic oligonucleotide
  Sense strand starting at position 558 of SEQ ID NO: 916386
cucucuaaguuauuggaca

SEQ ID NO: 1152597 - RNA, 19 nt, Artificial Sequence
  Description of Artificial Sequence: Synthetic oligonucleotide
  Antisense strand to SEQ ID NO: 1152596
uguccaauaacuuagagag

SEQ ID NO: 1152598 - RNA, 19 nt, Artificial Sequence
  Description of Artificial Sequence: Synthetic oligonucleotide
  Sense strand starting at position 707 of SEQ ID NO: 916386
uuaaauguugcccaaugau

SEQ ID NO: 1152599 - RNA, 19 nt, Artificial Sequence
  Description of Artificial Sequence: Synthetic oligonucleotide
  Antisense strand to SEQ ID NO: 1152598
aucauugggcaacauuuaa

SEQ ID NO: 1152600 - RNA, 19 nt, Artificial Sequence
  Description of Artificial Sequence: Synthetic oligonucleotide
  Sense strand starting at position 777 of SEQ ID NO: 916386
ugauguuauggucauucuu

SEQ ID NO: 1152601 - RNA, 19 nt, Artificial Sequence
  Description of Artificial Sequence: Synthetic oligonucleotide
  Antisense strand to SEQ ID NO: 1152600
aagaaugaccauaacauca

SEQ ID NO: 1152602 - RNA, 19 nt, Artificial Sequence
  Description of Artificial Sequence: Synthetic oligonucleotide
  Sense strand starting at position 1080 of SEQ ID NO: 916386
gggagugaugcccaucccu

SEQ ID NO: 1152603 - RNA, 19 nt, Artificial Sequence
  Description of Artificial Sequence: Synthetic oligonucleotide
  Antisense strand to SEQ ID NO: 1152602
agggaugggcaucacuccc

SEQ ID NO: 1152604 - RNA, 19 nt, Artificial Sequence
  Description of Artificial Sequence: Synthetic oligonucleotide
  Sense strand starting at position 1328 of SEQ ID NO: 916386
gugggaucgauuugcaggu

SEQ ID NO: 1152605 - RNA, 19 nt, Artificial Sequence
  Description of Artificial Sequence: Synthetic oligonucleotide
  Antisense strand to SEQ ID NO: 1152604
accugcaaaucgaucccac

SEQ ID NO: 1152606 - RNA, 19 nt, Artificial Sequence
  Description of Artificial Sequence: Synthetic oligonucleotide
  Sense strand starting at position 1977 of SEQ ID NO: 916386
aguuucuagaaagguauga

SEQ ID NO: 1152607 - RNA, 19 nt, Artificial Sequence
  Description of Artificial Sequence: Synthetic oligonucleotide
  Antisense strand to SEQ ID NO: 1152606
ucauaccuuucuagaaacu

SEQ ID NO: 1152608 - RNA, 19 nt, Artificial Sequence
  Description of Artificial Sequence: Synthetic oligonucleotide
  Sense strand starting at position 2071 of SEQ ID NO: 916386
cacaauaagcccggguaua

SEQ ID NO: 1152609 - RNA, 19 nt, Artificial Sequence
  Description of Artificial Sequence: Synthetic oligonucleotide
  Antisense strand to SEQ ID NO: 1152608
uauacccgggcuuauugug

SEQ ID NO: 1152610 - RNA, 19 nt, Artificial Sequence
  Description of Artificial Sequence: Synthetic oligonucleotide
  Sense strand starting at position 2109 of SEQ ID NO: 916386
uuagucauguccucaaaca

SEQ ID NO: 1152611 - RNA, 19 nt, Artificial Sequence
  Description of Artificial Sequence: Synthetic oligonucleotide
  Antisense strand to SEQ ID NO: 1152610
uguuugaggacaugacuaa

SEQ ID NO: 1152612 - RNA, 19 nt, Artificial Sequence
  Description of Artificial Sequence: Synthetic oligonucleotide
  Sense strand starting at position 2137 of SEQ ID NO: 916386
aggagcugaucugugauaa

SEQ ID NO: 1152613 - RNA, 19 nt, Artificial Sequence
  Description of Artificial Sequence: Synthetic oligonucleotide
  Antisense strand to SEQ ID NO: 1152612
uuaucacagaucagcuccu

SEQ ID NO: 1152614 - RNA, 19 nt, Artificial Sequence
  Description of Artificial Sequence: Synthetic oligonucleotide
  Sense strand starting at position 2138 of SEQ ID NO: 916386
ggagcugaucugugauaau

SEQ ID NO: 1152615 - RNA, 19 nt, Artificial Sequence
  Description of Artificial Sequence: Synthetic oligonucleotide
  Antisense strand to SEQ ID NO: 1152614
auuaucacagaucagcucc

SEQ ID NO: 1152616 - RNA, 19 nt, Artificial Sequence
  Description of Artificial Sequence: Synthetic oligonucleotide
  Sense strand starting at position 2363 of SEQ ID NO: 916386
ccuuguguccuggacauag

SEQ ID NO: 1152617 - RNA, 19 nt, Artificial Sequence
  Description of Artificial Sequence: Synthetic oligonucleotide
  Antisense strand to SEQ ID NO: 1152616
cuauguccaggacacaagg

SEQ ID NO: 1152618 - RNA, 19 nt, Artificial Sequence
  Description of Artificial Sequence: Synthetic oligonucleotide
  Sense strand starting at position 2436 of SEQ ID NO: 916386
ggaguugagucuuuacacu

SEQ ID NO: 1152619 - RNA, 19 nt, Artificial Sequence
  Description of Artificial Sequence: Synthetic oligonucleotide
  Antisense strand to SEQ ID NO: 1152618
aguguaaagacucaacucc

SEQ ID NO: 1152620 - RNA, 19 nt, Artificial Sequence
  Description of Artificial Sequence: Synthetic oligonucleotide
  Sense strand starting at position 2442 of SEQ ID NO: 916386
gagucuuuacacuguagga

SEQ ID NO: 1152621 - RNA, 19 nt, Artificial Sequence
  Description of Artificial Sequence: Synthetic oligonucleotide
  Antisense strand to SEQ ID NO: 1152620
uccuacaguguaaagacuc

SEQ ID NO: 1152622 - RNA, 19 nt, Artificial Sequence
  Description of Artificial Sequence: Synthetic oligonucleotide
  Sense strand starting at position 2464 of SEQ ID NO: 916386
acauuuguucuguguacug

SEQ ID NO: 1152623 - RNA, 19 nt, Artificial Sequence
  Description of Artificial Sequence: Synthetic oligonucleotide
  Antisense strand to SEQ ID NO: 1152622
caguacacagaacaaaugu

SEQ ID NO: 1152624 - RNA, 19 nt, Artificial Sequence
  Description of Artificial Sequence: Synthetic oligonucleotide
  Sense strand starting at position 2563 of SEQ ID NO: 916386
ccaggaguuucuuuccaua

SEQ ID NO: 1152625 - RNA, 19 nt, Artificial Sequence
  Description of Artificial Sequence: Synthetic oligonucleotide
  Antisense strand to SEQ ID NO: 1152624
uauggaaagaaacuccugg

SEQ ID NO: 1152626 - RNA, 19 nt, Artificial Sequence
  Description of Artificial Sequence: Synthetic oligonucleotide
  Sense strand starting at position 2565 of SEQ ID NO: 916386
aggaguuucuuuccauauc

SEQ ID NO: 1152627 - RNA, 19 nt, Artificial Sequence
  Description of Artificial Sequence: Synthetic oligonucleotide
  Antisense strand to SEQ ID NO: 1152626
gauauggaaagaaacuccu

SEQ ID NO: 1152628 - RNA, 19 nt, Artificial Sequence
  Description of Artificial Sequence: Synthetic oligonucleotide
  Sense strand starting at position 2647 of SEQ ID NO: 916386
aguugaaauuuauagacac

SEQ ID NO: 1152629 - RNA, 19 nt, Artificial Sequence
  Description of Artificial Sequence: Synthetic oligonucleotide
  Antisense strand to SEQ ID NO: 1152628
gugucuauaaauuucaacu

SEQ ID NO: 1152630 - RNA, 19 nt, Artificial Sequence
  Description of Artificial Sequence: Synthetic oligonucleotide
  Sense strand starting at position 2915 of SEQ ID NO: 916386
ugaucucagugcuugaaau

SEQ ID NO: 1152631 - RNA, 19 nt, Artificial Sequence
  Description of Artificial Sequence: Synthetic oligonucleotide
  Antisense strand to SEQ ID NO: 1152630
auuucaagcacugagauca

SEQ ID NO: 1152632 - RNA, 19 nt, Artificial Sequence
  Description of Artificial Sequence: Synthetic oligonucleotide
  Sense strand starting at position 2916 of SEQ ID NO: 916386
gaucucagugcuugaaauc

SEQ ID NO: 1152633 - RNA, 19 nt, Artificial Sequence
  Description of Artificial Sequence: Synthetic oligonucleotide
  Antisense strand to SEQ ID NO: 1152632
gauuucaagcacugagauc

SEQ ID NO: 1152634 - RNA, 19 nt, Artificial Sequence
  Description of Artificial Sequence: Synthetic oligonucleotide
  Sense strand starting at position 2917 of SEQ ID NO: 916386
aucucagugcuugaaaucu

SEQ ID NO: 1152635 - RNA, 19 nt, Artificial Sequence
  Description of Artificial Sequence: Synthetic oligonucleotide
  Antisense strand to SEQ ID NO: 1152634
agauuucaagcacugagau

SEQ ID NO: 1152636 - RNA, 19 nt, Artificial Sequence
  Description of Artificial Sequence: Synthetic oligonucleotide
  Sense strand starting at position 3057 of SEQ ID NO: 916386
gagagcaauccugggcaau

SEQ ID NO: 1152637 - RNA, 19 nt, Artificial Sequence
  Description of Artificial Sequence: Synthetic oligonucleotide
  Antisense strand to SEQ ID NO: 1152636
auugcccaggauugcucuc

SEQ ID NO: 1152638 - RNA, 19 nt, Artificial Sequence
  Description of Artificial Sequence: Synthetic oligonucleotide
  Sense strand starting at position 3058 of SEQ ID NO: 916386
agagcaauccugggcaaua

SEQ ID NO: 1152639 - RNA, 19 nt, Artificial Sequence
  Description of Artificial Sequence: Synthetic oligonucleotide
  Antisense strand to SEQ ID NO: 1152638
uauugcccaggauugcucu

SEQ ID NO: 1152640 - RNA, 19 nt, Artificial Sequence
  Description of Artificial Sequence: Synthetic oligonucleotide
  Sense strand starting at position 3059 of SEQ ID NO: 916386
gagcaauccugggcaauau

SEQ ID NO: 1152641 - RNA, 19 nt, Artificial Sequence
  Description of Artificial Sequence: Synthetic oligonucleotide
  Antisense strand to SEQ ID NO: 1152640
auauugcccaggauugcuc

SEQ ID NO: 1152642 - RNA, 19 nt, Artificial Sequence
  Description of Artificial Sequence: Synthetic oligonucleotide
  Sense strand starting at position 3060 of SEQ ID NO: 916386
agcaauccugggcaauauu

SEQ ID NO: 1152643 - RNA, 19 nt, Artificial Sequence
  Description of Artificial Sequence: Synthetic oligonucleotide
  Antisense strand to SEQ ID NO: 1152642
aauauugcccaggauugcu

SEQ ID NO: 1152644 - RNA, 19 nt, Artificial Sequence
  Description of Artificial Sequence: Synthetic oligonucleotide
  Sense strand starting at position 3072 of SEQ ID NO: 916386
caauauuguucugugagaa

SEQ ID NO: 1152645 - RNA, 19 nt, Artificial Sequence
  Description of Artificial Sequence: Synthetic oligonucleotide
  Antisense strand to SEQ ID NO: 1152644
uucucacagaacaauauug

SEQ ID NO: 1152646 - RNA, 19 nt, Artificial Sequence
  Description of Artificial Sequence: Synthetic oligonucleotide
  Sense strand starting at position 3233 of SEQ ID NO: 916386
guguucccugucuaaagga

SEQ ID NO: 1152647 - RNA, 19 nt, Artificial Sequence
  Description of Artificial Sequence: Synthetic oligonucleotide
  Antisense strand to SEQ ID NO: 1152646
uccuuuagacagggaacac

SEQ ID NO: 1152648 - RNA, 19 nt, Artificial Sequence
  Description of Artificial Sequence: Synthetic oligonucleotide
  Sense strand starting at position 3278 of SEQ ID NO: 916386
cgagauaccuucucaagac

SEQ ID NO: 1152649 - RNA, 19 nt, Artificial Sequence
  Description of Artificial Sequence: Synthetic oligonucleotide
  Antisense strand to SEQ ID NO: 1152648
gucuugagaagguaucucg

SEQ ID NO: 1152650 - RNA, 19 nt, Artificial Sequence
  Description of Artificial Sequence: Synthetic oligonucleotide
  Sense strand starting at position 3358 of SEQ ID NO: 916386
cacccaguucugggaaaga

SEQ ID NO: 1152651 - RNA, 19 nt, Artificial Sequence
  Description of Artificial Sequence: Synthetic oligonucleotide
  Antisense strand to SEQ ID NO: 1152650
ucuuucccagaacugggug

SEQ ID NO: 1152652 - RNA, 19 nt, Artificial Sequence
  Description of Artificial Sequence: Synthetic oligonucleotide
  Sense strand starting at position 3431 of SEQ ID NO: 916386
uuaggcuuggcaugaauga

SEQ ID NO: 1152653 - RNA, 19 nt, Artificial Sequence
  Description of Artificial Sequence: Synthetic oligonucleotide
  Antisense strand to SEQ ID NO: 1152652
ucauucaugccaagccuaa

SEQ ID NO: 1152654 - RNA, 19 nt, Artificial Sequence
  Description of Artificial Sequence: Synthetic oligonucleotide
  Sense strand starting at position 3432 of SEQ ID NO: 916386
uaggcuuggcaugaaugau

SEQ ID NO: 1152655 - RNA, 19 nt, Artificial Sequence
  Description of Artificial Sequence: Synthetic oligonucleotide
  Antisense strand to SEQ ID NO: 1152654
aucauucaugccaagccua

SEQ ID NO: 1152656 - RNA, 19 nt, Artificial Sequence
  Description of Artificial Sequence: Synthetic oligonucleotide
  Sense strand starting at position 3461 of SEQ ID NO: 916386
guaagaaggguuggcaauu

SEQ ID NO: 1152657 - RNA, 19 nt, Artificial Sequence
  Description of Artificial Sequence: Synthetic oligonucleotide
  Antisense strand to SEQ ID NO: 1152656
aauugccaacccuucuuac

SEQ ID NO: 1152658 - RNA, 19 nt, Artificial Sequence
  Description of Artificial Sequence: Synthetic oligonucleotide
  Sense strand starting at position 3483 of SEQ ID NO: 916386
gugggagcuauaugcauuu

SEQ ID NO: 1152659 - RNA, 19 nt, Artificial Sequence
  Description of Artificial Sequence: Synthetic oligonucleotide
  Antisense strand to SEQ ID NO: 1152658
aaaugcauauagcucccac

SEQ ID NO: 1152660 - RNA, 19 nt, Artificial Sequence
  Description of Artificial Sequence: Synthetic oligonucleotide
  Sense strand starting at position 3496 of SEQ ID NO: 916386
gcauuuacccaguguccua

SEQ ID NO: 1152661 - RNA, 19 nt, Artificial Sequence
  Description of Artificial Sequence: Synthetic oligonucleotide
  Antisense strand to SEQ ID NO: 1152660
uaggacacuggguaaaugc

SEQ ID NO: 1152662 - RNA, 19 nt, Artificial Sequence
  Description of Artificial Sequence: Synthetic oligonucleotide
  Sense strand starting at position 3614 of SEQ ID NO: 916386
gucacuauuugucccuuua

SEQ ID NO: 1152663 - RNA, 19 nt, Artificial Sequence
  Description of Artificial Sequence: Synthetic oligonucleotide
  Antisense strand to SEQ ID NO: 1152662
uaaagggacaaauagugac

SEQ ID NO: 1152664 - RNA, 19 nt, Artificial Sequence
  Description of Artificial Sequence: Synthetic oligonucleotide
  Sense strand starting at position 3759 of SEQ ID NO: 916386
guaaacugggagugaacau

SEQ ID NO: 1152665 - RNA, 19 nt, Artificial Sequence
  Description of Artificial Sequence: Synthetic oligonucleotide
  Antisense strand to SEQ ID NO: 1152664
auguucacucccaguuuac

SEQ ID NO: 1152666 - RNA, 19 nt, Artificial Sequence
  Description of Artificial Sequence: Synthetic oligonucleotide
  Sense strand starting at position 3840 of SEQ ID NO: 916386
aggcaucuggcauauaauu

SEQ ID NO: 1152667 - RNA, 19 nt, Artificial Sequence
  Description of Artificial Sequence: Synthetic oligonucleotide
  Antisense strand to SEQ ID NO: 1152666
aauuauaugccagaugccu

SEQ ID NO: 1152668 - RNA, 19 nt, Artificial Sequence
  Description of Artificial Sequence: Synthetic oligonucleotide
  Sense strand starting at position 3981 of SEQ ID NO: 916386
gguucagagaccgguaaga

SEQ ID NO: 1152669 - RNA, 19 nt, Artificial Sequence
  Description of Artificial Sequence: Synthetic oligonucleotide
  Antisense strand to SEQ ID NO: 1152668
ucuuaccggucucugaacc

SEQ ID NO: 1152670 - RNA, 19 nt, Artificial Sequence
  Description of Artificial Sequence: Synthetic oligonucleotide
  Sense strand starting at position 537 of SEQ ID NO: 916387
cagagaaagugucugguau

SEQ ID NO: 1152671 - RNA, 19 nt, Artificial Sequence
  Description of Artificial Sequence: Synthetic oligonucleotide
  Antisense strand to SEQ ID NO: 1152670
auaccagacacuuucucug

SEQ ID NO: 1152672 - RNA, 19 nt, Artificial Sequence
  Description of Artificial Sequence: Synthetic oligonucleotide
  Sense strand starting at position 538 of SEQ ID NO: 916387
agagaaagugucugguauc

SEQ ID NO: 1152673 - RNA, 19 nt, Artificial Sequence
  Description of Artificial Sequence: Synthetic oligonucleotide
  Antisense strand to SEQ ID NO: 1152672
gauaccagacacuuucucu

SEQ ID NO: 1152674 - RNA, 19 nt, Artificial Sequence
  Description of Artificial Sequence: Synthetic oligonucleotide
  Sense strand starting at position 555 of SEQ ID NO: 916387
uccaguuuccuggaggucu

SEQ ID NO: 1152675 - RNA, 19 nt, Artificial Sequence
  Description of Artificial Sequence: Synthetic oligonucleotide
  Antisense strand to SEQ ID NO: 1152674
agaccuccaggaaacugga

SEQ ID NO: 1152676 - RNA, 19 nt, Artificial Sequence
  Description of Artificial Sequence: Synthetic oligonucleotide
  Sense strand starting at position 679 of SEQ ID NO: 916387
gaaauugucccacggacca

SEQ ID NO: 1152677 - RNA, 19 nt, Artificial Sequence
  Description of Artificial Sequence: Synthetic oligonucleotide
  Antisense strand to SEQ ID NO: 1152676
ugguccgugggacaauuuc

SEQ ID NO: 1152678 - RNA, 19 nt, Artificial Sequence
  Description of Artificial Sequence: Synthetic oligonucleotide
  Sense strand starting at position 699 of SEQ ID NO: 916387
ugagguguucucgcacugu

SEQ ID NO: 1152679 - RNA, 19 nt, Artificial Sequence
  Description of Artificial Sequence: Synthetic oligonucleotide
  Antisense strand to SEQ ID NO: 1152678
acagugcgagaacaccuca

SEQ ID NO: 1152680 - RNA, 19 nt, Artificial Sequence
  Description of Artificial Sequence: Synthetic oligonucleotide
  Sense strand starting at position 710 of SEQ ID NO: 916387
cgcacuguaagcuauugau

SEQ ID NO: 1152681 - RNA, 19 nt, Artificial Sequence
  Description of Artificial Sequence: Synthetic oligonucleotide
  Antisense strand to SEQ ID NO: 1152680
aucaauagcuuacagugcg

SEQ ID NO: 1152682 - RNA, 19 nt, Artificial Sequence
  Description of Artificial Sequence: Synthetic oligonucleotide
  Sense strand starting at position 841 of SEQ ID NO: 916387
cuuaguuaggagggauauu

SEQ ID NO: 1152683 - RNA, 19 nt, Artificial Sequence
  Description of Artificial Sequence: Synthetic oligonucleotide
  Antisense strand to SEQ ID NO: 1152682
aauaucccuccuaacuaag

SEQ ID NO: 1152684 - RNA, 19 nt, Artificial Sequence
  Description of Artificial Sequence: Synthetic oligonucleotide
  Sense strand starting at position 857 of SEQ ID NO: 916387
auuagauguugacucauga

SEQ ID NO: 1152685 - RNA, 19 nt, Artificial Sequence
  Description of Artificial Sequence: Synthetic oligonucleotide
  Antisense strand to SEQ ID NO: 1152684
ucaugagucaacaucuaau

SEQ ID NO: 1152686 - RNA, 19 nt, Artificial Sequence
  Description of Artificial Sequence: Synthetic oligonucleotide
  Sense strand starting at position 2034 of SEQ ID NO: 916387
ccaguagcagcuuauauau

SEQ ID NO: 1152687 - RNA, 19 nt, Artificial Sequence
  Description of Artificial Sequence: Synthetic oligonucleotide
  Antisense strand to SEQ ID NO: 1152686
auauauaagcugcuacugg

SEQ ID NO: 1152688 - RNA, 19 nt, Artificial Sequence
  Description of Artificial Sequence: Synthetic oligonucleotide
  Sense strand starting at position 2212 of SEQ ID NO: 916387
cagcuuugacuugagaucu

SEQ ID NO: 1152689 - RNA, 19 nt, Artificial Sequence
  Description of Artificial Sequence: Synthetic oligonucleotide
  Antisense strand to SEQ ID NO: 1152688
agaucucaagucaaagcug

SEQ ID NO: 1152690 - RNA, 19 nt, Artificial Sequence
  Description of Artificial Sequence: Synthetic oligonucleotide
  Sense strand starting at position 2264 of SEQ ID NO: 916387
uggaauuagucacugucuu

SEQ ID NO: 1152691 - RNA, 19 nt, Artificial Sequence
  Description of Artificial Sequence: Synthetic oligonucleotide
  Antisense strand to SEQ ID NO: 1152690
aagacagugacuaauucca

SEQ ID NO: 1152692 - RNA, 19 nt, Artificial Sequence
  Description of Artificial Sequence: Synthetic oligonucleotide
  Sense strand starting at position 2265 of SEQ ID NO: 916387
ggaauuagucacugucuuc

SEQ ID NO: 1152693 - RNA, 19 nt, Artificial Sequence
  Description of Artificial Sequence: Synthetic oligonucleotide
  Antisense strand to SEQ ID NO: 1152692
gaagacagugacuaauucc

SEQ ID NO: 1152694 - RNA, 19 nt, Artificial Sequence
  Description of Artificial Sequence: Synthetic oligonucleotide
  Sense strand starting at position 2301 of SEQ ID NO: 916387
cuaggcuguuuaucgacau

SEQ ID NO: 1152695 - RNA, 19 nt, Artificial Sequence
  Description of Artificial Sequence: Synthetic oligonucleotide
  Antisense strand to SEQ ID NO: 1152694
augucgauaaacagccuag

SEQ ID NO: 1152696 - RNA, 19 nt, Artificial Sequence
  Description of Artificial Sequence: Synthetic oligonucleotide
  Sense strand starting at position 2362 of SEQ ID NO: 916387
cuugcuguuggagaucaca

SEQ ID NO: 1152697 - RNA, 19 nt, Artificial Sequence
  Description of Artificial Sequence: Synthetic oligonucleotide
  Antisense strand to SEQ ID NO: 1152696
ugugaucuccaacagcaag

SEQ ID NO: 1152698 - RNA, 19 nt, Artificial Sequence
  Description of Artificial Sequence: Synthetic oligonucleotide
  Sense strand starting at position 2512 of SEQ ID NO: 916387
ccaugaugaucaucucaug

SEQ ID NO: 1152699 - RNA, 19 nt, Artificial Sequence
  Description of Artificial Sequence: Synthetic oligonucleotide
  Antisense strand to SEQ ID NO: 1152698
caugagaugaucaucaugg

SEQ ID NO: 1152700 - RNA, 19 nt, Artificial Sequence
  Description of Artificial Sequence: Synthetic oligonucleotide
  Sense strand starting at position 2568 of SEQ ID NO: 916387
ucuuccauucuagauuguu

SEQ ID NO: 1152701 - RNA, 19 nt, Artificial Sequence
  Description of Artificial Sequence: Synthetic oligonucleotide
  Antisense strand to SEQ ID NO: 1152700
aacaaucuagaauggaaga

SEQ ID NO: 1152702 - RNA, 19 nt, Artificial Sequence
  Description of Artificial Sequence: Synthetic oligonucleotide
  Sense strand starting at position 2571 of SEQ ID NO: 916387
uccauucuagauuguuuga

SEQ ID NO: 1152703 - RNA, 19 nt, Artificial Sequence
  Description of Artificial Sequence: Synthetic oligonucleotide
  Antisense strand to SEQ ID NO: 1152702
ucaaacaaucuagaaugga

SEQ ID NO: 1152704 - RNA, 19 nt, Artificial Sequence
  Description of Artificial Sequence: Synthetic oligonucleotide
  Sense strand starting at position 2574 of SEQ ID NO: 916387
auucuagauuguuugaaag

SEQ ID NO: 1152705 - RNA, 19 nt, Artificial Sequence
  Description of Artificial Sequence: Synthetic oligonucleotide
  Antisense strand to SEQ ID NO: 1152704
cuuucaaacaaucuagaau

SEQ ID NO: 1152706 - RNA, 19 nt, Artificial Sequence
  Description of Artificial Sequence: Synthetic oligonucleotide
  Sense strand starting at position 2717 of SEQ ID NO: 916387
acaagugucuauuuagucu

SEQ ID NO: 1152707 - RNA, 19 nt, Artificial Sequence
  Description of Artificial Sequence: Synthetic oligonucleotide
  Antisense strand to SEQ ID NO: 1152706
agacuaaauagacacuugu

SEQ ID NO: 1152708 - RNA, 19 nt, Artificial Sequence
  Description of Artificial Sequence: Synthetic oligonucleotide
  Sense strand starting at position 2801 of SEQ ID NO: 916387
cucuauaaacguuguauuu

SEQ ID NO: 1152709 - RNA, 19 nt, Artificial Sequence
  Description of Artificial Sequence: Synthetic oligonucleotide
  Antisense strand to SEQ ID NO: 1152708
aaauacaacguuuauagag

SEQ ID NO: 1152710 - RNA, 19 nt, Artificial Sequence
  Description of Artificial Sequence: Synthetic oligonucleotide
  Sense strand starting at position 2803 of SEQ ID NO: 916387
cuauaaacguuguauuuga

SEQ ID NO: 1152711 - RNA, 19 nt, Artificial Sequence
  Description of Artificial Sequence: Synthetic oligonucleotide
  Antisense strand to SEQ ID NO: 1152710
ucaaauacaacguuuauag

SEQ ID NO: 1152712 - RNA, 19 nt, Artificial Sequence
  Description of Artificial Sequence: Synthetic oligonucleotide
  Sense strand starting at position 2810 of SEQ ID NO: 916387
cguuguauuugagugauau

SEQ ID NO: 1152713 - RNA, 19 nt, Artificial Sequence
  Description of Artificial Sequence: Synthetic oligonucleotide
  Antisense strand to SEQ ID NO: 1152712
auaucacucaaauacaacg

SEQ ID NO: 1152714 - RNA, 19 nt, Artificial Sequence
  Description of Artificial Sequence: Synthetic oligonucleotide
  Sense strand starting at position 2814 of SEQ ID NO: 916387
guauuugagugauauaucc

SEQ ID NO: 1152715 - RNA, 19 nt, Artificial Sequence
  Description of Artificial Sequence: Synthetic oligonucleotide
  Antisense strand to SEQ ID NO: 1152714
ggauauaucacucaaauac

SEQ ID NO: 1152716 - RNA, 19 nt, Artificial Sequence
  Description of Artificial Sequence: Synthetic oligonucleotide
  Sense strand starting at position 3049 of SEQ ID NO: 916387
guaguagauugcccauuua

SEQ ID NO: 1152717 - RNA, 19 nt, Artificial Sequence
  Description of Artificial Sequence: Synthetic oligonucleotide
  Antisense strand to SEQ ID NO: 1152716
uaaaugggcaaucuacuac

SEQ ID NO: 1152718 - RNA, 19 nt, Artificial Sequence
  Description of Artificial Sequence: Synthetic oligonucleotide
  Sense strand starting at position 3206 of SEQ ID NO: 916387
ccuaucuauggaggaagua

SEQ ID NO: 1152719 - RNA, 19 nt, Artificial Sequence
  Description of Artificial Sequence: Synthetic oligonucleotide
  Antisense strand to SEQ ID NO: 1152718
uacuuccuccauagauagg

SEQ ID NO: 1152720 - RNA, 19 nt, Artificial Sequence
  Description of Artificial Sequence: Synthetic oligonucleotide
  Sense strand starting at position 3219 of SEQ ID NO: 916387
gaaguaauguuagcaguuc

SEQ ID NO: 1152721 - RNA, 19 nt, Artificial Sequence
  Description of Artificial Sequence: Synthetic oligonucleotide
  Antisense strand to SEQ ID NO: 1152720
gaacugcuaacauuacuuc

SEQ ID NO: 1152722 - RNA, 19 nt, Artificial Sequence
  Description of Artificial Sequence: Synthetic oligonucleotide
  Sense strand starting at position 3248 of SEQ ID NO: 916387
cuuguaucuuuacuuggau

SEQ ID NO: 1152723 - RNA, 19 nt, Artificial Sequence
  Description of Artificial Sequence: Synthetic oligonucleotide
  Antisense strand to SEQ ID NO: 1152722
auccaaguaaagauacaag

SEQ ID NO: 1152724 - RNA, 19 nt, Artificial Sequence
  Description of Artificial Sequence: Synthetic oligonucleotide
  Sense strand starting at position 3249 of SEQ ID NO: 916387
uuguaucuuuacuuggaua

SEQ ID NO: 1152725 - RNA, 19 nt, Artificial Sequence
  Description of Artificial Sequence: Synthetic oligonucleotide
  Antisense strand to SEQ ID NO: 1152724
uauccaaguaaagauacaa

SEQ ID NO: 1152726 - RNA, 19 nt, Artificial Sequence
  Description of Artificial Sequence: Synthetic oligonucleotide
  Sense strand starting at position 3251 of SEQ ID NO: 916387
guaucuuuacuuggauauu

SEQ ID NO: 1152727 - RNA, 19 nt, Artificial Sequence
  Description of Artificial Sequence: Synthetic oligonucleotide
  Antisense strand to SEQ ID NO: 1152726
aauauccaaguaaagauac

SEQ ID NO: 1152728 - RNA, 19 nt, Artificial Sequence
  Description of Artificial Sequence: Synthetic oligonucleotide
  Sense strand starting at position 3313 of SEQ ID NO: 916387
uguguuugugucaacgugu

SEQ ID NO: 1152729 - RNA, 19 nt, Artificial Sequence
  Description of Artificial Sequence: Synthetic oligonucleotide
  Antisense strand to SEQ ID NO: 1152728
acacguugacacaaacaca

SEQ ID NO: 1152730 - RNA, 19 nt, Artificial Sequence
  Description of Artificial Sequence: Synthetic oligonucleotide
  Sense strand starting at position 3316 of SEQ ID NO: 916387
guuugugucaacguguguu

SEQ ID NO: 1152731 - RNA, 19 nt, Artificial Sequence
  Description of Artificial Sequence: Synthetic oligonucleotide
  Antisense strand to SEQ ID NO: 1152730
aacacacguugacacaaac

SEQ ID NO: 1152732 - RNA, 19 nt, Artificial Sequence
  Description of Artificial Sequence: Synthetic oligonucleotide
  Sense strand starting at position 3321 of SEQ ID NO: 916387
ugucaacguguguuuguau

SEQ ID NO: 1152733 - RNA, 19 nt, Artificial Sequence
  Description of Artificial Sequence: Synthetic oligonucleotide
  Antisense strand to SEQ ID NO: 1152732
auacaaacacacguugaca

SEQ ID NO: 1152734 - RNA, 19 nt, Artificial Sequence
  Description of Artificial Sequence: Synthetic oligonucleotide
  Sense strand starting at position 3330 of SEQ ID NO: 916387
guguuuguaugggugagga

SEQ ID NO: 1152735 - RNA, 19 nt, Artificial Sequence
  Description of Artificial Sequence: Synthetic oligonucleotide
  Antisense strand to SEQ ID NO: 1152734
uccucacccauacaaacac

SEQ ID NO: 1152736 - RNA, 19 nt, Artificial Sequence
  Description of Artificial Sequence: Synthetic oligonucleotide
  Sense strand starting at position 3379 of SEQ ID NO: 916387
gggagccugcauuguagaa

SEQ ID NO: 1152737 - RNA, 19 nt, Artificial Sequence
  Description of Artificial Sequence: Synthetic oligonucleotide
  Antisense strand to SEQ ID NO: 1152736
uucuacaaugcaggcuccc

SEQ ID NO: 1152738 - RNA, 19 nt, Artificial Sequence
  Description of Artificial Sequence: Synthetic oligonucleotide
  Sense strand starting at position 3383 of SEQ ID NO: 916387
gccugcauuguagaaaggu

SEQ ID NO: 1152739 - RNA, 19 nt, Artificial Sequence
  Description of Artificial Sequence: Synthetic oligonucleotide
  Antisense strand to SEQ ID NO: 1152738
accuuucuacaaugcaggc

SEQ ID NO: 1152740 - RNA, 19 nt, Artificial Sequence
  Description of Artificial Sequence: Synthetic oligonucleotide
  Sense strand starting at position 3517 of SEQ ID NO: 916387
gauuguguugugucugcuu

SEQ ID NO: 1152741 - RNA, 19 nt, Artificial Sequence
  Description of Artificial Sequence: Synthetic oligonucleotide
  Antisense strand to SEQ ID NO: 1152740
aagcagacacaacacaauc

SEQ ID NO: 1152742 - RNA, 19 nt, Artificial Sequence
  Description of Artificial Sequence: Synthetic oligonucleotide
  Sense strand starting at position 3610 of SEQ ID NO: 916387
ccaguuauucgaggacauu

SEQ ID NO: 1152743 - RNA, 19 nt, Artificial Sequence
  Description of Artificial Sequence: Synthetic oligonucleotide
  Antisense strand to SEQ ID NO: 1152742
aauguccucgaauaacugg

SEQ ID NO: 1152744 - RNA, 19 nt, Artificial Sequence
  Description of Artificial Sequence: Synthetic oligonucleotide
  Sense strand starting at position 3622 of SEQ ID NO: 916387
ggacauuucucccaaaugu

SEQ ID NO: 1152745 - RNA, 19 nt, Artificial Sequence
  Description of Artificial Sequence: Synthetic oligonucleotide
  Antisense strand to SEQ ID NO: 1152744
acauuugggagaaaugucc

SEQ ID NO: 1152746 - RNA, 19 nt, Artificial Sequence
  Description of Artificial Sequence: Synthetic oligonucleotide
  Sense strand starting at position 3643 of SEQ ID NO: 916387
auuacugucuguuuaccaa

SEQ ID NO: 1152747 - RNA, 19 nt, Artificial Sequence
  Description of Artificial Sequence: Synthetic oligonucleotide
  Antisense strand to SEQ ID NO: 1152746
uugguaaacagacaguaau

SEQ ID NO: 1152748 - RNA, 19 nt, Artificial Sequence
  Description of Artificial Sequence: Synthetic oligonucleotide
  Sense strand starting at position 3650 of SEQ ID NO: 916387
ucuguuuaccaaugucuuu

SEQ ID NO: 1152749 - RNA, 19 nt, Artificial Sequence
  Description of Artificial Sequence: Synthetic oligonucleotide
  Antisense strand to SEQ ID NO: 1152748
aaagacauugguaaacaga

SEQ ID NO: 1152750 - RNA, 19 nt, Artificial Sequence
  Description of Artificial Sequence: Synthetic oligonucleotide
  Sense strand starting at position 681 of SEQ ID NO: 916388
gaaauugucccauggacca

SEQ ID NO: 1152751 - RNA, 19 nt, Artificial Sequence
  Description of Artificial Sequence: Synthetic oligonucleotide
  Antisense strand to SEQ ID NO: 1152750
ugguccaugggacaauuuc

SEQ ID NO: 1152752 - RNA, 19 nt, Artificial Sequence
  Description of Artificial Sequence: Synthetic oligonucleotide
  Sense strand starting at position 694 of SEQ ID NO: 916388
ggaccauugagguguucuc

SEQ ID NO: 1152753 - RNA, 19 nt, Artificial Sequence
  Description of Artificial Sequence: Synthetic oligonucleotide
  Antisense strand to SEQ ID NO: 1152752
gagaacaccucaauggucc

SEQ ID NO: 1152754 - RNA, 19 nt, Artificial Sequence
  Description of Artificial Sequence: Synthetic oligonucleotide
  Sense strand starting at position 853 of SEQ ID NO: 916388
gagauauuauauguugacu

SEQ ID NO: 1152755 - RNA, 19 nt, Artificial Sequence
  Description of Artificial Sequence: Synthetic oligonucleotide
  Antisense strand to SEQ ID NO: 1152754
agucaacauauaauaucuc

SEQ ID NO: 1152756 - RNA, 19 nt, Artificial Sequence
  Description of Artificial Sequence: Synthetic oligonucleotide
  Sense strand starting at position 858 of SEQ ID NO: 916388
auuauauguugacucauga

SEQ ID NO: 1152757 - RNA, 19 nt, Artificial Sequence
  Description of Artificial Sequence: Synthetic oligonucleotide
  Antisense strand to SEQ ID NO: 1152756
ucaugagucaacauauaau

SEQ ID NO: 1152758 - RNA, 19 nt, Artificial Sequence
  Description of Artificial Sequence: Synthetic oligonucleotide
  Sense strand starting at position 2034 of SEQ ID NO: 916388
ccagcaguagcuuauauau

SEQ ID NO: 1152759 - RNA, 19 nt, Artificial Sequence
  Description of Artificial Sequence: Synthetic oligonucleotide
  Antisense strand to SEQ ID NO: 1152758
auauauaagcuacugcugg

SEQ ID NO: 1152760 - RNA, 19 nt, Artificial Sequence
  Description of Artificial Sequence: Synthetic oligonucleotide
  Sense strand starting at position 2044 of SEQ ID NO: 916388
cuuauauauuaugagagag

SEQ ID NO: 1152761 - RNA, 19 nt, Artificial Sequence
  Description of Artificial Sequence: Synthetic oligonucleotide
  Antisense strand to SEQ ID NO: 1152760
cucucucauaauauauaag

SEQ ID NO: 1152762 - RNA, 19 nt, Artificial Sequence
  Description of Artificial Sequence: Synthetic oligonucleotide
  Sense strand starting at position 2212 of SEQ ID NO: 916388
ccagcuuugacucgagauu

SEQ ID NO: 1152763 - RNA, 19 nt, Artificial Sequence
  Description of Artificial Sequence: Synthetic oligonucleotide
  Antisense strand to SEQ ID NO: 1152762
aaucucgagucaaagcugg

SEQ ID NO: 1152764 - RNA, 19 nt, Artificial Sequence
  Description of Artificial Sequence: Synthetic oligonucleotide
  Sense strand starting at position 2239 of SEQ ID NO: 916388
guaagagcauucucaguuc

SEQ ID NO: 1152765 - RNA, 19 nt, Artificial Sequence
  Description of Artificial Sequence: Synthetic oligonucleotide
  Antisense strand to SEQ ID NO: 1152764
gaacugagaaugcucuuac

SEQ ID NO: 1152766 - RNA, 19 nt, Artificial Sequence
  Description of Artificial Sequence: Synthetic oligonucleotide
  Sense strand starting at position 2262 of SEQ ID NO: 916388
aguugaaguuagucacugu

SEQ ID NO: 1152767 - RNA, 19 nt, Artificial Sequence
  Description of Artificial Sequence: Synthetic oligonucleotide
  Antisense strand to SEQ ID NO: 1152766
acagugacuaacuucaacu

SEQ ID NO: 1152768 - RNA, 19 nt, Artificial Sequence
  Description of Artificial Sequence: Synthetic oligonucleotide
  Sense strand starting at position 2265 of SEQ ID NO: 916388
ugaaguuagucacugucuu

SEQ ID NO: 1152769 - RNA, 19 nt, Artificial Sequence
  Description of Artificial Sequence: Synthetic oligonucleotide
  Antisense strand to SEQ ID NO: 1152768
aagacagugacuaacuuca

SEQ ID NO: 1152770 - RNA, 19 nt, Artificial Sequence
  Description of Artificial Sequence: Synthetic oligonucleotide
  Sense strand starting at position 2299 of SEQ ID NO: 916388
augcuaggcuguuuaucaa

SEQ ID NO: 1152771 - RNA, 19 nt, Artificial Sequence
  Description of Artificial Sequence: Synthetic oligonucleotide
  Antisense strand to SEQ ID NO: 1152770
uugauaaacagccuagcau

SEQ ID NO: 1152772 - RNA, 19 nt, Artificial Sequence
  Description of Artificial Sequence: Synthetic oligonucleotide
  Sense strand starting at position 2302 of SEQ ID NO: 916388
cuaggcuguuuaucaacau

SEQ ID NO: 1152773 - RNA, 19 nt, Artificial Sequence
  Description of Artificial Sequence: Synthetic oligonucleotide
  Antisense strand to SEQ ID NO: 1152772
auguugauaaacagccuag

SEQ ID NO: 1152774 - RNA, 19 nt, Artificial Sequence
  Description of Artificial Sequence: Synthetic oligonucleotide
  Sense strand starting at position 2350 of SEQ ID NO: 916388
acuuucuuccagcagagau

SEQ ID NO: 1152775 - RNA, 19 nt, Artificial Sequence
  Description of Artificial Sequence: Synthetic oligonucleotide
  Antisense strand to SEQ ID NO: 1152774
aucucugcuggaagaaagu

SEQ ID NO: 1152776 - RNA, 19 nt, Artificial Sequence
  Description of Artificial Sequence: Synthetic oligonucleotide
  Sense strand starting at position 2391 of SEQ ID NO: 916388
uugcaaaugccuuaacaga

SEQ ID NO: 1152777 - RNA, 19 nt, Artificial Sequence
  Description of Artificial Sequence: Synthetic oligonucleotide
  Antisense strand to SEQ ID NO: 1152776
ucuguuaaggcauuugcaa

SEQ ID NO: 1152778 - RNA, 19 nt, Artificial Sequence
  Description of Artificial Sequence: Synthetic oligonucleotide
  Sense strand starting at position 2438 of SEQ ID NO: 916388
uuccuucugugugcaauuu

SEQ ID NO: 1152779 - RNA, 19 nt, Artificial Sequence
  Description of Artificial Sequence: Synthetic oligonucleotide
  Antisense strand to SEQ ID NO: 1152778
aaauugcacacagaaggaa

SEQ ID NO: 1152780 - RNA, 19 nt, Artificial Sequence
  Description of Artificial Sequence: Synthetic oligonucleotide
  Sense strand starting at position 2477 of SEQ ID NO: 916388
acacaaugggccuguauau

SEQ ID NO: 1152781 - RNA, 19 nt, Artificial Sequence
  Description of Artificial Sequence: Synthetic oligonucleotide
  Antisense strand to SEQ ID NO: 1152780
auauacaggcccauugugu

SEQ ID NO: 1152782 - RNA, 19 nt, Artificial Sequence
  Description of Artificial Sequence: Synthetic oligonucleotide
  Sense strand starting at position 2503 of SEQ ID NO: 916388
accuguuuccaugaugauu

SEQ ID NO: 1152783 - RNA, 19 nt, Artificial Sequence
  Description of Artificial Sequence: Synthetic oligonucleotide
  Antisense strand to SEQ ID NO: 1152782
aaucaucauggaaacaggu

SEQ ID NO: 1152784 - RNA, 19 nt, Artificial Sequence
  Description of Artificial Sequence: Synthetic oligonucleotide
  Sense strand starting at position 2511 of SEQ ID NO: 916388
ccaugaugauuaccuuaug

SEQ ID NO: 1152785 - RNA, 19 nt, Artificial Sequence
  Description of Artificial Sequence: Synthetic oligonucleotide
  Antisense strand to SEQ ID NO: 1152784
cauaagguaaucaucaugg

SEQ ID NO: 1152786 - RNA, 19 nt, Artificial Sequence
  Description of Artificial Sequence: Synthetic oligonucleotide
  Sense strand starting at position 2531 of SEQ ID NO: 916388
ccagucuuauuucuuguau

SEQ ID NO: 1152787 - RNA, 19 nt, Artificial Sequence
  Description of Artificial Sequence: Synthetic oligonucleotide
  Antisense strand to SEQ ID NO: 1152786
auacaagaaauaagacugg

SEQ ID NO: 1152788 - RNA, 19 nt, Artificial Sequence
  Description of Artificial Sequence: Synthetic oligonucleotide
  Sense strand starting at position 2781 of SEQ ID NO: 916388
uggcaucacugagcuagaa

SEQ ID NO: 1152789 - RNA, 19 nt, Artificial Sequence
  Description of Artificial Sequence: Synthetic oligonucleotide
  Antisense strand to SEQ ID NO: 1152788
uucuagcucagugaugcca

SEQ ID NO: 1152790 - RNA, 19 nt, Artificial Sequence
  Description of Artificial Sequence: Synthetic oligonucleotide
  Sense strand starting at position 2783 of SEQ ID NO: 916388
gcaucacugagcuagaaag

SEQ ID NO: 1152791 - RNA, 19 nt, Artificial Sequence
  Description of Artificial Sequence: Synthetic oligonucleotide
  Antisense strand to SEQ ID NO: 1152790
cuuucuagcucagugaugc

SEQ ID NO: 1152792 - RNA, 19 nt, Artificial Sequence
  Description of Artificial Sequence: Synthetic oligonucleotide
  Sense strand starting at position 2804 of SEQ ID NO: 916388
aguaaugcuuuacuaggaa

SEQ ID NO: 1152793 - RNA, 19 nt, Artificial Sequence
  Description of Artificial Sequence: Synthetic oligonucleotide
  Antisense strand to SEQ ID NO: 1152792
uuccuaguaaagcauuacu

SEQ ID NO: 1152794 - RNA, 19 nt, Artificial Sequence
  Description of Artificial Sequence: Synthetic oligonucleotide
  Sense strand starting at position 2991 of SEQ ID NO: 916388
ccuccugaguaguuugaga

SEQ ID NO: 1152795 - RNA, 19 nt, Artificial Sequence
  Description of Artificial Sequence: Synthetic oligonucleotide
  Antisense strand to SEQ ID NO: 1152794
ucucaaacuacucaggagg

SEQ ID NO: 1152796 - RNA, 19 nt, Artificial Sequence
  Description of Artificial Sequence: Synthetic oligonucleotide
  Sense strand starting at position 2993 of SEQ ID NO: 916388
uccugaguaguuugagauu

SEQ ID NO: 1152797 - RNA, 19 nt, Artificial Sequence
  Description of Artificial Sequence: Synthetic oligonucleotide
  Antisense strand to SEQ ID NO: 1152796
aaucucaaacuacucagga

SEQ ID NO: 1152798 - RNA, 19 nt, Artificial Sequence
  Description of Artificial Sequence: Synthetic oligonucleotide
  Sense strand starting at position 3261 of SEQ ID NO: 916388
uugauaagaccagguuaau

SEQ ID NO: 1152799 - RNA, 19 nt, Artificial Sequence
  Description of Artificial Sequence: Synthetic oligonucleotide
  Antisense strand to SEQ ID NO: 1152798
auuaaccuggucuuaucaa

SEQ ID NO: 1152800 - RNA, 19 nt, Artificial Sequence
  Description of Artificial Sequence: Synthetic oligonucleotide
  Sense strand starting at position 3271 of SEQ ID NO: 916388
cagguuaauuguccugagu

SEQ ID NO: 1152801 - RNA, 19 nt, Artificial Sequence
  Description of Artificial Sequence: Synthetic oligonucleotide
  Antisense strand to SEQ ID NO: 1152800
acucaggacaauuaaccug

SEQ ID NO: 1152802 - RNA, 19 nt, Artificial Sequence
  Description of Artificial Sequence: Synthetic oligonucleotide
  Sense strand starting at position 3274 of SEQ ID NO: 916388
guuaauuguccugaguagu

SEQ ID NO: 1152803 - RNA, 19 nt, Artificial Sequence
  Description of Artificial Sequence: Synthetic oligonucleotide
  Antisense strand to SEQ ID NO: 1152802
acuacucaggacaauuaac

SEQ ID NO: 1152804 - RNA, 19 nt, Artificial Sequence
  Description of Artificial Sequence: Synthetic oligonucleotide
  Sense strand starting at position 3277 of SEQ ID NO: 916388
aauuguccugaguaguguu

SEQ ID NO: 1152805 - RNA, 19 nt, Artificial Sequence
  Description of Artificial Sequence: Synthetic oligonucleotide
  Antisense strand to SEQ ID NO: 1152804
aacacuacucaggacaauu

SEQ ID NO: 1152806 - RNA, 19 nt, Artificial Sequence
  Description of Artificial Sequence: Synthetic oligonucleotide
  Sense strand starting at position 3291 of SEQ ID NO: 916388
guguuucagucuuugggau

SEQ ID NO: 1152807 - RNA, 19 nt, Artificial Sequence
  Description of Artificial Sequence: Synthetic oligonucleotide
  Antisense strand to SEQ ID NO: 1152806
aucccaaagacugaaacac

SEQ ID NO: 1152808 - RNA, 19 nt, Artificial Sequence
  Description of Artificial Sequence: Synthetic oligonucleotide
  Sense strand starting at position 3313 of SEQ ID NO: 916388
cucauugcuuacucacagu

SEQ ID NO: 1152809 - RNA, 19 nt, Artificial Sequence
  Description of Artificial Sequence: Synthetic oligonucleotide
  Antisense strand to SEQ ID NO: 1152808
acugugaguaagcaaugag

SEQ ID NO: 1152810 - RNA, 19 nt, Artificial Sequence
  Description of Artificial Sequence: Synthetic oligonucleotide
  Sense strand starting at position 3424 of SEQ ID NO: 916388
uccagauguggauguagua

SEQ ID NO: 1152811 - RNA, 19 nt, Artificial Sequence
  Description of Artificial Sequence: Synthetic oligonucleotide
  Antisense strand to SEQ ID NO: 1152810
uacuacauccacaucugga

SEQ ID NO: 1152812 - RNA, 19 nt, Artificial Sequence
  Description of Artificial Sequence: Synthetic oligonucleotide
  Sense strand starting at position 3434 of SEQ ID NO: 916388
gauguaguagaaugccuau

SEQ ID NO: 1152813 - RNA, 19 nt, Artificial Sequence
  Description of Artificial Sequence: Synthetic oligonucleotide
  Antisense strand to SEQ ID NO: 1152812
auaggcauucuacuacauc

SEQ ID NO: 1152814 - RNA, 19 nt, Artificial Sequence
  Description of Artificial Sequence: Synthetic oligonucleotide
  Sense strand starting at position 3612 of SEQ ID NO: 916388
guuguagugcuugucugua

SEQ ID NO: 1152815 - RNA, 19 nt, Artificial Sequence
  Description of Artificial Sequence: Synthetic oligonucleotide
  Antisense strand to SEQ ID NO: 1152814
uacagacaagcacuacaac

SEQ ID NO: 1152816 - RNA, 19 nt, Artificial Sequence
  Description of Artificial Sequence: Synthetic oligonucleotide
  Sense strand starting at position 3911 of SEQ ID NO: 916388
uuaccagguccuuguguau

SEQ ID NO: 1152817 - RNA, 19 nt, Artificial Sequence
  Description of Artificial Sequence: Synthetic oligonucleotide
  Antisense strand to SEQ ID NO: 1152816
auacacaaggaccugguaa

SEQ ID NO: 1152818 - RNA, 19 nt, Artificial Sequence
  Description of Artificial Sequence: Synthetic oligonucleotide
  Sense strand starting at position 3934 of SEQ ID NO: 916388
cuaguaacuuuacuuggau

SEQ ID NO: 1152819 - RNA, 19 nt, Artificial Sequence
  Description of Artificial Sequence: Synthetic oligonucleotide
  Antisense strand to SEQ ID NO: 1152818
auccaaguaaaguuacuag

SEQ ID NO: 1152820 - RNA, 19 nt, Artificial Sequence
  Description of Artificial Sequence: Synthetic oligonucleotide
  Sense strand starting at position 3937 of SEQ ID NO: 916388
guaacuuuacuuggauaug

SEQ ID NO: 1152821 - RNA, 19 nt, Artificial Sequence
  Description of Artificial Sequence: Synthetic oligonucleotide
  Antisense strand to SEQ ID NO: 1152820
cauauccaaguaaaguuac

SEQ ID NO: 1152822 - RNA, 19 nt, Artificial Sequence
  Description of Artificial Sequence: Synthetic oligonucleotide
  Sense strand starting at position 3940 of SEQ ID NO: 916388
acuuuacuuggauauguuu

SEQ ID NO: 1152823 - RNA, 19 nt, Artificial Sequence
  Description of Artificial Sequence: Synthetic oligonucleotide
  Antisense strand to SEQ ID NO: 1152822
aaacauauccaaguaaagu

SEQ ID NO: 1152824 - RNA, 19 nt, Artificial Sequence
  Description of Artificial Sequence: Synthetic oligonucleotide
  Sense strand starting at position 3947 of SEQ ID NO: 916388
uuggauauguuucugagcu

SEQ ID NO: 1152825 - RNA, 19 nt, Artificial Sequence
  Description of Artificial Sequence: Synthetic oligonucleotide
  Antisense strand to SEQ ID NO: 1152824
agcucagaaacauauccaa

SEQ ID NO: 1152826 - RNA, 19 nt, Artificial Sequence
  Description of Artificial Sequence: Synthetic oligonucleotide
  Sense strand starting at position 3973 of SEQ ID NO: 916388
gggaauaugugagauuugu

SEQ ID NO: 1152827 - RNA, 19 nt, Artificial Sequence
  Description of Artificial Sequence: Synthetic oligonucleotide
  Antisense strand to SEQ ID NO: 1152826
acaaaucucacauauuccc

SEQ ID NO: 1152828 - RNA, 19 nt, Artificial Sequence
  Description of Artificial Sequence: Synthetic oligonucleotide
  Sense strand starting at position 3979 of SEQ ID NO: 916388
augugagauuuguguauuu

SEQ ID NO: 1152829 - RNA, 19 nt, Artificial Sequence
  Description of Artificial Sequence: Synthetic oligonucleotide
  Antisense strand to SEQ ID NO: 1152828
aaauacacaaaucucacau

SEQ ID NO: 1152830 - RNA, 19 nt, Artificial Sequence
  Description of Artificial Sequence: Synthetic oligonucleotide
  Sense strand starting at position 81 of SEQ ID NO: 916389
ggaacaucaucuuuagcca

SEQ ID NO: 1152831 - RNA, 19 nt, Artificial Sequence
  Description of Artificial Sequence: Synthetic oligonucleotide
  Antisense strand to SEQ ID NO: 1152830
uggcuaaagaugauguucc

SEQ ID NO: 1152832 - RNA, 19 nt, Artificial Sequence
  Description of Artificial Sequence: Synthetic oligonucleotide
  Sense strand starting at position 170 of SEQ ID NO: 916389
aaucaaguguccuacagag

SEQ ID NO: 1152833 - RNA, 19 nt, Artificial Sequence
  Description of Artificial Sequence: Synthetic oligonucleotide
  Antisense strand to SEQ ID NO: 1152832
cucuguaggacacuugauu

SEQ ID NO: 1152834 - RNA, 19 nt, Artificial Sequence
  Description of Artificial Sequence: Synthetic oligonucleotide
  Sense strand starting at position 177 of SEQ ID NO: 916389
uguccuacagagugaucca

SEQ ID NO: 1152835 - RNA, 19 nt, Artificial Sequence
  Description of Artificial Sequence: Synthetic oligonucleotide
  Antisense strand to SEQ ID NO: 1152834
uggaucacucuguaggaca

SEQ ID NO: 1152836 - RNA, 19 nt, Artificial Sequence
  Description of Artificial Sequence: Synthetic oligonucleotide
  Sense strand starting at position 184 of SEQ ID NO: 916389
cagagugauccaggaagca

SEQ ID NO: 1152837 - RNA, 19 nt, Artificial Sequence
  Description of Artificial Sequence: Synthetic oligonucleotide
  Antisense strand to SEQ ID NO: 1152836
ugcuuccuggaucacucug

SEQ ID NO: 1152838 - RNA, 19 nt, Artificial Sequence
  Description of Artificial Sequence: Synthetic oligonucleotide
  Sense strand starting at position 233 of SEQ ID NO: 916389
guugacucucgacgaaugu

SEQ ID NO: 1152839 - RNA, 19 nt, Artificial Sequence
  Description of Artificial Sequence: Synthetic oligonucleotide
  Antisense strand to SEQ ID NO: 1152838
acauucgucgagagucaac

SEQ ID NO: 1152840 - RNA, 19 nt, Artificial Sequence
  Description of Artificial Sequence: Synthetic oligonucleotide
  Sense strand starting at position 330 of SEQ ID NO: 916389
ucuuccugucaauggauca

SEQ ID NO: 1152841 - RNA, 19 nt, Artificial Sequence
  Description of Artificial Sequence: Synthetic oligonucleotide
  Antisense strand to SEQ ID NO: 1152840
ugauccauugacaggaaga

SEQ ID NO: 1152842 - RNA, 19 nt, Artificial Sequence
  Description of Artificial Sequence: Synthetic oligonucleotide
  Sense strand starting at position 337 of SEQ ID NO: 916389
gucaauggaucaugaggau

SEQ ID NO: 1152843 - RNA, 19 nt, Artificial Sequence
  Description of Artificial Sequence: Synthetic oligonucleotide
  Antisense strand to SEQ ID NO: 1152842
auccucaugauccauugac

SEQ ID NO: 1152844 - RNA, 19 nt, Artificial Sequence
  Description of Artificial Sequence: Synthetic oligonucleotide
  Sense strand starting at position 449 of SEQ ID NO: 916389
acagucaauccaugguaaa

SEQ ID NO: 1152845 - RNA, 19 nt, Artificial Sequence
  Description of Artificial Sequence: Synthetic oligonucleotide
  Antisense strand to SEQ ID NO: 1152844
uuuaccauggauugacugu

SEQ ID NO: 1152846 - RNA, 19 nt, Artificial Sequence
  Description of Artificial Sequence: Synthetic oligonucleotide
  Sense strand starting at position 501 of SEQ ID NO: 916389
aggaguagccgguaugacu

SEQ ID NO: 1152847 - RNA, 19 nt, Artificial Sequence
  Description of Artificial Sequence: Synthetic oligonucleotide
  Antisense strand to SEQ ID NO: 1152846
agucauaccggcuacuccu

SEQ ID NO: 1152848 - RNA, 19 nt, Artificial Sequence
  Description of Artificial Sequence: Synthetic oligonucleotide
  Sense strand starting at position 718 of SEQ ID NO: 916389
gggaguacacuucgucuaa

SEQ ID NO: 1152849 - RNA, 19 nt, Artificial Sequence
  Description of Artificial Sequence: Synthetic oligonucleotide
  Antisense strand to SEQ ID NO: 1152848
uuagacgaaguguacuccc

SEQ ID NO: 1152850 - RNA, 19 nt, Artificial Sequence
  Description of Artificial Sequence: Synthetic oligonucleotide
  Sense strand starting at position 719 of SEQ ID NO: 916389
ggaguacacuucgucuaag

SEQ ID NO: 1152851 - RNA, 19 nt, Artificial Sequence
  Description of Artificial Sequence: Synthetic oligonucleotide
  Antisense strand to SEQ ID NO: 1152850
cuuagacgaaguguacucc

SEQ ID NO: 1152852 - RNA, 19 nt, Artificial Sequence
  Description of Artificial Sequence: Synthetic oligonucleotide
  Sense strand starting at position 727 of SEQ ID NO: 916389
cuucgucuaagcugaggaa

SEQ ID NO: 1152853 - RNA, 19 nt, Artificial Sequence
  Description of Artificial Sequence: Synthetic oligonucleotide
  Antisense strand to SEQ ID NO: 1152852
uuccucagcuuagacgaag

SEQ ID NO: 1152854 - RNA, 19 nt, Artificial Sequence
  Description of Artificial Sequence: Synthetic oligonucleotide
  Sense strand starting at position 1194 of SEQ ID NO: 916389
gagagaacuccuggccuag

SEQ ID NO: 1152855 - RNA, 19 nt, Artificial Sequence
  Description of Artificial Sequence: Synthetic oligonucleotide
  Antisense strand to SEQ ID NO: 1152854
cuaggccaggaguucucuc

SEQ ID NO: 1152856 - RNA, 19 nt, Artificial Sequence
  Description of Artificial Sequence: Synthetic oligonucleotide
  Sense strand starting at position 1381 of SEQ ID NO: 916389
gguucaugcgaaggaggaa

SEQ ID NO: 1152857 - RNA, 19 nt, Artificial Sequence
  Description of Artificial Sequence: Synthetic oligonucleotide
  Antisense strand to SEQ ID NO: 1152856
uuccuccuucgcaugaacc

SEQ ID NO: 1152858 - RNA, 19 nt, Artificial Sequence
  Description of Artificial Sequence: Synthetic oligonucleotide
  Sense strand starting at position 2096 of SEQ ID NO: 916389
gcagggaugguccggagua

SEQ ID NO: 1152859 - RNA, 19 nt, Artificial Sequence
  Description of Artificial Sequence: Synthetic oligonucleotide
  Antisense strand to SEQ ID NO: 1152858
uacuccggaccaucccugc

SEQ ID NO: 1152860 - RNA, 19 nt, Artificial Sequence
  Description of Artificial Sequence: Synthetic oligonucleotide
  Sense strand starting at position 2399 of SEQ ID NO: 916389
ccagcuccuccuugagaga

SEQ ID NO: 1152861 - RNA, 19 nt, Artificial Sequence
  Description of Artificial Sequence: Synthetic oligonucleotide
  Antisense strand to SEQ ID NO: 1152860
ucucucaaggaggagcugg

SEQ ID NO: 1152862 - RNA, 19 nt, Artificial Sequence
  Description of Artificial Sequence: Synthetic oligonucleotide
  Sense strand starting at position 2400 of SEQ ID NO: 916389
cagcuccuccuugagagau

SEQ ID NO: 1152863 - RNA, 19 nt, Artificial Sequence
  Description of Artificial Sequence: Synthetic oligonucleotide
  Antisense strand to SEQ ID NO: 1152862
aucucucaaggaggagcug

SEQ ID NO: 1152864 - RNA, 19 nt, Artificial Sequence
  Description of Artificial Sequence: Synthetic oligonucleotide
  Sense strand starting at position 2412 of SEQ ID NO: 916389
gagagaucagcucacuugu

SEQ ID NO: 1152865 - RNA, 19 nt, Artificial Sequence
  Description of Artificial Sequence: Synthetic oligonucleotide
  Antisense strand to SEQ ID NO: 1152864
acaagugagcugaucucuc

SEQ ID NO: 1152866 - RNA, 19 nt, Artificial Sequence
  Description of Artificial Sequence: Synthetic oligonucleotide
  Sense strand starting at position 2672 of SEQ ID NO: 916389
gggacacuuguguguauuu

SEQ ID NO: 1152867 - RNA, 19 nt, Artificial Sequence
  Description of Artificial Sequence: Synthetic oligonucleotide
  Antisense strand to SEQ ID NO: 1152866
aaauacacacaaguguccc

SEQ ID NO: 1152868 - RNA, 19 nt, Artificial Sequence
  Description of Artificial Sequence: Synthetic oligonucleotide
  Sense strand starting at position 2674 of SEQ ID NO: 916389
gacacuuguguguauuugu

SEQ ID NO: 1152869 - RNA, 19 nt, Artificial Sequence
  Description of Artificial Sequence: Synthetic oligonucleotide
  Antisense strand to SEQ ID NO: 1152868
acaaauacacacaaguguc

SEQ ID NO: 1152870 - RNA, 19 nt, Artificial Sequence
  Description of Artificial Sequence: Synthetic oligonucleotide
  Sense strand starting at position 2681 of SEQ ID NO: 916389
guguguauuugugacacuu

SEQ ID NO: 1152871 - RNA, 19 nt, Artificial Sequence
  Description of Artificial Sequence: Synthetic oligonucleotide
  Antisense strand to SEQ ID NO: 1152870
aagugucacaaauacacac

SEQ ID NO: 1152872 - RNA, 19 nt, Artificial Sequence
  Description of Artificial Sequence: Synthetic oligonucleotide
  Sense strand starting at position 2683 of SEQ ID NO: 916389
guguauuugugacacuuug

SEQ ID NO: 1152873 - RNA, 19 nt, Artificial Sequence
  Description of Artificial Sequence: Synthetic oligonucleotide
  Antisense strand to SEQ ID NO: 1152872
caaagugucacaaauacac

SEQ ID NO: 1152874 - RNA, 19 nt, Artificial Sequence
  Description of Artificial Sequence: Synthetic oligonucleotide
  Sense strand starting at position 2788 of SEQ ID NO: 916389
gcaugucugagccugcuua

SEQ ID NO: 1152875 - RNA, 19 nt, Artificial Sequence
  Description of Artificial Sequence: Synthetic oligonucleotide
  Antisense strand to SEQ ID NO: 1152874
uaagcaggcucagacaugc

SEQ ID NO: 1152876 - RNA, 19 nt, Artificial Sequence
  Description of Artificial Sequence: Synthetic oligonucleotide
  Sense strand starting at position 2792 of SEQ ID NO: 916389
gucugagccugcuuacaca

SEQ ID NO: 1152877 - RNA, 19 nt, Artificial Sequence
  Description of Artificial Sequence: Synthetic oligonucleotide
  Antisense strand to SEQ ID NO: 1152876
uguguaagcaggcucagac

SEQ ID NO: 1152878 - RNA, 19 nt, Artificial Sequence
  Description of Artificial Sequence: Synthetic oligonucleotide
  Sense strand starting at position 3057 of SEQ ID NO: 916389
cggacaaagccugaguguu

SEQ ID NO: 1152879 - RNA, 19 nt, Artificial Sequence
  Description of Artificial Sequence: Synthetic oligonucleotide
  Antisense strand to SEQ ID NO: 1152878
aacacucaggcuuuguccg

SEQ ID NO: 1152880 - RNA, 19 nt, Artificial Sequence
  Description of Artificial Sequence: Synthetic oligonucleotide
  Sense strand starting at position 3178 of SEQ ID NO: 916389
ccagguucguuaccucaga

SEQ ID NO: 1152881 - RNA, 19 nt, Artificial Sequence
  Description of Artificial Sequence: Synthetic oligonucleotide
  Antisense strand to SEQ ID NO: 1152880
ucugagguaacgaaccugg

SEQ ID NO: 1152882 - RNA, 19 nt, Artificial Sequence
  Description of Artificial Sequence: Synthetic oligonucleotide
  Sense strand starting at position 3268 of SEQ ID NO: 916389
aggacuuccagugaggcua

SEQ ID NO: 1152883 - RNA, 19 nt, Artificial Sequence
  Description of Artificial Sequence: Synthetic oligonucleotide
  Antisense strand to SEQ ID NO: 1152882
uagccucacuggaaguccu

SEQ ID NO: 1152884 - RNA, 19 nt, Artificial Sequence
  Description of Artificial Sequence: Synthetic oligonucleotide
  Sense strand starting at position 3299 of SEQ ID NO: 916389
ccuucucagugaucuuagu

SEQ ID NO: 1152885 - RNA, 19 nt, Artificial Sequence
  Description of Artificial Sequence: Synthetic oligonucleotide
  Antisense strand to SEQ ID NO: 1152884
acuaagaucacugagaagg

SEQ ID NO: 1152886 - RNA, 19 nt, Artificial Sequence
  Description of Artificial Sequence: Synthetic oligonucleotide
  Sense strand starting at position 3433 of SEQ ID NO: 916389
ggagcauguaugugugcau

SEQ ID NO: 1152887 - RNA, 19 nt, Artificial Sequence
  Description of Artificial Sequence: Synthetic oligonucleotide
  Antisense strand to SEQ ID NO: 1152886
augcacacauacaugcucc

SEQ ID NO: 1152888 - RNA, 19 nt, Artificial Sequence
  Description of Artificial Sequence: Synthetic oligonucleotide
  Sense strand starting at position 3434 of SEQ ID NO: 916389
gagcauguaugugugcaua

SEQ ID NO: 1152889 - RNA, 19 nt, Artificial Sequence
  Description of Artificial Sequence: Synthetic oligonucleotide
  Antisense strand to SEQ ID NO: 1152888
uaugcacacauacaugcuc

SEQ ID NO: 1152890 - RNA, 19 nt, Artificial Sequence
  Description of Artificial Sequence: Synthetic oligonucleotide
  Sense strand starting at position 3436 of SEQ ID NO: 916389
gcauguaugugugcauaag

SEQ ID NO: 1152891 - RNA, 19 nt, Artificial Sequence
  Description of Artificial Sequence: Synthetic oligonucleotide
  Antisense strand to SEQ ID NO: 1152890
cuuaugcacacauacaugc

SEQ ID NO: 1152892 - RNA, 19 nt, Artificial Sequence
  Description of Artificial Sequence: Synthetic oligonucleotide
  Sense strand starting at position 3437 of SEQ ID NO: 916389
cauguaugugugcauaaga

SEQ ID NO: 1152893 - RNA, 19 nt, Artificial Sequence
  Description of Artificial Sequence: Synthetic oligonucleotide
  Antisense strand to SEQ ID NO: 1152892
ucuuaugcacacauacaug

SEQ ID NO: 1152894 - RNA, 19 nt, Artificial Sequence
  Description of Artificial Sequence: Synthetic oligonucleotide
  Sense strand starting at position 3461 of SEQ ID NO: 916389
agagauucgaccuggaauu

SEQ ID NO: 1152895 - RNA, 19 nt, Artificial Sequence
  Description of Artificial Sequence: Synthetic oligonucleotide
  Antisense strand to SEQ ID NO: 1152894
aauuccaggucgaaucucu

SEQ ID NO: 1152896 - RNA, 19 nt, Artificial Sequence
  Description of Artificial Sequence: Synthetic oligonucleotide
  Sense strand starting at position 3462 of SEQ ID NO: 916389
gagauucgaccuggaauug

SEQ ID NO: 1152897 - RNA, 19 nt, Artificial Sequence
  Description of Artificial Sequence: Synthetic oligonucleotide
  Antisense strand to SEQ ID NO: 1152896
caauuccaggucgaaucuc

SEQ ID NO: 1152898 - RNA, 19 nt, Artificial Sequence
  Description of Artificial Sequence: Synthetic oligonucleotide
  Sense strand starting at position 3463 of SEQ ID NO: 916389
agauucgaccuggaauugu

SEQ ID NO: 1152899 - RNA, 19 nt, Artificial Sequence
  Description of Artificial Sequence: Synthetic oligonucleotide
  Antisense strand to SEQ ID NO: 1152898
acaauuccaggucgaaucu

SEQ ID NO: 1152900 - RNA, 19 nt, Artificial Sequence
  Description of Artificial Sequence: Synthetic oligonucleotide
  Sense strand starting at position 3473 of SEQ ID NO: 916389
uggaauugugccugguugu

SEQ ID NO: 1152901 - RNA, 19 nt, Artificial Sequence
  Description of Artificial Sequence: Synthetic oligonucleotide
  Antisense strand to SEQ ID NO: 1152900
acaaccaggcacaauucca

SEQ ID NO: 1152902 - RNA, 19 nt, Artificial Sequence
  Description of Artificial Sequence: Synthetic oligonucleotide
  Sense strand starting at position 3474 of SEQ ID NO: 916389
ggaauugugccugguugua

SEQ ID NO: 1152903 - RNA, 19 nt, Artificial Sequence
  Description of Artificial Sequence: Synthetic oligonucleotide
  Antisense strand to SEQ ID NO: 1152902
uacaaccaggcacaauucc

SEQ ID NO: 1152904 - RNA, 19 nt, Artificial Sequence
  Description of Artificial Sequence: Synthetic oligonucleotide
  Sense strand starting at position 3493 of SEQ ID NO: 916389
gcuugaagagcauacggau

SEQ ID NO: 1152905 - RNA, 19 nt, Artificial Sequence
  Description of Artificial Sequence: Synthetic oligonucleotide
  Antisense strand to SEQ ID NO: 1152904
auccguaugcucuucaagc

SEQ ID NO: 1152906 - RNA, 19 nt, Artificial Sequence
  Description of Artificial Sequence: Synthetic oligonucleotide
  Sense strand starting at position 3828 of SEQ ID NO: 916389
cugggaaaucuuugucagg

SEQ ID NO: 1152907 - RNA, 19 nt, Artificial Sequence
  Description of Artificial Sequence: Synthetic oligonucleotide
  Antisense strand to SEQ ID NO: 1152906
ccugacaaagauuucccag

SEQ ID NO: 1152908 - RNA, 19 nt, Artificial Sequence
  Description of Artificial Sequence: Synthetic oligonucleotide
  Sense strand starting at position 3831 of SEQ ID NO: 916389
ggaaaucuuugucagggca

SEQ ID NO: 1152909 - RNA, 19 nt, Artificial Sequence
  Description of Artificial Sequence: Synthetic oligonucleotide
  Antisense strand to SEQ ID NO: 1152908
ugcccugacaaagauuucc

SEQ ID NO: 1152910 - RNA, 19 nt, Artificial Sequence
  Description of Artificial Sequence: Synthetic oligonucleotide
  Sense strand starting at position 105 of SEQ ID NO: 916390
cugaaauuauuugggaacu

SEQ ID NO: 1152911 - RNA, 19 nt, Artificial Sequence
  Description of Artificial Sequence: Synthetic oligonucleotide
  Antisense strand to SEQ ID NO: 1152910
aguucccaaauaauuucag

SEQ ID NO: 1152912 - RNA, 19 nt, Artificial Sequence
  Description of Artificial Sequence: Synthetic oligonucleotide
  Sense strand starting at position 107 of SEQ ID NO: 916390
gaaauuauuugggaacugu

SEQ ID NO: 1152913 - RNA, 19 nt, Artificial Sequence
  Description of Artificial Sequence: Synthetic oligonucleotide
  Antisense strand to SEQ ID NO: 1152912
acaguucccaaauaauuuc

SEQ ID NO: 1152914 - RNA, 19 nt, Artificial Sequence
  Description of Artificial Sequence: Synthetic oligonucleotide
  Sense strand starting at position 158 of SEQ ID NO: 916390
ggcagaccaucuuuauaaa

SEQ ID NO: 1152915 - RNA, 19 nt, Artificial Sequence
  Description of Artificial Sequence: Synthetic oligonucleotide
  Antisense strand to SEQ ID NO: 1152914
uuuauaaagauggucugcc

SEQ ID NO: 1152916 - RNA, 19 nt, Artificial Sequence
  Description of Artificial Sequence: Synthetic oligonucleotide
  Sense strand starting at position 181 of SEQ ID NO: 916390
augugacccuccucauguu

SEQ ID NO: 1152917 - RNA, 19 nt, Artificial Sequence
  Description of Artificial Sequence: Synthetic oligonucleotide
  Antisense strand to SEQ ID NO: 1152916
aacaugaggagggucacau

SEQ ID NO: 1152918 - RNA, 19 nt, Artificial Sequence
  Description of Artificial Sequence: Synthetic oligonucleotide
  Sense strand starting at position 208 of SEQ ID NO: 916390
uucccaugucuccagacuu

SEQ ID NO: 1152919 - RNA, 19 nt, Artificial Sequence
  Description of Artificial Sequence: Synthetic oligonucleotide
  Antisense strand to SEQ ID NO: 1152918
aagucuggagacaugggaa

SEQ ID NO: 1152920 - RNA, 19 nt, Artificial Sequence
  Description of Artificial Sequence: Synthetic oligonucleotide
  Sense strand starting at position 299 of SEQ ID NO: 916390
agaacacuuugaucuugca

SEQ ID NO: 1152921 - RNA, 19 nt, Artificial Sequence
  Description of Artificial Sequence: Synthetic oligonucleotide
  Antisense strand to SEQ ID NO: 1152920
ugcaagaucaaaguguucu

SEQ ID NO: 1152922 - RNA, 19 nt, Artificial Sequence
  Description of Artificial Sequence: Synthetic oligonucleotide
  Sense strand starting at position 306 of SEQ ID NO: 916390
uuugaucuugcagauauga

SEQ ID NO: 1152923 - RNA, 19 nt, Artificial Sequence
  Description of Artificial Sequence: Synthetic oligonucleotide
  Antisense strand to SEQ ID NO: 1152922
ucauaucugcaagaucaaa

SEQ ID NO: 1152924 - RNA, 19 nt, Artificial Sequence
  Description of Artificial Sequence: Synthetic oligonucleotide
  Sense strand starting at position 453 of SEQ ID NO: 916390
ccgucucacccauagacuu

SEQ ID NO: 1152925 - RNA, 19 nt, Artificial Sequence
  Description of Artificial Sequence: Synthetic oligonucleotide
  Antisense strand to SEQ ID NO: 1152924
aagucuaugggugagacgg

SEQ ID NO: 1152926 - RNA, 19 nt, Artificial Sequence
  Description of Artificial Sequence: Synthetic oligonucleotide
  Sense strand starting at position 466 of SEQ ID NO: 916390
agacuuuguccuggguuga

SEQ ID NO: 1152927 - RNA, 19 nt, Artificial Sequence
  Description of Artificial Sequence: Synthetic oligonucleotide
  Antisense strand to SEQ ID NO: 1152926
ucaacccaggacaaagucu

SEQ ID NO: 1152928 - RNA, 19 nt, Artificial Sequence
  Description of Artificial Sequence: Synthetic oligonucleotide
  Sense strand starting at position 657 of SEQ ID NO: 916390
ucuucucugccagaaguca

SEQ ID NO: 1152929 - RNA, 19 nt, Artificial Sequence
  Description of Artificial Sequence: Synthetic oligonucleotide
  Antisense strand to SEQ ID NO: 1152928
ugacuucuggcagagaaga

SEQ ID NO: 1152930 - RNA, 19 nt, Artificial Sequence
  Description of Artificial Sequence: Synthetic oligonucleotide
  Sense strand starting at position 796 of SEQ ID NO: 916390
gaguauuuagugugcguca

SEQ ID NO: 1152931 - RNA, 19 nt, Artificial Sequence
  Description of Artificial Sequence: Synthetic oligonucleotide
  Antisense strand to SEQ ID NO: 1152930
ugacgcacacuaaauacuc

SEQ ID NO: 1152932 - RNA, 19 nt, Artificial Sequence
  Description of Artificial Sequence: Synthetic oligonucleotide
  Sense strand starting at position 1270 of SEQ ID NO: 916390
agccucugccaguagaaau

SEQ ID NO: 1152933 - RNA, 19 nt, Artificial Sequence
  Description of Artificial Sequence: Synthetic oligonucleotide
  Antisense strand to SEQ ID NO: 1152932
auuucuacuggcagaggcu

SEQ ID NO: 1152934 - RNA, 19 nt, Artificial Sequence
  Description of Artificial Sequence: Synthetic oligonucleotide
  Sense strand starting at position 1364 of SEQ ID NO: 916390
cuaccuuguccacaguaaa

SEQ ID NO: 1152935 - RNA, 19 nt, Artificial Sequence
  Description of Artificial Sequence: Synthetic oligonucleotide
  Antisense strand to SEQ ID NO: 1152934
uuuacuguggacaagguag

SEQ ID NO: 1152936 - RNA, 19 nt, Artificial Sequence
  Description of Artificial Sequence: Synthetic oligonucleotide
  Sense strand starting at position 1375 of SEQ ID NO: 916390
acaguaaagucuuccucac

SEQ ID NO: 1152937 - RNA, 19 nt, Artificial Sequence
  Description of Artificial Sequence: Synthetic oligonucleotide
  Antisense strand to SEQ ID NO: 1152936
gugaggaagacuuuacugu

SEQ ID NO: 1152938 - RNA, 19 nt, Artificial Sequence
  Description of Artificial Sequence: Synthetic oligonucleotide
  Sense strand starting at position 1377 of SEQ ID NO: 916390
aguaaagucuuccucacau

SEQ ID NO: 1152939 - RNA, 19 nt, Artificial Sequence
  Description of Artificial Sequence: Synthetic oligonucleotide
  Antisense strand to SEQ ID NO: 1152938
augugaggaagacuuuacu

SEQ ID NO: 1152940 - RNA, 19 nt, Artificial Sequence
  Description of Artificial Sequence: Synthetic oligonucleotide
  Sense strand starting at position 1901 of SEQ ID NO: 916390
ucccgacuugcaggugaau

SEQ ID NO: 1152941 - RNA, 19 nt, Artificial Sequence
  Description of Artificial Sequence: Synthetic oligonucleotide
  Antisense strand to SEQ ID NO: 1152940
auucaccugcaagucggga

SEQ ID NO: 1152942 - RNA, 19 nt, Artificial Sequence
  Description of Artificial Sequence: Synthetic oligonucleotide
  Sense strand starting at position 1992 of SEQ ID NO: 916390
gcugguuguagugaggacu

SEQ ID NO: 1152943 - RNA, 19 nt, Artificial Sequence
  Description of Artificial Sequence: Synthetic oligonucleotide
  Antisense strand to SEQ ID NO: 1152942
aguccucacuacaaccagc

SEQ ID NO: 1152944 - RNA, 19 nt, Artificial Sequence
  Description of Artificial Sequence: Synthetic oligonucleotide
  Sense strand starting at position 2181 of SEQ ID NO: 916390
gcaagcuuugcucauguaa

SEQ ID NO: 1152945 - RNA, 19 nt, Artificial Sequence
  Description of Artificial Sequence: Synthetic oligonucleotide
  Antisense strand to SEQ ID NO: 1152944
uuacaugagcaaagcuugc

SEQ ID NO: 1152946 - RNA, 19 nt, Artificial Sequence
  Description of Artificial Sequence: Synthetic oligonucleotide
  Sense strand starting at position 2220 of SEQ ID NO: 916390
ccugcuguuauaggguaau

SEQ ID NO: 1152947 - RNA, 19 nt, Artificial Sequence
  Description of Artificial Sequence: Synthetic oligonucleotide
  Antisense strand to SEQ ID NO: 1152946
auuacccuauaacagcagg

SEQ ID NO: 1152948 - RNA, 19 nt, Artificial Sequence
  Description of Artificial Sequence: Synthetic oligonucleotide
  Sense strand starting at position 2297 of SEQ ID NO: 916390
ugauuaaucuucucugggu

SEQ ID NO: 1152949 - RNA, 19 nt, Artificial Sequence
  Description of Artificial Sequence: Synthetic oligonucleotide
  Antisense strand to SEQ ID NO: 1152948
acccagagaagauuaauca

SEQ ID NO: 1152950 - RNA, 19 nt, Artificial Sequence
  Description of Artificial Sequence: Synthetic oligonucleotide
  Sense strand starting at position 2298 of SEQ ID NO: 916390
gauuaaucuucucuggguu

SEQ ID NO: 1152951 - RNA, 19 nt, Artificial Sequence
  Description of Artificial Sequence: Synthetic oligonucleotide
  Antisense strand to SEQ ID NO: 1152950
aacccagagaagauuaauc

SEQ ID NO: 1152952 - RNA, 19 nt, Artificial Sequence
  Description of Artificial Sequence: Synthetic oligonucleotide
  Sense strand starting at position 2355 of SEQ ID NO: 916390
auggacuuuccuggauagu

SEQ ID NO: 1152953 - RNA, 19 nt, Artificial Sequence
  Description of Artificial Sequence: Synthetic oligonucleotide
  Antisense strand to SEQ ID NO: 1152952
acuauccaggaaaguccau

SEQ ID NO: 1152954 - RNA, 19 nt, Artificial Sequence
  Description of Artificial Sequence: Synthetic oligonucleotide
  Sense strand starting at position 2356 of SEQ ID NO: 916390
uggacuuuccuggauaguu

SEQ ID NO: 1152955 - RNA, 19 nt, Artificial Sequence
  Description of Artificial Sequence: Synthetic oligonucleotide
  Antisense strand to SEQ ID NO: 1152954
aacuauccaggaaagucca

SEQ ID NO: 1152956 - RNA, 19 nt, Artificial Sequence
  Description of Artificial Sequence: Synthetic oligonucleotide
  Sense strand starting at position 2766 of SEQ ID NO: 916390
uggagauuccugggugguc

SEQ ID NO: 1152957 - RNA, 19 nt, Artificial Sequence
  Description of Artificial Sequence: Synthetic oligonucleotide
  Antisense strand to SEQ ID NO: 1152956
gaccacccaggaaucucca

SEQ ID NO: 1152958 - RNA, 19 nt, Artificial Sequence
  Description of Artificial Sequence: Synthetic oligonucleotide
  Sense strand starting at position 2768 of SEQ ID NO: 916390
gagauuccuggguggucca

SEQ ID NO: 1152959 - RNA, 19 nt, Artificial Sequence
  Description of Artificial Sequence: Synthetic oligonucleotide
  Antisense strand to SEQ ID NO: 1152958
uggaccacccaggaaucuc

SEQ ID NO: 1152960 - RNA, 19 nt, Artificial Sequence
  Description of Artificial Sequence: Synthetic oligonucleotide
  Sense strand starting at position 2808 of SEQ ID NO: 916390
uccaauguguaucugcuaa

SEQ ID NO: 1152961 - RNA, 19 nt, Artificial Sequence
  Description of Artificial Sequence: Synthetic oligonucleotide
  Antisense strand to SEQ ID NO: 1152960
uuagcagauacacauugga

SEQ ID NO: 1152962 - RNA, 19 nt, Artificial Sequence
  Description of Artificial Sequence: Synthetic oligonucleotide
  Sense strand starting at position 2852 of SEQ ID NO: 916390
guaaucaucuguuuagagu

SEQ ID NO: 1152963 - RNA, 19 nt, Artificial Sequence
  Description of Artificial Sequence: Synthetic oligonucleotide
  Antisense strand to SEQ ID NO: 1152962
acucuaaacagaugauuac

SEQ ID NO: 1152964 - RNA, 19 nt, Artificial Sequence
  Description of Artificial Sequence: Synthetic oligonucleotide
  Sense strand starting at position 2882 of SEQ ID NO: 916390
agcuguuaucaacaugaaa

SEQ ID NO: 1152965 - RNA, 19 nt, Artificial Sequence
  Description of Artificial Sequence: Synthetic oligonucleotide
  Antisense strand to SEQ ID NO: 1152964
uuucauguugauaacagcu

SEQ ID NO: 1152966 - RNA, 19 nt, Artificial Sequence
  Description of Artificial Sequence: Synthetic oligonucleotide
  Sense strand starting at position 3020 of SEQ ID NO: 916390
caguaagcacgaugucauu

SEQ ID NO: 1152967 - RNA, 19 nt, Artificial Sequence
  Description of Artificial Sequence: Synthetic oligonucleotide
  Antisense strand to SEQ ID NO: 1152966
aaugacaucgugcuuacug

SEQ ID NO: 1152968 - RNA, 19 nt, Artificial Sequence
  Description of Artificial Sequence: Synthetic oligonucleotide
  Sense strand starting at position 3043 of SEQ ID NO: 916390
uccaaacaguccuuugaug

SEQ ID NO: 1152969 - RNA, 19 nt, Artificial Sequence
  Description of Artificial Sequence: Synthetic oligonucleotide
  Antisense strand to SEQ ID NO: 1152968
caucaaaggacuguuugga

SEQ ID NO: 1152970 - RNA, 19 nt, Artificial Sequence
  Description of Artificial Sequence: Synthetic oligonucleotide
  Sense strand starting at position 3174 of SEQ ID NO: 916390
cagcucugucccugaagau

SEQ ID NO: 1152971 - RNA, 19 nt, Artificial Sequence
  Description of Artificial Sequence: Synthetic oligonucleotide
  Antisense strand to SEQ ID NO: 1152970
aucuucagggacagagcug

SEQ ID NO: 1152972 - RNA, 19 nt, Artificial Sequence
  Description of Artificial Sequence: Synthetic oligonucleotide
  Sense strand starting at position 3175 of SEQ ID NO: 916390
agcucugucccugaagauc

SEQ ID NO: 1152973 - RNA, 19 nt, Artificial Sequence
  Description of Artificial Sequence: Synthetic oligonucleotide
  Antisense strand to SEQ ID NO: 1152972
gaucuucagggacagagcu

SEQ ID NO: 1152974 - RNA, 19 nt, Artificial Sequence
  Description of Artificial Sequence: Synthetic oligonucleotide
  Sense strand starting at position 3201 of SEQ ID NO: 916390
cccagagaucccugcugga

SEQ ID NO: 1152975 - RNA, 19 nt, Artificial Sequence
  Description of Artificial Sequence: Synthetic oligonucleotide
  Antisense strand to SEQ ID NO: 1152974
uccagcagggaucucuggg

SEQ ID NO: 1152976 - RNA, 19 nt, Artificial Sequence
  Description of Artificial Sequence: Synthetic oligonucleotide
  Sense strand starting at position 3687 of SEQ ID NO: 916390
ugucacaugucaucuuagu

SEQ ID NO: 1152977 - RNA, 19 nt, Artificial Sequence
  Description of Artificial Sequence: Synthetic oligonucleotide
  Antisense strand to SEQ ID NO: 1152976
acuaagaugacaugugaca

SEQ ID NO: 1152978 - RNA, 19 nt, Artificial Sequence
  Description of Artificial Sequence: Synthetic oligonucleotide
  Sense strand starting at position 3822 of SEQ ID NO: 916390
ggacaaucuugaguuccuu

SEQ ID NO: 1152979 - RNA, 19 nt, Artificial Sequence
  Description of Artificial Sequence: Synthetic oligonucleotide
  Antisense strand to SEQ ID NO: 1152978
aaggaacucaagauugucc

SEQ ID NO: 1152980 - RNA, 19 nt, Artificial Sequence
  Description of Artificial Sequence: Synthetic oligonucleotide
  Sense strand starting at position 3844 of SEQ ID NO: 916390
gggaaauucugggcaccuu

SEQ ID NO: 1152981 - RNA, 19 nt, Artificial Sequence
  Description of Artificial Sequence: Synthetic oligonucleotide
  Antisense strand to SEQ ID NO: 1152980
aaggugcccagaauuuccc

SEQ ID NO: 1152982 - RNA, 19 nt, Artificial Sequence
  Description of Artificial Sequence: Synthetic oligonucleotide
  Sense strand starting at position 3859 of SEQ ID NO: 916390
ccuugcuagccuggagaaa

SEQ ID NO: 1152983 - RNA, 19 nt, Artificial Sequence
  Description of Artificial Sequence: Synthetic oligonucleotide
  Antisense strand to SEQ ID NO: 1152982
uuucuccaggcuagcaagg

SEQ ID NO: 1152984 - RNA, 19 nt, Artificial Sequence
  Description of Artificial Sequence: Synthetic oligonucleotide
  Sense strand starting at position 3860 of SEQ ID NO: 916390
cuugcuagccuggagaaau

SEQ ID NO: 1152985 - RNA, 19 nt, Artificial Sequence
  Description of Artificial Sequence: Synthetic oligonucleotide
  Antisense strand to SEQ ID NO: 1152984
auuucuccaggcuagcaag

SEQ ID NO: 1152986 - RNA, 19 nt, Artificial Sequence
  Description of Artificial Sequence: Synthetic oligonucleotide
  Sense strand starting at position 3936 of SEQ ID NO: 916390
gcuggaaucgugggauguu

SEQ ID NO: 1152987 - RNA, 19 nt, Artificial Sequence
  Description of Artificial Sequence: Synthetic oligonucleotide
  Antisense strand to SEQ ID NO: 1152986
aacaucccacgauuccagc

SEQ ID NO: 1152988 - RNA, 19 nt, Artificial Sequence
  Description of Artificial Sequence: Synthetic oligonucleotide
  Sense strand starting at position 3954 of SEQ ID NO: 916390
uugguuccgccauagaaac

SEQ ID NO: 1152989 - RNA, 19 nt, Artificial Sequence
  Description of Artificial Sequence: Synthetic oligonucleotide
  Antisense strand to SEQ ID NO: 1152988
guuucuauggcggaaccaa

SEQ ID NO: 1152990 - RNA, 19 nt, Artificial Sequence
  Description of Artificial Sequence: Synthetic oligonucleotide
  Sense strand starting at position 365 of SEQ ID NO: 916391
acagaaucauggguuguga

SEQ ID NO: 1152991 - RNA, 19 nt, Artificial Sequence
  Description of Artificial Sequence: Synthetic oligonucleotide
  Antisense strand to SEQ ID NO: 1152990
ucacaacccaugauucugu

SEQ ID NO: 1152992 - RNA, 19 nt, Artificial Sequence
  Description of Artificial Sequence: Synthetic oligonucleotide
  Sense strand starting at position 367 of SEQ ID NO: 916391
agaaucauggguugugauu

SEQ ID NO: 1152993 - RNA, 19 nt, Artificial Sequence
  Description of Artificial Sequence: Synthetic oligonucleotide
  Antisense strand to SEQ ID NO: 1152992
aaucacaacccaugauucu

SEQ ID NO: 1152994 - RNA, 19 nt, Artificial Sequence
  Description of Artificial Sequence: Synthetic oligonucleotide
  Sense strand starting at position 373 of SEQ ID NO: 916391
auggguugugauuguaaau

SEQ ID NO: 1152995 - RNA, 19 nt, Artificial Sequence
  Description of Artificial Sequence: Synthetic oligonucleotide
  Antisense strand to SEQ ID NO: 1152994
auuuacaaucacaacccau

SEQ ID NO: 1152996 - RNA, 19 nt, Artificial Sequence
  Description of Artificial Sequence: Synthetic oligonucleotide
  Sense strand starting at position 379 of SEQ ID NO: 916391
ugugauuguaaaugagaau

SEQ ID NO: 1152997 - RNA, 19 nt, Artificial Sequence
  Description of Artificial Sequence: Synthetic oligonucleotide
  Antisense strand to SEQ ID NO: 1152996
auucucauuuacaaucaca

SEQ ID NO: 1152998 - RNA, 19 nt, Artificial Sequence
  Description of Artificial Sequence: Synthetic oligonucleotide
  Sense strand starting at position 401 of SEQ ID NO: 916391
uugggacggcaccauaaau

SEQ ID NO: 1152999 - RNA, 19 nt, Artificial Sequence
  Description of Artificial Sequence: Synthetic oligonucleotide
  Antisense strand to SEQ ID NO: 1152998
auuuauggugccgucccaa

SEQ ID NO: 1153000 - RNA, 19 nt, Artificial Sequence
  Description of Artificial Sequence: Synthetic oligonucleotide
  Sense strand starting at position 879 of SEQ ID NO: 916391
aaaugaagguccuugauac

SEQ ID NO: 1153001 - RNA, 19 nt, Artificial Sequence
  Description of Artificial Sequence: Synthetic oligonucleotide
  Antisense strand to SEQ ID NO: 1153000
guaucaaggaccuucauuu

SEQ ID NO: 1153002 - RNA, 19 nt, Artificial Sequence
  Description of Artificial Sequence: Synthetic oligonucleotide
  Sense strand starting at position 930 of SEQ ID NO: 916391
ugaauuaagucucccagaa

SEQ ID NO: 1153003 - RNA, 19 nt, Artificial Sequence
  Description of Artificial Sequence: Synthetic oligonucleotide
  Antisense strand to SEQ ID NO: 1153002
uucugggagacuuaauuca

SEQ ID NO: 1153004 - RNA, 19 nt, Artificial Sequence
  Description of Artificial Sequence: Synthetic oligonucleotide
  Sense strand starting at position 1305 of SEQ ID NO: 916391
ccaauuaagccucaucgca

SEQ ID NO: 1153005 - RNA, 19 nt, Artificial Sequence
  Description of Artificial Sequence: Synthetic oligonucleotide
  Antisense strand to SEQ ID NO: 1153004
ugcgaugaggcuuaauugg

SEQ ID NO: 1153006 - RNA, 19 nt, Artificial Sequence
  Description of Artificial Sequence: Synthetic oligonucleotide
  Sense strand starting at position 1479 of SEQ ID NO: 916391
gaggacucaccuugucgau

SEQ ID NO: 1153007 - RNA, 19 nt, Artificial Sequence
  Description of Artificial Sequence: Synthetic oligonucleotide
  Antisense strand to SEQ ID NO: 1153006
aucgacaaggugaguccuc

SEQ ID NO: 1153008 - RNA, 19 nt, Artificial Sequence
  Description of Artificial Sequence: Synthetic oligonucleotide
  Sense strand starting at position 1481 of SEQ ID NO: 916391
ggacucaccuugucgauga

SEQ ID NO: 1153009 - RNA, 19 nt, Artificial Sequence
  Description of Artificial Sequence: Synthetic oligonucleotide
  Antisense strand to SEQ ID NO: 1153008
ucaucgacaaggugagucc

SEQ ID NO: 1153010 - RNA, 19 nt, Artificial Sequence
  Description of Artificial Sequence: Synthetic oligonucleotide
  Sense strand starting at position 1512 of SEQ ID NO: 916391
uguuguuuagcgccuugau

SEQ ID NO: 1153011 - RNA, 19 nt, Artificial Sequence
  Description of Artificial Sequence: Synthetic oligonucleotide
  Antisense strand to SEQ ID NO: 1153010
aucaaggcgcuaaacaaca

SEQ ID NO: 1153012 - RNA, 19 nt, Artificial Sequence
  Description of Artificial Sequence: Synthetic oligonucleotide
  Sense strand starting at position 1908 of SEQ ID NO: 916391
ggcucauggcucgcaagua

SEQ ID NO: 1153013 - RNA, 19 nt, Artificial Sequence
  Description of Artificial Sequence: Synthetic oligonucleotide
  Antisense strand to SEQ ID NO: 1153012
uacuugcgagccaugagcc

SEQ ID NO: 1153014 - RNA, 19 nt, Artificial Sequence
  Description of Artificial Sequence: Synthetic oligonucleotide
  Sense strand starting at position 2015 of SEQ ID NO: 916391
gagucagccuaauuuguau

SEQ ID NO: 1153015 - RNA, 19 nt, Artificial Sequence
  Description of Artificial Sequence: Synthetic oligonucleotide
  Antisense strand to SEQ ID NO: 1153014
auacaaauuaggcugacuc

SEQ ID NO: 1153016 - RNA, 19 nt, Artificial Sequence
  Description of Artificial Sequence: Synthetic oligonucleotide
  Sense strand starting at position 2021 of SEQ ID NO: 916391
gccuaauuuguaugucgac

SEQ ID NO: 1153017 - RNA, 19 nt, Artificial Sequence
  Description of Artificial Sequence: Synthetic oligonucleotide
  Antisense strand to SEQ ID NO: 1153016
gucgacauacaaauuaggc

SEQ ID NO: 1153018 - RNA, 19 nt, Artificial Sequence
  Description of Artificial Sequence: Synthetic oligonucleotide
  Sense strand starting at position 2022 of SEQ ID NO: 916391
ccuaauuuguaugucgaca

SEQ ID NO: 1153019 - RNA, 19 nt, Artificial Sequence
  Description of Artificial Sequence: Synthetic oligonucleotide
  Antisense strand to SEQ ID NO: 1153018
ugucgacauacaaauuagg

SEQ ID NO: 1153020 - RNA, 19 nt, Artificial Sequence
  Description of Artificial Sequence: Synthetic oligonucleotide
  Sense strand starting at position 2082 of SEQ ID NO: 916391
aggaaauuaccaugcacuc

SEQ ID NO: 1153021 - RNA, 19 nt, Artificial Sequence
  Description of Artificial Sequence: Synthetic oligonucleotide
  Antisense strand to SEQ ID NO: 1153020
gagugcaugguaauuuccu

SEQ ID NO: 1153022 - RNA, 19 nt, Artificial Sequence
  Description of Artificial Sequence: Synthetic oligonucleotide
  Sense strand starting at position 2091 of SEQ ID NO: 916391
ccaugcacucaccgagauu

SEQ ID NO: 1153023 - RNA, 19 nt, Artificial Sequence
  Description of Artificial Sequence: Synthetic oligonucleotide
  Antisense strand to SEQ ID NO: 1153022
aaucucggugagugcaugg

SEQ ID NO: 1153024 - RNA, 19 nt, Artificial Sequence
  Description of Artificial Sequence: Synthetic oligonucleotide
  Sense strand starting at position 2135 of SEQ ID NO: 916391
caugaaucccuguaaagug

SEQ ID NO: 1153025 - RNA, 19 nt, Artificial Sequence
  Description of Artificial Sequence: Synthetic oligonucleotide
  Antisense strand to SEQ ID NO: 1153024
cacuuuacagggauucaug

SEQ ID NO: 1153026 - RNA, 19 nt, Artificial Sequence
  Description of Artificial Sequence: Synthetic oligonucleotide
  Sense strand starting at position 2143 of SEQ ID NO: 916391
ccuguaaagugacccagaa

SEQ ID NO: 1153027 - RNA, 19 nt, Artificial Sequence
  Description of Artificial Sequence: Synthetic oligonucleotide
  Antisense strand to SEQ ID NO: 1153026
uucugggucacuuuacagg

SEQ ID NO: 1153028 - RNA, 19 nt, Artificial Sequence
  Description of Artificial Sequence: Synthetic oligonucleotide
  Sense strand starting at position 2315 of SEQ ID NO: 916391
aggugugugaagcagaagu

SEQ ID NO: 1153029 - RNA, 19 nt, Artificial Sequence
  Description of Artificial Sequence: Synthetic oligonucleotide
  Antisense strand to SEQ ID NO: 1153028
acuucugcuucacacaccu

SEQ ID NO: 1153030 - RNA, 19 nt, Artificial Sequence
  Description of Artificial Sequence: Synthetic oligonucleotide
  Sense strand starting at position 2445 of SEQ ID NO: 916391
ucccuugugcaagaaggaa

SEQ ID NO: 1153031 - RNA, 19 nt, Artificial Sequence
  Description of Artificial Sequence: Synthetic oligonucleotide
  Antisense strand to SEQ ID NO: 1153030
uuccuucuugcacaaggga

SEQ ID NO: 1153032 - RNA, 19 nt, Artificial Sequence
  Description of Artificial Sequence: Synthetic oligonucleotide
  Sense strand starting at position 2532 of SEQ ID NO: 916391
gagaccucuggucacaagu

SEQ ID NO: 1153033 - RNA, 19 nt, Artificial Sequence
  Description of Artificial Sequence: Synthetic oligonucleotide
  Antisense strand to SEQ ID NO: 1153032
acuugugaccagaggucuc

SEQ ID NO: 1153034 - RNA, 19 nt, Artificial Sequence
  Description of Artificial Sequence: Synthetic oligonucleotide
  Sense strand starting at position 2554 of SEQ ID NO: 916391
gaggguugacuuuggacca

SEQ ID NO: 1153035 - RNA, 19 nt, Artificial Sequence
  Description of Artificial Sequence: Synthetic oligonucleotide
  Antisense strand to SEQ ID NO: 1153034
ugguccaaagucaacccuc

SEQ ID NO: 1153036 - RNA, 19 nt, Artificial Sequence
  Description of Artificial Sequence: Synthetic oligonucleotide
  Sense strand starting at position 2620 of SEQ ID NO: 916391
ccaugcuaucugggaggga

SEQ ID NO: 1153037 - RNA, 19 nt, Artificial Sequence
  Description of Artificial Sequence: Synthetic oligonucleotide
  Antisense strand to SEQ ID NO: 1153036
ucccucccagauagcaugg

SEQ ID NO: 1153038 - RNA, 19 nt, Artificial Sequence
  Description of Artificial Sequence: Synthetic oligonucleotide
  Sense strand starting at position 2666 of SEQ ID NO: 916391
ggaagacucaggcaugguu

SEQ ID NO: 1153039 - RNA, 19 nt, Artificial Sequence
  Description of Artificial Sequence: Synthetic oligonucleotide
  Antisense strand to SEQ ID NO: 1153038
aaccaugccugagucuucc

SEQ ID NO: 1153040 - RNA, 19 nt, Artificial Sequence
  Description of Artificial Sequence: Synthetic oligonucleotide
  Sense strand starting at position 2668 of SEQ ID NO: 916391
aagacucaggcaugguuua

SEQ ID NO: 1153041 - RNA, 19 nt, Artificial Sequence
  Description of Artificial Sequence: Synthetic oligonucleotide
  Antisense strand to SEQ ID NO: 1153040
uaaaccaugccugagucuu

SEQ ID NO: 1153042 - RNA, 19 nt, Artificial Sequence
  Description of Artificial Sequence: Synthetic oligonucleotide
  Sense strand starting at position 2824 of SEQ ID NO: 916391
ugugaucaguuauuaggaa

SEQ ID NO: 1153043 - RNA, 19 nt, Artificial Sequence
  Description of Artificial Sequence: Synthetic oligonucleotide
  Antisense strand to SEQ ID NO: 1153042
uuccuaauaacugaucaca

SEQ ID NO: 1153044 - RNA, 19 nt, Artificial Sequence
  Description of Artificial Sequence: Synthetic oligonucleotide
  Sense strand starting at position 3155 of SEQ ID NO: 916391
aagggacauuuaggaugau

SEQ ID NO: 1153045 - RNA, 19 nt, Artificial Sequence
  Description of Artificial Sequence: Synthetic oligonucleotide
  Antisense strand to SEQ ID NO: 1153044
aucauccuaaaugucccuu

SEQ ID NO: 1153046 - RNA, 19 nt, Artificial Sequence
  Description of Artificial Sequence: Synthetic oligonucleotide
  Sense strand starting at position 3156 of SEQ ID NO: 916391
agggacauuuaggaugauu

SEQ ID NO: 1153047 - RNA, 19 nt, Artificial Sequence
  Description of Artificial Sequence: Synthetic oligonucleotide
  Antisense strand to SEQ ID NO: 1153046
aaucauccuaaaugucccu

SEQ ID NO: 1153048 - RNA, 19 nt, Artificial Sequence
  Description of Artificial Sequence: Synthetic oligonucleotide
  Sense strand starting at position 3219 of SEQ ID NO: 916391
cagugauacccugaaggcu

SEQ ID NO: 1153049 - RNA, 19 nt, Artificial Sequence
  Description of Artificial Sequence: Synthetic oligonucleotide
  Antisense strand to SEQ ID NO: 1153048
agccuucaggguaucacug

SEQ ID NO: 1153050 - RNA, 19 nt, Artificial Sequence
  Description of Artificial Sequence: Synthetic oligonucleotide
  Sense strand starting at position 3252 of SEQ ID NO: 916391
gaccucauggguugguuaa

SEQ ID NO: 1153051 - RNA, 19 nt, Artificial Sequence
  Description of Artificial Sequence: Synthetic oligonucleotide
  Antisense strand to SEQ ID NO: 1153050
uuaaccaacccaugagguc

SEQ ID NO: 1153052 - RNA, 19 nt, Artificial Sequence
  Description of Artificial Sequence: Synthetic oligonucleotide
  Sense strand starting at position 3253 of SEQ ID NO: 916391
accucauggguugguuaaa

SEQ ID NO: 1153053 - RNA, 19 nt, Artificial Sequence
  Description of Artificial Sequence: Synthetic oligonucleotide
  Antisense strand to SEQ ID NO: 1153052
uuuaaccaacccaugaggu

SEQ ID NO: 1153054 - RNA, 19 nt, Artificial Sequence
  Description of Artificial Sequence: Synthetic oligonucleotide
  Sense strand starting at position 3254 of SEQ ID NO: 916391
ccucauggguugguuaaau

SEQ ID NO: 1153055 - RNA, 19 nt, Artificial Sequence
  Description of Artificial Sequence: Synthetic oligonucleotide
  Antisense strand to SEQ ID NO: 1153054
auuuaaccaacccaugagg

SEQ ID NO: 1153056 - RNA, 19 nt, Artificial Sequence
  Description of Artificial Sequence: Synthetic oligonucleotide
  Sense strand starting at position 3282 of SEQ ID NO: 916391
ggguaauuggcugacauag

SEQ ID NO: 1153057 - RNA, 19 nt, Artificial Sequence
  Description of Artificial Sequence: Synthetic oligonucleotide
  Antisense strand to SEQ ID NO: 1153056
cuaugucagccaauuaccc

SEQ ID NO: 1153058 - RNA, 19 nt, Artificial Sequence
  Description of Artificial Sequence: Synthetic oligonucleotide
  Sense strand starting at position 3723 of SEQ ID NO: 916391
gacaaagggugucuuugaa

SEQ ID NO: 1153059 - RNA, 19 nt, Artificial Sequence
  Description of Artificial Sequence: Synthetic oligonucleotide
  Antisense strand to SEQ ID NO: 1153058
uucaaagacacccuuuguc

SEQ ID NO: 1153060 - RNA, 19 nt, Artificial Sequence
  Description of Artificial Sequence: Synthetic oligonucleotide
  Sense strand starting at position 3768 of SEQ ID NO: 916391
uuucuaaggaguugagaua

SEQ ID NO: 1153061 - RNA, 19 nt, Artificial Sequence
  Description of Artificial Sequence: Synthetic oligonucleotide
  Antisense strand to SEQ ID NO: 1153060
uaucucaacuccuuagaaa

SEQ ID NO: 1153062 - RNA, 19 nt, Artificial Sequence
  Description of Artificial Sequence: Synthetic oligonucleotide
  Sense strand starting at position 3813 of SEQ ID NO: 916391
ggguuagggaacuguaaga

SEQ ID NO: 1153063 - RNA, 19 nt, Artificial Sequence
  Description of Artificial Sequence: Synthetic oligonucleotide
  Antisense strand to SEQ ID NO: 1153062
ucuuacaguucccuaaccc

SEQ ID NO: 1153064 - RNA, 19 nt, Artificial Sequence
  Description of Artificial Sequence: Synthetic oligonucleotide
  Sense strand starting at position 3820 of SEQ ID NO: 916391
ggaacuguaagaugaccuu

SEQ ID NO: 1153065 - RNA, 19 nt, Artificial Sequence
  Description of Artificial Sequence: Synthetic oligonucleotide
  Antisense strand to SEQ ID NO: 1153064
aaggucaucuuacaguucc

SEQ ID NO: 1153066 - RNA, 19 nt, Artificial Sequence
  Description of Artificial Sequence: Synthetic oligonucleotide
  Sense strand starting at position 3858 of SEQ ID NO: 916391
gguugacuggcuggaugaa

SEQ ID NO: 1153067 - RNA, 19 nt, Artificial Sequence
  Description of Artificial Sequence: Synthetic oligonucleotide
  Antisense strand to SEQ ID NO: 1153066
uucauccagccagucaacc

SEQ ID NO: 1153068 - RNA, 19 nt, Artificial Sequence
  Description of Artificial Sequence: Synthetic oligonucleotide
  Sense strand starting at position 3859 of SEQ ID NO: 916391
guugacuggcuggaugaau

SEQ ID NO: 1153069 - RNA, 19 nt, Artificial Sequence
  Description of Artificial Sequence: Synthetic oligonucleotide
  Antisense strand to SEQ ID NO: 1153068
auucauccagccagucaac

SEQ ID NO: 1153070 - RNA, 19 nt, Artificial Sequence
  Description of Artificial Sequence: Synthetic oligonucleotide
  Sense strand starting at position 459 of SEQ ID NO: 916392
gggucaaguccauauuccu

SEQ ID NO: 1153071 - RNA, 19 nt, Artificial Sequence
  Description of Artificial Sequence: Synthetic oligonucleotide
  Antisense strand to SEQ ID NO: 1153070
aggaauauggacuugaccc

SEQ ID NO: 1153072 - RNA, 19 nt, Artificial Sequence
  Description of Artificial Sequence: Synthetic oligonucleotide
  Sense strand starting at position 703 of SEQ ID NO: 916392
ggaagucucugcuucccaa

SEQ ID NO: 1153073 - RNA, 19 nt, Artificial Sequence
  Description of Artificial Sequence: Synthetic oligonucleotide
  Antisense strand to SEQ ID NO: 1153072
uugggaagcagagacuucc

SEQ ID NO: 1153074 - RNA, 19 nt, Artificial Sequence
  Description of Artificial Sequence: Synthetic oligonucleotide
  Sense strand starting at position 732 of SEQ ID NO: 916392
ccacuuuguuccucaguga

SEQ ID NO: 1153075 - RNA, 19 nt, Artificial Sequence
  Description of Artificial Sequence: Synthetic oligonucleotide
  Antisense strand to SEQ ID NO: 1153074
ucacugaggaacaaagugg

SEQ ID NO: 1153076 - RNA, 19 nt, Artificial Sequence
  Description of Artificial Sequence: Synthetic oligonucleotide
  Sense strand starting at position 735 of SEQ ID NO: 916392
cuuuguuccucagugauuc

SEQ ID NO: 1153077 - RNA, 19 nt, Artificial Sequence
  Description of Artificial Sequence: Synthetic oligonucleotide
  Antisense strand to SEQ ID NO: 1153076
gaaucacugaggaacaaag

SEQ ID NO: 1153078 - RNA, 19 nt, Artificial Sequence
  Description of Artificial Sequence: Synthetic oligonucleotide
  Sense strand starting at position 736 of SEQ ID NO: 916392
uuuguuccucagugauucu

SEQ ID NO: 1153079 - RNA, 19 nt, Artificial Sequence
  Description of Artificial Sequence: Synthetic oligonucleotide
  Antisense strand to SEQ ID NO: 1153078
agaaucacugaggaacaaa

SEQ ID NO: 1153080 - RNA, 19 nt, Artificial Sequence
  Description of Artificial Sequence: Synthetic oligonucleotide
  Sense strand starting at position 739 of SEQ ID NO: 916392
guuccucagugauucucaa

SEQ ID NO: 1153081 - RNA, 19 nt, Artificial Sequence
  Description of Artificial Sequence: Synthetic oligonucleotide
  Antisense strand to SEQ ID NO: 1153080
uugagaaucacugaggaac

SEQ ID NO: 1153082 - RNA, 19 nt, Artificial Sequence
  Description of Artificial Sequence: Synthetic oligonucleotide
  Sense strand starting at position 750 of SEQ ID NO: 916392
auucucaaaccugagugua

SEQ ID NO: 1153083 - RNA, 19 nt, Artificial Sequence
  Description of Artificial Sequence: Synthetic oligonucleotide
  Antisense strand to SEQ ID NO: 1153082
uacacucagguuugagaau

SEQ ID NO: 1153084 - RNA, 19 nt, Artificial Sequence
  Description of Artificial Sequence: Synthetic oligonucleotide
  Sense strand starting at position 1131 of SEQ ID NO: 916392
ucucauugcuuccuggaca

SEQ ID NO: 1153085 - RNA, 19 nt, Artificial Sequence
  Description of Artificial Sequence: Synthetic oligonucleotide
  Antisense strand to SEQ ID NO: 1153084
uguccaggaagcaaugaga

SEQ ID NO: 1153086 - RNA, 19 nt, Artificial Sequence
  Description of Artificial Sequence: Synthetic oligonucleotide
  Sense strand starting at position 1492 of SEQ ID NO: 916392
agaucagcuuucuccagaa

SEQ ID NO: 1153087 - RNA, 19 nt, Artificial Sequence
  Description of Artificial Sequence: Synthetic oligonucleotide
  Antisense strand to SEQ ID NO: 1153086
uucuggagaaagcugaucu

SEQ ID NO: 1153088 - RNA, 19 nt, Artificial Sequence
  Description of Artificial Sequence: Synthetic oligonucleotide
  Sense strand starting at position 1936 of SEQ ID NO: 916392
ucccgacuuguaggugaau

SEQ ID NO: 1153089 - RNA, 19 nt, Artificial Sequence
  Description of Artificial Sequence: Synthetic oligonucleotide
  Antisense strand to SEQ ID NO: 1153088
auucaccuacaagucggga

SEQ ID NO: 1153090 - RNA, 19 nt, Artificial Sequence
  Description of Artificial Sequence: Synthetic oligonucleotide
  Sense strand starting at position 1937 of SEQ ID NO: 916392
cccgacuuguaggugaauu

SEQ ID NO: 1153091 - RNA, 19 nt, Artificial Sequence
  Description of Artificial Sequence: Synthetic oligonucleotide
  Antisense strand to SEQ ID NO: 1153090
aauucaccuacaagucggg

SEQ ID NO: 1153092 - RNA, 19 nt, Artificial Sequence
  Description of Artificial Sequence: Synthetic oligonucleotide
  Sense strand starting at position 1938 of SEQ ID NO: 916392
ccgacuuguaggugaauug

SEQ ID NO: 1153093 - RNA, 19 nt, Artificial Sequence
  Description of Artificial Sequence: Synthetic oligonucleotide
  Antisense strand to SEQ ID NO: 1153092
caauucaccuacaagucgg

SEQ ID NO: 1153094 - RNA, 19 nt, Artificial Sequence
  Description of Artificial Sequence: Synthetic oligonucleotide
  Sense strand starting at position 2075 of SEQ ID NO: 916392
gccuaauuuguggguucag

SEQ ID NO: 1153095 - RNA, 19 nt, Artificial Sequence
  Description of Artificial Sequence: Synthetic oligonucleotide
  Antisense strand to SEQ ID NO: 1153094
cugaacccacaaauuaggc

SEQ ID NO: 1153096 - RNA, 19 nt, Artificial Sequence
  Description of Artificial Sequence: Synthetic oligonucleotide
  Sense strand starting at position 2090 of SEQ ID NO: 916392
ucaguuugccuggaagcaa

SEQ ID NO: 1153097 - RNA, 19 nt, Artificial Sequence
  Description of Artificial Sequence: Synthetic oligonucleotide
  Antisense strand to SEQ ID NO: 1153096
uugcuuccaggcaaacuga

SEQ ID NO: 1153098 - RNA, 19 nt, Artificial Sequence
  Description of Artificial Sequence: Synthetic oligonucleotide
  Sense strand starting at position 2178 of SEQ ID NO: 916392
gcaagucuugcucauguaa

SEQ ID NO: 1153099 - RNA, 19 nt, Artificial Sequence
  Description of Artificial Sequence: Synthetic oligonucleotide
  Antisense strand to SEQ ID NO: 1153098
uuacaugagcaagacuugc

SEQ ID NO: 1153100 - RNA, 19 nt, Artificial Sequence
  Description of Artificial Sequence: Synthetic oligonucleotide
  Sense strand starting at position 2214 of SEQ ID NO: 916392
gaacauguguaauuagcau

SEQ ID NO: 1153101 - RNA, 19 nt, Artificial Sequence
  Description of Artificial Sequence: Synthetic oligonucleotide
  Antisense strand to SEQ ID NO: 1153100
augcuaauuacacauguuc

SEQ ID NO: 1153102 - RNA, 19 nt, Artificial Sequence
  Description of Artificial Sequence: Synthetic oligonucleotide
  Sense strand starting at position 2221 of SEQ ID NO: 916392
uguaauuagcaugggcaca

SEQ ID NO: 1153103 - RNA, 19 nt, Artificial Sequence
  Description of Artificial Sequence: Synthetic oligonucleotide
  Antisense strand to SEQ ID NO: 1153102
ugugcccaugcuaauuaca

SEQ ID NO: 1153104 - RNA, 19 nt, Artificial Sequence
  Description of Artificial Sequence: Synthetic oligonucleotide
  Sense strand starting at position 2222 of SEQ ID NO: 916392
guaauuagcaugggcacau

SEQ ID NO: 1153105 - RNA, 19 nt, Artificial Sequence
  Description of Artificial Sequence: Synthetic oligonucleotide
  Antisense strand to SEQ ID NO: 1153104
augugcccaugcuaauuac

SEQ ID NO: 1153106 - RNA, 19 nt, Artificial Sequence
  Description of Artificial Sequence: Synthetic oligonucleotide
  Sense strand starting at position 2232 of SEQ ID NO: 916392
ugggcacauuauccauaga

SEQ ID NO: 1153107 - RNA, 19 nt, Artificial Sequence
  Description of Artificial Sequence: Synthetic oligonucleotide
  Antisense strand to SEQ ID NO: 1153106
ucuauggauaaugugccca

SEQ ID NO: 1153108 - RNA, 19 nt, Artificial Sequence
  Description of Artificial Sequence: Synthetic oligonucleotide
  Sense strand starting at position 2268 of SEQ ID NO: 916392
guuugucgcagucucaauu

SEQ ID NO: 1153109 - RNA, 19 nt, Artificial Sequence
  Description of Artificial Sequence: Synthetic oligonucleotide
  Antisense strand to SEQ ID NO: 1153108
aauugagacugcgacaaac

SEQ ID NO: 1153110 - RNA, 19 nt, Artificial Sequence
  Description of Artificial Sequence: Synthetic oligonucleotide
  Sense strand starting at position 2342 of SEQ ID NO: 916392
uuuaauugacagugucauc

SEQ ID NO: 1153111 - RNA, 19 nt, Artificial Sequence
  Description of Artificial Sequence: Synthetic oligonucleotide
  Antisense strand to SEQ ID NO: 1153110
gaugacacugucaauuaaa

SEQ ID NO: 1153112 - RNA, 19 nt, Artificial Sequence
  Description of Artificial Sequence: Synthetic oligonucleotide
  Sense strand starting at position 2347 of SEQ ID NO: 916392
uugacagugucaucuguua

SEQ ID NO: 1153113 - RNA, 19 nt, Artificial Sequence
  Description of Artificial Sequence: Synthetic oligonucleotide
  Antisense strand to SEQ ID NO: 1153112
uaacagaugacacugucaa

SEQ ID NO: 1153114 - RNA, 19 nt, Artificial Sequence
  Description of Artificial Sequence: Synthetic oligonucleotide
  Sense strand starting at position 2463 of SEQ ID NO: 916392
cccagaguuccuggagaca

SEQ ID NO: 1153115 - RNA, 19 nt, Artificial Sequence
  Description of Artificial Sequence: Synthetic oligonucleotide
  Antisense strand to SEQ ID NO: 1153114
ugucuccaggaacucuggg

SEQ ID NO: 1153116 - RNA, 19 nt, Artificial Sequence
  Description of Artificial Sequence: Synthetic oligonucleotide
  Sense strand starting at position 2664 of SEQ ID NO: 916392
ccugacucuugaccuugaa

SEQ ID NO: 1153117 - RNA, 19 nt, Artificial Sequence
  Description of Artificial Sequence: Synthetic oligonucleotide
  Antisense strand to SEQ ID NO: 1153116
uucaaggucaagagucagg

SEQ ID NO: 1153118 - RNA, 19 nt, Artificial Sequence
  Description of Artificial Sequence: Synthetic oligonucleotide
  Sense strand starting at position 2679 of SEQ ID NO: 916392
ugaaauuauggucauugca

SEQ ID NO: 1153119 - RNA, 19 nt, Artificial Sequence
  Description of Artificial Sequence: Synthetic oligonucleotide
  Antisense strand to SEQ ID NO: 1153118
ugcaaugaccauaauuuca

SEQ ID NO: 1153120 - RNA, 19 nt, Artificial Sequence
  Description of Artificial Sequence: Synthetic oligonucleotide
  Sense strand starting at position 2724 of SEQ ID NO: 916392
agcacuuuacaguguaaca

SEQ ID NO: 1153121 - RNA, 19 nt, Artificial Sequence
  Description of Artificial Sequence: Synthetic oligonucleotide
  Antisense strand to SEQ ID NO: 1153120
uguuacacuguaaagugcu

SEQ ID NO: 1153122 - RNA, 19 nt, Artificial Sequence
  Description of Artificial Sequence: Synthetic oligonucleotide
  Sense strand starting at position 2838 of SEQ ID NO: 916392
gauaauugaggaugucauu

SEQ ID NO: 1153123 - RNA, 19 nt, Artificial Sequence
  Description of Artificial Sequence: Synthetic oligonucleotide
  Antisense strand to SEQ ID NO: 1153122
aaugacauccucaauuauc

SEQ ID NO: 1153124 - RNA, 19 nt, Artificial Sequence
  Description of Artificial Sequence: Synthetic oligonucleotide
  Sense strand starting at position 2847 of SEQ ID NO: 916392
ggaugucauuccuuuagca

SEQ ID NO: 1153125 - RNA, 19 nt, Artificial Sequence
  Description of Artificial Sequence: Synthetic oligonucleotide
  Antisense strand to SEQ ID NO: 1153124
ugcuaaaggaaugacaucc

SEQ ID NO: 1153126 - RNA, 19 nt, Artificial Sequence
  Description of Artificial Sequence: Synthetic oligonucleotide
  Sense strand starting at position 2870 of SEQ ID NO: 916392
uuuagugaguccuuucuuu

SEQ ID NO: 1153127 - RNA, 19 nt, Artificial Sequence
  Description of Artificial Sequence: Synthetic oligonucleotide
  Antisense strand to SEQ ID NO: 1153126
aaagaaaggacucacuaaa

SEQ ID NO: 1153128 - RNA, 19 nt, Artificial Sequence
  Description of Artificial Sequence: Synthetic oligonucleotide
  Sense strand starting at position 2877 of SEQ ID NO: 916392
aguccuuucuuugugugaa

SEQ ID NO: 1153129 - RNA, 19 nt, Artificial Sequence
  Description of Artificial Sequence: Synthetic oligonucleotide
  Antisense strand to SEQ ID NO: 1153128
uucacacaaagaaaggacu

SEQ ID NO: 1153130 - RNA, 19 nt, Artificial Sequence
  Description of Artificial Sequence: Synthetic oligonucleotide
  Sense strand starting at position 2879 of SEQ ID NO: 916392
uccuuucuuugugugaauc

SEQ ID NO: 1153131 - RNA, 19 nt, Artificial Sequence
  Description of Artificial Sequence: Synthetic oligonucleotide
  Antisense strand to SEQ ID NO: 1153130
gauucacacaaagaaagga

SEQ ID NO: 1153132 - RNA, 19 nt, Artificial Sequence
  Description of Artificial Sequence: Synthetic oligonucleotide
  Sense strand starting at position 2978 of SEQ ID NO: 916392
gagcuaugcccgccuuauu

SEQ ID NO: 1153133 - RNA, 19 nt, Artificial Sequence
  Description of Artificial Sequence: Synthetic oligonucleotide
  Antisense strand to SEQ ID NO: 1153132
aauaaggcgggcauagcuc

SEQ ID NO: 1153134 - RNA, 19 nt, Artificial Sequence
  Description of Artificial Sequence: Synthetic oligonucleotide
  Sense strand starting at position 3211 of SEQ ID NO: 916392
caaaguaugugacccaaga

SEQ ID NO: 1153135 - RNA, 19 nt, Artificial Sequence
  Description of Artificial Sequence: Synthetic oligonucleotide
  Antisense strand to SEQ ID NO: 1153134
ucuugggucacauacuuug

SEQ ID NO: 1153136 - RNA, 19 nt, Artificial Sequence
  Description of Artificial Sequence: Synthetic oligonucleotide
  Sense strand starting at position 3357 of SEQ ID NO: 916392
agguuaugauaugccucua

SEQ ID NO: 1153137 - RNA, 19 nt, Artificial Sequence
  Description of Artificial Sequence: Synthetic oligonucleotide
  Antisense strand to SEQ ID NO: 1153136
uagaggcauaucauaaccu

SEQ ID NO: 1153138 - RNA, 19 nt, Artificial Sequence
  Description of Artificial Sequence: Synthetic oligonucleotide
  Sense strand starting at position 3498 of SEQ ID NO: 916392
uuggaaguccuuuaaucuu

SEQ ID NO: 1153139 - RNA, 19 nt, Artificial Sequence
  Description of Artificial Sequence: Synthetic oligonucleotide
  Antisense strand to SEQ ID NO: 1153138
aagauuaaaggacuuccaa

SEQ ID NO: 1153140 - RNA, 19 nt, Artificial Sequence
  Description of Artificial Sequence: Synthetic oligonucleotide
  Sense strand starting at position 3850 of SEQ ID NO: 916392
uuucuauuccuuuguaagu

SEQ ID NO: 1153141 - RNA, 19 nt, Artificial Sequence
  Description of Artificial Sequence: Synthetic oligonucleotide
  Antisense strand to SEQ ID NO: 1153140
acuuacaaaggaauagaaa

SEQ ID NO: 1153142 - RNA, 19 nt, Artificial Sequence
  Description of Artificial Sequence: Synthetic oligonucleotide
  Sense strand starting at position 3851 of SEQ ID NO: 916392
uucuauuccuuuguaaguu

SEQ ID NO: 1153143 - RNA, 19 nt, Artificial Sequence
  Description of Artificial Sequence: Synthetic oligonucleotide
  Antisense strand to SEQ ID NO: 1153142
aacuuacaaaggaauagaa

SEQ ID NO: 1153144 - RNA, 19 nt, Artificial Sequence
  Description of Artificial Sequence: Synthetic oligonucleotide
  Sense strand starting at position 3861 of SEQ ID NO: 916392
uuguaaguuucuuuguaag

SEQ ID NO: 1153145 - RNA, 19 nt, Artificial Sequence
  Description of Artificial Sequence: Synthetic oligonucleotide
  Antisense strand to SEQ ID NO: 1153144
cuuacaaagaaacuuacaa

SEQ ID NO: 1153146 - RNA, 19 nt, Artificial Sequence
  Description of Artificial Sequence: Synthetic oligonucleotide
  Sense strand starting at position 3901 of SEQ ID NO: 916392
cugcauugugaugagaaug

SEQ ID NO: 1153147 - RNA, 19 nt, Artificial Sequence
  Description of Artificial Sequence: Synthetic oligonucleotide
  Antisense strand to SEQ ID NO: 1153146
cauucucaucacaaugcag

SEQ ID NO: 1153148 - RNA, 19 nt, Artificial Sequence
  Description of Artificial Sequence: Synthetic oligonucleotide
  Sense strand starting at position 3909 of SEQ ID NO: 916392
ugaugagaaugcuuaguau

SEQ ID NO: 1153149 - RNA, 19 nt, Artificial Sequence
  Description of Artificial Sequence: Synthetic oligonucleotide
  Antisense strand to SEQ ID NO: 1153148
auacuaagcauucucauca

SEQ ID NO: 1153150 - RNA, 19 nt, Artificial Sequence
  Description of Artificial Sequence: Synthetic oligonucleotide
  Sense strand starting at position 45 of SEQ ID NO: 916393
ggcugaaguccugagcaga

SEQ ID NO: 1153151 - RNA, 19 nt, Artificial Sequence
  Description of Artificial Sequence: Synthetic oligonucleotide
  Antisense strand to SEQ ID NO: 1153150
ucugcucaggacuucagcc

SEQ ID NO: 1153152 - RNA, 19 nt, Artificial Sequence
  Description of Artificial Sequence: Synthetic oligonucleotide
  Sense strand starting at position 48 of SEQ ID NO: 916393
ugaaguccugagcagaguu

SEQ ID NO: 1153153 - RNA, 19 nt, Artificial Sequence
  Description of Artificial Sequence: Synthetic oligonucleotide
  Antisense strand to SEQ ID NO: 1153152
aacucugcucaggacuuca

SEQ ID NO: 1153154 - RNA, 19 nt, Artificial Sequence
  Description of Artificial Sequence: Synthetic oligonucleotide
  Sense strand starting at position 56 of SEQ ID NO: 916393
ugagcagaguuguuaagau

SEQ ID NO: 1153155 - RNA, 19 nt, Artificial Sequence
  Description of Artificial Sequence: Synthetic oligonucleotide
  Antisense strand to SEQ ID NO: 1153154
aucuuaacaacucugcuca

SEQ ID NO: 1153156 - RNA, 19 nt, Artificial Sequence
  Description of Artificial Sequence: Synthetic oligonucleotide
  Sense strand starting at position 244 of SEQ ID NO: 916393
caggcaaauguuugggaua

SEQ ID NO: 1153157 - RNA, 19 nt, Artificial Sequence
  Description of Artificial Sequence: Synthetic oligonucleotide
  Antisense strand to SEQ ID NO: 1153156
uaucccaaacauuugccug

SEQ ID NO: 1153158 - RNA, 19 nt, Artificial Sequence
  Description of Artificial Sequence: Synthetic oligonucleotide
  Sense strand starting at position 299 of SEQ ID NO: 916393
aggcuagugacaggaguaa

SEQ ID NO: 1153159 - RNA, 19 nt, Artificial Sequence
  Description of Artificial Sequence: Synthetic oligonucleotide
  Antisense strand to SEQ ID NO: 1153158
uuacuccugucacuagccu

SEQ ID NO: 1153160 - RNA, 19 nt, Artificial Sequence
  Description of Artificial Sequence: Synthetic oligonucleotide
  Sense strand starting at position 314 of SEQ ID NO: 916393
guaagauaucccugaguug

SEQ ID NO: 1153161 - RNA, 19 nt, Artificial Sequence
  Description of Artificial Sequence: Synthetic oligonucleotide
  Antisense strand to SEQ ID NO: 1153160
caacucagggauaucuuac

SEQ ID NO: 1153162 - RNA, 19 nt, Artificial Sequence
  Description of Artificial Sequence: Synthetic oligonucleotide
  Sense strand starting at position 317 of SEQ ID NO: 916393
agauaucccugaguugcuu

SEQ ID NO: 1153163 - RNA, 19 nt, Artificial Sequence
  Description of Artificial Sequence: Synthetic oligonucleotide
  Antisense strand to SEQ ID NO: 1153162
aagcaacucagggauaucu

SEQ ID NO: 1153164 - RNA, 19 nt, Artificial Sequence
  Description of Artificial Sequence: Synthetic oligonucleotide
  Sense strand starting at position 587 of SEQ ID NO: 916393
cgggaaacauggucuguga

SEQ ID NO: 1153165 - RNA, 19 nt, Artificial Sequence
  Description of Artificial Sequence: Synthetic oligonucleotide
  Antisense strand to SEQ ID NO: 1153164
ucacagaccauguuucccg

SEQ ID NO: 1153166 - RNA, 19 nt, Artificial Sequence
  Description of Artificial Sequence: Synthetic oligonucleotide
  Sense strand starting at position 633 of SEQ ID NO: 916393
cuuauaguccuccaccaga

SEQ ID NO: 1153167 - RNA, 19 nt, Artificial Sequence
  Description of Artificial Sequence: Synthetic oligonucleotide
  Antisense strand to SEQ ID NO: 1153166
ucugguggaggacuauaag

SEQ ID NO: 1153168 - RNA, 19 nt, Artificial Sequence
  Description of Artificial Sequence: Synthetic oligonucleotide
  Sense strand starting at position 918 of SEQ ID NO: 916393
ccagguuugccauagauug

SEQ ID NO: 1153169 - RNA, 19 nt, Artificial Sequence
  Description of Artificial Sequence: Synthetic oligonucleotide
  Antisense strand to SEQ ID NO: 1153168
caaucuauggcaaaccugg

SEQ ID NO: 1153170 - RNA, 19 nt, Artificial Sequence
  Description of Artificial Sequence: Synthetic oligonucleotide
  Sense strand starting at position 920 of SEQ ID NO: 916393
agguuugccauagauuguu

SEQ ID NO: 1153171 - RNA, 19 nt, Artificial Sequence
  Description of Artificial Sequence: Synthetic oligonucleotide
  Antisense strand to SEQ ID NO: 1153170
aacaaucuauggcaaaccu

SEQ ID NO: 1153172 - RNA, 19 nt, Artificial Sequence
  Description of Artificial Sequence: Synthetic oligonucleotide
  Sense strand starting at position 1044 of SEQ ID NO: 916393
gaacucacucaaggaguuu

SEQ ID NO: 1153173 - RNA, 19 nt, Artificial Sequence
  Description of Artificial Sequence: Synthetic oligonucleotide
  Antisense strand to SEQ ID NO: 1153172
aaacuccuugagugaguuc

SEQ ID NO: 1153174 - RNA, 19 nt, Artificial Sequence
  Description of Artificial Sequence: Synthetic oligonucleotide
  Sense strand starting at position 1159 of SEQ ID NO: 916393
ugaacacugcuggauucua

SEQ ID NO: 1153175 - RNA, 19 nt, Artificial Sequence
  Description of Artificial Sequence: Synthetic oligonucleotide
  Antisense strand to SEQ ID NO: 1153174
uagaauccagcaguguuca

SEQ ID NO: 1153176 - RNA, 19 nt, Artificial Sequence
  Description of Artificial Sequence: Synthetic oligonucleotide
  Sense strand starting at position 1202 of SEQ ID NO: 916393
uccagcuguccucaagaaa

SEQ ID NO: 1153177 - RNA, 19 nt, Artificial Sequence
  Description of Artificial Sequence: Synthetic oligonucleotide
  Antisense strand to SEQ ID NO: 1153176
uuucuugaggacagcugga

SEQ ID NO: 1153178 - RNA, 19 nt, Artificial Sequence
  Description of Artificial Sequence: Synthetic oligonucleotide
  Sense strand starting at position 1286 of SEQ ID NO: 916393
gccaaagaagccgauauau

SEQ ID NO: 1153179 - RNA, 19 nt, Artificial Sequence
  Description of Artificial Sequence: Synthetic oligonucleotide
  Antisense strand to SEQ ID NO: 1153178
auauaucggcuucuuuggc

SEQ ID NO: 1153180 - RNA, 19 nt, Artificial Sequence
  Description of Artificial Sequence: Synthetic oligonucleotide
  Sense strand starting at position 1472 of SEQ ID NO: 916393
ugagacccaccuugucaau

SEQ ID NO: 1153181 - RNA, 19 nt, Artificial Sequence
  Description of Artificial Sequence: Synthetic oligonucleotide
  Antisense strand to SEQ ID NO: 1153180
auugacaaggugggucuca

SEQ ID NO: 1153182 - RNA, 19 nt, Artificial Sequence
  Description of Artificial Sequence: Synthetic oligonucleotide
  Sense strand starting at position 1954 of SEQ ID NO: 916393
gugggaaagguugaguuga

SEQ ID NO: 1153183 - RNA, 19 nt, Artificial Sequence
  Description of Artificial Sequence: Synthetic oligonucleotide
  Antisense strand to SEQ ID NO: 1153182
ucaacucaaccuuucccac

SEQ ID NO: 1153184 - RNA, 19 nt, Artificial Sequence
  Description of Artificial Sequence: Synthetic oligonucleotide
  Sense strand starting at position 1956 of SEQ ID NO: 916393
gggaaagguugaguugaca

SEQ ID NO: 1153185 - RNA, 19 nt, Artificial Sequence
  Description of Artificial Sequence: Synthetic oligonucleotide
  Antisense strand to SEQ ID NO: 1153184
ugucaacucaaccuuuccc

SEQ ID NO: 1153186 - RNA, 19 nt, Artificial Sequence
  Description of Artificial Sequence: Synthetic oligonucleotide
  Sense strand starting at position 2122 of SEQ ID NO: 916393
augggcaauuuguagaaca

SEQ ID NO: 1153187 - RNA, 19 nt, Artificial Sequence
  Description of Artificial Sequence: Synthetic oligonucleotide
  Antisense strand to SEQ ID NO: 1153186
uguucuacaaauugcccau

SEQ ID NO: 1153188 - RNA, 19 nt, Artificial Sequence
  Description of Artificial Sequence: Synthetic oligonucleotide
  Sense strand starting at position 2151 of SEQ ID NO: 916393
agcccuuugcagcaacaaa

SEQ ID NO: 1153189 - RNA, 19 nt, Artificial Sequence
  Description of Artificial Sequence: Synthetic oligonucleotide
  Antisense strand to SEQ ID NO: 1153188
uuuguugcugcaaagggcu

SEQ ID NO: 1153190 - RNA, 19 nt, Artificial Sequence
  Description of Artificial Sequence: Synthetic oligonucleotide
  Sense strand starting at position 2175 of SEQ ID NO: 916393
ucugauagcaaguggaaua

SEQ ID NO: 1153191 - RNA, 19 nt, Artificial Sequence
  Description of Artificial Sequence: Synthetic oligonucleotide
  Antisense strand to SEQ ID NO: 1153190
uauuccacuugcuaucaga

SEQ ID NO: 1153192 - RNA, 19 nt, Artificial Sequence
  Description of Artificial Sequence: Synthetic oligonucleotide
  Sense strand starting at position 2176 of SEQ ID NO: 916393
cugauagcaaguggaauau

SEQ ID NO: 1153193 - RNA, 19 nt, Artificial Sequence
  Description of Artificial Sequence: Synthetic oligonucleotide
  Antisense strand to SEQ ID NO: 1153192
auauuccacuugcuaucag

SEQ ID NO: 1153194 - RNA, 19 nt, Artificial Sequence
  Description of Artificial Sequence: Synthetic oligonucleotide
  Sense strand starting at position 2236 of SEQ ID NO: 916393
ugugcucccuaauuaagga

SEQ ID NO: 1153195 - RNA, 19 nt, Artificial Sequence
  Description of Artificial Sequence: Synthetic oligonucleotide
  Antisense strand to SEQ ID NO: 1153194
uccuuaauuagggagcaca

SEQ ID NO: 1153196 - RNA, 19 nt, Artificial Sequence
  Description of Artificial Sequence: Synthetic oligonucleotide
  Sense strand starting at position 2427 of SEQ ID NO: 916393
uuguguggaagcuggaauu

SEQ ID NO: 1153197 - RNA, 19 nt, Artificial Sequence
  Description of Artificial Sequence: Synthetic oligonucleotide
  Antisense strand to SEQ ID NO: 1153196
aauuccagcuuccacacaa

SEQ ID NO: 1153198 - RNA, 19 nt, Artificial Sequence
  Description of Artificial Sequence: Synthetic oligonucleotide
  Sense strand starting at position 2486 of SEQ ID NO: 916393
uuggaaagauguccucaaa

SEQ ID NO: 1153199 - RNA, 19 nt, Artificial Sequence
  Description of Artificial Sequence: Synthetic oligonucleotide
  Antisense strand to SEQ ID NO: 1153198
uuugaggacaucuuuccaa

SEQ ID NO: 1153200 - RNA, 19 nt, Artificial Sequence
  Description of Artificial Sequence: Synthetic oligonucleotide
  Sense strand starting at position 2597 of SEQ ID NO: 916393
gaggaaugacucugcagca

SEQ ID NO: 1153201 - RNA, 19 nt, Artificial Sequence
  Description of Artificial Sequence: Synthetic oligonucleotide
  Antisense strand to SEQ ID NO: 1153200
ugcugcagagucauuccuc

SEQ ID NO: 1153202 - RNA, 19 nt, Artificial Sequence
  Description of Artificial Sequence: Synthetic oligonucleotide
  Sense strand starting at position 2598 of SEQ ID NO: 916393
aggaaugacucugcagcau

SEQ ID NO: 1153203 - RNA, 19 nt, Artificial Sequence
  Description of Artificial Sequence: Synthetic oligonucleotide
  Antisense strand to SEQ ID NO: 1153202
augcugcagagucauuccu

SEQ ID NO: 1153204 - RNA, 19 nt, Artificial Sequence
  Description of Artificial Sequence: Synthetic oligonucleotide
  Sense strand starting at position 2636 of SEQ ID NO: 916393
ggauauugucuagggccuu

SEQ ID NO: 1153205 - RNA, 19 nt, Artificial Sequence
  Description of Artificial Sequence: Synthetic oligonucleotide
  Antisense strand to SEQ ID NO: 1153204
aaggcccuagacaauaucc

SEQ ID NO: 1153206 - RNA, 19 nt, Artificial Sequence
  Description of Artificial Sequence: Synthetic oligonucleotide
  Sense strand starting at position 2695 of SEQ ID NO: 916393
gccuuacaaccaugagaac

SEQ ID NO: 1153207 - RNA, 19 nt, Artificial Sequence
  Description of Artificial Sequence: Synthetic oligonucleotide
  Antisense strand to SEQ ID NO: 1153206
guucucaugguuguaaggc

SEQ ID NO: 1153208 - RNA, 19 nt, Artificial Sequence
  Description of Artificial Sequence: Synthetic oligonucleotide
  Sense strand starting at position 2706 of SEQ ID NO: 916393
augagaaccuuuccaguca

SEQ ID NO: 1153209 - RNA, 19 nt, Artificial Sequence
  Description of Artificial Sequence: Synthetic oligonucleotide
  Antisense strand to SEQ ID NO: 1153208
ugacuggaaagguucucau

SEQ ID NO: 1153210 - RNA, 19 nt, Artificial Sequence
  Description of Artificial Sequence: Synthetic oligonucleotide
  Sense strand starting at position 2944 of SEQ ID NO: 916393
caggaaguaucacugcuuu

SEQ ID NO: 1153211 - RNA, 19 nt, Artificial Sequence
  Description of Artificial Sequence: Synthetic oligonucleotide
  Antisense strand to SEQ ID NO: 1153210
aaagcagugauacuuccug

SEQ ID NO: 1153212 - RNA, 19 nt, Artificial Sequence
  Description of Artificial Sequence: Synthetic oligonucleotide
  Sense strand starting at position 2980 of SEQ ID NO: 916393
gguacagugcaauguuaaa

SEQ ID NO: 1153213 - RNA, 19 nt, Artificial Sequence
  Description of Artificial Sequence: Synthetic oligonucleotide
  Antisense strand to SEQ ID NO: 1153212
uuuaacauugcacuguacc

SEQ ID NO: 1153214 - RNA, 19 nt, Artificial Sequence
  Description of Artificial Sequence: Synthetic oligonucleotide
  Sense strand starting at position 3376 of SEQ ID NO: 916393
ugagaacacuuggcuuguu

SEQ ID NO: 1153215 - RNA, 19 nt, Artificial Sequence
  Description of Artificial Sequence: Synthetic oligonucleotide
  Antisense strand to SEQ ID NO: 1153214
aacaagccaaguguucuca

SEQ ID NO: 1153216 - RNA, 19 nt, Artificial Sequence
  Description of Artificial Sequence: Synthetic oligonucleotide
  Sense strand starting at position 3377 of SEQ ID NO: 916393
gagaacacuuggcuuguuu

SEQ ID NO: 1153217 - RNA, 19 nt, Artificial Sequence
  Description of Artificial Sequence: Synthetic oligonucleotide
  Antisense strand to SEQ ID NO: 1153216
aaacaagccaaguguucuc

SEQ ID NO: 1153218 - RNA, 19 nt, Artificial Sequence
  Description of Artificial Sequence: Synthetic oligonucleotide
  Sense strand starting at position 3838 of SEQ ID NO: 916393
gagccaaagcucuggaaug

SEQ ID NO: 1153219 - RNA, 19 nt, Artificial Sequence
  Description of Artificial Sequence: Synthetic oligonucleotide
  Antisense strand to SEQ ID NO: 1153218
cauuccagagcuuuggcuc

SEQ ID NO: 1153220 - RNA, 19 nt, Artificial Sequence
  Description of Artificial Sequence: Synthetic oligonucleotide
  Sense strand starting at position 3894 of SEQ ID NO: 916393
ugaggaauggcucaucuug

SEQ ID NO: 1153221 - RNA, 19 nt, Artificial Sequence
  Description of Artificial Sequence: Synthetic oligonucleotide
  Antisense strand to SEQ ID NO: 1153220
caagaugagccauuccuca

SEQ ID NO: 1153222 - RNA, 19 nt, Artificial Sequence
  Description of Artificial Sequence: Synthetic oligonucleotide
  Sense strand starting at position 3896 of SEQ ID NO: 916393
aggaauggcucaucuugau

SEQ ID NO: 1153223 - RNA, 19 nt, Artificial Sequence
  Description of Artificial Sequence: Synthetic oligonucleotide
  Antisense strand to SEQ ID NO: 1153222
aucaagaugagccauuccu

SEQ ID NO: 1153224 - RNA, 19 nt, Artificial Sequence
  Description of Artificial Sequence: Synthetic oligonucleotide
  Sense strand starting at position 3902 of SEQ ID NO: 916393
ggcucaucuugauuagggu

SEQ ID NO: 1153225 - RNA, 19 nt, Artificial Sequence
  Description of Artificial Sequence: Synthetic oligonucleotide
  Antisense strand to SEQ ID NO: 1153224
acccuaaucaagaugagcc

SEQ ID NO: 1153226 - RNA, 19 nt, Artificial Sequence
  Description of Artificial Sequence: Synthetic oligonucleotide
  Sense strand starting at position 3903 of SEQ ID NO: 916393
gcucaucuugauuaggguu

SEQ ID NO: 1153227 - RNA, 19 nt, Artificial Sequence
  Description of Artificial Sequence: Synthetic oligonucleotide
  Antisense strand to SEQ ID NO: 1153226
aacccuaaucaagaugagc

SEQ ID NO: 1153228 - RNA, 19 nt, Artificial Sequence
  Description of Artificial Sequence: Synthetic oligonucleotide
  Sense strand starting at position 3983 of SEQ ID NO: 916393
agaguaguggcucagaggu

SEQ ID NO: 1153229 - RNA, 19 nt, Artificial Sequence
  Description of Artificial Sequence: Synthetic oligonucleotide
  Antisense strand to SEQ ID NO: 1153228
accucugagccacuacucu

SEQ ID NO: 1153230 - RNA, 19 nt, Artificial Sequence
  Description of Artificial Sequence: Synthetic oligonucleotide
  Sense strand starting at position 11 of SEQ ID NO: 916394
auagauaugcaaugcuaau

SEQ ID NO: 1153231 - RNA, 19 nt, Artificial Sequence
  Description of Artificial Sequence: Synthetic oligonucleotide
  Antisense strand to SEQ ID NO: 1153230
auuagcauugcauaucuau

SEQ ID NO: 1153232 - RNA, 19 nt, Artificial Sequence
  Description of Artificial Sequence: Synthetic oligonucleotide
  Sense strand starting at position 58 of SEQ ID NO: 916394
accgaaaucguggaguaaa

SEQ ID NO: 1153233 - RNA, 19 nt, Artificial Sequence
  Description of Artificial Sequence: Synthetic oligonucleotide
  Antisense strand to SEQ ID NO: 1153232
uuuacuccacgauuucggu

SEQ ID NO: 1153234 - RNA, 19 nt, Artificial Sequence
  Description of Artificial Sequence: Synthetic oligonucleotide
  Sense strand starting at position 61 of SEQ ID NO: 916394
gaaaucguggaguaaacuu

SEQ ID NO: 1153235 - RNA, 19 nt, Artificial Sequence
  Description of Artificial Sequence: Synthetic oligonucleotide
  Antisense strand to SEQ ID NO: 1153234
aaguuuacuccacgauuuc

SEQ ID NO: 1153236 - RNA, 19 nt, Artificial Sequence
  Description of Artificial Sequence: Synthetic oligonucleotide
  Sense strand starting at position 68 of SEQ ID NO: 916394
uggaguaaacuuuaucugu

SEQ ID NO: 1153237 - RNA, 19 nt, Artificial Sequence
  Description of Artificial Sequence: Synthetic oligonucleotide
  Antisense strand to SEQ ID NO: 1153236
acagauaaaguuuacucca

SEQ ID NO: 1153238 - RNA, 19 nt, Artificial Sequence
  Description of Artificial Sequence: Synthetic oligonucleotide
  Sense strand starting at position 93 of SEQ ID NO: 916394
ggcuguuucggguagauuu

SEQ ID NO: 1153239 - RNA, 19 nt, Artificial Sequence
  Description of Artificial Sequence: Synthetic oligonucleotide
  Antisense strand to SEQ ID NO: 1153238
aaaucuacccgaaacagcc

SEQ ID NO: 1153240 - RNA, 19 nt, Artificial Sequence
  Description of Artificial Sequence: Synthetic oligonucleotide
  Sense strand starting at position 172 of SEQ ID NO: 916394
guagcucaagcuuagaaau

SEQ ID NO: 1153241 - RNA, 19 nt, Artificial Sequence
  Description of Artificial Sequence: Synthetic oligonucleotide
  Antisense strand to SEQ ID NO: 1153240
auuucuaagcuugagcuac

SEQ ID NO: 1153242 - RNA, 19 nt, Artificial Sequence
  Description of Artificial Sequence: Synthetic oligonucleotide
  Sense strand starting at position 208 of SEQ ID NO: 916394
uggguuagucuggaccaaa

SEQ ID NO: 1153243 - RNA, 19 nt, Artificial Sequence
  Description of Artificial Sequence: Synthetic oligonucleotide
  Antisense strand to SEQ ID NO: 1153242
uuugguccagacuaaccca

SEQ ID NO: 1153244 - RNA, 19 nt, Artificial Sequence
  Description of Artificial Sequence: Synthetic oligonucleotide
  Sense strand starting at position 353 of SEQ ID NO: 916394
gaaugccauccuggaaaug

SEQ ID NO: 1153245 - RNA, 19 nt, Artificial Sequence
  Description of Artificial Sequence: Synthetic oligonucleotide
  Antisense strand to SEQ ID NO: 1153244
cauuuccaggauggcauuc

SEQ ID NO: 1153246 - RNA, 19 nt, Artificial Sequence
  Description of Artificial Sequence: Synthetic oligonucleotide
  Sense strand starting at position 413 of SEQ ID NO: 916394
acaauaugcugacugugaa

SEQ ID NO: 1153247 - RNA, 19 nt, Artificial Sequence
  Description of Artificial Sequence: Synthetic oligonucleotide
  Antisense strand to SEQ ID NO: 1153246
uucacagucagcauauugu

SEQ ID NO: 1153248 - RNA, 19 nt, Artificial Sequence
  Description of Artificial Sequence: Synthetic oligonucleotide
  Sense strand starting at position 414 of SEQ ID NO: 916394
caauaugcugacugugaaa

SEQ ID NO: 1153249 - RNA, 19 nt, Artificial Sequence
  Description of Artificial Sequence: Synthetic oligonucleotide
  Antisense strand to SEQ ID NO: 1153248
uuucacagucagcauauug

SEQ ID NO: 1153250 - RNA, 19 nt, Artificial Sequence
  Description of Artificial Sequence: Synthetic oligonucleotide
  Sense strand starting at position 416 of SEQ ID NO: 916394
auaugcugacugugaaauu

SEQ ID NO: 1153251 - RNA, 19 nt, Artificial Sequence
  Description of Artificial Sequence: Synthetic oligonucleotide
  Antisense strand to SEQ ID NO: 1153250
aauuucacagucagcauau

SEQ ID NO: 1153252 - RNA, 19 nt, Artificial Sequence
  Description of Artificial Sequence: Synthetic oligonucleotide
  Sense strand starting at position 436 of SEQ ID NO: 916394
cauuaugauuucuagagug

SEQ ID NO: 1153253 - RNA, 19 nt, Artificial Sequence
  Description of Artificial Sequence: Synthetic oligonucleotide
  Antisense strand to SEQ ID NO: 1153252
cacucuagaaaucauaaug

SEQ ID NO: 1153254 - RNA, 19 nt, Artificial Sequence
  Description of Artificial Sequence: Synthetic oligonucleotide
  Sense strand starting at position 805 of SEQ ID NO: 916394
agcucacugguauaggaau

SEQ ID NO: 1153255 - RNA, 19 nt, Artificial Sequence
  Description of Artificial Sequence: Synthetic oligonucleotide
  Antisense strand to SEQ ID NO: 1153254
auuccuauaccagugagcu

SEQ ID NO: 1153256 - RNA, 19 nt, Artificial Sequence
  Description of Artificial Sequence: Synthetic oligonucleotide
  Sense strand starting at position 1024 of SEQ ID NO: 916394
cuuggcacccauugacaau

SEQ ID NO: 1153257 - RNA, 19 nt, Artificial Sequence
  Description of Artificial Sequence: Synthetic oligonucleotide
  Antisense strand to SEQ ID NO: 1153256
auugucaaugggugccaag

SEQ ID NO: 1153258 - RNA, 19 nt, Artificial Sequence
  Description of Artificial Sequence: Synthetic oligonucleotide
  Sense strand starting at position 1162 of SEQ ID NO: 916394
uggguuaaguuucucaaca

SEQ ID NO: 1153259 - RNA, 19 nt, Artificial Sequence
  Description of Artificial Sequence: Synthetic oligonucleotide
  Antisense strand to SEQ ID NO: 1153258
uguugagaaacuuaaccca

SEQ ID NO: 1153260 - RNA, 19 nt, Artificial Sequence
  Description of Artificial Sequence: Synthetic oligonucleotide
  Sense strand starting at position 1163 of SEQ ID NO: 916394
ggguuaaguuucucaacac

SEQ ID NO: 1153261 - RNA, 19 nt, Artificial Sequence
  Description of Artificial Sequence: Synthetic oligonucleotide
  Antisense strand to SEQ ID NO: 1153260
guguugagaaacuuaaccc

SEQ ID NO: 1153262 - RNA, 19 nt, Artificial Sequence
  Description of Artificial Sequence: Synthetic oligonucleotide
  Sense strand starting at position 1215 of SEQ ID NO: 916394
gcaacucuccuguagagaa

SEQ ID NO: 1153263 - RNA, 19 nt, Artificial Sequence
  Description of Artificial Sequence: Synthetic oligonucleotide
  Antisense strand to SEQ ID NO: 1153262
uucucuacaggagaguugc

SEQ ID NO: 1153264 - RNA, 19 nt, Artificial Sequence
  Description of Artificial Sequence: Synthetic oligonucleotide
  Sense strand starting at position 1250 of SEQ ID NO: 916394
cuugguguugacugaacca

SEQ ID NO: 1153265 - RNA, 19 nt, Artificial Sequence
  Description of Artificial Sequence: Synthetic oligonucleotide
  Antisense strand to SEQ ID NO: 1153264
ugguucagucaacaccaag

SEQ ID NO: 1153266 - RNA, 19 nt, Artificial Sequence
  Description of Artificial Sequence: Synthetic oligonucleotide
  Sense strand starting at position 1420 of SEQ ID NO: 916394
uggcccuuccaagaguuua

SEQ ID NO: 1153267 - RNA, 19 nt, Artificial Sequence
  Description of Artificial Sequence: Synthetic oligonucleotide
  Antisense strand to SEQ ID NO: 1153266
uaaacucuuggaagggcca

SEQ ID NO: 1153268 - RNA, 19 nt, Artificial Sequence
  Description of Artificial Sequence: Synthetic oligonucleotide
  Sense strand starting at position 1477 of SEQ ID NO: 916394
uuaccuugucgaugaagga

SEQ ID NO: 1153269 - RNA, 19 nt, Artificial Sequence
  Description of Artificial Sequence: Synthetic oligonucleotide
  Antisense strand to SEQ ID NO: 1153268
uccuucaucgacaagguaa

SEQ ID NO: 1153270 - RNA, 19 nt, Artificial Sequence
  Description of Artificial Sequence: Synthetic oligonucleotide
  Sense strand starting at position 1561 of SEQ ID NO: 916394
ggucgauuugcaggugaag

SEQ ID NO: 1153271 - RNA, 19 nt, Artificial Sequence
  Description of Artificial Sequence: Synthetic oligonucleotide
  Antisense strand to SEQ ID NO: 1153270
cuucaccugcaaaucgacc

SEQ ID NO: 1153272 - RNA, 19 nt, Artificial Sequence
  Description of Artificial Sequence: Synthetic oligonucleotide
  Sense strand starting at position 2245 of SEQ ID NO: 916394
uugcaacuugaucagcaua

SEQ ID NO: 1153273 - RNA, 19 nt, Artificial Sequence
  Description of Artificial Sequence: Synthetic oligonucleotide
  Antisense strand to SEQ ID NO: 1153272
uaugcugaucaaguugcaa

SEQ ID NO: 1153274 - RNA, 19 nt, Artificial Sequence
  Description of Artificial Sequence: Synthetic oligonucleotide
  Sense strand starting at position 2255 of SEQ ID NO: 916394
aucagcauaugaguaagaa

SEQ ID NO: 1153275 - RNA, 19 nt, Artificial Sequence
  Description of Artificial Sequence: Synthetic oligonucleotide
  Antisense strand to SEQ ID NO: 1153274
uucuuacucauaugcugau

SEQ ID NO: 1153276 - RNA, 19 nt, Artificial Sequence
  Description of Artificial Sequence: Synthetic oligonucleotide
  Sense strand starting at position 2515 of SEQ ID NO: 916394
gaaggucgcgcucuguaau

SEQ ID NO: 1153277 - RNA, 19 nt, Artificial Sequence
  Description of Artificial Sequence: Synthetic oligonucleotide
  Antisense strand to SEQ ID NO: 1153276
auuacagagcgcgaccuuc

SEQ ID NO: 1153278 - RNA, 19 nt, Artificial Sequence
  Description of Artificial Sequence: Synthetic oligonucleotide
  Sense strand starting at position 2529 of SEQ ID NO: 916394
guaaucaucuuccuuagga

SEQ ID NO: 1153279 - RNA, 19 nt, Artificial Sequence
  Description of Artificial Sequence: Synthetic oligonucleotide
  Antisense strand to SEQ ID NO: 1153278
uccuaaggaagaugauuac

SEQ ID NO: 1153280 - RNA, 19 nt, Artificial Sequence
  Description of Artificial Sequence: Synthetic oligonucleotide
  Sense strand starting at position 2598 of SEQ ID NO: 916394
uauuguguaggucacacau

SEQ ID NO: 1153281 - RNA, 19 nt, Artificial Sequence
  Description of Artificial Sequence: Synthetic oligonucleotide
  Antisense strand to SEQ ID NO: 1153280
augugugaccuacacaaua

SEQ ID NO: 1153282 - RNA, 19 nt, Artificial Sequence
  Description of Artificial Sequence: Synthetic oligonucleotide
  Sense strand starting at position 2718 of SEQ ID NO: 916394
aggagaaagacucggguuu

SEQ ID NO: 1153283 - RNA, 19 nt, Artificial Sequence
  Description of Artificial Sequence: Synthetic oligonucleotide
  Antisense strand to SEQ ID NO: 1153282
aaacccgagucuuucuccu

SEQ ID NO: 1153284 - RNA, 19 nt, Artificial Sequence
  Description of Artificial Sequence: Synthetic oligonucleotide
  Sense strand starting at position 2741 of SEQ ID NO: 916394
cucagaccugcucauaguu

SEQ ID NO: 1153285 - RNA, 19 nt, Artificial Sequence
  Description of Artificial Sequence: Synthetic oligonucleotide
  Antisense strand to SEQ ID NO: 1153284
aacuaugagcaggucugag

SEQ ID NO: 1153286 - RNA, 19 nt, Artificial Sequence
  Description of Artificial Sequence: Synthetic oligonucleotide
  Sense strand starting at position 2768 of SEQ ID NO: 916394
uugagcaagccaugaaacu

SEQ ID NO: 1153287 - RNA, 19 nt, Artificial Sequence
  Description of Artificial Sequence: Synthetic oligonucleotide
  Antisense strand to SEQ ID NO: 1153286
aguuucauggcuugcucaa

SEQ ID NO: 1153288 - RNA, 19 nt, Artificial Sequence
  Description of Artificial Sequence: Synthetic oligonucleotide
  Sense strand starting at position 2769 of SEQ ID NO: 916394
ugagcaagccaugaaacuu

SEQ ID NO: 1153289 - RNA, 19 nt, Artificial Sequence
  Description of Artificial Sequence: Synthetic oligonucleotide
  Antisense strand to SEQ ID NO: 1153288
aaguuucauggcuugcuca

SEQ ID NO: 1153290 - RNA, 19 nt, Artificial Sequence
  Description of Artificial Sequence: Synthetic oligonucleotide
  Sense strand starting at position 2853 of SEQ ID NO: 916394
ucgcaaugcccgguauaug

SEQ ID NO: 1153291 - RNA, 19 nt, Artificial Sequence
  Description of Artificial Sequence: Synthetic oligonucleotide
  Antisense strand to SEQ ID NO: 1153290
cauauaccgggcauugcga

SEQ ID NO: 1153292 - RNA, 19 nt, Artificial Sequence
  Description of Artificial Sequence: Synthetic oligonucleotide
  Sense strand starting at position 2868 of SEQ ID NO: 916394
uauguaagugcugaguaaa

SEQ ID NO: 1153293 - RNA, 19 nt, Artificial Sequence
  Description of Artificial Sequence: Synthetic oligonucleotide
  Antisense strand to SEQ ID NO: 1153292
uuuacucagcacuuacaua

SEQ ID NO: 1153294 - RNA, 19 nt, Artificial Sequence
  Description of Artificial Sequence: Synthetic oligonucleotide
  Sense strand starting at position 2878 of SEQ ID NO: 916394
cugaguaaaugucuauuga

SEQ ID NO: 1153295 - RNA, 19 nt, Artificial Sequence
  Description of Artificial Sequence: Synthetic oligonucleotide
  Antisense strand to SEQ ID NO: 1153294
ucaauagacauuuacucag

SEQ ID NO: 1153296 - RNA, 19 nt, Artificial Sequence
  Description of Artificial Sequence: Synthetic oligonucleotide
  Sense strand starting at position 2958 of SEQ ID NO: 916394
ugacuaguccugugggaau

SEQ ID NO: 1153297 - RNA, 19 nt, Artificial Sequence
  Description of Artificial Sequence: Synthetic oligonucleotide
  Antisense strand to SEQ ID NO: 1153296
auucccacaggacuaguca

SEQ ID NO: 1153298 - RNA, 19 nt, Artificial Sequence
  Description of Artificial Sequence: Synthetic oligonucleotide
  Sense strand starting at position 3050 of SEQ ID NO: 916394
gaugguguaccaugaauca

SEQ ID NO: 1153299 - RNA, 19 nt, Artificial Sequence
  Description of Artificial Sequence: Synthetic oligonucleotide
  Antisense strand to SEQ ID NO: 1153298
ugauucaugguacaccauc

SEQ ID NO: 1153300 - RNA, 19 nt, Artificial Sequence
  Description of Artificial Sequence: Synthetic oligonucleotide
  Sense strand starting at position 3092 of SEQ ID NO: 916394
cugccuaucccagaagucu

SEQ ID NO: 1153301 - RNA, 19 nt, Artificial Sequence
  Description of Artificial Sequence: Synthetic oligonucleotide
  Antisense strand to SEQ ID NO: 1153300
agacuucugggauaggcag

SEQ ID NO: 1153302 - RNA, 19 nt, Artificial Sequence
  Description of Artificial Sequence: Synthetic oligonucleotide
  Sense strand starting at position 3783 of SEQ ID NO: 916394
agcccagaaugguuaacua

SEQ ID NO: 1153303 - RNA, 19 nt, Artificial Sequence
  Description of Artificial Sequence: Synthetic oligonucleotide
  Antisense strand to SEQ ID NO: 1153302
uaguuaaccauucugggcu

SEQ ID NO: 1153304 - RNA, 19 nt, Artificial Sequence
  Description of Artificial Sequence: Synthetic oligonucleotide
  Sense strand starting at position 3787 of SEQ ID NO: 916394
cagaaugguuaacuaguca

SEQ ID NO: 1153305 - RNA, 19 nt, Artificial Sequence
  Description of Artificial Sequence: Synthetic oligonucleotide
  Antisense strand to SEQ ID NO: 1153304
ugacuaguuaaccauucug

SEQ ID NO: 1153306 - RNA, 19 nt, Artificial Sequence
  Description of Artificial Sequence: Synthetic oligonucleotide
  Sense strand starting at position 3791 of SEQ ID NO: 916394
augguuaacuagucagaca

SEQ ID NO: 1153307 - RNA, 19 nt, Artificial Sequence
  Description of Artificial Sequence: Synthetic oligonucleotide
  Antisense strand to SEQ ID NO: 1153306
ugucugacuaguuaaccau

SEQ ID NO: 1153308 - RNA, 19 nt, Artificial Sequence
  Description of Artificial Sequence: Synthetic oligonucleotide
  Sense strand starting at position 3832 of SEQ ID NO: 916394
auuccauggucuuuccaca

SEQ ID NO: 1153309 - RNA, 19 nt, Artificial Sequence
  Description of Artificial Sequence: Synthetic oligonucleotide
  Antisense strand to SEQ ID NO: 1153308
uguggaaagaccauggaau

SEQ ID NO: 1153310 - RNA, 19 nt, Artificial Sequence
  Description of Artificial Sequence: Synthetic oligonucleotide
  Sense strand starting at position 454 of SEQ ID NO: 916395
ucauguauuuccgucacau

SEQ ID NO: 1153311 - RNA, 19 nt, Artificial Sequence
  Description of Artificial Sequence: Synthetic oligonucleotide
  Antisense strand to SEQ ID NO: 1153310
augugacggaaauacauga

SEQ ID NO: 1153312 - RNA, 19 nt, Artificial Sequence
  Description of Artificial Sequence: Synthetic oligonucleotide
  Sense strand starting at position 458 of SEQ ID NO: 916395
guauuuccgucacauuuaa

SEQ ID NO: 1153313 - RNA, 19 nt, Artificial Sequence
  Description of Artificial Sequence: Synthetic oligonucleotide
  Antisense strand to SEQ ID NO: 1153312
uuaaaugugacggaaauac

SEQ ID NO: 1153314 - RNA, 19 nt, Artificial Sequence
  Description of Artificial Sequence: Synthetic oligonucleotide
  Sense strand starting at position 538 of SEQ ID NO: 916395
acucaaagaguuuaaguuu

SEQ ID NO: 1153315 - RNA, 19 nt, Artificial Sequence
  Description of Artificial Sequence: Synthetic oligonucleotide
  Antisense strand to SEQ ID NO: 1153314
aaacuuaaacucuuugagu

SEQ ID NO: 1153316 - RNA, 19 nt, Artificial Sequence
  Description of Artificial Sequence: Synthetic oligonucleotide
  Sense strand starting at position 545 of SEQ ID NO: 916395
gaguuuaaguuucccaaag

SEQ ID NO: 1153317 - RNA, 19 nt, Artificial Sequence
  Description of Artificial Sequence: Synthetic oligonucleotide
  Antisense strand to SEQ ID NO: 1153316
cuuugggaaacuuaaacuc

SEQ ID NO: 1153318 - RNA, 19 nt, Artificial Sequence
  Description of Artificial Sequence: Synthetic oligonucleotide
  Sense strand starting at position 567 of SEQ ID NO: 916395
caagucuacugagugacaa

SEQ ID NO: 1153319 - RNA, 19 nt, Artificial Sequence
  Description of Artificial Sequence: Synthetic oligonucleotide
  Antisense strand to SEQ ID NO: 1153318
uugucacucaguagacuug

SEQ ID NO: 1153320 - RNA, 19 nt, Artificial Sequence
  Description of Artificial Sequence: Synthetic oligonucleotide
  Sense strand starting at position 568 of SEQ ID NO: 916395
aagucuacugagugacaaa

SEQ ID NO: 1153321 - RNA, 19 nt, Artificial Sequence
  Description of Artificial Sequence: Synthetic oligonucleotide
  Antisense strand to SEQ ID NO: 1153320
uuugucacucaguagacuu

SEQ ID NO: 1153322 - RNA, 19 nt, Artificial Sequence
  Description of Artificial Sequence: Synthetic oligonucleotide
  Sense strand starting at position 603 of SEQ ID NO: 916395
aggacuguccugggucuau

SEQ ID NO: 1153323 - RNA, 19 nt, Artificial Sequence
  Description of Artificial Sequence: Synthetic oligonucleotide
  Antisense strand to SEQ ID NO: 1153322
auagacccaggacaguccu

SEQ ID NO: 1153324 - RNA, 19 nt, Artificial Sequence
  Description of Artificial Sequence: Synthetic oligonucleotide
  Sense strand starting at position 724 of SEQ ID NO: 916395
gucaaugaggucuaacauu

SEQ ID NO: 1153325 - RNA, 19 nt, Artificial Sequence
  Description of Artificial Sequence: Synthetic oligonucleotide
  Antisense strand to SEQ ID NO: 1153324
aauguuagaccucauugac

SEQ ID NO: 1153326 - RNA, 19 nt, Artificial Sequence
  Description of Artificial Sequence: Synthetic oligonucleotide
  Sense strand starting at position 865 of SEQ ID NO: 916395
auggacagcucaguuuaau

SEQ ID NO: 1153327 - RNA, 19 nt, Artificial Sequence
  Description of Artificial Sequence: Synthetic oligonucleotide
  Antisense strand to SEQ ID NO: 1153326
auuaaacugagcuguccau

SEQ ID NO: 1153328 - RNA, 19 nt, Artificial Sequence
  Description of Artificial Sequence: Synthetic oligonucleotide
  Sense strand starting at position 877 of SEQ ID NO: 916395
guuuaauuauuggcugaag

SEQ ID NO: 1153329 - RNA, 19 nt, Artificial Sequence
  Description of Artificial Sequence: Synthetic oligonucleotide
  Antisense strand to SEQ ID NO: 1153328
cuucagccaauaauuaaac

SEQ ID NO: 1153330 - RNA, 19 nt, Artificial Sequence
  Description of Artificial Sequence: Synthetic oligonucleotide
  Sense strand starting at position 879 of SEQ ID NO: 916395
uuaauuauuggcugaagca

SEQ ID NO: 1153331 - RNA, 19 nt, Artificial Sequence
  Description of Artificial Sequence: Synthetic oligonucleotide
  Antisense strand to SEQ ID NO: 1153330
ugcuucagccaauaauuaa

SEQ ID NO: 1153332 - RNA, 19 nt, Artificial Sequence
  Description of Artificial Sequence: Synthetic oligonucleotide
  Sense strand starting at position 898 of SEQ ID NO: 916395
cagcaucaucuggaaggua

SEQ ID NO: 1153333 - RNA, 19 nt, Artificial Sequence
  Description of Artificial Sequence: Synthetic oligonucleotide
  Antisense strand to SEQ ID NO: 1153332
uaccuuccagaugaugcug

SEQ ID NO: 1153334 - RNA, 19 nt, Artificial Sequence
  Description of Artificial Sequence: Synthetic oligonucleotide
  Sense strand starting at position 987 of SEQ ID NO: 916395
gcuacuuuggauuaucaag

SEQ ID NO: 1153335 - RNA, 19 nt, Artificial Sequence
  Description of Artificial Sequence: Synthetic oligonucleotide
  Antisense strand to SEQ ID NO: 1153334
cuugauaauccaaaguagc

SEQ ID NO: 1153336 - RNA, 19 nt, Artificial Sequence
  Description of Artificial Sequence: Synthetic oligonucleotide
  Sense strand starting at position 1114 of SEQ ID NO: 916395
aucucauucuuagcaggaa

SEQ ID NO: 1153337 - RNA, 19 nt, Artificial Sequence
  Description of Artificial Sequence: Synthetic oligonucleotide
  Antisense strand to SEQ ID NO: 1153336
uuccugcuaagaaugagau

SEQ ID NO: 1153338 - RNA, 19 nt, Artificial Sequence
  Description of Artificial Sequence: Synthetic oligonucleotide
  Sense strand starting at position 1453 of SEQ ID NO: 916395
aggagacucugguuuacaa

SEQ ID NO: 1153339 - RNA, 19 nt, Artificial Sequence
  Description of Artificial Sequence: Synthetic oligonucleotide
  Antisense strand to SEQ ID NO: 1153338
uuguaaaccagagucuccu

SEQ ID NO: 1153340 - RNA, 19 nt, Artificial Sequence
  Description of Artificial Sequence: Synthetic oligonucleotide
  Sense strand starting at position 1962 of SEQ ID NO: 916395
aggcaagcuagugaucacu

SEQ ID NO: 1153341 - RNA, 19 nt, Artificial Sequence
  Description of Artificial Sequence: Synthetic oligonucleotide
  Antisense strand to SEQ ID NO: 1153340
agugaucacuagcuugccu

SEQ ID NO: 1153342 - RNA, 19 nt, Artificial Sequence
  Description of Artificial Sequence: Synthetic oligonucleotide
  Sense strand starting at position 1971 of SEQ ID NO: 916395
agugaucacuuagcaagag

SEQ ID NO: 1153343 - RNA, 19 nt, Artificial Sequence
  Description of Artificial Sequence: Synthetic oligonucleotide
  Antisense strand to SEQ ID NO: 1153342
cucuugcuaagugaucacu

SEQ ID NO: 1153344 - RNA, 19 nt, Artificial Sequence
  Description of Artificial Sequence: Synthetic oligonucleotide
  Sense strand starting at position 2010 of SEQ ID NO: 916395
agaggagacuggccuuuau

SEQ ID NO: 1153345 - RNA, 19 nt, Artificial Sequence
  Description of Artificial Sequence: Synthetic oligonucleotide
  Antisense strand to SEQ ID NO: 1153344
auaaaggccagucuccucu

SEQ ID NO: 1153346 - RNA, 19 nt, Artificial Sequence
  Description of Artificial Sequence: Synthetic oligonucleotide
  Sense strand starting at position 2024 of SEQ ID NO: 916395
uuuauauaacagggaguuu

SEQ ID NO: 1153347 - RNA, 19 nt, Artificial Sequence
  Description of Artificial Sequence: Synthetic oligonucleotide
  Antisense strand to SEQ ID NO: 1153346
aaacucccuguuauauaaa

SEQ ID NO: 1153348 - RNA, 19 nt, Artificial Sequence
  Description of Artificial Sequence: Synthetic oligonucleotide
  Sense strand starting at position 2062 of SEQ ID NO: 916395
cgagcaauuaguugagaau

SEQ ID NO: 1153349 - RNA, 19 nt, Artificial Sequence
  Description of Artificial Sequence: Synthetic oligonucleotide
  Antisense strand to SEQ ID NO: 1153348
auucucaacuaauugcucg

SEQ ID NO: 1153350 - RNA, 19 nt, Artificial Sequence
  Description of Artificial Sequence: Synthetic oligonucleotide
  Sense strand starting at position 2075 of SEQ ID NO: 916395
gagaaucaucuuggguuug

SEQ ID NO: 1153351 - RNA, 19 nt, Artificial Sequence
  Description of Artificial Sequence: Synthetic oligonucleotide
  Antisense strand to SEQ ID NO: 1153350
caaacccaagaugauucuc

SEQ ID NO: 1153352 - RNA, 19 nt, Artificial Sequence
  Description of Artificial Sequence: Synthetic oligonucleotide
  Sense strand starting at position 2077 of SEQ ID NO: 916395
gaaucaucuuggguuuggu

SEQ ID NO: 1153353 - RNA, 19 nt, Artificial Sequence
  Description of Artificial Sequence: Synthetic oligonucleotide
  Antisense strand to SEQ ID NO: 1153352
accaaacccaagaugauuc

SEQ ID NO: 1153354 - RNA, 19 nt, Artificial Sequence
  Description of Artificial Sequence: Synthetic oligonucleotide
  Sense strand starting at position 2142 of SEQ ID NO: 916395
gagauaauccucugggcca

SEQ ID NO: 1153355 - RNA, 19 nt, Artificial Sequence
  Description of Artificial Sequence: Synthetic oligonucleotide
  Antisense strand to SEQ ID NO: 1153354
uggcccagaggauuaucuc

SEQ ID NO: 1153356 - RNA, 19 nt, Artificial Sequence
  Description of Artificial Sequence: Synthetic oligonucleotide
  Sense strand starting at position 2144 of SEQ ID NO: 916395
gauaauccucugggccaga

SEQ ID NO: 1153357 - RNA, 19 nt, Artificial Sequence
  Description of Artificial Sequence: Synthetic oligonucleotide
  Antisense strand to SEQ ID NO: 1153356
ucuggcccagaggauuauc

SEQ ID NO: 1153358 - RNA, 19 nt, Artificial Sequence
  Description of Artificial Sequence: Synthetic oligonucleotide
  Sense strand starting at position 2157 of SEQ ID NO: 916395
gccagaguggcuuugcuuu

SEQ ID NO: 1153359 - RNA, 19 nt, Artificial Sequence
  Description of Artificial Sequence: Synthetic oligonucleotide
  Antisense strand to SEQ ID NO: 1153358
aaagcaaagccacucuggc

SEQ ID NO: 1153360 - RNA, 19 nt, Artificial Sequence
  Description of Artificial Sequence: Synthetic oligonucleotide
  Sense strand starting at position 2190 of SEQ ID NO: 916395
cuaaacuugccucaguuga

SEQ ID NO: 1153361 - RNA, 19 nt, Artificial Sequence
  Description of Artificial Sequence: Synthetic oligonucleotide
  Antisense strand to SEQ ID NO: 1153360
ucaacugaggcaaguuuag

SEQ ID NO: 1153362 - RNA, 19 nt, Artificial Sequence
  Description of Artificial Sequence: Synthetic oligonucleotide
  Sense strand starting at position 2310 of SEQ ID NO: 916395
ccaggugauccggagccau

SEQ ID NO: 1153363 - RNA, 19 nt, Artificial Sequence
  Description of Artificial Sequence: Synthetic oligonucleotide
  Antisense strand to SEQ ID NO: 1153362
auggcuccggaucaccugg

SEQ ID NO: 1153364 - RNA, 19 nt, Artificial Sequence
  Description of Artificial Sequence: Synthetic oligonucleotide
  Sense strand starting at position 2325 of SEQ ID NO: 916395
ccaugagcucccugacaca

SEQ ID NO: 1153365 - RNA, 19 nt, Artificial Sequence
  Description of Artificial Sequence: Synthetic oligonucleotide
  Antisense strand to SEQ ID NO: 1153364
ugugucagggagcucaugg

SEQ ID NO: 1153366 - RNA, 19 nt, Artificial Sequence
  Description of Artificial Sequence: Synthetic oligonucleotide
  Sense strand starting at position 2586 of SEQ ID NO: 916395
ccuggaguuugggcugaga

SEQ ID NO: 1153367 - RNA, 19 nt, Artificial Sequence
  Description of Artificial Sequence: Synthetic oligonucleotide
  Antisense strand to SEQ ID NO: 1153366
ucucagcccaaacuccagg

SEQ ID NO: 1153368 - RNA, 19 nt, Artificial Sequence
  Description of Artificial Sequence: Synthetic oligonucleotide
  Sense strand starting at position 2588 of SEQ ID NO: 916395
uggaguuugggcugagaaa

SEQ ID NO: 1153369 - RNA, 19 nt, Artificial Sequence
  Description of Artificial Sequence: Synthetic oligonucleotide
  Antisense strand to SEQ ID NO: 1153368
uuucucagcccaaacucca

SEQ ID NO: 1153370 - RNA, 19 nt, Artificial Sequence
  Description of Artificial Sequence: Synthetic oligonucleotide
  Sense strand starting at position 2976 of SEQ ID NO: 916395
caucgugaaccugacauaa

SEQ ID NO: 1153371 - RNA, 19 nt, Artificial Sequence
  Description of Artificial Sequence: Synthetic oligonucleotide
  Antisense strand to SEQ ID NO: 1153370
uuaugucagguucacgaug

SEQ ID NO: 1153372 - RNA, 19 nt, Artificial Sequence
  Description of Artificial Sequence: Synthetic oligonucleotide
  Sense strand starting at position 3210 of SEQ ID NO: 916395
aggaaaggguugagaguuu

SEQ ID NO: 1153373 - RNA, 19 nt, Artificial Sequence
  Description of Artificial Sequence: Synthetic oligonucleotide
  Antisense strand to SEQ ID NO: 1153372
aaacucucaacccuuuccu

SEQ ID NO: 1153374 - RNA, 19 nt, Artificial Sequence
  Description of Artificial Sequence: Synthetic oligonucleotide
  Sense strand starting at position 3276 of SEQ ID NO: 916395
gggaaacccuggucuagac

SEQ ID NO: 1153375 - RNA, 19 nt, Artificial Sequence
  Description of Artificial Sequence: Synthetic oligonucleotide
  Antisense strand to SEQ ID NO: 1153374
gucuagaccaggguuuccc

SEQ ID NO: 1153376 - RNA, 19 nt, Artificial Sequence
  Description of Artificial Sequence: Synthetic oligonucleotide
  Sense strand starting at position 3462 of SEQ ID NO: 916395
ucagguugucgucugcaua

SEQ ID NO: 1153377 - RNA, 19 nt, Artificial Sequence
  Description of Artificial Sequence: Synthetic oligonucleotide
  Antisense strand to SEQ ID NO: 1153376
uaugcagacgacaaccuga

SEQ ID NO: 1153378 - RNA, 19 nt, Artificial Sequence
  Description of Artificial Sequence: Synthetic oligonucleotide
  Sense strand starting at position 3505 of SEQ ID NO: 916395
gcagguggcacugauucua

SEQ ID NO: 1153379 - RNA, 19 nt, Artificial Sequence
  Description of Artificial Sequence: Synthetic oligonucleotide
  Antisense strand to SEQ ID NO: 1153378
uagaaucagugccaccugc

SEQ ID NO: 1153380 - RNA, 19 nt, Artificial Sequence
  Description of Artificial Sequence: Synthetic oligonucleotide
  Sense strand starting at position 3581 of SEQ ID NO: 916395
gggcgcucugucuuucuga

SEQ ID NO: 1153381 - RNA, 19 nt, Artificial Sequence
  Description of Artificial Sequence: Synthetic oligonucleotide
  Antisense strand to SEQ ID NO: 1153380
ucagaaagacagagcgccc

SEQ ID NO: 1153382 - RNA, 19 nt, Artificial Sequence
  Description of Artificial Sequence: Synthetic oligonucleotide
  Sense strand starting at position 3583 of SEQ ID NO: 916395
gcgcucugucuuucugagu

SEQ ID NO: 1153383 - RNA, 19 nt, Artificial Sequence
  Description of Artificial Sequence: Synthetic oligonucleotide
  Antisense strand to SEQ ID NO: 1153382
acucagaaagacagagcgc

SEQ ID NO: 1153384 - RNA, 19 nt, Artificial Sequence
  Description of Artificial Sequence: Synthetic oligonucleotide
  Sense strand starting at position 3664 of SEQ ID NO: 916395
ugaguugagugacuucaag

SEQ ID NO: 1153385 - RNA, 19 nt, Artificial Sequence
  Description of Artificial Sequence: Synthetic oligonucleotide
  Antisense strand to SEQ ID NO: 1153384
cuugaagucacucaacuca

SEQ ID NO: 1153386 - RNA, 19 nt, Artificial Sequence
  Description of Artificial Sequence: Synthetic oligonucleotide
  Sense strand starting at position 3847 of SEQ ID NO: 916395
uguugugagcauuaaacaa

SEQ ID NO: 1153387 - RNA, 19 nt, Artificial Sequence
  Description of Artificial Sequence: Synthetic oligonucleotide
  Antisense strand to SEQ ID NO: 1153386
uuguuuaaugcucacaaca

SEQ ID NO: 1153388 - RNA, 19 nt, Artificial Sequence
  Description of Artificial Sequence: Synthetic oligonucleotide
  Sense strand starting at position 3894 of SEQ ID NO: 916395
gugcuugacacauagcaag

SEQ ID NO: 1153389 - RNA, 19 nt, Artificial Sequence
  Description of Artificial Sequence: Synthetic oligonucleotide
  Antisense strand to SEQ ID NO: 1153388
cuugcuaugugucaagcac

SEQ ID NO: 1153390 - RNA, 19 nt, Artificial Sequence
  Description of Artificial Sequence: Synthetic oligonucleotide
  Sense strand starting at position 72 of SEQ ID NO: 916396
agggaaagucacugagugu

SEQ ID NO: 1153391 - RNA, 19 nt, Artificial Sequence
  Description of Artificial Sequence: Synthetic oligonucleotide
  Antisense strand to SEQ ID NO: 1153390
acacucagugacuuucccu

SEQ ID NO: 1153392 - RNA, 19 nt, Artificial Sequence
  Description of Artificial Sequence: Synthetic oligonucleotide
  Sense strand starting at position 501 of SEQ ID NO: 916396
aggaauuguaacuguuuga

SEQ ID NO: 1153393 - RNA, 19 nt, Artificial Sequence
  Description of Artificial Sequence: Synthetic oligonucleotide
  Antisense strand to SEQ ID NO: 1153392
ucaaacaguuacaauuccu

SEQ ID NO: 1153394 - RNA, 19 nt, Artificial Sequence
  Description of Artificial Sequence: Synthetic oligonucleotide
  Sense strand starting at position 514 of SEQ ID NO: 916396
guuugaaauucccuaaacg

SEQ ID NO: 1153395 - RNA, 19 nt, Artificial Sequence
  Description of Artificial Sequence: Synthetic oligonucleotide
  Antisense strand to SEQ ID NO: 1153394
cguuuagggaauuucaaac

SEQ ID NO: 1153396 - RNA, 19 nt, Artificial Sequence
  Description of Artificial Sequence: Synthetic oligonucleotide
  Sense strand starting at position 741 of SEQ ID NO: 916396
ucacauacacuguaguaau

SEQ ID NO: 1153397 - RNA, 19 nt, Artificial Sequence
  Description of Artificial Sequence: Synthetic oligonucleotide
  Antisense strand to SEQ ID NO: 1153396
auuacuacaguguauguga

SEQ ID NO: 1153398 - RNA, 19 nt, Artificial Sequence
  Description of Artificial Sequence: Synthetic oligonucleotide
  Sense strand starting at position 828 of SEQ ID NO: 916396
cgaugucuggccuaucaua

SEQ ID NO: 1153399 - RNA, 19 nt, Artificial Sequence
  Description of Artificial Sequence: Synthetic oligonucleotide
  Antisense strand to SEQ ID NO: 1153398
uaugauaggccagacaucg

SEQ ID NO: 1153400 - RNA, 19 nt, Artificial Sequence
  Description of Artificial Sequence: Synthetic oligonucleotide
  Sense strand starting at position 1023 of SEQ ID NO: 916396
guggauaguuggguggauu

SEQ ID NO: 1153401 - RNA, 19 nt, Artificial Sequence
  Description of Artificial Sequence: Synthetic oligonucleotide
  Antisense strand to SEQ ID NO: 1153400
aauccacccaacuauccac

SEQ ID NO: 1153402 - RNA, 19 nt, Artificial Sequence
  Description of Artificial Sequence: Synthetic oligonucleotide
  Sense strand starting at position 1025 of SEQ ID NO: 916396
ggauaguuggguggauuga

SEQ ID NO: 1153403 - RNA, 19 nt, Artificial Sequence
  Description of Artificial Sequence: Synthetic oligonucleotide
  Antisense strand to SEQ ID NO: 1153402
ucaauccacccaacuaucc

SEQ ID NO: 1153404 - RNA, 19 nt, Artificial Sequence
  Description of Artificial Sequence: Synthetic oligonucleotide
  Sense strand starting at position 1192 of SEQ ID NO: 916396
gguacuacaccauguaucu

SEQ ID NO: 1153405 - RNA, 19 nt, Artificial Sequence
  Description of Artificial Sequence: Synthetic oligonucleotide
  Antisense strand to SEQ ID NO: 1153404
agauacaugguguaguacc

SEQ ID NO: 1153406 - RNA, 19 nt, Artificial Sequence
  Description of Artificial Sequence: Synthetic oligonucleotide
  Sense strand starting at position 1202 of SEQ ID NO: 916396
cauguaucuguugaguauu

SEQ ID NO: 1153407 - RNA, 19 nt, Artificial Sequence
  Description of Artificial Sequence: Synthetic oligonucleotide
  Antisense strand to SEQ ID NO: 1153406
aauacucaacagauacaug

SEQ ID NO: 1153408 - RNA, 19 nt, Artificial Sequence
  Description of Artificial Sequence: Synthetic oligonucleotide
  Sense strand starting at position 1261 of SEQ ID NO: 916396
ggaauuaaaucccugcaag

SEQ ID NO: 1153409 - RNA, 19 nt, Artificial Sequence
  Description of Artificial Sequence: Synthetic oligonucleotide
  Antisense strand to SEQ ID NO: 1153408
cuugcagggauuuaauucc

SEQ ID NO: 1153410 - RNA, 19 nt, Artificial Sequence
  Description of Artificial Sequence: Synthetic oligonucleotide
  Sense strand starting at position 1341 of SEQ ID NO: 916396
gcacgauguggugagaggu

SEQ ID NO: 1153411 - RNA, 19 nt, Artificial Sequence
  Description of Artificial Sequence: Synthetic oligonucleotide
  Antisense strand to SEQ ID NO: 1153410
accucucaccacaucgugc

SEQ ID NO: 1153412 - RNA, 19 nt, Artificial Sequence
  Description of Artificial Sequence: Synthetic oligonucleotide
  Sense strand starting at position 1445 of SEQ ID NO: 916396
gcaaacuuguuguugagaa

SEQ ID NO: 1153413 - RNA, 19 nt, Artificial Sequence
  Description of Artificial Sequence: Synthetic oligonucleotide
  Antisense strand to SEQ ID NO: 1153412
uucucaacaacaaguuugc

SEQ ID NO: 1153414 - RNA, 19 nt, Artificial Sequence
  Description of Artificial Sequence: Synthetic oligonucleotide
  Sense strand starting at position 1485 of SEQ ID NO: 916396
gggucuugauccucugaau

SEQ ID NO: 1153415 - RNA, 19 nt, Artificial Sequence
  Description of Artificial Sequence: Synthetic oligonucleotide
  Antisense strand to SEQ ID NO: 1153414
auucagaggaucaagaccc

SEQ ID NO: 1153416 - RNA, 19 nt, Artificial Sequence
  Description of Artificial Sequence: Synthetic oligonucleotide
  Sense strand starting at position 1897 of SEQ ID NO: 916396
ugcagaagagcugguacua

SEQ ID NO: 1153417 - RNA, 19 nt, Artificial Sequence
  Description of Artificial Sequence: Synthetic oligonucleotide
  Antisense strand to SEQ ID NO: 1153416
uaguaccagcucuucugca

SEQ ID NO: 1153418 - RNA, 19 nt, Artificial Sequence
  Description of Artificial Sequence: Synthetic oligonucleotide
  Sense strand starting at position 1968 of SEQ ID NO: 916396
ucauguuugcuggagcauc

SEQ ID NO: 1153419 - RNA, 19 nt, Artificial Sequence
  Description of Artificial Sequence: Synthetic oligonucleotide
  Antisense strand to SEQ ID NO: 1153418
gaugcuccagcaaacauga

SEQ ID NO: 1153420 - RNA, 19 nt, Artificial Sequence
  Description of Artificial Sequence: Synthetic oligonucleotide
  Sense strand starting at position 2047 of SEQ ID NO: 916396
agcucugacuccuuugaaa

SEQ ID NO: 1153421 - RNA, 19 nt, Artificial Sequence
  Description of Artificial Sequence: Synthetic oligonucleotide
  Antisense strand to SEQ ID NO: 1153420
uuucaaaggagucagagcu

SEQ ID NO: 1153422 - RNA, 19 nt, Artificial Sequence
  Description of Artificial Sequence: Synthetic oligonucleotide
  Sense strand starting at position 2190 of SEQ ID NO: 916396
acaccugugaguugcagaa

SEQ ID NO: 1153423 - RNA, 19 nt, Artificial Sequence
  Description of Artificial Sequence: Synthetic oligonucleotide
  Antisense strand to SEQ ID NO: 1153422
uucugcaacucacaggugu

SEQ ID NO: 1153424 - RNA, 19 nt, Artificial Sequence
  Description of Artificial Sequence: Synthetic oligonucleotide
  Sense strand starting at position 2194 of SEQ ID NO: 916396
cugugaguugcagaaauca

SEQ ID NO: 1153425 - RNA, 19 nt, Artificial Sequence
  Description of Artificial Sequence: Synthetic oligonucleotide
  Antisense strand to SEQ ID NO: 1153424
ugauuucugcaacucacag

SEQ ID NO: 1153426 - RNA, 19 nt, Artificial Sequence
  Description of Artificial Sequence: Synthetic oligonucleotide
  Sense strand starting at position 2290 of SEQ ID NO: 916396
ucaggaucucauugcugga

SEQ ID NO: 1153427 - RNA, 19 nt, Artificial Sequence
  Description of Artificial Sequence: Synthetic oligonucleotide
  Antisense strand to SEQ ID NO: 1153426
uccagcaaugagauccuga

SEQ ID NO: 1153428 - RNA, 19 nt, Artificial Sequence
  Description of Artificial Sequence: Synthetic oligonucleotide
  Sense strand starting at position 2295 of SEQ ID NO: 916396
aucucauugcuggaaacuu

SEQ ID NO: 1153429 - RNA, 19 nt, Artificial Sequence
  Description of Artificial Sequence: Synthetic oligonucleotide
  Antisense strand to SEQ ID NO: 1153428
aaguuuccagcaaugagau

SEQ ID NO: 1153430 - RNA, 19 nt, Artificial Sequence
  Description of Artificial Sequence: Synthetic oligonucleotide
  Sense strand starting at position 2383 of SEQ ID NO: 916396
cugggaugugccugggaga

SEQ ID NO: 1153431 - RNA, 19 nt, Artificial Sequence
  Description of Artificial Sequence: Synthetic oligonucleotide
  Antisense strand to SEQ ID NO: 1153430
ucucccaggcacaucccag

SEQ ID NO: 1153432 - RNA, 19 nt, Artificial Sequence
  Description of Artificial Sequence: Synthetic oligonucleotide
  Sense strand starting at position 2384 of SEQ ID NO: 916396
ugggaugugccugggagau

SEQ ID NO: 1153433 - RNA, 19 nt, Artificial Sequence
  Description of Artificial Sequence: Synthetic oligonucleotide
  Antisense strand to SEQ ID NO: 1153432
aucucccaggcacauccca

SEQ ID NO: 1153434 - RNA, 19 nt, Artificial Sequence
  Description of Artificial Sequence: Synthetic oligonucleotide
  Sense strand starting at position 2413 of SEQ ID NO: 916396
guuagaugguguuuagaga

SEQ ID NO: 1153435 - RNA, 19 nt, Artificial Sequence
  Description of Artificial Sequence: Synthetic oligonucleotide
  Antisense strand to SEQ ID NO: 1153434
ucucuaaacaccaucuaac

SEQ ID NO: 1153436 - RNA, 19 nt, Artificial Sequence
  Description of Artificial Sequence: Synthetic oligonucleotide
  Sense strand starting at position 2437 of SEQ ID NO: 916396
ggaccauagcugggacaga

SEQ ID NO: 1153437 - RNA, 19 nt, Artificial Sequence
  Description of Artificial Sequence: Synthetic oligonucleotide
  Antisense strand to SEQ ID NO: 1153436
ucugucccagcuauggucc

SEQ ID NO: 1153438 - RNA, 19 nt, Artificial Sequence
  Description of Artificial Sequence: Synthetic oligonucleotide
  Sense strand starting at position 2585 of SEQ ID NO: 916396
gcaauauuguggucacuga

SEQ ID NO: 1153439 - RNA, 19 nt, Artificial Sequence
  Description of Artificial Sequence: Synthetic oligonucleotide
  Antisense strand to SEQ ID NO: 1153438
ucagugaccacaauauugc

SEQ ID NO: 1153440 - RNA, 19 nt, Artificial Sequence
  Description of Artificial Sequence: Synthetic oligonucleotide
  Sense strand starting at position 2619 of SEQ ID NO: 916396
cacagauucugcccaaggu

SEQ ID NO: 1153441 - RNA, 19 nt, Artificial Sequence
  Description of Artificial Sequence: Synthetic oligonucleotide
  Antisense strand to SEQ ID NO: 1153440
accuugggcagaaucugug

SEQ ID NO: 1153442 - RNA, 19 nt, Artificial Sequence
  Description of Artificial Sequence: Synthetic oligonucleotide
  Sense strand starting at position 2656 of SEQ ID NO: 916396
cuugauaagccucagacuu

SEQ ID NO: 1153443 - RNA, 19 nt, Artificial Sequence
  Description of Artificial Sequence: Synthetic oligonucleotide
  Antisense strand to SEQ ID NO: 1153442
aagucugaggcuuaucaag

SEQ ID NO: 1153444 - RNA, 19 nt, Artificial Sequence
  Description of Artificial Sequence: Synthetic oligonucleotide
  Sense strand starting at position 2711 of SEQ ID NO: 916396
aaagucugugguuauagau

SEQ ID NO: 1153445 - RNA, 19 nt, Artificial Sequence
  Description of Artificial Sequence: Synthetic oligonucleotide
  Antisense strand to SEQ ID NO: 1153444
aucuauaaccacagacuuu

SEQ ID NO: 1153446 - RNA, 19 nt, Artificial Sequence
  Description of Artificial Sequence: Synthetic oligonucleotide
  Sense strand starting at position 3037 of SEQ ID NO: 916396
acgguagaccagcacuaau

SEQ ID NO: 1153447 - RNA, 19 nt, Artificial Sequence
  Description of Artificial Sequence: Synthetic oligonucleotide
  Antisense strand to SEQ ID NO: 1153446
auuagugcuggucuaccgu

SEQ ID NO: 1153448 - RNA, 19 nt, Artificial Sequence
  Description of Artificial Sequence: Synthetic oligonucleotide
  Sense strand starting at position 3120 of SEQ ID NO: 916396
aucaguguccgccaacaaa

SEQ ID NO: 1153449 - RNA, 19 nt, Artificial Sequence
  Description of Artificial Sequence: Synthetic oligonucleotide
  Antisense strand to SEQ ID NO: 1153448
uuuguuggcggacacugau

SEQ ID NO: 1153450 - RNA, 19 nt, Artificial Sequence
  Description of Artificial Sequence: Synthetic oligonucleotide
  Sense strand starting at position 3257 of SEQ ID NO: 916396
ugcccaauuggauacaauu

SEQ ID NO: 1153451 - RNA, 19 nt, Artificial Sequence
  Description of Artificial Sequence: Synthetic oligonucleotide
  Antisense strand to SEQ ID NO: 1153450
aauuguauccaauugggca

SEQ ID NO: 1153452 - RNA, 19 nt, Artificial Sequence
  Description of Artificial Sequence: Synthetic oligonucleotide
  Sense strand starting at position 3280 of SEQ ID NO: 916396
uaaaucaucuuguuggaga

SEQ ID NO: 1153453 - RNA, 19 nt, Artificial Sequence
  Description of Artificial Sequence: Synthetic oligonucleotide
  Antisense strand to SEQ ID NO: 1153452
ucuccaacaagaugauuua

SEQ ID NO: 1153454 - RNA, 19 nt, Artificial Sequence
  Description of Artificial Sequence: Synthetic oligonucleotide
  Sense strand starting at position 3282 of SEQ ID NO: 916396
aaucaucuuguuggagacu

SEQ ID NO: 1153455 - RNA, 19 nt, Artificial Sequence
  Description of Artificial Sequence: Synthetic oligonucleotide
  Antisense strand to SEQ ID NO: 1153454
agucuccaacaagaugauu

SEQ ID NO: 1153456 - RNA, 19 nt, Artificial Sequence
  Description of Artificial Sequence: Synthetic oligonucleotide
  Sense strand starting at position 3323 of SEQ ID NO: 916396
uugugauacuauguaccau

SEQ ID NO: 1153457 - RNA, 19 nt, Artificial Sequence
  Description of Artificial Sequence: Synthetic oligonucleotide
  Antisense strand to SEQ ID NO: 1153456
augguacauaguaucacaa

SEQ ID NO: 1153458 - RNA, 19 nt, Artificial Sequence
  Description of Artificial Sequence: Synthetic oligonucleotide
  Sense strand starting at position 3639 of SEQ ID NO: 916396
ugcagugagcccuuaucgu

SEQ ID NO: 1153459 - RNA, 19 nt, Artificial Sequence
  Description of Artificial Sequence: Synthetic oligonucleotide
  Antisense strand to SEQ ID NO: 1153458
acgauaagggcucacugca

SEQ ID NO: 1153460 - RNA, 19 nt, Artificial Sequence
  Description of Artificial Sequence: Synthetic oligonucleotide
  Sense strand starting at position 3724 of SEQ ID NO: 916396
uaagacagacuuugugagu

SEQ ID NO: 1153461 - RNA, 19 nt, Artificial Sequence
  Description of Artificial Sequence: Synthetic oligonucleotide
  Antisense strand to SEQ ID NO: 1153460
acucacaaagucugucuua

SEQ ID NO: 1153462 - RNA, 19 nt, Artificial Sequence
  Description of Artificial Sequence: Synthetic oligonucleotide
  Sense strand starting at position 3725 of SEQ ID NO: 916396
aagacagacuuugugagua

SEQ ID NO: 1153463 - RNA, 19 nt, Artificial Sequence
  Description of Artificial Sequence: Synthetic oligonucleotide
  Antisense strand to SEQ ID NO: 1153462
uacucacaaagucugucuu

SEQ ID NO: 1153464 - RNA, 19 nt, Artificial Sequence
  Description of Artificial Sequence: Synthetic oligonucleotide
  Sense strand starting at position 3729 of SEQ ID NO: 916396
cagacuuugugaguaacua

SEQ ID NO: 1153465 - RNA, 19 nt, Artificial Sequence
  Description of Artificial Sequence: Synthetic oligonucleotide
  Antisense strand to SEQ ID NO: 1153464
uaguuacucacaaagucug

SEQ ID NO: 1153466 - RNA, 19 nt, Artificial Sequence
  Description of Artificial Sequence: Synthetic oligonucleotide
  Sense strand starting at position 3733 of SEQ ID NO: 916396
cuuugugaguaacuagaaa

SEQ ID NO: 1153467 - RNA, 19 nt, Artificial Sequence
  Description of Artificial Sequence: Synthetic oligonucleotide
  Antisense strand to SEQ ID NO: 1153466
uuucuaguuacucacaaag

SEQ ID NO: 1153468 - RNA, 19 nt, Artificial Sequence
  Description of Artificial Sequence: Synthetic oligonucleotide
  Sense strand starting at position 3744 of SEQ ID NO: 916396
acuagaaagugaguugauu

SEQ ID NO: 1153469 - RNA, 19 nt, Artificial Sequence
  Description of Artificial Sequence: Synthetic oligonucleotide
  Antisense strand to SEQ ID NO: 1153468
aaucaacucacuuucuagu

SEQ ID NO: 1153470 - RNA, 19 nt, Artificial Sequence
  Description of Artificial Sequence: Synthetic oligonucleotide
  Sense strand starting at position 61 of SEQ ID NO: 916397
ccuacucuggcucaggaau

SEQ ID NO: 1153471 - RNA, 19 nt, Artificial Sequence
  Description of Artificial Sequence: Synthetic oligonucleotide
  Antisense strand to SEQ ID NO: 1153470
auuccugagccagaguagg

SEQ ID NO: 1153472 - RNA, 19 nt, Artificial Sequence
  Description of Artificial Sequence: Synthetic oligonucleotide
  Sense strand starting at position 199 of SEQ ID NO: 916397
ggaagucuucccugauuaa

SEQ ID NO: 1153473 - RNA, 19 nt, Artificial Sequence
  Description of Artificial Sequence: Synthetic oligonucleotide
  Antisense strand to SEQ ID NO: 1153472
uuaaucagggaagacuucc

SEQ ID NO: 1153474 - RNA, 19 nt, Artificial Sequence
  Description of Artificial Sequence: Synthetic oligonucleotide
  Sense strand starting at position 285 of SEQ ID NO: 916397
agcaguccuuuagucagau

SEQ ID NO: 1153475 - RNA, 19 nt, Artificial Sequence
  Description of Artificial Sequence: Synthetic oligonucleotide
  Antisense strand to SEQ ID NO: 1153474
aucugacuaaaggacugcu

SEQ ID NO: 1153476 - RNA, 19 nt, Artificial Sequence
  Description of Artificial Sequence: Synthetic oligonucleotide
  Sense strand starting at position 286 of SEQ ID NO: 916397
gcaguccuuuagucagauc

SEQ ID NO: 1153477 - RNA, 19 nt, Artificial Sequence
  Description of Artificial Sequence: Synthetic oligonucleotide
  Antisense strand to SEQ ID NO: 1153476
gaucugacuaaaggacugc

SEQ ID NO: 1153478 - RNA, 19 nt, Artificial Sequence
  Description of Artificial Sequence: Synthetic oligonucleotide
  Sense strand starting at position 289 of SEQ ID NO: 916397
guccuuuagucagaucuug

SEQ ID NO: 1153479 - RNA, 19 nt, Artificial Sequence
  Description of Artificial Sequence: Synthetic oligonucleotide
  Antisense strand to SEQ ID NO: 1153478
caagaucugacuaaaggac

SEQ ID NO: 1153480 - RNA, 19 nt, Artificial Sequence
  Description of Artificial Sequence: Synthetic oligonucleotide
  Sense strand starting at position 368 of SEQ ID NO: 916397
gugauagccuguccuaaau

SEQ ID NO: 1153481 - RNA, 19 nt, Artificial Sequence
  Description of Artificial Sequence: Synthetic oligonucleotide
  Antisense strand to SEQ ID NO: 1153480
auuuaggacaggcuaucac

SEQ ID NO: 1153482 - RNA, 19 nt, Artificial Sequence
  Description of Artificial Sequence: Synthetic oligonucleotide
  Sense strand starting at position 436 of SEQ ID NO: 916397
aguggaugcucagaacgua

SEQ ID NO: 1153483 - RNA, 19 nt, Artificial Sequence
  Description of Artificial Sequence: Synthetic oligonucleotide
  Antisense strand to SEQ ID NO: 1153482
uacguucugagcauccacu

SEQ ID NO: 1153484 - RNA, 19 nt, Artificial Sequence
  Description of Artificial Sequence: Synthetic oligonucleotide
  Sense strand starting at position 491 of SEQ ID NO: 916397
accacaaagucguucucaa

SEQ ID NO: 1153485 - RNA, 19 nt, Artificial Sequence
  Description of Artificial Sequence: Synthetic oligonucleotide
  Antisense strand to SEQ ID NO: 1153484
uugagaacgacuuuguggu

SEQ ID NO: 1153486 - RNA, 19 nt, Artificial Sequence
  Description of Artificial Sequence: Synthetic oligonucleotide
  Sense strand starting at position 499 of SEQ ID NO: 916397
gucguucucaaguguggca

SEQ ID NO: 1153487 - RNA, 19 nt, Artificial Sequence
  Description of Artificial Sequence: Synthetic oligonucleotide
  Antisense strand to SEQ ID NO: 1153486
ugccacacuugagaacgac

SEQ ID NO: 1153488 - RNA, 19 nt, Artificial Sequence
  Description of Artificial Sequence: Synthetic oligonucleotide
  Sense strand starting at position 626 of SEQ ID NO: 916397
aggacuccuugccuuagaa

SEQ ID NO: 1153489 - RNA, 19 nt, Artificial Sequence
  Description of Artificial Sequence: Synthetic oligonucleotide
  Antisense strand to SEQ ID NO: 1153488
uucuaaggcaaggaguccu

SEQ ID NO: 1153490 - RNA, 19 nt, Artificial Sequence
  Description of Artificial Sequence: Synthetic oligonucleotide
  Sense strand starting at position 769 of SEQ ID NO: 916397
ggcacauucgaauaccuuu

SEQ ID NO: 1153491 - RNA, 19 nt, Artificial Sequence
  Description of Artificial Sequence: Synthetic oligonucleotide
  Antisense strand to SEQ ID NO: 1153490
aaagguauucgaaugugcc

SEQ ID NO: 1153492 - RNA, 19 nt, Artificial Sequence
  Description of Artificial Sequence: Synthetic oligonucleotide
  Sense strand starting at position 999 of SEQ ID NO: 916397
ggugacauuucccaaguuu

SEQ ID NO: 1153493 - RNA, 19 nt, Artificial Sequence
  Description of Artificial Sequence: Synthetic oligonucleotide
  Antisense strand to SEQ ID NO: 1153492
aaacuugggaaaugucacc

SEQ ID NO: 1153494 - RNA, 19 nt, Artificial Sequence
  Description of Artificial Sequence: Synthetic oligonucleotide
  Sense strand starting at position 1171 of SEQ ID NO: 916397
ccaucugugaauuguguca

SEQ ID NO: 1153495 - RNA, 19 nt, Artificial Sequence
  Description of Artificial Sequence: Synthetic oligonucleotide
  Antisense strand to SEQ ID NO: 1153494
ugacacaauucacagaugg

SEQ ID NO: 1153496 - RNA, 19 nt, Artificial Sequence
  Description of Artificial Sequence: Synthetic oligonucleotide
  Sense strand starting at position 1278 of SEQ ID NO: 916397
acaggaauuucucaagaau

SEQ ID NO: 1153497 - RNA, 19 nt, Artificial Sequence
  Description of Artificial Sequence: Synthetic oligonucleotide
  Antisense strand to SEQ ID NO: 1153496
auucuugagaaauuccugu

SEQ ID NO: 1153498 - RNA, 19 nt, Artificial Sequence
  Description of Artificial Sequence: Synthetic oligonucleotide
  Sense strand starting at position 1336 of SEQ ID NO: 916397
cagccuugaccggaaacau

SEQ ID NO: 1153499 - RNA, 19 nt, Artificial Sequence
  Description of Artificial Sequence: Synthetic oligonucleotide
  Antisense strand to SEQ ID NO: 1153498
auguuuccggucaaggcug

SEQ ID NO: 1153500 - RNA, 19 nt, Artificial Sequence
  Description of Artificial Sequence: Synthetic oligonucleotide
  Sense strand starting at position 1393 of SEQ ID NO: 916397
cugccuuuccuccaagguu

SEQ ID NO: 1153501 - RNA, 19 nt, Artificial Sequence
  Description of Artificial Sequence: Synthetic oligonucleotide
  Antisense strand to SEQ ID NO: 1153500
aaccuuggaggaaaggcag

SEQ ID NO: 1153502 - RNA, 19 nt, Artificial Sequence
  Description of Artificial Sequence: Synthetic oligonucleotide
  Sense strand starting at position 1401 of SEQ ID NO: 916397
ccuccaagguucuccagau

SEQ ID NO: 1153503 - RNA, 19 nt, Artificial Sequence
  Description of Artificial Sequence: Synthetic oligonucleotide
  Antisense strand to SEQ ID NO: 1153502
aucuggagaaccuuggagg

SEQ ID NO: 1153504 - RNA, 19 nt, Artificial Sequence
  Description of Artificial Sequence: Synthetic oligonucleotide
  Sense strand starting at position 1603 of SEQ ID NO: 916397
gggaaauuucagugugccu

SEQ ID NO: 1153505 - RNA, 19 nt, Artificial Sequence
  Description of Artificial Sequence: Synthetic oligonucleotide
  Antisense strand to SEQ ID NO: 1153504
aggcacacugaaauuuccc

SEQ ID NO: 1153506 - RNA, 19 nt, Artificial Sequence
  Description of Artificial Sequence: Synthetic oligonucleotide
  Sense strand starting at position 2132 of SEQ ID NO: 916397
gagggacuucuuugcugca

SEQ ID NO: 1153507 - RNA, 19 nt, Artificial Sequence
  Description of Artificial Sequence: Synthetic oligonucleotide
  Antisense strand to SEQ ID NO: 1153506
ugcagcaaagaagucccuc

SEQ ID NO: 1153508 - RNA, 19 nt, Artificial Sequence
  Description of Artificial Sequence: Synthetic oligonucleotide
  Sense strand starting at position 2134 of SEQ ID NO: 916397
gggacuucuuugcugcaga

SEQ ID NO: 1153509 - RNA, 19 nt, Artificial Sequence
  Description of Artificial Sequence: Synthetic oligonucleotide
  Antisense strand to SEQ ID NO: 1153508
ucugcagcaaagaaguccc

SEQ ID NO: 1153510 - RNA, 19 nt, Artificial Sequence
  Description of Artificial Sequence: Synthetic oligonucleotide
  Sense strand starting at position 2137 of SEQ ID NO: 916397
acuucuuugcugcagaagu

SEQ ID NO: 1153511 - RNA, 19 nt, Artificial Sequence
  Description of Artificial Sequence: Synthetic oligonucleotide
  Antisense strand to SEQ ID NO: 1153510
acuucugcagcaaagaagu

SEQ ID NO: 1153512 - RNA, 19 nt, Artificial Sequence
  Description of Artificial Sequence: Synthetic oligonucleotide
  Sense strand starting at position 2139 of SEQ ID NO: 916397
uucuuugcugcagaaguua

SEQ ID NO: 1153513 - RNA, 19 nt, Artificial Sequence
  Description of Artificial Sequence: Synthetic oligonucleotide
  Antisense strand to SEQ ID NO: 1153512
uaacuucugcagcaaagaa

SEQ ID NO: 1153514 - RNA, 19 nt, Artificial Sequence
  Description of Artificial Sequence: Synthetic oligonucleotide
  Sense strand starting at position 2144 of SEQ ID NO: 916397
ugcugcagaaguuauuaga

SEQ ID NO: 1153515 - RNA, 19 nt, Artificial Sequence
  Description of Artificial Sequence: Synthetic oligonucleotide
  Antisense strand to SEQ ID NO: 1153514
ucuaauaacuucugcagca

SEQ ID NO: 1153516 - RNA, 19 nt, Artificial Sequence
  Description of Artificial Sequence: Synthetic oligonucleotide
  Sense strand starting at position 2277 of SEQ ID NO: 916397
gaagcaaacugguuguuga

SEQ ID NO: 1153517 - RNA, 19 nt, Artificial Sequence
  Description of Artificial Sequence: Synthetic oligonucleotide
  Antisense strand to SEQ ID NO: 1153516
ucaacaaccaguuugcuuc

SEQ ID NO: 1153518 - RNA, 19 nt, Artificial Sequence
  Description of Artificial Sequence: Synthetic oligonucleotide
  Sense strand starting at position 2371 of SEQ ID NO: 916397
gcagauucugguugauggu

SEQ ID NO: 1153519 - RNA, 19 nt, Artificial Sequence
  Description of Artificial Sequence: Synthetic oligonucleotide
  Antisense strand to SEQ ID NO: 1153518
accaucaaccagaaucugc

SEQ ID NO: 1153520 - RNA, 19 nt, Artificial Sequence
  Description of Artificial Sequence: Synthetic oligonucleotide
  Sense strand starting at position 2685 of SEQ ID NO: 916397
acagauugucaaggugugu

SEQ ID NO: 1153521 - RNA, 19 nt, Artificial Sequence
  Description of Artificial Sequence: Synthetic oligonucleotide
  Antisense strand to SEQ ID NO: 1153520
acacaccuugacaaucugu

SEQ ID NO: 1153522 - RNA, 19 nt, Artificial Sequence
  Description of Artificial Sequence: Synthetic oligonucleotide
  Sense strand starting at position 2691 of SEQ ID NO: 916397
ugucaaggugugugaguuu

SEQ ID NO: 1153523 - RNA, 19 nt, Artificial Sequence
  Description of Artificial Sequence: Synthetic oligonucleotide
  Antisense strand to SEQ ID NO: 1153522
aaacucacacaccuugaca

SEQ ID NO: 1153524 - RNA, 19 nt, Artificial Sequence
  Description of Artificial Sequence: Synthetic oligonucleotide
  Sense strand starting at position 2761 of SEQ ID NO: 916397
ggccuuggagagcaagaua

SEQ ID NO: 1153525 - RNA, 19 nt, Artificial Sequence
  Description of Artificial Sequence: Synthetic oligonucleotide
  Antisense strand to SEQ ID NO: 1153524
uaucuugcucuccaaggcc

SEQ ID NO: 1153526 - RNA, 19 nt, Artificial Sequence
  Description of Artificial Sequence: Synthetic oligonucleotide
  Sense strand starting at position 2772 of SEQ ID NO: 916397
gcaagauacucuugaccug

SEQ ID NO: 1153527 - RNA, 19 nt, Artificial Sequence
  Description of Artificial Sequence: Synthetic oligonucleotide
  Antisense strand to SEQ ID NO: 1153526
caggucaagaguaucuugc

SEQ ID NO: 1153528 - RNA, 19 nt, Artificial Sequence
  Description of Artificial Sequence: Synthetic oligonucleotide
  Sense strand starting at position 2823 of SEQ ID NO: 916397
cucugacgugccuggagaa

SEQ ID NO: 1153529 - RNA, 19 nt, Artificial Sequence
  Description of Artificial Sequence: Synthetic oligonucleotide
  Antisense strand to SEQ ID NO: 1153528
uucuccaggcacgucagag

SEQ ID NO: 1153530 - RNA, 19 nt, Artificial Sequence
  Description of Artificial Sequence: Synthetic oligonucleotide
  Sense strand starting at position 2824 of SEQ ID NO: 916397
ucugacgugccuggagaau

SEQ ID NO: 1153531 - RNA, 19 nt, Artificial Sequence
  Description of Artificial Sequence: Synthetic oligonucleotide
  Antisense strand to SEQ ID NO: 1153530
auucuccaggcacgucaga

SEQ ID NO: 1153532 - RNA, 19 nt, Artificial Sequence
  Description of Artificial Sequence: Synthetic oligonucleotide
  Sense strand starting at position 2914 of SEQ ID NO: 916397
gagaaauaggcaugcccaa

SEQ ID NO: 1153533 - RNA, 19 nt, Artificial Sequence
  Description of Artificial Sequence: Synthetic oligonucleotide
  Antisense strand to SEQ ID NO: 1153532
uugggcaugccuauuucuc

SEQ ID NO: 1153534 - RNA, 19 nt, Artificial Sequence
  Description of Artificial Sequence: Synthetic oligonucleotide
  Sense strand starting at position 2958 of SEQ ID NO: 916397
ggaugucagugcugaggga

SEQ ID NO: 1153535 - RNA, 19 nt, Artificial Sequence
  Description of Artificial Sequence: Synthetic oligonucleotide
  Antisense strand to SEQ ID NO: 1153534
ucccucagcacugacaucc

SEQ ID NO: 1153536 - RNA, 19 nt, Artificial Sequence
  Description of Artificial Sequence: Synthetic oligonucleotide
  Sense strand starting at position 2981 of SEQ ID NO: 916397
gagggauggccggagcaaa

SEQ ID NO: 1153537 - RNA, 19 nt, Artificial Sequence
  Description of Artificial Sequence: Synthetic oligonucleotide
  Antisense strand to SEQ ID NO: 1153536
uuugcuccggccaucccuc

SEQ ID NO: 1153538 - RNA, 19 nt, Artificial Sequence
  Description of Artificial Sequence: Synthetic oligonucleotide
  Sense strand starting at position 3115 of SEQ ID NO: 916397
aagggagaaucugccucaa

SEQ ID NO: 1153539 - RNA, 19 nt, Artificial Sequence
  Description of Artificial Sequence: Synthetic oligonucleotide
  Antisense strand to SEQ ID NO: 1153538
uugaggcagauucucccuu

SEQ ID NO: 1153540 - RNA, 19 nt, Artificial Sequence
  Description of Artificial Sequence: Synthetic oligonucleotide
  Sense strand starting at position 3127 of SEQ ID NO: 916397
gccucaaggaguuggagaa

SEQ ID NO: 1153541 - RNA, 19 nt, Artificial Sequence
  Description of Artificial Sequence: Synthetic oligonucleotide
  Antisense strand to SEQ ID NO: 1153540
uucuccaacuccuugaggc

SEQ ID NO: 1153542 - RNA, 19 nt, Artificial Sequence
  Description of Artificial Sequence: Synthetic oligonucleotide
  Sense strand starting at position 3174 of SEQ ID NO: 916397
ggagguuaguggagguguu

SEQ ID NO: 1153543 - RNA, 19 nt, Artificial Sequence
  Description of Artificial Sequence: Synthetic oligonucleotide
  Antisense strand to SEQ ID NO: 1153542
aacaccuccacuaaccucc

SEQ ID NO: 1153544 - RNA, 19 nt, Artificial Sequence
  Description of Artificial Sequence: Synthetic oligonucleotide
  Sense strand starting at position 3175 of SEQ ID NO: 916397
gagguuaguggagguguua

SEQ ID NO: 1153545 - RNA, 19 nt, Artificial Sequence
  Description of Artificial Sequence: Synthetic oligonucleotide
  Antisense strand to SEQ ID NO: 1153544
uaacaccuccacuaaccuc

SEQ ID NO: 1153546 - RNA, 19 nt, Artificial Sequence
  Description of Artificial Sequence: Synthetic oligonucleotide
  Sense strand starting at position 3279 of SEQ ID NO: 916397
agcaaucauccaugaggca

SEQ ID NO: 1153547 - RNA, 19 nt, Artificial Sequence
  Description of Artificial Sequence: Synthetic oligonucleotide
  Antisense strand to SEQ ID NO: 1153546
ugccucauggaugauugcu

SEQ ID NO: 1153548 - RNA, 19 nt, Artificial Sequence
  Description of Artificial Sequence: Synthetic oligonucleotide
  Sense strand starting at position 3423 of SEQ ID NO: 916397
gcuuccugagguuacaaau

SEQ ID NO: 1153549 - RNA, 19 nt, Artificial Sequence
  Description of Artificial Sequence: Synthetic oligonucleotide
  Antisense strand to SEQ ID NO: 1153548
auuuguaaccucaggaagc

SEQ ID NO: 1153550 - RNA, 19 nt, Artificial Sequence
  Description of Artificial Sequence: Synthetic oligonucleotide
  Sense strand starting at position 58 of SEQ ID NO: 916398
ggcacauucgaauaccuuu

SEQ ID NO: 1153551 - RNA, 19 nt, Artificial Sequence
  Description of Artificial Sequence: Synthetic oligonucleotide
  Antisense strand to SEQ ID NO: 1153550
aaagguauucgaaugugcc

SEQ ID NO: 1153552 - RNA, 19 nt, Artificial Sequence
  Description of Artificial Sequence: Synthetic oligonucleotide
  Sense strand starting at position 288 of SEQ ID NO: 916398
ggugacauuucccaaguuu

SEQ ID NO: 1153553 - RNA, 19 nt, Artificial Sequence
  Description of Artificial Sequence: Synthetic oligonucleotide
  Antisense strand to SEQ ID NO: 1153552
aaacuugggaaaugucacc

SEQ ID NO: 1153554 - RNA, 19 nt, Artificial Sequence
  Description of Artificial Sequence: Synthetic oligonucleotide
  Sense strand starting at position 460 of SEQ ID NO: 916398
ccaucugugaauuguguca

SEQ ID NO: 1153555 - RNA, 19 nt, Artificial Sequence
  Description of Artificial Sequence: Synthetic oligonucleotide
  Antisense strand to SEQ ID NO: 1153554
ugacacaauucacagaugg

SEQ ID NO: 1153556 - RNA, 19 nt, Artificial Sequence
  Description of Artificial Sequence: Synthetic oligonucleotide
  Sense strand starting at position 462 of SEQ ID NO: 916398
aucugugaauugugucaca

SEQ ID NO: 1153557 - RNA, 19 nt, Artificial Sequence
  Description of Artificial Sequence: Synthetic oligonucleotide
  Antisense strand to SEQ ID NO: 1153556
ugugacacaauucacagau

SEQ ID NO: 1153558 - RNA, 19 nt, Artificial Sequence
  Description of Artificial Sequence: Synthetic oligonucleotide
  Sense strand starting at position 567 of SEQ ID NO: 916398
acaggaauuucucaagaau

SEQ ID NO: 1153559 - RNA, 19 nt, Artificial Sequence
  Description of Artificial Sequence: Synthetic oligonucleotide
  Antisense strand to SEQ ID NO: 1153558
auucuugagaaauuccugu

SEQ ID NO: 1153560 - RNA, 19 nt, Artificial Sequence
  Description of Artificial Sequence: Synthetic oligonucleotide
  Sense strand starting at position 625 of SEQ ID NO: 916398
cagccuugaccggaaacau

SEQ ID NO: 1153561 - RNA, 19 nt, Artificial Sequence
  Description of Artificial Sequence: Synthetic oligonucleotide
  Antisense strand to SEQ ID NO: 1153560
auguuuccggucaaggcug

SEQ ID NO: 1153562 - RNA, 19 nt, Artificial Sequence
  Description of Artificial Sequence: Synthetic oligonucleotide
  Sense strand starting at position 682 of SEQ ID NO: 916398
cugccuuuccuccaagguu

SEQ ID NO: 1153563 - RNA, 19 nt, Artificial Sequence
  Description of Artificial Sequence: Synthetic oligonucleotide
  Antisense strand to SEQ ID NO: 1153562
aaccuuggaggaaaggcag

SEQ ID NO: 1153564 - RNA, 19 nt, Artificial Sequence
  Description of Artificial Sequence: Synthetic oligonucleotide
  Sense strand starting at position 690 of SEQ ID NO: 916398
ccuccaagguucuccagau

SEQ ID NO: 1153565 - RNA, 19 nt, Artificial Sequence
  Description of Artificial Sequence: Synthetic oligonucleotide
  Antisense strand to SEQ ID NO: 1153564
aucuggagaaccuuggagg

SEQ ID NO: 1153566 - RNA, 19 nt, Artificial Sequence
  Description of Artificial Sequence: Synthetic oligonucleotide
  Sense strand starting at position 892 of SEQ ID NO: 916398
gggaaauuucagugugccu

SEQ ID NO: 1153567 - RNA, 19 nt, Artificial Sequence
  Description of Artificial Sequence: Synthetic oligonucleotide
  Antisense strand to SEQ ID NO: 1153566
aggcacacugaaauuuccc

SEQ ID NO: 1153568 - RNA, 19 nt, Artificial Sequence
  Description of Artificial Sequence: Synthetic oligonucleotide
  Sense strand starting at position 1421 of SEQ ID NO: 916398
gagggacuucuuugcugca

SEQ ID NO: 1153569 - RNA, 19 nt, Artificial Sequence
  Description of Artificial Sequence: Synthetic oligonucleotide
  Antisense strand to SEQ ID NO: 1153568
ugcagcaaagaagucccuc

SEQ ID NO: 1153570 - RNA, 19 nt, Artificial Sequence
  Description of Artificial Sequence: Synthetic oligonucleotide
  Sense strand starting at position 1423 of SEQ ID NO: 916398
gggacuucuuugcugcaga

SEQ ID NO: 1153571 - RNA, 19 nt, Artificial Sequence
  Description of Artificial Sequence: Synthetic oligonucleotide
  Antisense strand to SEQ ID NO: 1153570
ucugcagcaaagaaguccc

SEQ ID NO: 1153572 - RNA, 19 nt, Artificial Sequence
  Description of Artificial Sequence: Synthetic oligonucleotide
  Sense strand starting at position 1426 of SEQ ID NO: 916398
acuucuuugcugcagaagu

SEQ ID NO: 1153573 - RNA, 19 nt, Artificial Sequence
  Description of Artificial Sequence: Synthetic oligonucleotide
  Antisense strand to SEQ ID NO: 1153572
acuucugcagcaaagaagu

SEQ ID NO: 1153574 - RNA, 19 nt, Artificial Sequence
  Description of Artificial Sequence: Synthetic oligonucleotide
  Sense strand starting at position 1428 of SEQ ID NO: 916398
uucuuugcugcagaaguua

SEQ ID NO: 1153575 - RNA, 19 nt, Artificial Sequence
  Description of Artificial Sequence: Synthetic oligonucleotide
  Antisense strand to SEQ ID NO: 1153574
uaacuucugcagcaaagaa

SEQ ID NO: 1153576 - RNA, 19 nt, Artificial Sequence
  Description of Artificial Sequence: Synthetic oligonucleotide
  Sense strand starting at position 1433 of SEQ ID NO: 916398
ugcugcagaaguuauuaga

SEQ ID NO: 1153577 - RNA, 19 nt, Artificial Sequence
  Description of Artificial Sequence: Synthetic oligonucleotide
  Antisense strand to SEQ ID NO: 1153576
ucuaauaacuucugcagca

SEQ ID NO: 1153578 - RNA, 19 nt, Artificial Sequence
  Description of Artificial Sequence: Synthetic oligonucleotide
  Sense strand starting at position 1566 of SEQ ID NO: 916398
gaagcaaacugguuguuga

SEQ ID NO: 1153579 - RNA, 19 nt, Artificial Sequence
  Description of Artificial Sequence: Synthetic oligonucleotide
  Antisense strand to SEQ ID NO: 1153578
ucaacaaccaguuugcuuc

SEQ ID NO: 1153580 - RNA, 19 nt, Artificial Sequence
  Description of Artificial Sequence: Synthetic oligonucleotide
  Sense strand starting at position 1657 of SEQ ID NO: 916398
ucagcagauucugguugau

SEQ ID NO: 1153581 - RNA, 19 nt, Artificial Sequence
  Description of Artificial Sequence: Synthetic oligonucleotide
  Antisense strand to SEQ ID NO: 1153580
aucaaccagaaucugcuga

SEQ ID NO: 1153582 - RNA, 19 nt, Artificial Sequence
  Description of Artificial Sequence: Synthetic oligonucleotide
  Sense strand starting at position 1660 of SEQ ID NO: 916398
gcagauucugguugauggu

SEQ ID NO: 1153583 - RNA, 19 nt, Artificial Sequence
  Description of Artificial Sequence: Synthetic oligonucleotide
  Antisense strand to SEQ ID NO: 1153582
accaucaaccagaaucugc

SEQ ID NO: 1153584 - RNA, 19 nt, Artificial Sequence
  Description of Artificial Sequence: Synthetic oligonucleotide
  Sense strand starting at position 1974 of SEQ ID NO: 916398
acagauugucaaggugugu

SEQ ID NO: 1153585 - RNA, 19 nt, Artificial Sequence
  Description of Artificial Sequence: Synthetic oligonucleotide
  Antisense strand to SEQ ID NO: 1153584
acacaccuugacaaucugu

SEQ ID NO: 1153586 - RNA, 19 nt, Artificial Sequence
  Description of Artificial Sequence: Synthetic oligonucleotide
  Sense strand starting at position 1980 of SEQ ID NO: 916398
ugucaaggugugugaguuu

SEQ ID NO: 1153587 - RNA, 19 nt, Artificial Sequence
  Description of Artificial Sequence: Synthetic oligonucleotide
  Antisense strand to SEQ ID NO: 1153586
aaacucacacaccuugaca

SEQ ID NO: 1153588 - RNA, 19 nt, Artificial Sequence
  Description of Artificial Sequence: Synthetic oligonucleotide
  Sense strand starting at position 2050 of SEQ ID NO: 916398
ggccuuggagagcaagaua

SEQ ID NO: 1153589 - RNA, 19 nt, Artificial Sequence
  Description of Artificial Sequence: Synthetic oligonucleotide
  Antisense strand to SEQ ID NO: 1153588
uaucuugcucuccaaggcc

SEQ ID NO: 1153590 - RNA, 19 nt, Artificial Sequence
  Description of Artificial Sequence: Synthetic oligonucleotide
  Sense strand starting at position 2061 of SEQ ID NO: 916398
gcaagauacucuugaccug

SEQ ID NO: 1153591 - RNA, 19 nt, Artificial Sequence
  Description of Artificial Sequence: Synthetic oligonucleotide
  Antisense strand to SEQ ID NO: 1153590
caggucaagaguaucuugc

SEQ ID NO: 1153592 - RNA, 19 nt, Artificial Sequence
  Description of Artificial Sequence: Synthetic oligonucleotide
  Sense strand starting at position 2112 of SEQ ID NO: 916398
cucugacgugccuggagaa

SEQ ID NO: 1153593 - RNA, 19 nt, Artificial Sequence
  Description of Artificial Sequence: Synthetic oligonucleotide
  Antisense strand to SEQ ID NO: 1153592
uucuccaggcacgucagag

SEQ ID NO: 1153594 - RNA, 19 nt, Artificial Sequence
  Description of Artificial Sequence: Synthetic oligonucleotide
  Sense strand starting at position 2113 of SEQ ID NO: 916398
ucugacgugccuggagaau

SEQ ID NO: 1153595 - RNA, 19 nt, Artificial Sequence
  Description of Artificial Sequence: Synthetic oligonucleotide
  Antisense strand to SEQ ID NO: 1153594
auucuccaggcacgucaga

SEQ ID NO: 1153596 - RNA, 19 nt, Artificial Sequence
  Description of Artificial Sequence: Synthetic oligonucleotide
  Sense strand starting at position 2203 of SEQ ID NO: 916398
gagaaauaggcaugcccaa

SEQ ID NO: 1153597 - RNA, 19 nt, Artificial Sequence
  Description of Artificial Sequence: Synthetic oligonucleotide
  Antisense strand to SEQ ID NO: 1153596
uugggcaugccuauuucuc

SEQ ID NO: 1153598 - RNA, 19 nt, Artificial Sequence
  Description of Artificial Sequence: Synthetic oligonucleotide
  Sense strand starting at position 2247 of SEQ ID NO: 916398
ggaugucagugcugaggga

SEQ ID NO: 1153599 - RNA, 19 nt, Artificial Sequence
  Description of Artificial Sequence: Synthetic oligonucleotide
  Antisense strand to SEQ ID NO: 1153598
ucccucagcacugacaucc

SEQ ID NO: 1153600 - RNA, 19 nt, Artificial Sequence
  Description of Artificial Sequence: Synthetic oligonucleotide
  Sense strand starting at position 2270 of SEQ ID NO: 916398
gagggauggccggagcaaa

SEQ ID NO: 1153601 - RNA, 19 nt, Artificial Sequence
  Description of Artificial Sequence: Synthetic oligonucleotide
  Antisense strand to SEQ ID NO: 1153600
uuugcuccggccaucccuc

SEQ ID NO: 1153602 - RNA, 19 nt, Artificial Sequence
  Description of Artificial Sequence: Synthetic oligonucleotide
  Sense strand starting at position 2404 of SEQ ID NO: 916398
aagggagaaucugccucaa

SEQ ID NO: 1153603 - RNA, 19 nt, Artificial Sequence
  Description of Artificial Sequence: Synthetic oligonucleotide
  Antisense strand to SEQ ID NO: 1153602
uugaggcagauucucccuu

SEQ ID NO: 1153604 - RNA, 19 nt, Artificial Sequence
  Description of Artificial Sequence: Synthetic oligonucleotide
  Sense strand starting at position 2416 of SEQ ID NO: 916398
gccucaaggaguuggagaa

SEQ ID NO: 1153605 - RNA, 19 nt, Artificial Sequence
  Description of Artificial Sequence: Synthetic oligonucleotide
  Antisense strand to SEQ ID NO: 1153604
uucuccaacuccuugaggc

SEQ ID NO: 1153606 - RNA, 19 nt, Artificial Sequence
  Description of Artificial Sequence: Synthetic oligonucleotide
  Sense strand starting at position 2463 of SEQ ID NO: 916398
ggagguuaguggagguguu

SEQ ID NO: 1153607 - RNA, 19 nt, Artificial Sequence
  Description of Artificial Sequence: Synthetic oligonucleotide
  Antisense strand to SEQ ID NO: 1153606
aacaccuccacuaaccucc

SEQ ID NO: 1153608 - RNA, 19 nt, Artificial Sequence
  Description of Artificial Sequence: Synthetic oligonucleotide
  Sense strand starting at position 2464 of SEQ ID NO: 916398
gagguuaguggagguguua

SEQ ID NO: 1153609 - RNA, 19 nt, Artificial Sequence
  Description of Artificial Sequence: Synthetic oligonucleotide
  Antisense strand to SEQ ID NO: 1153608
uaacaccuccacuaaccuc

SEQ ID NO: 1153610 - RNA, 19 nt, Artificial Sequence
  Description of Artificial Sequence: Synthetic oligonucleotide
  Sense strand starting at position 2568 of SEQ ID NO: 916398
agcaaucauccaugaggca

SEQ ID NO: 1153611 - RNA, 19 nt, Artificial Sequence
  Description of Artificial Sequence: Synthetic oligonucleotide
  Antisense strand to SEQ ID NO: 1153610
ugccucauggaugauugcu

SEQ ID NO: 1153612 - RNA, 19 nt, Artificial Sequence
  Description of Artificial Sequence: Synthetic oligonucleotide
  Sense strand starting at position 2712 of SEQ ID NO: 916398
gcuuccugagguuacaaau

SEQ ID NO: 1153613 - RNA, 19 nt, Artificial Sequence
  Description of Artificial Sequence: Synthetic oligonucleotide
  Antisense strand to SEQ ID NO: 1153612
auuuguaaccucaggaagc

SEQ ID NO: 1153614 - RNA, 19 nt, Artificial Sequence
  Description of Artificial Sequence: Synthetic oligonucleotide
  Sense strand starting at position 3454 of SEQ ID NO: 916398
cugccucuggccugaaagu

SEQ ID NO: 1153615 - RNA, 19 nt, Artificial Sequence
  Description of Artificial Sequence: Synthetic oligonucleotide
  Antisense strand to SEQ ID NO: 1153614
acuuucaggccagaggcag

SEQ ID NO: 1153616 - RNA, 19 nt, Artificial Sequence
  Description of Artificial Sequence: Synthetic oligonucleotide
  Sense strand starting at position 3465 of SEQ ID NO: 916398
cugaaagucugguggguga

SEQ ID NO: 1153617 - RNA, 19 nt, Artificial Sequence
  Description of Artificial Sequence: Synthetic oligonucleotide
  Antisense strand to SEQ ID NO: 1153616
ucacccaccagacuuucag

SEQ ID NO: 1153618 - RNA, 19 nt, Artificial Sequence
  Description of Artificial Sequence: Synthetic oligonucleotide
  Sense strand starting at position 3632 of SEQ ID NO: 916398
uuucuuauuuacguggcaa

SEQ ID NO: 1153619 - RNA, 19 nt, Artificial Sequence
  Description of Artificial Sequence: Synthetic oligonucleotide
  Antisense strand to SEQ ID NO: 1153618
uugccacguaaauaagaaa

SEQ ID NO: 1153620 - RNA, 19 nt, Artificial Sequence
  Description of Artificial Sequence: Synthetic oligonucleotide
  Sense strand starting at position 3633 of SEQ ID NO: 916398
uucuuauuuacguggcaag

SEQ ID NO: 1153621 - RNA, 19 nt, Artificial Sequence
  Description of Artificial Sequence: Synthetic oligonucleotide
  Antisense strand to SEQ ID NO: 1153620
cuugccacguaaauaagaa

SEQ ID NO: 1153622 - RNA, 19 nt, Artificial Sequence
  Description of Artificial Sequence: Synthetic oligonucleotide
  Sense strand starting at position 3718 of SEQ ID NO: 916398
gggcuuugacaaugcaacu

SEQ ID NO: 1153623 - RNA, 19 nt, Artificial Sequence
  Description of Artificial Sequence: Synthetic oligonucleotide
  Antisense strand to SEQ ID NO: 1153622
aguugcauugucaaagccc

SEQ ID NO: 1153624 - RNA, 19 nt, Artificial Sequence
  Description of Artificial Sequence: Synthetic oligonucleotide
  Sense strand starting at position 3773 of SEQ ID NO: 916398
acucaagagaugugcuaug

SEQ ID NO: 1153625 - RNA, 19 nt, Artificial Sequence
  Description of Artificial Sequence: Synthetic oligonucleotide
  Antisense strand to SEQ ID NO: 1153624
cauagcacaucucuugagu

SEQ ID NO: 1153626 - RNA, 19 nt, Artificial Sequence
  Description of Artificial Sequence: Synthetic oligonucleotide
  Sense strand starting at position 3778 of SEQ ID NO: 916398
agagaugugcuaugaggaa

SEQ ID NO: 1153627 - RNA, 19 nt, Artificial Sequence
  Description of Artificial Sequence: Synthetic oligonucleotide
  Antisense strand to SEQ ID NO: 1153626
uuccucauagcacaucucu

SEQ ID NO: 1153628 - RNA, 19 nt, Artificial Sequence
  Description of Artificial Sequence: Synthetic oligonucleotide
  Sense strand starting at position 3793 of SEQ ID NO: 916398
ggaagucacucuuagcaau

SEQ ID NO: 1153629 - RNA, 19 nt, Artificial Sequence
  Description of Artificial Sequence: Synthetic oligonucleotide
  Antisense strand to SEQ ID NO: 1153628
auugcuaagagugacuucc

SEQ ID NO: 1153630 - RNA, 19 nt, Artificial Sequence
  Description of Artificial Sequence: Synthetic oligonucleotide
  Sense strand starting at position 2 of SEQ ID NO: 916399
auuggugaacugggugaaa

SEQ ID NO: 1153631 - RNA, 19 nt, Artificial Sequence
  Description of Artificial Sequence: Synthetic oligonucleotide
  Antisense strand to SEQ ID NO: 1153630
uuucacccaguucaccaau

SEQ ID NO: 1153632 - RNA, 19 nt, Artificial Sequence
  Description of Artificial Sequence: Synthetic oligonucleotide
  Sense strand starting at position 4 of SEQ ID NO: 916399
uggugaacugggugaaaga

SEQ ID NO: 1153633 - RNA, 19 nt, Artificial Sequence
  Description of Artificial Sequence: Synthetic oligonucleotide
  Antisense strand to SEQ ID NO: 1153632
ucuuucacccaguucacca

SEQ ID NO: 1153634 - RNA, 19 nt, Artificial Sequence
  Description of Artificial Sequence: Synthetic oligonucleotide
  Sense strand starting at position 37 of SEQ ID NO: 916399
guuguacuauucuugcaac

SEQ ID NO: 1153635 - RNA, 19 nt, Artificial Sequence
  Description of Artificial Sequence: Synthetic oligonucleotide
  Antisense strand to SEQ ID NO: 1153634
guugcaagaauaguacaac

SEQ ID NO: 1153636 - RNA, 19 nt, Artificial Sequence
  Description of Artificial Sequence: Synthetic oligonucleotide
  Sense strand starting at position 172 of SEQ ID NO: 916399
gagaguucuuggcccagcu

SEQ ID NO: 1153637 - RNA, 19 nt, Artificial Sequence
  Description of Artificial Sequence: Synthetic oligonucleotide
  Antisense strand to SEQ ID NO: 1153636
agcugggccaagaacucuc

SEQ ID NO: 1153638 - RNA, 19 nt, Artificial Sequence
  Description of Artificial Sequence: Synthetic oligonucleotide
  Sense strand starting at position 238 of SEQ ID NO: 916399
cugcaauccugagaaaggu

SEQ ID NO: 1153639 - RNA, 19 nt, Artificial Sequence
  Description of Artificial Sequence: Synthetic oligonucleotide
  Antisense strand to SEQ ID NO: 1153638
accuuucucaggauugcag

SEQ ID NO: 1153640 - RNA, 19 nt, Artificial Sequence
  Description of Artificial Sequence: Synthetic oligonucleotide
  Sense strand starting at position 263 of SEQ ID NO: 916399
uuguuuggccucugggaca

SEQ ID NO: 1153641 - RNA, 19 nt, Artificial Sequence
  Description of Artificial Sequence: Synthetic oligonucleotide
  Antisense strand to SEQ ID NO: 1153640
ugucccagaggccaaacaa

SEQ ID NO: 1153642 - RNA, 19 nt, Artificial Sequence
  Description of Artificial Sequence: Synthetic oligonucleotide
  Sense strand starting at position 433 of SEQ ID NO: 916399
ugccuauugugagcaguaa

SEQ ID NO: 1153643 - RNA, 19 nt, Artificial Sequence
  Description of Artificial Sequence: Synthetic oligonucleotide
  Antisense strand to SEQ ID NO: 1153642
uuacugcucacaauaggca

SEQ ID NO: 1153644 - RNA, 19 nt, Artificial Sequence
  Description of Artificial Sequence: Synthetic oligonucleotide
  Sense strand starting at position 434 of SEQ ID NO: 916399
gccuauugugagcaguaac

SEQ ID NO: 1153645 - RNA, 19 nt, Artificial Sequence
  Description of Artificial Sequence: Synthetic oligonucleotide
  Antisense strand to SEQ ID NO: 1153644
guuacugcucacaauaggc

SEQ ID NO: 1153646 - RNA, 19 nt, Artificial Sequence
  Description of Artificial Sequence: Synthetic oligonucleotide
  Sense strand starting at position 437 of SEQ ID NO: 916399
uauugugagcaguaacaac

SEQ ID NO: 1153647 - RNA, 19 nt, Artificial Sequence
  Description of Artificial Sequence: Synthetic oligonucleotide
  Antisense strand to SEQ ID NO: 1153646
guuguuacugcucacaaua

SEQ ID NO: 1153648 - RNA, 19 nt, Artificial Sequence
  Description of Artificial Sequence: Synthetic oligonucleotide
  Sense strand starting at position 521 of SEQ ID NO: 916399
uuguaucauccugggcaaa

SEQ ID NO: 1153649 - RNA, 19 nt, Artificial Sequence
  Description of Artificial Sequence: Synthetic oligonucleotide
  Antisense strand to SEQ ID NO: 1153648
uuugcccaggaugauacaa

SEQ ID NO: 1153650 - RNA, 19 nt, Artificial Sequence
  Description of Artificial Sequence: Synthetic oligonucleotide
  Sense strand starting at position 522 of SEQ ID NO: 916399
uguaucauccugggcaaau

SEQ ID NO: 1153651 - RNA, 19 nt, Artificial Sequence
  Description of Artificial Sequence: Synthetic oligonucleotide
  Antisense strand to SEQ ID NO: 1153650
auuugcccaggaugauaca

SEQ ID NO: 1153652 - RNA, 19 nt, Artificial Sequence
  Description of Artificial Sequence: Synthetic oligonucleotide
  Sense strand starting at position 523 of SEQ ID NO: 916399
guaucauccugggcaaauc

SEQ ID NO: 1153653 - RNA, 19 nt, Artificial Sequence
  Description of Artificial Sequence: Synthetic oligonucleotide
  Antisense strand to SEQ ID NO: 1153652
gauuugcccaggaugauac

SEQ ID NO: 1153654 - RNA, 19 nt, Artificial Sequence
  Description of Artificial Sequence: Synthetic oligonucleotide
  Sense strand starting at position 542 of SEQ ID NO: 916399
acuugagcucucuagaccu

SEQ ID NO: 1153655 - RNA, 19 nt, Artificial Sequence
  Description of Artificial Sequence: Synthetic oligonucleotide
  Antisense strand to SEQ ID NO: 1153654
aggucuagagagcucaagu

SEQ ID NO: 1153656 - RNA, 19 nt, Artificial Sequence
  Description of Artificial Sequence: Synthetic oligonucleotide
  Sense strand starting at position 640 of SEQ ID NO: 916399
aagggaugugcauguucuu

SEQ ID NO: 1153657 - RNA, 19 nt, Artificial Sequence
  Description of Artificial Sequence: Synthetic oligonucleotide
  Antisense strand to SEQ ID NO: 1153656
aagaacaugcacaucccuu

SEQ ID NO: 1153658 - RNA, 19 nt, Artificial Sequence
  Description of Artificial Sequence: Synthetic oligonucleotide
  Sense strand starting at position 645 of SEQ ID NO: 916399
augugcauguucuucggaa

SEQ ID NO: 1153659 - RNA, 19 nt, Artificial Sequence
  Description of Artificial Sequence: Synthetic oligonucleotide
  Antisense strand to SEQ ID NO: 1153658
uuccgaagaacaugcacau

SEQ ID NO: 1153660 - RNA, 19 nt, Artificial Sequence
  Description of Artificial Sequence: Synthetic oligonucleotide
  Sense strand starting at position 646 of SEQ ID NO: 916399
ugugcauguucuucggaaa

SEQ ID NO: 1153661 - RNA, 19 nt, Artificial Sequence
  Description of Artificial Sequence: Synthetic oligonucleotide
  Antisense strand to SEQ ID NO: 1153660
uuuccgaagaacaugcaca

SEQ ID NO: 1153662 - RNA, 19 nt, Artificial Sequence
  Description of Artificial Sequence: Synthetic oligonucleotide
  Sense strand starting at position 647 of SEQ ID NO: 916399
gugcauguucuucggaaac

SEQ ID NO: 1153663 - RNA, 19 nt, Artificial Sequence
  Description of Artificial Sequence: Synthetic oligonucleotide
  Antisense strand to SEQ ID NO: 1153662
guuuccgaagaacaugcac

SEQ ID NO: 1153664 - RNA, 19 nt, Artificial Sequence
  Description of Artificial Sequence: Synthetic oligonucleotide
  Sense strand starting at position 685 of SEQ ID NO: 916399
gguacauuugucugccaga

SEQ ID NO: 1153665 - RNA, 19 nt, Artificial Sequence
  Description of Artificial Sequence: Synthetic oligonucleotide
  Antisense strand to SEQ ID NO: 1153664
ucuggcagacaaauguacc

SEQ ID NO: 1153666 - RNA, 19 nt, Artificial Sequence
  Description of Artificial Sequence: Synthetic oligonucleotide
  Sense strand starting at position 686 of SEQ ID NO: 916399
guacauuugucugccagac

SEQ ID NO: 1153667 - RNA, 19 nt, Artificial Sequence
  Description of Artificial Sequence: Synthetic oligonucleotide
  Antisense strand to SEQ ID NO: 1153666
gucuggcagacaaauguac

SEQ ID NO: 1153668 - RNA, 19 nt, Artificial Sequence
  Description of Artificial Sequence: Synthetic oligonucleotide
  Sense strand starting at position 688 of SEQ ID NO: 916399
acauuugucugccagaccu

SEQ ID NO: 1153669 - RNA, 19 nt, Artificial Sequence
  Description of Artificial Sequence: Synthetic oligonucleotide
  Antisense strand to SEQ ID NO: 1153668
aggucuggcagacaaaugu

SEQ ID NO: 1153670 - RNA, 19 nt, Artificial Sequence
  Description of Artificial Sequence: Synthetic oligonucleotide
  Sense strand starting at position 746 of SEQ ID NO: 916399
ggacaaugccagcgaaaca

SEQ ID NO: 1153671 - RNA, 19 nt, Artificial Sequence
  Description of Artificial Sequence: Synthetic oligonucleotide
  Antisense strand to SEQ ID NO: 1153670
uguuucgcuggcauugucc

SEQ ID NO: 1153672 - RNA, 19 nt, Artificial Sequence
  Description of Artificial Sequence: Synthetic oligonucleotide
  Sense strand starting at position 780 of SEQ ID NO: 916399
gcacaaguguugcucccau

SEQ ID NO: 1153673 - RNA, 19 nt, Artificial Sequence
  Description of Artificial Sequence: Synthetic oligonucleotide
  Antisense strand to SEQ ID NO: 1153672
augggagcaacacuugugc

SEQ ID NO: 1153674 - RNA, 19 nt, Artificial Sequence
  Description of Artificial Sequence: Synthetic oligonucleotide
  Sense strand starting at position 1055 of SEQ ID NO: 916399
ugcucuuagccuugaacaa

SEQ ID NO: 1153675 - RNA, 19 nt, Artificial Sequence
  Description of Artificial Sequence: Synthetic oligonucleotide
  Antisense strand to SEQ ID NO: 1153674
uuguucaaggcuaagagca

SEQ ID NO: 1153676 - RNA, 19 nt, Artificial Sequence
  Description of Artificial Sequence: Synthetic oligonucleotide
  Sense strand starting at position 1056 of SEQ ID NO: 916399
gcucuuagccuugaacaac

SEQ ID NO: 1153677 - RNA, 19 nt, Artificial Sequence
  Description of Artificial Sequence: Synthetic oligonucleotide
  Antisense strand to SEQ ID NO: 1153676
guuguucaaggcuaagagc

SEQ ID NO: 1153678 - RNA, 19 nt, Artificial Sequence
  Description of Artificial Sequence: Synthetic oligonucleotide
  Sense strand starting at position 1203 of SEQ ID NO: 916399
cguauuaaucaugguggua

SEQ ID NO: 1153679 - RNA, 19 nt, Artificial Sequence
  Description of Artificial Sequence: Synthetic oligonucleotide
  Antisense strand to SEQ ID NO: 1153678
uaccaccaugauuaauacg

SEQ ID NO: 1153680 - RNA, 19 nt, Artificial Sequence
  Description of Artificial Sequence: Synthetic oligonucleotide
  Sense strand starting at position 1208 of SEQ ID NO: 916399
uaaucauggugguaggaca

SEQ ID NO: 1153681 - RNA, 19 nt, Artificial Sequence
  Description of Artificial Sequence: Synthetic oligonucleotide
  Antisense strand to SEQ ID NO: 1153680
uguccuaccaccaugauua

SEQ ID NO: 1153682 - RNA, 19 nt, Artificial Sequence
  Description of Artificial Sequence: Synthetic oligonucleotide
  Sense strand starting at position 1365 of SEQ ID NO: 916399
gcuccagagcucuaucaac

SEQ ID NO: 1153683 - RNA, 19 nt, Artificial Sequence
  Description of Artificial Sequence: Synthetic oligonucleotide
  Antisense strand to SEQ ID NO: 1153682
guugauagagcucuggagc

SEQ ID NO: 1153684 - RNA, 19 nt, Artificial Sequence
  Description of Artificial Sequence: Synthetic oligonucleotide
  Sense strand starting at position 1781 of SEQ ID NO: 916399
agaggcuucggcugccaaa

SEQ ID NO: 1153685 - RNA, 19 nt, Artificial Sequence
  Description of Artificial Sequence: Synthetic oligonucleotide
  Antisense strand to SEQ ID NO: 1153684
uuuggcagccgaagccucu

SEQ ID NO: 1153686 - RNA, 19 nt, Artificial Sequence
  Description of Artificial Sequence: Synthetic oligonucleotide
  Sense strand starting at position 1934 of SEQ ID NO: 916399
uggaguauguuugccgaga

SEQ ID NO: 1153687 - RNA, 19 nt, Artificial Sequence
  Description of Artificial Sequence: Synthetic oligonucleotide
  Antisense strand to SEQ ID NO: 1153686
ucucggcaaacauacucca

SEQ ID NO: 1153688 - RNA, 19 nt, Artificial Sequence
  Description of Artificial Sequence: Synthetic oligonucleotide
  Sense strand starting at position 1935 of SEQ ID NO: 916399
ggaguauguuugccgagag

SEQ ID NO: 1153689 - RNA, 19 nt, Artificial Sequence
  Description of Artificial Sequence: Synthetic oligonucleotide
  Antisense strand to SEQ ID NO: 1153688
cucucggcaaacauacucc

SEQ ID NO: 1153690 - RNA, 19 nt, Artificial Sequence
  Description of Artificial Sequence: Synthetic oligonucleotide
  Sense strand starting at position 1938 of SEQ ID NO: 916399
guauguuugccgagagacg

SEQ ID NO: 1153691 - RNA, 19 nt, Artificial Sequence
  Description of Artificial Sequence: Synthetic oligonucleotide
  Antisense strand to SEQ ID NO: 1153690
cgucucucggcaaacauac

SEQ ID NO: 1153692 - RNA, 19 nt, Artificial Sequence
  Description of Artificial Sequence: Synthetic oligonucleotide
  Sense strand starting at position 2339 of SEQ ID NO: 916399
cccagaggccacugucaau

SEQ ID NO: 1153693 - RNA, 19 nt, Artificial Sequence
  Description of Artificial Sequence: Synthetic oligonucleotide
  Antisense strand to SEQ ID NO: 1153692
auugacaguggccucuggg

SEQ ID NO: 1153694 - RNA, 19 nt, Artificial Sequence
  Description of Artificial Sequence: Synthetic oligonucleotide
  Sense strand starting at position 2353 of SEQ ID NO: 916399
ucaauagggcucuguucua

SEQ ID NO: 1153695 - RNA, 19 nt, Artificial Sequence
  Description of Artificial Sequence: Synthetic oligonucleotide
  Antisense strand to SEQ ID NO: 1153694
uagaacagagcccuauuga

SEQ ID NO: 1153696 - RNA, 19 nt, Artificial Sequence
  Description of Artificial Sequence: Synthetic oligonucleotide
  Sense strand starting at position 2595 of SEQ ID NO: 916399
agagccuucugggaaguga

SEQ ID NO: 1153697 - RNA, 19 nt, Artificial Sequence
  Description of Artificial Sequence: Synthetic oligonucleotide
  Antisense strand to SEQ ID NO: 1153696
ucacuucccagaaggcucu

SEQ ID NO: 1153698 - RNA, 19 nt, Artificial Sequence
  Description of Artificial Sequence: Synthetic oligonucleotide
  Sense strand starting at position 2745 of SEQ ID NO: 916399
cauucuuauggaggcugaa

SEQ ID NO: 1153699 - RNA, 19 nt, Artificial Sequence
  Description of Artificial Sequence: Synthetic oligonucleotide
  Antisense strand to SEQ ID NO: 1153698
uucagccuccauaagaaug

SEQ ID NO: 1153700 - RNA, 19 nt, Artificial Sequence
  Description of Artificial Sequence: Synthetic oligonucleotide
  Sense strand starting at position 2788 of SEQ ID NO: 916399
accugagaucccugagccu

SEQ ID NO: 1153701 - RNA, 19 nt, Artificial Sequence
  Description of Artificial Sequence: Synthetic oligonucleotide
  Antisense strand to SEQ ID NO: 1153700
aggcucagggaucucaggu

SEQ ID NO: 1153702 - RNA, 19 nt, Artificial Sequence
  Description of Artificial Sequence: Synthetic oligonucleotide
  Sense strand starting at position 3190 of SEQ ID NO: 916399
gcaagaagaugggcucaaa

SEQ ID NO: 1153703 - RNA, 19 nt, Artificial Sequence
  Description of Artificial Sequence: Synthetic oligonucleotide
  Antisense strand to SEQ ID NO: 1153702
uuugagcccaucuucuugc

SEQ ID NO: 1153704 - RNA, 19 nt, Artificial Sequence
  Description of Artificial Sequence: Synthetic oligonucleotide
  Sense strand starting at position 3466 of SEQ ID NO: 916399
guugcuugaagagguugaa

SEQ ID NO: 1153705 - RNA, 19 nt, Artificial Sequence
  Description of Artificial Sequence: Synthetic oligonucleotide
  Antisense strand to SEQ ID NO: 1153704
uucaaccucuucaagcaac

SEQ ID NO: 1153706 - RNA, 19 nt, Artificial Sequence
  Description of Artificial Sequence: Synthetic oligonucleotide
  Sense strand starting at position 3871 of SEQ ID NO: 916399
uugucagcccucugaguca

SEQ ID NO: 1153707 - RNA, 19 nt, Artificial Sequence
  Description of Artificial Sequence: Synthetic oligonucleotide
  Antisense strand to SEQ ID NO: 1153706
ugacucagagggcugacaa

SEQ ID NO: 1153708 - RNA, 19 nt, Artificial Sequence
  Description of Artificial Sequence: Synthetic oligonucleotide
  Sense strand starting at position 3912 of SEQ ID NO: 916399
gugagaggcagucgauaaa

SEQ ID NO: 1153709 - RNA, 19 nt, Artificial Sequence
  Description of Artificial Sequence: Synthetic oligonucleotide
  Antisense strand to SEQ ID NO: 1153708
uuuaucgacugccucucac

SEQ ID NO: 1153710 - RNA, 19 nt, Artificial Sequence
  Description of Artificial Sequence: Synthetic oligonucleotide
  Sense strand starting at position 160 of SEQ ID NO: 916400
gaugauaauguuuguaaag

SEQ ID NO: 1153711 - RNA, 19 nt, Artificial Sequence
  Description of Artificial Sequence: Synthetic oligonucleotide
  Antisense strand to SEQ ID NO: 1153710
cuuuacaaacauuaucauc

SEQ ID NO: 1153712 - RNA, 19 nt, Artificial Sequence
  Description of Artificial Sequence: Synthetic oligonucleotide
  Sense strand starting at position 207 of SEQ ID NO: 916400
aagauaauugcuuguauag

SEQ ID NO: 1153713 - RNA, 19 nt, Artificial Sequence
  Description of Artificial Sequence: Synthetic oligonucleotide
  Antisense strand to SEQ ID NO: 1153712
cuauacaagcaauuaucuu

SEQ ID NO: 1153714 - RNA, 19 nt, Artificial Sequence
  Description of Artificial Sequence: Synthetic oligonucleotide
  Sense strand starting at position 242 of SEQ ID NO: 916400
acacuacugugaugggaaa

SEQ ID NO: 1153715 - RNA, 19 nt, Artificial Sequence
  Description of Artificial Sequence: Synthetic oligonucleotide
  Antisense strand to SEQ ID NO: 1153714
uuucccaucacaguagugu

SEQ ID NO: 1153716 - RNA, 19 nt, Artificial Sequence
  Description of Artificial Sequence: Synthetic oligonucleotide
  Sense strand starting at position 394 of SEQ ID NO: 916400
ggagcauccucuccuuaac

SEQ ID NO: 1153717 - RNA, 19 nt, Artificial Sequence
  Description of Artificial Sequence: Synthetic oligonucleotide
  Antisense strand to SEQ ID NO: 1153716
guuaaggagaggaugcucc

SEQ ID NO: 1153718 - RNA, 19 nt, Artificial Sequence
  Description of Artificial Sequence: Synthetic oligonucleotide
  Sense strand starting at position 503 of SEQ ID NO: 916400
ggaggaugcgucuguggaa

SEQ ID NO: 1153719 - RNA, 19 nt, Artificial Sequence
  Description of Artificial Sequence: Synthetic oligonucleotide
  Antisense strand to SEQ ID NO: 1153718
uuccacagacgcauccucc

SEQ ID NO: 1153720 - RNA, 19 nt, Artificial Sequence
  Description of Artificial Sequence: Synthetic oligonucleotide
  Sense strand starting at position 504 of SEQ ID NO: 916400
gaggaugcgucuguggaaa

SEQ ID NO: 1153721 - RNA, 19 nt, Artificial Sequence
  Description of Artificial Sequence: Synthetic oligonucleotide
  Antisense strand to SEQ ID NO: 1153720
uuuccacagacgcauccuc

SEQ ID NO: 1153722 - RNA, 19 nt, Artificial Sequence
  Description of Artificial Sequence: Synthetic oligonucleotide
  Sense strand starting at position 541 of SEQ ID NO: 916400
ccuucucacugguccuaga

SEQ ID NO: 1153723 - RNA, 19 nt, Artificial Sequence
  Description of Artificial Sequence: Synthetic oligonucleotide
  Antisense strand to SEQ ID NO: 1153722
ucuaggaccagugagaagg

SEQ ID NO: 1153724 - RNA, 19 nt, Artificial Sequence
  Description of Artificial Sequence: Synthetic oligonucleotide
  Sense strand starting at position 613 of SEQ ID NO: 916400
gggcaaggccgggaugauu

SEQ ID NO: 1153725 - RNA, 19 nt, Artificial Sequence
  Description of Artificial Sequence: Synthetic oligonucleotide
  Antisense strand to SEQ ID NO: 1153724
aaucaucccggccuugccc

SEQ ID NO: 1153726 - RNA, 19 nt, Artificial Sequence
  Description of Artificial Sequence: Synthetic oligonucleotide
  Sense strand starting at position 694 of SEQ ID NO: 916400
cucacuauuuccuguagua

SEQ ID NO: 1153727 - RNA, 19 nt, Artificial Sequence
  Description of Artificial Sequence: Synthetic oligonucleotide
  Antisense strand to SEQ ID NO: 1153726
uacuacaggaaauagugag

SEQ ID NO: 1153728 - RNA, 19 nt, Artificial Sequence
  Description of Artificial Sequence: Synthetic oligonucleotide
  Sense strand starting at position 975 of SEQ ID NO: 916400
gucugaaauggucaccauu

SEQ ID NO: 1153729 - RNA, 19 nt, Artificial Sequence
  Description of Artificial Sequence: Synthetic oligonucleotide
  Antisense strand to SEQ ID NO: 1153728
aauggugaccauuucagac

SEQ ID NO: 1153730 - RNA, 19 nt, Artificial Sequence
  Description of Artificial Sequence: Synthetic oligonucleotide
  Sense strand starting at position 1104 of SEQ ID NO: 916400
aagggaucucuuuggcgga

SEQ ID NO: 1153731 - RNA, 19 nt, Artificial Sequence
  Description of Artificial Sequence: Synthetic oligonucleotide
  Antisense strand to SEQ ID NO: 1153730
uccgccaaagagaucccuu

SEQ ID NO: 1153732 - RNA, 19 nt, Artificial Sequence
  Description of Artificial Sequence: Synthetic oligonucleotide
  Sense strand starting at position 1134 of SEQ ID NO: 916400
agagauagauuaggaugau

SEQ ID NO: 1153733 - RNA, 19 nt, Artificial Sequence
  Description of Artificial Sequence: Synthetic oligonucleotide
  Antisense strand to SEQ ID NO: 1153732
aucauccuaaucuaucucu

SEQ ID NO: 1153734 - RNA, 19 nt, Artificial Sequence
  Description of Artificial Sequence: Synthetic oligonucleotide
  Sense strand starting at position 1135 of SEQ ID NO: 916400
gagauagauuaggaugauu

SEQ ID NO: 1153735 - RNA, 19 nt, Artificial Sequence
  Description of Artificial Sequence: Synthetic oligonucleotide
  Antisense strand to SEQ ID NO: 1153734
aaucauccuaaucuaucuc

SEQ ID NO: 1153736 - RNA, 19 nt, Artificial Sequence
  Description of Artificial Sequence: Synthetic oligonucleotide
  Sense strand starting at position 1242 of SEQ ID NO: 916400
gggcaauacuaucaccuca

SEQ ID NO: 1153737 - RNA, 19 nt, Artificial Sequence
  Description of Artificial Sequence: Synthetic oligonucleotide
  Antisense strand to SEQ ID NO: 1153736
ugaggugauaguauugccc

SEQ ID NO: 1153738 - RNA, 19 nt, Artificial Sequence
  Description of Artificial Sequence: Synthetic oligonucleotide
  Sense strand starting at position 1268 of SEQ ID NO: 916400
cucuguuccugaguucuag

SEQ ID NO: 1153739 - RNA, 19 nt, Artificial Sequence
  Description of Artificial Sequence: Synthetic oligonucleotide
  Antisense strand to SEQ ID NO: 1153738
cuagaacucaggaacagag

SEQ ID NO: 1153740 - RNA, 19 nt, Artificial Sequence
  Description of Artificial Sequence: Synthetic oligonucleotide
  Sense strand starting at position 1274 of SEQ ID NO: 916400
uccugaguucuaggguuua

SEQ ID NO: 1153741 - RNA, 19 nt, Artificial Sequence
  Description of Artificial Sequence: Synthetic oligonucleotide
  Antisense strand to SEQ ID NO: 1153740
uaaacccuagaacucagga

SEQ ID NO: 1153742 - RNA, 19 nt, Artificial Sequence
  Description of Artificial Sequence: Synthetic oligonucleotide
  Sense strand starting at position 1338 of SEQ ID NO: 916400
cccucuaucuuagaggaca

SEQ ID NO: 1153743 - RNA, 19 nt, Artificial Sequence
  Description of Artificial Sequence: Synthetic oligonucleotide
  Antisense strand to SEQ ID NO: 1153742
uguccucuaagauagaggg

SEQ ID NO: 1153744 - RNA, 19 nt, Artificial Sequence
  Description of Artificial Sequence: Synthetic oligonucleotide
  Sense strand starting at position 1474 of SEQ ID NO: 916400
gaggcaguguucucauguu

SEQ ID NO: 1153745 - RNA, 19 nt, Artificial Sequence
  Description of Artificial Sequence: Synthetic oligonucleotide
  Antisense strand to SEQ ID NO: 1153744
aacaugagaacacugccuc

SEQ ID NO: 1153746 - RNA, 19 nt, Artificial Sequence
  Description of Artificial Sequence: Synthetic oligonucleotide
  Sense strand starting at position 1610 of SEQ ID NO: 916400
gacauaauugccuguccug

SEQ ID NO: 1153747 - RNA, 19 nt, Artificial Sequence
  Description of Artificial Sequence: Synthetic oligonucleotide
  Antisense strand to SEQ ID NO: 1153746
caggacaggcaauuauguc

SEQ ID NO: 1153748 - RNA, 19 nt, Artificial Sequence
  Description of Artificial Sequence: Synthetic oligonucleotide
  Sense strand starting at position 1616 of SEQ ID NO: 916400
auugccuguccugagacuu

SEQ ID NO: 1153749 - RNA, 19 nt, Artificial Sequence
  Description of Artificial Sequence: Synthetic oligonucleotide
  Antisense strand to SEQ ID NO: 1153748
aagucucaggacaggcaau

SEQ ID NO: 1153750 - RNA, 19 nt, Artificial Sequence
  Description of Artificial Sequence: Synthetic oligonucleotide
  Sense strand starting at position 1982 of SEQ ID NO: 916400
ccgcaaacauuugcugaau

SEQ ID NO: 1153751 - RNA, 19 nt, Artificial Sequence
  Description of Artificial Sequence: Synthetic oligonucleotide
  Antisense strand to SEQ ID NO: 1153750
auucagcaaauguuugcgg

SEQ ID NO: 1153752 - RNA, 19 nt, Artificial Sequence
  Description of Artificial Sequence: Synthetic oligonucleotide
  Sense strand starting at position 1984 of SEQ ID NO: 916400
gcaaacauuugcugaauga

SEQ ID NO: 1153753 - RNA, 19 nt, Artificial Sequence
  Description of Artificial Sequence: Synthetic oligonucleotide
  Antisense strand to SEQ ID NO: 1153752
ucauucagcaaauguuugc

SEQ ID NO: 1153754 - RNA, 19 nt, Artificial Sequence
  Description of Artificial Sequence: Synthetic oligonucleotide
  Sense strand starting at position 2082 of SEQ ID NO: 916400
agaauagggcuuuguuaca

SEQ ID NO: 1153755 - RNA, 19 nt, Artificial Sequence
  Description of Artificial Sequence: Synthetic oligonucleotide
  Antisense strand to SEQ ID NO: 1153754
uguaacaaagcccuauucu

SEQ ID NO: 1153756 - RNA, 19 nt, Artificial Sequence
  Description of Artificial Sequence: Synthetic oligonucleotide
  Sense strand starting at position 2215 of SEQ ID NO: 916400
ccauauuugucucauuuga

SEQ ID NO: 1153757 - RNA, 19 nt, Artificial Sequence
  Description of Artificial Sequence: Synthetic oligonucleotide
  Antisense strand to SEQ ID NO: 1153756
ucaaaugagacaaauaugg

SEQ ID NO: 1153758 - RNA, 19 nt, Artificial Sequence
  Description of Artificial Sequence: Synthetic oligonucleotide
  Sense strand starting at position 2302 of SEQ ID NO: 916400
gaaguaaugugcccagcaa

SEQ ID NO: 1153759 - RNA, 19 nt, Artificial Sequence
  Description of Artificial Sequence: Synthetic oligonucleotide
  Antisense strand to SEQ ID NO: 1153758
uugcugggcacauuacuuc

SEQ ID NO: 1153760 - RNA, 19 nt, Artificial Sequence
  Description of Artificial Sequence: Synthetic oligonucleotide
  Sense strand starting at position 2303 of SEQ ID NO: 916400
aaguaaugugcccagcaag

SEQ ID NO: 1153761 - RNA, 19 nt, Artificial Sequence
  Description of Artificial Sequence: Synthetic oligonucleotide
  Antisense strand to SEQ ID NO: 1153760
cuugcugggcacauuacuu

SEQ ID NO: 1153762 - RNA, 19 nt, Artificial Sequence
  Description of Artificial Sequence: Synthetic oligonucleotide
  Sense strand starting at position 2317 of SEQ ID NO: 916400
gcaaguaguagucagagcu

SEQ ID NO: 1153763 - RNA, 19 nt, Artificial Sequence
  Description of Artificial Sequence: Synthetic oligonucleotide
  Antisense strand to SEQ ID NO: 1153762
agcucugacuacuacuugc

SEQ ID NO: 1153764 - RNA, 19 nt, Artificial Sequence
  Description of Artificial Sequence: Synthetic oligonucleotide
  Sense strand starting at position 2339 of SEQ ID NO: 916400
accggaguccuguacccua

SEQ ID NO: 1153765 - RNA, 19 nt, Artificial Sequence
  Description of Artificial Sequence: Synthetic oligonucleotide
  Antisense strand to SEQ ID NO: 1153764
uaggguacaggacuccggu

SEQ ID NO: 1153766 - RNA, 19 nt, Artificial Sequence
  Description of Artificial Sequence: Synthetic oligonucleotide
  Sense strand starting at position 2407 of SEQ ID NO: 916400
gcgugucuuauacauguuu

SEQ ID NO: 1153767 - RNA, 19 nt, Artificial Sequence
  Description of Artificial Sequence: Synthetic oligonucleotide
  Antisense strand to SEQ ID NO: 1153766
aaacauguauaagacacgc

SEQ ID NO: 1153768 - RNA, 19 nt, Artificial Sequence
  Description of Artificial Sequence: Synthetic oligonucleotide
  Sense strand starting at position 2621 of SEQ ID NO: 916400
gaggaaagaagcugugauu

SEQ ID NO: 1153769 - RNA, 19 nt, Artificial Sequence
  Description of Artificial Sequence: Synthetic oligonucleotide
  Antisense strand to SEQ ID NO: 1153768
aaucacagcuucuuuccuc

SEQ ID NO: 1153770 - RNA, 19 nt, Artificial Sequence
  Description of Artificial Sequence: Synthetic oligonucleotide
  Sense strand starting at position 2994 of SEQ ID NO: 916400
gaggaagagcucuguuugu

SEQ ID NO: 1153771 - RNA, 19 nt, Artificial Sequence
  Description of Artificial Sequence: Synthetic oligonucleotide
  Antisense strand to SEQ ID NO: 1153770
acaaacagagcucuuccuc

SEQ ID NO: 1153772 - RNA, 19 nt, Artificial Sequence
  Description of Artificial Sequence: Synthetic oligonucleotide
  Sense strand starting at position 2999 of SEQ ID NO: 916400
agagcucuguuugucccaa

SEQ ID NO: 1153773 - RNA, 19 nt, Artificial Sequence
  Description of Artificial Sequence: Synthetic oligonucleotide
  Antisense strand to SEQ ID NO: 1153772
uugggacaaacagagcucu

SEQ ID NO: 1153774 - RNA, 19 nt, Artificial Sequence
  Description of Artificial Sequence: Synthetic oligonucleotide
  Sense strand starting at position 3000 of SEQ ID NO: 916400
gagcucuguuugucccaaa

SEQ ID NO: 1153775 - RNA, 19 nt, Artificial Sequence
  Description of Artificial Sequence: Synthetic oligonucleotide
  Antisense strand to SEQ ID NO: 1153774
uuugggacaaacagagcuc

SEQ ID NO: 1153776 - RNA, 19 nt, Artificial Sequence
  Description of Artificial Sequence: Synthetic oligonucleotide
  Sense strand starting at position 3148 of SEQ ID NO: 916400
ggccuucucugacugagca

SEQ ID NO: 1153777 - RNA, 19 nt, Artificial Sequence
  Description of Artificial Sequence: Synthetic oligonucleotide
  Antisense strand to SEQ ID NO: 1153776
ugcucagucagagaaggcc

SEQ ID NO: 1153778 - RNA, 19 nt, Artificial Sequence
  Description of Artificial Sequence: Synthetic oligonucleotide
  Sense strand starting at position 3269 of SEQ ID NO: 916400
cuccaugugucuucucaac

SEQ ID NO: 1153779 - RNA, 19 nt, Artificial Sequence
  Description of Artificial Sequence: Synthetic oligonucleotide
  Antisense strand to SEQ ID NO: 1153778
guugagaagacacauggag

SEQ ID NO: 1153780 - RNA, 19 nt, Artificial Sequence
  Description of Artificial Sequence: Synthetic oligonucleotide
  Sense strand starting at position 3271 of SEQ ID NO: 916400
ccaugugucuucucaacug

SEQ ID NO: 1153781 - RNA, 19 nt, Artificial Sequence
  Description of Artificial Sequence: Synthetic oligonucleotide
  Antisense strand to SEQ ID NO: 1153780
caguugagaagacacaugg

SEQ ID NO: 1153782 - RNA, 19 nt, Artificial Sequence
  Description of Artificial Sequence: Synthetic oligonucleotide
  Sense strand starting at position 3492 of SEQ ID NO: 916400
caaggagaaucgcuugaga

SEQ ID NO: 1153783 - RNA, 19 nt, Artificial Sequence
  Description of Artificial Sequence: Synthetic oligonucleotide
  Antisense strand to SEQ ID NO: 1153782
ucucaagcgauucuccuug

SEQ ID NO: 1153784 - RNA, 19 nt, Artificial Sequence
  Description of Artificial Sequence: Synthetic oligonucleotide
  Sense strand starting at position 3678 of SEQ ID NO: 916400
guagauuggaggugucagu

SEQ ID NO: 1153785 - RNA, 19 nt, Artificial Sequence
  Description of Artificial Sequence: Synthetic oligonucleotide
  Antisense strand to SEQ ID NO: 1153784
acugacaccuccaaucuac

SEQ ID NO: 1153786 - RNA, 19 nt, Artificial Sequence
  Description of Artificial Sequence: Synthetic oligonucleotide
  Sense strand starting at position 3762 of SEQ ID NO: 916400
aagagugugucuccucuga

SEQ ID NO: 1153787 - RNA, 19 nt, Artificial Sequence
  Description of Artificial Sequence: Synthetic oligonucleotide
  Antisense strand to SEQ ID NO: 1153786
ucagaggagacacacucuu

SEQ ID NO: 1153788 - RNA, 19 nt, Artificial Sequence
  Description of Artificial Sequence: Synthetic oligonucleotide
  Sense strand starting at position 3764 of SEQ ID NO: 916400
gagugugucuccucugaga

SEQ ID NO: 1153789 - RNA, 19 nt, Artificial Sequence
  Description of Artificial Sequence: Synthetic oligonucleotide
  Antisense strand to SEQ ID NO: 1153788
ucucagaggagacacacuc

SEQ ID NO: 1153790 - RNA, 19 nt, Artificial Sequence
  Description of Artificial Sequence: Synthetic oligonucleotide
  Sense strand starting at position 87 of SEQ ID NO: 916401
aaugcauacugguugaauu

SEQ ID NO: 1153791 - RNA, 19 nt, Artificial Sequence
  Description of Artificial Sequence: Synthetic oligonucleotide
  Antisense strand to SEQ ID NO: 1153790
aauucaaccaguaugcauu

SEQ ID NO: 1153792 - RNA, 19 nt, Artificial Sequence
  Description of Artificial Sequence: Synthetic oligonucleotide
  Sense strand starting at position 102 of SEQ ID NO: 916401
aauuguaaaugcucaggau

SEQ ID NO: 1153793 - RNA, 19 nt, Artificial Sequence
  Description of Artificial Sequence: Synthetic oligonucleotide
  Antisense strand to SEQ ID NO: 1153792
auccugagcauuuacaauu

SEQ ID NO: 1153794 - RNA, 19 nt, Artificial Sequence
  Description of Artificial Sequence: Synthetic oligonucleotide
  Sense strand starting at position 148 of SEQ ID NO: 916401
gauauaccggugugcagaa

SEQ ID NO: 1153795 - RNA, 19 nt, Artificial Sequence
  Description of Artificial Sequence: Synthetic oligonucleotide
  Antisense strand to SEQ ID NO: 1153794
uucugcacaccgguauauc

SEQ ID NO: 1153796 - RNA, 19 nt, Artificial Sequence
  Description of Artificial Sequence: Synthetic oligonucleotide
  Sense strand starting at position 160 of SEQ ID NO: 916401
ugcagaagucaggaugcau

SEQ ID NO: 1153797 - RNA, 19 nt, Artificial Sequence
  Description of Artificial Sequence: Synthetic oligonucleotide
  Antisense strand to SEQ ID NO: 1153796
augcauccugacuucugca

SEQ ID NO: 1153798 - RNA, 19 nt, Artificial Sequence
  Description of Artificial Sequence: Synthetic oligonucleotide
  Sense strand starting at position 171 of SEQ ID NO: 916401
ggaugcauucccuguccaa

SEQ ID NO: 1153799 - RNA, 19 nt, Artificial Sequence
  Description of Artificial Sequence: Synthetic oligonucleotide
  Antisense strand to SEQ ID NO: 1153798
uuggacagggaaugcaucc

SEQ ID NO: 1153800 - RNA, 19 nt, Artificial Sequence
  Description of Artificial Sequence: Synthetic oligonucleotide
  Sense strand starting at position 185 of SEQ ID NO: 916401
uccaaaucacaguguucca

SEQ ID NO: 1153801 - RNA, 19 nt, Artificial Sequence
  Description of Artificial Sequence: Synthetic oligonucleotide
  Antisense strand to SEQ ID NO: 1153800
uggaacacugugauuugga

SEQ ID NO: 1153802 - RNA, 19 nt, Artificial Sequence
  Description of Artificial Sequence: Synthetic oligonucleotide
  Sense strand starting at position 292 of SEQ ID NO: 916401
cuauuugcugagugaaugu

SEQ ID NO: 1153803 - RNA, 19 nt, Artificial Sequence
  Description of Artificial Sequence: Synthetic oligonucleotide
  Antisense strand to SEQ ID NO: 1153802
acauucacucagcaaauag

SEQ ID NO: 1153804 - RNA, 19 nt, Artificial Sequence
  Description of Artificial Sequence: Synthetic oligonucleotide
  Sense strand starting at position 328 of SEQ ID NO: 916401
agagcacaccucuguauga

SEQ ID NO: 1153805 - RNA, 19 nt, Artificial Sequence
  Description of Artificial Sequence: Synthetic oligonucleotide
  Antisense strand to SEQ ID NO: 1153804
ucauacagaggugugcucu

SEQ ID NO: 1153806 - RNA, 19 nt, Artificial Sequence
  Description of Artificial Sequence: Synthetic oligonucleotide
  Sense strand starting at position 329 of SEQ ID NO: 916401
gagcacaccucuguaugau

SEQ ID NO: 1153807 - RNA, 19 nt, Artificial Sequence
  Description of Artificial Sequence: Synthetic oligonucleotide
  Antisense strand to SEQ ID NO: 1153806
aucauacagaggugugcuc

SEQ ID NO: 1153808 - RNA, 19 nt, Artificial Sequence
  Description of Artificial Sequence: Synthetic oligonucleotide
  Sense strand starting at position 330 of SEQ ID NO: 916401
agcacaccucuguaugauu

SEQ ID NO: 1153809 - RNA, 19 nt, Artificial Sequence
  Description of Artificial Sequence: Synthetic oligonucleotide
  Antisense strand to SEQ ID NO: 1153808
aaucauacagaggugugcu

SEQ ID NO: 1153810 - RNA, 19 nt, Artificial Sequence
  Description of Artificial Sequence: Synthetic oligonucleotide
  Sense strand starting at position 920 of SEQ ID NO: 916401
ggucaagacucccaaauuu

SEQ ID NO: 1153811 - RNA, 19 nt, Artificial Sequence
  Description of Artificial Sequence: Synthetic oligonucleotide
  Antisense strand to SEQ ID NO: 1153810
aaauuugggagucuugacc

SEQ ID NO: 1153812 - RNA, 19 nt, Artificial Sequence
  Description of Artificial Sequence: Synthetic oligonucleotide
  Sense strand starting at position 986 of SEQ ID NO: 916401
gucauuuccugcccugaaa

SEQ ID NO: 1153813 - RNA, 19 nt, Artificial Sequence
  Description of Artificial Sequence: Synthetic oligonucleotide
  Antisense strand to SEQ ID NO: 1153812
uuucagggcaggaaaugac

SEQ ID NO: 1153814 - RNA, 19 nt, Artificial Sequence
  Description of Artificial Sequence: Synthetic oligonucleotide
  Sense strand starting at position 1789 of SEQ ID NO: 916401
cucuuuccgucauuccaua

SEQ ID NO: 1153815 - RNA, 19 nt, Artificial Sequence
  Description of Artificial Sequence: Synthetic oligonucleotide
  Antisense strand to SEQ ID NO: 1153814
uauggaaugacggaaagag

SEQ ID NO: 1153816 - RNA, 19 nt, Artificial Sequence
  Description of Artificial Sequence: Synthetic oligonucleotide
  Sense strand starting at position 1910 of SEQ ID NO: 916401
ggcucuuucccaggagaga

SEQ ID NO: 1153817 - RNA, 19 nt, Artificial Sequence
  Description of Artificial Sequence: Synthetic oligonucleotide
  Antisense strand to SEQ ID NO: 1153816
ucucuccugggaaagagcc

SEQ ID NO: 1153818 - RNA, 19 nt, Artificial Sequence
  Description of Artificial Sequence: Synthetic oligonucleotide
  Sense strand starting at position 1911 of SEQ ID NO: 916401
gcucuuucccaggagagag

SEQ ID NO: 1153819 - RNA, 19 nt, Artificial Sequence
  Description of Artificial Sequence: Synthetic oligonucleotide
  Antisense strand to SEQ ID NO: 1153818
cucucuccugggaaagagc

SEQ ID NO: 1153820 - RNA, 19 nt, Artificial Sequence
  Description of Artificial Sequence: Synthetic oligonucleotide
  Sense strand starting at position 1944 of SEQ ID NO: 916401
gguugagagcuuuacagag

SEQ ID NO: 1153821 - RNA, 19 nt, Artificial Sequence
  Description of Artificial Sequence: Synthetic oligonucleotide
  Antisense strand to SEQ ID NO: 1153820
cucuguaaagcucucaacc

SEQ ID NO: 1153822 - RNA, 19 nt, Artificial Sequence
  Description of Artificial Sequence: Synthetic oligonucleotide
  Sense strand starting at position 1986 of SEQ ID NO: 916401
uaaggaaaggccuguaaag

SEQ ID NO: 1153823 - RNA, 19 nt, Artificial Sequence
  Description of Artificial Sequence: Synthetic oligonucleotide
  Antisense strand to SEQ ID NO: 1153822
cuuuacaggccuuuccuua

SEQ ID NO: 1153824 - RNA, 19 nt, Artificial Sequence
  Description of Artificial Sequence: Synthetic oligonucleotide
  Sense strand starting at position 2064 of SEQ ID NO: 916401
aaggcugagucaucuagga

SEQ ID NO: 1153825 - RNA, 19 nt, Artificial Sequence
  Description of Artificial Sequence: Synthetic oligonucleotide
  Antisense strand to SEQ ID NO: 1153824
uccuagaugacucagccuu

SEQ ID NO: 1153826 - RNA, 19 nt, Artificial Sequence
  Description of Artificial Sequence: Synthetic oligonucleotide
  Sense strand starting at position 2066 of SEQ ID NO: 916401
ggcugagucaucuaggagu

SEQ ID NO: 1153827 - RNA, 19 nt, Artificial Sequence
  Description of Artificial Sequence: Synthetic oligonucleotide
  Antisense strand to SEQ ID NO: 1153826
acuccuagaugacucagcc

SEQ ID NO: 1153828 - RNA, 19 nt, Artificial Sequence
  Description of Artificial Sequence: Synthetic oligonucleotide
  Sense strand starting at position 2068 of SEQ ID NO: 916401
cugagucaucuaggaguaa

SEQ ID NO: 1153829 - RNA, 19 nt, Artificial Sequence
  Description of Artificial Sequence: Synthetic oligonucleotide
  Antisense strand to SEQ ID NO: 1153828
uuacuccuagaugacucag

SEQ ID NO: 1153830 - RNA, 19 nt, Artificial Sequence
  Description of Artificial Sequence: Synthetic oligonucleotide
  Sense strand starting at position 2183 of SEQ ID NO: 916401
gaggacuuguuaguagcga

SEQ ID NO: 1153831 - RNA, 19 nt, Artificial Sequence
  Description of Artificial Sequence: Synthetic oligonucleotide
  Antisense strand to SEQ ID NO: 1153830
ucgcuacuaacaaguccuc

SEQ ID NO: 1153832 - RNA, 19 nt, Artificial Sequence
  Description of Artificial Sequence: Synthetic oligonucleotide
  Sense strand starting at position 2265 of SEQ ID NO: 916401
agugcugggaucugggaau

SEQ ID NO: 1153833 - RNA, 19 nt, Artificial Sequence
  Description of Artificial Sequence: Synthetic oligonucleotide
  Antisense strand to SEQ ID NO: 1153832
auucccagaucccagcacu

SEQ ID NO: 1153834 - RNA, 19 nt, Artificial Sequence
  Description of Artificial Sequence: Synthetic oligonucleotide
  Sense strand starting at position 2345 of SEQ ID NO: 916401
cuggcuauuccugggacca

SEQ ID NO: 1153835 - RNA, 19 nt, Artificial Sequence
  Description of Artificial Sequence: Synthetic oligonucleotide
  Antisense strand to SEQ ID NO: 1153834
uggucccaggaauagccag

SEQ ID NO: 1153836 - RNA, 19 nt, Artificial Sequence
  Description of Artificial Sequence: Synthetic oligonucleotide
  Sense strand starting at position 2346 of SEQ ID NO: 916401
uggcuauuccugggaccag

SEQ ID NO: 1153837 - RNA, 19 nt, Artificial Sequence
  Description of Artificial Sequence: Synthetic oligonucleotide
  Antisense strand to SEQ ID NO: 1153836
cuggucccaggaauagcca

SEQ ID NO: 1153838 - RNA, 19 nt, Artificial Sequence
  Description of Artificial Sequence: Synthetic oligonucleotide
  Sense strand starting at position 2454 of SEQ ID NO: 916401
cccuccagaucuucgcaaa

SEQ ID NO: 1153839 - RNA, 19 nt, Artificial Sequence
  Description of Artificial Sequence: Synthetic oligonucleotide
  Antisense strand to SEQ ID NO: 1153838
uuugcgaagaucuggaggg

SEQ ID NO: 1153840 - RNA, 19 nt, Artificial Sequence
  Description of Artificial Sequence: Synthetic oligonucleotide
  Sense strand starting at position 2455 of SEQ ID NO: 916401
ccuccagaucuucgcaaau

SEQ ID NO: 1153841 - RNA, 19 nt, Artificial Sequence
  Description of Artificial Sequence: Synthetic oligonucleotide
  Antisense strand to SEQ ID NO: 1153840
auuugcgaagaucuggagg

SEQ ID NO: 1153842 - RNA, 19 nt, Artificial Sequence
  Description of Artificial Sequence: Synthetic oligonucleotide
  Sense strand starting at position 2664 of SEQ ID NO: 916401
caggguccaucaguguauu

SEQ ID NO: 1153843 - RNA, 19 nt, Artificial Sequence
  Description of Artificial Sequence: Synthetic oligonucleotide
  Antisense strand to SEQ ID NO: 1153842
aauacacugauggacccug

SEQ ID NO: 1153844 - RNA, 19 nt, Artificial Sequence
  Description of Artificial Sequence: Synthetic oligonucleotide
  Sense strand starting at position 2715 of SEQ ID NO: 916401
agaauacuguccuccaagu

SEQ ID NO: 1153845 - RNA, 19 nt, Artificial Sequence
  Description of Artificial Sequence: Synthetic oligonucleotide
  Antisense strand to SEQ ID NO: 1153844
acuuggaggacaguauucu

SEQ ID NO: 1153846 - RNA, 19 nt, Artificial Sequence
  Description of Artificial Sequence: Synthetic oligonucleotide
  Sense strand starting at position 2762 of SEQ ID NO: 916401
ccuaauugcugacucaagu

SEQ ID NO: 1153847 - RNA, 19 nt, Artificial Sequence
  Description of Artificial Sequence: Synthetic oligonucleotide
  Antisense strand to SEQ ID NO: 1153846
acuugagucagcaauuagg

SEQ ID NO: 1153848 - RNA, 19 nt, Artificial Sequence
  Description of Artificial Sequence: Synthetic oligonucleotide
  Sense strand starting at position 2819 of SEQ ID NO: 916401
uggcaugaguugagaaggu

SEQ ID NO: 1153849 - RNA, 19 nt, Artificial Sequence
  Description of Artificial Sequence: Synthetic oligonucleotide
  Antisense strand to SEQ ID NO: 1153848
accuucucaacucaugcca

SEQ ID NO: 1153850 - RNA, 19 nt, Artificial Sequence
  Description of Artificial Sequence: Synthetic oligonucleotide
  Sense strand starting at position 2869 of SEQ ID NO: 916401
ccuccacuccuauagguau

SEQ ID NO: 1153851 - RNA, 19 nt, Artificial Sequence
  Description of Artificial Sequence: Synthetic oligonucleotide
  Antisense strand to SEQ ID NO: 1153850
auaccuauaggaguggagg

SEQ ID NO: 1153852 - RNA, 19 nt, Artificial Sequence
  Description of Artificial Sequence: Synthetic oligonucleotide
  Sense strand starting at position 2875 of SEQ ID NO: 916401
cuccuauagguaugagaca

SEQ ID NO: 1153853 - RNA, 19 nt, Artificial Sequence
  Description of Artificial Sequence: Synthetic oligonucleotide
  Antisense strand to SEQ ID NO: 1153852
ugucucauaccuauaggag

SEQ ID NO: 1153854 - RNA, 19 nt, Artificial Sequence
  Description of Artificial Sequence: Synthetic oligonucleotide
  Sense strand starting at position 3081 of SEQ ID NO: 916401
aagagaagucugggucgga

SEQ ID NO: 1153855 - RNA, 19 nt, Artificial Sequence
  Description of Artificial Sequence: Synthetic oligonucleotide
  Antisense strand to SEQ ID NO: 1153854
uccgacccagacuucucuu

SEQ ID NO: 1153856 - RNA, 19 nt, Artificial Sequence
  Description of Artificial Sequence: Synthetic oligonucleotide
  Sense strand starting at position 3084 of SEQ ID NO: 916401
agaagucugggucggagaa

SEQ ID NO: 1153857 - RNA, 19 nt, Artificial Sequence
  Description of Artificial Sequence: Synthetic oligonucleotide
  Antisense strand to SEQ ID NO: 1153856
uucuccgacccagacuucu

SEQ ID NO: 1153858 - RNA, 19 nt, Artificial Sequence
  Description of Artificial Sequence: Synthetic oligonucleotide
  Sense strand starting at position 3085 of SEQ ID NO: 916401
gaagucugggucggagaau

SEQ ID NO: 1153859 - RNA, 19 nt, Artificial Sequence
  Description of Artificial Sequence: Synthetic oligonucleotide
  Antisense strand to SEQ ID NO: 1153858
auucuccgacccagacuuc

SEQ ID NO: 1153860 - RNA, 19 nt, Artificial Sequence
  Description of Artificial Sequence: Synthetic oligonucleotide
  Sense strand starting at position 3088 of SEQ ID NO: 916401
gucugggucggagaauaga

SEQ ID NO: 1153861 - RNA, 19 nt, Artificial Sequence
  Description of Artificial Sequence: Synthetic oligonucleotide
  Antisense strand to SEQ ID NO: 1153860
ucuauucuccgacccagac

SEQ ID NO: 1153862 - RNA, 19 nt, Artificial Sequence
  Description of Artificial Sequence: Synthetic oligonucleotide
  Sense strand starting at position 3133 of SEQ ID NO: 916401
ugcuaagacguuuagaaau

SEQ ID NO: 1153863 - RNA, 19 nt, Artificial Sequence
  Description of Artificial Sequence: Synthetic oligonucleotide
  Antisense strand to SEQ ID NO: 1153862
auuucuaaacgucuuagca

SEQ ID NO: 1153864 - RNA, 19 nt, Artificial Sequence
  Description of Artificial Sequence: Synthetic oligonucleotide
  Sense strand starting at position 3180 of SEQ ID NO: 916401
cguucugaugaagagcauu

SEQ ID NO: 1153865 - RNA, 19 nt, Artificial Sequence
  Description of Artificial Sequence: Synthetic oligonucleotide
  Antisense strand to SEQ ID NO: 1153864
aaugcucuucaucagaacg

SEQ ID NO: 1153866 - RNA, 19 nt, Artificial Sequence
  Description of Artificial Sequence: Synthetic oligonucleotide
  Sense strand starting at position 3334 of SEQ ID NO: 916401
guuggcagcgcuuccuaaa

SEQ ID NO: 1153867 - RNA, 19 nt, Artificial Sequence
  Description of Artificial Sequence: Synthetic oligonucleotide
  Antisense strand to SEQ ID NO: 1153866
uuuaggaagcgcugccaac

SEQ ID NO: 1153868 - RNA, 19 nt, Artificial Sequence
  Description of Artificial Sequence: Synthetic oligonucleotide
  Sense strand starting at position 3551 of SEQ ID NO: 916401
gaagaaaggccuuguugga

SEQ ID NO: 1153869 - RNA, 19 nt, Artificial Sequence
  Description of Artificial Sequence: Synthetic oligonucleotide
  Antisense strand to SEQ ID NO: 1153868
uccaacaaggccuuucuuc

SEQ ID NO: 1153870 - RNA, 19 nt, Artificial Sequence
  Description of Artificial Sequence: Synthetic oligonucleotide
  Sense strand starting at position 82 of SEQ ID NO: 916402
aucuuauccuaauggaaug

SEQ ID NO: 1153871 - RNA, 19 nt, Artificial Sequence
  Description of Artificial Sequence: Synthetic oligonucleotide
  Antisense strand to SEQ ID NO: 1153870
cauuccauuaggauaagau

SEQ ID NO: 1153872 - RNA, 19 nt, Artificial Sequence
  Description of Artificial Sequence: Synthetic oligonucleotide
  Sense strand starting at position 120 of SEQ ID NO: 916402
cucuuuacauauguaaguu

SEQ ID NO: 1153873 - RNA, 19 nt, Artificial Sequence
  Description of Artificial Sequence: Synthetic oligonucleotide
  Antisense strand to SEQ ID NO: 1153872
aacuuacauauguaaagag

SEQ ID NO: 1153874 - RNA, 19 nt, Artificial Sequence
  Description of Artificial Sequence: Synthetic oligonucleotide
  Sense strand starting at position 245 of SEQ ID NO: 916402
agcagugcgaaccaagaau

SEQ ID NO: 1153875 - RNA, 19 nt, Artificial Sequence
  Description of Artificial Sequence: Synthetic oligonucleotide
  Antisense strand to SEQ ID NO: 1153874
auucuugguucgcacugcu

SEQ ID NO: 1153876 - RNA, 19 nt, Artificial Sequence
  Description of Artificial Sequence: Synthetic oligonucleotide
  Sense strand starting at position 280 of SEQ ID NO: 916402
augcuuagcugcucucuau

SEQ ID NO: 1153877 - RNA, 19 nt, Artificial Sequence
  Description of Artificial Sequence: Synthetic oligonucleotide
  Antisense strand to SEQ ID NO: 1153876
auagagagcagcuaagcau

SEQ ID NO: 1153878 - RNA, 19 nt, Artificial Sequence
  Description of Artificial Sequence: Synthetic oligonucleotide
  Sense strand starting at position 544 of SEQ ID NO: 916402
uggcuccugcugugugaaa

SEQ ID NO: 1153879 - RNA, 19 nt, Artificial Sequence
  Description of Artificial Sequence: Synthetic oligonucleotide
  Antisense strand to SEQ ID NO: 1153878
uuucacacagcaggagcca

SEQ ID NO: 1153880 - RNA, 19 nt, Artificial Sequence
  Description of Artificial Sequence: Synthetic oligonucleotide
  Sense strand starting at position 546 of SEQ ID NO: 916402
gcuccugcugugugaaagu

SEQ ID NO: 1153881 - RNA, 19 nt, Artificial Sequence
  Description of Artificial Sequence: Synthetic oligonucleotide
  Antisense strand to SEQ ID NO: 1153880
acuuucacacagcaggagc

SEQ ID NO: 1153882 - RNA, 19 nt, Artificial Sequence
  Description of Artificial Sequence: Synthetic oligonucleotide
  Sense strand starting at position 641 of SEQ ID NO: 916402
gggcgaccgcguuaucuga

SEQ ID NO: 1153883 - RNA, 19 nt, Artificial Sequence
  Description of Artificial Sequence: Synthetic oligonucleotide
  Antisense strand to SEQ ID NO: 1153882
ucagauaacgcggucgccc

SEQ ID NO: 1153884 - RNA, 19 nt, Artificial Sequence
  Description of Artificial Sequence: Synthetic oligonucleotide
  Sense strand starting at position 913 of SEQ ID NO: 916402
ggguaugacucauucugug

SEQ ID NO: 1153885 - RNA, 19 nt, Artificial Sequence
  Description of Artificial Sequence: Synthetic oligonucleotide
  Antisense strand to SEQ ID NO: 1153884
cacagaaugagucauaccc

SEQ ID NO: 1153886 - RNA, 19 nt, Artificial Sequence
  Description of Artificial Sequence: Synthetic oligonucleotide
  Sense strand starting at position 955 of SEQ ID NO: 916402
cgccaaaggccucaaucaa

SEQ ID NO: 1153887 - RNA, 19 nt, Artificial Sequence
  Description of Artificial Sequence: Synthetic oligonucleotide
  Antisense strand to SEQ ID NO: 1153886
uugauugaggccuuuggcg

SEQ ID NO: 1153888 - RNA, 19 nt, Artificial Sequence
  Description of Artificial Sequence: Synthetic oligonucleotide
  Sense strand starting at position 970 of SEQ ID NO: 916402
ucaauauuugcccguuuga

SEQ ID NO: 1153889 - RNA, 19 nt, Artificial Sequence
  Description of Artificial Sequence: Synthetic oligonucleotide
  Antisense strand to SEQ ID NO: 1153888
ucaaacgggcaaauauuga

SEQ ID NO: 1153890 - RNA, 19 nt, Artificial Sequence
  Description of Artificial Sequence: Synthetic oligonucleotide
  Sense strand starting at position 979 of SEQ ID NO: 916402
gcccguuugaaccgagaca

SEQ ID NO: 1153891 - RNA, 19 nt, Artificial Sequence
  Description of Artificial Sequence: Synthetic oligonucleotide
  Antisense strand to SEQ ID NO: 1153890
ugucucgguucaaacgggc

SEQ ID NO: 1153892 - RNA, 19 nt, Artificial Sequence
  Description of Artificial Sequence: Synthetic oligonucleotide
  Sense strand starting at position 1009 of SEQ ID NO: 916402
cuccuagaaugcuagaauc

SEQ ID NO: 1153893 - RNA, 19 nt, Artificial Sequence
  Description of Artificial Sequence: Synthetic oligonucleotide
  Antisense strand to SEQ ID NO: 1153892
gauucuagcauucuaggag

SEQ ID NO: 1153894 - RNA, 19 nt, Artificial Sequence
  Description of Artificial Sequence: Synthetic oligonucleotide
  Sense strand starting at position 1570 of SEQ ID NO: 916402
ucaccuugucuaugaagga

SEQ ID NO: 1153895 - RNA, 19 nt, Artificial Sequence
  Description of Artificial Sequence: Synthetic oligonucleotide
  Antisense strand to SEQ ID NO: 1153894
uccuucauagacaagguga

SEQ ID NO: 1153896 - RNA, 19 nt, Artificial Sequence
  Description of Artificial Sequence: Synthetic oligonucleotide
  Sense strand starting at position 1962 of SEQ ID NO: 916402
cugcuucuuggugaggaga

SEQ ID NO: 1153897 - RNA, 19 nt, Artificial Sequence
  Description of Artificial Sequence: Synthetic oligonucleotide
  Antisense strand to SEQ ID NO: 1153896
ucuccucaccaagaagcag

SEQ ID NO: 1153898 - RNA, 19 nt, Artificial Sequence
  Description of Artificial Sequence: Synthetic oligonucleotide
  Sense strand starting at position 2228 of SEQ ID NO: 916402
gaaauccuguccuggcaca

SEQ ID NO: 1153899 - RNA, 19 nt, Artificial Sequence
  Description of Artificial Sequence: Synthetic oligonucleotide
  Antisense strand to SEQ ID NO: 1153898
ugugccaggacaggauuuc

SEQ ID NO: 1153900 - RNA, 19 nt, Artificial Sequence
  Description of Artificial Sequence: Synthetic oligonucleotide
  Sense strand starting at position 2241 of SEQ ID NO: 916402
ggcacaagugccuguaaca

SEQ ID NO: 1153901 - RNA, 19 nt, Artificial Sequence
  Description of Artificial Sequence: Synthetic oligonucleotide
  Antisense strand to SEQ ID NO: 1153900
uguuacaggcacuugugcc

SEQ ID NO: 1153902 - RNA, 19 nt, Artificial Sequence
  Description of Artificial Sequence: Synthetic oligonucleotide
  Sense strand starting at position 2408 of SEQ ID NO: 916402
cagagaaacucuccugugu

SEQ ID NO: 1153903 - RNA, 19 nt, Artificial Sequence
  Description of Artificial Sequence: Synthetic oligonucleotide
  Antisense strand to SEQ ID NO: 1153902
acacaggagaguuucucug

SEQ ID NO: 1153904 - RNA, 19 nt, Artificial Sequence
  Description of Artificial Sequence: Synthetic oligonucleotide
  Sense strand starting at position 2410 of SEQ ID NO: 916402
gagaaacucuccuguguuc

SEQ ID NO: 1153905 - RNA, 19 nt, Artificial Sequence
  Description of Artificial Sequence: Synthetic oligonucleotide
  Antisense strand to SEQ ID NO: 1153904
gaacacaggagaguuucuc

SEQ ID NO: 1153906 - RNA, 19 nt, Artificial Sequence
  Description of Artificial Sequence: Synthetic oligonucleotide
  Sense strand starting at position 2421 of SEQ ID NO: 916402
cuguguucucccugauuga

SEQ ID NO: 1153907 - RNA, 19 nt, Artificial Sequence
  Description of Artificial Sequence: Synthetic oligonucleotide
  Antisense strand to SEQ ID NO: 1153906
ucaaucagggagaacacag

SEQ ID NO: 1153908 - RNA, 19 nt, Artificial Sequence
  Description of Artificial Sequence: Synthetic oligonucleotide
  Sense strand starting at position 2422 of SEQ ID NO: 916402
uguguucucccugauugaa

SEQ ID NO: 1153909 - RNA, 19 nt, Artificial Sequence
  Description of Artificial Sequence: Synthetic oligonucleotide
  Antisense strand to SEQ ID NO: 1153908
uucaaucagggagaacaca

SEQ ID NO: 1153910 - RNA, 19 nt, Artificial Sequence
  Description of Artificial Sequence: Synthetic oligonucleotide
  Sense strand starting at position 2430 of SEQ ID NO: 916402
cccugauugaagcgauuau

SEQ ID NO: 1153911 - RNA, 19 nt, Artificial Sequence
  Description of Artificial Sequence: Synthetic oligonucleotide
  Antisense strand to SEQ ID NO: 1153910
auaaucgcuucaaucaggg

SEQ ID NO: 1153912 - RNA, 19 nt, Artificial Sequence
  Description of Artificial Sequence: Synthetic oligonucleotide
  Sense strand starting at position 2431 of SEQ ID NO: 916402
ccugauugaagcgauuaug

SEQ ID NO: 1153913 - RNA, 19 nt, Artificial Sequence
  Description of Artificial Sequence: Synthetic oligonucleotide
  Antisense strand to SEQ ID NO: 1153912
cauaaucgcuucaaucagg

SEQ ID NO: 1153914 - RNA, 19 nt, Artificial Sequence
  Description of Artificial Sequence: Synthetic oligonucleotide
  Sense strand starting at position 2484 of SEQ ID NO: 916402
aguccaaagccuugaaucu

SEQ ID NO: 1153915 - RNA, 19 nt, Artificial Sequence
  Description of Artificial Sequence: Synthetic oligonucleotide
  Antisense strand to SEQ ID NO: 1153914
agauucaaggcuuuggacu

SEQ ID NO: 1153916 - RNA, 19 nt, Artificial Sequence
  Description of Artificial Sequence: Synthetic oligonucleotide
  Sense strand starting at position 2491 of SEQ ID NO: 916402
agccuugaaucugaaauca

SEQ ID NO: 1153917 - RNA, 19 nt, Artificial Sequence
  Description of Artificial Sequence: Synthetic oligonucleotide
  Antisense strand to SEQ ID NO: 1153916
ugauuucagauucaaggcu

SEQ ID NO: 1153918 - RNA, 19 nt, Artificial Sequence
  Description of Artificial Sequence: Synthetic oligonucleotide
  Sense strand starting at position 2517 of SEQ ID NO: 916402
gccucaucuuuccagguua

SEQ ID NO: 1153919 - RNA, 19 nt, Artificial Sequence
  Description of Artificial Sequence: Synthetic oligonucleotide
  Antisense strand to SEQ ID NO: 1153918
uaaccuggaaagaugaggc

SEQ ID NO: 1153920 - RNA, 19 nt, Artificial Sequence
  Description of Artificial Sequence: Synthetic oligonucleotide
  Sense strand starting at position 2519 of SEQ ID NO: 916402
cucaucuuuccagguuacu

SEQ ID NO: 1153921 - RNA, 19 nt, Artificial Sequence
  Description of Artificial Sequence: Synthetic oligonucleotide
  Antisense strand to SEQ ID NO: 1153920
aguaaccuggaaagaugag

SEQ ID NO: 1153922 - RNA, 19 nt, Artificial Sequence
  Description of Artificial Sequence: Synthetic oligonucleotide
  Sense strand starting at position 2578 of SEQ ID NO: 916402
gguagauauuuguggaaug

SEQ ID NO: 1153923 - RNA, 19 nt, Artificial Sequence
  Description of Artificial Sequence: Synthetic oligonucleotide
  Antisense strand to SEQ ID NO: 1153922
cauuccacaaauaucuacc

SEQ ID NO: 1153924 - RNA, 19 nt, Artificial Sequence
  Description of Artificial Sequence: Synthetic oligonucleotide
  Sense strand starting at position 2680 of SEQ ID NO: 916402
ggcugucgucccucuacau

SEQ ID NO: 1153925 - RNA, 19 nt, Artificial Sequence
  Description of Artificial Sequence: Synthetic oligonucleotide
  Antisense strand to SEQ ID NO: 1153924
auguagagggacgacagcc

SEQ ID NO: 1153926 - RNA, 19 nt, Artificial Sequence
  Description of Artificial Sequence: Synthetic oligonucleotide
  Sense strand starting at position 3185 of SEQ ID NO: 916402
ggagcuaugucagggacuu

SEQ ID NO: 1153927 - RNA, 19 nt, Artificial Sequence
  Description of Artificial Sequence: Synthetic oligonucleotide
  Antisense strand to SEQ ID NO: 1153926
aagucccugacauagcucc

SEQ ID NO: 1153928 - RNA, 19 nt, Artificial Sequence
  Description of Artificial Sequence: Synthetic oligonucleotide
  Sense strand starting at position 3186 of SEQ ID NO: 916402
gagcuaugucagggacuuc

SEQ ID NO: 1153929 - RNA, 19 nt, Artificial Sequence
  Description of Artificial Sequence: Synthetic oligonucleotide
  Antisense strand to SEQ ID NO: 1153928
gaagucccugacauagcuc

SEQ ID NO: 1153930 - RNA, 19 nt, Artificial Sequence
  Description of Artificial Sequence: Synthetic oligonucleotide
  Sense strand starting at position 3212 of SEQ ID NO: 916402
uugcucuuugcgggaguca

SEQ ID NO: 1153931 - RNA, 19 nt, Artificial Sequence
  Description of Artificial Sequence: Synthetic oligonucleotide
  Antisense strand to SEQ ID NO: 1153930
ugacucccgcaaagagcaa

SEQ ID NO: 1153932 - RNA, 19 nt, Artificial Sequence
  Description of Artificial Sequence: Synthetic oligonucleotide
  Sense strand starting at position 3235 of SEQ ID NO: 916402
cauugcucccagugaguga

SEQ ID NO: 1153933 - RNA, 19 nt, Artificial Sequence
  Description of Artificial Sequence: Synthetic oligonucleotide
  Antisense strand to SEQ ID NO: 1153932
ucacucacugggagcaaug

SEQ ID NO: 1153934 - RNA, 19 nt, Artificial Sequence
  Description of Artificial Sequence: Synthetic oligonucleotide
  Sense strand starting at position 3246 of SEQ ID NO: 916402
gugagugaaucaugggaag

SEQ ID NO: 1153935 - RNA, 19 nt, Artificial Sequence
  Description of Artificial Sequence: Synthetic oligonucleotide
  Antisense strand to SEQ ID NO: 1153934
cuucccaugauucacucac

SEQ ID NO: 1153936 - RNA, 19 nt, Artificial Sequence
  Description of Artificial Sequence: Synthetic oligonucleotide
  Sense strand starting at position 3248 of SEQ ID NO: 916402
gagugaaucaugggaagug

SEQ ID NO: 1153937 - RNA, 19 nt, Artificial Sequence
  Description of Artificial Sequence: Synthetic oligonucleotide
  Antisense strand to SEQ ID NO: 1153936
cacuucccaugauucacuc

SEQ ID NO: 1153938 - RNA, 19 nt, Artificial Sequence
  Description of Artificial Sequence: Synthetic oligonucleotide
  Sense strand starting at position 3249 of SEQ ID NO: 916402
agugaaucaugggaaguga

SEQ ID NO: 1153939 - RNA, 19 nt, Artificial Sequence
  Description of Artificial Sequence: Synthetic oligonucleotide
  Antisense strand to SEQ ID NO: 1153938
ucacuucccaugauucacu

SEQ ID NO: 1153940 - RNA, 19 nt, Artificial Sequence
  Description of Artificial Sequence: Synthetic oligonucleotide
  Sense strand starting at position 3379 of SEQ ID NO: 916402
gcaccugucucccauuauc

SEQ ID NO: 1153941 - RNA, 19 nt, Artificial Sequence
  Description of Artificial Sequence: Synthetic oligonucleotide
  Antisense strand to SEQ ID NO: 1153940
gauaaugggagacaggugc

SEQ ID NO: 1153942 - RNA, 19 nt, Artificial Sequence
  Description of Artificial Sequence: Synthetic oligonucleotide
  Sense strand starting at position 3681 of SEQ ID NO: 916402
gugacauagcccugaccca

SEQ ID NO: 1153943 - RNA, 19 nt, Artificial Sequence
  Description of Artificial Sequence: Synthetic oligonucleotide
  Antisense strand to SEQ ID NO: 1153942
ugggucagggcuaugucac

SEQ ID NO: 1153944 - RNA, 19 nt, Artificial Sequence
  Description of Artificial Sequence: Synthetic oligonucleotide
  Sense strand starting at position 3749 of SEQ ID NO: 916402
cauccuucucuaggagaga

SEQ ID NO: 1153945 - RNA, 19 nt, Artificial Sequence
  Description of Artificial Sequence: Synthetic oligonucleotide
  Antisense strand to SEQ ID NO: 1153944
ucucuccuagagaaggaug

SEQ ID NO: 1153946 - RNA, 19 nt, Artificial Sequence
  Description of Artificial Sequence: Synthetic oligonucleotide
  Sense strand starting at position 7 of SEQ ID NO: 916403
ggagguggcucuuuaggga

SEQ ID NO: 1153947 - RNA, 19 nt, Artificial Sequence
  Description of Artificial Sequence: Synthetic oligonucleotide
  Antisense strand to SEQ ID NO: 1153946
ucccuaaagagccaccucc

SEQ ID NO: 1153948 - RNA, 19 nt, Artificial Sequence
  Description of Artificial Sequence: Synthetic oligonucleotide
  Sense strand starting at position 48 of SEQ ID NO: 916403
gcugcucuuagagggagaa

SEQ ID NO: 1153949 - RNA, 19 nt, Artificial Sequence
  Description of Artificial Sequence: Synthetic oligonucleotide
  Antisense strand to SEQ ID NO: 1153948
uucucccucuaagagcagc

SEQ ID NO: 1153950 - RNA, 19 nt, Artificial Sequence
  Description of Artificial Sequence: Synthetic oligonucleotide
  Sense strand starting at position 61 of SEQ ID NO: 916403
ggagaaccagcucagcaau

SEQ ID NO: 1153951 - RNA, 19 nt, Artificial Sequence
  Description of Artificial Sequence: Synthetic oligonucleotide
  Antisense strand to SEQ ID NO: 1153950
auugcugagcugguucucc

SEQ ID NO: 1153952 - RNA, 19 nt, Artificial Sequence
  Description of Artificial Sequence: Synthetic oligonucleotide
  Sense strand starting at position 188 of SEQ ID NO: 916403
cuggucuaggcacaugaau

SEQ ID NO: 1153953 - RNA, 19 nt, Artificial Sequence
  Description of Artificial Sequence: Synthetic oligonucleotide
  Antisense strand to SEQ ID NO: 1153952
auucaugugccuagaccag

SEQ ID NO: 1153954 - RNA, 19 nt, Artificial Sequence
  Description of Artificial Sequence: Synthetic oligonucleotide
  Sense strand starting at position 384 of SEQ ID NO: 916403
ggcaguguggcuugaauuu

SEQ ID NO: 1153955 - RNA, 19 nt, Artificial Sequence
  Description of Artificial Sequence: Synthetic oligonucleotide
  Antisense strand to SEQ ID NO: 1153954
aaauucaagccacacugcc

SEQ ID NO: 1153956 - RNA, 19 nt, Artificial Sequence
  Description of Artificial Sequence: Synthetic oligonucleotide
  Sense strand starting at position 410 of SEQ ID NO: 916403
uuugcaauguuccuccaga

SEQ ID NO: 1153957 - RNA, 19 nt, Artificial Sequence
  Description of Artificial Sequence: Synthetic oligonucleotide
  Antisense strand to SEQ ID NO: 1153956
ucuggaggaacauugcaaa

SEQ ID NO: 1153958 - RNA, 19 nt, Artificial Sequence
  Description of Artificial Sequence: Synthetic oligonucleotide
  Sense strand starting at position 411 of SEQ ID NO: 916403
uugcaauguuccuccagag

SEQ ID NO: 1153959 - RNA, 19 nt, Artificial Sequence
  Description of Artificial Sequence: Synthetic oligonucleotide
  Antisense strand to SEQ ID NO: 1153958
cucuggaggaacauugcaa

SEQ ID NO: 1153960 - RNA, 19 nt, Artificial Sequence
  Description of Artificial Sequence: Synthetic oligonucleotide
  Sense strand starting at position 435 of SEQ ID NO: 916403
ggcauaaguagaugcucaa

SEQ ID NO: 1153961 - RNA, 19 nt, Artificial Sequence
  Description of Artificial Sequence: Synthetic oligonucleotide
  Antisense strand to SEQ ID NO: 1153960
uugagcaucuacuuaugcc

SEQ ID NO: 1153962 - RNA, 19 nt, Artificial Sequence
  Description of Artificial Sequence: Synthetic oligonucleotide
  Sense strand starting at position 439 of SEQ ID NO: 916403
uaaguagaugcucaaugca

SEQ ID NO: 1153963 - RNA, 19 nt, Artificial Sequence
  Description of Artificial Sequence: Synthetic oligonucleotide
  Antisense strand to SEQ ID NO: 1153962
ugcauugagcaucuacuua

SEQ ID NO: 1153964 - RNA, 19 nt, Artificial Sequence
  Description of Artificial Sequence: Synthetic oligonucleotide
  Sense strand starting at position 649 of SEQ ID NO: 916403
ugucuucucccauaagguu

SEQ ID NO: 1153965 - RNA, 19 nt, Artificial Sequence
  Description of Artificial Sequence: Synthetic oligonucleotide
  Antisense strand to SEQ ID NO: 1153964
aaccuuaugggagaagaca

SEQ ID NO: 1153966 - RNA, 19 nt, Artificial Sequence
  Description of Artificial Sequence: Synthetic oligonucleotide
  Sense strand starting at position 745 of SEQ ID NO: 916403
uggcacuaucaugauuauu

SEQ ID NO: 1153967 - RNA, 19 nt, Artificial Sequence
  Description of Artificial Sequence: Synthetic oligonucleotide
  Antisense strand to SEQ ID NO: 1153966
aauaaucaugauagugcca

SEQ ID NO: 1153968 - RNA, 19 nt, Artificial Sequence
  Description of Artificial Sequence: Synthetic oligonucleotide
  Sense strand starting at position 836 of SEQ ID NO: 916403
guggauaacuuccuuggga

SEQ ID NO: 1153969 - RNA, 19 nt, Artificial Sequence
  Description of Artificial Sequence: Synthetic oligonucleotide
  Antisense strand to SEQ ID NO: 1153968
ucccaaggaaguuauccac

SEQ ID NO: 1153970 - RNA, 19 nt, Artificial Sequence
  Description of Artificial Sequence: Synthetic oligonucleotide
  Sense strand starting at position 838 of SEQ ID NO: 916403
ggauaacuuccuugggagc

SEQ ID NO: 1153971 - RNA, 19 nt, Artificial Sequence
  Description of Artificial Sequence: Synthetic oligonucleotide
  Antisense strand to SEQ ID NO: 1153970
gcucccaaggaaguuaucc

SEQ ID NO: 1153972 - RNA, 19 nt, Artificial Sequence
  Description of Artificial Sequence: Synthetic oligonucleotide
  Sense strand starting at position 921 of SEQ ID NO: 916403
gagucuaggaagugugguu

SEQ ID NO: 1153973 - RNA, 19 nt, Artificial Sequence
  Description of Artificial Sequence: Synthetic oligonucleotide
  Antisense strand to SEQ ID NO: 1153972
aaccacacuuccuagacuc

SEQ ID NO: 1153974 - RNA, 19 nt, Artificial Sequence
  Description of Artificial Sequence: Synthetic oligonucleotide
  Sense strand starting at position 926 of SEQ ID NO: 916403
uaggaagugugguugugau

SEQ ID NO: 1153975 - RNA, 19 nt, Artificial Sequence
  Description of Artificial Sequence: Synthetic oligonucleotide
  Antisense strand to SEQ ID NO: 1153974
aucacaaccacacuuccua

SEQ ID NO: 1153976 - RNA, 19 nt, Artificial Sequence
  Description of Artificial Sequence: Synthetic oligonucleotide
  Sense strand starting at position 1225 of SEQ ID NO: 916403
guccacuugccucagagua

SEQ ID NO: 1153977 - RNA, 19 nt, Artificial Sequence
  Description of Artificial Sequence: Synthetic oligonucleotide
  Antisense strand to SEQ ID NO: 1153976
uacucugaggcaaguggac

SEQ ID NO: 1153978 - RNA, 19 nt, Artificial Sequence
  Description of Artificial Sequence: Synthetic oligonucleotide
  Sense strand starting at position 1350 of SEQ ID NO: 916403
ugcagcauguuauuaucaa

SEQ ID NO: 1153979 - RNA, 19 nt, Artificial Sequence
  Description of Artificial Sequence: Synthetic oligonucleotide
  Antisense strand to SEQ ID NO: 1153978
uugauaauaacaugcugca

SEQ ID NO: 1153980 - RNA, 19 nt, Artificial Sequence
  Description of Artificial Sequence: Synthetic oligonucleotide
  Sense strand starting at position 1516 of SEQ ID NO: 916403
gugaucgaugcucagggaa

SEQ ID NO: 1153981 - RNA, 19 nt, Artificial Sequence
  Description of Artificial Sequence: Synthetic oligonucleotide
  Antisense strand to SEQ ID NO: 1153980
uucccugagcaucgaucac

SEQ ID NO: 1153982 - RNA, 19 nt, Artificial Sequence
  Description of Artificial Sequence: Synthetic oligonucleotide
  Sense strand starting at position 1519 of SEQ ID NO: 916403
aucgaugcucagggaaaca

SEQ ID NO: 1153983 - RNA, 19 nt, Artificial Sequence
  Description of Artificial Sequence: Synthetic oligonucleotide
  Antisense strand to SEQ ID NO: 1153982
uguuucccugagcaucgau

SEQ ID NO: 1153984 - RNA, 19 nt, Artificial Sequence
  Description of Artificial Sequence: Synthetic oligonucleotide
  Sense strand starting at position 1606 of SEQ ID NO: 916403
gccaauuagggaggcaaau

SEQ ID NO: 1153985 - RNA, 19 nt, Artificial Sequence
  Description of Artificial Sequence: Synthetic oligonucleotide
  Antisense strand to SEQ ID NO: 1153984
auuugccucccuaauuggc

SEQ ID NO: 1153986 - RNA, 19 nt, Artificial Sequence
  Description of Artificial Sequence: Synthetic oligonucleotide
  Sense strand starting at position 1723 of SEQ ID NO: 916403
cacagucaccuuggagaua

SEQ ID NO: 1153987 - RNA, 19 nt, Artificial Sequence
  Description of Artificial Sequence: Synthetic oligonucleotide
  Antisense strand to SEQ ID NO: 1153986
uaucuccaaggugacugug

SEQ ID NO: 1153988 - RNA, 19 nt, Artificial Sequence
  Description of Artificial Sequence: Synthetic oligonucleotide
  Sense strand starting at position 2078 of SEQ ID NO: 916403
gaccaaccuguuggaugau

SEQ ID NO: 1153989 - RNA, 19 nt, Artificial Sequence
  Description of Artificial Sequence: Synthetic oligonucleotide
  Antisense strand to SEQ ID NO: 1153988
aucauccaacagguugguc

SEQ ID NO: 1153990 - RNA, 19 nt, Artificial Sequence
  Description of Artificial Sequence: Synthetic oligonucleotide
  Sense strand starting at position 2340 of SEQ ID NO: 916403
ugacguaucugggcucaca

SEQ ID NO: 1153991 - RNA, 19 nt, Artificial Sequence
  Description of Artificial Sequence: Synthetic oligonucleotide
  Antisense strand to SEQ ID NO: 1153990
ugugagcccagauacguca

SEQ ID NO: 1153992 - RNA, 19 nt, Artificial Sequence
  Description of Artificial Sequence: Synthetic oligonucleotide
  Sense strand starting at position 2478 of SEQ ID NO: 916403
caaagagucucccuggcuu

SEQ ID NO: 1153993 - RNA, 19 nt, Artificial Sequence
  Description of Artificial Sequence: Synthetic oligonucleotide
  Antisense strand to SEQ ID NO: 1153992
aagccagggagacucuuug

SEQ ID NO: 1153994 - RNA, 19 nt, Artificial Sequence
  Description of Artificial Sequence: Synthetic oligonucleotide
  Sense strand starting at position 2480 of SEQ ID NO: 916403
aagagucucccuggcuuau

SEQ ID NO: 1153995 - RNA, 19 nt, Artificial Sequence
  Description of Artificial Sequence: Synthetic oligonucleotide
  Antisense strand to SEQ ID NO: 1153994
auaagccagggagacucuu

SEQ ID NO: 1153996 - RNA, 19 nt, Artificial Sequence
  Description of Artificial Sequence: Synthetic oligonucleotide
  Sense strand starting at position 2544 of SEQ ID NO: 916403
uuuaacuagcauugauuga

SEQ ID NO: 1153997 - RNA, 19 nt, Artificial Sequence
  Description of Artificial Sequence: Synthetic oligonucleotide
  Antisense strand to SEQ ID NO: 1153996
ucaaucaaugcuaguuaaa

SEQ ID NO: 1153998 - RNA, 19 nt, Artificial Sequence
  Description of Artificial Sequence: Synthetic oligonucleotide
  Sense strand starting at position 2623 of SEQ ID NO: 916403
aggagcucucagcauugga

SEQ ID NO: 1153999 - RNA, 19 nt, Artificial Sequence
  Description of Artificial Sequence: Synthetic oligonucleotide
  Antisense strand to SEQ ID NO: 1153998
uccaaugcugagagcuccu

SEQ ID NO: 1154000 - RNA, 19 nt, Artificial Sequence
  Description of Artificial Sequence: Synthetic oligonucleotide
  Sense strand starting at position 2627 of SEQ ID NO: 916403
gcucucagcauuggaaaug

SEQ ID NO: 1154001 - RNA, 19 nt, Artificial Sequence
  Description of Artificial Sequence: Synthetic oligonucleotide
  Antisense strand to SEQ ID NO: 1154000
cauuuccaaugcugagagc

SEQ ID NO: 1154002 - RNA, 19 nt, Artificial Sequence
  Description of Artificial Sequence: Synthetic oligonucleotide
  Sense strand starting at position 2768 of SEQ ID NO: 916403
guacaaagcacuugguaga

SEQ ID NO: 1154003 - RNA, 19 nt, Artificial Sequence
  Description of Artificial Sequence: Synthetic oligonucleotide
  Antisense strand to SEQ ID NO: 1154002
ucuaccaagugcuuuguac

SEQ ID NO: 1154004 - RNA, 19 nt, Artificial Sequence
  Description of Artificial Sequence: Synthetic oligonucleotide
  Sense strand starting at position 2794 of SEQ ID NO: 916403
ggacaaaguuggccucaau

SEQ ID NO: 1154005 - RNA, 19 nt, Artificial Sequence
  Description of Artificial Sequence: Synthetic oligonucleotide
  Antisense strand to SEQ ID NO: 1154004
auugaggccaacuuugucc

SEQ ID NO: 1154006 - RNA, 19 nt, Artificial Sequence
  Description of Artificial Sequence: Synthetic oligonucleotide
  Sense strand starting at position 2961 of SEQ ID NO: 916403
uuacaccaucugugaagua

SEQ ID NO: 1154007 - RNA, 19 nt, Artificial Sequence
  Description of Artificial Sequence: Synthetic oligonucleotide
  Antisense strand to SEQ ID NO: 1154006
uacuucacagaugguguaa

SEQ ID NO: 1154008 - RNA, 19 nt, Artificial Sequence
  Description of Artificial Sequence: Synthetic oligonucleotide
  Sense strand starting at position 3239 of SEQ ID NO: 916403
ggagugugucugggagagu

SEQ ID NO: 1154009 - RNA, 19 nt, Artificial Sequence
  Description of Artificial Sequence: Synthetic oligonucleotide
  Antisense strand to SEQ ID NO: 1154008
acucucccagacacacucc

SEQ ID NO: 1154010 - RNA, 19 nt, Artificial Sequence
  Description of Artificial Sequence: Synthetic oligonucleotide
  Sense strand starting at position 3400 of SEQ ID NO: 916403
aggcacuucuggcucacaa

SEQ ID NO: 1154011 - RNA, 19 nt, Artificial Sequence
  Description of Artificial Sequence: Synthetic oligonucleotide
  Antisense strand to SEQ ID NO: 1154010
uugugagccagaagugccu

SEQ ID NO: 1154012 - RNA, 19 nt, Artificial Sequence
  Description of Artificial Sequence: Synthetic oligonucleotide
  Sense strand starting at position 3719 of SEQ ID NO: 916403
agauaugucccagaugcuu

SEQ ID NO: 1154013 - RNA, 19 nt, Artificial Sequence
  Description of Artificial Sequence: Synthetic oligonucleotide
  Antisense strand to SEQ ID NO: 1154012
aagcaucugggacauaucu

SEQ ID NO: 1154014 - RNA, 19 nt, Artificial Sequence
  Description of Artificial Sequence: Synthetic oligonucleotide
  Sense strand starting at position 3727 of SEQ ID NO: 916403
cccagaugcuuugcaggaa

SEQ ID NO: 1154015 - RNA, 19 nt, Artificial Sequence
  Description of Artificial Sequence: Synthetic oligonucleotide
  Antisense strand to SEQ ID NO: 1154014
uuccugcaaagcaucuggg

SEQ ID NO: 1154016 - RNA, 19 nt, Artificial Sequence
  Description of Artificial Sequence: Synthetic oligonucleotide
  Sense strand starting at position 3730 of SEQ ID NO: 916403
agaugcuuugcaggaauua

SEQ ID NO: 1154017 - RNA, 19 nt, Artificial Sequence
  Description of Artificial Sequence: Synthetic oligonucleotide
  Antisense strand to SEQ ID NO: 1154016
uaauuccugcaaagcaucu

SEQ ID NO: 1154018 - RNA, 19 nt, Artificial Sequence
  Description of Artificial Sequence: Synthetic oligonucleotide
  Sense strand starting at position 3731 of SEQ ID NO: 916403
gaugcuuugcaggaauuag

SEQ ID NO: 1154019 - RNA, 19 nt, Artificial Sequence
  Description of Artificial Sequence: Synthetic oligonucleotide
  Antisense strand to SEQ ID NO: 1154018
cuaauuccugcaaagcauc

SEQ ID NO: 1154020 - RNA, 19 nt, Artificial Sequence
  Description of Artificial Sequence: Synthetic oligonucleotide
  Sense strand starting at position 3843 of SEQ ID NO: 916403
agucuaaggccacacgauu

SEQ ID NO: 1154021 - RNA, 19 nt, Artificial Sequence
  Description of Artificial Sequence: Synthetic oligonucleotide
  Antisense strand to SEQ ID NO: 1154020
aaucguguggccuuagacu

SEQ ID NO: 1154022 - RNA, 19 nt, Artificial Sequence
  Description of Artificial Sequence: Synthetic oligonucleotide
  Sense strand starting at position 3891 of SEQ ID NO: 916403
ugaggagcucuuuaaucug

SEQ ID NO: 1154023 - RNA, 19 nt, Artificial Sequence
  Description of Artificial Sequence: Synthetic oligonucleotide
  Antisense strand to SEQ ID NO: 1154022
cagauuaaagagcuccuca

SEQ ID NO: 1154024 - RNA, 19 nt, Artificial Sequence
  Description of Artificial Sequence: Synthetic oligonucleotide
  Sense strand starting at position 3953 of SEQ ID NO: 916403
gaaggaagcugccuucuua

SEQ ID NO: 1154025 - RNA, 19 nt, Artificial Sequence
  Description of Artificial Sequence: Synthetic oligonucleotide
  Antisense strand to SEQ ID NO: 1154024
uaagaaggcagcuuccuuc

SEQ ID NO: 1154026 - RNA, 19 nt, Artificial Sequence
  Description of Artificial Sequence: Synthetic oligonucleotide
  Sense strand starting at position 400 of SEQ ID NO: 916404
acaggugucugggcaaaga

SEQ ID NO: 1154027 - RNA, 19 nt, Artificial Sequence
  Description of Artificial Sequence: Synthetic oligonucleotide
  Antisense strand to SEQ ID NO: 1154026
ucuuugcccagacaccugu

SEQ ID NO: 1154028 - RNA, 19 nt, Artificial Sequence
  Description of Artificial Sequence: Synthetic oligonucleotide
  Sense strand starting at position 449 of SEQ ID NO: 916404
ggucaaucuaguggucaug

SEQ ID NO: 1154029 - RNA, 19 nt, Artificial Sequence
  Description of Artificial Sequence: Synthetic oligonucleotide
  Antisense strand to SEQ ID NO: 1154028
caugaccacuagauugacc

SEQ ID NO: 1154030 - RNA, 19 nt, Artificial Sequence
  Description of Artificial Sequence: Synthetic oligonucleotide
  Sense strand starting at position 488 of SEQ ID NO: 916404
guucuuauugucuaaucca

SEQ ID NO: 1154031 - RNA, 19 nt, Artificial Sequence
  Description of Artificial Sequence: Synthetic oligonucleotide
  Antisense strand to SEQ ID NO: 1154030
uggauuagacaauaagaac

SEQ ID NO: 1154032 - RNA, 19 nt, Artificial Sequence
  Description of Artificial Sequence: Synthetic oligonucleotide
  Sense strand starting at position 496 of SEQ ID NO: 916404
ugucuaauccaguguauuu

SEQ ID NO: 1154033 - RNA, 19 nt, Artificial Sequence
  Description of Artificial Sequence: Synthetic oligonucleotide
  Antisense strand to SEQ ID NO: 1154032
aaauacacuggauuagaca

SEQ ID NO: 1154034 - RNA, 19 nt, Artificial Sequence
  Description of Artificial Sequence: Synthetic oligonucleotide
  Sense strand starting at position 870 of SEQ ID NO: 916404
ucuggagcuuaucugagau

SEQ ID NO: 1154035 - RNA, 19 nt, Artificial Sequence
  Description of Artificial Sequence: Synthetic oligonucleotide
  Antisense strand to SEQ ID NO: 1154034
aucucagauaagcuccaga

SEQ ID NO: 1154036 - RNA, 19 nt, Artificial Sequence
  Description of Artificial Sequence: Synthetic oligonucleotide
  Sense strand starting at position 937 of SEQ ID NO: 916404
caugaucugugucuagauu

SEQ ID NO: 1154037 - RNA, 19 nt, Artificial Sequence
  Description of Artificial Sequence: Synthetic oligonucleotide
  Antisense strand to SEQ ID NO: 1154036
aaucuagacacagaucaug

SEQ ID NO: 1154038 - RNA, 19 nt, Artificial Sequence
  Description of Artificial Sequence: Synthetic oligonucleotide
  Sense strand starting at position 1072 of SEQ ID NO: 916404
cuaugaaacuaggugauca

SEQ ID NO: 1154039 - RNA, 19 nt, Artificial Sequence
  Description of Artificial Sequence: Synthetic oligonucleotide
  Antisense strand to SEQ ID NO: 1154038
ugaucaccuaguuucauag

SEQ ID NO: 1154040 - RNA, 19 nt, Artificial Sequence
  Description of Artificial Sequence: Synthetic oligonucleotide
  Sense strand starting at position 1076 of SEQ ID NO: 916404
gaaacuaggugaucagcaa

SEQ ID NO: 1154041 - RNA, 19 nt, Artificial Sequence
  Description of Artificial Sequence: Synthetic oligonucleotide
  Antisense strand to SEQ ID NO: 1154040
uugcugaucaccuaguuuc

SEQ ID NO: 1154042 - RNA, 19 nt, Artificial Sequence
  Description of Artificial Sequence: Synthetic oligonucleotide
  Sense strand starting at position 1119 of SEQ ID NO: 916404
ucagaucacagaugagguu

SEQ ID NO: 1154043 - RNA, 19 nt, Artificial Sequence
  Description of Artificial Sequence: Synthetic oligonucleotide
  Antisense strand to SEQ ID NO: 1154042
aaccucaucugugaucuga

SEQ ID NO: 1154044 - RNA, 19 nt, Artificial Sequence
  Description of Artificial Sequence: Synthetic oligonucleotide
  Sense strand starting at position 1209 of SEQ ID NO: 916404
cugugucaucuggaaguca

SEQ ID NO: 1154045 - RNA, 19 nt, Artificial Sequence
  Description of Artificial Sequence: Synthetic oligonucleotide
  Antisense strand to SEQ ID NO: 1154044
ugacuuccagaugacacag

SEQ ID NO: 1154046 - RNA, 19 nt, Artificial Sequence
  Description of Artificial Sequence: Synthetic oligonucleotide
  Sense strand starting at position 1995 of SEQ ID NO: 916404
uggaguccugauggaaacu

SEQ ID NO: 1154047 - RNA, 19 nt, Artificial Sequence
  Description of Artificial Sequence: Synthetic oligonucleotide
  Antisense strand to SEQ ID NO: 1154046
aguuuccaucaggacucca

SEQ ID NO: 1154048 - RNA, 19 nt, Artificial Sequence
  Description of Artificial Sequence: Synthetic oligonucleotide
  Sense strand starting at position 2039 of SEQ ID NO: 916404
gcccuauuuaugcgcagau

SEQ ID NO: 1154049 - RNA, 19 nt, Artificial Sequence
  Description of Artificial Sequence: Synthetic oligonucleotide
  Antisense strand to SEQ ID NO: 1154048
aucugcgcauaaauagggc

SEQ ID NO: 1154050 - RNA, 19 nt, Artificial Sequence
  Description of Artificial Sequence: Synthetic oligonucleotide
  Sense strand starting at position 2040 of SEQ ID NO: 916404
cccuauuuaugcgcagauu

SEQ ID NO: 1154051 - RNA, 19 nt, Artificial Sequence
  Description of Artificial Sequence: Synthetic oligonucleotide
  Antisense strand to SEQ ID NO: 1154050
aaucugcgcauaaauaggg

SEQ ID NO: 1154052 - RNA, 19 nt, Artificial Sequence
  Description of Artificial Sequence: Synthetic oligonucleotide
  Sense strand starting at position 2041 of SEQ ID NO: 916404
ccuauuuaugcgcagauuc

SEQ ID NO: 1154053 - RNA, 19 nt, Artificial Sequence
  Description of Artificial Sequence: Synthetic oligonucleotide
  Antisense strand to SEQ ID NO: 1154052
gaaucugcgcauaaauagg

SEQ ID NO: 1154054 - RNA, 19 nt, Artificial Sequence
  Description of Artificial Sequence: Synthetic oligonucleotide
  Sense strand starting at position 2138 of SEQ ID NO: 916404
ucuccagaaugugcuuuaa

SEQ ID NO: 1154055 - RNA, 19 nt, Artificial Sequence
  Description of Artificial Sequence: Synthetic oligonucleotide
  Antisense strand to SEQ ID NO: 1154054
uuaaagcacauucuggaga

SEQ ID NO: 1154056 - RNA, 19 nt, Artificial Sequence
  Description of Artificial Sequence: Synthetic oligonucleotide
  Sense strand starting at position 2140 of SEQ ID NO: 916404
uccagaaugugcuuuaaug

SEQ ID NO: 1154057 - RNA, 19 nt, Artificial Sequence
  Description of Artificial Sequence: Synthetic oligonucleotide
  Antisense strand to SEQ ID NO: 1154056
cauuaaagcacauucugga

SEQ ID NO: 1154058 - RNA, 19 nt, Artificial Sequence
  Description of Artificial Sequence: Synthetic oligonucleotide
  Sense strand starting at position 2373 of SEQ ID NO: 916404
ggaggagaccuguguguua

SEQ ID NO: 1154059 - RNA, 19 nt, Artificial Sequence
  Description of Artificial Sequence: Synthetic oligonucleotide
  Antisense strand to SEQ ID NO: 1154058
uaacacacaggucuccucc

SEQ ID NO: 1154060 - RNA, 19 nt, Artificial Sequence
  Description of Artificial Sequence: Synthetic oligonucleotide
  Sense strand starting at position 2558 of SEQ ID NO: 916404
ugggaacagucagcagauu

SEQ ID NO: 1154061 - RNA, 19 nt, Artificial Sequence
  Description of Artificial Sequence: Synthetic oligonucleotide
  Antisense strand to SEQ ID NO: 1154060
aaucugcugacuguuccca

SEQ ID NO: 1154062 - RNA, 19 nt, Artificial Sequence
  Description of Artificial Sequence: Synthetic oligonucleotide
  Sense strand starting at position 2566 of SEQ ID NO: 916404
gucagcagauuauuaaaua

SEQ ID NO: 1154063 - RNA, 19 nt, Artificial Sequence
  Description of Artificial Sequence: Synthetic oligonucleotide
  Antisense strand to SEQ ID NO: 1154062
uauuuaauaaucugcugac

SEQ ID NO: 1154064 - RNA, 19 nt, Artificial Sequence
  Description of Artificial Sequence: Synthetic oligonucleotide
  Sense strand starting at position 2728 of SEQ ID NO: 916404
uuauuugaguggcagaaag

SEQ ID NO: 1154065 - RNA, 19 nt, Artificial Sequence
  Description of Artificial Sequence: Synthetic oligonucleotide
  Antisense strand to SEQ ID NO: 1154064
cuuucugccacucaaauaa

SEQ ID NO: 1154066 - RNA, 19 nt, Artificial Sequence
  Description of Artificial Sequence: Synthetic oligonucleotide
  Sense strand starting at position 2774 of SEQ ID NO: 916404
gcaggaauuucuuaagaau

SEQ ID NO: 1154067 - RNA, 19 nt, Artificial Sequence
  Description of Artificial Sequence: Synthetic oligonucleotide
  Antisense strand to SEQ ID NO: 1154066
auucuuaagaaauuccugc

SEQ ID NO: 1154068 - RNA, 19 nt, Artificial Sequence
  Description of Artificial Sequence: Synthetic oligonucleotide
  Sense strand starting at position 2924 of SEQ ID NO: 916404
ggcucuagcccuuguauuu

SEQ ID NO: 1154069 - RNA, 19 nt, Artificial Sequence
  Description of Artificial Sequence: Synthetic oligonucleotide
  Antisense strand to SEQ ID NO: 1154068
aaauacaagggcuagagcc

SEQ ID NO: 1154070 - RNA, 19 nt, Artificial Sequence
  Description of Artificial Sequence: Synthetic oligonucleotide
  Sense strand starting at position 2957 of SEQ ID NO: 916404
aguaaaucuugagcuggga

SEQ ID NO: 1154071 - RNA, 19 nt, Artificial Sequence
  Description of Artificial Sequence: Synthetic oligonucleotide
  Antisense strand to SEQ ID NO: 1154070
ucccagcucaagauuuacu

SEQ ID NO: 1154072 - RNA, 19 nt, Artificial Sequence
  Description of Artificial Sequence: Synthetic oligonucleotide
  Sense strand starting at position 2976 of SEQ ID NO: 916404
uguccaauuugguagacaa

SEQ ID NO: 1154073 - RNA, 19 nt, Artificial Sequence
  Description of Artificial Sequence: Synthetic oligonucleotide
  Antisense strand to SEQ ID NO: 1154072
uugucuaccaaauuggaca

SEQ ID NO: 1154074 - RNA, 19 nt, Artificial Sequence
  Description of Artificial Sequence: Synthetic oligonucleotide
  Sense strand starting at position 2997 of SEQ ID NO: 916404
ggcagauguggcuacuuaa

SEQ ID NO: 1154075 - RNA, 19 nt, Artificial Sequence
  Description of Artificial Sequence: Synthetic oligonucleotide
  Antisense strand to SEQ ID NO: 1154074
uuaaguagccacaucugcc

SEQ ID NO: 1154076 - RNA, 19 nt, Artificial Sequence
  Description of Artificial Sequence: Synthetic oligonucleotide
  Sense strand starting at position 3000 of SEQ ID NO: 916404
agauguggcuacuuaaauu

SEQ ID NO: 1154077 - RNA, 19 nt, Artificial Sequence
  Description of Artificial Sequence: Synthetic oligonucleotide
  Antisense strand to SEQ ID NO: 1154076
aauuuaaguagccacaucu

SEQ ID NO: 1154078 - RNA, 19 nt, Artificial Sequence
  Description of Artificial Sequence: Synthetic oligonucleotide
  Sense strand starting at position 3106 of SEQ ID NO: 916404
gugccuaccuuauuagaca

SEQ ID NO: 1154079 - RNA, 19 nt, Artificial Sequence
  Description of Artificial Sequence: Synthetic oligonucleotide
  Antisense strand to SEQ ID NO: 1154078
ugucuaauaagguaggcac

SEQ ID NO: 1154080 - RNA, 19 nt, Artificial Sequence
  Description of Artificial Sequence: Synthetic oligonucleotide
  Sense strand starting at position 3114 of SEQ ID NO: 916404
cuuauuagacagugcauau

SEQ ID NO: 1154081 - RNA, 19 nt, Artificial Sequence
  Description of Artificial Sequence: Synthetic oligonucleotide
  Antisense strand to SEQ ID NO: 1154080
auaugcacugucuaauaag

SEQ ID NO: 1154082 - RNA, 19 nt, Artificial Sequence
  Description of Artificial Sequence: Synthetic oligonucleotide
  Sense strand starting at position 3273 of SEQ ID NO: 916404
guguaacucuuauuauauc

SEQ ID NO: 1154083 - RNA, 19 nt, Artificial Sequence
  Description of Artificial Sequence: Synthetic oligonucleotide
  Antisense strand to SEQ ID NO: 1154082
gauauaauaagaguuacac

SEQ ID NO: 1154084 - RNA, 19 nt, Artificial Sequence
  Description of Artificial Sequence: Synthetic oligonucleotide
  Sense strand starting at position 3307 of SEQ ID NO: 916404
aaaugucagauuggugaug

SEQ ID NO: 1154085 - RNA, 19 nt, Artificial Sequence
  Description of Artificial Sequence: Synthetic oligonucleotide
  Antisense strand to SEQ ID NO: 1154084
caucaccaaucugacauuu

SEQ ID NO: 1154086 - RNA, 19 nt, Artificial Sequence
  Description of Artificial Sequence: Synthetic oligonucleotide
  Sense strand starting at position 3427 of SEQ ID NO: 916404
gccucaguggaggaguuua

SEQ ID NO: 1154087 - RNA, 19 nt, Artificial Sequence
  Description of Artificial Sequence: Synthetic oligonucleotide
  Antisense strand to SEQ ID NO: 1154086
uaaacuccuccacugaggc

SEQ ID NO: 1154088 - RNA, 19 nt, Artificial Sequence
  Description of Artificial Sequence: Synthetic oligonucleotide
  Sense strand starting at position 3657 of SEQ ID NO: 916404
cauggaucuuaguuugaua

SEQ ID NO: 1154089 - RNA, 19 nt, Artificial Sequence
  Description of Artificial Sequence: Synthetic oligonucleotide
  Antisense strand to SEQ ID NO: 1154088
uaucaaacuaagauccaug

SEQ ID NO: 1154090 - RNA, 19 nt, Artificial Sequence
  Description of Artificial Sequence: Synthetic oligonucleotide
  Sense strand starting at position 3659 of SEQ ID NO: 916404
uggaucuuaguuugauaag

SEQ ID NO: 1154091 - RNA, 19 nt, Artificial Sequence
  Description of Artificial Sequence: Synthetic oligonucleotide
  Antisense strand to SEQ ID NO: 1154090
cuuaucaaacuaagaucca

SEQ ID NO: 1154092 - RNA, 19 nt, Artificial Sequence
  Description of Artificial Sequence: Synthetic oligonucleotide
  Sense strand starting at position 3702 of SEQ ID NO: 916404
ccuacuaugugaucaucau

SEQ ID NO: 1154093 - RNA, 19 nt, Artificial Sequence
  Description of Artificial Sequence: Synthetic oligonucleotide
  Antisense strand to SEQ ID NO: 1154092
augaugaucacauaguagg

SEQ ID NO: 1154094 - RNA, 19 nt, Artificial Sequence
  Description of Artificial Sequence: Synthetic oligonucleotide
  Sense strand starting at position 3703 of SEQ ID NO: 916404
cuacuaugugaucaucauu

SEQ ID NO: 1154095 - RNA, 19 nt, Artificial Sequence
  Description of Artificial Sequence: Synthetic oligonucleotide
  Antisense strand to SEQ ID NO: 1154094
aaugaugaucacauaguag

SEQ ID NO: 1154096 - RNA, 19 nt, Artificial Sequence
  Description of Artificial Sequence: Synthetic oligonucleotide
  Sense strand starting at position 3728 of SEQ ID NO: 916404
cguaaaugaucucuaauuc

SEQ ID NO: 1154097 - RNA, 19 nt, Artificial Sequence
  Description of Artificial Sequence: Synthetic oligonucleotide
  Antisense strand to SEQ ID NO: 1154096
gaauuagagaucauuuacg

SEQ ID NO: 1154098 - RNA, 19 nt, Artificial Sequence
  Description of Artificial Sequence: Synthetic oligonucleotide
  Sense strand starting at position 3759 of SEQ ID NO: 916404
uaugaaguaugugccauua

SEQ ID NO: 1154099 - RNA, 19 nt, Artificial Sequence
  Description of Artificial Sequence: Synthetic oligonucleotide
  Antisense strand to SEQ ID NO: 1154098
uaauggcacauacuucaua

SEQ ID NO: 1154100 - RNA, 19 nt, Artificial Sequence
  Description of Artificial Sequence: Synthetic oligonucleotide
  Sense strand starting at position 3882 of SEQ ID NO: 916404
acuuauaagcugugacaac

SEQ ID NO: 1154101 - RNA, 19 nt, Artificial Sequence
  Description of Artificial Sequence: Synthetic oligonucleotide
  Antisense strand to SEQ ID NO: 1154100
guugucacagcuuauaagu

SEQ ID NO: 1154102 - RNA, 19 nt, Artificial Sequence
  Description of Artificial Sequence: Synthetic oligonucleotide
  Sense strand starting at position 3938 of SEQ ID NO: 916404
uagugaaaguuguuuacag

SEQ ID NO: 1154103 - RNA, 19 nt, Artificial Sequence
  Description of Artificial Sequence: Synthetic oligonucleotide
  Antisense strand to SEQ ID NO: 1154102
cuguaaacaacuuucacua

SEQ ID NO: 1154104 - RNA, 19 nt, Artificial Sequence
  Description of Artificial Sequence: Synthetic oligonucleotide
  Sense strand starting at position 3957 of SEQ ID NO: 916404
gggaguaucugugaauuua

SEQ ID NO: 1154105 - RNA, 19 nt, Artificial Sequence
  Description of Artificial Sequence: Synthetic oligonucleotide
  Antisense strand to SEQ ID NO: 1154104
uaaauucacagauacuccc

SEQ ID NO: 1154106 - RNA, 19 nt, Artificial Sequence
  Description of Artificial Sequence: Synthetic oligonucleotide
  Sense strand starting at position 129 of SEQ ID NO: 916405
gagauuaggaguugaguaa

SEQ ID NO: 1154107 - RNA, 19 nt, Artificial Sequence
  Description of Artificial Sequence: Synthetic oligonucleotide
  Antisense strand to SEQ ID NO: 1154106
uuacucaacuccuaaucuc

SEQ ID NO: 1154108 - RNA, 19 nt, Artificial Sequence
  Description of Artificial Sequence: Synthetic oligonucleotide
  Sense strand starting at position 133 of SEQ ID NO: 916405
uuaggaguugaguaaguuc

SEQ ID NO: 1154109 - RNA, 19 nt, Artificial Sequence
  Description of Artificial Sequence: Synthetic oligonucleotide
  Antisense strand to SEQ ID NO: 1154108
gaacuuacucaacuccuaa

SEQ ID NO: 1154110 - RNA, 19 nt, Artificial Sequence
  Description of Artificial Sequence: Synthetic oligonucleotide
  Sense strand starting at position 316 of SEQ ID NO: 916405
uggugugauguuguugcua

SEQ ID NO: 1154111 - RNA, 19 nt, Artificial Sequence
  Description of Artificial Sequence: Synthetic oligonucleotide
  Antisense strand to SEQ ID NO: 1154110
uagcaacaacaucacacca

SEQ ID NO: 1154112 - RNA, 19 nt, Artificial Sequence
  Description of Artificial Sequence: Synthetic oligonucleotide
  Sense strand starting at position 356 of SEQ ID NO: 916405
auaaguuuauagccagaac

SEQ ID NO: 1154113 - RNA, 19 nt, Artificial Sequence
  Description of Artificial Sequence: Synthetic oligonucleotide
  Antisense strand to SEQ ID NO: 1154112
guucuggcuauaaacuuau

SEQ ID NO: 1154114 - RNA, 19 nt, Artificial Sequence
  Description of Artificial Sequence: Synthetic oligonucleotide
  Sense strand starting at position 359 of SEQ ID NO: 916405
aguuuauagccagaacuua

SEQ ID NO: 1154115 - RNA, 19 nt, Artificial Sequence
  Description of Artificial Sequence: Synthetic oligonucleotide
  Antisense strand to SEQ ID NO: 1154114
uaaguucuggcuauaaacu

SEQ ID NO: 1154116 - RNA, 19 nt, Artificial Sequence
  Description of Artificial Sequence: Synthetic oligonucleotide
  Sense strand starting at position 397 of SEQ ID NO: 916405
cuguaaguuugacuaaaca

SEQ ID NO: 1154117 - RNA, 19 nt, Artificial Sequence
  Description of Artificial Sequence: Synthetic oligonucleotide
  Antisense strand to SEQ ID NO: 1154116
uguuuagucaaacuuacag

SEQ ID NO: 1154118 - RNA, 19 nt, Artificial Sequence
  Description of Artificial Sequence: Synthetic oligonucleotide
  Sense strand starting at position 426 of SEQ ID NO: 916405
ugaagcacuuuggcauaua

SEQ ID NO: 1154119 - RNA, 19 nt, Artificial Sequence
  Description of Artificial Sequence: Synthetic oligonucleotide
  Antisense strand to SEQ ID NO: 1154118
uauaugccaaagugcuuca

SEQ ID NO: 1154120 - RNA, 19 nt, Artificial Sequence
  Description of Artificial Sequence: Synthetic oligonucleotide
  Sense strand starting at position 429 of SEQ ID NO: 916405
agcacuuuggcauauauua

SEQ ID NO: 1154121 - RNA, 19 nt, Artificial Sequence
  Description of Artificial Sequence: Synthetic oligonucleotide
  Antisense strand to SEQ ID NO: 1154120
uaauauaugccaaagugcu

SEQ ID NO: 1154122 - RNA, 19 nt, Artificial Sequence
  Description of Artificial Sequence: Synthetic oligonucleotide
  Sense strand starting at position 608 of SEQ ID NO: 916405
accuuacggucaccagaaa

SEQ ID NO: 1154123 - RNA, 19 nt, Artificial Sequence
  Description of Artificial Sequence: Synthetic oligonucleotide
  Antisense strand to SEQ ID NO: 1154122
uuucuggugaccguaaggu

SEQ ID NO: 1154124 - RNA, 19 nt, Artificial Sequence
  Description of Artificial Sequence: Synthetic oligonucleotide
  Sense strand starting at position 1070 of SEQ ID NO: 916405
aggcucaagaguugugaca

SEQ ID NO: 1154125 - RNA, 19 nt, Artificial Sequence
  Description of Artificial Sequence: Synthetic oligonucleotide
  Antisense strand to SEQ ID NO: 1154124
ugucacaacucuugagccu

SEQ ID NO: 1154126 - RNA, 19 nt, Artificial Sequence
  Description of Artificial Sequence: Synthetic oligonucleotide
  Sense strand starting at position 1077 of SEQ ID NO: 916405
agaguugugacacagcuca

SEQ ID NO: 1154127 - RNA, 19 nt, Artificial Sequence
  Description of Artificial Sequence: Synthetic oligonucleotide
  Antisense strand to SEQ ID NO: 1154126
ugagcugugucacaacucu

SEQ ID NO: 1154128 - RNA, 19 nt, Artificial Sequence
  Description of Artificial Sequence: Synthetic oligonucleotide
  Sense strand starting at position 1119 of SEQ ID NO: 916405
guuaaagccucaucaggaa

SEQ ID NO: 1154129 - RNA, 19 nt, Artificial Sequence
  Description of Artificial Sequence: Synthetic oligonucleotide
  Antisense strand to SEQ ID NO: 1154128
uuccugaugaggcuuuaac

SEQ ID NO: 1154130 - RNA, 19 nt, Artificial Sequence
  Description of Artificial Sequence: Synthetic oligonucleotide
  Sense strand starting at position 1179 of SEQ ID NO: 916405
uuuggaaguuccucuuaua

SEQ ID NO: 1154131 - RNA, 19 nt, Artificial Sequence
  Description of Artificial Sequence: Synthetic oligonucleotide
  Antisense strand to SEQ ID NO: 1154130
uauaagaggaacuuccaaa

SEQ ID NO: 1154132 - RNA, 19 nt, Artificial Sequence
  Description of Artificial Sequence: Synthetic oligonucleotide
  Sense strand starting at position 1282 of SEQ ID NO: 916405
agcagaaauguuuagugca

SEQ ID NO: 1154133 - RNA, 19 nt, Artificial Sequence
  Description of Artificial Sequence: Synthetic oligonucleotide
  Antisense strand to SEQ ID NO: 1154132
ugcacuaaacauuucugcu

SEQ ID NO: 1154134 - RNA, 19 nt, Artificial Sequence
  Description of Artificial Sequence: Synthetic oligonucleotide
  Sense strand starting at position 1284 of SEQ ID NO: 916405
cagaaauguuuagugcaga

SEQ ID NO: 1154135 - RNA, 19 nt, Artificial Sequence
  Description of Artificial Sequence: Synthetic oligonucleotide
  Antisense strand to SEQ ID NO: 1154134
ucugcacuaaacauuucug

SEQ ID NO: 1154136 - RNA, 19 nt, Artificial Sequence
  Description of Artificial Sequence: Synthetic oligonucleotide
  Sense strand starting at position 1287 of SEQ ID NO: 916405
aaauguuuagugcagaauc

SEQ ID NO: 1154137 - RNA, 19 nt, Artificial Sequence
  Description of Artificial Sequence: Synthetic oligonucleotide
  Antisense strand to SEQ ID NO: 1154136
gauucugcacuaaacauuu

SEQ ID NO: 1154138 - RNA, 19 nt, Artificial Sequence
  Description of Artificial Sequence: Synthetic oligonucleotide
  Sense strand starting at position 1297 of SEQ ID NO: 916405
ugcagaaucugaucuaacu

SEQ ID NO: 1154139 - RNA, 19 nt, Artificial Sequence
  Description of Artificial Sequence: Synthetic oligonucleotide
  Antisense strand to SEQ ID NO: 1154138
aguuagaucagauucugca

SEQ ID NO: 1154140 - RNA, 19 nt, Artificial Sequence
  Description of Artificial Sequence: Synthetic oligonucleotide
  Sense strand starting at position 1469 of SEQ ID NO: 916405
ccuuaccuuguugaugaaa

SEQ ID NO: 1154141 - RNA, 19 nt, Artificial Sequence
  Description of Artificial Sequence: Synthetic oligonucleotide
  Antisense strand to SEQ ID NO: 1154140
uuucaucaacaagguaagg

SEQ ID NO: 1154142 - RNA, 19 nt, Artificial Sequence
  Description of Artificial Sequence: Synthetic oligonucleotide
  Sense strand starting at position 1478 of SEQ ID NO: 916405
guugaugaaagaugcgaaa

SEQ ID NO: 1154143 - RNA, 19 nt, Artificial Sequence
  Description of Artificial Sequence: Synthetic oligonucleotide
  Antisense strand to SEQ ID NO: 1154142
uuucgcaucuuucaucaac

SEQ ID NO: 1154144 - RNA, 19 nt, Artificial Sequence
  Description of Artificial Sequence: Synthetic oligonucleotide
  Sense strand starting at position 1868 of SEQ ID NO: 916405
gaaagagugguacgacaug

SEQ ID NO: 1154145 - RNA, 19 nt, Artificial Sequence
  Description of Artificial Sequence: Synthetic oligonucleotide
  Antisense strand to SEQ ID NO: 1154144
caugucguaccacucuuuc

SEQ ID NO: 1154146 - RNA, 19 nt, Artificial Sequence
  Description of Artificial Sequence: Synthetic oligonucleotide
  Sense strand starting at position 1986 of SEQ ID NO: 916405
ggaggacugagauguguca

SEQ ID NO: 1154147 - RNA, 19 nt, Artificial Sequence
  Description of Artificial Sequence: Synthetic oligonucleotide
  Antisense strand to SEQ ID NO: 1154146
ugacacaucucaguccucc

SEQ ID NO: 1154148 - RNA, 19 nt, Artificial Sequence
  Description of Artificial Sequence: Synthetic oligonucleotide
  Sense strand starting at position 1988 of SEQ ID NO: 916405
aggacugagaugugucaaa

SEQ ID NO: 1154149 - RNA, 19 nt, Artificial Sequence
  Description of Artificial Sequence: Synthetic oligonucleotide
  Antisense strand to SEQ ID NO: 1154148
uuugacacaucucaguccu

SEQ ID NO: 1154150 - RNA, 19 nt, Artificial Sequence
  Description of Artificial Sequence: Synthetic oligonucleotide
  Sense strand starting at position 2017 of SEQ ID NO: 916405
ccauuaaacuagguuuaug

SEQ ID NO: 1154151 - RNA, 19 nt, Artificial Sequence
  Description of Artificial Sequence: Synthetic oligonucleotide
  Antisense strand to SEQ ID NO: 1154150
cauaaaccuaguuuaaugg

SEQ ID NO: 1154152 - RNA, 19 nt, Artificial Sequence
  Description of Artificial Sequence: Synthetic oligonucleotide
  Sense strand starting at position 2028 of SEQ ID NO: 916405
gguuuaugagcuugggaua

SEQ ID NO: 1154153 - RNA, 19 nt, Artificial Sequence
  Description of Artificial Sequence: Synthetic oligonucleotide
  Antisense strand to SEQ ID NO: 1154152
uaucccaagcucauaaacc

SEQ ID NO: 1154154 - RNA, 19 nt, Artificial Sequence
  Description of Artificial Sequence: Synthetic oligonucleotide
  Sense strand starting at position 2041 of SEQ ID NO: 916405
gggauauuggcagagcuaa

SEQ ID NO: 1154155 - RNA, 19 nt, Artificial Sequence
  Description of Artificial Sequence: Synthetic oligonucleotide
  Antisense strand to SEQ ID NO: 1154154
uuagcucugccaauauccc

SEQ ID NO: 1154156 - RNA, 19 nt, Artificial Sequence
  Description of Artificial Sequence: Synthetic oligonucleotide
  Sense strand starting at position 2070 of SEQ ID NO: 916405
ggauaauuaggguagcgaa

SEQ ID NO: 1154157 - RNA, 19 nt, Artificial Sequence
  Description of Artificial Sequence: Synthetic oligonucleotide
  Antisense strand to SEQ ID NO: 1154156
uucgcuacccuaauuaucc

SEQ ID NO: 1154158 - RNA, 19 nt, Artificial Sequence
  Description of Artificial Sequence: Synthetic oligonucleotide
  Sense strand starting at position 2191 of SEQ ID NO: 916405
agauauguuccauguaucc

SEQ ID NO: 1154159 - RNA, 19 nt, Artificial Sequence
  Description of Artificial Sequence: Synthetic oligonucleotide
  Antisense strand to SEQ ID NO: 1154158
ggauacauggaacauaucu

SEQ ID NO: 1154160 - RNA, 19 nt, Artificial Sequence
  Description of Artificial Sequence: Synthetic oligonucleotide
  Sense strand starting at position 2233 of SEQ ID NO: 916405
gagaguugggacuacguca

SEQ ID NO: 1154161 - RNA, 19 nt, Artificial Sequence
  Description of Artificial Sequence: Synthetic oligonucleotide
  Antisense strand to SEQ ID NO: 1154160
ugacguagucccaacucuc

SEQ ID NO: 1154162 - RNA, 19 nt, Artificial Sequence
  Description of Artificial Sequence: Synthetic oligonucleotide
  Sense strand starting at position 2314 of SEQ ID NO: 916405
agucccauaugcuuaaaga

SEQ ID NO: 1154163 - RNA, 19 nt, Artificial Sequence
  Description of Artificial Sequence: Synthetic oligonucleotide
  Antisense strand to SEQ ID NO: 1154162
ucuuuaagcauaugggacu

SEQ ID NO: 1154164 - RNA, 19 nt, Artificial Sequence
  Description of Artificial Sequence: Synthetic oligonucleotide
  Sense strand starting at position 2315 of SEQ ID NO: 916405
gucccauaugcuuaaagau

SEQ ID NO: 1154165 - RNA, 19 nt, Artificial Sequence
  Description of Artificial Sequence: Synthetic oligonucleotide
  Antisense strand to SEQ ID NO: 1154164
aucuuuaagcauaugggac

SEQ ID NO: 1154166 - RNA, 19 nt, Artificial Sequence
  Description of Artificial Sequence: Synthetic oligonucleotide
  Sense strand starting at position 2639 of SEQ ID NO: 916405
ggacgcucuccucaacacu

SEQ ID NO: 1154167 - RNA, 19 nt, Artificial Sequence
  Description of Artificial Sequence: Synthetic oligonucleotide
  Antisense strand to SEQ ID NO: 1154166
aguguugaggagagcgucc

SEQ ID NO: 1154168 - RNA, 19 nt, Artificial Sequence
  Description of Artificial Sequence: Synthetic oligonucleotide
  Sense strand starting at position 2741 of SEQ ID NO: 916405
cugagugucccugagguca

SEQ ID NO: 1154169 - RNA, 19 nt, Artificial Sequence
  Description of Artificial Sequence: Synthetic oligonucleotide
  Antisense strand to SEQ ID NO: 1154168
ugaccucagggacacucag

SEQ ID NO: 1154170 - RNA, 19 nt, Artificial Sequence
  Description of Artificial Sequence: Synthetic oligonucleotide
  Sense strand starting at position 2863 of SEQ ID NO: 916405
gacacagcucuuuggagau

SEQ ID NO: 1154171 - RNA, 19 nt, Artificial Sequence
  Description of Artificial Sequence: Synthetic oligonucleotide
  Antisense strand to SEQ ID NO: 1154170
aucuccaaagagcuguguc

SEQ ID NO: 1154172 - RNA, 19 nt, Artificial Sequence
  Description of Artificial Sequence: Synthetic oligonucleotide
  Sense strand starting at position 3045 of SEQ ID NO: 916405
cauuuauuguguguuggga

SEQ ID NO: 1154173 - RNA, 19 nt, Artificial Sequence
  Description of Artificial Sequence: Synthetic oligonucleotide
  Antisense strand to SEQ ID NO: 1154172
ucccaacacacaauaaaug

SEQ ID NO: 1154174 - RNA, 19 nt, Artificial Sequence
  Description of Artificial Sequence: Synthetic oligonucleotide
  Sense strand starting at position 3078 of SEQ ID NO: 916405
uuacauccauggucucauu

SEQ ID NO: 1154175 - RNA, 19 nt, Artificial Sequence
  Description of Artificial Sequence: Synthetic oligonucleotide
  Antisense strand to SEQ ID NO: 1154174
aaugagaccauggauguaa

SEQ ID NO: 1154176 - RNA, 19 nt, Artificial Sequence
  Description of Artificial Sequence: Synthetic oligonucleotide
  Sense strand starting at position 3281 of SEQ ID NO: 916405
ggaaucugcugcccauaaa

SEQ ID NO: 1154177 - RNA, 19 nt, Artificial Sequence
  Description of Artificial Sequence: Synthetic oligonucleotide
  Antisense strand to SEQ ID NO: 1154176
uuuaugggcagcagauucc

SEQ ID NO: 1154178 - RNA, 19 nt, Artificial Sequence
  Description of Artificial Sequence: Synthetic oligonucleotide
  Sense strand starting at position 3324 of SEQ ID NO: 916405
ccuuccaaccuguggauua

SEQ ID NO: 1154179 - RNA, 19 nt, Artificial Sequence
  Description of Artificial Sequence: Synthetic oligonucleotide
  Antisense strand to SEQ ID NO: 1154178
uaauccacagguuggaagg

SEQ ID NO: 1154180 - RNA, 19 nt, Artificial Sequence
  Description of Artificial Sequence: Synthetic oligonucleotide
  Sense strand starting at position 3550 of SEQ ID NO: 916405
acacucuucccuggacuga

SEQ ID NO: 1154181 - RNA, 19 nt, Artificial Sequence
  Description of Artificial Sequence: Synthetic oligonucleotide
  Antisense strand to SEQ ID NO: 1154180
ucaguccagggaagagugu

SEQ ID NO: 1154182 - RNA, 19 nt, Artificial Sequence
  Description of Artificial Sequence: Synthetic oligonucleotide
  Sense strand starting at position 3594 of SEQ ID NO: 916405
gugaauguugauggagaca

SEQ ID NO: 1154183 - RNA, 19 nt, Artificial Sequence
  Description of Artificial Sequence: Synthetic oligonucleotide
  Antisense strand to SEQ ID NO: 1154182
ugucuccaucaacauucac

SEQ ID NO: 1154184 - RNA, 19 nt, Artificial Sequence
  Description of Artificial Sequence: Synthetic oligonucleotide
  Sense strand starting at position 3972 of SEQ ID NO: 916405
aguugagaagggugugauu

SEQ ID NO: 1154185 - RNA, 19 nt, Artificial Sequence
  Description of Artificial Sequence: Synthetic oligonucleotide
  Antisense strand to SEQ ID NO: 1154184
aaucacacccuucucaacu

SEQ ID NO: 1154186 - RNA, 19 nt, Artificial Sequence
  Description of Artificial Sequence: Synthetic oligonucleotide
  Sense strand starting at position 141 of SEQ ID NO: 916406
aaguucuuccugggaguua

SEQ ID NO: 1154187 - RNA, 19 nt, Artificial Sequence
  Description of Artificial Sequence: Synthetic oligonucleotide
  Antisense strand to SEQ ID NO: 1154186
uaacucccaggaagaacuu

SEQ ID NO: 1154188 - RNA, 19 nt, Artificial Sequence
  Description of Artificial Sequence: Synthetic oligonucleotide
  Sense strand starting at position 152 of SEQ ID NO: 916406
gggaguuaaucucuucuaa

SEQ ID NO: 1154189 - RNA, 19 nt, Artificial Sequence
  Description of Artificial Sequence: Synthetic oligonucleotide
  Antisense strand to SEQ ID NO: 1154188
uuagaagagauuaacuccc

SEQ ID NO: 1154190 - RNA, 19 nt, Artificial Sequence
  Description of Artificial Sequence: Synthetic oligonucleotide
  Sense strand starting at position 198 of SEQ ID NO: 916406
gcuugaagaguccagauuc

SEQ ID NO: 1154191 - RNA, 19 nt, Artificial Sequence
  Description of Artificial Sequence: Synthetic oligonucleotide
  Antisense strand to SEQ ID NO: 1154190
gaaucuggacucuucaagc

SEQ ID NO: 1154192 - RNA, 19 nt, Artificial Sequence
  Description of Artificial Sequence: Synthetic oligonucleotide
  Sense strand starting at position 266 of SEQ ID NO: 916406
uguagaguggcgagguuaa

SEQ ID NO: 1154193 - RNA, 19 nt, Artificial Sequence
  Description of Artificial Sequence: Synthetic oligonucleotide
  Antisense strand to SEQ ID NO: 1154192
uuaaccucgccacucuaca

SEQ ID NO: 1154194 - RNA, 19 nt, Artificial Sequence
  Description of Artificial Sequence: Synthetic oligonucleotide
  Sense strand starting at position 277 of SEQ ID NO: 916406
gagguuaaagcucaccuua

SEQ ID NO: 1154195 - RNA, 19 nt, Artificial Sequence
  Description of Artificial Sequence: Synthetic oligonucleotide
  Antisense strand to SEQ ID NO: 1154194
uaaggugagcuuuaaccuc

SEQ ID NO: 1154196 - RNA, 19 nt, Artificial Sequence
  Description of Artificial Sequence: Synthetic oligonucleotide
  Sense strand starting at position 287 of SEQ ID NO: 916406
cucaccuuacuaugaggau

SEQ ID NO: 1154197 - RNA, 19 nt, Artificial Sequence
  Description of Artificial Sequence: Synthetic oligonucleotide
  Antisense strand to SEQ ID NO: 1154196
auccucauaguaaggugag

SEQ ID NO: 1154198 - RNA, 19 nt, Artificial Sequence
  Description of Artificial Sequence: Synthetic oligonucleotide
  Sense strand starting at position 811 of SEQ ID NO: 916406
gacuccucucuugagguuu

SEQ ID NO: 1154199 - RNA, 19 nt, Artificial Sequence
  Description of Artificial Sequence: Synthetic oligonucleotide
  Antisense strand to SEQ ID NO: 1154198
aaaccucaagagaggaguc

SEQ ID NO: 1154200 - RNA, 19 nt, Artificial Sequence
  Description of Artificial Sequence: Synthetic oligonucleotide
  Sense strand starting at position 854 of SEQ ID NO: 916406
cccagaacauguuccuagu

SEQ ID NO: 1154201 - RNA, 19 nt, Artificial Sequence
  Description of Artificial Sequence: Synthetic oligonucleotide
  Antisense strand to SEQ ID NO: 1154200
acuaggaacauguucuggg

SEQ ID NO: 1154202 - RNA, 19 nt, Artificial Sequence
  Description of Artificial Sequence: Synthetic oligonucleotide
  Sense strand starting at position 944 of SEQ ID NO: 916406
ugcaaacucuaguuggaca

SEQ ID NO: 1154203 - RNA, 19 nt, Artificial Sequence
  Description of Artificial Sequence: Synthetic oligonucleotide
  Antisense strand to SEQ ID NO: 1154202
uguccaacuagaguuugca

SEQ ID NO: 1154204 - RNA, 19 nt, Artificial Sequence
  Description of Artificial Sequence: Synthetic oligonucleotide
  Sense strand starting at position 1015 of SEQ ID NO: 916406
ccauaaagccugugaggau

SEQ ID NO: 1154205 - RNA, 19 nt, Artificial Sequence
  Description of Artificial Sequence: Synthetic oligonucleotide
  Antisense strand to SEQ ID NO: 1154204
auccucacaggcuuuaugg

SEQ ID NO: 1154206 - RNA, 19 nt, Artificial Sequence
  Description of Artificial Sequence: Synthetic oligonucleotide
  Sense strand starting at position 1075 of SEQ ID NO: 916406
ggaacaguggcuuggacaa

SEQ ID NO: 1154207 - RNA, 19 nt, Artificial Sequence
  Description of Artificial Sequence: Synthetic oligonucleotide
  Antisense strand to SEQ ID NO: 1154206
uuguccaagccacuguucc

SEQ ID NO: 1154208 - RNA, 19 nt, Artificial Sequence
  Description of Artificial Sequence: Synthetic oligonucleotide
  Sense strand starting at position 1124 of SEQ ID NO: 916406
cacugugugguauagaaag

SEQ ID NO: 1154209 - RNA, 19 nt, Artificial Sequence
  Description of Artificial Sequence: Synthetic oligonucleotide
  Antisense strand to SEQ ID NO: 1154208
cuuucuauaccacacagug

SEQ ID NO: 1154210 - RNA, 19 nt, Artificial Sequence
  Description of Artificial Sequence: Synthetic oligonucleotide
  Sense strand starting at position 1130 of SEQ ID NO: 916406
gugguauagaaagaguucu

SEQ ID NO: 1154211 - RNA, 19 nt, Artificial Sequence
  Description of Artificial Sequence: Synthetic oligonucleotide
  Antisense strand to SEQ ID NO: 1154210
agaacucuuucuauaccac

SEQ ID NO: 1154212 - RNA, 19 nt, Artificial Sequence
  Description of Artificial Sequence: Synthetic oligonucleotide
  Sense strand starting at position 1220 of SEQ ID NO: 916406
agcaucuccuuggcauuua

SEQ ID NO: 1154213 - RNA, 19 nt, Artificial Sequence
  Description of Artificial Sequence: Synthetic oligonucleotide
  Antisense strand to SEQ ID NO: 1154212
uaaaugccaaggagaugcu

SEQ ID NO: 1154214 - RNA, 19 nt, Artificial Sequence
  Description of Artificial Sequence: Synthetic oligonucleotide
  Sense strand starting at position 1297 of SEQ ID NO: 916406
gugauauuaucacucagug

SEQ ID NO: 1154215 - RNA, 19 nt, Artificial Sequence
  Description of Artificial Sequence: Synthetic oligonucleotide
  Antisense strand to SEQ ID NO: 1154214
cacugagugauaauaucac

SEQ ID NO: 1154216 - RNA, 19 nt, Artificial Sequence
  Description of Artificial Sequence: Synthetic oligonucleotide
  Sense strand starting at position 1302 of SEQ ID NO: 916406
auuaucacucaguguggaa

SEQ ID NO: 1154217 - RNA, 19 nt, Artificial Sequence
  Description of Artificial Sequence: Synthetic oligonucleotide
  Antisense strand to SEQ ID NO: 1154216
uuccacacugagugauaau

SEQ ID NO: 1154218 - RNA, 19 nt, Artificial Sequence
  Description of Artificial Sequence: Synthetic oligonucleotide
  Sense strand starting at position 1409 of SEQ ID NO: 916406
guguccuagaaguaugacu

SEQ ID NO: 1154219 - RNA, 19 nt, Artificial Sequence
  Description of Artificial Sequence: Synthetic oligonucleotide
  Antisense strand to SEQ ID NO: 1154218
agucauacuucuaggacac

SEQ ID NO: 1154220 - RNA, 19 nt, Artificial Sequence
  Description of Artificial Sequence: Synthetic oligonucleotide
  Sense strand starting at position 1411 of SEQ ID NO: 916406
guccuagaaguaugacuac

SEQ ID NO: 1154221 - RNA, 19 nt, Artificial Sequence
  Description of Artificial Sequence: Synthetic oligonucleotide
  Antisense strand to SEQ ID NO: 1154220
guagucauacuucuaggac

SEQ ID NO: 1154222 - RNA, 19 nt, Artificial Sequence
  Description of Artificial Sequence: Synthetic oligonucleotide
  Sense strand starting at position 1414 of SEQ ID NO: 916406
cuagaaguaugacuaccuu

SEQ ID NO: 1154223 - RNA, 19 nt, Artificial Sequence
  Description of Artificial Sequence: Synthetic oligonucleotide
  Antisense strand to SEQ ID NO: 1154222
aagguagucauacuucuag

SEQ ID NO: 1154224 - RNA, 19 nt, Artificial Sequence
  Description of Artificial Sequence: Synthetic oligonucleotide
  Sense strand starting at position 1444 of SEQ ID NO: 916406
ugggaacuucugugggcaa

SEQ ID NO: 1154225 - RNA, 19 nt, Artificial Sequence
  Description of Artificial Sequence: Synthetic oligonucleotide
  Antisense strand to SEQ ID NO: 1154224
uugcccacagaaguuccca

SEQ ID NO: 1154226 - RNA, 19 nt, Artificial Sequence
  Description of Artificial Sequence: Synthetic oligonucleotide
  Sense strand starting at position 1497 of SEQ ID NO: 916406
cugaguucugaacaugagu

SEQ ID NO: 1154227 - RNA, 19 nt, Artificial Sequence
  Description of Artificial Sequence: Synthetic oligonucleotide
  Antisense strand to SEQ ID NO: 1154226
acucauguucagaacucag

SEQ ID NO: 1154228 - RNA, 19 nt, Artificial Sequence
  Description of Artificial Sequence: Synthetic oligonucleotide
  Sense strand starting at position 1499 of SEQ ID NO: 916406
gaguucugaacaugaguag

SEQ ID NO: 1154229 - RNA, 19 nt, Artificial Sequence
  Description of Artificial Sequence: Synthetic oligonucleotide
  Antisense strand to SEQ ID NO: 1154228
cuacucauguucagaacuc

SEQ ID NO: 1154230 - RNA, 19 nt, Artificial Sequence
  Description of Artificial Sequence: Synthetic oligonucleotide
  Sense strand starting at position 1942 of SEQ ID NO: 916406
gagguuaggaggugucuga

SEQ ID NO: 1154231 - RNA, 19 nt, Artificial Sequence
  Description of Artificial Sequence: Synthetic oligonucleotide
  Antisense strand to SEQ ID NO: 1154230
ucagacaccuccuaaccuc

SEQ ID NO: 1154232 - RNA, 19 nt, Artificial Sequence
  Description of Artificial Sequence: Synthetic oligonucleotide
  Sense strand starting at position 2253 of SEQ ID NO: 916406
gguuccugaaagcauuagu

SEQ ID NO: 1154233 - RNA, 19 nt, Artificial Sequence
  Description of Artificial Sequence: Synthetic oligonucleotide
  Antisense strand to SEQ ID NO: 1154232
acuaaugcuuucaggaacc

SEQ ID NO: 1154234 - RNA, 19 nt, Artificial Sequence
  Description of Artificial Sequence: Synthetic oligonucleotide
  Sense strand starting at position 2330 of SEQ ID NO: 916406
ucugaacccuguucugaaa

SEQ ID NO: 1154235 - RNA, 19 nt, Artificial Sequence
  Description of Artificial Sequence: Synthetic oligonucleotide
  Antisense strand to SEQ ID NO: 1154234
uuucagaacaggguucaga

SEQ ID NO: 1154236 - RNA, 19 nt, Artificial Sequence
  Description of Artificial Sequence: Synthetic oligonucleotide
  Sense strand starting at position 2692 of SEQ ID NO: 916406
ggugucauugcugauggga

SEQ ID NO: 1154237 - RNA, 19 nt, Artificial Sequence
  Description of Artificial Sequence: Synthetic oligonucleotide
  Antisense strand to SEQ ID NO: 1154236
ucccaucagcaaugacacc

SEQ ID NO: 1154238 - RNA, 19 nt, Artificial Sequence
  Description of Artificial Sequence: Synthetic oligonucleotide
  Sense strand starting at position 2695 of SEQ ID NO: 916406
gucauugcugaugggauca

SEQ ID NO: 1154239 - RNA, 19 nt, Artificial Sequence
  Description of Artificial Sequence: Synthetic oligonucleotide
  Antisense strand to SEQ ID NO: 1154238
ugaucccaucagcaaugac

SEQ ID NO: 1154240 - RNA, 19 nt, Artificial Sequence
  Description of Artificial Sequence: Synthetic oligonucleotide
  Sense strand starting at position 2725 of SEQ ID NO: 916406
uguggaauaccucagagcu

SEQ ID NO: 1154241 - RNA, 19 nt, Artificial Sequence
  Description of Artificial Sequence: Synthetic oligonucleotide
  Antisense strand to SEQ ID NO: 1154240
agcucugagguauuccaca

SEQ ID NO: 1154242 - RNA, 19 nt, Artificial Sequence
  Description of Artificial Sequence: Synthetic oligonucleotide
  Sense strand starting at position 2798 of SEQ ID NO: 916406
guaguacaggauugagaga

SEQ ID NO: 1154243 - RNA, 19 nt, Artificial Sequence
  Description of Artificial Sequence: Synthetic oligonucleotide
  Antisense strand to SEQ ID NO: 1154242
ucucucaauccuguacuac

SEQ ID NO: 1154244 - RNA, 19 nt, Artificial Sequence
  Description of Artificial Sequence: Synthetic oligonucleotide
  Sense strand starting at position 2846 of SEQ ID NO: 916406
cagacuagacuauguguau

SEQ ID NO: 1154245 - RNA, 19 nt, Artificial Sequence
  Description of Artificial Sequence: Synthetic oligonucleotide
  Antisense strand to SEQ ID NO: 1154244
auacacauagucuagucug

SEQ ID NO: 1154246 - RNA, 19 nt, Artificial Sequence
  Description of Artificial Sequence: Synthetic oligonucleotide
  Sense strand starting at position 2847 of SEQ ID NO: 916406
agacuagacuauguguauu

SEQ ID NO: 1154247 - RNA, 19 nt, Artificial Sequence
  Description of Artificial Sequence: Synthetic oligonucleotide
  Antisense strand to SEQ ID NO: 1154246
aauacacauagucuagucu

SEQ ID NO: 1154248 - RNA, 19 nt, Artificial Sequence
  Description of Artificial Sequence: Synthetic oligonucleotide
  Sense strand starting at position 3174 of SEQ ID NO: 916406
ucagcaggguccuuaaaug

SEQ ID NO: 1154249 - RNA, 19 nt, Artificial Sequence
  Description of Artificial Sequence: Synthetic oligonucleotide
  Antisense strand to SEQ ID NO: 1154248
cauuuaaggacccugcuga

SEQ ID NO: 1154250 - RNA, 19 nt, Artificial Sequence
  Description of Artificial Sequence: Synthetic oligonucleotide
  Sense strand starting at position 3307 of SEQ ID NO: 916406
aggcaauggcuuugaugga

SEQ ID NO: 1154251 - RNA, 19 nt, Artificial Sequence
  Description of Artificial Sequence: Synthetic oligonucleotide
  Antisense strand to SEQ ID NO: 1154250
uccaucaaagccauugccu

SEQ ID NO: 1154252 - RNA, 19 nt, Artificial Sequence
  Description of Artificial Sequence: Synthetic oligonucleotide
  Sense strand starting at position 3405 of SEQ ID NO: 916406
gacugcuuucgucaggaga

SEQ ID NO: 1154253 - RNA, 19 nt, Artificial Sequence
  Description of Artificial Sequence: Synthetic oligonucleotide
  Antisense strand to SEQ ID NO: 1154252
ucuccugacgaaagcaguc

SEQ ID NO: 1154254 - RNA, 19 nt, Artificial Sequence
  Description of Artificial Sequence: Synthetic oligonucleotide
  Sense strand starting at position 3408 of SEQ ID NO: 916406
ugcuuucgucaggagagga

SEQ ID NO: 1154255 - RNA, 19 nt, Artificial Sequence
  Description of Artificial Sequence: Synthetic oligonucleotide
  Antisense strand to SEQ ID NO: 1154254
uccucuccugacgaaagca

SEQ ID NO: 1154256 - RNA, 19 nt, Artificial Sequence
  Description of Artificial Sequence: Synthetic oligonucleotide
  Sense strand starting at position 3547 of SEQ ID NO: 916406
ggaugagugggccaguuau

SEQ ID NO: 1154257 - RNA, 19 nt, Artificial Sequence
  Description of Artificial Sequence: Synthetic oligonucleotide
  Antisense strand to SEQ ID NO: 1154256
auaacuggcccacucaucc

SEQ ID NO: 1154258 - RNA, 19 nt, Artificial Sequence
  Description of Artificial Sequence: Synthetic oligonucleotide
  Sense strand starting at position 3785 of SEQ ID NO: 916406
gggauccuggugugaaaga

SEQ ID NO: 1154259 - RNA, 19 nt, Artificial Sequence
  Description of Artificial Sequence: Synthetic oligonucleotide
  Antisense strand to SEQ ID NO: 1154258
ucuuucacaccaggauccc

SEQ ID NO: 1154260 - RNA, 19 nt, Artificial Sequence
  Description of Artificial Sequence: Synthetic oligonucleotide
  Sense strand starting at position 3913 of SEQ ID NO: 916406
uggugcugucauguucagu

SEQ ID NO: 1154261 - RNA, 19 nt, Artificial Sequence
  Description of Artificial Sequence: Synthetic oligonucleotide
  Antisense strand to SEQ ID NO: 1154260
acugaacaugacagcacca

SEQ ID NO: 1154262 - RNA, 19 nt, Artificial Sequence
  Description of Artificial Sequence: Synthetic oligonucleotide
  Sense strand starting at position 3939 of SEQ ID NO: 916406
gggucaaacaucugcuaga

SEQ ID NO: 1154263 - RNA, 19 nt, Artificial Sequence
  Description of Artificial Sequence: Synthetic oligonucleotide
  Antisense strand to SEQ ID NO: 1154262
ucuagcagauguuugaccc

SEQ ID NO: 1154264 - RNA, 19 nt, Artificial Sequence
  Description of Artificial Sequence: Synthetic oligonucleotide
  Sense strand starting at position 3940 of SEQ ID NO: 916406
ggucaaacaucugcuagac

SEQ ID NO: 1154265 - RNA, 19 nt, Artificial Sequence
  Description of Artificial Sequence: Synthetic oligonucleotide
  Antisense strand to SEQ ID NO: 1154264
gucuagcagauguuugacc

SEQ ID NO: 1154266 - RNA, 19 nt, Artificial Sequence
  Description of Artificial Sequence: Synthetic oligonucleotide
  Sense strand starting at position 188 of SEQ ID NO: 916407
uggcauuugaagugcuuga

SEQ ID NO: 1154267 - RNA, 19 nt, Artificial Sequence
  Description of Artificial Sequence: Synthetic oligonucleotide
  Antisense strand to SEQ ID NO: 1154266
ucaagcacuucaaaugcca

SEQ ID NO: 1154268 - RNA, 19 nt, Artificial Sequence
  Description of Artificial Sequence: Synthetic oligonucleotide
  Sense strand starting at position 242 of SEQ ID NO: 916407
cagcgaugacuugaccaca

SEQ ID NO: 1154269 - RNA, 19 nt, Artificial Sequence
  Description of Artificial Sequence: Synthetic oligonucleotide
  Antisense strand to SEQ ID NO: 1154268
uguggucaagucaucgcug

SEQ ID NO: 1154270 - RNA, 19 nt, Artificial Sequence
  Description of Artificial Sequence: Synthetic oligonucleotide
  Sense strand starting at position 447 of SEQ ID NO: 916407
ggaaguuggaaggguugau

SEQ ID NO: 1154271 - RNA, 19 nt, Artificial Sequence
  Description of Artificial Sequence: Synthetic oligonucleotide
  Antisense strand to SEQ ID NO: 1154270
aucaacccuuccaacuucc

SEQ ID NO: 1154272 - RNA, 19 nt, Artificial Sequence
  Description of Artificial Sequence: Synthetic oligonucleotide
  Sense strand starting at position 451 of SEQ ID NO: 916407
guuggaaggguugauucua

SEQ ID NO: 1154273 - RNA, 19 nt, Artificial Sequence
  Description of Artificial Sequence: Synthetic oligonucleotide
  Antisense strand to SEQ ID NO: 1154272
uagaaucaacccuuccaac

SEQ ID NO: 1154274 - RNA, 19 nt, Artificial Sequence
  Description of Artificial Sequence: Synthetic oligonucleotide
  Sense strand starting at position 778 of SEQ ID NO: 916407
uuggguuauccacaucacu

SEQ ID NO: 1154275 - RNA, 19 nt, Artificial Sequence
  Description of Artificial Sequence: Synthetic oligonucleotide
  Antisense strand to SEQ ID NO: 1154274
agugauguggauaacccaa

SEQ ID NO: 1154276 - RNA, 19 nt, Artificial Sequence
  Description of Artificial Sequence: Synthetic oligonucleotide
  Sense strand starting at position 863 of SEQ ID NO: 916407
aggcaacuuggccgaauuu

SEQ ID NO: 1154277 - RNA, 19 nt, Artificial Sequence
  Description of Artificial Sequence: Synthetic oligonucleotide
  Antisense strand to SEQ ID NO: 1154276
aaauucggccaaguugccu

SEQ ID NO: 1154278 - RNA, 19 nt, Artificial Sequence
  Description of Artificial Sequence: Synthetic oligonucleotide
  Sense strand starting at position 1069 of SEQ ID NO: 916407
caguguuuccagccuguuu

SEQ ID NO: 1154279 - RNA, 19 nt, Artificial Sequence
  Description of Artificial Sequence: Synthetic oligonucleotide
  Antisense strand to SEQ ID NO: 1154278
aaacaggcuggaaacacug

SEQ ID NO: 1154280 - RNA, 19 nt, Artificial Sequence
  Description of Artificial Sequence: Synthetic oligonucleotide
  Sense strand starting at position 1088 of SEQ ID NO: 916407
cagagacauuucuaaguga

SEQ ID NO: 1154281 - RNA, 19 nt, Artificial Sequence
  Description of Artificial Sequence: Synthetic oligonucleotide
  Antisense strand to SEQ ID NO: 1154280
ucacuuagaaaugucucug

SEQ ID NO: 1154282 - RNA, 19 nt, Artificial Sequence
  Description of Artificial Sequence: Synthetic oligonucleotide
  Sense strand starting at position 1158 of SEQ ID NO: 916407
uccucuguccuccagaaga

SEQ ID NO: 1154283 - RNA, 19 nt, Artificial Sequence
  Description of Artificial Sequence: Synthetic oligonucleotide
  Antisense strand to SEQ ID NO: 1154282
ucuucuggaggacagagga

SEQ ID NO: 1154284 - RNA, 19 nt, Artificial Sequence
  Description of Artificial Sequence: Synthetic oligonucleotide
  Sense strand starting at position 1160 of SEQ ID NO: 916407
cucuguccuccagaagaua

SEQ ID NO: 1154285 - RNA, 19 nt, Artificial Sequence
  Description of Artificial Sequence: Synthetic oligonucleotide
  Antisense strand to SEQ ID NO: 1154284
uaucuucuggaggacagag

SEQ ID NO: 1154286 - RNA, 19 nt, Artificial Sequence
  Description of Artificial Sequence: Synthetic oligonucleotide
  Sense strand starting at position 1273 of SEQ ID NO: 916407
gagguaggcacuugaaaga

SEQ ID NO: 1154287 - RNA, 19 nt, Artificial Sequence
  Description of Artificial Sequence: Synthetic oligonucleotide
  Antisense strand to SEQ ID NO: 1154286
ucuuucaagugccuaccuc

SEQ ID NO: 1154288 - RNA, 19 nt, Artificial Sequence
  Description of Artificial Sequence: Synthetic oligonucleotide
  Sense strand starting at position 1282 of SEQ ID NO: 916407
acuugaaagaucugagguc

SEQ ID NO: 1154289 - RNA, 19 nt, Artificial Sequence
  Description of Artificial Sequence: Synthetic oligonucleotide
  Antisense strand to SEQ ID NO: 1154288
gaccucagaucuuucaagu

SEQ ID NO: 1154290 - RNA, 19 nt, Artificial Sequence
  Description of Artificial Sequence: Synthetic oligonucleotide
  Sense strand starting at position 1399 of SEQ ID NO: 916407
auagguaccuugucaauga

SEQ ID NO: 1154291 - RNA, 19 nt, Artificial Sequence
  Description of Artificial Sequence: Synthetic oligonucleotide
  Antisense strand to SEQ ID NO: 1154290
ucauugacaagguaccuau

SEQ ID NO: 1154292 - RNA, 19 nt, Artificial Sequence
  Description of Artificial Sequence: Synthetic oligonucleotide
  Sense strand starting at position 1403 of SEQ ID NO: 916407
guaccuugucaaugaagga

SEQ ID NO: 1154293 - RNA, 19 nt, Artificial Sequence
  Description of Artificial Sequence: Synthetic oligonucleotide
  Antisense strand to SEQ ID NO: 1154292
uccuucauugacaagguac

SEQ ID NO: 1154294 - RNA, 19 nt, Artificial Sequence
  Description of Artificial Sequence: Synthetic oligonucleotide
  Sense strand starting at position 1879 of SEQ ID NO: 916407
ggugucauugcugaacaag

SEQ ID NO: 1154295 - RNA, 19 nt, Artificial Sequence
  Description of Artificial Sequence: Synthetic oligonucleotide
  Antisense strand to SEQ ID NO: 1154294
cuuguucagcaaugacacc

SEQ ID NO: 1154296 - RNA, 19 nt, Artificial Sequence
  Description of Artificial Sequence: Synthetic oligonucleotide
  Sense strand starting at position 2106 of SEQ ID NO: 916407
auuuaugagcuuggguagu

SEQ ID NO: 1154297 - RNA, 19 nt, Artificial Sequence
  Description of Artificial Sequence: Synthetic oligonucleotide
  Antisense strand to SEQ ID NO: 1154296
acuacccaagcucauaaau

SEQ ID NO: 1154298 - RNA, 19 nt, Artificial Sequence
  Description of Artificial Sequence: Synthetic oligonucleotide
  Sense strand starting at position 2153 of SEQ ID NO: 916407
ccuugacaaugaguuaacu

SEQ ID NO: 1154299 - RNA, 19 nt, Artificial Sequence
  Description of Artificial Sequence: Synthetic oligonucleotide
  Antisense strand to SEQ ID NO: 1154298
aguuaacucauugucaagg

SEQ ID NO: 1154300 - RNA, 19 nt, Artificial Sequence
  Description of Artificial Sequence: Synthetic oligonucleotide
  Sense strand starting at position 2173 of SEQ ID NO: 916407
agacacaccuagucucauu

SEQ ID NO: 1154301 - RNA, 19 nt, Artificial Sequence
  Description of Artificial Sequence: Synthetic oligonucleotide
  Antisense strand to SEQ ID NO: 1154300
aaugagacuaggugugucu

SEQ ID NO: 1154302 - RNA, 19 nt, Artificial Sequence
  Description of Artificial Sequence: Synthetic oligonucleotide
  Sense strand starting at position 2180 of SEQ ID NO: 916407
ccuagucucauugggauga

SEQ ID NO: 1154303 - RNA, 19 nt, Artificial Sequence
  Description of Artificial Sequence: Synthetic oligonucleotide
  Antisense strand to SEQ ID NO: 1154302
ucaucccaaugagacuagg

SEQ ID NO: 1154304 - RNA, 19 nt, Artificial Sequence
  Description of Artificial Sequence: Synthetic oligonucleotide
  Sense strand starting at position 2191 of SEQ ID NO: 916407
ugggaugagggcuguaaca

SEQ ID NO: 1154305 - RNA, 19 nt, Artificial Sequence
  Description of Artificial Sequence: Synthetic oligonucleotide
  Antisense strand to SEQ ID NO: 1154304
uguuacagcccucauccca

SEQ ID NO: 1154306 - RNA, 19 nt, Artificial Sequence
  Description of Artificial Sequence: Synthetic oligonucleotide
  Sense strand starting at position 2301 of SEQ ID NO: 916407
auuaauuugcuuuggucau

SEQ ID NO: 1154307 - RNA, 19 nt, Artificial Sequence
  Description of Artificial Sequence: Synthetic oligonucleotide
  Antisense strand to SEQ ID NO: 1154306
augaccaaagcaaauuaau

SEQ ID NO: 1154308 - RNA, 19 nt, Artificial Sequence
  Description of Artificial Sequence: Synthetic oligonucleotide
  Sense strand starting at position 2316 of SEQ ID NO: 916407
ucauaaaugcaauagguuu

SEQ ID NO: 1154309 - RNA, 19 nt, Artificial Sequence
  Description of Artificial Sequence: Synthetic oligonucleotide
  Antisense strand to SEQ ID NO: 1154308
aaaccuauugcauuuauga

SEQ ID NO: 1154310 - RNA, 19 nt, Artificial Sequence
  Description of Artificial Sequence: Synthetic oligonucleotide
  Sense strand starting at position 2350 of SEQ ID NO: 916407
ggcuaaccaccagaaaguu

SEQ ID NO: 1154311 - RNA, 19 nt, Artificial Sequence
  Description of Artificial Sequence: Synthetic oligonucleotide
  Antisense strand to SEQ ID NO: 1154310
aacuuucuggugguuagcc

SEQ ID NO: 1154312 - RNA, 19 nt, Artificial Sequence
  Description of Artificial Sequence: Synthetic oligonucleotide
  Sense strand starting at position 2362 of SEQ ID NO: 916407
gaaaguuaggauggcgaca

SEQ ID NO: 1154313 - RNA, 19 nt, Artificial Sequence
  Description of Artificial Sequence: Synthetic oligonucleotide
  Antisense strand to SEQ ID NO: 1154312
ugucgccauccuaacuuuc

SEQ ID NO: 1154314 - RNA, 19 nt, Artificial Sequence
  Description of Artificial Sequence: Synthetic oligonucleotide
  Sense strand starting at position 2457 of SEQ ID NO: 916407
ccaaguaagaagugauaug

SEQ ID NO: 1154315 - RNA, 19 nt, Artificial Sequence
  Description of Artificial Sequence: Synthetic oligonucleotide
  Antisense strand to SEQ ID NO: 1154314
cauaucacuucuuacuugg

SEQ ID NO: 1154316 - RNA, 19 nt, Artificial Sequence
  Description of Artificial Sequence: Synthetic oligonucleotide
  Sense strand starting at position 2488 of SEQ ID NO: 916407
uuuguugcauuucugcaaa

SEQ ID NO: 1154317 - RNA, 19 nt, Artificial Sequence
  Description of Artificial Sequence: Synthetic oligonucleotide
  Antisense strand to SEQ ID NO: 1154316
uuugcagaaaugcaacaaa

SEQ ID NO: 1154318 - RNA, 19 nt, Artificial Sequence
  Description of Artificial Sequence: Synthetic oligonucleotide
  Sense strand starting at position 2490 of SEQ ID NO: 916407
uguugcauuucugcaaauc

SEQ ID NO: 1154319 - RNA, 19 nt, Artificial Sequence
  Description of Artificial Sequence: Synthetic oligonucleotide
  Antisense strand to SEQ ID NO: 1154318
gauuugcagaaaugcaaca

SEQ ID NO: 1154320 - RNA, 19 nt, Artificial Sequence
  Description of Artificial Sequence: Synthetic oligonucleotide
  Sense strand starting at position 2552 of SEQ ID NO: 916407
ggcuguuuaguauacaaga

SEQ ID NO: 1154321 - RNA, 19 nt, Artificial Sequence
  Description of Artificial Sequence: Synthetic oligonucleotide
  Antisense strand to SEQ ID NO: 1154320
ucuuguauacuaaacagcc

SEQ ID NO: 1154322 - RNA, 19 nt, Artificial Sequence
  Description of Artificial Sequence: Synthetic oligonucleotide
  Sense strand starting at position 2554 of SEQ ID NO: 916407
cuguuuaguauacaagagu

SEQ ID NO: 1154323 - RNA, 19 nt, Artificial Sequence
  Description of Artificial Sequence: Synthetic oligonucleotide
  Antisense strand to SEQ ID NO: 1154322
acucuuguauacuaaacag

SEQ ID NO: 1154324 - RNA, 19 nt, Artificial Sequence
  Description of Artificial Sequence: Synthetic oligonucleotide
  Sense strand starting at position 2588 of SEQ ID NO: 916407
gcucauuugggcuagugua

SEQ ID NO: 1154325 - RNA, 19 nt, Artificial Sequence
  Description of Artificial Sequence: Synthetic oligonucleotide
  Antisense strand to SEQ ID NO: 1154324
uacacuagcccaaaugagc

SEQ ID NO: 1154326 - RNA, 19 nt, Artificial Sequence
  Description of Artificial Sequence: Synthetic oligonucleotide
  Sense strand starting at position 2950 of SEQ ID NO: 916407
auuggaaaguuucuguaua

SEQ ID NO: 1154327 - RNA, 19 nt, Artificial Sequence
  Description of Artificial Sequence: Synthetic oligonucleotide
  Antisense strand to SEQ ID NO: 1154326
uauacagaaacuuuccaau

SEQ ID NO: 1154328 - RNA, 19 nt, Artificial Sequence
  Description of Artificial Sequence: Synthetic oligonucleotide
  Sense strand starting at position 2952 of SEQ ID NO: 916407
uggaaaguuucuguauaga

SEQ ID NO: 1154329 - RNA, 19 nt, Artificial Sequence
  Description of Artificial Sequence: Synthetic oligonucleotide
  Antisense strand to SEQ ID NO: 1154328
ucuauacagaaacuuucca

SEQ ID NO: 1154330 - RNA, 19 nt, Artificial Sequence
  Description of Artificial Sequence: Synthetic oligonucleotide
  Sense strand starting at position 2996 of SEQ ID NO: 916407
ccaaauauaccauaggugu

SEQ ID NO: 1154331 - RNA, 19 nt, Artificial Sequence
  Description of Artificial Sequence: Synthetic oligonucleotide
  Antisense strand to SEQ ID NO: 1154330
acaccuaugguauauuugg

SEQ ID NO: 1154332 - RNA, 19 nt, Artificial Sequence
  Description of Artificial Sequence: Synthetic oligonucleotide
  Sense strand starting at position 3039 of SEQ ID NO: 916407
uuccuugaauuauugauga

SEQ ID NO: 1154333 - RNA, 19 nt, Artificial Sequence
  Description of Artificial Sequence: Synthetic oligonucleotide
  Antisense strand to SEQ ID NO: 1154332
ucaucaauaauucaaggaa

SEQ ID NO: 1154334 - RNA, 19 nt, Artificial Sequence
  Description of Artificial Sequence: Synthetic oligonucleotide
  Sense strand starting at position 3050 of SEQ ID NO: 916407
auugaugaaucuuugguua

SEQ ID NO: 1154335 - RNA, 19 nt, Artificial Sequence
  Description of Artificial Sequence: Synthetic oligonucleotide
  Antisense strand to SEQ ID NO: 1154334
uaaccaaagauucaucaau

SEQ ID NO: 1154336 - RNA, 19 nt, Artificial Sequence
  Description of Artificial Sequence: Synthetic oligonucleotide
  Sense strand starting at position 3053 of SEQ ID NO: 916407
gaugaaucuuugguuagga

SEQ ID NO: 1154337 - RNA, 19 nt, Artificial Sequence
  Description of Artificial Sequence: Synthetic oligonucleotide
  Antisense strand to SEQ ID NO: 1154336
uccuaaccaaagauucauc

SEQ ID NO: 1154338 - RNA, 19 nt, Artificial Sequence
  Description of Artificial Sequence: Synthetic oligonucleotide
  Sense strand starting at position 3054 of SEQ ID NO: 916407
augaaucuuugguuaggau

SEQ ID NO: 1154339 - RNA, 19 nt, Artificial Sequence
  Description of Artificial Sequence: Synthetic oligonucleotide
  Antisense strand to SEQ ID NO: 1154338
auccuaaccaaagauucau

SEQ ID NO: 1154340 - RNA, 19 nt, Artificial Sequence
  Description of Artificial Sequence: Synthetic oligonucleotide
  Sense strand starting at position 3533 of SEQ ID NO: 916407
cucgauuucuugccacacu

SEQ ID NO: 1154341 - RNA, 19 nt, Artificial Sequence
  Description of Artificial Sequence: Synthetic oligonucleotide
  Antisense strand to SEQ ID NO: 1154340
aguguggcaagaaaucgag

SEQ ID NO: 1154342 - RNA, 19 nt, Artificial Sequence
  Description of Artificial Sequence: Synthetic oligonucleotide
  Sense strand starting at position 3618 of SEQ ID NO: 916407
ucaauccuuggguaucuau

SEQ ID NO: 1154343 - RNA, 19 nt, Artificial Sequence
  Description of Artificial Sequence: Synthetic oligonucleotide
  Antisense strand to SEQ ID NO: 1154342
auagauacccaaggauuga

SEQ ID NO: 1154344 - RNA, 19 nt, Artificial Sequence
  Description of Artificial Sequence: Synthetic oligonucleotide
  Sense strand starting at position 3884 of SEQ ID NO: 916407
guucgucgagccuccgaua

SEQ ID NO: 1154345 - RNA, 19 nt, Artificial Sequence
  Description of Artificial Sequence: Synthetic oligonucleotide
  Antisense strand to SEQ ID NO: 1154344
uaucggaggcucgacgaac

SEQ ID NO: 1154346 - RNA, 19 nt, Artificial Sequence
  Description of Artificial Sequence: Synthetic oligonucleotide
  Sense strand starting at position 61 of SEQ ID NO: 916408
gcuggauccuccuuuggaa

SEQ ID NO: 1154347 - RNA, 19 nt, Artificial Sequence
  Description of Artificial Sequence: Synthetic oligonucleotide
  Antisense strand to SEQ ID NO: 1154346
uuccaaaggaggauccagc

SEQ ID NO: 1154348 - RNA, 19 nt, Artificial Sequence
  Description of Artificial Sequence: Synthetic oligonucleotide
  Sense strand starting at position 73 of SEQ ID NO: 916408
uuuggaagucagugacaug

SEQ ID NO: 1154349 - RNA, 19 nt, Artificial Sequence
  Description of Artificial Sequence: Synthetic oligonucleotide
  Antisense strand to SEQ ID NO: 1154348
caugucacugacuuccaaa

SEQ ID NO: 1154350 - RNA, 19 nt, Artificial Sequence
  Description of Artificial Sequence: Synthetic oligonucleotide
  Sense strand starting at position 99 of SEQ ID NO: 916408
ugcugugaaauaugauaga

SEQ ID NO: 1154351 - RNA, 19 nt, Artificial Sequence
  Description of Artificial Sequence: Synthetic oligonucleotide
  Antisense strand to SEQ ID NO: 1154350
ucuaucauauuucacagca

SEQ ID NO: 1154352 - RNA, 19 nt, Artificial Sequence
  Description of Artificial Sequence: Synthetic oligonucleotide
  Sense strand starting at position 158 of SEQ ID NO: 916408
cacugugaagccugauuag

SEQ ID NO: 1154353 - RNA, 19 nt, Artificial Sequence
  Description of Artificial Sequence: Synthetic oligonucleotide
  Antisense strand to SEQ ID NO: 1154352
cuaaucaggcuucacagug

SEQ ID NO: 1154354 - RNA, 19 nt, Artificial Sequence
  Description of Artificial Sequence: Synthetic oligonucleotide
  Sense strand starting at position 518 of SEQ ID NO: 916408
cuguccucaugggucagaa

SEQ ID NO: 1154355 - RNA, 19 nt, Artificial Sequence
  Description of Artificial Sequence: Synthetic oligonucleotide
  Antisense strand to SEQ ID NO: 1154354
uucugacccaugaggacag

SEQ ID NO: 1154356 - RNA, 19 nt, Artificial Sequence
  Description of Artificial Sequence: Synthetic oligonucleotide
  Sense strand starting at position 747 of SEQ ID NO: 916408
gaccgaggugucugagaug

SEQ ID NO: 1154357 - RNA, 19 nt, Artificial Sequence
  Description of Artificial Sequence: Synthetic oligonucleotide
  Antisense strand to SEQ ID NO: 1154356
caucucagacaccucgguc

SEQ ID NO: 1154358 - RNA, 19 nt, Artificial Sequence
  Description of Artificial Sequence: Synthetic oligonucleotide
  Sense strand starting at position 879 of SEQ ID NO: 916408
ggcacuggucaugaagguu

SEQ ID NO: 1154359 - RNA, 19 nt, Artificial Sequence
  Description of Artificial Sequence: Synthetic oligonucleotide
  Antisense strand to SEQ ID NO: 1154358
aaccuucaugaccagugcc

SEQ ID NO: 1154360 - RNA, 19 nt, Artificial Sequence
  Description of Artificial Sequence: Synthetic oligonucleotide
  Sense strand starting at position 882 of SEQ ID NO: 916408
acuggucaugaagguuaca

SEQ ID NO: 1154361 - RNA, 19 nt, Artificial Sequence
  Description of Artificial Sequence: Synthetic oligonucleotide
  Antisense strand to SEQ ID NO: 1154360
uguaaccuucaugaccagu

SEQ ID NO: 1154362 - RNA, 19 nt, Artificial Sequence
  Description of Artificial Sequence: Synthetic oligonucleotide
  Sense strand starting at position 982 of SEQ ID NO: 916408
ggaacagugucugccuuaa

SEQ ID NO: 1154363 - RNA, 19 nt, Artificial Sequence
  Description of Artificial Sequence: Synthetic oligonucleotide
  Antisense strand to SEQ ID NO: 1154362
uuaaggcagacacuguucc

SEQ ID NO: 1154364 - RNA, 19 nt, Artificial Sequence
  Description of Artificial Sequence: Synthetic oligonucleotide
  Sense strand starting at position 1075 of SEQ ID NO: 916408
aggcuaggaugagugauua

SEQ ID NO: 1154365 - RNA, 19 nt, Artificial Sequence
  Description of Artificial Sequence: Synthetic oligonucleotide
  Antisense strand to SEQ ID NO: 1154364
uaaucacucauccuagccu

SEQ ID NO: 1154366 - RNA, 19 nt, Artificial Sequence
  Description of Artificial Sequence: Synthetic oligonucleotide
  Sense strand starting at position 1079 of SEQ ID NO: 916408
uaggaugagugauuaguca

SEQ ID NO: 1154367 - RNA, 19 nt, Artificial Sequence
  Description of Artificial Sequence: Synthetic oligonucleotide
  Antisense strand to SEQ ID NO: 1154366
ugacuaaucacucauccua

SEQ ID NO: 1154368 - RNA, 19 nt, Artificial Sequence
  Description of Artificial Sequence: Synthetic oligonucleotide
  Sense strand starting at position 1086 of SEQ ID NO: 916408
agugauuagucaguccauu

SEQ ID NO: 1154369 - RNA, 19 nt, Artificial Sequence
  Description of Artificial Sequence: Synthetic oligonucleotide
  Antisense strand to SEQ ID NO: 1154368
aauggacugacuaaucacu

SEQ ID NO: 1154370 - RNA, 19 nt, Artificial Sequence
  Description of Artificial Sequence: Synthetic oligonucleotide
  Sense strand starting at position 1092 of SEQ ID NO: 916408
uagucaguccauuaaugag

SEQ ID NO: 1154371 - RNA, 19 nt, Artificial Sequence
  Description of Artificial Sequence: Synthetic oligonucleotide
  Antisense strand to SEQ ID NO: 1154370
cucauuaauggacugacua

SEQ ID NO: 1154372 - RNA, 19 nt, Artificial Sequence
  Description of Artificial Sequence: Synthetic oligonucleotide
  Sense strand starting at position 1279 of SEQ ID NO: 916408
ggacauggccucuguauug

SEQ ID NO: 1154373 - RNA, 19 nt, Artificial Sequence
  Description of Artificial Sequence: Synthetic oligonucleotide
  Antisense strand to SEQ ID NO: 1154372
caauacagaggccaugucc

SEQ ID NO: 1154374 - RNA, 19 nt, Artificial Sequence
  Description of Artificial Sequence: Synthetic oligonucleotide
  Sense strand starting at position 1509 of SEQ ID NO: 916408
gucugauuuccgcagguag

SEQ ID NO: 1154375 - RNA, 19 nt, Artificial Sequence
  Description of Artificial Sequence: Synthetic oligonucleotide
  Antisense strand to SEQ ID NO: 1154374
cuaccugcggaaaucagac

SEQ ID NO: 1154376 - RNA, 19 nt, Artificial Sequence
  Description of Artificial Sequence: Synthetic oligonucleotide
  Sense strand starting at position 1683 of SEQ ID NO: 916408
ccuucuuuagaacgacaaa

SEQ ID NO: 1154377 - RNA, 19 nt, Artificial Sequence
  Description of Artificial Sequence: Synthetic oligonucleotide
  Antisense strand to SEQ ID NO: 1154376
uuugucguucuaaagaagg

SEQ ID NO: 1154378 - RNA, 19 nt, Artificial Sequence
  Description of Artificial Sequence: Synthetic oligonucleotide
  Sense strand starting at position 1762 of SEQ ID NO: 916408
aaggucuggagcugagaaa

SEQ ID NO: 1154379 - RNA, 19 nt, Artificial Sequence
  Description of Artificial Sequence: Synthetic oligonucleotide
  Antisense strand to SEQ ID NO: 1154378
uuucucagcuccagaccuu

SEQ ID NO: 1154380 - RNA, 19 nt, Artificial Sequence
  Description of Artificial Sequence: Synthetic oligonucleotide
  Sense strand starting at position 2025 of SEQ ID NO: 916408
guuccauuggcagggagau

SEQ ID NO: 1154381 - RNA, 19 nt, Artificial Sequence
  Description of Artificial Sequence: Synthetic oligonucleotide
  Antisense strand to SEQ ID NO: 1154380
aucucccugccaauggaac

SEQ ID NO: 1154382 - RNA, 19 nt, Artificial Sequence
  Description of Artificial Sequence: Synthetic oligonucleotide
  Sense strand starting at position 2061 of SEQ ID NO: 916408
aaagguaagcugugaagga

SEQ ID NO: 1154383 - RNA, 19 nt, Artificial Sequence
  Description of Artificial Sequence: Synthetic oligonucleotide
  Antisense strand to SEQ ID NO: 1154382
uccuucacagcuuaccuuu

SEQ ID NO: 1154384 - RNA, 19 nt, Artificial Sequence
  Description of Artificial Sequence: Synthetic oligonucleotide
  Sense strand starting at position 2083 of SEQ ID NO: 916408
ggacauagagagugcuaga

SEQ ID NO: 1154385 - RNA, 19 nt, Artificial Sequence
  Description of Artificial Sequence: Synthetic oligonucleotide
  Antisense strand to SEQ ID NO: 1154384
ucuagcacucucuaugucc

SEQ ID NO: 1154386 - RNA, 19 nt, Artificial Sequence
  Description of Artificial Sequence: Synthetic oligonucleotide
  Sense strand starting at position 2159 of SEQ ID NO: 916408
uggagucuuagaggugaau

SEQ ID NO: 1154387 - RNA, 19 nt, Artificial Sequence
  Description of Artificial Sequence: Synthetic oligonucleotide
  Antisense strand to SEQ ID NO: 1154386
auucaccucuaagacucca

SEQ ID NO: 1154388 - RNA, 19 nt, Artificial Sequence
  Description of Artificial Sequence: Synthetic oligonucleotide
  Sense strand starting at position 2170 of SEQ ID NO: 916408
aggugaaucccaggaaucu

SEQ ID NO: 1154389 - RNA, 19 nt, Artificial Sequence
  Description of Artificial Sequence: Synthetic oligonucleotide
  Antisense strand to SEQ ID NO: 1154388
agauuccugggauucaccu

SEQ ID NO: 1154390 - RNA, 19 nt, Artificial Sequence
  Description of Artificial Sequence: Synthetic oligonucleotide
  Sense strand starting at position 2550 of SEQ ID NO: 916408
ugccauucagguggaaaga

SEQ ID NO: 1154391 - RNA, 19 nt, Artificial Sequence
  Description of Artificial Sequence: Synthetic oligonucleotide
  Antisense strand to SEQ ID NO: 1154390
ucuuuccaccugaauggca

SEQ ID NO: 1154392 - RNA, 19 nt, Artificial Sequence
  Description of Artificial Sequence: Synthetic oligonucleotide
  Sense strand starting at position 2719 of SEQ ID NO: 916408
gggaaagcagucugacuca

SEQ ID NO: 1154393 - RNA, 19 nt, Artificial Sequence
  Description of Artificial Sequence: Synthetic oligonucleotide
  Antisense strand to SEQ ID NO: 1154392
ugagucagacugcuuuccc

SEQ ID NO: 1154394 - RNA, 19 nt, Artificial Sequence
  Description of Artificial Sequence: Synthetic oligonucleotide
  Sense strand starting at position 2779 of SEQ ID NO: 916408
agagcaaguuguuuaaccu

SEQ ID NO: 1154395 - RNA, 19 nt, Artificial Sequence
  Description of Artificial Sequence: Synthetic oligonucleotide
  Antisense strand to SEQ ID NO: 1154394
agguuaaacaacuugcucu

SEQ ID NO: 1154396 - RNA, 19 nt, Artificial Sequence
  Description of Artificial Sequence: Synthetic oligonucleotide
  Sense strand starting at position 2854 of SEQ ID NO: 916408
uguugugaagcuugaacaa

SEQ ID NO: 1154397 - RNA, 19 nt, Artificial Sequence
  Description of Artificial Sequence: Synthetic oligonucleotide
  Antisense strand to SEQ ID NO: 1154396
uuguucaagcuucacaaca

SEQ ID NO: 1154398 - RNA, 19 nt, Artificial Sequence
  Description of Artificial Sequence: Synthetic oligonucleotide
  Sense strand starting at position 2900 of SEQ ID NO: 916408
gucccugacacguaguaaa

SEQ ID NO: 1154399 - RNA, 19 nt, Artificial Sequence
  Description of Artificial Sequence: Synthetic oligonucleotide
  Antisense strand to SEQ ID NO: 1154398
uuuacuacgugucagggac

SEQ ID NO: 1154400 - RNA, 19 nt, Artificial Sequence
  Description of Artificial Sequence: Synthetic oligonucleotide
  Sense strand starting at position 2911 of SEQ ID NO: 916408
guaguaaaugcucagucua

SEQ ID NO: 1154401 - RNA, 19 nt, Artificial Sequence
  Description of Artificial Sequence: Synthetic oligonucleotide
  Antisense strand to SEQ ID NO: 1154400
uagacugagcauuuacuac

SEQ ID NO: 1154402 - RNA, 19 nt, Artificial Sequence
  Description of Artificial Sequence: Synthetic oligonucleotide
  Sense strand starting at position 3053 of SEQ ID NO: 916408
ugugucuaugucuauauca

SEQ ID NO: 1154403 - RNA, 19 nt, Artificial Sequence
  Description of Artificial Sequence: Synthetic oligonucleotide
  Antisense strand to SEQ ID NO: 1154402
ugauauagacauagacaca

SEQ ID NO: 1154404 - RNA, 19 nt, Artificial Sequence
  Description of Artificial Sequence: Synthetic oligonucleotide
  Sense strand starting at position 3101 of SEQ ID NO: 916408
agcccugugggauguagau

SEQ ID NO: 1154405 - RNA, 19 nt, Artificial Sequence
  Description of Artificial Sequence: Synthetic oligonucleotide
  Antisense strand to SEQ ID NO: 1154404
aucuacaucccacagggcu

SEQ ID NO: 1154406 - RNA, 19 nt, Artificial Sequence
  Description of Artificial Sequence: Synthetic oligonucleotide
  Sense strand starting at position 3103 of SEQ ID NO: 916408
cccugugggauguagauau

SEQ ID NO: 1154407 - RNA, 19 nt, Artificial Sequence
  Description of Artificial Sequence: Synthetic oligonucleotide
  Antisense strand to SEQ ID NO: 1154406
auaucuacaucccacaggg

SEQ ID NO: 1154408 - RNA, 19 nt, Artificial Sequence
  Description of Artificial Sequence: Synthetic oligonucleotide
  Sense strand starting at position 3107 of SEQ ID NO: 916408
gugggauguagauauuacu

SEQ ID NO: 1154409 - RNA, 19 nt, Artificial Sequence
  Description of Artificial Sequence: Synthetic oligonucleotide
  Antisense strand to SEQ ID NO: 1154408
aguaauaucuacaucccac

SEQ ID NO: 1154410 - RNA, 19 nt, Artificial Sequence
  Description of Artificial Sequence: Synthetic oligonucleotide
  Sense strand starting at position 3181 of SEQ ID NO: 916408
caugguaagcgauagucuu

SEQ ID NO: 1154411 - RNA, 19 nt, Artificial Sequence
  Description of Artificial Sequence: Synthetic oligonucleotide
  Antisense strand to SEQ ID NO: 1154410
aagacuaucgcuuaccaug

SEQ ID NO: 1154412 - RNA, 19 nt, Artificial Sequence
  Description of Artificial Sequence: Synthetic oligonucleotide
  Sense strand starting at position 3188 of SEQ ID NO: 916408
agcgauagucuugagauag

SEQ ID NO: 1154413 - RNA, 19 nt, Artificial Sequence
  Description of Artificial Sequence: Synthetic oligonucleotide
  Antisense strand to SEQ ID NO: 1154412
cuaucucaagacuaucgcu

SEQ ID NO: 1154414 - RNA, 19 nt, Artificial Sequence
  Description of Artificial Sequence: Synthetic oligonucleotide
  Sense strand starting at position 3192 of SEQ ID NO: 916408
auagucuugagauaggcau

SEQ ID NO: 1154415 - RNA, 19 nt, Artificial Sequence
  Description of Artificial Sequence: Synthetic oligonucleotide
  Antisense strand to SEQ ID NO: 1154414
augccuaucucaagacuau

SEQ ID NO: 1154416 - RNA, 19 nt, Artificial Sequence
  Description of Artificial Sequence: Synthetic oligonucleotide
  Sense strand starting at position 3223 of SEQ ID NO: 916408
ccuacagcaugucugagau

SEQ ID NO: 1154417 - RNA, 19 nt, Artificial Sequence
  Description of Artificial Sequence: Synthetic oligonucleotide
  Antisense strand to SEQ ID NO: 1154416
aucucagacaugcuguagg

SEQ ID NO: 1154418 - RNA, 19 nt, Artificial Sequence
  Description of Artificial Sequence: Synthetic oligonucleotide
  Sense strand starting at position 3271 of SEQ ID NO: 916408
gcugucugauaaguggaga

SEQ ID NO: 1154419 - RNA, 19 nt, Artificial Sequence
  Description of Artificial Sequence: Synthetic oligonucleotide
  Antisense strand to SEQ ID NO: 1154418
ucuccacuuaucagacagc

SEQ ID NO: 1154420 - RNA, 19 nt, Artificial Sequence
  Description of Artificial Sequence: Synthetic oligonucleotide
  Sense strand starting at position 3640 of SEQ ID NO: 916408
cuaccacuguccuuggaaa

SEQ ID NO: 1154421 - RNA, 19 nt, Artificial Sequence
  Description of Artificial Sequence: Synthetic oligonucleotide
  Antisense strand to SEQ ID NO: 1154420
uuuccaaggacagugguag

SEQ ID NO: 1154422 - RNA, 19 nt, Artificial Sequence
  Description of Artificial Sequence: Synthetic oligonucleotide
  Sense strand starting at position 3691 of SEQ ID NO: 916408
gcugacuauuugccaucau

SEQ ID NO: 1154423 - RNA, 19 nt, Artificial Sequence
  Description of Artificial Sequence: Synthetic oligonucleotide
  Antisense strand to SEQ ID NO: 1154422
augauggcaaauagucagc

SEQ ID NO: 1154424 - RNA, 19 nt, Artificial Sequence
  Description of Artificial Sequence: Synthetic oligonucleotide
  Sense strand starting at position 3971 of SEQ ID NO: 916408
gucgucuuggcucaagaaa

SEQ ID NO: 1154425 - RNA, 19 nt, Artificial Sequence
  Description of Artificial Sequence: Synthetic oligonucleotide
  Antisense strand to SEQ ID NO: 1154424
uuucuugagccaagacgac

SEQ ID NO: 1154426 - RNA, 19 nt, Artificial Sequence
  Description of Artificial Sequence: Synthetic oligonucleotide
  Sense strand starting at position 8 of SEQ ID NO: 916409
guaguaaaugcucagucua

SEQ ID NO: 1154427 - RNA, 19 nt, Artificial Sequence
  Description of Artificial Sequence: Synthetic oligonucleotide
  Antisense strand to SEQ ID NO: 1154426
uagacugagcauuuacuac

SEQ ID NO: 1154428 - RNA, 19 nt, Artificial Sequence
  Description of Artificial Sequence: Synthetic oligonucleotide
  Sense strand starting at position 150 of SEQ ID NO: 916409
ugugucuaugucuauauca

SEQ ID NO: 1154429 - RNA, 19 nt, Artificial Sequence
  Description of Artificial Sequence: Synthetic oligonucleotide
  Antisense strand to SEQ ID NO: 1154428
ugauauagacauagacaca

SEQ ID NO: 1154430 - RNA, 19 nt, Artificial Sequence
  Description of Artificial Sequence: Synthetic oligonucleotide
  Sense strand starting at position 198 of SEQ ID NO: 916409
agcccugugggauguagau

SEQ ID NO: 1154431 - RNA, 19 nt, Artificial Sequence
  Description of Artificial Sequence: Synthetic oligonucleotide
  Antisense strand to SEQ ID NO: 1154430
aucuacaucccacagggcu

SEQ ID NO: 1154432 - RNA, 19 nt, Artificial Sequence
  Description of Artificial Sequence: Synthetic oligonucleotide
  Sense strand starting at position 200 of SEQ ID NO: 916409
cccugugggauguagauau

SEQ ID NO: 1154433 - RNA, 19 nt, Artificial Sequence
  Description of Artificial Sequence: Synthetic oligonucleotide
  Antisense strand to SEQ ID NO: 1154432
auaucuacaucccacaggg

SEQ ID NO: 1154434 - RNA, 19 nt, Artificial Sequence
  Description of Artificial Sequence: Synthetic oligonucleotide
  Sense strand starting at position 204 of SEQ ID NO: 916409
gugggauguagauauuacu

SEQ ID NO: 1154435 - RNA, 19 nt, Artificial Sequence
  Description of Artificial Sequence: Synthetic oligonucleotide
  Antisense strand to SEQ ID NO: 1154434
aguaauaucuacaucccac

SEQ ID NO: 1154436 - RNA, 19 nt, Artificial Sequence
  Description of Artificial Sequence: Synthetic oligonucleotide
  Sense strand starting at position 278 of SEQ ID NO: 916409
caugguaagcgauagucuu

SEQ ID NO: 1154437 - RNA, 19 nt, Artificial Sequence
  Description of Artificial Sequence: Synthetic oligonucleotide
  Antisense strand to SEQ ID NO: 1154436
aagacuaucgcuuaccaug

SEQ ID NO: 1154438 - RNA, 19 nt, Artificial Sequence
  Description of Artificial Sequence: Synthetic oligonucleotide
  Sense strand starting at position 285 of SEQ ID NO: 916409
agcgauagucuugagauag

SEQ ID NO: 1154439 - RNA, 19 nt, Artificial Sequence
  Description of Artificial Sequence: Synthetic oligonucleotide
  Antisense strand to SEQ ID NO: 1154438
cuaucucaagacuaucgcu

SEQ ID NO: 1154440 - RNA, 19 nt, Artificial Sequence
  Description of Artificial Sequence: Synthetic oligonucleotide
  Sense strand starting at position 289 of SEQ ID NO: 916409
auagucuugagauaggcau

SEQ ID NO: 1154441 - RNA, 19 nt, Artificial Sequence
  Description of Artificial Sequence: Synthetic oligonucleotide
  Antisense strand to SEQ ID NO: 1154440
augccuaucucaagacuau

SEQ ID NO: 1154442 - RNA, 19 nt, Artificial Sequence
  Description of Artificial Sequence: Synthetic oligonucleotide
  Sense strand starting at position 320 of SEQ ID NO: 916409
ccuacagcaugucugagau

SEQ ID NO: 1154443 - RNA, 19 nt, Artificial Sequence
  Description of Artificial Sequence: Synthetic oligonucleotide
  Antisense strand to SEQ ID NO: 1154442
aucucagacaugcuguagg

SEQ ID NO: 1154444 - RNA, 19 nt, Artificial Sequence
  Description of Artificial Sequence: Synthetic oligonucleotide
  Sense strand starting at position 368 of SEQ ID NO: 916409
gcugucugauaaguggaga

SEQ ID NO: 1154445 - RNA, 19 nt, Artificial Sequence
  Description of Artificial Sequence: Synthetic oligonucleotide
  Antisense strand to SEQ ID NO: 1154444
ucuccacuuaucagacagc

SEQ ID NO: 1154446 - RNA, 19 nt, Artificial Sequence
  Description of Artificial Sequence: Synthetic oligonucleotide
  Sense strand starting at position 737 of SEQ ID NO: 916409
cuaccacuguccuuggaaa

SEQ ID NO: 1154447 - RNA, 19 nt, Artificial Sequence
  Description of Artificial Sequence: Synthetic oligonucleotide
  Antisense strand to SEQ ID NO: 1154446
uuuccaaggacagugguag

SEQ ID NO: 1154448 - RNA, 19 nt, Artificial Sequence
  Description of Artificial Sequence: Synthetic oligonucleotide
  Sense strand starting at position 788 of SEQ ID NO: 916409
gcugacuauuugccaucau

SEQ ID NO: 1154449 - RNA, 19 nt, Artificial Sequence
  Description of Artificial Sequence: Synthetic oligonucleotide
  Antisense strand to SEQ ID NO: 1154448
augauggcaaauagucagc

SEQ ID NO: 1154450 - RNA, 19 nt, Artificial Sequence
  Description of Artificial Sequence: Synthetic oligonucleotide
  Sense strand starting at position 1068 of SEQ ID NO: 916409
gucgucuuggcucaagaaa

SEQ ID NO: 1154451 - RNA, 19 nt, Artificial Sequence
  Description of Artificial Sequence: Synthetic oligonucleotide
  Antisense strand to SEQ ID NO: 1154450
uuucuugagccaagacgac

SEQ ID NO: 1154452 - RNA, 19 nt, Artificial Sequence
  Description of Artificial Sequence: Synthetic oligonucleotide
  Sense strand starting at position 1273 of SEQ ID NO: 916409
acaccuggaccucguuaaa

SEQ ID NO: 1154453 - RNA, 19 nt, Artificial Sequence
  Description of Artificial Sequence: Synthetic oligonucleotide
  Antisense strand to SEQ ID NO: 1154452
uuuaacgagguccaggugu

SEQ ID NO: 1154454 - RNA, 19 nt, Artificial Sequence
  Description of Artificial Sequence: Synthetic oligonucleotide
  Sense strand starting at position 1296 of SEQ ID NO: 916409
gcgggaguuaagugaugga

SEQ ID NO: 1154455 - RNA, 19 nt, Artificial Sequence
  Description of Artificial Sequence: Synthetic oligonucleotide
  Antisense strand to SEQ ID NO: 1154454
uccaucacuuaacucccgc

SEQ ID NO: 1154456 - RNA, 19 nt, Artificial Sequence
  Description of Artificial Sequence: Synthetic oligonucleotide
  Sense strand starting at position 1300 of SEQ ID NO: 916409
gaguuaagugauggaaacu

SEQ ID NO: 1154457 - RNA, 19 nt, Artificial Sequence
  Description of Artificial Sequence: Synthetic oligonucleotide
  Antisense strand to SEQ ID NO: 1154456
aguuuccaucacuuaacuc

SEQ ID NO: 1154458 - RNA, 19 nt, Artificial Sequence
  Description of Artificial Sequence: Synthetic oligonucleotide
  Sense strand starting at position 2210 of SEQ ID NO: 916409
cacagucuuucugugagau

SEQ ID NO: 1154459 - RNA, 19 nt, Artificial Sequence
  Description of Artificial Sequence: Synthetic oligonucleotide
  Antisense strand to SEQ ID NO: 1154458
aucucacagaaagacugug

SEQ ID NO: 1154460 - RNA, 19 nt, Artificial Sequence
  Description of Artificial Sequence: Synthetic oligonucleotide
  Sense strand starting at position 2211 of SEQ ID NO: 916409
acagucuuucugugagaug

SEQ ID NO: 1154461 - RNA, 19 nt, Artificial Sequence
  Description of Artificial Sequence: Synthetic oligonucleotide
  Antisense strand to SEQ ID NO: 1154460
caucucacagaaagacugu

SEQ ID NO: 1154462 - RNA, 19 nt, Artificial Sequence
  Description of Artificial Sequence: Synthetic oligonucleotide
  Sense strand starting at position 2222 of SEQ ID NO: 916409
gugagauggccucaaccca

SEQ ID NO: 1154463 - RNA, 19 nt, Artificial Sequence
  Description of Artificial Sequence: Synthetic oligonucleotide
  Antisense strand to SEQ ID NO: 1154462
uggguugaggccaucucac

SEQ ID NO: 1154464 - RNA, 19 nt, Artificial Sequence
  Description of Artificial Sequence: Synthetic oligonucleotide
  Sense strand starting at position 2278 of SEQ ID NO: 916409
gguggcuggguuugggaua

SEQ ID NO: 1154465 - RNA, 19 nt, Artificial Sequence
  Description of Artificial Sequence: Synthetic oligonucleotide
  Antisense strand to SEQ ID NO: 1154464
uaucccaaacccagccacc

SEQ ID NO: 1154466 - RNA, 19 nt, Artificial Sequence
  Description of Artificial Sequence: Synthetic oligonucleotide
  Sense strand starting at position 2370 of SEQ ID NO: 916409
ucaucuaucugguuccaca

SEQ ID NO: 1154467 - RNA, 19 nt, Artificial Sequence
  Description of Artificial Sequence: Synthetic oligonucleotide
  Antisense strand to SEQ ID NO: 1154466
uguggaaccagauagauga

SEQ ID NO: 1154468 - RNA, 19 nt, Artificial Sequence
  Description of Artificial Sequence: Synthetic oligonucleotide
  Sense strand starting at position 2389 of SEQ ID NO: 916409
gaggacacauucucaagua

SEQ ID NO: 1154469 - RNA, 19 nt, Artificial Sequence
  Description of Artificial Sequence: Synthetic oligonucleotide
  Antisense strand to SEQ ID NO: 1154468
uacuugagaauguguccuc

SEQ ID NO: 1154470 - RNA, 19 nt, Artificial Sequence
  Description of Artificial Sequence: Synthetic oligonucleotide
  Sense strand starting at position 2533 of SEQ ID NO: 916409
ggcagaugaucucuuggaa

SEQ ID NO: 1154471 - RNA, 19 nt, Artificial Sequence
  Description of Artificial Sequence: Synthetic oligonucleotide
  Antisense strand to SEQ ID NO: 1154470
uuccaagagaucaucugcc

SEQ ID NO: 1154472 - RNA, 19 nt, Artificial Sequence
  Description of Artificial Sequence: Synthetic oligonucleotide
  Sense strand starting at position 2536 of SEQ ID NO: 916409
agaugaucucuuggaaccu

SEQ ID NO: 1154473 - RNA, 19 nt, Artificial Sequence
  Description of Artificial Sequence: Synthetic oligonucleotide
  Antisense strand to SEQ ID NO: 1154472
agguuccaagagaucaucu

SEQ ID NO: 1154474 - RNA, 19 nt, Artificial Sequence
  Description of Artificial Sequence: Synthetic oligonucleotide
  Sense strand starting at position 2764 of SEQ ID NO: 916409
ugcuuugcucuuuaagaag

SEQ ID NO: 1154475 - RNA, 19 nt, Artificial Sequence
  Description of Artificial Sequence: Synthetic oligonucleotide
  Antisense strand to SEQ ID NO: 1154474
cuucuuaaagagcaaagca

SEQ ID NO: 1154476 - RNA, 19 nt, Artificial Sequence
  Description of Artificial Sequence: Synthetic oligonucleotide
  Sense strand starting at position 2851 of SEQ ID NO: 916409
cuugaauugucaucccuag

SEQ ID NO: 1154477 - RNA, 19 nt, Artificial Sequence
  Description of Artificial Sequence: Synthetic oligonucleotide
  Antisense strand to SEQ ID NO: 1154476
cuagggaugacaauucaag

SEQ ID NO: 1154478 - RNA, 19 nt, Artificial Sequence
  Description of Artificial Sequence: Synthetic oligonucleotide
  Sense strand starting at position 2857 of SEQ ID NO: 916409
uugucaucccuagaggagu

SEQ ID NO: 1154479 - RNA, 19 nt, Artificial Sequence
  Description of Artificial Sequence: Synthetic oligonucleotide
  Antisense strand to SEQ ID NO: 1154478
acuccucuagggaugacaa

SEQ ID NO: 1154480 - RNA, 19 nt, Artificial Sequence
  Description of Artificial Sequence: Synthetic oligonucleotide
  Sense strand starting at position 2906 of SEQ ID NO: 916409
gugggauagugguuuauuc

SEQ ID NO: 1154481 - RNA, 19 nt, Artificial Sequence
  Description of Artificial Sequence: Synthetic oligonucleotide
  Antisense strand to SEQ ID NO: 1154480
gaauaaaccacuaucccac

SEQ ID NO: 1154482 - RNA, 19 nt, Artificial Sequence
  Description of Artificial Sequence: Synthetic oligonucleotide
  Sense strand starting at position 2908 of SEQ ID NO: 916409
gggauagugguuuauucuu

SEQ ID NO: 1154483 - RNA, 19 nt, Artificial Sequence
  Description of Artificial Sequence: Synthetic oligonucleotide
  Antisense strand to SEQ ID NO: 1154482
aagaauaaaccacuauccc

SEQ ID NO: 1154484 - RNA, 19 nt, Artificial Sequence
  Description of Artificial Sequence: Synthetic oligonucleotide
  Sense strand starting at position 2916 of SEQ ID NO: 916409
gguuuauucuugucuaagg

SEQ ID NO: 1154485 - RNA, 19 nt, Artificial Sequence
  Description of Artificial Sequence: Synthetic oligonucleotide
  Antisense strand to SEQ ID NO: 1154484
ccuuagacaagaauaaacc

SEQ ID NO: 1154486 - RNA, 19 nt, Artificial Sequence
  Description of Artificial Sequence: Synthetic oligonucleotide
  Sense strand starting at position 2999 of SEQ ID NO: 916409
guguccuugggacacuuau

SEQ ID NO: 1154487 - RNA, 19 nt, Artificial Sequence
  Description of Artificial Sequence: Synthetic oligonucleotide
  Antisense strand to SEQ ID NO: 1154486
auaagugucccaaggacac

SEQ ID NO: 1154488 - RNA, 19 nt, Artificial Sequence
  Description of Artificial Sequence: Synthetic oligonucleotide
  Sense strand starting at position 3640 of SEQ ID NO: 916409
gagggaaagcucuguguaa

SEQ ID NO: 1154489 - RNA, 19 nt, Artificial Sequence
  Description of Artificial Sequence: Synthetic oligonucleotide
  Antisense strand to SEQ ID NO: 1154488
uuacacagagcuuucccuc

SEQ ID NO: 1154490 - RNA, 19 nt, Artificial Sequence
  Description of Artificial Sequence: Synthetic oligonucleotide
  Sense strand starting at position 3641 of SEQ ID NO: 916409
agggaaagcucuguguaaa

SEQ ID NO: 1154491 - RNA, 19 nt, Artificial Sequence
  Description of Artificial Sequence: Synthetic oligonucleotide
  Antisense strand to SEQ ID NO: 1154490
uuuacacagagcuuucccu

SEQ ID NO: 1154492 - RNA, 19 nt, Artificial Sequence
  Description of Artificial Sequence: Synthetic oligonucleotide
  Sense strand starting at position 3642 of SEQ ID NO: 916409
gggaaagcucuguguaaag

SEQ ID NO: 1154493 - RNA, 19 nt, Artificial Sequence
  Description of Artificial Sequence: Synthetic oligonucleotide
  Antisense strand to SEQ ID NO: 1154492
cuuuacacagagcuuuccc

SEQ ID NO: 1154494 - RNA, 19 nt, Artificial Sequence
  Description of Artificial Sequence: Synthetic oligonucleotide
  Sense strand starting at position 3644 of SEQ ID NO: 916409
gaaagcucuguguaaagga

SEQ ID NO: 1154495 - RNA, 19 nt, Artificial Sequence
  Description of Artificial Sequence: Synthetic oligonucleotide
  Antisense strand to SEQ ID NO: 1154494
uccuuuacacagagcuuuc

SEQ ID NO: 1154496 - RNA, 19 nt, Artificial Sequence
  Description of Artificial Sequence: Synthetic oligonucleotide
  Sense strand starting at position 3671 of SEQ ID NO: 916409
guugcuuuccacgagaaac

SEQ ID NO: 1154497 - RNA, 19 nt, Artificial Sequence
  Description of Artificial Sequence: Synthetic oligonucleotide
  Antisense strand to SEQ ID NO: 1154496
guuucucguggaaagcaac

SEQ ID NO: 1154498 - RNA, 19 nt, Artificial Sequence
  Description of Artificial Sequence: Synthetic oligonucleotide
  Sense strand starting at position 3673 of SEQ ID NO: 916409
ugcuuuccacgagaaacau

SEQ ID NO: 1154499 - RNA, 19 nt, Artificial Sequence
  Description of Artificial Sequence: Synthetic oligonucleotide
  Antisense strand to SEQ ID NO: 1154498
auguuucucguggaaagca

SEQ ID NO: 1154500 - RNA, 19 nt, Artificial Sequence
  Description of Artificial Sequence: Synthetic oligonucleotide
  Sense strand starting at position 3888 of SEQ ID NO: 916409
gggccuauugcugggauac

SEQ ID NO: 1154501 - RNA, 19 nt, Artificial Sequence
  Description of Artificial Sequence: Synthetic oligonucleotide
  Antisense strand to SEQ ID NO: 1154500
guaucccagcaauaggccc

SEQ ID NO: 1154502 - RNA, 19 nt, Artificial Sequence
  Description of Artificial Sequence: Synthetic oligonucleotide
  Sense strand starting at position 3889 of SEQ ID NO: 916409
ggccuauugcugggauaca

SEQ ID NO: 1154503 - RNA, 19 nt, Artificial Sequence
  Description of Artificial Sequence: Synthetic oligonucleotide
  Antisense strand to SEQ ID NO: 1154502
uguaucccagcaauaggcc

SEQ ID NO: 1154504 - RNA, 19 nt, Artificial Sequence
  Description of Artificial Sequence: Synthetic oligonucleotide
  Sense strand starting at position 3933 of SEQ ID NO: 916409
gacugacugccauguagac

SEQ ID NO: 1154505 - RNA, 19 nt, Artificial Sequence
  Description of Artificial Sequence: Synthetic oligonucleotide
  Antisense strand to SEQ ID NO: 1154504
gucuacauggcagucaguc

SEQ ID NO: 1154506 - RNA, 19 nt, Artificial Sequence
  Description of Artificial Sequence: Synthetic oligonucleotide
  Sense strand starting at position 395 of SEQ ID NO: 916410
acaggugucugggcaaaga

SEQ ID NO: 1154507 - RNA, 19 nt, Artificial Sequence
  Description of Artificial Sequence: Synthetic oligonucleotide
  Antisense strand to SEQ ID NO: 1154506
ucuuugcccagacaccugu

SEQ ID NO: 1154508 - RNA, 19 nt, Artificial Sequence
  Description of Artificial Sequence: Synthetic oligonucleotide
  Sense strand starting at position 444 of SEQ ID NO: 916410
ggucaaucuaguggucaug

SEQ ID NO: 1154509 - RNA, 19 nt, Artificial Sequence
  Description of Artificial Sequence: Synthetic oligonucleotide
  Antisense strand to SEQ ID NO: 1154508
caugaccacuagauugacc

SEQ ID NO: 1154510 - RNA, 19 nt, Artificial Sequence
  Description of Artificial Sequence: Synthetic oligonucleotide
  Sense strand starting at position 483 of SEQ ID NO: 916410
guucuuauugucuaaucca

SEQ ID NO: 1154511 - RNA, 19 nt, Artificial Sequence
  Description of Artificial Sequence: Synthetic oligonucleotide
  Antisense strand to SEQ ID NO: 1154510
uggauuagacaauaagaac

SEQ ID NO: 1154512 - RNA, 19 nt, Artificial Sequence
  Description of Artificial Sequence: Synthetic oligonucleotide
  Sense strand starting at position 491 of SEQ ID NO: 916410
ugucuaauccaguguauuu

SEQ ID NO: 1154513 - RNA, 19 nt, Artificial Sequence
  Description of Artificial Sequence: Synthetic oligonucleotide
  Antisense strand to SEQ ID NO: 1154512
aaauacacuggauuagaca

SEQ ID NO: 1154514 - RNA, 19 nt, Artificial Sequence
  Description of Artificial Sequence: Synthetic oligonucleotide
  Sense strand starting at position 865 of SEQ ID NO: 916410
ucuggagcuuaucugagau

SEQ ID NO: 1154515 - RNA, 19 nt, Artificial Sequence
  Description of Artificial Sequence: Synthetic oligonucleotide
  Antisense strand to SEQ ID NO: 1154514
aucucagauaagcuccaga

SEQ ID NO: 1154516 - RNA, 19 nt, Artificial Sequence
  Description of Artificial Sequence: Synthetic oligonucleotide
  Sense strand starting at position 929 of SEQ ID NO: 916410
ggucaugaucugugucuag

SEQ ID NO: 1154517 - RNA, 19 nt, Artificial Sequence
  Description of Artificial Sequence: Synthetic oligonucleotide
  Antisense strand to SEQ ID NO: 1154516
cuagacacagaucaugacc

SEQ ID NO: 1154518 - RNA, 19 nt, Artificial Sequence
  Description of Artificial Sequence: Synthetic oligonucleotide
  Sense strand starting at position 932 of SEQ ID NO: 916410
caugaucugugucuagauu

SEQ ID NO: 1154519 - RNA, 19 nt, Artificial Sequence
  Description of Artificial Sequence: Synthetic oligonucleotide
  Antisense strand to SEQ ID NO: 1154518
aaucuagacacagaucaug

SEQ ID NO: 1154520 - RNA, 19 nt, Artificial Sequence
  Description of Artificial Sequence: Synthetic oligonucleotide
  Sense strand starting at position 1071 of SEQ ID NO: 916410
cuaugaaacuaggugauca

SEQ ID NO: 1154521 - RNA, 19 nt, Artificial Sequence
  Description of Artificial Sequence: Synthetic oligonucleotide
  Antisense strand to SEQ ID NO: 1154520
ugaucaccuaguuucauag

SEQ ID NO: 1154522 - RNA, 19 nt, Artificial Sequence
  Description of Artificial Sequence: Synthetic oligonucleotide
  Sense strand starting at position 1075 of SEQ ID NO: 916410
gaaacuaggugaucagcaa

SEQ ID NO: 1154523 - RNA, 19 nt, Artificial Sequence
  Description of Artificial Sequence: Synthetic oligonucleotide
  Antisense strand to SEQ ID NO: 1154522
uugcugaucaccuaguuuc

SEQ ID NO: 1154524 - RNA, 19 nt, Artificial Sequence
  Description of Artificial Sequence: Synthetic oligonucleotide
  Sense strand starting at position 1100 of SEQ ID NO: 916410
caggcagaguacucagguu

SEQ ID NO: 1154525 - RNA, 19 nt, Artificial Sequence
  Description of Artificial Sequence: Synthetic oligonucleotide
  Antisense strand to SEQ ID NO: 1154524
aaccugaguacucugccug

SEQ ID NO: 1154526 - RNA, 19 nt, Artificial Sequence
  Description of Artificial Sequence: Synthetic oligonucleotide
  Sense strand starting at position 1118 of SEQ ID NO: 916410
ucagaucacagaugagguu

SEQ ID NO: 1154527 - RNA, 19 nt, Artificial Sequence
  Description of Artificial Sequence: Synthetic oligonucleotide
  Antisense strand to SEQ ID NO: 1154526
aaccucaucugugaucuga

SEQ ID NO: 1154528 - RNA, 19 nt, Artificial Sequence
  Description of Artificial Sequence: Synthetic oligonucleotide
  Sense strand starting at position 1208 of SEQ ID NO: 916410
cugugucaucuggaaguca

SEQ ID NO: 1154529 - RNA, 19 nt, Artificial Sequence
  Description of Artificial Sequence: Synthetic oligonucleotide
  Antisense strand to SEQ ID NO: 1154528
ugacuuccagaugacacag

SEQ ID NO: 1154530 - RNA, 19 nt, Artificial Sequence
  Description of Artificial Sequence: Synthetic oligonucleotide
  Sense strand starting at position 2016 of SEQ ID NO: 916410
gggcgucaggcguucacua

SEQ ID NO: 1154531 - RNA, 19 nt, Artificial Sequence
  Description of Artificial Sequence: Synthetic oligonucleotide
  Antisense strand to SEQ ID NO: 1154530
uagugaacgccugacgccc

SEQ ID NO: 1154532 - RNA, 19 nt, Artificial Sequence
  Description of Artificial Sequence: Synthetic oligonucleotide
  Sense strand starting at position 2090 of SEQ ID NO: 916410
gagcaauuagaaggcuuua

SEQ ID NO: 1154533 - RNA, 19 nt, Artificial Sequence
  Description of Artificial Sequence: Synthetic oligonucleotide
  Antisense strand to SEQ ID NO: 1154532
uaaagccuucuaauugcuc

SEQ ID NO: 1154534 - RNA, 19 nt, Artificial Sequence
  Description of Artificial Sequence: Synthetic oligonucleotide
  Sense strand starting at position 2386 of SEQ ID NO: 916410
cgcggugcucauaggacua

SEQ ID NO: 1154535 - RNA, 19 nt, Artificial Sequence
  Description of Artificial Sequence: Synthetic oligonucleotide
  Antisense strand to SEQ ID NO: 1154534
uaguccuaugagcaccgcg

SEQ ID NO: 1154536 - RNA, 19 nt, Artificial Sequence
  Description of Artificial Sequence: Synthetic oligonucleotide
  Sense strand starting at position 2461 of SEQ ID NO: 916410
guuucuccgaacuagauga

SEQ ID NO: 1154537 - RNA, 19 nt, Artificial Sequence
  Description of Artificial Sequence: Synthetic oligonucleotide
  Antisense strand to SEQ ID NO: 1154536
ucaucuaguucggagaaac

SEQ ID NO: 1154538 - RNA, 19 nt, Artificial Sequence
  Description of Artificial Sequence: Synthetic oligonucleotide
  Sense strand starting at position 2833 of SEQ ID NO: 916410
ccaccuuauuaggucauau

SEQ ID NO: 1154539 - RNA, 19 nt, Artificial Sequence
  Description of Artificial Sequence: Synthetic oligonucleotide
  Antisense strand to SEQ ID NO: 1154538
auaugaccuaauaaggugg

SEQ ID NO: 1154540 - RNA, 19 nt, Artificial Sequence
  Description of Artificial Sequence: Synthetic oligonucleotide
  Sense strand starting at position 3062 of SEQ ID NO: 916410
caguaucuggcucagaaua

SEQ ID NO: 1154541 - RNA, 19 nt, Artificial Sequence
  Description of Artificial Sequence: Synthetic oligonucleotide
  Antisense strand to SEQ ID NO: 1154540
uauucugagccagauacug

SEQ ID NO: 1154542 - RNA, 19 nt, Artificial Sequence
  Description of Artificial Sequence: Synthetic oligonucleotide
  Sense strand starting at position 3072 of SEQ ID NO: 916410
cucagaauaugagaucaaa

SEQ ID NO: 1154543 - RNA, 19 nt, Artificial Sequence
  Description of Artificial Sequence: Synthetic oligonucleotide
  Antisense strand to SEQ ID NO: 1154542
uuugaucucauauucugag

SEQ ID NO: 1154544 - RNA, 19 nt, Artificial Sequence
  Description of Artificial Sequence: Synthetic oligonucleotide
  Sense strand starting at position 3167 of SEQ ID NO: 916410
gaaacuccugcacagaagu

SEQ ID NO: 1154545 - RNA, 19 nt, Artificial Sequence
  Description of Artificial Sequence: Synthetic oligonucleotide
  Antisense strand to SEQ ID NO: 1154544
acuucugugcaggaguuuc

SEQ ID NO: 1154546 - RNA, 19 nt, Artificial Sequence
  Description of Artificial Sequence: Synthetic oligonucleotide
  Sense strand starting at position 3177 of SEQ ID NO: 916410
cacagaaguuugucaguac

SEQ ID NO: 1154547 - RNA, 19 nt, Artificial Sequence
  Description of Artificial Sequence: Synthetic oligonucleotide
  Antisense strand to SEQ ID NO: 1154546
guacugacaaacuucugug

SEQ ID NO: 1154548 - RNA, 19 nt, Artificial Sequence
  Description of Artificial Sequence: Synthetic oligonucleotide
  Sense strand starting at position 3180 of SEQ ID NO: 916410
agaaguuugucaguacccu

SEQ ID NO: 1154549 - RNA, 19 nt, Artificial Sequence
  Description of Artificial Sequence: Synthetic oligonucleotide
  Antisense strand to SEQ ID NO: 1154548
aggguacugacaaacuucu

SEQ ID NO: 1154550 - RNA, 19 nt, Artificial Sequence
  Description of Artificial Sequence: Synthetic oligonucleotide
  Sense strand starting at position 3181 of SEQ ID NO: 916410
gaaguuugucaguacccuu

SEQ ID NO: 1154551 - RNA, 19 nt, Artificial Sequence
  Description of Artificial Sequence: Synthetic oligonucleotide
  Antisense strand to SEQ ID NO: 1154550
aaggguacugacaaacuuc

SEQ ID NO: 1154552 - RNA, 19 nt, Artificial Sequence
  Description of Artificial Sequence: Synthetic oligonucleotide
  Sense strand starting at position 3220 of SEQ ID NO: 916410
ucuauauuuguaugugcca

SEQ ID NO: 1154553 - RNA, 19 nt, Artificial Sequence
  Description of Artificial Sequence: Synthetic oligonucleotide
  Antisense strand to SEQ ID NO: 1154552
uggcacauacaaauauaga

SEQ ID NO: 1154554 - RNA, 19 nt, Artificial Sequence
  Description of Artificial Sequence: Synthetic oligonucleotide
  Sense strand starting at position 3236 of SEQ ID NO: 916410
ccauccauccagugugaau

SEQ ID NO: 1154555 - RNA, 19 nt, Artificial Sequence
  Description of Artificial Sequence: Synthetic oligonucleotide
  Antisense strand to SEQ ID NO: 1154554
auucacacuggauggaugg

SEQ ID NO: 1154556 - RNA, 19 nt, Artificial Sequence
  Description of Artificial Sequence: Synthetic oligonucleotide
  Sense strand starting at position 3249 of SEQ ID NO: 916410
gugaauagugugggucuua

SEQ ID NO: 1154557 - RNA, 19 nt, Artificial Sequence
  Description of Artificial Sequence: Synthetic oligonucleotide
  Antisense strand to SEQ ID NO: 1154556
uaagacccacacuauucac

SEQ ID NO: 1154558 - RNA, 19 nt, Artificial Sequence
  Description of Artificial Sequence: Synthetic oligonucleotide
  Sense strand starting at position 3250 of SEQ ID NO: 916410
ugaauagugugggucuuaa

SEQ ID NO: 1154559 - RNA, 19 nt, Artificial Sequence
  Description of Artificial Sequence: Synthetic oligonucleotide
  Antisense strand to SEQ ID NO: 1154558
uuaagacccacacuauuca

SEQ ID NO: 1154560 - RNA, 19 nt, Artificial Sequence
  Description of Artificial Sequence: Synthetic oligonucleotide
  Sense strand starting at position 3336 of SEQ ID NO: 916410
cuugacucuccugggaaau

SEQ ID NO: 1154561 - RNA, 19 nt, Artificial Sequence
  Description of Artificial Sequence: Synthetic oligonucleotide
  Antisense strand to SEQ ID NO: 1154560
auuucccaggagagucaag

SEQ ID NO: 1154562 - RNA, 19 nt, Artificial Sequence
  Description of Artificial Sequence: Synthetic oligonucleotide
  Sense strand starting at position 3337 of SEQ ID NO: 916410
uugacucuccugggaaaua

SEQ ID NO: 1154563 - RNA, 19 nt, Artificial Sequence
  Description of Artificial Sequence: Synthetic oligonucleotide
  Antisense strand to SEQ ID NO: 1154562
uauuucccaggagagucaa

SEQ ID NO: 1154564 - RNA, 19 nt, Artificial Sequence
  Description of Artificial Sequence: Synthetic oligonucleotide
  Sense strand starting at position 3373 of SEQ ID NO: 916410
cuacuacugccuuagaguu

SEQ ID NO: 1154565 - RNA, 19 nt, Artificial Sequence
  Description of Artificial Sequence: Synthetic oligonucleotide
  Antisense strand to SEQ ID NO: 1154564
aacucuaaggcaguaguag

SEQ ID NO: 1154566 - RNA, 19 nt, Artificial Sequence
  Description of Artificial Sequence: Synthetic oligonucleotide
  Sense strand starting at position 3389 of SEQ ID NO: 916410
guuacagaaauguguacau

SEQ ID NO: 1154567 - RNA, 19 nt, Artificial Sequence
  Description of Artificial Sequence: Synthetic oligonucleotide
  Antisense strand to SEQ ID NO: 1154566
auguacacauuucuguaac

SEQ ID NO: 1154568 - RNA, 19 nt, Artificial Sequence
  Description of Artificial Sequence: Synthetic oligonucleotide
  Sense strand starting at position 3598 of SEQ ID NO: 916410
accuuaugucaugggaaua

SEQ ID NO: 1154569 - RNA, 19 nt, Artificial Sequence
  Description of Artificial Sequence: Synthetic oligonucleotide
  Antisense strand to SEQ ID NO: 1154568
uauucccaugacauaaggu

SEQ ID NO: 1154570 - RNA, 19 nt, Artificial Sequence
  Description of Artificial Sequence: Synthetic oligonucleotide
  Sense strand starting at position 3610 of SEQ ID NO: 916410
gggaauaacuuguuacaug

SEQ ID NO: 1154571 - RNA, 19 nt, Artificial Sequence
  Description of Artificial Sequence: Synthetic oligonucleotide
  Antisense strand to SEQ ID NO: 1154570
cauguaacaaguuauuccc

SEQ ID NO: 1154572 - RNA, 19 nt, Artificial Sequence
  Description of Artificial Sequence: Synthetic oligonucleotide
  Sense strand starting at position 3642 of SEQ ID NO: 916410
aguuguauggccuauguau

SEQ ID NO: 1154573 - RNA, 19 nt, Artificial Sequence
  Description of Artificial Sequence: Synthetic oligonucleotide
  Antisense strand to SEQ ID NO: 1154572
auacauaggccauacaacu

SEQ ID NO: 1154574 - RNA, 19 nt, Artificial Sequence
  Description of Artificial Sequence: Synthetic oligonucleotide
  Sense strand starting at position 3671 of SEQ ID NO: 916410
auacucagucaccauguaa

SEQ ID NO: 1154575 - RNA, 19 nt, Artificial Sequence
  Description of Artificial Sequence: Synthetic oligonucleotide
  Antisense strand to SEQ ID NO: 1154574
uuacauggugacugaguau

SEQ ID NO: 1154576 - RNA, 19 nt, Artificial Sequence
  Description of Artificial Sequence: Synthetic oligonucleotide
  Sense strand starting at position 3821 of SEQ ID NO: 916410
ugaggaaaugcuuagggca

SEQ ID NO: 1154577 - RNA, 19 nt, Artificial Sequence
  Description of Artificial Sequence: Synthetic oligonucleotide
  Antisense strand to SEQ ID NO: 1154576
ugcccuaagcauuuccuca

SEQ ID NO: 1154578 - RNA, 19 nt, Artificial Sequence
  Description of Artificial Sequence: Synthetic oligonucleotide
  Sense strand starting at position 3834 of SEQ ID NO: 916410
agggcauugaccuggacaa

SEQ ID NO: 1154579 - RNA, 19 nt, Artificial Sequence
  Description of Artificial Sequence: Synthetic oligonucleotide
  Antisense strand to SEQ ID NO: 1154578
uuguccaggucaaugcccu

SEQ ID NO: 1154580 - RNA, 19 nt, Artificial Sequence
  Description of Artificial Sequence: Synthetic oligonucleotide
  Sense strand starting at position 3835 of SEQ ID NO: 916410
gggcauugaccuggacaaa

SEQ ID NO: 1154581 - RNA, 19 nt, Artificial Sequence
  Description of Artificial Sequence: Synthetic oligonucleotide
  Antisense strand to SEQ ID NO: 1154580
uuuguccaggucaaugccc

SEQ ID NO: 1154582 - RNA, 19 nt, Artificial Sequence
  Description of Artificial Sequence: Synthetic oligonucleotide
  Sense strand starting at position 3908 of SEQ ID NO: 916410
augggaucacaucgagcua

SEQ ID NO: 1154583 - RNA, 19 nt, Artificial Sequence
  Description of Artificial Sequence: Synthetic oligonucleotide
  Antisense strand to SEQ ID NO: 1154582
uagcucgaugugaucccau

SEQ ID NO: 1154584 - RNA, 19 nt, Artificial Sequence
  Description of Artificial Sequence: Synthetic oligonucleotide
  Sense strand starting at position 3909 of SEQ ID NO: 916410
ugggaucacaucgagcuaa

SEQ ID NO: 1154585 - RNA, 19 nt, Artificial Sequence
  Description of Artificial Sequence: Synthetic oligonucleotide
  Antisense strand to SEQ ID NO: 1154584
uuagcucgaugugauccca

SEQ ID NO: 1154586 - RNA, 19 nt, Artificial Sequence
  Description of Artificial Sequence: Synthetic oligonucleotide
  Sense strand starting at position 272 of SEQ ID NO: 916411
cccgauacaccuugacauu

SEQ ID NO: 1154587 - RNA, 19 nt, Artificial Sequence
  Description of Artificial Sequence: Synthetic oligonucleotide
  Antisense strand to SEQ ID NO: 1154586
aaugucaagguguaucggg

SEQ ID NO: 1154588 - RNA, 19 nt, Artificial Sequence
  Description of Artificial Sequence: Synthetic oligonucleotide
  Sense strand starting at position 310 of SEQ ID NO: 916411
ggaucacauuuccagauga

SEQ ID NO: 1154589 - RNA, 19 nt, Artificial Sequence
  Description of Artificial Sequence: Synthetic oligonucleotide
  Antisense strand to SEQ ID NO: 1154588
ucaucuggaaaugugaucc

SEQ ID NO: 1154590 - RNA, 19 nt, Artificial Sequence
  Description of Artificial Sequence: Synthetic oligonucleotide
  Sense strand starting at position 603 of SEQ ID NO: 916411
gcaggagggccacaagauu

SEQ ID NO: 1154591 - RNA, 19 nt, Artificial Sequence
  Description of Artificial Sequence: Synthetic oligonucleotide
  Antisense strand to SEQ ID NO: 1154590
aaucuuguggcccuccugc

SEQ ID NO: 1154592 - RNA, 19 nt, Artificial Sequence
  Description of Artificial Sequence: Synthetic oligonucleotide
  Sense strand starting at position 783 of SEQ ID NO: 916411
uuaaucaacccaugcguau

SEQ ID NO: 1154593 - RNA, 19 nt, Artificial Sequence
  Description of Artificial Sequence: Synthetic oligonucleotide
  Antisense strand to SEQ ID NO: 1154592
auacgcauggguugauuaa

SEQ ID NO: 1154594 - RNA, 19 nt, Artificial Sequence
  Description of Artificial Sequence: Synthetic oligonucleotide
  Sense strand starting at position 803 of SEQ ID NO: 916411
gcuggguugguuugggaga

SEQ ID NO: 1154595 - RNA, 19 nt, Artificial Sequence
  Description of Artificial Sequence: Synthetic oligonucleotide
  Antisense strand to SEQ ID NO: 1154594
ucucccaaaccaacccagc

SEQ ID NO: 1154596 - RNA, 19 nt, Artificial Sequence
  Description of Artificial Sequence: Synthetic oligonucleotide
  Sense strand starting at position 859 of SEQ ID NO: 916411
gcagauguccagugaucuc

SEQ ID NO: 1154597 - RNA, 19 nt, Artificial Sequence
  Description of Artificial Sequence: Synthetic oligonucleotide
  Antisense strand to SEQ ID NO: 1154596
gagaucacuggacaucugc

SEQ ID NO: 1154598 - RNA, 19 nt, Artificial Sequence
  Description of Artificial Sequence: Synthetic oligonucleotide
  Sense strand starting at position 974 of SEQ ID NO: 916411
cugaguaacuuugcaacca

SEQ ID NO: 1154599 - RNA, 19 nt, Artificial Sequence
  Description of Artificial Sequence: Synthetic oligonucleotide
  Antisense strand to SEQ ID NO: 1154598
ugguugcaaaguuacucag

SEQ ID NO: 1154600 - RNA, 19 nt, Artificial Sequence
  Description of Artificial Sequence: Synthetic oligonucleotide
  Sense strand starting at position 1040 of SEQ ID NO: 916411
ucaaguucugccggagaga

SEQ ID NO: 1154601 - RNA, 19 nt, Artificial Sequence
  Description of Artificial Sequence: Synthetic oligonucleotide
  Antisense strand to SEQ ID NO: 1154600
ucucuccggcagaacuuga

SEQ ID NO: 1154602 - RNA, 19 nt, Artificial Sequence
  Description of Artificial Sequence: Synthetic oligonucleotide
  Sense strand starting at position 1041 of SEQ ID NO: 916411
caaguucugccggagagaa

SEQ ID NO: 1154603 - RNA, 19 nt, Artificial Sequence
  Description of Artificial Sequence: Synthetic oligonucleotide
  Antisense strand to SEQ ID NO: 1154602
uucucuccggcagaacuug

SEQ ID NO: 1154604 - RNA, 19 nt, Artificial Sequence
  Description of Artificial Sequence: Synthetic oligonucleotide
  Sense strand starting at position 1053 of SEQ ID NO: 916411
gagagaaugucacaagaag

SEQ ID NO: 1154605 - RNA, 19 nt, Artificial Sequence
  Description of Artificial Sequence: Synthetic oligonucleotide
  Antisense strand to SEQ ID NO: 1154604
cuucuugugacauucucuc

SEQ ID NO: 1154606 - RNA, 19 nt, Artificial Sequence
  Description of Artificial Sequence: Synthetic oligonucleotide
  Sense strand starting at position 1130 of SEQ ID NO: 916411
ucaggaguauucucccaca

SEQ ID NO: 1154607 - RNA, 19 nt, Artificial Sequence
  Description of Artificial Sequence: Synthetic oligonucleotide
  Antisense strand to SEQ ID NO: 1154606
ugugggagaauacuccuga

SEQ ID NO: 1154608 - RNA, 19 nt, Artificial Sequence
  Description of Artificial Sequence: Synthetic oligonucleotide
  Sense strand starting at position 1239 of SEQ ID NO: 916411
ggaaauggguaguuccaua

SEQ ID NO: 1154609 - RNA, 19 nt, Artificial Sequence
  Description of Artificial Sequence: Synthetic oligonucleotide
  Antisense strand to SEQ ID NO: 1154608
uauggaacuacccauuucc

SEQ ID NO: 1154610 - RNA, 19 nt, Artificial Sequence
  Description of Artificial Sequence: Synthetic oligonucleotide
  Sense strand starting at position 1244 of SEQ ID NO: 916411
uggguaguuccauaggaau

SEQ ID NO: 1154611 - RNA, 19 nt, Artificial Sequence
  Description of Artificial Sequence: Synthetic oligonucleotide
  Antisense strand to SEQ ID NO: 1154610
auuccuauggaacuaccca

SEQ ID NO: 1154612 - RNA, 19 nt, Artificial Sequence
  Description of Artificial Sequence: Synthetic oligonucleotide
  Sense strand starting at position 1285 of SEQ ID NO: 916411
uccugacauguauaucacu

SEQ ID NO: 1154613 - RNA, 19 nt, Artificial Sequence
  Description of Artificial Sequence: Synthetic oligonucleotide
  Antisense strand to SEQ ID NO: 1154612
agugauauacaugucagga

SEQ ID NO: 1154614 - RNA, 19 nt, Artificial Sequence
  Description of Artificial Sequence: Synthetic oligonucleotide
  Sense strand starting at position 1449 of SEQ ID NO: 916411
ucugcagcuccuuaaugua

SEQ ID NO: 1154615 - RNA, 19 nt, Artificial Sequence
  Description of Artificial Sequence: Synthetic oligonucleotide
  Antisense strand to SEQ ID NO: 1154614
uacauuaaggagcugcaga

SEQ ID NO: 1154616 - RNA, 19 nt, Artificial Sequence
  Description of Artificial Sequence: Synthetic oligonucleotide
  Sense strand starting at position 1464 of SEQ ID NO: 916411
uguauuacccggcacacaa

SEQ ID NO: 1154617 - RNA, 19 nt, Artificial Sequence
  Description of Artificial Sequence: Synthetic oligonucleotide
  Antisense strand to SEQ ID NO: 1154616
uugugugccggguaauaca

SEQ ID NO: 1154618 - RNA, 19 nt, Artificial Sequence
  Description of Artificial Sequence: Synthetic oligonucleotide
  Sense strand starting at position 1548 of SEQ ID NO: 916411
gcgaaugacaacgguaaca

SEQ ID NO: 1154619 - RNA, 19 nt, Artificial Sequence
  Description of Artificial Sequence: Synthetic oligonucleotide
  Antisense strand to SEQ ID NO: 1154618
uguuaccguugucauucgc

SEQ ID NO: 1154620 - RNA, 19 nt, Artificial Sequence
  Description of Artificial Sequence: Synthetic oligonucleotide
  Sense strand starting at position 1668 of SEQ ID NO: 916411
caggcuuugcaaggagaga

SEQ ID NO: 1154621 - RNA, 19 nt, Artificial Sequence
  Description of Artificial Sequence: Synthetic oligonucleotide
  Antisense strand to SEQ ID NO: 1154620
ucucuccuugcaaagccug

SEQ ID NO: 1154622 - RNA, 19 nt, Artificial Sequence
  Description of Artificial Sequence: Synthetic oligonucleotide
  Sense strand starting at position 1922 of SEQ ID NO: 916411
guuggagaugcucaagucu

SEQ ID NO: 1154623 - RNA, 19 nt, Artificial Sequence
  Description of Artificial Sequence: Synthetic oligonucleotide
  Antisense strand to SEQ ID NO: 1154622
agacuugagcaucuccaac

SEQ ID NO: 1154624 - RNA, 19 nt, Artificial Sequence
  Description of Artificial Sequence: Synthetic oligonucleotide
  Sense strand starting at position 1954 of SEQ ID NO: 916411
ccaguucgcacugcuguaa

SEQ ID NO: 1154625 - RNA, 19 nt, Artificial Sequence
  Description of Artificial Sequence: Synthetic oligonucleotide
  Antisense strand to SEQ ID NO: 1154624
uuacagcagugcgaacugg

SEQ ID NO: 1154626 - RNA, 19 nt, Artificial Sequence
  Description of Artificial Sequence: Synthetic oligonucleotide
  Sense strand starting at position 2129 of SEQ ID NO: 916411
gcgacuucucaacaauguc

SEQ ID NO: 1154627 - RNA, 19 nt, Artificial Sequence
  Description of Artificial Sequence: Synthetic oligonucleotide
  Antisense strand to SEQ ID NO: 1154626
gacauuguugagaagucgc

SEQ ID NO: 1154628 - RNA, 19 nt, Artificial Sequence
  Description of Artificial Sequence: Synthetic oligonucleotide
  Sense strand starting at position 2246 of SEQ ID NO: 916411
agcggacuccauuagaaug

SEQ ID NO: 1154629 - RNA, 19 nt, Artificial Sequence
  Description of Artificial Sequence: Synthetic oligonucleotide
  Antisense strand to SEQ ID NO: 1154628
cauucuaauggaguccgcu

SEQ ID NO: 1154630 - RNA, 19 nt, Artificial Sequence
  Description of Artificial Sequence: Synthetic oligonucleotide
  Sense strand starting at position 2300 of SEQ ID NO: 916411
gagagaugcuguuucucag

SEQ ID NO: 1154631 - RNA, 19 nt, Artificial Sequence
  Description of Artificial Sequence: Synthetic oligonucleotide
  Antisense strand to SEQ ID NO: 1154630
cugagaaacagcaucucuc

SEQ ID NO: 1154632 - RNA, 19 nt, Artificial Sequence
  Description of Artificial Sequence: Synthetic oligonucleotide
  Sense strand starting at position 2303 of SEQ ID NO: 916411
agaugcuguuucucagaag

SEQ ID NO: 1154633 - RNA, 19 nt, Artificial Sequence
  Description of Artificial Sequence: Synthetic oligonucleotide
  Antisense strand to SEQ ID NO: 1154632
cuucugagaaacagcaucu

SEQ ID NO: 1154634 - RNA, 19 nt, Artificial Sequence
  Description of Artificial Sequence: Synthetic oligonucleotide
  Sense strand starting at position 2336 of SEQ ID NO: 916411
ugaugcugucuguacacuu

SEQ ID NO: 1154635 - RNA, 19 nt, Artificial Sequence
  Description of Artificial Sequence: Synthetic oligonucleotide
  Antisense strand to SEQ ID NO: 1154634
aaguguacagacagcauca

SEQ ID NO: 1154636 - RNA, 19 nt, Artificial Sequence
  Description of Artificial Sequence: Synthetic oligonucleotide
  Sense strand starting at position 2584 of SEQ ID NO: 916411
gugcuuuagcgcguucuca

SEQ ID NO: 1154637 - RNA, 19 nt, Artificial Sequence
  Description of Artificial Sequence: Synthetic oligonucleotide
  Antisense strand to SEQ ID NO: 1154636
ugagaacgcgcuaaagcac

SEQ ID NO: 1154638 - RNA, 19 nt, Artificial Sequence
  Description of Artificial Sequence: Synthetic oligonucleotide
  Sense strand starting at position 2585 of SEQ ID NO: 916411
ugcuuuagcgcguucucaa

SEQ ID NO: 1154639 - RNA, 19 nt, Artificial Sequence
  Description of Artificial Sequence: Synthetic oligonucleotide
  Antisense strand to SEQ ID NO: 1154638
uugagaacgcgcuaaagca

SEQ ID NO: 1154640 - RNA, 19 nt, Artificial Sequence
  Description of Artificial Sequence: Synthetic oligonucleotide
  Sense strand starting at position 2586 of SEQ ID NO: 916411
gcuuuagcgcguucucaag

SEQ ID NO: 1154641 - RNA, 19 nt, Artificial Sequence
  Description of Artificial Sequence: Synthetic oligonucleotide
  Antisense strand to SEQ ID NO: 1154640
cuugagaacgcgcuaaagc

SEQ ID NO: 1154642 - RNA, 19 nt, Artificial Sequence
  Description of Artificial Sequence: Synthetic oligonucleotide
  Sense strand starting at position 3253 of SEQ ID NO: 916411
gugugcgcccaacuuuaaa

SEQ ID NO: 1154643 - RNA, 19 nt, Artificial Sequence
  Description of Artificial Sequence: Synthetic oligonucleotide
  Antisense strand to SEQ ID NO: 1154642
uuuaaaguugggcgcacac

SEQ ID NO: 1154644 - RNA, 19 nt, Artificial Sequence
  Description of Artificial Sequence: Synthetic oligonucleotide
  Sense strand starting at position 3422 of SEQ ID NO: 916411
ucguuuguccuuucuuguu

SEQ ID NO: 1154645 - RNA, 19 nt, Artificial Sequence
  Description of Artificial Sequence: Synthetic oligonucleotide
  Antisense strand to SEQ ID NO: 1154644
aacaagaaaggacaaacga

SEQ ID NO: 1154646 - RNA, 19 nt, Artificial Sequence
  Description of Artificial Sequence: Synthetic oligonucleotide
  Sense strand starting at position 3462 of SEQ ID NO: 916411
accugaugaucuuccguga

SEQ ID NO: 1154647 - RNA, 19 nt, Artificial Sequence
  Description of Artificial Sequence: Synthetic oligonucleotide
  Antisense strand to SEQ ID NO: 1154646
ucacggaagaucaucaggu

SEQ ID NO: 1154648 - RNA, 19 nt, Artificial Sequence
  Description of Artificial Sequence: Synthetic oligonucleotide
  Sense strand starting at position 3465 of SEQ ID NO: 916411
ugaugaucuuccgugaauu

SEQ ID NO: 1154649 - RNA, 19 nt, Artificial Sequence
  Description of Artificial Sequence: Synthetic oligonucleotide
  Antisense strand to SEQ ID NO: 1154648
aauucacggaagaucauca

SEQ ID NO: 1154650 - RNA, 19 nt, Artificial Sequence
  Description of Artificial Sequence: Synthetic oligonucleotide
  Sense strand starting at position 3617 of SEQ ID NO: 916411
ccuaacugacguuauauca

SEQ ID NO: 1154651 - RNA, 19 nt, Artificial Sequence
  Description of Artificial Sequence: Synthetic oligonucleotide
  Antisense strand to SEQ ID NO: 1154650
ugauauaacgucaguuagg

SEQ ID NO: 1154652 - RNA, 19 nt, Artificial Sequence
  Description of Artificial Sequence: Synthetic oligonucleotide
  Sense strand starting at position 3625 of SEQ ID NO: 916411
acguuauaucagcaaacga

SEQ ID NO: 1154653 - RNA, 19 nt, Artificial Sequence
  Description of Artificial Sequence: Synthetic oligonucleotide
  Antisense strand to SEQ ID NO: 1154652
ucguuugcugauauaacgu

SEQ ID NO: 1154654 - RNA, 19 nt, Artificial Sequence
  Description of Artificial Sequence: Synthetic oligonucleotide
  Sense strand starting at position 3638 of SEQ ID NO: 916411
aaacgauggcuccacaguu

SEQ ID NO: 1154655 - RNA, 19 nt, Artificial Sequence
  Description of Artificial Sequence: Synthetic oligonucleotide
  Antisense strand to SEQ ID NO: 1154654
aacuguggagccaucguuu

SEQ ID NO: 1154656 - RNA, 19 nt, Artificial Sequence
  Description of Artificial Sequence: Synthetic oligonucleotide
  Sense strand starting at position 3873 of SEQ ID NO: 916411
acacgugaaaguuauguga

SEQ ID NO: 1154657 - RNA, 19 nt, Artificial Sequence
  Description of Artificial Sequence: Synthetic oligonucleotide
  Antisense strand to SEQ ID NO: 1154656
ucacauaacuuucacgugu

SEQ ID NO: 1154658 - RNA, 19 nt, Artificial Sequence
  Description of Artificial Sequence: Synthetic oligonucleotide
  Sense strand starting at position 3876 of SEQ ID NO: 916411
cgugaaaguuaugugaaau

SEQ ID NO: 1154659 - RNA, 19 nt, Artificial Sequence
  Description of Artificial Sequence: Synthetic oligonucleotide
  Antisense strand to SEQ ID NO: 1154658
auuucacauaacuuucacg

SEQ ID NO: 1154660 - RNA, 19 nt, Artificial Sequence
  Description of Artificial Sequence: Synthetic oligonucleotide
  Sense strand starting at position 3961 of SEQ ID NO: 916411
guuacuccugcguuguaaa

SEQ ID NO: 1154661 - RNA, 19 nt, Artificial Sequence
  Description of Artificial Sequence: Synthetic oligonucleotide
  Antisense strand to SEQ ID NO: 1154660
uuuacaacgcaggaguaac

SEQ ID NO: 1154662 - RNA, 19 nt, Artificial Sequence
  Description of Artificial Sequence: Synthetic oligonucleotide
  Sense strand starting at position 3968 of SEQ ID NO: 916411
cugcguuguaaagcagagu

SEQ ID NO: 1154663 - RNA, 19 nt, Artificial Sequence
  Description of Artificial Sequence: Synthetic oligonucleotide
  Antisense strand to SEQ ID NO: 1154662
acucugcuuuacaacgcag

SEQ ID NO: 1154664 - RNA, 19 nt, Artificial Sequence
  Description of Artificial Sequence: Synthetic oligonucleotide
  Sense strand starting at position 3971 of SEQ ID NO: 916411
cguuguaaagcagaguuga

SEQ ID NO: 1154665 - RNA, 19 nt, Artificial Sequence
  Description of Artificial Sequence: Synthetic oligonucleotide
  Antisense strand to SEQ ID NO: 1154664
ucaacucugcuuuacaacg

SEQ ID NO: 1154666 - RNA, 19 nt, Artificial Sequence
  Description of Artificial Sequence: Synthetic oligonucleotide
  Sense strand starting at position 251 of SEQ ID NO: 916412
uguuaaaccuucccaacga

SEQ ID NO: 1154667 - RNA, 19 nt, Artificial Sequence
  Description of Artificial Sequence: Synthetic oligonucleotide
  Antisense strand to SEQ ID NO: 1154666
ucguugggaagguuuaaca

SEQ ID NO: 1154668 - RNA, 19 nt, Artificial Sequence
  Description of Artificial Sequence: Synthetic oligonucleotide
  Sense strand starting at position 434 of SEQ ID NO: 916412
agcuuaucuccugggaaug

SEQ ID NO: 1154669 - RNA, 19 nt, Artificial Sequence
  Description of Artificial Sequence: Synthetic oligonucleotide
  Antisense strand to SEQ ID NO: 1154668
cauucccaggagauaagcu

SEQ ID NO: 1154670 - RNA, 19 nt, Artificial Sequence
  Description of Artificial Sequence: Synthetic oligonucleotide
  Sense strand starting at position 446 of SEQ ID NO: 916412
gggaaugcucauggauaga

SEQ ID NO: 1154671 - RNA, 19 nt, Artificial Sequence
  Description of Artificial Sequence: Synthetic oligonucleotide
  Antisense strand to SEQ ID NO: 1154670
ucuauccaugagcauuccc

SEQ ID NO: 1154672 - RNA, 19 nt, Artificial Sequence
  Description of Artificial Sequence: Synthetic oligonucleotide
  Sense strand starting at position 569 of SEQ ID NO: 916412
cccucugagaaguguaaug

SEQ ID NO: 1154673 - RNA, 19 nt, Artificial Sequence
  Description of Artificial Sequence: Synthetic oligonucleotide
  Antisense strand to SEQ ID NO: 1154672
cauuacacuucucagaggg

SEQ ID NO: 1154674 - RNA, 19 nt, Artificial Sequence
  Description of Artificial Sequence: Synthetic oligonucleotide
  Sense strand starting at position 892 of SEQ ID NO: 916412
uauuuaauggcugguguga

SEQ ID NO: 1154675 - RNA, 19 nt, Artificial Sequence
  Description of Artificial Sequence: Synthetic oligonucleotide
  Antisense strand to SEQ ID NO: 1154674
ucacaccagccauuaaaua

SEQ ID NO: 1154676 - RNA, 19 nt, Artificial Sequence
  Description of Artificial Sequence: Synthetic oligonucleotide
  Sense strand starting at position 955 of SEQ ID NO: 916412
ggaucugauuuguuccgca

SEQ ID NO: 1154677 - RNA, 19 nt, Artificial Sequence
  Description of Artificial Sequence: Synthetic oligonucleotide
  Antisense strand to SEQ ID NO: 1154676
ugcggaacaaaucagaucc

SEQ ID NO: 1154678 - RNA, 19 nt, Artificial Sequence
  Description of Artificial Sequence: Synthetic oligonucleotide
  Sense strand starting at position 1031 of SEQ ID NO: 916412
aaucauuggccaggugaca

SEQ ID NO: 1154679 - RNA, 19 nt, Artificial Sequence
  Description of Artificial Sequence: Synthetic oligonucleotide
  Antisense strand to SEQ ID NO: 1154678
ugucaccuggccaaugauu

SEQ ID NO: 1154680 - RNA, 19 nt, Artificial Sequence
  Description of Artificial Sequence: Synthetic oligonucleotide
  Sense strand starting at position 1143 of SEQ ID NO: 916412
ggaucaucauggcccaaau

SEQ ID NO: 1154681 - RNA, 19 nt, Artificial Sequence
  Description of Artificial Sequence: Synthetic oligonucleotide
  Antisense strand to SEQ ID NO: 1154680
auuugggccaugaugaucc

SEQ ID NO: 1154682 - RNA, 19 nt, Artificial Sequence
  Description of Artificial Sequence: Synthetic oligonucleotide
  Sense strand starting at position 1162 of SEQ ID NO: 916412
agugcuucuguggaucaaa

SEQ ID NO: 1154683 - RNA, 19 nt, Artificial Sequence
  Description of Artificial Sequence: Synthetic oligonucleotide
  Antisense strand to SEQ ID NO: 1154682
uuugauccacagaagcacu

SEQ ID NO: 1154684 - RNA, 19 nt, Artificial Sequence
  Description of Artificial Sequence: Synthetic oligonucleotide
  Sense strand starting at position 1657 of SEQ ID NO: 916412
gaggcauaguggguaaaca

SEQ ID NO: 1154685 - RNA, 19 nt, Artificial Sequence
  Description of Artificial Sequence: Synthetic oligonucleotide
  Antisense strand to SEQ ID NO: 1154684
uguuuacccacuaugccuc

SEQ ID NO: 1154686 - RNA, 19 nt, Artificial Sequence
  Description of Artificial Sequence: Synthetic oligonucleotide
  Sense strand starting at position 1893 of SEQ ID NO: 916412
ggccauacucaccagcaua

SEQ ID NO: 1154687 - RNA, 19 nt, Artificial Sequence
  Description of Artificial Sequence: Synthetic oligonucleotide
  Antisense strand to SEQ ID NO: 1154686
uaugcuggugaguauggcc

SEQ ID NO: 1154688 - RNA, 19 nt, Artificial Sequence
  Description of Artificial Sequence: Synthetic oligonucleotide
  Sense strand starting at position 1941 of SEQ ID NO: 916412
agaggagagugguaaauuu

SEQ ID NO: 1154689 - RNA, 19 nt, Artificial Sequence
  Description of Artificial Sequence: Synthetic oligonucleotide
  Antisense strand to SEQ ID NO: 1154688
aaauuuaccacucuccucu

SEQ ID NO: 1154690 - RNA, 19 nt, Artificial Sequence
  Description of Artificial Sequence: Synthetic oligonucleotide
  Sense strand starting at position 1967 of SEQ ID NO: 916412
ugggaugaggagugaguau

SEQ ID NO: 1154691 - RNA, 19 nt, Artificial Sequence
  Description of Artificial Sequence: Synthetic oligonucleotide
  Antisense strand to SEQ ID NO: 1154690
auacucacuccucauccca

SEQ ID NO: 1154692 - RNA, 19 nt, Artificial Sequence
  Description of Artificial Sequence: Synthetic oligonucleotide
  Sense strand starting at position 1976 of SEQ ID NO: 916412
gagugaguauaaccacaga

SEQ ID NO: 1154693 - RNA, 19 nt, Artificial Sequence
  Description of Artificial Sequence: Synthetic oligonucleotide
  Antisense strand to SEQ ID NO: 1154692
ucugugguuauacucacuc

SEQ ID NO: 1154694 - RNA, 19 nt, Artificial Sequence
  Description of Artificial Sequence: Synthetic oligonucleotide
  Sense strand starting at position 2157 of SEQ ID NO: 916412
ggcugauaccugggauccu

SEQ ID NO: 1154695 - RNA, 19 nt, Artificial Sequence
  Description of Artificial Sequence: Synthetic oligonucleotide
  Antisense strand to SEQ ID NO: 1154694
aggaucccagguaucagcc

SEQ ID NO: 1154696 - RNA, 19 nt, Artificial Sequence
  Description of Artificial Sequence: Synthetic oligonucleotide
  Sense strand starting at position 2192 of SEQ ID NO: 916412
auaggagccuuucucuaac

SEQ ID NO: 1154697 - RNA, 19 nt, Artificial Sequence
  Description of Artificial Sequence: Synthetic oligonucleotide
  Antisense strand to SEQ ID NO: 1154696
guuagagaaaggcuccuau

SEQ ID NO: 1154698 - RNA, 19 nt, Artificial Sequence
  Description of Artificial Sequence: Synthetic oligonucleotide
  Sense strand starting at position 2320 of SEQ ID NO: 916412
gagauucugggaugugucu

SEQ ID NO: 1154699 - RNA, 19 nt, Artificial Sequence
  Description of Artificial Sequence: Synthetic oligonucleotide
  Antisense strand to SEQ ID NO: 1154698
agacacaucccagaaucuc

SEQ ID NO: 1154700 - RNA, 19 nt, Artificial Sequence
  Description of Artificial Sequence: Synthetic oligonucleotide
  Sense strand starting at position 2345 of SEQ ID NO: 916412
gguucugguagagaaaucu

SEQ ID NO: 1154701 - RNA, 19 nt, Artificial Sequence
  Description of Artificial Sequence: Synthetic oligonucleotide
  Antisense strand to SEQ ID NO: 1154700
agauuucucuaccagaacc

SEQ ID NO: 1154702 - RNA, 19 nt, Artificial Sequence
  Description of Artificial Sequence: Synthetic oligonucleotide
  Sense strand starting at position 2404 of SEQ ID NO: 916412
ggauuacauuguccaccuu

SEQ ID NO: 1154703 - RNA, 19 nt, Artificial Sequence
  Description of Artificial Sequence: Synthetic oligonucleotide
  Antisense strand to SEQ ID NO: 1154702
aagguggacaauguaaucc

SEQ ID NO: 1154704 - RNA, 19 nt, Artificial Sequence
  Description of Artificial Sequence: Synthetic oligonucleotide
  Sense strand starting at position 2590 of SEQ ID NO: 916412
uucucuguucuugacauua

SEQ ID NO: 1154705 - RNA, 19 nt, Artificial Sequence
  Description of Artificial Sequence: Synthetic oligonucleotide
  Antisense strand to SEQ ID NO: 1154704
uaaugucaagaacagagaa

SEQ ID NO: 1154706 - RNA, 19 nt, Artificial Sequence
  Description of Artificial Sequence: Synthetic oligonucleotide
  Sense strand starting at position 2685 of SEQ ID NO: 916412
ccacauuucugagagaauc

SEQ ID NO: 1154707 - RNA, 19 nt, Artificial Sequence
  Description of Artificial Sequence: Synthetic oligonucleotide
  Antisense strand to SEQ ID NO: 1154706
gauucucucagaaaugugg

SEQ ID NO: 1154708 - RNA, 19 nt, Artificial Sequence
  Description of Artificial Sequence: Synthetic oligonucleotide
  Sense strand starting at position 2696 of SEQ ID NO: 916412
agagaaucuccuggucaaa

SEQ ID NO: 1154709 - RNA, 19 nt, Artificial Sequence
  Description of Artificial Sequence: Synthetic oligonucleotide
  Antisense strand to SEQ ID NO: 1154708
uuugaccaggagauucucu

SEQ ID NO: 1154710 - RNA, 19 nt, Artificial Sequence
  Description of Artificial Sequence: Synthetic oligonucleotide
  Sense strand starting at position 2769 of SEQ ID NO: 916412
ugacccauggugugaauaa

SEQ ID NO: 1154711 - RNA, 19 nt, Artificial Sequence
  Description of Artificial Sequence: Synthetic oligonucleotide
  Antisense strand to SEQ ID NO: 1154710
uuauucacaccauggguca

SEQ ID NO: 1154712 - RNA, 19 nt, Artificial Sequence
  Description of Artificial Sequence: Synthetic oligonucleotide
  Sense strand starting at position 2776 of SEQ ID NO: 916412
uggugugaauaauccagaa

SEQ ID NO: 1154713 - RNA, 19 nt, Artificial Sequence
  Description of Artificial Sequence: Synthetic oligonucleotide
  Antisense strand to SEQ ID NO: 1154712
uucuggauuauucacacca

SEQ ID NO: 1154714 - RNA, 19 nt, Artificial Sequence
  Description of Artificial Sequence: Synthetic oligonucleotide
  Sense strand starting at position 2811 of SEQ ID NO: 916412
agaagcuucucuuugacuu

SEQ ID NO: 1154715 - RNA, 19 nt, Artificial Sequence
  Description of Artificial Sequence: Synthetic oligonucleotide
  Antisense strand to SEQ ID NO: 1154714
aagucaaagagaagcuucu

SEQ ID NO: 1154716 - RNA, 19 nt, Artificial Sequence
  Description of Artificial Sequence: Synthetic oligonucleotide
  Sense strand starting at position 2831 of SEQ ID NO: 916412
gcguuucuuccuuuccuga

SEQ ID NO: 1154717 - RNA, 19 nt, Artificial Sequence
  Description of Artificial Sequence: Synthetic oligonucleotide
  Antisense strand to SEQ ID NO: 1154716
ucaggaaaggaagaaacgc

SEQ ID NO: 1154718 - RNA, 19 nt, Artificial Sequence
  Description of Artificial Sequence: Synthetic oligonucleotide
  Sense strand starting at position 2838 of SEQ ID NO: 916412
uuccuuuccugaucuggga

SEQ ID NO: 1154719 - RNA, 19 nt, Artificial Sequence
  Description of Artificial Sequence: Synthetic oligonucleotide
  Antisense strand to SEQ ID NO: 1154718
ucccagaucaggaaaggaa

SEQ ID NO: 1154720 - RNA, 19 nt, Artificial Sequence
  Description of Artificial Sequence: Synthetic oligonucleotide
  Sense strand starting at position 2931 of SEQ ID NO: 916412
auuuguugucuaggaguug

SEQ ID NO: 1154721 - RNA, 19 nt, Artificial Sequence
  Description of Artificial Sequence: Synthetic oligonucleotide
  Antisense strand to SEQ ID NO: 1154720
caacuccuagacaacaaau

SEQ ID NO: 1154722 - RNA, 19 nt, Artificial Sequence
  Description of Artificial Sequence: Synthetic oligonucleotide
  Sense strand starting at position 2964 of SEQ ID NO: 916412
agcauagugguggagauua

SEQ ID NO: 1154723 - RNA, 19 nt, Artificial Sequence
  Description of Artificial Sequence: Synthetic oligonucleotide
  Antisense strand to SEQ ID NO: 1154722
uaaucuccaccacuaugcu

SEQ ID NO: 1154724 - RNA, 19 nt, Artificial Sequence
  Description of Artificial Sequence: Synthetic oligonucleotide
  Sense strand starting at position 2985 of SEQ ID NO: 916412
ugggauaauauacggcaaa

SEQ ID NO: 1154725 - RNA, 19 nt, Artificial Sequence
  Description of Artificial Sequence: Synthetic oligonucleotide
  Antisense strand to SEQ ID NO: 1154724
uuugccguauauuauccca

SEQ ID NO: 1154726 - RNA, 19 nt, Artificial Sequence
  Description of Artificial Sequence: Synthetic oligonucleotide
  Sense strand starting at position 2988 of SEQ ID NO: 916412
gauaauauacggcaaagca

SEQ ID NO: 1154727 - RNA, 19 nt, Artificial Sequence
  Description of Artificial Sequence: Synthetic oligonucleotide
  Antisense strand to SEQ ID NO: 1154726
ugcuuugccguauauuauc

SEQ ID NO: 1154728 - RNA, 19 nt, Artificial Sequence
  Description of Artificial Sequence: Synthetic oligonucleotide
  Sense strand starting at position 3252 of SEQ ID NO: 916412
gguagcucugaagaugagu

SEQ ID NO: 1154729 - RNA, 19 nt, Artificial Sequence
  Description of Artificial Sequence: Synthetic oligonucleotide
  Antisense strand to SEQ ID NO: 1154728
acucaucuucagagcuacc

SEQ ID NO: 1154730 - RNA, 19 nt, Artificial Sequence
  Description of Artificial Sequence: Synthetic oligonucleotide
  Sense strand starting at position 3258 of SEQ ID NO: 916412
ucugaagaugagugugaga

SEQ ID NO: 1154731 - RNA, 19 nt, Artificial Sequence
  Description of Artificial Sequence: Synthetic oligonucleotide
  Antisense strand to SEQ ID NO: 1154730
ucucacacucaucuucaga

SEQ ID NO: 1154732 - RNA, 19 nt, Artificial Sequence
  Description of Artificial Sequence: Synthetic oligonucleotide
  Sense strand starting at position 3379 of SEQ ID NO: 916412
acauuaaagccuuggcaau

SEQ ID NO: 1154733 - RNA, 19 nt, Artificial Sequence
  Description of Artificial Sequence: Synthetic oligonucleotide
  Antisense strand to SEQ ID NO: 1154732
auugccaaggcuuuaaugu

SEQ ID NO: 1154734 - RNA, 19 nt, Artificial Sequence
  Description of Artificial Sequence: Synthetic oligonucleotide
  Sense strand starting at position 3577 of SEQ ID NO: 916412
gaucuagaucccgagcagu

SEQ ID NO: 1154735 - RNA, 19 nt, Artificial Sequence
  Description of Artificial Sequence: Synthetic oligonucleotide
  Antisense strand to SEQ ID NO: 1154734
acugcucgggaucuagauc

SEQ ID NO: 1154736 - RNA, 19 nt, Artificial Sequence
  Description of Artificial Sequence: Synthetic oligonucleotide
  Sense strand starting at position 3670 of SEQ ID NO: 916412
gaacuuuggcgucaacacu

SEQ ID NO: 1154737 - RNA, 19 nt, Artificial Sequence
  Description of Artificial Sequence: Synthetic oligonucleotide
  Antisense strand to SEQ ID NO: 1154736
aguguugacgccaaaguuc

SEQ ID NO: 1154738 - RNA, 19 nt, Artificial Sequence
  Description of Artificial Sequence: Synthetic oligonucleotide
  Sense strand starting at position 3700 of SEQ ID NO: 916412
agagcagggucuuuccaaa

SEQ ID NO: 1154739 - RNA, 19 nt, Artificial Sequence
  Description of Artificial Sequence: Synthetic oligonucleotide
  Antisense strand to SEQ ID NO: 1154738
uuuggaaagacccugcucu

SEQ ID NO: 1154740 - RNA, 19 nt, Artificial Sequence
  Description of Artificial Sequence: Synthetic oligonucleotide
  Sense strand starting at position 3758 of SEQ ID NO: 916412
uggccucaguaauuaaaga

SEQ ID NO: 1154741 - RNA, 19 nt, Artificial Sequence
  Description of Artificial Sequence: Synthetic oligonucleotide
  Antisense strand to SEQ ID NO: 1154740
ucuuuaauuacugaggcca

SEQ ID NO: 1154742 - RNA, 19 nt, Artificial Sequence
  Description of Artificial Sequence: Synthetic oligonucleotide
  Sense strand starting at position 3893 of SEQ ID NO: 916412
gaaagaauugggugcauag

SEQ ID NO: 1154743 - RNA, 19 nt, Artificial Sequence
  Description of Artificial Sequence: Synthetic oligonucleotide
  Antisense strand to SEQ ID NO: 1154742
cuaugcacccaauucuuuc

SEQ ID NO: 1154744 - RNA, 19 nt, Artificial Sequence
  Description of Artificial Sequence: Synthetic oligonucleotide
  Sense strand starting at position 3920 of SEQ ID NO: 916412
ggcagaccucauggauaug

SEQ ID NO: 1154745 - RNA, 19 nt, Artificial Sequence
  Description of Artificial Sequence: Synthetic oligonucleotide
  Antisense strand to SEQ ID NO: 1154744
cauauccaugaggucugcc

SEQ ID NO: 1154746 - RNA, 19 nt, Artificial Sequence
  Description of Artificial Sequence: Synthetic oligonucleotide
  Sense strand starting at position 7 of SEQ ID NO: 916413
gcuuuagacuugucuucuc

SEQ ID NO: 1154747 - RNA, 19 nt, Artificial Sequence
  Description of Artificial Sequence: Synthetic oligonucleotide
  Antisense strand to SEQ ID NO: 1154746
gagaagacaagucuaaagc

SEQ ID NO: 1154748 - RNA, 19 nt, Artificial Sequence
  Description of Artificial Sequence: Synthetic oligonucleotide
  Sense strand starting at position 124 of SEQ ID NO: 916413
ccuggaguuuacuuggcau

SEQ ID NO: 1154749 - RNA, 19 nt, Artificial Sequence
  Description of Artificial Sequence: Synthetic oligonucleotide
  Antisense strand to SEQ ID NO: 1154748
augccaaguaaacuccagg

SEQ ID NO: 1154750 - RNA, 19 nt, Artificial Sequence
  Description of Artificial Sequence: Synthetic oligonucleotide
  Sense strand starting at position 126 of SEQ ID NO: 916413
uggaguuuacuuggcauca

SEQ ID NO: 1154751 - RNA, 19 nt, Artificial Sequence
  Description of Artificial Sequence: Synthetic oligonucleotide
  Antisense strand to SEQ ID NO: 1154750
ugaugccaaguaaacucca

SEQ ID NO: 1154752 - RNA, 19 nt, Artificial Sequence
  Description of Artificial Sequence: Synthetic oligonucleotide
  Sense strand starting at position 127 of SEQ ID NO: 916413
ggaguuuacuuggcaucag

SEQ ID NO: 1154753 - RNA, 19 nt, Artificial Sequence
  Description of Artificial Sequence: Synthetic oligonucleotide
  Antisense strand to SEQ ID NO: 1154752
cugaugccaaguaaacucc

SEQ ID NO: 1154754 - RNA, 19 nt, Artificial Sequence
  Description of Artificial Sequence: Synthetic oligonucleotide
  Sense strand starting at position 195 of SEQ ID NO: 916413
agcuacagauaucugaaau

SEQ ID NO: 1154755 - RNA, 19 nt, Artificial Sequence
  Description of Artificial Sequence: Synthetic oligonucleotide
  Antisense strand to SEQ ID NO: 1154754
auuucagauaucuguagcu

SEQ ID NO: 1154756 - RNA, 19 nt, Artificial Sequence
  Description of Artificial Sequence: Synthetic oligonucleotide
  Sense strand starting at position 876 of SEQ ID NO: 916413
acccguugaggaugagaaa

SEQ ID NO: 1154757 - RNA, 19 nt, Artificial Sequence
  Description of Artificial Sequence: Synthetic oligonucleotide
  Antisense strand to SEQ ID NO: 1154756
uuucucauccucaacgggu

SEQ ID NO: 1154758 - RNA, 19 nt, Artificial Sequence
  Description of Artificial Sequence: Synthetic oligonucleotide
  Sense strand starting at position 962 of SEQ ID NO: 916413
gcauccacuucuggagaga

SEQ ID NO: 1154759 - RNA, 19 nt, Artificial Sequence
  Description of Artificial Sequence: Synthetic oligonucleotide
  Antisense strand to SEQ ID NO: 1154758
ucucuccagaaguggaugc

SEQ ID NO: 1154760 - RNA, 19 nt, Artificial Sequence
  Description of Artificial Sequence: Synthetic oligonucleotide
  Sense strand starting at position 1136 of SEQ ID NO: 916413
gguccuguugcccaaguuu

SEQ ID NO: 1154761 - RNA, 19 nt, Artificial Sequence
  Description of Artificial Sequence: Synthetic oligonucleotide
  Antisense strand to SEQ ID NO: 1154760
aaacuugggcaacaggacc

SEQ ID NO: 1154762 - RNA, 19 nt, Artificial Sequence
  Description of Artificial Sequence: Synthetic oligonucleotide
  Sense strand starting at position 1383 of SEQ ID NO: 916413
gguguuucccgagggagaa

SEQ ID NO: 1154763 - RNA, 19 nt, Artificial Sequence
  Description of Artificial Sequence: Synthetic oligonucleotide
  Antisense strand to SEQ ID NO: 1154762
uucucccucgggaaacacc

SEQ ID NO: 1154764 - RNA, 19 nt, Artificial Sequence
  Description of Artificial Sequence: Synthetic oligonucleotide
  Sense strand starting at position 1384 of SEQ ID NO: 916413
guguuucccgagggagaaa

SEQ ID NO: 1154765 - RNA, 19 nt, Artificial Sequence
  Description of Artificial Sequence: Synthetic oligonucleotide
  Antisense strand to SEQ ID NO: 1154764
uuucucccucgggaaacac

SEQ ID NO: 1154766 - RNA, 19 nt, Artificial Sequence
  Description of Artificial Sequence: Synthetic oligonucleotide
  Sense strand starting at position 1409 of SEQ ID NO: 916413
gcaggaagaacuuggguuu

SEQ ID NO: 1154767 - RNA, 19 nt, Artificial Sequence
  Description of Artificial Sequence: Synthetic oligonucleotide
  Antisense strand to SEQ ID NO: 1154766
aaacccaaguucuuccugc

SEQ ID NO: 1154768 - RNA, 19 nt, Artificial Sequence
  Description of Artificial Sequence: Synthetic oligonucleotide
  Sense strand starting at position 1429 of SEQ ID NO: 916413
uguuucuucucugcccaga

SEQ ID NO: 1154769 - RNA, 19 nt, Artificial Sequence
  Description of Artificial Sequence: Synthetic oligonucleotide
  Antisense strand to SEQ ID NO: 1154768
ucugggcagagaagaaaca

SEQ ID NO: 1154770 - RNA, 19 nt, Artificial Sequence
  Description of Artificial Sequence: Synthetic oligonucleotide
  Sense strand starting at position 1431 of SEQ ID NO: 916413
uuucuucucugcccagaga

SEQ ID NO: 1154771 - RNA, 19 nt, Artificial Sequence
  Description of Artificial Sequence: Synthetic oligonucleotide
  Antisense strand to SEQ ID NO: 1154770
ucucugggcagagaagaaa

SEQ ID NO: 1154772 - RNA, 19 nt, Artificial Sequence
  Description of Artificial Sequence: Synthetic oligonucleotide
  Sense strand starting at position 1515 of SEQ ID NO: 916413
ggaccuuuguggccacaga

SEQ ID NO: 1154773 - RNA, 19 nt, Artificial Sequence
  Description of Artificial Sequence: Synthetic oligonucleotide
  Antisense strand to SEQ ID NO: 1154772
ucuguggccacaaaggucc

SEQ ID NO: 1154774 - RNA, 19 nt, Artificial Sequence
  Description of Artificial Sequence: Synthetic oligonucleotide
  Sense strand starting at position 1528 of SEQ ID NO: 916413
cacagagaucccugcuggu

SEQ ID NO: 1154775 - RNA, 19 nt, Artificial Sequence
  Description of Artificial Sequence: Synthetic oligonucleotide
  Antisense strand to SEQ ID NO: 1154774
accagcagggaucucugug

SEQ ID NO: 1154776 - RNA, 19 nt, Artificial Sequence
  Description of Artificial Sequence: Synthetic oligonucleotide
  Sense strand starting at position 2072 of SEQ ID NO: 916413
uuucgcuucgcaguggaaa

SEQ ID NO: 1154777 - RNA, 19 nt, Artificial Sequence
  Description of Artificial Sequence: Synthetic oligonucleotide
  Antisense strand to SEQ ID NO: 1154776
uuuccacugcgaagcgaaa

SEQ ID NO: 1154778 - RNA, 19 nt, Artificial Sequence
  Description of Artificial Sequence: Synthetic oligonucleotide
  Sense strand starting at position 2424 of SEQ ID NO: 916413
aguacaaugucccugggaa

SEQ ID NO: 1154779 - RNA, 19 nt, Artificial Sequence
  Description of Artificial Sequence: Synthetic oligonucleotide
  Antisense strand to SEQ ID NO: 1154778
uucccagggacauuguacu

SEQ ID NO: 1154780 - RNA, 19 nt, Artificial Sequence
  Description of Artificial Sequence: Synthetic oligonucleotide
  Sense strand starting at position 2425 of SEQ ID NO: 916413
guacaaugucccugggaac

SEQ ID NO: 1154781 - RNA, 19 nt, Artificial Sequence
  Description of Artificial Sequence: Synthetic oligonucleotide
  Antisense strand to SEQ ID NO: 1154780
guucccagggacauuguac

SEQ ID NO: 1154782 - RNA, 19 nt, Artificial Sequence
  Description of Artificial Sequence: Synthetic oligonucleotide
  Sense strand starting at position 2426 of SEQ ID NO: 916413
uacaaugucccugggaaca

SEQ ID NO: 1154783 - RNA, 19 nt, Artificial Sequence
  Description of Artificial Sequence: Synthetic oligonucleotide
  Antisense strand to SEQ ID NO: 1154782
uguucccagggacauugua

SEQ ID NO: 1154784 - RNA, 19 nt, Artificial Sequence
  Description of Artificial Sequence: Synthetic oligonucleotide
  Sense strand starting at position 2477 of SEQ ID NO: 916413
aaugguaggucugaggcua

SEQ ID NO: 1154785 - RNA, 19 nt, Artificial Sequence
  Description of Artificial Sequence: Synthetic oligonucleotide
  Antisense strand to SEQ ID NO: 1154784
uagccucagaccuaccauu

SEQ ID NO: 1154786 - RNA, 19 nt, Artificial Sequence
  Description of Artificial Sequence: Synthetic oligonucleotide
  Sense strand starting at position 2569 of SEQ ID NO: 916413
uggacacuuuacuuauagu

SEQ ID NO: 1154787 - RNA, 19 nt, Artificial Sequence
  Description of Artificial Sequence: Synthetic oligonucleotide
  Antisense strand to SEQ ID NO: 1154786
acuauaaguaaagugucca

SEQ ID NO: 1154788 - RNA, 19 nt, Artificial Sequence
  Description of Artificial Sequence: Synthetic oligonucleotide
  Sense strand starting at position 2650 of SEQ ID NO: 916413
uguacaauuugccaagguu

SEQ ID NO: 1154789 - RNA, 19 nt, Artificial Sequence
  Description of Artificial Sequence: Synthetic oligonucleotide
  Antisense strand to SEQ ID NO: 1154788
aaccuuggcaaauuguaca

SEQ ID NO: 1154790 - RNA, 19 nt, Artificial Sequence
  Description of Artificial Sequence: Synthetic oligonucleotide
  Sense strand starting at position 2665 of SEQ ID NO: 916413
gguuagggagcgugaagau

SEQ ID NO: 1154791 - RNA, 19 nt, Artificial Sequence
  Description of Artificial Sequence: Synthetic oligonucleotide
  Antisense strand to SEQ ID NO: 1154790
aucuucacgcucccuaacc

SEQ ID NO: 1154792 - RNA, 19 nt, Artificial Sequence
  Description of Artificial Sequence: Synthetic oligonucleotide
  Sense strand starting at position 2666 of SEQ ID NO: 916413
guuagggagcgugaagaua

SEQ ID NO: 1154793 - RNA, 19 nt, Artificial Sequence
  Description of Artificial Sequence: Synthetic oligonucleotide
  Antisense strand to SEQ ID NO: 1154792
uaucuucacgcucccuaac

SEQ ID NO: 1154794 - RNA, 19 nt, Artificial Sequence
  Description of Artificial Sequence: Synthetic oligonucleotide
  Sense strand starting at position 2720 of SEQ ID NO: 916413
uaguccugaccuuggauga

SEQ ID NO: 1154795 - RNA, 19 nt, Artificial Sequence
  Description of Artificial Sequence: Synthetic oligonucleotide
  Antisense strand to SEQ ID NO: 1154794
ucauccaaggucaggacua

SEQ ID NO: 1154796 - RNA, 19 nt, Artificial Sequence
  Description of Artificial Sequence: Synthetic oligonucleotide
  Sense strand starting at position 2724 of SEQ ID NO: 916413
ccugaccuuggaugaguua

SEQ ID NO: 1154797 - RNA, 19 nt, Artificial Sequence
  Description of Artificial Sequence: Synthetic oligonucleotide
  Antisense strand to SEQ ID NO: 1154796
uaacucauccaaggucagg

SEQ ID NO: 1154798 - RNA, 19 nt, Artificial Sequence
  Description of Artificial Sequence: Synthetic oligonucleotide
  Sense strand starting at position 2743 of SEQ ID NO: 916413
cgggcgucuccugggagaa

SEQ ID NO: 1154799 - RNA, 19 nt, Artificial Sequence
  Description of Artificial Sequence: Synthetic oligonucleotide
  Antisense strand to SEQ ID NO: 1154798
uucucccaggagacgcccg

SEQ ID NO: 1154800 - RNA, 19 nt, Artificial Sequence
  Description of Artificial Sequence: Synthetic oligonucleotide
  Sense strand starting at position 2744 of SEQ ID NO: 916413
gggcgucuccugggagaaa

SEQ ID NO: 1154801 - RNA, 19 nt, Artificial Sequence
  Description of Artificial Sequence: Synthetic oligonucleotide
  Antisense strand to SEQ ID NO: 1154800
uuucucccaggagacgccc

SEQ ID NO: 1154802 - RNA, 19 nt, Artificial Sequence
  Description of Artificial Sequence: Synthetic oligonucleotide
  Sense strand starting at position 2757 of SEQ ID NO: 916413
gagaaaugaugcuguugau

SEQ ID NO: 1154803 - RNA, 19 nt, Artificial Sequence
  Description of Artificial Sequence: Synthetic oligonucleotide
  Antisense strand to SEQ ID NO: 1154802
aucaacagcaucauuucuc

SEQ ID NO: 1154804 - RNA, 19 nt, Artificial Sequence
  Description of Artificial Sequence: Synthetic oligonucleotide
  Sense strand starting at position 2760 of SEQ ID NO: 916413
aaaugaugcuguugaugag

SEQ ID NO: 1154805 - RNA, 19 nt, Artificial Sequence
  Description of Artificial Sequence: Synthetic oligonucleotide
  Antisense strand to SEQ ID NO: 1154804
cucaucaacagcaucauuu

SEQ ID NO: 1154806 - RNA, 19 nt, Artificial Sequence
  Description of Artificial Sequence: Synthetic oligonucleotide
  Sense strand starting at position 2764 of SEQ ID NO: 916413
gaugcuguugaugagucaa

SEQ ID NO: 1154807 - RNA, 19 nt, Artificial Sequence
  Description of Artificial Sequence: Synthetic oligonucleotide
  Antisense strand to SEQ ID NO: 1154806
uugacucaucaacagcauc

SEQ ID NO: 1154808 - RNA, 19 nt, Artificial Sequence
  Description of Artificial Sequence: Synthetic oligonucleotide
  Sense strand starting at position 2835 of SEQ ID NO: 916413
uccagagguuccgaacuaa

SEQ ID NO: 1154809 - RNA, 19 nt, Artificial Sequence
  Description of Artificial Sequence: Synthetic oligonucleotide
  Antisense strand to SEQ ID NO: 1154808
uuaguucggaaccucugga

SEQ ID NO: 1154810 - RNA, 19 nt, Artificial Sequence
  Description of Artificial Sequence: Synthetic oligonucleotide
  Sense strand starting at position 2890 of SEQ ID NO: 916413
gcagaaaucuuagaaaucu

SEQ ID NO: 1154811 - RNA, 19 nt, Artificial Sequence
  Description of Artificial Sequence: Synthetic oligonucleotide
  Antisense strand to SEQ ID NO: 1154810
agauuucuaagauuucugc

SEQ ID NO: 1154812 - RNA, 19 nt, Artificial Sequence
  Description of Artificial Sequence: Synthetic oligonucleotide
  Sense strand starting at position 2968 of SEQ ID NO: 916413
ugacaagagucauacaacu

SEQ ID NO: 1154813 - RNA, 19 nt, Artificial Sequence
  Description of Artificial Sequence: Synthetic oligonucleotide
  Antisense strand to SEQ ID NO: 1154812
aguuguaugacucuuguca

SEQ ID NO: 1154814 - RNA, 19 nt, Artificial Sequence
  Description of Artificial Sequence: Synthetic oligonucleotide
  Sense strand starting at position 3280 of SEQ ID NO: 916413
cuaggucuuguguggguua

SEQ ID NO: 1154815 - RNA, 19 nt, Artificial Sequence
  Description of Artificial Sequence: Synthetic oligonucleotide
  Antisense strand to SEQ ID NO: 1154814
uaacccacacaagaccuag

SEQ ID NO: 1154816 - RNA, 19 nt, Artificial Sequence
  Description of Artificial Sequence: Synthetic oligonucleotide
  Sense strand starting at position 3283 of SEQ ID NO: 916413
ggucuuguguggguuagca

SEQ ID NO: 1154817 - RNA, 19 nt, Artificial Sequence
  Description of Artificial Sequence: Synthetic oligonucleotide
  Antisense strand to SEQ ID NO: 1154816
ugcuaacccacacaagacc

SEQ ID NO: 1154818 - RNA, 19 nt, Artificial Sequence
  Description of Artificial Sequence: Synthetic oligonucleotide
  Sense strand starting at position 3349 of SEQ ID NO: 916413
ggacauaagucagcucuca

SEQ ID NO: 1154819 - RNA, 19 nt, Artificial Sequence
  Description of Artificial Sequence: Synthetic oligonucleotide
  Antisense strand to SEQ ID NO: 1154818
ugagagcugacuuaugucc

SEQ ID NO: 1154820 - RNA, 19 nt, Artificial Sequence
  Description of Artificial Sequence: Synthetic oligonucleotide
  Sense strand starting at position 3354 of SEQ ID NO: 916413
uaagucagcucucagaaga

SEQ ID NO: 1154821 - RNA, 19 nt, Artificial Sequence
  Description of Artificial Sequence: Synthetic oligonucleotide
  Antisense strand to SEQ ID NO: 1154820
ucuucugagagcugacuua

SEQ ID NO: 1154822 - RNA, 19 nt, Artificial Sequence
  Description of Artificial Sequence: Synthetic oligonucleotide
  Sense strand starting at position 3402 of SEQ ID NO: 916413
gaucuugucuucuugaguc

SEQ ID NO: 1154823 - RNA, 19 nt, Artificial Sequence
  Description of Artificial Sequence: Synthetic oligonucleotide
  Antisense strand to SEQ ID NO: 1154822
gacucaagaagacaagauc

SEQ ID NO: 1154824 - RNA, 19 nt, Artificial Sequence
  Description of Artificial Sequence: Synthetic oligonucleotide
  Sense strand starting at position 3412 of SEQ ID NO: 916413
ucuugagucguggguggua

SEQ ID NO: 1154825 - RNA, 19 nt, Artificial Sequence
  Description of Artificial Sequence: Synthetic oligonucleotide
  Antisense strand to SEQ ID NO: 1154824
uaccacccacgacucaaga

SEQ ID NO: 1154826 - RNA, 19 nt, Artificial Sequence
  Description of Artificial Sequence: Synthetic oligonucleotide
  Sense strand starting at position 72 of SEQ ID NO: 916414
agacauuccuggccugaug

SEQ ID NO: 1154827 - RNA, 19 nt, Artificial Sequence
  Description of Artificial Sequence: Synthetic oligonucleotide
  Antisense strand to SEQ ID NO: 1154826
caucaggccaggaaugucu

SEQ ID NO: 1154828 - RNA, 19 nt, Artificial Sequence
  Description of Artificial Sequence: Synthetic oligonucleotide
  Sense strand starting at position 183 of SEQ ID NO: 916414
cuugcuuuagggcauagaa

SEQ ID NO: 1154829 - RNA, 19 nt, Artificial Sequence
  Description of Artificial Sequence: Synthetic oligonucleotide
  Antisense strand to SEQ ID NO: 1154828
uucuaugcccuaaagcaag

SEQ ID NO: 1154830 - RNA, 19 nt, Artificial Sequence
  Description of Artificial Sequence: Synthetic oligonucleotide
  Sense strand starting at position 185 of SEQ ID NO: 916414
ugcuuuagggcauagaacu

SEQ ID NO: 1154831 - RNA, 19 nt, Artificial Sequence
  Description of Artificial Sequence: Synthetic oligonucleotide
  Antisense strand to SEQ ID NO: 1154830
aguucuaugcccuaaagca

SEQ ID NO: 1154832 - RNA, 19 nt, Artificial Sequence
  Description of Artificial Sequence: Synthetic oligonucleotide
  Sense strand starting at position 209 of SEQ ID NO: 916414
aguggaauuagauguccaa

SEQ ID NO: 1154833 - RNA, 19 nt, Artificial Sequence
  Description of Artificial Sequence: Synthetic oligonucleotide
  Antisense strand to SEQ ID NO: 1154832
uuggacaucuaauuccacu

SEQ ID NO: 1154834 - RNA, 19 nt, Artificial Sequence
  Description of Artificial Sequence: Synthetic oligonucleotide
  Sense strand starting at position 212 of SEQ ID NO: 916414
ggaauuagauguccaaguc

SEQ ID NO: 1154835 - RNA, 19 nt, Artificial Sequence
  Description of Artificial Sequence: Synthetic oligonucleotide
  Antisense strand to SEQ ID NO: 1154834
gacuuggacaucuaauucc

SEQ ID NO: 1154836 - RNA, 19 nt, Artificial Sequence
  Description of Artificial Sequence: Synthetic oligonucleotide
  Sense strand starting at position 213 of SEQ ID NO: 916414
gaauuagauguccaagucu

SEQ ID NO: 1154837 - RNA, 19 nt, Artificial Sequence
  Description of Artificial Sequence: Synthetic oligonucleotide
  Antisense strand to SEQ ID NO: 1154836
agacuuggacaucuaauuc

SEQ ID NO: 1154838 - RNA, 19 nt, Artificial Sequence
  Description of Artificial Sequence: Synthetic oligonucleotide
  Sense strand starting at position 222 of SEQ ID NO: 916414
guccaagucuaagugaaag

SEQ ID NO: 1154839 - RNA, 19 nt, Artificial Sequence
  Description of Artificial Sequence: Synthetic oligonucleotide
  Antisense strand to SEQ ID NO: 1154838
cuuucacuuagacuuggac

SEQ ID NO: 1154840 - RNA, 19 nt, Artificial Sequence
  Description of Artificial Sequence: Synthetic oligonucleotide
  Sense strand starting at position 306 of SEQ ID NO: 916414
gcgagagaggcuuaauaac

SEQ ID NO: 1154841 - RNA, 19 nt, Artificial Sequence
  Description of Artificial Sequence: Synthetic oligonucleotide
  Antisense strand to SEQ ID NO: 1154840
guuauuaagccucucucgc

SEQ ID NO: 1154842 - RNA, 19 nt, Artificial Sequence
  Description of Artificial Sequence: Synthetic oligonucleotide
  Sense strand starting at position 323 of SEQ ID NO: 916414
acagaaaccugagucucua

SEQ ID NO: 1154843 - RNA, 19 nt, Artificial Sequence
  Description of Artificial Sequence: Synthetic oligonucleotide
  Antisense strand to SEQ ID NO: 1154842
uagagacucagguuucugu

SEQ ID NO: 1154844 - RNA, 19 nt, Artificial Sequence
  Description of Artificial Sequence: Synthetic oligonucleotide
  Sense strand starting at position 327 of SEQ ID NO: 916414
aaaccugagucucuaggua

SEQ ID NO: 1154845 - RNA, 19 nt, Artificial Sequence
  Description of Artificial Sequence: Synthetic oligonucleotide
  Antisense strand to SEQ ID NO: 1154844
uaccuagagacucagguuu

SEQ ID NO: 1154846 - RNA, 19 nt, Artificial Sequence
  Description of Artificial Sequence: Synthetic oligonucleotide
  Sense strand starting at position 495 of SEQ ID NO: 916414
aggaucuucuuggcacaca

SEQ ID NO: 1154847 - RNA, 19 nt, Artificial Sequence
  Description of Artificial Sequence: Synthetic oligonucleotide
  Antisense strand to SEQ ID NO: 1154846
ugugugccaagaagauccu

SEQ ID NO: 1154848 - RNA, 19 nt, Artificial Sequence
  Description of Artificial Sequence: Synthetic oligonucleotide
  Sense strand starting at position 511 of SEQ ID NO: 916414
acauuaugucaucaguaau

SEQ ID NO: 1154849 - RNA, 19 nt, Artificial Sequence
  Description of Artificial Sequence: Synthetic oligonucleotide
  Antisense strand to SEQ ID NO: 1154848
auuacugaugacauaaugu

SEQ ID NO: 1154850 - RNA, 19 nt, Artificial Sequence
  Description of Artificial Sequence: Synthetic oligonucleotide
  Sense strand starting at position 541 of SEQ ID NO: 916414
ggaacucuggcaggaguua

SEQ ID NO: 1154851 - RNA, 19 nt, Artificial Sequence
  Description of Artificial Sequence: Synthetic oligonucleotide
  Antisense strand to SEQ ID NO: 1154850
uaacuccugccagaguucc

SEQ ID NO: 1154852 - RNA, 19 nt, Artificial Sequence
  Description of Artificial Sequence: Synthetic oligonucleotide
  Sense strand starting at position 655 of SEQ ID NO: 916414
gugccuguugucuuucuau

SEQ ID NO: 1154853 - RNA, 19 nt, Artificial Sequence
  Description of Artificial Sequence: Synthetic oligonucleotide
  Antisense strand to SEQ ID NO: 1154852
auagaaagacaacaggcac

SEQ ID NO: 1154854 - RNA, 19 nt, Artificial Sequence
  Description of Artificial Sequence: Synthetic oligonucleotide
  Sense strand starting at position 661 of SEQ ID NO: 916414
guugucuuucuauaugaaa

SEQ ID NO: 1154855 - RNA, 19 nt, Artificial Sequence
  Description of Artificial Sequence: Synthetic oligonucleotide
  Antisense strand to SEQ ID NO: 1154854
uuucauauagaaagacaac

SEQ ID NO: 1154856 - RNA, 19 nt, Artificial Sequence
  Description of Artificial Sequence: Synthetic oligonucleotide
  Sense strand starting at position 1043 of SEQ ID NO: 916414
ggagaugucacagauguuc

SEQ ID NO: 1154857 - RNA, 19 nt, Artificial Sequence
  Description of Artificial Sequence: Synthetic oligonucleotide
  Antisense strand to SEQ ID NO: 1154856
gaacaucugugacaucucc

SEQ ID NO: 1154858 - RNA, 19 nt, Artificial Sequence
  Description of Artificial Sequence: Synthetic oligonucleotide
  Sense strand starting at position 1051 of SEQ ID NO: 916414
cacagauguuccuugacug

SEQ ID NO: 1154859 - RNA, 19 nt, Artificial Sequence
  Description of Artificial Sequence: Synthetic oligonucleotide
  Antisense strand to SEQ ID NO: 1154858
cagucaaggaacaucugug

SEQ ID NO: 1154860 - RNA, 19 nt, Artificial Sequence
  Description of Artificial Sequence: Synthetic oligonucleotide
  Sense strand starting at position 1052 of SEQ ID NO: 916414
acagauguuccuugacuga

SEQ ID NO: 1154861 - RNA, 19 nt, Artificial Sequence
  Description of Artificial Sequence: Synthetic oligonucleotide
  Antisense strand to SEQ ID NO: 1154860
ucagucaaggaacaucugu

SEQ ID NO: 1154862 - RNA, 19 nt, Artificial Sequence
  Description of Artificial Sequence: Synthetic oligonucleotide
  Sense strand starting at position 1096 of SEQ ID NO: 916414
gcuuauuacugaucuggaa

SEQ ID NO: 1154863 - RNA, 19 nt, Artificial Sequence
  Description of Artificial Sequence: Synthetic oligonucleotide
  Antisense strand to SEQ ID NO: 1154862
uuccagaucaguaauaagc

SEQ ID NO: 1154864 - RNA, 19 nt, Artificial Sequence
  Description of Artificial Sequence: Synthetic oligonucleotide
  Sense strand starting at position 1164 of SEQ ID NO: 916414
uaaccacuggugugaaaca

SEQ ID NO: 1154865 - RNA, 19 nt, Artificial Sequence
  Description of Artificial Sequence: Synthetic oligonucleotide
  Antisense strand to SEQ ID NO: 1154864
uguuucacaccagugguua

SEQ ID NO: 1154866 - RNA, 19 nt, Artificial Sequence
  Description of Artificial Sequence: Synthetic oligonucleotide
  Sense strand starting at position 1169 of SEQ ID NO: 916414
acuggugugaaacauggua

SEQ ID NO: 1154867 - RNA, 19 nt, Artificial Sequence
  Description of Artificial Sequence: Synthetic oligonucleotide
  Antisense strand to SEQ ID NO: 1154866
uaccauguuucacaccagu

SEQ ID NO: 1154868 - RNA, 19 nt, Artificial Sequence
  Description of Artificial Sequence: Synthetic oligonucleotide
  Sense strand starting at position 1171 of SEQ ID NO: 916414
uggugugaaacaugguaca

SEQ ID NO: 1154869 - RNA, 19 nt, Artificial Sequence
  Description of Artificial Sequence: Synthetic oligonucleotide
  Antisense strand to SEQ ID NO: 1154868
uguaccauguuucacacca

SEQ ID NO: 1154870 - RNA, 19 nt, Artificial Sequence
  Description of Artificial Sequence: Synthetic oligonucleotide
  Sense strand starting at position 1794 of SEQ ID NO: 916414
gagagaagcguaugaggaa

SEQ ID NO: 1154871 - RNA, 19 nt, Artificial Sequence
  Description of Artificial Sequence: Synthetic oligonucleotide
  Antisense strand to SEQ ID NO: 1154870
uuccucauacgcuucucuc

SEQ ID NO: 1154872 - RNA, 19 nt, Artificial Sequence
  Description of Artificial Sequence: Synthetic oligonucleotide
  Sense strand starting at position 1801 of SEQ ID NO: 916414
gcguaugaggaauggauga

SEQ ID NO: 1154873 - RNA, 19 nt, Artificial Sequence
  Description of Artificial Sequence: Synthetic oligonucleotide
  Antisense strand to SEQ ID NO: 1154872
ucauccauuccucauacgc

SEQ ID NO: 1154874 - RNA, 19 nt, Artificial Sequence
  Description of Artificial Sequence: Synthetic oligonucleotide
  Sense strand starting at position 2512 of SEQ ID NO: 916414
uuaauaugguagcucauga

SEQ ID NO: 1154875 - RNA, 19 nt, Artificial Sequence
  Description of Artificial Sequence: Synthetic oligonucleotide
  Antisense strand to SEQ ID NO: 1154874
ucaugagcuaccauauuaa

SEQ ID NO: 1154876 - RNA, 19 nt, Artificial Sequence
  Description of Artificial Sequence: Synthetic oligonucleotide
  Sense strand starting at position 2517 of SEQ ID NO: 916414
augguagcucaugacugaa

SEQ ID NO: 1154877 - RNA, 19 nt, Artificial Sequence
  Description of Artificial Sequence: Synthetic oligonucleotide
  Antisense strand to SEQ ID NO: 1154876
uucagucaugagcuaccau

SEQ ID NO: 1154878 - RNA, 19 nt, Artificial Sequence
  Description of Artificial Sequence: Synthetic oligonucleotide
  Sense strand starting at position 2581 of SEQ ID NO: 916414
ccgauauaacuuggaucuu

SEQ ID NO: 1154879 - RNA, 19 nt, Artificial Sequence
  Description of Artificial Sequence: Synthetic oligonucleotide
  Antisense strand to SEQ ID NO: 1154878
aagauccaaguuauaucgg

SEQ ID NO: 1154880 - RNA, 19 nt, Artificial Sequence
  Description of Artificial Sequence: Synthetic oligonucleotide
  Sense strand starting at position 2899 of SEQ ID NO: 916414
ccauccauccugggagaca

SEQ ID NO: 1154881 - RNA, 19 nt, Artificial Sequence
  Description of Artificial Sequence: Synthetic oligonucleotide
  Antisense strand to SEQ ID NO: 1154880
ugucucccaggauggaugg

SEQ ID NO: 1154882 - RNA, 19 nt, Artificial Sequence
  Description of Artificial Sequence: Synthetic oligonucleotide
  Sense strand starting at position 3028 of SEQ ID NO: 916414
cuacacuggcauugagaca

SEQ ID NO: 1154883 - RNA, 19 nt, Artificial Sequence
  Description of Artificial Sequence: Synthetic oligonucleotide
  Antisense strand to SEQ ID NO: 1154882
ugucucaaugccaguguag

SEQ ID NO: 1154884 - RNA, 19 nt, Artificial Sequence
  Description of Artificial Sequence: Synthetic oligonucleotide
  Sense strand starting at position 3072 of SEQ ID NO: 916414
uguagacaaccucagaguu

SEQ ID NO: 1154885 - RNA, 19 nt, Artificial Sequence
  Description of Artificial Sequence: Synthetic oligonucleotide
  Antisense strand to SEQ ID NO: 1154884
aacucugagguugucuaca

SEQ ID NO: 1154886 - RNA, 19 nt, Artificial Sequence
  Description of Artificial Sequence: Synthetic oligonucleotide
  Sense strand starting at position 3082 of SEQ ID NO: 916414
cucagaguuggccacagaa

SEQ ID NO: 1154887 - RNA, 19 nt, Artificial Sequence
  Description of Artificial Sequence: Synthetic oligonucleotide
  Antisense strand to SEQ ID NO: 1154886
uucuguggccaacucugag

SEQ ID NO: 1154888 - RNA, 19 nt, Artificial Sequence
  Description of Artificial Sequence: Synthetic oligonucleotide
  Sense strand starting at position 3132 of SEQ ID NO: 916414
ggacuuuaaggcugaacaa

SEQ ID NO: 1154889 - RNA, 19 nt, Artificial Sequence
  Description of Artificial Sequence: Synthetic oligonucleotide
  Antisense strand to SEQ ID NO: 1154888
uuguucagccuuaaagucc

SEQ ID NO: 1154890 - RNA, 19 nt, Artificial Sequence
  Description of Artificial Sequence: Synthetic oligonucleotide
  Sense strand starting at position 3147 of SEQ ID NO: 916414
acaagcuuaugucuggaau

SEQ ID NO: 1154891 - RNA, 19 nt, Artificial Sequence
  Description of Artificial Sequence: Synthetic oligonucleotide
  Antisense strand to SEQ ID NO: 1154890
auuccagacauaagcuugu

SEQ ID NO: 1154892 - RNA, 19 nt, Artificial Sequence
  Description of Artificial Sequence: Synthetic oligonucleotide
  Sense strand starting at position 3150 of SEQ ID NO: 916414
agcuuaugucuggaaucuc

SEQ ID NO: 1154893 - RNA, 19 nt, Artificial Sequence
  Description of Artificial Sequence: Synthetic oligonucleotide
  Antisense strand to SEQ ID NO: 1154892
gagauuccagacauaagcu

SEQ ID NO: 1154894 - RNA, 19 nt, Artificial Sequence
  Description of Artificial Sequence: Synthetic oligonucleotide
  Sense strand starting at position 3189 of SEQ ID NO: 916414
gcaaguagaguugaggaua

SEQ ID NO: 1154895 - RNA, 19 nt, Artificial Sequence
  Description of Artificial Sequence: Synthetic oligonucleotide
  Antisense strand to SEQ ID NO: 1154894
uauccucaacucuacuugc

SEQ ID NO: 1154896 - RNA, 19 nt, Artificial Sequence
  Description of Artificial Sequence: Synthetic oligonucleotide
  Sense strand starting at position 3200 of SEQ ID NO: 916414
ugaggauacuaguucugaa

SEQ ID NO: 1154897 - RNA, 19 nt, Artificial Sequence
  Description of Artificial Sequence: Synthetic oligonucleotide
  Antisense strand to SEQ ID NO: 1154896
uucagaacuaguauccuca

SEQ ID NO: 1154898 - RNA, 19 nt, Artificial Sequence
  Description of Artificial Sequence: Synthetic oligonucleotide
  Sense strand starting at position 3225 of SEQ ID NO: 916414
cuuuaauuugcuggcauga

SEQ ID NO: 1154899 - RNA, 19 nt, Artificial Sequence
  Description of Artificial Sequence: Synthetic oligonucleotide
  Antisense strand to SEQ ID NO: 1154898
ucaugccagcaaauuaaag

SEQ ID NO: 1154900 - RNA, 19 nt, Artificial Sequence
  Description of Artificial Sequence: Synthetic oligonucleotide
  Sense strand starting at position 3248 of SEQ ID NO: 916414
ucaugucauggugacaagu

SEQ ID NO: 1154901 - RNA, 19 nt, Artificial Sequence
  Description of Artificial Sequence: Synthetic oligonucleotide
  Antisense strand to SEQ ID NO: 1154900
acuugucaccaugacauga

SEQ ID NO: 1154902 - RNA, 19 nt, Artificial Sequence
  Description of Artificial Sequence: Synthetic oligonucleotide
  Sense strand starting at position 3767 of SEQ ID NO: 916414
ucuucuguaccauggauaa

SEQ ID NO: 1154903 - RNA, 19 nt, Artificial Sequence
  Description of Artificial Sequence: Synthetic oligonucleotide
  Antisense strand to SEQ ID NO: 1154902
uuauccaugguacagaaga

SEQ ID NO: 1154904 - RNA, 19 nt, Artificial Sequence
  Description of Artificial Sequence: Synthetic oligonucleotide
  Sense strand starting at position 3974 of SEQ ID NO: 916414
cuaagcuuuguugagaaua

SEQ ID NO: 1154905 - RNA, 19 nt, Artificial Sequence
  Description of Artificial Sequence: Synthetic oligonucleotide
  Antisense strand to SEQ ID NO: 1154904
uauucucaacaaagcuuag

SEQ ID NO: 1154906 - RNA, 19 nt, Artificial Sequence
  Description of Artificial Sequence: Synthetic oligonucleotide
  Sense strand starting at position 11 of SEQ ID NO: 916415
aggccugaauugcuaacau

SEQ ID NO: 1154907 - RNA, 19 nt, Artificial Sequence
  Description of Artificial Sequence: Synthetic oligonucleotide
  Antisense strand to SEQ ID NO: 1154906
auguuagcaauucaggccu

SEQ ID NO: 1154908 - RNA, 19 nt, Artificial Sequence
  Description of Artificial Sequence: Synthetic oligonucleotide
  Sense strand starting at position 48 of SEQ ID NO: 916415
ucagcaugaccuggaucua

SEQ ID NO: 1154909 - RNA, 19 nt, Artificial Sequence
  Description of Artificial Sequence: Synthetic oligonucleotide
  Antisense strand to SEQ ID NO: 1154908
uagauccaggucaugcuga

SEQ ID NO: 1154910 - RNA, 19 nt, Artificial Sequence
  Description of Artificial Sequence: Synthetic oligonucleotide
  Sense strand starting at position 146 of SEQ ID NO: 916415
uauuaaguaucgcuuuaga

SEQ ID NO: 1154911 - RNA, 19 nt, Artificial Sequence
  Description of Artificial Sequence: Synthetic oligonucleotide
  Antisense strand to SEQ ID NO: 1154910
ucuaaagcgauacuuaaua

SEQ ID NO: 1154912 - RNA, 19 nt, Artificial Sequence
  Description of Artificial Sequence: Synthetic oligonucleotide
  Sense strand starting at position 149 of SEQ ID NO: 916415
uaaguaucgcuuuagagac

SEQ ID NO: 1154913 - RNA, 19 nt, Artificial Sequence
  Description of Artificial Sequence: Synthetic oligonucleotide
  Antisense strand to SEQ ID NO: 1154912
gucucuaaagcgauacuua

SEQ ID NO: 1154914 - RNA, 19 nt, Artificial Sequence
  Description of Artificial Sequence: Synthetic oligonucleotide
  Sense strand starting at position 234 of SEQ ID NO: 916415
ggaaucaauuuggaaguca

SEQ ID NO: 1154915 - RNA, 19 nt, Artificial Sequence
  Description of Artificial Sequence: Synthetic oligonucleotide
  Antisense strand to SEQ ID NO: 1154914
ugacuuccaaauugauucc

SEQ ID NO: 1154916 - RNA, 19 nt, Artificial Sequence
  Description of Artificial Sequence: Synthetic oligonucleotide
  Sense strand starting at position 267 of SEQ ID NO: 916415
aguuccugucaauauaaac

SEQ ID NO: 1154917 - RNA, 19 nt, Artificial Sequence
  Description of Artificial Sequence: Synthetic oligonucleotide
  Antisense strand to SEQ ID NO: 1154916
guuuauauugacaggaacu

SEQ ID NO: 1154918 - RNA, 19 nt, Artificial Sequence
  Description of Artificial Sequence: Synthetic oligonucleotide
  Sense strand starting at position 397 of SEQ ID NO: 916415
uucuuauucugccuaagga

SEQ ID NO: 1154919 - RNA, 19 nt, Artificial Sequence
  Description of Artificial Sequence: Synthetic oligonucleotide
  Antisense strand to SEQ ID NO: 1154918
uccuuaggcagaauaagaa

SEQ ID NO: 1154920 - RNA, 19 nt, Artificial Sequence
  Description of Artificial Sequence: Synthetic oligonucleotide
  Sense strand starting at position 398 of SEQ ID NO: 916415
ucuuauucugccuaaggaa

SEQ ID NO: 1154921 - RNA, 19 nt, Artificial Sequence
  Description of Artificial Sequence: Synthetic oligonucleotide
  Antisense strand to SEQ ID NO: 1154920
uuccuuaggcagaauaaga

SEQ ID NO: 1154922 - RNA, 19 nt, Artificial Sequence
  Description of Artificial Sequence: Synthetic oligonucleotide
  Sense strand starting at position 491 of SEQ ID NO: 916415
uguuccaaugaauguuuau

SEQ ID NO: 1154923 - RNA, 19 nt, Artificial Sequence
  Description of Artificial Sequence: Synthetic oligonucleotide
  Antisense strand to SEQ ID NO: 1154922
auaaacauucauuggaaca

SEQ ID NO: 1154924 - RNA, 19 nt, Artificial Sequence
  Description of Artificial Sequence: Synthetic oligonucleotide
  Sense strand starting at position 569 of SEQ ID NO: 916415
aagcuuaucggcgacacaa

SEQ ID NO: 1154925 - RNA, 19 nt, Artificial Sequence
  Description of Artificial Sequence: Synthetic oligonucleotide
  Antisense strand to SEQ ID NO: 1154924
uugugucgccgauaagcuu

SEQ ID NO: 1154926 - RNA, 19 nt, Artificial Sequence
  Description of Artificial Sequence: Synthetic oligonucleotide
  Sense strand starting at position 571 of SEQ ID NO: 916415
gcuuaucggcgacacaaua

SEQ ID NO: 1154927 - RNA, 19 nt, Artificial Sequence
  Description of Artificial Sequence: Synthetic oligonucleotide
  Antisense strand to SEQ ID NO: 1154926
uauugugucgccgauaagc

SEQ ID NO: 1154928 - RNA, 19 nt, Artificial Sequence
  Description of Artificial Sequence: Synthetic oligonucleotide
  Sense strand starting at position 632 of SEQ ID NO: 916415
uuacuuuaugcuggaauau

SEQ ID NO: 1154929 - RNA, 19 nt, Artificial Sequence
  Description of Artificial Sequence: Synthetic oligonucleotide
  Antisense strand to SEQ ID NO: 1154928
auauuccagcauaaaguaa

SEQ ID NO: 1154930 - RNA, 19 nt, Artificial Sequence
  Description of Artificial Sequence: Synthetic oligonucleotide
  Sense strand starting at position 761 of SEQ ID NO: 916415
uucuuaugggcauaguuaa

SEQ ID NO: 1154931 - RNA, 19 nt, Artificial Sequence
  Description of Artificial Sequence: Synthetic oligonucleotide
  Antisense strand to SEQ ID NO: 1154930
uuaacuaugcccauaagaa

SEQ ID NO: 1154932 - RNA, 19 nt, Artificial Sequence
  Description of Artificial Sequence: Synthetic oligonucleotide
  Sense strand starting at position 928 of SEQ ID NO: 916415
uucguauuucuguaaggca

SEQ ID NO: 1154933 - RNA, 19 nt, Artificial Sequence
  Description of Artificial Sequence: Synthetic oligonucleotide
  Antisense strand to SEQ ID NO: 1154932
ugccuuacagaaauacgaa

SEQ ID NO: 1154934 - RNA, 19 nt, Artificial Sequence
  Description of Artificial Sequence: Synthetic oligonucleotide
  Sense strand starting at position 937 of SEQ ID NO: 916415
cuguaaggcagguauccaa

SEQ ID NO: 1154935 - RNA, 19 nt, Artificial Sequence
  Description of Artificial Sequence: Synthetic oligonucleotide
  Antisense strand to SEQ ID NO: 1154934
uuggauaccugccuuacag

SEQ ID NO: 1154936 - RNA, 19 nt, Artificial Sequence
  Description of Artificial Sequence: Synthetic oligonucleotide
  Sense strand starting at position 989 of SEQ ID NO: 916415
gacguucuaguuuaaguaa

SEQ ID NO: 1154937 - RNA, 19 nt, Artificial Sequence
  Description of Artificial Sequence: Synthetic oligonucleotide
  Antisense strand to SEQ ID NO: 1154936
uuacuuaaacuagaacguc

SEQ ID NO: 1154938 - RNA, 19 nt, Artificial Sequence
  Description of Artificial Sequence: Synthetic oligonucleotide
  Sense strand starting at position 1055 of SEQ ID NO: 916415
cggaauaaguuucccucau

SEQ ID NO: 1154939 - RNA, 19 nt, Artificial Sequence
  Description of Artificial Sequence: Synthetic oligonucleotide
  Antisense strand to SEQ ID NO: 1154938
augagggaaacuuauuccg

SEQ ID NO: 1154940 - RNA, 19 nt, Artificial Sequence
  Description of Artificial Sequence: Synthetic oligonucleotide
  Sense strand starting at position 1056 of SEQ ID NO: 916415
ggaauaaguuucccucauu

SEQ ID NO: 1154941 - RNA, 19 nt, Artificial Sequence
  Description of Artificial Sequence: Synthetic oligonucleotide
  Antisense strand to SEQ ID NO: 1154940
aaugagggaaacuuauucc

SEQ ID NO: 1154942 - RNA, 19 nt, Artificial Sequence
  Description of Artificial Sequence: Synthetic oligonucleotide
  Sense strand starting at position 1590 of SEQ ID NO: 916415
ucccauagcuuccuagagu

SEQ ID NO: 1154943 - RNA, 19 nt, Artificial Sequence
  Description of Artificial Sequence: Synthetic oligonucleotide
  Antisense strand to SEQ ID NO: 1154942
acucuaggaagcuauggga

SEQ ID NO: 1154944 - RNA, 19 nt, Artificial Sequence
  Description of Artificial Sequence: Synthetic oligonucleotide
  Sense strand starting at position 1593 of SEQ ID NO: 916415
cauagcuuccuagaguguu

SEQ ID NO: 1154945 - RNA, 19 nt, Artificial Sequence
  Description of Artificial Sequence: Synthetic oligonucleotide
  Antisense strand to SEQ ID NO: 1154944
aacacucuaggaagcuaug

SEQ ID NO: 1154946 - RNA, 19 nt, Artificial Sequence
  Description of Artificial Sequence: Synthetic oligonucleotide
  Sense strand starting at position 2184 of SEQ ID NO: 916415
gcuacacagcacugauaau

SEQ ID NO: 1154947 - RNA, 19 nt, Artificial Sequence
  Description of Artificial Sequence: Synthetic oligonucleotide
  Antisense strand to SEQ ID NO: 1154946
auuaucagugcuguguagc

SEQ ID NO: 1154948 - RNA, 19 nt, Artificial Sequence
  Description of Artificial Sequence: Synthetic oligonucleotide
  Sense strand starting at position 2363 of SEQ ID NO: 916415
gcagcuaauguauauuaaa

SEQ ID NO: 1154949 - RNA, 19 nt, Artificial Sequence
  Description of Artificial Sequence: Synthetic oligonucleotide
  Antisense strand to SEQ ID NO: 1154948
uuuaauauacauuagcugc

SEQ ID NO: 1154950 - RNA, 19 nt, Artificial Sequence
  Description of Artificial Sequence: Synthetic oligonucleotide
  Sense strand starting at position 2391 of SEQ ID NO: 916415
uguguuuggcacuauacua

SEQ ID NO: 1154951 - RNA, 19 nt, Artificial Sequence
  Description of Artificial Sequence: Synthetic oligonucleotide
  Antisense strand to SEQ ID NO: 1154950
uaguauagugccaaacaca

SEQ ID NO: 1154952 - RNA, 19 nt, Artificial Sequence
  Description of Artificial Sequence: Synthetic oligonucleotide
  Sense strand starting at position 2504 of SEQ ID NO: 916415
cggguuucccuuuaaagaa

SEQ ID NO: 1154953 - RNA, 19 nt, Artificial Sequence
  Description of Artificial Sequence: Synthetic oligonucleotide
  Antisense strand to SEQ ID NO: 1154952
uucuuuaaagggaaacccg

SEQ ID NO: 1154954 - RNA, 19 nt, Artificial Sequence
  Description of Artificial Sequence: Synthetic oligonucleotide
  Sense strand starting at position 2530 of SEQ ID NO: 916415
ccaggcucauuugaauuaa

SEQ ID NO: 1154955 - RNA, 19 nt, Artificial Sequence
  Description of Artificial Sequence: Synthetic oligonucleotide
  Antisense strand to SEQ ID NO: 1154954
uuaauucaaaugagccugg

SEQ ID NO: 1154956 - RNA, 19 nt, Artificial Sequence
  Description of Artificial Sequence: Synthetic oligonucleotide
  Sense strand starting at position 2592 of SEQ ID NO: 916415
uggacagugucuucuuuga

SEQ ID NO: 1154957 - RNA, 19 nt, Artificial Sequence
  Description of Artificial Sequence: Synthetic oligonucleotide
  Antisense strand to SEQ ID NO: 1154956
ucaaagaagacacugucca

SEQ ID NO: 1154958 - RNA, 19 nt, Artificial Sequence
  Description of Artificial Sequence: Synthetic oligonucleotide
  Sense strand starting at position 2673 of SEQ ID NO: 916415
uuuguuagaugguccaaau

SEQ ID NO: 1154959 - RNA, 19 nt, Artificial Sequence
  Description of Artificial Sequence: Synthetic oligonucleotide
  Antisense strand to SEQ ID NO: 1154958
auuuggaccaucuaacaaa

SEQ ID NO: 1154960 - RNA, 19 nt, Artificial Sequence
  Description of Artificial Sequence: Synthetic oligonucleotide
  Sense strand starting at position 2683 of SEQ ID NO: 916415
gguccaaauuccuuauugu

SEQ ID NO: 1154961 - RNA, 19 nt, Artificial Sequence
  Description of Artificial Sequence: Synthetic oligonucleotide
  Antisense strand to SEQ ID NO: 1154960
acaauaaggaauuuggacc

SEQ ID NO: 1154962 - RNA, 19 nt, Artificial Sequence
  Description of Artificial Sequence: Synthetic oligonucleotide
  Sense strand starting at position 2684 of SEQ ID NO: 916415
guccaaauuccuuauuguc

SEQ ID NO: 1154963 - RNA, 19 nt, Artificial Sequence
  Description of Artificial Sequence: Synthetic oligonucleotide
  Antisense strand to SEQ ID NO: 1154962
gacaauaaggaauuuggac

SEQ ID NO: 1154964 - RNA, 19 nt, Artificial Sequence
  Description of Artificial Sequence: Synthetic oligonucleotide
  Sense strand starting at position 2699 of SEQ ID NO: 916415
ugucuuuagcaauauguag

SEQ ID NO: 1154965 - RNA, 19 nt, Artificial Sequence
  Description of Artificial Sequence: Synthetic oligonucleotide
  Antisense strand to SEQ ID NO: 1154964
cuacauauugcuaaagaca

SEQ ID NO: 1154966 - RNA, 19 nt, Artificial Sequence
  Description of Artificial Sequence: Synthetic oligonucleotide
  Sense strand starting at position 2708 of SEQ ID NO: 916415
caauauguaguaggauaga

SEQ ID NO: 1154967 - RNA, 19 nt, Artificial Sequence
  Description of Artificial Sequence: Synthetic oligonucleotide
  Antisense strand to SEQ ID NO: 1154966
ucuauccuacuacauauug

SEQ ID NO: 1154968 - RNA, 19 nt, Artificial Sequence
  Description of Artificial Sequence: Synthetic oligonucleotide
  Sense strand starting at position 2998 of SEQ ID NO: 916415
ggaguuaauagugagccaa

SEQ ID NO: 1154969 - RNA, 19 nt, Artificial Sequence
  Description of Artificial Sequence: Synthetic oligonucleotide
  Antisense strand to SEQ ID NO: 1154968
uuggcucacuauuaacucc

SEQ ID NO: 1154970 - RNA, 19 nt, Artificial Sequence
  Description of Artificial Sequence: Synthetic oligonucleotide
  Sense strand starting at position 3000 of SEQ ID NO: 916415
aguuaauagugagccaaca

SEQ ID NO: 1154971 - RNA, 19 nt, Artificial Sequence
  Description of Artificial Sequence: Synthetic oligonucleotide
  Antisense strand to SEQ ID NO: 1154970
uguuggcucacuauuaacu

SEQ ID NO: 1154972 - RNA, 19 nt, Artificial Sequence
  Description of Artificial Sequence: Synthetic oligonucleotide
  Sense strand starting at position 3524 of SEQ ID NO: 916415
uugccauucugaucucaug

SEQ ID NO: 1154973 - RNA, 19 nt, Artificial Sequence
  Description of Artificial Sequence: Synthetic oligonucleotide
  Antisense strand to SEQ ID NO: 1154972
caugagaucagaauggcaa

SEQ ID NO: 1154974 - RNA, 19 nt, Artificial Sequence
  Description of Artificial Sequence: Synthetic oligonucleotide
  Sense strand starting at position 3636 of SEQ ID NO: 916415
uaaugugguccucaguaaa

SEQ ID NO: 1154975 - RNA, 19 nt, Artificial Sequence
  Description of Artificial Sequence: Synthetic oligonucleotide
  Antisense strand to SEQ ID NO: 1154974
uuuacugaggaccacauua

SEQ ID NO: 1154976 - RNA, 19 nt, Artificial Sequence
  Description of Artificial Sequence: Synthetic oligonucleotide
  Sense strand starting at position 3639 of SEQ ID NO: 916415
ugugguccucaguaaauuc

SEQ ID NO: 1154977 - RNA, 19 nt, Artificial Sequence
  Description of Artificial Sequence: Synthetic oligonucleotide
  Antisense strand to SEQ ID NO: 1154976
gaauuuacugaggaccaca

SEQ ID NO: 1154978 - RNA, 19 nt, Artificial Sequence
  Description of Artificial Sequence: Synthetic oligonucleotide
  Sense strand starting at position 3646 of SEQ ID NO: 916415
cucaguaaauucccgugaa

SEQ ID NO: 1154979 - RNA, 19 nt, Artificial Sequence
  Description of Artificial Sequence: Synthetic oligonucleotide
  Antisense strand to SEQ ID NO: 1154978
uucacgggaauuuacugag

SEQ ID NO: 1154980 - RNA, 19 nt, Artificial Sequence
  Description of Artificial Sequence: Synthetic oligonucleotide
  Sense strand starting at position 3650 of SEQ ID NO: 916415
guaaauucccgugaaguca

SEQ ID NO: 1154981 - RNA, 19 nt, Artificial Sequence
  Description of Artificial Sequence: Synthetic oligonucleotide
  Antisense strand to SEQ ID NO: 1154980
ugacuucacgggaauuuac

SEQ ID NO: 1154982 - RNA, 19 nt, Artificial Sequence
  Description of Artificial Sequence: Synthetic oligonucleotide
  Sense strand starting at position 3662 of SEQ ID NO: 916415
gaagucaucucagugauua

SEQ ID NO: 1154983 - RNA, 19 nt, Artificial Sequence
  Description of Artificial Sequence: Synthetic oligonucleotide
  Antisense strand to SEQ ID NO: 1154982
uaaucacugagaugacuuc

SEQ ID NO: 1154984 - RNA, 19 nt, Artificial Sequence
  Description of Artificial Sequence: Synthetic oligonucleotide
  Sense strand starting at position 3967 of SEQ ID NO: 916415
ucaacaaaugcuugucgaa

SEQ ID NO: 1154985 - RNA, 19 nt, Artificial Sequence
  Description of Artificial Sequence: Synthetic oligonucleotide
  Antisense strand to SEQ ID NO: 1154984
uucgacaagcauuuguuga

SEQ ID NO: 1154986 - RNA, 19 nt, Artificial Sequence
  Description of Artificial Sequence: Synthetic oligonucleotide
  Sense strand starting at position 113 of SEQ ID NO: 916416
cccugucuucuugaacaga

SEQ ID NO: 1154987 - RNA, 19 nt, Artificial Sequence
  Description of Artificial Sequence: Synthetic oligonucleotide
  Antisense strand to SEQ ID NO: 1154986
ucuguucaagaagacaggg

SEQ ID NO: 1154988 - RNA, 19 nt, Artificial Sequence
  Description of Artificial Sequence: Synthetic oligonucleotide
  Sense strand starting at position 296 of SEQ ID NO: 916416
ucuaaucugcaauggacua

SEQ ID NO: 1154989 - RNA, 19 nt, Artificial Sequence
  Description of Artificial Sequence: Synthetic oligonucleotide
  Antisense strand to SEQ ID NO: 1154988
uaguccauugcagauuaga

SEQ ID NO: 1154990 - RNA, 19 nt, Artificial Sequence
  Description of Artificial Sequence: Synthetic oligonucleotide
  Sense strand starting at position 319 of SEQ ID NO: 916416
auaagucuagucuauuaac

SEQ ID NO: 1154991 - RNA, 19 nt, Artificial Sequence
  Description of Artificial Sequence: Synthetic oligonucleotide
  Antisense strand to SEQ ID NO: 1154990
guuaauagacuagacuuau

SEQ ID NO: 1154992 - RNA, 19 nt, Artificial Sequence
  Description of Artificial Sequence: Synthetic oligonucleotide
  Sense strand starting at position 325 of SEQ ID NO: 916416
cuagucuauuaacuguaua

SEQ ID NO: 1154993 - RNA, 19 nt, Artificial Sequence
  Description of Artificial Sequence: Synthetic oligonucleotide
  Antisense strand to SEQ ID NO: 1154992
uauacaguuaauagacuag

SEQ ID NO: 1154994 - RNA, 19 nt, Artificial Sequence
  Description of Artificial Sequence: Synthetic oligonucleotide
  Sense strand starting at position 330 of SEQ ID NO: 916416
cuauuaacuguauacguaa

SEQ ID NO: 1154995 - RNA, 19 nt, Artificial Sequence
  Description of Artificial Sequence: Synthetic oligonucleotide
  Antisense strand to SEQ ID NO: 1154994
uuacguauacaguuaauag

SEQ ID NO: 1154996 - RNA, 19 nt, Artificial Sequence
  Description of Artificial Sequence: Synthetic oligonucleotide
  Sense strand starting at position 339 of SEQ ID NO: 916416
guauacguaaaguaagagu

SEQ ID NO: 1154997 - RNA, 19 nt, Artificial Sequence
  Description of Artificial Sequence: Synthetic oligonucleotide
  Antisense strand to SEQ ID NO: 1154996
acucuuacuuuacguauac

SEQ ID NO: 1154998 - RNA, 19 nt, Artificial Sequence
  Description of Artificial Sequence: Synthetic oligonucleotide
  Sense strand starting at position 356 of SEQ ID NO: 916416
guuagcaggacucaaaguu

SEQ ID NO: 1154999 - RNA, 19 nt, Artificial Sequence
  Description of Artificial Sequence: Synthetic oligonucleotide
  Antisense strand to SEQ ID NO: 1154998
aacuuugaguccugcuaac

SEQ ID NO: 1155000 - RNA, 19 nt, Artificial Sequence
  Description of Artificial Sequence: Synthetic oligonucleotide
  Sense strand starting at position 392 of SEQ ID NO: 916416
uuuggagacaacuguguaa

SEQ ID NO: 1155001 - RNA, 19 nt, Artificial Sequence
  Description of Artificial Sequence: Synthetic oligonucleotide
  Antisense strand to SEQ ID NO: 1155000
uuacacaguugucuccaaa

SEQ ID NO: 1155002 - RNA, 19 nt, Artificial Sequence
  Description of Artificial Sequence: Synthetic oligonucleotide
  Sense strand starting at position 394 of SEQ ID NO: 916416
uggagacaacuguguaaca

SEQ ID NO: 1155003 - RNA, 19 nt, Artificial Sequence
  Description of Artificial Sequence: Synthetic oligonucleotide
  Antisense strand to SEQ ID NO: 1155002
uguuacacaguugucucca

SEQ ID NO: 1155004 - RNA, 19 nt, Artificial Sequence
  Description of Artificial Sequence: Synthetic oligonucleotide
  Sense strand starting at position 395 of SEQ ID NO: 916416
ggagacaacuguguaacaa

SEQ ID NO: 1155005 - RNA, 19 nt, Artificial Sequence
  Description of Artificial Sequence: Synthetic oligonucleotide
  Antisense strand to SEQ ID NO: 1155004
uuguuacacaguugucucc

SEQ ID NO: 1155006 - RNA, 19 nt, Artificial Sequence
  Description of Artificial Sequence: Synthetic oligonucleotide
  Sense strand starting at position 450 of SEQ ID NO: 916416
uccucccaucuguaaggau

SEQ ID NO: 1155007 - RNA, 19 nt, Artificial Sequence
  Description of Artificial Sequence: Synthetic oligonucleotide
  Antisense strand to SEQ ID NO: 1155006
auccuuacagaugggagga

SEQ ID NO: 1155008 - RNA, 19 nt, Artificial Sequence
  Description of Artificial Sequence: Synthetic oligonucleotide
  Sense strand starting at position 594 of SEQ ID NO: 916416
ucagacauggccugcauuu

SEQ ID NO: 1155009 - RNA, 19 nt, Artificial Sequence
  Description of Artificial Sequence: Synthetic oligonucleotide
  Antisense strand to SEQ ID NO: 1155008
aaaugcaggccaugucuga

SEQ ID NO: 1155010 - RNA, 19 nt, Artificial Sequence
  Description of Artificial Sequence: Synthetic oligonucleotide
  Sense strand starting at position 669 of SEQ ID NO: 916416
auaguuguucugcacuuaa

SEQ ID NO: 1155011 - RNA, 19 nt, Artificial Sequence
  Description of Artificial Sequence: Synthetic oligonucleotide
  Antisense strand to SEQ ID NO: 1155010
uuaagugcagaacaacuau

SEQ ID NO: 1155012 - RNA, 19 nt, Artificial Sequence
  Description of Artificial Sequence: Synthetic oligonucleotide
  Sense strand starting at position 763 of SEQ ID NO: 916416
ugaagaaacaguggcuaua

SEQ ID NO: 1155013 - RNA, 19 nt, Artificial Sequence
  Description of Artificial Sequence: Synthetic oligonucleotide
  Antisense strand to SEQ ID NO: 1155012
uauagccacuguuucuuca

SEQ ID NO: 1155014 - RNA, 19 nt, Artificial Sequence
  Description of Artificial Sequence: Synthetic oligonucleotide
  Sense strand starting at position 765 of SEQ ID NO: 916416
aagaaacaguggcuauaua

SEQ ID NO: 1155015 - RNA, 19 nt, Artificial Sequence
  Description of Artificial Sequence: Synthetic oligonucleotide
  Antisense strand to SEQ ID NO: 1155014
uauauagccacuguuucuu

SEQ ID NO: 1155016 - RNA, 19 nt, Artificial Sequence
  Description of Artificial Sequence: Synthetic oligonucleotide
  Sense strand starting at position 867 of SEQ ID NO: 916416
ucagauauuucuggagaaa

SEQ ID NO: 1155017 - RNA, 19 nt, Artificial Sequence
  Description of Artificial Sequence: Synthetic oligonucleotide
  Antisense strand to SEQ ID NO: 1155016
uuucuccagaaauaucuga

SEQ ID NO: 1155018 - RNA, 19 nt, Artificial Sequence
  Description of Artificial Sequence: Synthetic oligonucleotide
  Sense strand starting at position 936 of SEQ ID NO: 916416
aauggucugcaugauauac

SEQ ID NO: 1155019 - RNA, 19 nt, Artificial Sequence
  Description of Artificial Sequence: Synthetic oligonucleotide
  Antisense strand to SEQ ID NO: 1155018
guauaucaugcagaccauu

SEQ ID NO: 1155020 - RNA, 19 nt, Artificial Sequence
  Description of Artificial Sequence: Synthetic oligonucleotide
  Sense strand starting at position 1041 of SEQ ID NO: 916416
cucacugcuguggauauaa

SEQ ID NO: 1155021 - RNA, 19 nt, Artificial Sequence
  Description of Artificial Sequence: Synthetic oligonucleotide
  Antisense strand to SEQ ID NO: 1155020
uuauauccacagcagugag

SEQ ID NO: 1155022 - RNA, 19 nt, Artificial Sequence
  Description of Artificial Sequence: Synthetic oligonucleotide
  Sense strand starting at position 1043 of SEQ ID NO: 916416
cacugcuguggauauaaau

SEQ ID NO: 1155023 - RNA, 19 nt, Artificial Sequence
  Description of Artificial Sequence: Synthetic oligonucleotide
  Antisense strand to SEQ ID NO: 1155022
auuuauauccacagcagug

SEQ ID NO: 1155024 - RNA, 19 nt, Artificial Sequence
  Description of Artificial Sequence: Synthetic oligonucleotide
  Sense strand starting at position 1542 of SEQ ID NO: 916416
ucaaauauucgagguaaag

SEQ ID NO: 1155025 - RNA, 19 nt, Artificial Sequence
  Description of Artificial Sequence: Synthetic oligonucleotide
  Antisense strand to SEQ ID NO: 1155024
cuuuaccucgaauauuuga

SEQ ID NO: 1155026 - RNA, 19 nt, Artificial Sequence
  Description of Artificial Sequence: Synthetic oligonucleotide
  Sense strand starting at position 1972 of SEQ ID NO: 916416
ucuggagaccucuguaaca

SEQ ID NO: 1155027 - RNA, 19 nt, Artificial Sequence
  Description of Artificial Sequence: Synthetic oligonucleotide
  Antisense strand to SEQ ID NO: 1155026
uguuacagaggucuccaga

SEQ ID NO: 1155028 - RNA, 19 nt, Artificial Sequence
  Description of Artificial Sequence: Synthetic oligonucleotide
  Sense strand starting at position 1974 of SEQ ID NO: 916416
uggagaccucuguaacagu

SEQ ID NO: 1155029 - RNA, 19 nt, Artificial Sequence
  Description of Artificial Sequence: Synthetic oligonucleotide
  Antisense strand to SEQ ID NO: 1155028
acuguuacagaggucucca

SEQ ID NO: 1155030 - RNA, 19 nt, Artificial Sequence
  Description of Artificial Sequence: Synthetic oligonucleotide
  Sense strand starting at position 1987 of SEQ ID NO: 916416
aacagucgugcggagaaga

SEQ ID NO: 1155031 - RNA, 19 nt, Artificial Sequence
  Description of Artificial Sequence: Synthetic oligonucleotide
  Antisense strand to SEQ ID NO: 1155030
ucuucuccgcacgacuguu

SEQ ID NO: 1155032 - RNA, 19 nt, Artificial Sequence
  Description of Artificial Sequence: Synthetic oligonucleotide
  Sense strand starting at position 2096 of SEQ ID NO: 916416
ucuccauugugauuggaaa

SEQ ID NO: 1155033 - RNA, 19 nt, Artificial Sequence
  Description of Artificial Sequence: Synthetic oligonucleotide
  Antisense strand to SEQ ID NO: 1155032
uuuccaaucacaauggaga

SEQ ID NO: 1155034 - RNA, 19 nt, Artificial Sequence
  Description of Artificial Sequence: Synthetic oligonucleotide
  Sense strand starting at position 2097 of SEQ ID NO: 916416
cuccauugugauuggaaau

SEQ ID NO: 1155035 - RNA, 19 nt, Artificial Sequence
  Description of Artificial Sequence: Synthetic oligonucleotide
  Antisense strand to SEQ ID NO: 1155034
auuuccaaucacaauggag

SEQ ID NO: 1155036 - RNA, 19 nt, Artificial Sequence
  Description of Artificial Sequence: Synthetic oligonucleotide
  Sense strand starting at position 2305 of SEQ ID NO: 916416
ccgacucuucuggacuuua

SEQ ID NO: 1155037 - RNA, 19 nt, Artificial Sequence
  Description of Artificial Sequence: Synthetic oligonucleotide
  Antisense strand to SEQ ID NO: 1155036
uaaaguccagaagagucgg

SEQ ID NO: 1155038 - RNA, 19 nt, Artificial Sequence
  Description of Artificial Sequence: Synthetic oligonucleotide
  Sense strand starting at position 3013 of SEQ ID NO: 916416
agugcuugguaccuaaaua

SEQ ID NO: 1155039 - RNA, 19 nt, Artificial Sequence
  Description of Artificial Sequence: Synthetic oligonucleotide
  Antisense strand to SEQ ID NO: 1155038
uauuuagguaccaagcacu

SEQ ID NO: 1155040 - RNA, 19 nt, Artificial Sequence
  Description of Artificial Sequence: Synthetic oligonucleotide
  Sense strand starting at position 3055 of SEQ ID NO: 916416
aaugauaaauuggaggaau

SEQ ID NO: 1155041 - RNA, 19 nt, Artificial Sequence
  Description of Artificial Sequence: Synthetic oligonucleotide
  Antisense strand to SEQ ID NO: 1155040
auuccuccaauuuaucauu

SEQ ID NO: 1155042 - RNA, 19 nt, Artificial Sequence
  Description of Artificial Sequence: Synthetic oligonucleotide
  Sense strand starting at position 3138 of SEQ ID NO: 916416
acaaacuuccuguauguga

SEQ ID NO: 1155043 - RNA, 19 nt, Artificial Sequence
  Description of Artificial Sequence: Synthetic oligonucleotide
  Antisense strand to SEQ ID NO: 1155042
ucacauacaggaaguuugu

SEQ ID NO: 1155044 - RNA, 19 nt, Artificial Sequence
  Description of Artificial Sequence: Synthetic oligonucleotide
  Sense strand starting at position 3260 of SEQ ID NO: 916416
auaagauuaugcccuuuga

SEQ ID NO: 1155045 - RNA, 19 nt, Artificial Sequence
  Description of Artificial Sequence: Synthetic oligonucleotide
  Antisense strand to SEQ ID NO: 1155044
ucaaagggcauaaucuuau

SEQ ID NO: 1155046 - RNA, 19 nt, Artificial Sequence
  Description of Artificial Sequence: Synthetic oligonucleotide
  Sense strand starting at position 3390 of SEQ ID NO: 916416
agagaaggguuuguugaga

SEQ ID NO: 1155047 - RNA, 19 nt, Artificial Sequence
  Description of Artificial Sequence: Synthetic oligonucleotide
  Antisense strand to SEQ ID NO: 1155046
ucucaacaaacccuucucu

SEQ ID NO: 1155048 - RNA, 19 nt, Artificial Sequence
  Description of Artificial Sequence: Synthetic oligonucleotide
  Sense strand starting at position 3591 of SEQ ID NO: 916416
gcaaguuaucuagaaggua

SEQ ID NO: 1155049 - RNA, 19 nt, Artificial Sequence
  Description of Artificial Sequence: Synthetic oligonucleotide
  Antisense strand to SEQ ID NO: 1155048
uaccuucuagauaacuugc

SEQ ID NO: 1155050 - RNA, 19 nt, Artificial Sequence
  Description of Artificial Sequence: Synthetic oligonucleotide
  Sense strand starting at position 3640 of SEQ ID NO: 916416
gucagauauuuagacuuua

SEQ ID NO: 1155051 - RNA, 19 nt, Artificial Sequence
  Description of Artificial Sequence: Synthetic oligonucleotide
  Antisense strand to SEQ ID NO: 1155050
uaaagucuaaauaucugac

SEQ ID NO: 1155052 - RNA, 19 nt, Artificial Sequence
  Description of Artificial Sequence: Synthetic oligonucleotide
  Sense strand starting at position 3698 of SEQ ID NO: 916416
cccauuacuguguaacuuu

SEQ ID NO: 1155053 - RNA, 19 nt, Artificial Sequence
  Description of Artificial Sequence: Synthetic oligonucleotide
  Antisense strand to SEQ ID NO: 1155052
aaaguuacacaguaauggg

SEQ ID NO: 1155054 - RNA, 19 nt, Artificial Sequence
  Description of Artificial Sequence: Synthetic oligonucleotide
  Sense strand starting at position 3791 of SEQ ID NO: 916416
gguguucuaaucugauuga

SEQ ID NO: 1155055 - RNA, 19 nt, Artificial Sequence
  Description of Artificial Sequence: Synthetic oligonucleotide
  Antisense strand to SEQ ID NO: 1155054
ucaaucagauuagaacacc

SEQ ID NO: 1155056 - RNA, 19 nt, Artificial Sequence
  Description of Artificial Sequence: Synthetic oligonucleotide
  Sense strand starting at position 3794 of SEQ ID NO: 916416
guucuaaucugauugaaca

SEQ ID NO: 1155057 - RNA, 19 nt, Artificial Sequence
  Description of Artificial Sequence: Synthetic oligonucleotide
  Antisense strand to SEQ ID NO: 1155056
uguucaaucagauuagaac

SEQ ID NO: 1155058 - RNA, 19 nt, Artificial Sequence
  Description of Artificial Sequence: Synthetic oligonucleotide
  Sense strand starting at position 3811 of SEQ ID NO: 916416
caaagugaaugcucuagua

SEQ ID NO: 1155059 - RNA, 19 nt, Artificial Sequence
  Description of Artificial Sequence: Synthetic oligonucleotide
  Antisense strand to SEQ ID NO: 1155058
uacuagagcauucacuuug

SEQ ID NO: 1155060 - RNA, 19 nt, Artificial Sequence
  Description of Artificial Sequence: Synthetic oligonucleotide
  Sense strand starting at position 3813 of SEQ ID NO: 916416
aagugaaugcucuaguaug

SEQ ID NO: 1155061 - RNA, 19 nt, Artificial Sequence
  Description of Artificial Sequence: Synthetic oligonucleotide
  Antisense strand to SEQ ID NO: 1155060
cauacuagagcauucacuu

SEQ ID NO: 1155062 - RNA, 19 nt, Artificial Sequence
  Description of Artificial Sequence: Synthetic oligonucleotide
  Sense strand starting at position 3823 of SEQ ID NO: 916416
ucuaguauguaacucuaaa

SEQ ID NO: 1155063 - RNA, 19 nt, Artificial Sequence
  Description of Artificial Sequence: Synthetic oligonucleotide
  Antisense strand to SEQ ID NO: 1155062
uuuagaguuacauacuaga

SEQ ID NO: 1155064 - RNA, 19 nt, Artificial Sequence
  Description of Artificial Sequence: Synthetic oligonucleotide
  Sense strand starting at position 3862 of SEQ ID NO: 916416
ccucucaaauaguugagaa

SEQ ID NO: 1155065 - RNA, 19 nt, Artificial Sequence
  Description of Artificial Sequence: Synthetic oligonucleotide
  Antisense strand to SEQ ID NO: 1155064
uucucaacuauuugagagg

SEQ ID NO: 1155066 - RNA, 19 nt, Artificial Sequence
  Description of Artificial Sequence: Synthetic oligonucleotide
  Sense strand starting at position 52 of SEQ ID NO: 916417
cccugucuucuugaacaga

SEQ ID NO: 1155067 - RNA, 19 nt, Artificial Sequence
  Description of Artificial Sequence: Synthetic oligonucleotide
  Antisense strand to SEQ ID NO: 1155066
ucuguucaagaagacaggg

SEQ ID NO: 1155068 - RNA, 19 nt, Artificial Sequence
  Description of Artificial Sequence: Synthetic oligonucleotide
  Sense strand starting at position 235 of SEQ ID NO: 916417
ucuaaucugcaauggacua

SEQ ID NO: 1155069 - RNA, 19 nt, Artificial Sequence
  Description of Artificial Sequence: Synthetic oligonucleotide
  Antisense strand to SEQ ID NO: 1155068
uaguccauugcagauuaga

SEQ ID NO: 1155070 - RNA, 19 nt, Artificial Sequence
  Description of Artificial Sequence: Synthetic oligonucleotide
  Sense strand starting at position 258 of SEQ ID NO: 916417
auaagucuagucuauuaac

SEQ ID NO: 1155071 - RNA, 19 nt, Artificial Sequence
  Description of Artificial Sequence: Synthetic oligonucleotide
  Antisense strand to SEQ ID NO: 1155070
guuaauagacuagacuuau

SEQ ID NO: 1155072 - RNA, 19 nt, Artificial Sequence
  Description of Artificial Sequence: Synthetic oligonucleotide
  Sense strand starting at position 264 of SEQ ID NO: 916417
cuagucuauuaacuguaua

SEQ ID NO: 1155073 - RNA, 19 nt, Artificial Sequence
  Description of Artificial Sequence: Synthetic oligonucleotide
  Antisense strand to SEQ ID NO: 1155072
uauacaguuaauagacuag

SEQ ID NO: 1155074 - RNA, 19 nt, Artificial Sequence
  Description of Artificial Sequence: Synthetic oligonucleotide
  Sense strand starting at position 269 of SEQ ID NO: 916417
cuauuaacuguauacguaa

SEQ ID NO: 1155075 - RNA, 19 nt, Artificial Sequence
  Description of Artificial Sequence: Synthetic oligonucleotide
  Antisense strand to SEQ ID NO: 1155074
uuacguauacaguuaauag

SEQ ID NO: 1155076 - RNA, 19 nt, Artificial Sequence
  Description of Artificial Sequence: Synthetic oligonucleotide
  Sense strand starting at position 278 of SEQ ID NO: 916417
guauacguaaaguaagagu

SEQ ID NO: 1155077 - RNA, 19 nt, Artificial Sequence
  Description of Artificial Sequence: Synthetic oligonucleotide
  Antisense strand to SEQ ID NO: 1155076
acucuuacuuuacguauac

SEQ ID NO: 1155078 - RNA, 19 nt, Artificial Sequence
  Description of Artificial Sequence: Synthetic oligonucleotide
  Sense strand starting at position 295 of SEQ ID NO: 916417
guuagcaggacucaaaguu

SEQ ID NO: 1155079 - RNA, 19 nt, Artificial Sequence
  Description of Artificial Sequence: Synthetic oligonucleotide
  Antisense strand to SEQ ID NO: 1155078
aacuuugaguccugcuaac

SEQ ID NO: 1155080 - RNA, 19 nt, Artificial Sequence
  Description of Artificial Sequence: Synthetic oligonucleotide
  Sense strand starting at position 331 of SEQ ID NO: 916417
uuuggagacaacuguguaa

SEQ ID NO: 1155081 - RNA, 19 nt, Artificial Sequence
  Description of Artificial Sequence: Synthetic oligonucleotide
  Antisense strand to SEQ ID NO: 1155080
uuacacaguugucuccaaa

SEQ ID NO: 1155082 - RNA, 19 nt, Artificial Sequence
  Description of Artificial Sequence: Synthetic oligonucleotide
  Sense strand starting at position 333 of SEQ ID NO: 916417
uggagacaacuguguaaca

SEQ ID NO: 1155083 - RNA, 19 nt, Artificial Sequence
  Description of Artificial Sequence: Synthetic oligonucleotide
  Antisense strand to SEQ ID NO: 1155082
uguuacacaguugucucca

SEQ ID NO: 1155084 - RNA, 19 nt, Artificial Sequence
  Description of Artificial Sequence: Synthetic oligonucleotide
  Sense strand starting at position 334 of SEQ ID NO: 916417
ggagacaacuguguaacaa

SEQ ID NO: 1155085 - RNA, 19 nt, Artificial Sequence
  Description of Artificial Sequence: Synthetic oligonucleotide
  Antisense strand to SEQ ID NO: 1155084
uuguuacacaguugucucc

SEQ ID NO: 1155086 - RNA, 19 nt, Artificial Sequence
  Description of Artificial Sequence: Synthetic oligonucleotide
  Sense strand starting at position 389 of SEQ ID NO: 916417
uccucccaucuguaaggau

SEQ ID NO: 1155087 - RNA, 19 nt, Artificial Sequence
  Description of Artificial Sequence: Synthetic oligonucleotide
  Antisense strand to SEQ ID NO: 1155086
auccuuacagaugggagga

SEQ ID NO: 1155088 - RNA, 19 nt, Artificial Sequence
  Description of Artificial Sequence: Synthetic oligonucleotide
  Sense strand starting at position 533 of SEQ ID NO: 916417
ucagacauggccugcauuu

SEQ ID NO: 1155089 - RNA, 19 nt, Artificial Sequence
  Description of Artificial Sequence: Synthetic oligonucleotide
  Antisense strand to SEQ ID NO: 1155088
aaaugcaggccaugucuga

SEQ ID NO: 1155090 - RNA, 19 nt, Artificial Sequence
  Description of Artificial Sequence: Synthetic oligonucleotide
  Sense strand starting at position 608 of SEQ ID NO: 916417
auaguuguucugcacuuaa

SEQ ID NO: 1155091 - RNA, 19 nt, Artificial Sequence
  Description of Artificial Sequence: Synthetic oligonucleotide
  Antisense strand to SEQ ID NO: 1155090
uuaagugcagaacaacuau

SEQ ID NO: 1155092 - RNA, 19 nt, Artificial Sequence
  Description of Artificial Sequence: Synthetic oligonucleotide
  Sense strand starting at position 702 of SEQ ID NO: 916417
ugaagaaacaguggcuaua

SEQ ID NO: 1155093 - RNA, 19 nt, Artificial Sequence
  Description of Artificial Sequence: Synthetic oligonucleotide
  Antisense strand to SEQ ID NO: 1155092
uauagccacuguuucuuca

SEQ ID NO: 1155094 - RNA, 19 nt, Artificial Sequence
  Description of Artificial Sequence: Synthetic oligonucleotide
  Sense strand starting at position 704 of SEQ ID NO: 916417
aagaaacaguggcuauaua

SEQ ID NO: 1155095 - RNA, 19 nt, Artificial Sequence
  Description of Artificial Sequence: Synthetic oligonucleotide
  Antisense strand to SEQ ID NO: 1155094
uauauagccacuguuucuu

SEQ ID NO: 1155096 - RNA, 19 nt, Artificial Sequence
  Description of Artificial Sequence: Synthetic oligonucleotide
  Sense strand starting at position 806 of SEQ ID NO: 916417
ucagauauuucuggagaaa

SEQ ID NO: 1155097 - RNA, 19 nt, Artificial Sequence
  Description of Artificial Sequence: Synthetic oligonucleotide
  Antisense strand to SEQ ID NO: 1155096
uuucuccagaaauaucuga

SEQ ID NO: 1155098 - RNA, 19 nt, Artificial Sequence
  Description of Artificial Sequence: Synthetic oligonucleotide
  Sense strand starting at position 875 of SEQ ID NO: 916417
aauggucugcaugauauac

SEQ ID NO: 1155099 - RNA, 19 nt, Artificial Sequence
  Description of Artificial Sequence: Synthetic oligonucleotide
  Antisense strand to SEQ ID NO: 1155098
guauaucaugcagaccauu

SEQ ID NO: 1155100 - RNA, 19 nt, Artificial Sequence
  Description of Artificial Sequence: Synthetic oligonucleotide
  Sense strand starting at position 980 of SEQ ID NO: 916417
cucacugcuguggauauaa

SEQ ID NO: 1155101 - RNA, 19 nt, Artificial Sequence
  Description of Artificial Sequence: Synthetic oligonucleotide
  Antisense strand to SEQ ID NO: 1155100
uuauauccacagcagugag

SEQ ID NO: 1155102 - RNA, 19 nt, Artificial Sequence
  Description of Artificial Sequence: Synthetic oligonucleotide
  Sense strand starting at position 982 of SEQ ID NO: 916417
cacugcuguggauauaaau

SEQ ID NO: 1155103 - RNA, 19 nt, Artificial Sequence
  Description of Artificial Sequence: Synthetic oligonucleotide
  Antisense strand to SEQ ID NO: 1155102
auuuauauccacagcagug

SEQ ID NO: 1155104 - RNA, 19 nt, Artificial Sequence
  Description of Artificial Sequence: Synthetic oligonucleotide
  Sense strand starting at position 1481 of SEQ ID NO: 916417
ucaaauauucgagguaaag

SEQ ID NO: 1155105 - RNA, 19 nt, Artificial Sequence
  Description of Artificial Sequence: Synthetic oligonucleotide
  Antisense strand to SEQ ID NO: 1155104
cuuuaccucgaauauuuga

SEQ ID NO: 1155106 - RNA, 19 nt, Artificial Sequence
  Description of Artificial Sequence: Synthetic oligonucleotide
  Sense strand starting at position 1911 of SEQ ID NO: 916417
ucuggagaccucuguaaca

SEQ ID NO: 1155107 - RNA, 19 nt, Artificial Sequence
  Description of Artificial Sequence: Synthetic oligonucleotide
  Antisense strand to SEQ ID NO: 1155106
uguuacagaggucuccaga

SEQ ID NO: 1155108 - RNA, 19 nt, Artificial Sequence
  Description of Artificial Sequence: Synthetic oligonucleotide
  Sense strand starting at position 1913 of SEQ ID NO: 916417
uggagaccucuguaacagu

SEQ ID NO: 1155109 - RNA, 19 nt, Artificial Sequence
  Description of Artificial Sequence: Synthetic oligonucleotide
  Antisense strand to SEQ ID NO: 1155108
acuguuacagaggucucca

SEQ ID NO: 1155110 - RNA, 19 nt, Artificial Sequence
  Description of Artificial Sequence: Synthetic oligonucleotide
  Sense strand starting at position 1926 of SEQ ID NO: 916417
aacagucgugcggagaaga

SEQ ID NO: 1155111 - RNA, 19 nt, Artificial Sequence
  Description of Artificial Sequence: Synthetic oligonucleotide
  Antisense strand to SEQ ID NO: 1155110
ucuucuccgcacgacuguu

SEQ ID NO: 1155112 - RNA, 19 nt, Artificial Sequence
  Description of Artificial Sequence: Synthetic oligonucleotide
  Sense strand starting at position 2035 of SEQ ID NO: 916417
ucuccauugugauuggaaa

SEQ ID NO: 1155113 - RNA, 19 nt, Artificial Sequence
  Description of Artificial Sequence: Synthetic oligonucleotide
  Antisense strand to SEQ ID NO: 1155112
uuuccaaucacaauggaga

SEQ ID NO: 1155114 - RNA, 19 nt, Artificial Sequence
  Description of Artificial Sequence: Synthetic oligonucleotide
  Sense strand starting at position 2036 of SEQ ID NO: 916417
cuccauugugauuggaaau

SEQ ID NO: 1155115 - RNA, 19 nt, Artificial Sequence
  Description of Artificial Sequence: Synthetic oligonucleotide
  Antisense strand to SEQ ID NO: 1155114
auuuccaaucacaauggag

SEQ ID NO: 1155116 - RNA, 19 nt, Artificial Sequence
  Description of Artificial Sequence: Synthetic oligonucleotide
  Sense strand starting at position 2244 of SEQ ID NO: 916417
ccgacucuucuggacuuua

SEQ ID NO: 1155117 - RNA, 19 nt, Artificial Sequence
  Description of Artificial Sequence: Synthetic oligonucleotide
  Antisense strand to SEQ ID NO: 1155116
uaaaguccagaagagucgg

SEQ ID NO: 1155118 - RNA, 19 nt, Artificial Sequence
  Description of Artificial Sequence: Synthetic oligonucleotide
  Sense strand starting at position 2952 of SEQ ID NO: 916417
agugcuugguaccuaaaua

SEQ ID NO: 1155119 - RNA, 19 nt, Artificial Sequence
  Description of Artificial Sequence: Synthetic oligonucleotide
  Antisense strand to SEQ ID NO: 1155118
uauuuagguaccaagcacu

SEQ ID NO: 1155120 - RNA, 19 nt, Artificial Sequence
  Description of Artificial Sequence: Synthetic oligonucleotide
  Sense strand starting at position 2994 of SEQ ID NO: 916417
aaugauaaauuggaggaau

SEQ ID NO: 1155121 - RNA, 19 nt, Artificial Sequence
  Description of Artificial Sequence: Synthetic oligonucleotide
  Antisense strand to SEQ ID NO: 1155120
auuccuccaauuuaucauu

SEQ ID NO: 1155122 - RNA, 19 nt, Artificial Sequence
  Description of Artificial Sequence: Synthetic oligonucleotide
  Sense strand starting at position 3077 of SEQ ID NO: 916417
acaaacuuccuguauguga

SEQ ID NO: 1155123 - RNA, 19 nt, Artificial Sequence
  Description of Artificial Sequence: Synthetic oligonucleotide
  Antisense strand to SEQ ID NO: 1155122
ucacauacaggaaguuugu

SEQ ID NO: 1155124 - RNA, 19 nt, Artificial Sequence
  Description of Artificial Sequence: Synthetic oligonucleotide
  Sense strand starting at position 3199 of SEQ ID NO: 916417
auaagauuaugcccuuuga

SEQ ID NO: 1155125 - RNA, 19 nt, Artificial Sequence
  Description of Artificial Sequence: Synthetic oligonucleotide
  Antisense strand to SEQ ID NO: 1155124
ucaaagggcauaaucuuau

SEQ ID NO: 1155126 - RNA, 19 nt, Artificial Sequence
  Description of Artificial Sequence: Synthetic oligonucleotide
  Sense strand starting at position 3329 of SEQ ID NO: 916417
agagaaggguuuguugaga

SEQ ID NO: 1155127 - RNA, 19 nt, Artificial Sequence
  Description of Artificial Sequence: Synthetic oligonucleotide
  Antisense strand to SEQ ID NO: 1155126
ucucaacaaacccuucucu

SEQ ID NO: 1155128 - RNA, 19 nt, Artificial Sequence
  Description of Artificial Sequence: Synthetic oligonucleotide
  Sense strand starting at position 3530 of SEQ ID NO: 916417
gcaaguuaucuagaaggua

SEQ ID NO: 1155129 - RNA, 19 nt, Artificial Sequence
  Description of Artificial Sequence: Synthetic oligonucleotide
  Antisense strand to SEQ ID NO: 1155128
uaccuucuagauaacuugc

SEQ ID NO: 1155130 - RNA, 19 nt, Artificial Sequence
  Description of Artificial Sequence: Synthetic oligonucleotide
  Sense strand starting at position 3579 of SEQ ID NO: 916417
gucagauauuuagacuuua

SEQ ID NO: 1155131 - RNA, 19 nt, Artificial Sequence
  Description of Artificial Sequence: Synthetic oligonucleotide
  Antisense strand to SEQ ID NO: 1155130
uaaagucuaaauaucugac

SEQ ID NO: 1155132 - RNA, 19 nt, Artificial Sequence
  Description of Artificial Sequence: Synthetic oligonucleotide
  Sense strand starting at position 3637 of SEQ ID NO: 916417
cccauuacuguguaacuuu

SEQ ID NO: 1155133 - RNA, 19 nt, Artificial Sequence
  Description of Artificial Sequence: Synthetic oligonucleotide
  Antisense strand to SEQ ID NO: 1155132
aaaguuacacaguaauggg

SEQ ID NO: 1155134 - RNA, 19 nt, Artificial Sequence
  Description of Artificial Sequence: Synthetic oligonucleotide
  Sense strand starting at position 3730 of SEQ ID NO: 916417
gguguucuaaucugauuga

SEQ ID NO: 1155135 - RNA, 19 nt, Artificial Sequence
  Description of Artificial Sequence: Synthetic oligonucleotide
  Antisense strand to SEQ ID NO: 1155134
ucaaucagauuagaacacc

SEQ ID NO: 1155136 - RNA, 19 nt, Artificial Sequence
  Description of Artificial Sequence: Synthetic oligonucleotide
  Sense strand starting at position 3733 of SEQ ID NO: 916417
guucuaaucugauugaaca

SEQ ID NO: 1155137 - RNA, 19 nt, Artificial Sequence
  Description of Artificial Sequence: Synthetic oligonucleotide
  Antisense strand to SEQ ID NO: 1155136
uguucaaucagauuagaac

SEQ ID NO: 1155138 - RNA, 19 nt, Artificial Sequence
  Description of Artificial Sequence: Synthetic oligonucleotide
  Sense strand starting at position 3750 of SEQ ID NO: 916417
caaagugaaugcucuagua

SEQ ID NO: 1155139 - RNA, 19 nt, Artificial Sequence
  Description of Artificial Sequence: Synthetic oligonucleotide
  Antisense strand to SEQ ID NO: 1155138
uacuagagcauucacuuug

SEQ ID NO: 1155140 - RNA, 19 nt, Artificial Sequence
  Description of Artificial Sequence: Synthetic oligonucleotide
  Sense strand starting at position 3752 of SEQ ID NO: 916417
aagugaaugcucuaguaug

SEQ ID NO: 1155141 - RNA, 19 nt, Artificial Sequence
  Description of Artificial Sequence: Synthetic oligonucleotide
  Antisense strand to SEQ ID NO: 1155140
cauacuagagcauucacuu

SEQ ID NO: 1155142 - RNA, 19 nt, Artificial Sequence
  Description of Artificial Sequence: Synthetic oligonucleotide
  Sense strand starting at position 3762 of SEQ ID NO: 916417
ucuaguauguaacucuaaa

SEQ ID NO: 1155143 - RNA, 19 nt, Artificial Sequence
  Description of Artificial Sequence: Synthetic oligonucleotide
  Antisense strand to SEQ ID NO: 1155142
uuuagaguuacauacuaga

SEQ ID NO: 1155144 - RNA, 19 nt, Artificial Sequence
  Description of Artificial Sequence: Synthetic oligonucleotide
  Sense strand starting at position 3801 of SEQ ID NO: 916417
ccucucaaauaguugagaa

SEQ ID NO: 1155145 - RNA, 19 nt, Artificial Sequence
  Description of Artificial Sequence: Synthetic oligonucleotide
  Antisense strand to SEQ ID NO: 1155144
uucucaacuauuugagagg

SEQ ID NO: 1155146 - RNA, 19 nt, Artificial Sequence
  Description of Artificial Sequence: Synthetic oligonucleotide
  Sense strand starting at position 128 of SEQ ID NO: 916418
acuggcaucugcgcaaaua

SEQ ID NO: 1155147 - RNA, 19 nt, Artificial Sequence
  Description of Artificial Sequence: Synthetic oligonucleotide
  Antisense strand to SEQ ID NO: 1155146
uauuugcgcagaugccagu

SEQ ID NO: 1155148 - RNA, 19 nt, Artificial Sequence
  Description of Artificial Sequence: Synthetic oligonucleotide
  Sense strand starting at position 163 of SEQ ID NO: 916418
agagaauugucacauauac

SEQ ID NO: 1155149 - RNA, 19 nt, Artificial Sequence
  Description of Artificial Sequence: Synthetic oligonucleotide
  Antisense strand to SEQ ID NO: 1155148
guauaugugacaauucucu

SEQ ID NO: 1155150 - RNA, 19 nt, Artificial Sequence
  Description of Artificial Sequence: Synthetic oligonucleotide
  Sense strand starting at position 274 of SEQ ID NO: 916418
augacaucauuucgauaau

SEQ ID NO: 1155151 - RNA, 19 nt, Artificial Sequence
  Description of Artificial Sequence: Synthetic oligonucleotide
  Antisense strand to SEQ ID NO: 1155150
auuaucgaaaugaugucau

SEQ ID NO: 1155152 - RNA, 19 nt, Artificial Sequence
  Description of Artificial Sequence: Synthetic oligonucleotide
  Sense strand starting at position 275 of SEQ ID NO: 916418
ugacaucauuucgauaaug

SEQ ID NO: 1155153 - RNA, 19 nt, Artificial Sequence
  Description of Artificial Sequence: Synthetic oligonucleotide
  Antisense strand to SEQ ID NO: 1155152
cauuaucgaaaugauguca

SEQ ID NO: 1155154 - RNA, 19 nt, Artificial Sequence
  Description of Artificial Sequence: Synthetic oligonucleotide
  Sense strand starting at position 286 of SEQ ID NO: 916418
cgauaaugguguucuuuaa

SEQ ID NO: 1155155 - RNA, 19 nt, Artificial Sequence
  Description of Artificial Sequence: Synthetic oligonucleotide
  Antisense strand to SEQ ID NO: 1155154
uuaaagaacaccauuaucg

SEQ ID NO: 1155156 - RNA, 19 nt, Artificial Sequence
  Description of Artificial Sequence: Synthetic oligonucleotide
  Sense strand starting at position 293 of SEQ ID NO: 916418
gguguucuuuaagaaagau

SEQ ID NO: 1155157 - RNA, 19 nt, Artificial Sequence
  Description of Artificial Sequence: Synthetic oligonucleotide
  Antisense strand to SEQ ID NO: 1155156
aucuuucuuaaagaacacc

SEQ ID NO: 1155158 - RNA, 19 nt, Artificial Sequence
  Description of Artificial Sequence: Synthetic oligonucleotide
  Sense strand starting at position 349 of SEQ ID NO: 916418
cauauucuugcagguaagu

SEQ ID NO: 1155159 - RNA, 19 nt, Artificial Sequence
  Description of Artificial Sequence: Synthetic oligonucleotide
  Antisense strand to SEQ ID NO: 1155158
acuuaccugcaagaauaug

SEQ ID NO: 1155160 - RNA, 19 nt, Artificial Sequence
  Description of Artificial Sequence: Synthetic oligonucleotide
  Sense strand starting at position 2153 of SEQ ID NO: 916418
ggcggagacuguuucuacu

SEQ ID NO: 1155161 - RNA, 19 nt, Artificial Sequence
  Description of Artificial Sequence: Synthetic oligonucleotide
  Antisense strand to SEQ ID NO: 1155160
aguagaaacagucuccgcc

SEQ ID NO: 1155162 - RNA, 19 nt, Artificial Sequence
  Description of Artificial Sequence: Synthetic oligonucleotide
  Sense strand starting at position 2345 of SEQ ID NO: 916418
aaguuuauggcguaaguuu

SEQ ID NO: 1155163 - RNA, 19 nt, Artificial Sequence
  Description of Artificial Sequence: Synthetic oligonucleotide
  Antisense strand to SEQ ID NO: 1155162
aaacuuacgccauaaacuu

SEQ ID NO: 1155164 - RNA, 19 nt, Artificial Sequence
  Description of Artificial Sequence: Synthetic oligonucleotide
  Sense strand starting at position 2411 of SEQ ID NO: 916418
agaaauucugcuggccaga

SEQ ID NO: 1155165 - RNA, 19 nt, Artificial Sequence
  Description of Artificial Sequence: Synthetic oligonucleotide
  Antisense strand to SEQ ID NO: 1155164
ucuggccagcagaauuucu

SEQ ID NO: 1155166 - RNA, 19 nt, Artificial Sequence
  Description of Artificial Sequence: Synthetic oligonucleotide
  Sense strand starting at position 2438 of SEQ ID NO: 916418
gcagcuuucccgucugacu

SEQ ID NO: 1155167 - RNA, 19 nt, Artificial Sequence
  Description of Artificial Sequence: Synthetic oligonucleotide
  Antisense strand to SEQ ID NO: 1155166
agucagacgggaaagcugc

SEQ ID NO: 1155168 - RNA, 19 nt, Artificial Sequence
  Description of Artificial Sequence: Synthetic oligonucleotide
  Sense strand starting at position 2477 of SEQ ID NO: 916418
ucgucuuuagcuugaccua

SEQ ID NO: 1155169 - RNA, 19 nt, Artificial Sequence
  Description of Artificial Sequence: Synthetic oligonucleotide
  Antisense strand to SEQ ID NO: 1155168
uaggucaagcuaaagacga

SEQ ID NO: 1155170 - RNA, 19 nt, Artificial Sequence
  Description of Artificial Sequence: Synthetic oligonucleotide
  Sense strand starting at position 2554 of SEQ ID NO: 916418
cucucucauucugagaaga

SEQ ID NO: 1155171 - RNA, 19 nt, Artificial Sequence
  Description of Artificial Sequence: Synthetic oligonucleotide
  Antisense strand to SEQ ID NO: 1155170
ucuucucagaaugagagag

SEQ ID NO: 1155172 - RNA, 19 nt, Artificial Sequence
  Description of Artificial Sequence: Synthetic oligonucleotide
  Sense strand starting at position 2556 of SEQ ID NO: 916418
cucucauucugagaagaua

SEQ ID NO: 1155173 - RNA, 19 nt, Artificial Sequence
  Description of Artificial Sequence: Synthetic oligonucleotide
  Antisense strand to SEQ ID NO: 1155172
uaucuucucagaaugagag

SEQ ID NO: 1155174 - RNA, 19 nt, Artificial Sequence
  Description of Artificial Sequence: Synthetic oligonucleotide
  Sense strand starting at position 2608 of SEQ ID NO: 916418
agcguaauggcuguucauu

SEQ ID NO: 1155175 - RNA, 19 nt, Artificial Sequence
  Description of Artificial Sequence: Synthetic oligonucleotide
  Antisense strand to SEQ ID NO: 1155174
aaugaacagccauuacgcu

SEQ ID NO: 1155176 - RNA, 19 nt, Artificial Sequence
  Description of Artificial Sequence: Synthetic oligonucleotide
  Sense strand starting at position 2609 of SEQ ID NO: 916418
gcguaauggcuguucauuc

SEQ ID NO: 1155177 - RNA, 19 nt, Artificial Sequence
  Description of Artificial Sequence: Synthetic oligonucleotide
  Antisense strand to SEQ ID NO: 1155176
gaaugaacagccauuacgc

SEQ ID NO: 1155178 - RNA, 19 nt, Artificial Sequence
  Description of Artificial Sequence: Synthetic oligonucleotide
  Sense strand starting at position 2676 of SEQ ID NO: 916418
ugacuuuacuacgucagca

SEQ ID NO: 1155179 - RNA, 19 nt, Artificial Sequence
  Description of Artificial Sequence: Synthetic oligonucleotide
  Antisense strand to SEQ ID NO: 1155178
ugcugacguaguaaaguca

SEQ ID NO: 1155180 - RNA, 19 nt, Artificial Sequence
  Description of Artificial Sequence: Synthetic oligonucleotide
  Sense strand starting at position 2691 of SEQ ID NO: 916418
agcacuugaaagugaaaga

SEQ ID NO: 1155181 - RNA, 19 nt, Artificial Sequence
  Description of Artificial Sequence: Synthetic oligonucleotide
  Antisense strand to SEQ ID NO: 1155180
ucuuucacuuucaagugcu

SEQ ID NO: 1155182 - RNA, 19 nt, Artificial Sequence
  Description of Artificial Sequence: Synthetic oligonucleotide
  Sense strand starting at position 2726 of SEQ ID NO: 916418
cuaagacucucagagacau

SEQ ID NO: 1155183 - RNA, 19 nt, Artificial Sequence
  Description of Artificial Sequence: Synthetic oligonucleotide
  Antisense strand to SEQ ID NO: 1155182
augucucugagagucuuag

SEQ ID NO: 1155184 - RNA, 19 nt, Artificial Sequence
  Description of Artificial Sequence: Synthetic oligonucleotide
  Sense strand starting at position 2879 of SEQ ID NO: 916418
ggaggaaccuugcuucugu

SEQ ID NO: 1155185 - RNA, 19 nt, Artificial Sequence
  Description of Artificial Sequence: Synthetic oligonucleotide
  Antisense strand to SEQ ID NO: 1155184
acagaagcaagguuccucc

SEQ ID NO: 1155186 - RNA, 19 nt, Artificial Sequence
  Description of Artificial Sequence: Synthetic oligonucleotide
  Sense strand starting at position 2956 of SEQ ID NO: 916418
aagagaggauaguaugaga

SEQ ID NO: 1155187 - RNA, 19 nt, Artificial Sequence
  Description of Artificial Sequence: Synthetic oligonucleotide
  Antisense strand to SEQ ID NO: 1155186
ucucauacuauccucucuu

SEQ ID NO: 1155188 - RNA, 19 nt, Artificial Sequence
  Description of Artificial Sequence: Synthetic oligonucleotide
  Sense strand starting at position 2959 of SEQ ID NO: 916418
agaggauaguaugagauga

SEQ ID NO: 1155189 - RNA, 19 nt, Artificial Sequence
  Description of Artificial Sequence: Synthetic oligonucleotide
  Antisense strand to SEQ ID NO: 1155188
ucaucucauacuauccucu

SEQ ID NO: 1155190 - RNA, 19 nt, Artificial Sequence
  Description of Artificial Sequence: Synthetic oligonucleotide
  Sense strand starting at position 2961 of SEQ ID NO: 916418
aggauaguaugagaugaau

SEQ ID NO: 1155191 - RNA, 19 nt, Artificial Sequence
  Description of Artificial Sequence: Synthetic oligonucleotide
  Antisense strand to SEQ ID NO: 1155190
auucaucucauacuauccu

SEQ ID NO: 1155192 - RNA, 19 nt, Artificial Sequence
  Description of Artificial Sequence: Synthetic oligonucleotide
  Sense strand starting at position 3083 of SEQ ID NO: 916418
ggaaaugaaucccagagag

SEQ ID NO: 1155193 - RNA, 19 nt, Artificial Sequence
  Description of Artificial Sequence: Synthetic oligonucleotide
  Antisense strand to SEQ ID NO: 1155192
cucucugggauucauuucc

SEQ ID NO: 1155194 - RNA, 19 nt, Artificial Sequence
  Description of Artificial Sequence: Synthetic oligonucleotide
  Sense strand starting at position 3220 of SEQ ID NO: 916418
uuuguuguugaaugaguua

SEQ ID NO: 1155195 - RNA, 19 nt, Artificial Sequence
  Description of Artificial Sequence: Synthetic oligonucleotide
  Antisense strand to SEQ ID NO: 1155194
uaacucauucaacaacaaa

SEQ ID NO: 1155196 - RNA, 19 nt, Artificial Sequence
  Description of Artificial Sequence: Synthetic oligonucleotide
  Sense strand starting at position 3654 of SEQ ID NO: 916418
uguccucuaucauugagac

SEQ ID NO: 1155197 - RNA, 19 nt, Artificial Sequence
  Description of Artificial Sequence: Synthetic oligonucleotide
  Antisense strand to SEQ ID NO: 1155196
gucucaaugauagaggaca

SEQ ID NO: 1155198 - RNA, 19 nt, Artificial Sequence
  Description of Artificial Sequence: Synthetic oligonucleotide
  Sense strand starting at position 3655 of SEQ ID NO: 916418
guccucuaucauugagacu

SEQ ID NO: 1155199 - RNA, 19 nt, Artificial Sequence
  Description of Artificial Sequence: Synthetic oligonucleotide
  Antisense strand to SEQ ID NO: 1155198
agucucaaugauagaggac

SEQ ID NO: 1155200 - RNA, 19 nt, Artificial Sequence
  Description of Artificial Sequence: Synthetic oligonucleotide
  Sense strand starting at position 3693 of SEQ ID NO: 916418
cugaaucuaugacuguuau

SEQ ID NO: 1155201 - RNA, 19 nt, Artificial Sequence
  Description of Artificial Sequence: Synthetic oligonucleotide
  Antisense strand to SEQ ID NO: 1155200
auaacagucauagauucag

SEQ ID NO: 1155202 - RNA, 19 nt, Artificial Sequence
  Description of Artificial Sequence: Synthetic oligonucleotide
  Sense strand starting at position 3694 of SEQ ID NO: 916418
ugaaucuaugacuguuaug

SEQ ID NO: 1155203 - RNA, 19 nt, Artificial Sequence
  Description of Artificial Sequence: Synthetic oligonucleotide
  Antisense strand to SEQ ID NO: 1155202
cauaacagucauagauuca

SEQ ID NO: 1155204 - RNA, 19 nt, Artificial Sequence
  Description of Artificial Sequence: Synthetic oligonucleotide
  Sense strand starting at position 3738 of SEQ ID NO: 916418
aaacuauaguggcuaugau

SEQ ID NO: 1155205 - RNA, 19 nt, Artificial Sequence
  Description of Artificial Sequence: Synthetic oligonucleotide
  Antisense strand to SEQ ID NO: 1155204
aucauagccacuauaguuu

SEQ ID NO: 1155206 - RNA, 19 nt, Artificial Sequence
  Description of Artificial Sequence: Synthetic oligonucleotide
  Sense strand starting at position 3780 of SEQ ID NO: 916418
cauaauuaucuggguggga

SEQ ID NO: 1155207 - RNA, 19 nt, Artificial Sequence
  Description of Artificial Sequence: Synthetic oligonucleotide
  Antisense strand to SEQ ID NO: 1155206
ucccacccagauaauuaug

SEQ ID NO: 1155208 - RNA, 19 nt, Artificial Sequence
  Description of Artificial Sequence: Synthetic oligonucleotide
  Sense strand starting at position 3782 of SEQ ID NO: 916418
uaauuaucugggugggaac

SEQ ID NO: 1155209 - RNA, 19 nt, Artificial Sequence
  Description of Artificial Sequence: Synthetic oligonucleotide
  Antisense strand to SEQ ID NO: 1155208
guucccacccagauaauua

SEQ ID NO: 1155210 - RNA, 19 nt, Artificial Sequence
  Description of Artificial Sequence: Synthetic oligonucleotide
  Sense strand starting at position 3822 of SEQ ID NO: 916418
ggacuugugucuccaugua

SEQ ID NO: 1155211 - RNA, 19 nt, Artificial Sequence
  Description of Artificial Sequence: Synthetic oligonucleotide
  Antisense strand to SEQ ID NO: 1155210
uacauggagacacaagucc

SEQ ID NO: 1155212 - RNA, 19 nt, Artificial Sequence
  Description of Artificial Sequence: Synthetic oligonucleotide
  Sense strand starting at position 3835 of SEQ ID NO: 916418
cauguagcagagugguuaa

SEQ ID NO: 1155213 - RNA, 19 nt, Artificial Sequence
  Description of Artificial Sequence: Synthetic oligonucleotide
  Antisense strand to SEQ ID NO: 1155212
uuaaccacucugcuacaug

SEQ ID NO: 1155214 - RNA, 19 nt, Artificial Sequence
  Description of Artificial Sequence: Synthetic oligonucleotide
  Sense strand starting at position 3838 of SEQ ID NO: 916418
guagcagagugguuaagcu

SEQ ID NO: 1155215 - RNA, 19 nt, Artificial Sequence
  Description of Artificial Sequence: Synthetic oligonucleotide
  Antisense strand to SEQ ID NO: 1155214
agcuuaaccacucugcuac

SEQ ID NO: 1155216 - RNA, 19 nt, Artificial Sequence
  Description of Artificial Sequence: Synthetic oligonucleotide
  Sense strand starting at position 3846 of SEQ ID NO: 916418
gugguuaagcugugagcuu

SEQ ID NO: 1155217 - RNA, 19 nt, Artificial Sequence
  Description of Artificial Sequence: Synthetic oligonucleotide
  Antisense strand to SEQ ID NO: 1155216
aagcucacagcuuaaccac

SEQ ID NO: 1155218 - RNA, 19 nt, Artificial Sequence
  Description of Artificial Sequence: Synthetic oligonucleotide
  Sense strand starting at position 3853 of SEQ ID NO: 916418
agcugugagcuuuggaguu

SEQ ID NO: 1155219 - RNA, 19 nt, Artificial Sequence
  Description of Artificial Sequence: Synthetic oligonucleotide
  Antisense strand to SEQ ID NO: 1155218
aacuccaaagcucacagcu

SEQ ID NO: 1155220 - RNA, 19 nt, Artificial Sequence
  Description of Artificial Sequence: Synthetic oligonucleotide
  Sense strand starting at position 3896 of SEQ ID NO: 916418
cccugucucuuacuuugau

SEQ ID NO: 1155221 - RNA, 19 nt, Artificial Sequence
  Description of Artificial Sequence: Synthetic oligonucleotide
  Antisense strand to SEQ ID NO: 1155220
aucaaaguaagagacaggg

SEQ ID NO: 1155222 - RNA, 19 nt, Artificial Sequence
  Description of Artificial Sequence: Synthetic oligonucleotide
  Sense strand starting at position 3897 of SEQ ID NO: 916418
ccugucucuuacuuugauu

SEQ ID NO: 1155223 - RNA, 19 nt, Artificial Sequence
  Description of Artificial Sequence: Synthetic oligonucleotide
  Antisense strand to SEQ ID NO: 1155222
aaucaaaguaagagacagg

SEQ ID NO: 1155224 - RNA, 19 nt, Artificial Sequence
  Description of Artificial Sequence: Synthetic oligonucleotide
  Sense strand starting at position 3948 of SEQ ID NO: 916418
cuccucugauaggaaucau

SEQ ID NO: 1155225 - RNA, 19 nt, Artificial Sequence
  Description of Artificial Sequence: Synthetic oligonucleotide
  Antisense strand to SEQ ID NO: 1155224
augauuccuaucagaggag

SEQ ID NO: 1155226 - RNA, 19 nt, Artificial Sequence
  Description of Artificial Sequence: Synthetic oligonucleotide
  Sense strand starting at position 34 of SEQ ID NO: 916419
ggagcagucagucaccuaa

SEQ ID NO: 1155227 - RNA, 19 nt, Artificial Sequence
  Description of Artificial Sequence: Synthetic oligonucleotide
  Antisense strand to SEQ ID NO: 1155226
uuaggugacugacugcucc

SEQ ID NO: 1155228 - RNA, 19 nt, Artificial Sequence
  Description of Artificial Sequence: Synthetic oligonucleotide
  Sense strand starting at position 36 of SEQ ID NO: 916419
agcagucagucaccuaaga

SEQ ID NO: 1155229 - RNA, 19 nt, Artificial Sequence
  Description of Artificial Sequence: Synthetic oligonucleotide
  Antisense strand to SEQ ID NO: 1155228
ucuuaggugacugacugcu

SEQ ID NO: 1155230 - RNA, 19 nt, Artificial Sequence
  Description of Artificial Sequence: Synthetic oligonucleotide
  Sense strand starting at position 157 of SEQ ID NO: 916419
gccucagaaucauaauguu

SEQ ID NO: 1155231 - RNA, 19 nt, Artificial Sequence
  Description of Artificial Sequence: Synthetic oligonucleotide
  Antisense strand to SEQ ID NO: 1155230
aacauuaugauucugaggc

SEQ ID NO: 1155232 - RNA, 19 nt, Artificial Sequence
  Description of Artificial Sequence: Synthetic oligonucleotide
  Sense strand starting at position 160 of SEQ ID NO: 916419
ucagaaucauaauguuaga

SEQ ID NO: 1155233 - RNA, 19 nt, Artificial Sequence
  Description of Artificial Sequence: Synthetic oligonucleotide
  Antisense strand to SEQ ID NO: 1155232
ucuaacauuaugauucuga

SEQ ID NO: 1155234 - RNA, 19 nt, Artificial Sequence
  Description of Artificial Sequence: Synthetic oligonucleotide
  Sense strand starting at position 261 of SEQ ID NO: 916419
ccaucuguaugcucaagca

SEQ ID NO: 1155235 - RNA, 19 nt, Artificial Sequence
  Description of Artificial Sequence: Synthetic oligonucleotide
  Antisense strand to SEQ ID NO: 1155234
ugcuugagcauacagaugg

SEQ ID NO: 1155236 - RNA, 19 nt, Artificial Sequence
  Description of Artificial Sequence: Synthetic oligonucleotide
  Sense strand starting at position 293 of SEQ ID NO: 916419
uuuagugaggccuguguau

SEQ ID NO: 1155237 - RNA, 19 nt, Artificial Sequence
  Description of Artificial Sequence: Synthetic oligonucleotide
  Antisense strand to SEQ ID NO: 1155236
auacacaggccucacuaaa

SEQ ID NO: 1155238 - RNA, 19 nt, Artificial Sequence
  Description of Artificial Sequence: Synthetic oligonucleotide
  Sense strand starting at position 305 of SEQ ID NO: 916419
uguguauccagccaggaaa

SEQ ID NO: 1155239 - RNA, 19 nt, Artificial Sequence
  Description of Artificial Sequence: Synthetic oligonucleotide
  Antisense strand to SEQ ID NO: 1155238
uuuccuggcuggauacaca

SEQ ID NO: 1155240 - RNA, 19 nt, Artificial Sequence
  Description of Artificial Sequence: Synthetic oligonucleotide
  Sense strand starting at position 620 of SEQ ID NO: 916419
cccagagccucauggaaga

SEQ ID NO: 1155241 - RNA, 19 nt, Artificial Sequence
  Description of Artificial Sequence: Synthetic oligonucleotide
  Antisense strand to SEQ ID NO: 1155240
ucuuccaugaggcucuggg

SEQ ID NO: 1155242 - RNA, 19 nt, Artificial Sequence
  Description of Artificial Sequence: Synthetic oligonucleotide
  Sense strand starting at position 732 of SEQ ID NO: 916419
aucuaaagacgucggaguu

SEQ ID NO: 1155243 - RNA, 19 nt, Artificial Sequence
  Description of Artificial Sequence: Synthetic oligonucleotide
  Antisense strand to SEQ ID NO: 1155242
aacuccgacgucuuuagau

SEQ ID NO: 1155244 - RNA, 19 nt, Artificial Sequence
  Description of Artificial Sequence: Synthetic oligonucleotide
  Sense strand starting at position 756 of SEQ ID NO: 916419
ggacaugggucucaggacu

SEQ ID NO: 1155245 - RNA, 19 nt, Artificial Sequence
  Description of Artificial Sequence: Synthetic oligonucleotide
  Antisense strand to SEQ ID NO: 1155244
aguccugagacccaugucc

SEQ ID NO: 1155246 - RNA, 19 nt, Artificial Sequence
  Description of Artificial Sequence: Synthetic oligonucleotide
  Sense strand starting at position 799 of SEQ ID NO: 916419
gguggaagugauggcuuaa

SEQ ID NO: 1155247 - RNA, 19 nt, Artificial Sequence
  Description of Artificial Sequence: Synthetic oligonucleotide
  Antisense strand to SEQ ID NO: 1155246
uuaagccaucacuuccacc

SEQ ID NO: 1155248 - RNA, 19 nt, Artificial Sequence
  Description of Artificial Sequence: Synthetic oligonucleotide
  Sense strand starting at position 2111 of SEQ ID NO: 916419
gggagaggcccaugugaaa

SEQ ID NO: 1155249 - RNA, 19 nt, Artificial Sequence
  Description of Artificial Sequence: Synthetic oligonucleotide
  Antisense strand to SEQ ID NO: 1155248
uuucacaugggccucuccc

SEQ ID NO: 1155250 - RNA, 19 nt, Artificial Sequence
  Description of Artificial Sequence: Synthetic oligonucleotide
  Sense strand starting at position 2142 of SEQ ID NO: 916419
aagagugcugaguggacaa

SEQ ID NO: 1155251 - RNA, 19 nt, Artificial Sequence
  Description of Artificial Sequence: Synthetic oligonucleotide
  Antisense strand to SEQ ID NO: 1155250
uuguccacucagcacucuu

SEQ ID NO: 1155252 - RNA, 19 nt, Artificial Sequence
  Description of Artificial Sequence: Synthetic oligonucleotide
  Sense strand starting at position 2155 of SEQ ID NO: 916419
ggacaaagcuggucuagug

SEQ ID NO: 1155253 - RNA, 19 nt, Artificial Sequence
  Description of Artificial Sequence: Synthetic oligonucleotide
  Antisense strand to SEQ ID NO: 1155252
cacuagaccagcuuugucc

SEQ ID NO: 1155254 - RNA, 19 nt, Artificial Sequence
  Description of Artificial Sequence: Synthetic oligonucleotide
  Sense strand starting at position 2162 of SEQ ID NO: 916419
gcuggucuaguguggaaua

SEQ ID NO: 1155255 - RNA, 19 nt, Artificial Sequence
  Description of Artificial Sequence: Synthetic oligonucleotide
  Antisense strand to SEQ ID NO: 1155254
uauuccacacuagaccagc

SEQ ID NO: 1155256 - RNA, 19 nt, Artificial Sequence
  Description of Artificial Sequence: Synthetic oligonucleotide
  Sense strand starting at position 2163 of SEQ ID NO: 916419
cuggucuaguguggaauaa

SEQ ID NO: 1155257 - RNA, 19 nt, Artificial Sequence
  Description of Artificial Sequence: Synthetic oligonucleotide
  Antisense strand to SEQ ID NO: 1155256
uuauuccacacuagaccag

SEQ ID NO: 1155258 - RNA, 19 nt, Artificial Sequence
  Description of Artificial Sequence: Synthetic oligonucleotide
  Sense strand starting at position 2541 of SEQ ID NO: 916419
ccugcacuccuuuggagaa

SEQ ID NO: 1155259 - RNA, 19 nt, Artificial Sequence
  Description of Artificial Sequence: Synthetic oligonucleotide
  Antisense strand to SEQ ID NO: 1155258
uucuccaaaggagugcagg

SEQ ID NO: 1155260 - RNA, 19 nt, Artificial Sequence
  Description of Artificial Sequence: Synthetic oligonucleotide
  Sense strand starting at position 2542 of SEQ ID NO: 916419
cugcacuccuuuggagaaa

SEQ ID NO: 1155261 - RNA, 19 nt, Artificial Sequence
  Description of Artificial Sequence: Synthetic oligonucleotide
  Antisense strand to SEQ ID NO: 1155260
uuucuccaaaggagugcag

SEQ ID NO: 1155262 - RNA, 19 nt, Artificial Sequence
  Description of Artificial Sequence: Synthetic oligonucleotide
  Sense strand starting at position 2752 of SEQ ID NO: 916419
gaagauguguguccucaag

SEQ ID NO: 1155263 - RNA, 19 nt, Artificial Sequence
  Description of Artificial Sequence: Synthetic oligonucleotide
  Antisense strand to SEQ ID NO: 1155262
cuugaggacacacaucuuc

SEQ ID NO: 1155264 - RNA, 19 nt, Artificial Sequence
  Description of Artificial Sequence: Synthetic oligonucleotide
  Sense strand starting at position 2824 of SEQ ID NO: 916419
gguggagcaugugaucauu

SEQ ID NO: 1155265 - RNA, 19 nt, Artificial Sequence
  Description of Artificial Sequence: Synthetic oligonucleotide
  Antisense strand to SEQ ID NO: 1155264
aaugaucacaugcuccacc

SEQ ID NO: 1155266 - RNA, 19 nt, Artificial Sequence
  Description of Artificial Sequence: Synthetic oligonucleotide
  Sense strand starting at position 2833 of SEQ ID NO: 916419
ugugaucauuucuccaugu

SEQ ID NO: 1155267 - RNA, 19 nt, Artificial Sequence
  Description of Artificial Sequence: Synthetic oligonucleotide
  Antisense strand to SEQ ID NO: 1155266
acauggagaaaugaucaca

SEQ ID NO: 1155268 - RNA, 19 nt, Artificial Sequence
  Description of Artificial Sequence: Synthetic oligonucleotide
  Sense strand starting at position 2948 of SEQ ID NO: 916419
ugagguuuccauggcaaca

SEQ ID NO: 1155269 - RNA, 19 nt, Artificial Sequence
  Description of Artificial Sequence: Synthetic oligonucleotide
  Antisense strand to SEQ ID NO: 1155268
uguugccauggaaaccuca

SEQ ID NO: 1155270 - RNA, 19 nt, Artificial Sequence
  Description of Artificial Sequence: Synthetic oligonucleotide
  Sense strand starting at position 3734 of SEQ ID NO: 916419
gcggguaagaccugaaggu

SEQ ID NO: 1155271 - RNA, 19 nt, Artificial Sequence
  Description of Artificial Sequence: Synthetic oligonucleotide
  Antisense strand to SEQ ID NO: 1155270
accuucaggucuuacccgc

SEQ ID NO: 1155272 - RNA, 19 nt, Artificial Sequence
  Description of Artificial Sequence: Synthetic oligonucleotide
  Sense strand starting at position 3868 of SEQ ID NO: 916419
agggaugccucucuugcua

SEQ ID NO: 1155273 - RNA, 19 nt, Artificial Sequence
  Description of Artificial Sequence: Synthetic oligonucleotide
  Antisense strand to SEQ ID NO: 1155272
uagcaagagaggcaucccu

SEQ ID NO: 1155274 - RNA, 19 nt, Artificial Sequence
  Description of Artificial Sequence: Synthetic oligonucleotide
  Sense strand starting at position 3870 of SEQ ID NO: 916419
ggaugccucucuugcuaua

SEQ ID NO: 1155275 - RNA, 19 nt, Artificial Sequence
  Description of Artificial Sequence: Synthetic oligonucleotide
  Antisense strand to SEQ ID NO: 1155274
uauagcaagagaggcaucc

SEQ ID NO: 1155276 - RNA, 19 nt, Artificial Sequence
  Description of Artificial Sequence: Synthetic oligonucleotide
  Sense strand starting at position 372 of SEQ ID NO: 916420
agguaacauuuagaugaaa

SEQ ID NO: 1155277 - RNA, 19 nt, Artificial Sequence
  Description of Artificial Sequence: Synthetic oligonucleotide
  Antisense strand to SEQ ID NO: 1155276
uuucaucuaaauguuaccu

SEQ ID NO: 1155278 - RNA, 19 nt, Artificial Sequence
  Description of Artificial Sequence: Synthetic oligonucleotide
  Sense strand starting at position 420 of SEQ ID NO: 916420
gggaucaggaccuguucua

SEQ ID NO: 1155279 - RNA, 19 nt, Artificial Sequence
  Description of Artificial Sequence: Synthetic oligonucleotide
  Antisense strand to SEQ ID NO: 1155278
uagaacagguccugauccc

SEQ ID NO: 1155280 - RNA, 19 nt, Artificial Sequence
  Description of Artificial Sequence: Synthetic oligonucleotide
  Sense strand starting at position 427 of SEQ ID NO: 916420
ggaccuguucuagguacuu

SEQ ID NO: 1155281 - RNA, 19 nt, Artificial Sequence
  Description of Artificial Sequence: Synthetic oligonucleotide
  Antisense strand to SEQ ID NO: 1155280
aaguaccuagaacaggucc

SEQ ID NO: 1155282 - RNA, 19 nt, Artificial Sequence
  Description of Artificial Sequence: Synthetic oligonucleotide
  Sense strand starting at position 479 of SEQ ID NO: 916420
ugugauaaauagguagguu

SEQ ID NO: 1155283 - RNA, 19 nt, Artificial Sequence
  Description of Artificial Sequence: Synthetic oligonucleotide
  Antisense strand to SEQ ID NO: 1155282
aaccuaccuauuuaucaca

SEQ ID NO: 1155284 - RNA, 19 nt, Artificial Sequence
  Description of Artificial Sequence: Synthetic oligonucleotide
  Sense strand starting at position 577 of SEQ ID NO: 916420
ggauuugaaucaggcaauc

SEQ ID NO: 1155285 - RNA, 19 nt, Artificial Sequence
  Description of Artificial Sequence: Synthetic oligonucleotide
  Antisense strand to SEQ ID NO: 1155284
gauugccugauucaaaucc

SEQ ID NO: 1155286 - RNA, 19 nt, Artificial Sequence
  Description of Artificial Sequence: Synthetic oligonucleotide
  Sense strand starting at position 681 of SEQ ID NO: 916420
aaguauuauguagggcuau

SEQ ID NO: 1155287 - RNA, 19 nt, Artificial Sequence
  Description of Artificial Sequence: Synthetic oligonucleotide
  Antisense strand to SEQ ID NO: 1155286
auagcccuacauaauacuu

SEQ ID NO: 1155288 - RNA, 19 nt, Artificial Sequence
  Description of Artificial Sequence: Synthetic oligonucleotide
  Sense strand starting at position 694 of SEQ ID NO: 916420
ggcuauugccacuacaaca

SEQ ID NO: 1155289 - RNA, 19 nt, Artificial Sequence
  Description of Artificial Sequence: Synthetic oligonucleotide
  Antisense strand to SEQ ID NO: 1155288
uguuguaguggcaauagcc

SEQ ID NO: 1155290 - RNA, 19 nt, Artificial Sequence
  Description of Artificial Sequence: Synthetic oligonucleotide
  Sense strand starting at position 761 of SEQ ID NO: 916420
ggguaagucaacugauaca

SEQ ID NO: 1155291 - RNA, 19 nt, Artificial Sequence
  Description of Artificial Sequence: Synthetic oligonucleotide
  Antisense strand to SEQ ID NO: 1155290
uguaucaguugacuuaccc

SEQ ID NO: 1155292 - RNA, 19 nt, Artificial Sequence
  Description of Artificial Sequence: Synthetic oligonucleotide
  Sense strand starting at position 845 of SEQ ID NO: 916420
ccaggugugugguuaagaa

SEQ ID NO: 1155293 - RNA, 19 nt, Artificial Sequence
  Description of Artificial Sequence: Synthetic oligonucleotide
  Antisense strand to SEQ ID NO: 1155292
uucuuaaccacacaccugg

SEQ ID NO: 1155294 - RNA, 19 nt, Artificial Sequence
  Description of Artificial Sequence: Synthetic oligonucleotide
  Sense strand starting at position 867 of SEQ ID NO: 916420
acgagaacauaccuauauu

SEQ ID NO: 1155295 - RNA, 19 nt, Artificial Sequence
  Description of Artificial Sequence: Synthetic oligonucleotide
  Antisense strand to SEQ ID NO: 1155294
aauauagguauguucucgu

SEQ ID NO: 1155296 - RNA, 19 nt, Artificial Sequence
  Description of Artificial Sequence: Synthetic oligonucleotide
  Sense strand starting at position 908 of SEQ ID NO: 916420
auaaguuguuucucauaac

SEQ ID NO: 1155297 - RNA, 19 nt, Artificial Sequence
  Description of Artificial Sequence: Synthetic oligonucleotide
  Antisense strand to SEQ ID NO: 1155296
guuaugagaaacaacuuau

SEQ ID NO: 1155298 - RNA, 19 nt, Artificial Sequence
  Description of Artificial Sequence: Synthetic oligonucleotide
  Sense strand starting at position 951 of SEQ ID NO: 916420
agugcuaauuuauaggaau

SEQ ID NO: 1155299 - RNA, 19 nt, Artificial Sequence
  Description of Artificial Sequence: Synthetic oligonucleotide
  Antisense strand to SEQ ID NO: 1155298
auuccuauaaauuagcacu

SEQ ID NO: 1155300 - RNA, 19 nt, Artificial Sequence
  Description of Artificial Sequence: Synthetic oligonucleotide
  Sense strand starting at position 954 of SEQ ID NO: 916420
gcuaauuuauaggaauuag

SEQ ID NO: 1155301 - RNA, 19 nt, Artificial Sequence
  Description of Artificial Sequence: Synthetic oligonucleotide
  Antisense strand to SEQ ID NO: 1155300
cuaauuccuauaaauuagc

SEQ ID NO: 1155302 - RNA, 19 nt, Artificial Sequence
  Description of Artificial Sequence: Synthetic oligonucleotide
  Sense strand starting at position 981 of SEQ ID NO: 916420
gcaggcauuuaugaaauau

SEQ ID NO: 1155303 - RNA, 19 nt, Artificial Sequence
  Description of Artificial Sequence: Synthetic oligonucleotide
  Antisense strand to SEQ ID NO: 1155302
auauuucauaaaugccugc

SEQ ID NO: 1155304 - RNA, 19 nt, Artificial Sequence
  Description of Artificial Sequence: Synthetic oligonucleotide
  Sense strand starting at position 1284 of SEQ ID NO: 916420
gagacuaucugggaaucag

SEQ ID NO: 1155305 - RNA, 19 nt, Artificial Sequence
  Description of Artificial Sequence: Synthetic oligonucleotide
  Antisense strand to SEQ ID NO: 1155304
cugauucccagauagucuc

SEQ ID NO: 1155306 - RNA, 19 nt, Artificial Sequence
  Description of Artificial Sequence: Synthetic oligonucleotide
  Sense strand starting at position 1296 of SEQ ID NO: 916420
gaaucaguccuagaagcuc

SEQ ID NO: 1155307 - RNA, 19 nt, Artificial Sequence
  Description of Artificial Sequence: Synthetic oligonucleotide
  Antisense strand to SEQ ID NO: 1155306
gagcuucuaggacugauuc

SEQ ID NO: 1155308 - RNA, 19 nt, Artificial Sequence
  Description of Artificial Sequence: Synthetic oligonucleotide
  Sense strand starting at position 1344 of SEQ ID NO: 916420
aggagucucggagauugua

SEQ ID NO: 1155309 - RNA, 19 nt, Artificial Sequence
  Description of Artificial Sequence: Synthetic oligonucleotide
  Antisense strand to SEQ ID NO: 1155308
uacaaucuccgagacuccu

SEQ ID NO: 1155310 - RNA, 19 nt, Artificial Sequence
  Description of Artificial Sequence: Synthetic oligonucleotide
  Sense strand starting at position 1418 of SEQ ID NO: 916420
aggcaaucagacugugaaa

SEQ ID NO: 1155311 - RNA, 19 nt, Artificial Sequence
  Description of Artificial Sequence: Synthetic oligonucleotide
  Antisense strand to SEQ ID NO: 1155310
uuucacagucugauugccu

SEQ ID NO: 1155312 - RNA, 19 nt, Artificial Sequence
  Description of Artificial Sequence: Synthetic oligonucleotide
  Sense strand starting at position 1420 of SEQ ID NO: 916420
gcaaucagacugugaaaca

SEQ ID NO: 1155313 - RNA, 19 nt, Artificial Sequence
  Description of Artificial Sequence: Synthetic oligonucleotide
  Antisense strand to SEQ ID NO: 1155312
uguuucacagucugauugc

SEQ ID NO: 1155314 - RNA, 19 nt, Artificial Sequence
  Description of Artificial Sequence: Synthetic oligonucleotide
  Sense strand starting at position 1473 of SEQ ID NO: 916420
aggguaugccucuggagag

SEQ ID NO: 1155315 - RNA, 19 nt, Artificial Sequence
  Description of Artificial Sequence: Synthetic oligonucleotide
  Antisense strand to SEQ ID NO: 1155314
cucuccagaggcauacccu

SEQ ID NO: 1155316 - RNA, 19 nt, Artificial Sequence
  Description of Artificial Sequence: Synthetic oligonucleotide
  Sense strand starting at position 2321 of SEQ ID NO: 916420
gucggagccucgacuguua

SEQ ID NO: 1155317 - RNA, 19 nt, Artificial Sequence
  Description of Artificial Sequence: Synthetic oligonucleotide
  Antisense strand to SEQ ID NO: 1155316
uaacagucgaggcuccgac

SEQ ID NO: 1155318 - RNA, 19 nt, Artificial Sequence
  Description of Artificial Sequence: Synthetic oligonucleotide
  Sense strand starting at position 2330 of SEQ ID NO: 916420
ucgacuguuagguagcaga

SEQ ID NO: 1155319 - RNA, 19 nt, Artificial Sequence
  Description of Artificial Sequence: Synthetic oligonucleotide
  Antisense strand to SEQ ID NO: 1155318
ucugcuaccuaacagucga

SEQ ID NO: 1155320 - RNA, 19 nt, Artificial Sequence
  Description of Artificial Sequence: Synthetic oligonucleotide
  Sense strand starting at position 2520 of SEQ ID NO: 916420
agaacuaaguuugugggaa

SEQ ID NO: 1155321 - RNA, 19 nt, Artificial Sequence
  Description of Artificial Sequence: Synthetic oligonucleotide
  Antisense strand to SEQ ID NO: 1155320
uucccacaaacuuaguucu

SEQ ID NO: 1155322 - RNA, 19 nt, Artificial Sequence
  Description of Artificial Sequence: Synthetic oligonucleotide
  Sense strand starting at position 2565 of SEQ ID NO: 916420
agaccaagcucugucucaa

SEQ ID NO: 1155323 - RNA, 19 nt, Artificial Sequence
  Description of Artificial Sequence: Synthetic oligonucleotide
  Antisense strand to SEQ ID NO: 1155322
uugagacagagcuuggucu

SEQ ID NO: 1155324 - RNA, 19 nt, Artificial Sequence
  Description of Artificial Sequence: Synthetic oligonucleotide
  Sense strand starting at position 3014 of SEQ ID NO: 916420
cacuuacaguguuuaugua

SEQ ID NO: 1155325 - RNA, 19 nt, Artificial Sequence
  Description of Artificial Sequence: Synthetic oligonucleotide
  Antisense strand to SEQ ID NO: 1155324
uacauaaacacuguaagug

SEQ ID NO: 1155326 - RNA, 19 nt, Artificial Sequence
  Description of Artificial Sequence: Synthetic oligonucleotide
  Sense strand starting at position 3028 of SEQ ID NO: 916420
auguauuuguguccuuguu

SEQ ID NO: 1155327 - RNA, 19 nt, Artificial Sequence
  Description of Artificial Sequence: Synthetic oligonucleotide
  Antisense strand to SEQ ID NO: 1155326
aacaaggacacaaauacau

SEQ ID NO: 1155328 - RNA, 19 nt, Artificial Sequence
  Description of Artificial Sequence: Synthetic oligonucleotide
  Sense strand starting at position 3030 of SEQ ID NO: 916420
guauuuguguccuuguuug

SEQ ID NO: 1155329 - RNA, 19 nt, Artificial Sequence
  Description of Artificial Sequence: Synthetic oligonucleotide
  Antisense strand to SEQ ID NO: 1155328
caaacaaggacacaaauac

SEQ ID NO: 1155330 - RNA, 19 nt, Artificial Sequence
  Description of Artificial Sequence: Synthetic oligonucleotide
  Sense strand starting at position 3046 of SEQ ID NO: 916420
uugacagcucccugaacua

SEQ ID NO: 1155331 - RNA, 19 nt, Artificial Sequence
  Description of Artificial Sequence: Synthetic oligonucleotide
  Antisense strand to SEQ ID NO: 1155330
uaguucagggagcugucaa

SEQ ID NO: 1155332 - RNA, 19 nt, Artificial Sequence
  Description of Artificial Sequence: Synthetic oligonucleotide
  Sense strand starting at position 3148 of SEQ ID NO: 916420
aguaaacauguuugaauag

SEQ ID NO: 1155333 - RNA, 19 nt, Artificial Sequence
  Description of Artificial Sequence: Synthetic oligonucleotide
  Antisense strand to SEQ ID NO: 1155332
cuauucaaacauguuuacu

SEQ ID NO: 1155334 - RNA, 19 nt, Artificial Sequence
  Description of Artificial Sequence: Synthetic oligonucleotide
  Sense strand starting at position 3173 of SEQ ID NO: 916420
acuugaaacuaagaaggau

SEQ ID NO: 1155335 - RNA, 19 nt, Artificial Sequence
  Description of Artificial Sequence: Synthetic oligonucleotide
  Antisense strand to SEQ ID NO: 1155334
auccuucuuaguuucaagu

SEQ ID NO: 1155336 - RNA, 19 nt, Artificial Sequence
  Description of Artificial Sequence: Synthetic oligonucleotide
  Sense strand starting at position 3287 of SEQ ID NO: 916420
guggguucccuggauauag

SEQ ID NO: 1155337 - RNA, 19 nt, Artificial Sequence
  Description of Artificial Sequence: Synthetic oligonucleotide
  Antisense strand to SEQ ID NO: 1155336
cuauauccagggaacccac

SEQ ID NO: 1155338 - RNA, 19 nt, Artificial Sequence
  Description of Artificial Sequence: Synthetic oligonucleotide
  Sense strand starting at position 3333 of SEQ ID NO: 916420
uagugaauguuaccuugga

SEQ ID NO: 1155339 - RNA, 19 nt, Artificial Sequence
  Description of Artificial Sequence: Synthetic oligonucleotide
  Antisense strand to SEQ ID NO: 1155338
uccaagguaacauucacua

SEQ ID NO: 1155340 - RNA, 19 nt, Artificial Sequence
  Description of Artificial Sequence: Synthetic oligonucleotide
  Sense strand starting at position 3334 of SEQ ID NO: 916420
agugaauguuaccuuggau

SEQ ID NO: 1155341 - RNA, 19 nt, Artificial Sequence
  Description of Artificial Sequence: Synthetic oligonucleotide
  Antisense strand to SEQ ID NO: 1155340
auccaagguaacauucacu

SEQ ID NO: 1155342 - RNA, 19 nt, Artificial Sequence
  Description of Artificial Sequence: Synthetic oligonucleotide
  Sense strand starting at position 3337 of SEQ ID NO: 916420
gaauguuaccuuggauaug

SEQ ID NO: 1155343 - RNA, 19 nt, Artificial Sequence
  Description of Artificial Sequence: Synthetic oligonucleotide
  Antisense strand to SEQ ID NO: 1155342
cauauccaagguaacauuc

SEQ ID NO: 1155344 - RNA, 19 nt, Artificial Sequence
  Description of Artificial Sequence: Synthetic oligonucleotide
  Sense strand starting at position 3461 of SEQ ID NO: 916420
ugcuuuaugggucacagag

SEQ ID NO: 1155345 - RNA, 19 nt, Artificial Sequence
  Description of Artificial Sequence: Synthetic oligonucleotide
  Antisense strand to SEQ ID NO: 1155344
cucugugacccauaaagca

SEQ ID NO: 1155346 - RNA, 19 nt, Artificial Sequence
  Description of Artificial Sequence: Synthetic oligonucleotide
  Sense strand starting at position 3481 of SEQ ID NO: 916420
uuuauauuagcacagguua

SEQ ID NO: 1155347 - RNA, 19 nt, Artificial Sequence
  Description of Artificial Sequence: Synthetic oligonucleotide
  Antisense strand to SEQ ID NO: 1155346
uaaccugugcuaauauaaa

SEQ ID NO: 1155348 - RNA, 19 nt, Artificial Sequence
  Description of Artificial Sequence: Synthetic oligonucleotide
  Sense strand starting at position 3486 of SEQ ID NO: 916420
auuagcacagguuauuaau

SEQ ID NO: 1155349 - RNA, 19 nt, Artificial Sequence
  Description of Artificial Sequence: Synthetic oligonucleotide
  Antisense strand to SEQ ID NO: 1155348
auuaauaaccugugcuaau

SEQ ID NO: 1155350 - RNA, 19 nt, Artificial Sequence
  Description of Artificial Sequence: Synthetic oligonucleotide
  Sense strand starting at position 3496 of SEQ ID NO: 916420
guuauuaaugacuguacca

SEQ ID NO: 1155351 - RNA, 19 nt, Artificial Sequence
  Description of Artificial Sequence: Synthetic oligonucleotide
  Antisense strand to SEQ ID NO: 1155350
ugguacagucauuaauaac

SEQ ID NO: 1155352 - RNA, 19 nt, Artificial Sequence
  Description of Artificial Sequence: Synthetic oligonucleotide
  Sense strand starting at position 3558 of SEQ ID NO: 916420
uucacaaguguuggguaga

SEQ ID NO: 1155353 - RNA, 19 nt, Artificial Sequence
  Description of Artificial Sequence: Synthetic oligonucleotide
  Antisense strand to SEQ ID NO: 1155352
ucuacccaacacuugugaa

SEQ ID NO: 1155354 - RNA, 19 nt, Artificial Sequence
  Description of Artificial Sequence: Synthetic oligonucleotide
  Sense strand starting at position 3663 of SEQ ID NO: 916420
ggcugauuacccgagguca

SEQ ID NO: 1155355 - RNA, 19 nt, Artificial Sequence
  Description of Artificial Sequence: Synthetic oligonucleotide
  Antisense strand to SEQ ID NO: 1155354
ugaccucggguaaucagcc

SEQ ID NO: 1155356 - RNA, 19 nt, Artificial Sequence
  Description of Artificial Sequence: Synthetic oligonucleotide
  Sense strand starting at position 57 of SEQ ID NO: 916421
gcuuuaugguagaggagga

SEQ ID NO: 1155357 - RNA, 19 nt, Artificial Sequence
  Description of Artificial Sequence: Synthetic oligonucleotide
  Antisense strand to SEQ ID NO: 1155356
uccuccucuaccauaaagc

SEQ ID NO: 1155358 - RNA, 19 nt, Artificial Sequence
  Description of Artificial Sequence: Synthetic oligonucleotide
  Sense strand starting at position 108 of SEQ ID NO: 916421
gcagaaugguaccuuucuu

SEQ ID NO: 1155359 - RNA, 19 nt, Artificial Sequence
  Description of Artificial Sequence: Synthetic oligonucleotide
  Antisense strand to SEQ ID NO: 1155358
aagaaagguaccauucugc

SEQ ID NO: 1155360 - RNA, 19 nt, Artificial Sequence
  Description of Artificial Sequence: Synthetic oligonucleotide
  Sense strand starting at position 114 of SEQ ID NO: 916421
ugguaccuuucuuuaaaga

SEQ ID NO: 1155361 - RNA, 19 nt, Artificial Sequence
  Description of Artificial Sequence: Synthetic oligonucleotide
  Antisense strand to SEQ ID NO: 1155360
ucuuuaaagaaagguacca

SEQ ID NO: 1155362 - RNA, 19 nt, Artificial Sequence
  Description of Artificial Sequence: Synthetic oligonucleotide
  Sense strand starting at position 115 of SEQ ID NO: 916421
gguaccuuucuuuaaagac

SEQ ID NO: 1155363 - RNA, 19 nt, Artificial Sequence
  Description of Artificial Sequence: Synthetic oligonucleotide
  Antisense strand to SEQ ID NO: 1155362
gucuuuaaagaaagguacc

SEQ ID NO: 1155364 - RNA, 19 nt, Artificial Sequence
  Description of Artificial Sequence: Synthetic oligonucleotide
  Sense strand starting at position 355 of SEQ ID NO: 916421
cugcaaugucuugaucuaa

SEQ ID NO: 1155365 - RNA, 19 nt, Artificial Sequence
  Description of Artificial Sequence: Synthetic oligonucleotide
  Antisense strand to SEQ ID NO: 1155364
uuagaucaagacauugcag

SEQ ID NO: 1155366 - RNA, 19 nt, Artificial Sequence
  Description of Artificial Sequence: Synthetic oligonucleotide
  Sense strand starting at position 434 of SEQ ID NO: 916421
gccucucugcuggaaggaa

SEQ ID NO: 1155367 - RNA, 19 nt, Artificial Sequence
  Description of Artificial Sequence: Synthetic oligonucleotide
  Antisense strand to SEQ ID NO: 1155366
uuccuuccagcagagaggc

SEQ ID NO: 1155368 - RNA, 19 nt, Artificial Sequence
  Description of Artificial Sequence: Synthetic oligonucleotide
  Sense strand starting at position 492 of SEQ ID NO: 916421
ucgccuuggucuccgagaa

SEQ ID NO: 1155369 - RNA, 19 nt, Artificial Sequence
  Description of Artificial Sequence: Synthetic oligonucleotide
  Antisense strand to SEQ ID NO: 1155368
uucucggagaccaaggcga

SEQ ID NO: 1155370 - RNA, 19 nt, Artificial Sequence
  Description of Artificial Sequence: Synthetic oligonucleotide
  Sense strand starting at position 493 of SEQ ID NO: 916421
cgccuuggucuccgagaau

SEQ ID NO: 1155371 - RNA, 19 nt, Artificial Sequence
  Description of Artificial Sequence: Synthetic oligonucleotide
  Antisense strand to SEQ ID NO: 1155370
auucucggagaccaaggcg

SEQ ID NO: 1155372 - RNA, 19 nt, Artificial Sequence
  Description of Artificial Sequence: Synthetic oligonucleotide
  Sense strand starting at position 1135 of SEQ ID NO: 916421
caggcucugggucacaaau

SEQ ID NO: 1155373 - RNA, 19 nt, Artificial Sequence
  Description of Artificial Sequence: Synthetic oligonucleotide
  Antisense strand to SEQ ID NO: 1155372
auuugugacccagagccug

SEQ ID NO: 1155374 - RNA, 19 nt, Artificial Sequence
  Description of Artificial Sequence: Synthetic oligonucleotide
  Sense strand starting at position 1183 of SEQ ID NO: 916421
gcaggaauucgcccugcga

SEQ ID NO: 1155375 - RNA, 19 nt, Artificial Sequence
  Description of Artificial Sequence: Synthetic oligonucleotide
  Antisense strand to SEQ ID NO: 1155374
ucgcagggcgaauuccugc

SEQ ID NO: 1155376 - RNA, 19 nt, Artificial Sequence
  Description of Artificial Sequence: Synthetic oligonucleotide
  Sense strand starting at position 1185 of SEQ ID NO: 916421
aggaauucgcccugcgaug

SEQ ID NO: 1155377 - RNA, 19 nt, Artificial Sequence
  Description of Artificial Sequence: Synthetic oligonucleotide
  Antisense strand to SEQ ID NO: 1155376
caucgcagggcgaauuccu

SEQ ID NO: 1155378 - RNA, 19 nt, Artificial Sequence
  Description of Artificial Sequence: Synthetic oligonucleotide
  Sense strand starting at position 1186 of SEQ ID NO: 916421
ggaauucgcccugcgaugu

SEQ ID NO: 1155379 - RNA, 19 nt, Artificial Sequence
  Description of Artificial Sequence: Synthetic oligonucleotide
  Antisense strand to SEQ ID NO: 1155378
acaucgcagggcgaauucc

SEQ ID NO: 1155380 - RNA, 19 nt, Artificial Sequence
  Description of Artificial Sequence: Synthetic oligonucleotide
  Sense strand starting at position 1346 of SEQ ID NO: 916421
ccaggaugcccuugacaaa

SEQ ID NO: 1155381 - RNA, 19 nt, Artificial Sequence
  Description of Artificial Sequence: Synthetic oligonucleotide
  Antisense strand to SEQ ID NO: 1155380
uuugucaagggcauccugg

SEQ ID NO: 1155382 - RNA, 19 nt, Artificial Sequence
  Description of Artificial Sequence: Synthetic oligonucleotide
  Sense strand starting at position 2440 of SEQ ID NO: 916421
agaaauaguuacguuauca

SEQ ID NO: 1155383 - RNA, 19 nt, Artificial Sequence
  Description of Artificial Sequence: Synthetic oligonucleotide
  Antisense strand to SEQ ID NO: 1155382
ugauaacguaacuauuucu

SEQ ID NO: 1155384 - RNA, 19 nt, Artificial Sequence
  Description of Artificial Sequence: Synthetic oligonucleotide
  Sense strand starting at position 2482 of SEQ ID NO: 916421
gcgaaugauagguggccuu

SEQ ID NO: 1155385 - RNA, 19 nt, Artificial Sequence
  Description of Artificial Sequence: Synthetic oligonucleotide
  Antisense strand to SEQ ID NO: 1155384
aaggccaccuaucauucgc

SEQ ID NO: 1155386 - RNA, 19 nt, Artificial Sequence
  Description of Artificial Sequence: Synthetic oligonucleotide
  Sense strand starting at position 2548 of SEQ ID NO: 916421
aucaaagcucuaggcuaau

SEQ ID NO: 1155387 - RNA, 19 nt, Artificial Sequence
  Description of Artificial Sequence: Synthetic oligonucleotide
  Antisense strand to SEQ ID NO: 1155386
auuagccuagagcuuugau

SEQ ID NO: 1155388 - RNA, 19 nt, Artificial Sequence
  Description of Artificial Sequence: Synthetic oligonucleotide
  Sense strand starting at position 2554 of SEQ ID NO: 916421
gcucuaggcuaaucgcuaa

SEQ ID NO: 1155389 - RNA, 19 nt, Artificial Sequence
  Description of Artificial Sequence: Synthetic oligonucleotide
  Antisense strand to SEQ ID NO: 1155388
uuagcgauuagccuagagc

SEQ ID NO: 1155390 - RNA, 19 nt, Artificial Sequence
  Description of Artificial Sequence: Synthetic oligonucleotide
  Sense strand starting at position 2557 of SEQ ID NO: 916421
cuaggcuaaucgcuaaaca

SEQ ID NO: 1155391 - RNA, 19 nt, Artificial Sequence
  Description of Artificial Sequence: Synthetic oligonucleotide
  Antisense strand to SEQ ID NO: 1155390
uguuuagcgauuagccuag

SEQ ID NO: 1155392 - RNA, 19 nt, Artificial Sequence
  Description of Artificial Sequence: Synthetic oligonucleotide
  Sense strand starting at position 2637 of SEQ ID NO: 916421
cgaagugacucauuuguuu

SEQ ID NO: 1155393 - RNA, 19 nt, Artificial Sequence
  Description of Artificial Sequence: Synthetic oligonucleotide
  Antisense strand to SEQ ID NO: 1155392
aaacaaaugagucacuucg

SEQ ID NO: 1155394 - RNA, 19 nt, Artificial Sequence
  Description of Artificial Sequence: Synthetic oligonucleotide
  Sense strand starting at position 2662 of SEQ ID NO: 916421
agugguuuagaauacccua

SEQ ID NO: 1155395 - RNA, 19 nt, Artificial Sequence
  Description of Artificial Sequence: Synthetic oligonucleotide
  Antisense strand to SEQ ID NO: 1155394
uaggguauucuaaaccacu

SEQ ID NO: 1155396 - RNA, 19 nt, Artificial Sequence
  Description of Artificial Sequence: Synthetic oligonucleotide
  Sense strand starting at position 2665 of SEQ ID NO: 916421
gguuuagaauacccuagaa

SEQ ID NO: 1155397 - RNA, 19 nt, Artificial Sequence
  Description of Artificial Sequence: Synthetic oligonucleotide
  Antisense strand to SEQ ID NO: 1155396
uucuaggguauucuaaacc

SEQ ID NO: 1155398 - RNA, 19 nt, Artificial Sequence
  Description of Artificial Sequence: Synthetic oligonucleotide
  Sense strand starting at position 2691 of SEQ ID NO: 916421
uuaguaaaucgaugccaga

SEQ ID NO: 1155399 - RNA, 19 nt, Artificial Sequence
  Description of Artificial Sequence: Synthetic oligonucleotide
  Antisense strand to SEQ ID NO: 1155398
ucuggcaucgauuuacuaa

SEQ ID NO: 1155400 - RNA, 19 nt, Artificial Sequence
  Description of Artificial Sequence: Synthetic oligonucleotide
  Sense strand starting at position 2713 of SEQ ID NO: 916421
acagauggcuguuugcuaa

SEQ ID NO: 1155401 - RNA, 19 nt, Artificial Sequence
  Description of Artificial Sequence: Synthetic oligonucleotide
  Antisense strand to SEQ ID NO: 1155400
uuagcaaacagccaucugu

SEQ ID NO: 1155402 - RNA, 19 nt, Artificial Sequence
  Description of Artificial Sequence: Synthetic oligonucleotide
  Sense strand starting at position 2716 of SEQ ID NO: 916421
gauggcuguuugcuaacuu

SEQ ID NO: 1155403 - RNA, 19 nt, Artificial Sequence
  Description of Artificial Sequence: Synthetic oligonucleotide
  Antisense strand to SEQ ID NO: 1155402
aaguuagcaaacagccauc

SEQ ID NO: 1155404 - RNA, 19 nt, Artificial Sequence
  Description of Artificial Sequence: Synthetic oligonucleotide
  Sense strand starting at position 2726 of SEQ ID NO: 916421
ugcuaacuuccagggacuu

SEQ ID NO: 1155405 - RNA, 19 nt, Artificial Sequence
  Description of Artificial Sequence: Synthetic oligonucleotide
  Antisense strand to SEQ ID NO: 1155404
aagucccuggaaguuagca

SEQ ID NO: 1155406 - RNA, 19 nt, Artificial Sequence
  Description of Artificial Sequence: Synthetic oligonucleotide
  Sense strand starting at position 2727 of SEQ ID NO: 916421
gcuaacuuccagggacuuu

SEQ ID NO: 1155407 - RNA, 19 nt, Artificial Sequence
  Description of Artificial Sequence: Synthetic oligonucleotide
  Antisense strand to SEQ ID NO: 1155406
aaagucccuggaaguuagc

SEQ ID NO: 1155408 - RNA, 19 nt, Artificial Sequence
  Description of Artificial Sequence: Synthetic oligonucleotide
  Sense strand starting at position 2788 of SEQ ID NO: 916421
caccuaugugagugacacu

SEQ ID NO: 1155409 - RNA, 19 nt, Artificial Sequence
  Description of Artificial Sequence: Synthetic oligonucleotide
  Antisense strand to SEQ ID NO: 1155408
agugucacucacauaggug

SEQ ID NO: 1155410 - RNA, 19 nt, Artificial Sequence
  Description of Artificial Sequence: Synthetic oligonucleotide
  Sense strand starting at position 2871 of SEQ ID NO: 916421
uauagugaaucugcaggaa

SEQ ID NO: 1155411 - RNA, 19 nt, Artificial Sequence
  Description of Artificial Sequence: Synthetic oligonucleotide
  Antisense strand to SEQ ID NO: 1155410
uuccugcagauucacuaua

SEQ ID NO: 1155412 - RNA, 19 nt, Artificial Sequence
  Description of Artificial Sequence: Synthetic oligonucleotide
  Sense strand starting at position 2907 of SEQ ID NO: 916421
cagggcuuucuuggagaga

SEQ ID NO: 1155413 - RNA, 19 nt, Artificial Sequence
  Description of Artificial Sequence: Synthetic oligonucleotide
  Antisense strand to SEQ ID NO: 1155412
ucucuccaagaaagcccug

SEQ ID NO: 1155414 - RNA, 19 nt, Artificial Sequence
  Description of Artificial Sequence: Synthetic oligonucleotide
  Sense strand starting at position 2908 of SEQ ID NO: 916421
agggcuuucuuggagagaa

SEQ ID NO: 1155415 - RNA, 19 nt, Artificial Sequence
  Description of Artificial Sequence: Synthetic oligonucleotide
  Antisense strand to SEQ ID NO: 1155414
uucucuccaagaaagcccu

SEQ ID NO: 1155416 - RNA, 19 nt, Artificial Sequence
  Description of Artificial Sequence: Synthetic oligonucleotide
  Sense strand starting at position 2920 of SEQ ID NO: 916421
gagagaagcccucguugag

SEQ ID NO: 1155417 - RNA, 19 nt, Artificial Sequence
  Description of Artificial Sequence: Synthetic oligonucleotide
  Antisense strand to SEQ ID NO: 1155416
cucaacgagggcuucucuc

SEQ ID NO: 1155418 - RNA, 19 nt, Artificial Sequence
  Description of Artificial Sequence: Synthetic oligonucleotide
  Sense strand starting at position 2941 of SEQ ID NO: 916421
acaaauagcccucgccaga

SEQ ID NO: 1155419 - RNA, 19 nt, Artificial Sequence
  Description of Artificial Sequence: Synthetic oligonucleotide
  Antisense strand to SEQ ID NO: 1155418
ucuggcgagggcuauuugu

SEQ ID NO: 1155420 - RNA, 19 nt, Artificial Sequence
  Description of Artificial Sequence: Synthetic oligonucleotide
  Sense strand starting at position 2971 of SEQ ID NO: 916421
ugcugaaagaggugguauu

SEQ ID NO: 1155421 - RNA, 19 nt, Artificial Sequence
  Description of Artificial Sequence: Synthetic oligonucleotide
  Antisense strand to SEQ ID NO: 1155420
aauaccaccucuuucagca

SEQ ID NO: 1155422 - RNA, 19 nt, Artificial Sequence
  Description of Artificial Sequence: Synthetic oligonucleotide
  Sense strand starting at position 3267 of SEQ ID NO: 916421
ucuuccuuucuugggugaa

SEQ ID NO: 1155423 - RNA, 19 nt, Artificial Sequence
  Description of Artificial Sequence: Synthetic oligonucleotide
  Antisense strand to SEQ ID NO: 1155422
uucacccaagaaaggaaga

SEQ ID NO: 1155424 - RNA, 19 nt, Artificial Sequence
  Description of Artificial Sequence: Synthetic oligonucleotide
  Sense strand starting at position 3336 of SEQ ID NO: 916421
gugaguuaacuccgguuuc

SEQ ID NO: 1155425 - RNA, 19 nt, Artificial Sequence
  Description of Artificial Sequence: Synthetic oligonucleotide
  Antisense strand to SEQ ID NO: 1155424
gaaaccggaguuaacucac

SEQ ID NO: 1155426 - RNA, 19 nt, Artificial Sequence
  Description of Artificial Sequence: Synthetic oligonucleotide
  Sense strand starting at position 3428 of SEQ ID NO: 916421
acugcuacucugugcuuau

SEQ ID NO: 1155427 - RNA, 19 nt, Artificial Sequence
  Description of Artificial Sequence: Synthetic oligonucleotide
  Antisense strand to SEQ ID NO: 1155426
auaagcacagaguagcagu

SEQ ID NO: 1155428 - RNA, 19 nt, Artificial Sequence
  Description of Artificial Sequence: Synthetic oligonucleotide
  Sense strand starting at position 3584 of SEQ ID NO: 916421
ggaugaauuauacagcggu

SEQ ID NO: 1155429 - RNA, 19 nt, Artificial Sequence
  Description of Artificial Sequence: Synthetic oligonucleotide
  Antisense strand to SEQ ID NO: 1155428
accgcuguauaauucaucc

SEQ ID NO: 1155430 - RNA, 19 nt, Artificial Sequence
  Description of Artificial Sequence: Synthetic oligonucleotide
  Sense strand starting at position 3587 of SEQ ID NO: 916421
ugaauuauacagcggugaa

SEQ ID NO: 1155431 - RNA, 19 nt, Artificial Sequence
  Description of Artificial Sequence: Synthetic oligonucleotide
  Antisense strand to SEQ ID NO: 1155430
uucaccgcuguauaauuca

SEQ ID NO: 1155432 - RNA, 19 nt, Artificial Sequence
  Description of Artificial Sequence: Synthetic oligonucleotide
  Sense strand starting at position 3727 of SEQ ID NO: 916421
cuguaugcuuaugcauauu

SEQ ID NO: 1155433 - RNA, 19 nt, Artificial Sequence
  Description of Artificial Sequence: Synthetic oligonucleotide
  Antisense strand to SEQ ID NO: 1155432
aauaugcauaagcauacag

SEQ ID NO: 1155434 - RNA, 19 nt, Artificial Sequence
  Description of Artificial Sequence: Synthetic oligonucleotide
  Sense strand starting at position 3971 of SEQ ID NO: 916421
ugugaacugagaugcaaua

SEQ ID NO: 1155435 - RNA, 19 nt, Artificial Sequence
  Description of Artificial Sequence: Synthetic oligonucleotide
  Antisense strand to SEQ ID NO: 1155434
uauugcaucucaguucaca

SEQ ID NO: 1155436 - RNA, 19 nt, Artificial Sequence
  Description of Artificial Sequence: Synthetic oligonucleotide
  Sense strand starting at position 74 of SEQ ID NO: 916422
cuuugagcucagggagaaa

SEQ ID NO: 1155437 - RNA, 19 nt, Artificial Sequence
  Description of Artificial Sequence: Synthetic oligonucleotide
  Antisense strand to SEQ ID NO: 1155436
uuucucccugagcucaaag

SEQ ID NO: 1155438 - RNA, 19 nt, Artificial Sequence
  Description of Artificial Sequence: Synthetic oligonucleotide
  Sense strand starting at position 207 of SEQ ID NO: 916422
gaauuugggugacauugau

SEQ ID NO: 1155439 - RNA, 19 nt, Artificial Sequence
  Description of Artificial Sequence: Synthetic oligonucleotide
  Antisense strand to SEQ ID NO: 1155438
aucaaugucacccaaauuc

SEQ ID NO: 1155440 - RNA, 19 nt, Artificial Sequence
  Description of Artificial Sequence: Synthetic oligonucleotide
  Sense strand starting at position 215 of SEQ ID NO: 916422
gugacauugauguagugag

SEQ ID NO: 1155441 - RNA, 19 nt, Artificial Sequence
  Description of Artificial Sequence: Synthetic oligonucleotide
  Antisense strand to SEQ ID NO: 1155440
cucacuacaucaaugucac

SEQ ID NO: 1155442 - RNA, 19 nt, Artificial Sequence
  Description of Artificial Sequence: Synthetic oligonucleotide
  Sense strand starting at position 222 of SEQ ID NO: 916422
ugauguagugagggcauua

SEQ ID NO: 1155443 - RNA, 19 nt, Artificial Sequence
  Description of Artificial Sequence: Synthetic oligonucleotide
  Antisense strand to SEQ ID NO: 1155442
uaaugcccucacuacauca

SEQ ID NO: 1155444 - RNA, 19 nt, Artificial Sequence
  Description of Artificial Sequence: Synthetic oligonucleotide
  Sense strand starting at position 234 of SEQ ID NO: 916422
ggcauuagaagccauaagu

SEQ ID NO: 1155445 - RNA, 19 nt, Artificial Sequence
  Description of Artificial Sequence: Synthetic oligonucleotide
  Antisense strand to SEQ ID NO: 1155444
acuuauggcuucuaaugcc

SEQ ID NO: 1155446 - RNA, 19 nt, Artificial Sequence
  Description of Artificial Sequence: Synthetic oligonucleotide
  Sense strand starting at position 361 of SEQ ID NO: 916422
ggaguuaacacguguaaag

SEQ ID NO: 1155447 - RNA, 19 nt, Artificial Sequence
  Description of Artificial Sequence: Synthetic oligonucleotide
  Antisense strand to SEQ ID NO: 1155446
cuuuacacguguuaacucc

SEQ ID NO: 1155448 - RNA, 19 nt, Artificial Sequence
  Description of Artificial Sequence: Synthetic oligonucleotide
  Sense strand starting at position 363 of SEQ ID NO: 916422
aguuaacacguguaaagga

SEQ ID NO: 1155449 - RNA, 19 nt, Artificial Sequence
  Description of Artificial Sequence: Synthetic oligonucleotide
  Antisense strand to SEQ ID NO: 1155448
uccuuuacacguguuaacu

SEQ ID NO: 1155450 - RNA, 19 nt, Artificial Sequence
  Description of Artificial Sequence: Synthetic oligonucleotide
  Sense strand starting at position 689 of SEQ ID NO: 916422
ucgauuucguuucuacuuu

SEQ ID NO: 1155451 - RNA, 19 nt, Artificial Sequence
  Description of Artificial Sequence: Synthetic oligonucleotide
  Antisense strand to SEQ ID NO: 1155450
aaaguagaaacgaaaucga

SEQ ID NO: 1155452 - RNA, 19 nt, Artificial Sequence
  Description of Artificial Sequence: Synthetic oligonucleotide
  Sense strand starting at position 812 of SEQ ID NO: 916422
gaaguuucuguuugggauu

SEQ ID NO: 1155453 - RNA, 19 nt, Artificial Sequence
  Description of Artificial Sequence: Synthetic oligonucleotide
  Antisense strand to SEQ ID NO: 1155452
aaucccaaacagaaacuuc

SEQ ID NO: 1155454 - RNA, 19 nt, Artificial Sequence
  Description of Artificial Sequence: Synthetic oligonucleotide
  Sense strand starting at position 833 of SEQ ID NO: 916422
ggccgaugggcucacacau

SEQ ID NO: 1155455 - RNA, 19 nt, Artificial Sequence
  Description of Artificial Sequence: Synthetic oligonucleotide
  Antisense strand to SEQ ID NO: 1155454
augugugagcccaucggcc

SEQ ID NO: 1155456 - RNA, 19 nt, Artificial Sequence
  Description of Artificial Sequence: Synthetic oligonucleotide
  Sense strand starting at position 1084 of SEQ ID NO: 916422
gggaccuuuccuggaccaa

SEQ ID NO: 1155457 - RNA, 19 nt, Artificial Sequence
  Description of Artificial Sequence: Synthetic oligonucleotide
  Antisense strand to SEQ ID NO: 1155456
uugguccaggaaagguccc

SEQ ID NO: 1155458 - RNA, 19 nt, Artificial Sequence
  Description of Artificial Sequence: Synthetic oligonucleotide
  Sense strand starting at position 1298 of SEQ ID NO: 916422
gcacuucuccgagagguug

SEQ ID NO: 1155459 - RNA, 19 nt, Artificial Sequence
  Description of Artificial Sequence: Synthetic oligonucleotide
  Antisense strand to SEQ ID NO: 1155458
caaccucucggagaagugc

SEQ ID NO: 1155460 - RNA, 19 nt, Artificial Sequence
  Description of Artificial Sequence: Synthetic oligonucleotide
  Sense strand starting at position 1795 of SEQ ID NO: 916422
ugucuggucgccgcguaau

SEQ ID NO: 1155461 - RNA, 19 nt, Artificial Sequence
  Description of Artificial Sequence: Synthetic oligonucleotide
  Antisense strand to SEQ ID NO: 1155460
auuacgcggcgaccagaca

SEQ ID NO: 1155462 - RNA, 19 nt, Artificial Sequence
  Description of Artificial Sequence: Synthetic oligonucleotide
  Sense strand starting at position 1809 of SEQ ID NO: 916422
guaauucgcgcauccuuau

SEQ ID NO: 1155463 - RNA, 19 nt, Artificial Sequence
  Description of Artificial Sequence: Synthetic oligonucleotide
  Antisense strand to SEQ ID NO: 1155462
auaaggaugcgcgaauuac

SEQ ID NO: 1155464 - RNA, 19 nt, Artificial Sequence
  Description of Artificial Sequence: Synthetic oligonucleotide
  Sense strand starting at position 1967 of SEQ ID NO: 916422
aucaguauuguugaguauu

SEQ ID NO: 1155465 - RNA, 19 nt, Artificial Sequence
  Description of Artificial Sequence: Synthetic oligonucleotide
  Antisense strand to SEQ ID NO: 1155464
aauacucaacaauacugau

SEQ ID NO: 1155466 - RNA, 19 nt, Artificial Sequence
  Description of Artificial Sequence: Synthetic oligonucleotide
  Sense strand starting at position 1969 of SEQ ID NO: 916422
caguauuguugaguauuag

SEQ ID NO: 1155467 - RNA, 19 nt, Artificial Sequence
  Description of Artificial Sequence: Synthetic oligonucleotide
  Antisense strand to SEQ ID NO: 1155466
cuaauacucaacaauacug

SEQ ID NO: 1155468 - RNA, 19 nt, Artificial Sequence
  Description of Artificial Sequence: Synthetic oligonucleotide
  Sense strand starting at position 2125 of SEQ ID NO: 916422
aggccuaguccgggaggua

SEQ ID NO: 1155469 - RNA, 19 nt, Artificial Sequence
  Description of Artificial Sequence: Synthetic oligonucleotide
  Antisense strand to SEQ ID NO: 1155468
uaccucccggacuaggccu

SEQ ID NO: 1155470 - RNA, 19 nt, Artificial Sequence
  Description of Artificial Sequence: Synthetic oligonucleotide
  Sense strand starting at position 2350 of SEQ ID NO: 916422
ggccuuucucauggagaga

SEQ ID NO: 1155471 - RNA, 19 nt, Artificial Sequence
  Description of Artificial Sequence: Synthetic oligonucleotide
  Antisense strand to SEQ ID NO: 1155470
ucucuccaugagaaaggcc

SEQ ID NO: 1155472 - RNA, 19 nt, Artificial Sequence
  Description of Artificial Sequence: Synthetic oligonucleotide
  Sense strand starting at position 2351 of SEQ ID NO: 916422
gccuuucucauggagagag

SEQ ID NO: 1155473 - RNA, 19 nt, Artificial Sequence
  Description of Artificial Sequence: Synthetic oligonucleotide
  Antisense strand to SEQ ID NO: 1155472
cucucuccaugagaaaggc

SEQ ID NO: 1155474 - RNA, 19 nt, Artificial Sequence
  Description of Artificial Sequence: Synthetic oligonucleotide
  Sense strand starting at position 3106 of SEQ ID NO: 916422
uaguguauacucgcuguuu

SEQ ID NO: 1155475 - RNA, 19 nt, Artificial Sequence
  Description of Artificial Sequence: Synthetic oligonucleotide
  Antisense strand to SEQ ID NO: 1155474
aaacagcgaguauacacua

SEQ ID NO: 1155476 - RNA, 19 nt, Artificial Sequence
  Description of Artificial Sequence: Synthetic oligonucleotide
  Sense strand starting at position 3111 of SEQ ID NO: 916422
uauacucgcuguuugagaa

SEQ ID NO: 1155477 - RNA, 19 nt, Artificial Sequence
  Description of Artificial Sequence: Synthetic oligonucleotide
  Antisense strand to SEQ ID NO: 1155476
uucucaaacagcgaguaua

SEQ ID NO: 1155478 - RNA, 19 nt, Artificial Sequence
  Description of Artificial Sequence: Synthetic oligonucleotide
  Sense strand starting at position 3112 of SEQ ID NO: 916422
auacucgcuguuugagaau

SEQ ID NO: 1155479 - RNA, 19 nt, Artificial Sequence
  Description of Artificial Sequence: Synthetic oligonucleotide
  Antisense strand to SEQ ID NO: 1155478
auucucaaacagcgaguau

SEQ ID NO: 1155480 - RNA, 19 nt, Artificial Sequence
  Description of Artificial Sequence: Synthetic oligonucleotide
  Sense strand starting at position 3147 of SEQ ID NO: 916422
uuuauuguguuaguaccau

SEQ ID NO: 1155481 - RNA, 19 nt, Artificial Sequence
  Description of Artificial Sequence: Synthetic oligonucleotide
  Antisense strand to SEQ ID NO: 1155480
augguacuaacacaauaaa

SEQ ID NO: 1155482 - RNA, 19 nt, Artificial Sequence
  Description of Artificial Sequence: Synthetic oligonucleotide
  Sense strand starting at position 3162 of SEQ ID NO: 916422
ccaucaauccugugaguaa

SEQ ID NO: 1155483 - RNA, 19 nt, Artificial Sequence
  Description of Artificial Sequence: Synthetic oligonucleotide
  Antisense strand to SEQ ID NO: 1155482
uuacucacaggauugaugg

SEQ ID NO: 1155484 - RNA, 19 nt, Artificial Sequence
  Description of Artificial Sequence: Synthetic oligonucleotide
  Sense strand starting at position 3165 of SEQ ID NO: 916422
ucaauccugugaguaaauu

SEQ ID NO: 1155485 - RNA, 19 nt, Artificial Sequence
  Description of Artificial Sequence: Synthetic oligonucleotide
  Antisense strand to SEQ ID NO: 1155484
aauuuacucacaggauuga

SEQ ID NO: 1155486 - RNA, 19 nt, Artificial Sequence
  Description of Artificial Sequence: Synthetic oligonucleotide
  Sense strand starting at position 3175 of SEQ ID NO: 916422
gaguaaauuucugcgugug

SEQ ID NO: 1155487 - RNA, 19 nt, Artificial Sequence
  Description of Artificial Sequence: Synthetic oligonucleotide
  Antisense strand to SEQ ID NO: 1155486
cacacgcagaaauuuacuc

SEQ ID NO: 1155488 - RNA, 19 nt, Artificial Sequence
  Description of Artificial Sequence: Synthetic oligonucleotide
  Sense strand starting at position 3251 of SEQ ID NO: 916422
guguuuaucacugugugca

SEQ ID NO: 1155489 - RNA, 19 nt, Artificial Sequence
  Description of Artificial Sequence: Synthetic oligonucleotide
  Antisense strand to SEQ ID NO: 1155488
ugcacacagugauaaacac

SEQ ID NO: 1155490 - RNA, 19 nt, Artificial Sequence
  Description of Artificial Sequence: Synthetic oligonucleotide
  Sense strand starting at position 3290 of SEQ ID NO: 916422
ugccuauguguguuugcuu

SEQ ID NO: 1155491 - RNA, 19 nt, Artificial Sequence
  Description of Artificial Sequence: Synthetic oligonucleotide
  Antisense strand to SEQ ID NO: 1155490
aagcaaacacacauaggca

SEQ ID NO: 1155492 - RNA, 19 nt, Artificial Sequence
  Description of Artificial Sequence: Synthetic oligonucleotide
  Sense strand starting at position 3299 of SEQ ID NO: 916422
guguuugcuuauuugagga

SEQ ID NO: 1155493 - RNA, 19 nt, Artificial Sequence
  Description of Artificial Sequence: Synthetic oligonucleotide
  Antisense strand to SEQ ID NO: 1155492
uccucaaauaagcaaacac

SEQ ID NO: 1155494 - RNA, 19 nt, Artificial Sequence
  Description of Artificial Sequence: Synthetic oligonucleotide
  Sense strand starting at position 3320 of SEQ ID NO: 916422
cauaaaugugaggguguuu

SEQ ID NO: 1155495 - RNA, 19 nt, Artificial Sequence
  Description of Artificial Sequence: Synthetic oligonucleotide
  Antisense strand to SEQ ID NO: 1155494
aaacacccucacauuuaug

SEQ ID NO: 1155496 - RNA, 19 nt, Artificial Sequence
  Description of Artificial Sequence: Synthetic oligonucleotide
  Sense strand starting at position 3339 of SEQ ID NO: 916422
ucauguguacgugugcauu

SEQ ID NO: 1155497 - RNA, 19 nt, Artificial Sequence
  Description of Artificial Sequence: Synthetic oligonucleotide
  Antisense strand to SEQ ID NO: 1155496
aaugcacacguacacauga

SEQ ID NO: 1155498 - RNA, 19 nt, Artificial Sequence
  Description of Artificial Sequence: Synthetic oligonucleotide
  Sense strand starting at position 3345 of SEQ ID NO: 916422
guacgugugcauucacgua

SEQ ID NO: 1155499 - RNA, 19 nt, Artificial Sequence
  Description of Artificial Sequence: Synthetic oligonucleotide
  Antisense strand to SEQ ID NO: 1155498
uacgugaaugcacacguac

SEQ ID NO: 1155500 - RNA, 19 nt, Artificial Sequence
  Description of Artificial Sequence: Synthetic oligonucleotide
  Sense strand starting at position 3378 of SEQ ID NO: 916422
uguguuugcaagcauugau

SEQ ID NO: 1155501 - RNA, 19 nt, Artificial Sequence
  Description of Artificial Sequence: Synthetic oligonucleotide
  Antisense strand to SEQ ID NO: 1155500
aucaaugcuugcaaacaca

SEQ ID NO: 1155502 - RNA, 19 nt, Artificial Sequence
  Description of Artificial Sequence: Synthetic oligonucleotide
  Sense strand starting at position 3382 of SEQ ID NO: 916422
uuugcaagcauugauguga

SEQ ID NO: 1155503 - RNA, 19 nt, Artificial Sequence
  Description of Artificial Sequence: Synthetic oligonucleotide
  Antisense strand to SEQ ID NO: 1155502
ucacaucaaugcuugcaaa

SEQ ID NO: 1155504 - RNA, 19 nt, Artificial Sequence
  Description of Artificial Sequence: Synthetic oligonucleotide
  Sense strand starting at position 3462 of SEQ ID NO: 916422
agacccuguguguaugaga

SEQ ID NO: 1155505 - RNA, 19 nt, Artificial Sequence
  Description of Artificial Sequence: Synthetic oligonucleotide
  Antisense strand to SEQ ID NO: 1155504
ucucauacacacagggucu

SEQ ID NO: 1155506 - RNA, 19 nt, Artificial Sequence
  Description of Artificial Sequence: Synthetic oligonucleotide
  Sense strand starting at position 3516 of SEQ ID NO: 916422
ucugaagagcuauguuugu

SEQ ID NO: 1155507 - RNA, 19 nt, Artificial Sequence
  Description of Artificial Sequence: Synthetic oligonucleotide
  Antisense strand to SEQ ID NO: 1155506
acaaacauagcucuucaga

SEQ ID NO: 1155508 - RNA, 19 nt, Artificial Sequence
  Description of Artificial Sequence: Synthetic oligonucleotide
  Sense strand starting at position 3558 of SEQ ID NO: 916422
ccugcaaauguguguauuu

SEQ ID NO: 1155509 - RNA, 19 nt, Artificial Sequence
  Description of Artificial Sequence: Synthetic oligonucleotide
  Antisense strand to SEQ ID NO: 1155508
aaauacacacauuugcagg

SEQ ID NO: 1155510 - RNA, 19 nt, Artificial Sequence
  Description of Artificial Sequence: Synthetic oligonucleotide
  Sense strand starting at position 3565 of SEQ ID NO: 916422
auguguguauuugugcaaa

SEQ ID NO: 1155511 - RNA, 19 nt, Artificial Sequence
  Description of Artificial Sequence: Synthetic oligonucleotide
  Antisense strand to SEQ ID NO: 1155510
uuugcacaaauacacacau

SEQ ID NO: 1155512 - RNA, 19 nt, Artificial Sequence
  Description of Artificial Sequence: Synthetic oligonucleotide
  Sense strand starting at position 3567 of SEQ ID NO: 916422
guguguauuugugcaaaca

SEQ ID NO: 1155513 - RNA, 19 nt, Artificial Sequence
  Description of Artificial Sequence: Synthetic oligonucleotide
  Antisense strand to SEQ ID NO: 1155512
uguuugcacaaauacacac

SEQ ID NO: 1155514 - RNA, 19 nt, Artificial Sequence
  Description of Artificial Sequence: Synthetic oligonucleotide
  Sense strand starting at position 3921 of SEQ ID NO: 916422
cugcuuauuggugcuguua

SEQ ID NO: 1155515 - RNA, 19 nt, Artificial Sequence
  Description of Artificial Sequence: Synthetic oligonucleotide
  Antisense strand to SEQ ID NO: 1155514
uaacagcaccaauaagcag

SEQ ID NO: 1155516 - RNA, 19 nt, Artificial Sequence
  Description of Artificial Sequence: Synthetic oligonucleotide
  Sense strand starting at position 3 of SEQ ID NO: 916423
guucucuucccagggacua

SEQ ID NO: 1155517 - RNA, 19 nt, Artificial Sequence
  Description of Artificial Sequence: Synthetic oligonucleotide
  Antisense strand to SEQ ID NO: 1155516
uagucccugggaagagaac

SEQ ID NO: 1155518 - RNA, 19 nt, Artificial Sequence
  Description of Artificial Sequence: Synthetic oligonucleotide
  Sense strand starting at position 140 of SEQ ID NO: 916423
aagagaggguaagaaauau

SEQ ID NO: 1155519 - RNA, 19 nt, Artificial Sequence
  Description of Artificial Sequence: Synthetic oligonucleotide
  Antisense strand to SEQ ID NO: 1155518
auauuucuuacccucucuu

SEQ ID NO: 1155520 - RNA, 19 nt, Artificial Sequence
  Description of Artificial Sequence: Synthetic oligonucleotide
  Sense strand starting at position 293 of SEQ ID NO: 916423
ugggcugaccucuaguaua

SEQ ID NO: 1155521 - RNA, 19 nt, Artificial Sequence
  Description of Artificial Sequence: Synthetic oligonucleotide
  Antisense strand to SEQ ID NO: 1155520
uauacuagaggucagccca

SEQ ID NO: 1155522 - RNA, 19 nt, Artificial Sequence
  Description of Artificial Sequence: Synthetic oligonucleotide
  Sense strand starting at position 330 of SEQ ID NO: 916423
ccauaaauuguauguggau

SEQ ID NO: 1155523 - RNA, 19 nt, Artificial Sequence
  Description of Artificial Sequence: Synthetic oligonucleotide
  Antisense strand to SEQ ID NO: 1155522
auccacauacaauuuaugg

SEQ ID NO: 1155524 - RNA, 19 nt, Artificial Sequence
  Description of Artificial Sequence: Synthetic oligonucleotide
  Sense strand starting at position 339 of SEQ ID NO: 916423
guauguggaucugucuaac

SEQ ID NO: 1155525 - RNA, 19 nt, Artificial Sequence
  Description of Artificial Sequence: Synthetic oligonucleotide
  Antisense strand to SEQ ID NO: 1155524
guuagacagauccacauac

SEQ ID NO: 1155526 - RNA, 19 nt, Artificial Sequence
  Description of Artificial Sequence: Synthetic oligonucleotide
  Sense strand starting at position 342 of SEQ ID NO: 916423
uguggaucugucuaaccca

SEQ ID NO: 1155527 - RNA, 19 nt, Artificial Sequence
  Description of Artificial Sequence: Synthetic oligonucleotide
  Antisense strand to SEQ ID NO: 1155526
uggguuagacagauccaca

SEQ ID NO: 1155528 - RNA, 19 nt, Artificial Sequence
  Description of Artificial Sequence: Synthetic oligonucleotide
  Sense strand starting at position 682 of SEQ ID NO: 916423
agaagaaaggauugguguu

SEQ ID NO: 1155529 - RNA, 19 nt, Artificial Sequence
  Description of Artificial Sequence: Synthetic oligonucleotide
  Antisense strand to SEQ ID NO: 1155528
aacaccaauccuuucuucu

SEQ ID NO: 1155530 - RNA, 19 nt, Artificial Sequence
  Description of Artificial Sequence: Synthetic oligonucleotide
  Sense strand starting at position 683 of SEQ ID NO: 916423
gaagaaaggauugguguua

SEQ ID NO: 1155531 - RNA, 19 nt, Artificial Sequence
  Description of Artificial Sequence: Synthetic oligonucleotide
  Antisense strand to SEQ ID NO: 1155530
uaacaccaauccuuucuuc

SEQ ID NO: 1155532 - RNA, 19 nt, Artificial Sequence
  Description of Artificial Sequence: Synthetic oligonucleotide
  Sense strand starting at position 684 of SEQ ID NO: 916423
aagaaaggauugguguuau

SEQ ID NO: 1155533 - RNA, 19 nt, Artificial Sequence
  Description of Artificial Sequence: Synthetic oligonucleotide
  Antisense strand to SEQ ID NO: 1155532
auaacaccaauccuuucuu

SEQ ID NO: 1155534 - RNA, 19 nt, Artificial Sequence
  Description of Artificial Sequence: Synthetic oligonucleotide
  Sense strand starting at position 732 of SEQ ID NO: 916423
ugaauaguauugguaacca

SEQ ID NO: 1155535 - RNA, 19 nt, Artificial Sequence
  Description of Artificial Sequence: Synthetic oligonucleotide
  Antisense strand to SEQ ID NO: 1155534
ugguuaccaauacuauuca

SEQ ID NO: 1155536 - RNA, 19 nt, Artificial Sequence
  Description of Artificial Sequence: Synthetic oligonucleotide
  Sense strand starting at position 1112 of SEQ ID NO: 916423
gcuggaauuaggugcaaga

SEQ ID NO: 1155537 - RNA, 19 nt, Artificial Sequence
  Description of Artificial Sequence: Synthetic oligonucleotide
  Antisense strand to SEQ ID NO: 1155536
ucuugcaccuaauuccagc

SEQ ID NO: 1155538 - RNA, 19 nt, Artificial Sequence
  Description of Artificial Sequence: Synthetic oligonucleotide
  Sense strand starting at position 1122 of SEQ ID NO: 916423
ggugcaagacaauaguagu

SEQ ID NO: 1155539 - RNA, 19 nt, Artificial Sequence
  Description of Artificial Sequence: Synthetic oligonucleotide
  Antisense strand to SEQ ID NO: 1155538
acuacuauugucuugcacc

SEQ ID NO: 1155540 - RNA, 19 nt, Artificial Sequence
  Description of Artificial Sequence: Synthetic oligonucleotide
  Sense strand starting at position 1200 of SEQ ID NO: 916423
ggaagggugccagaugguu

SEQ ID NO: 1155541 - RNA, 19 nt, Artificial Sequence
  Description of Artificial Sequence: Synthetic oligonucleotide
  Antisense strand to SEQ ID NO: 1155540
aaccaucuggcacccuucc

SEQ ID NO: 1155542 - RNA, 19 nt, Artificial Sequence
  Description of Artificial Sequence: Synthetic oligonucleotide
  Sense strand starting at position 1265 of SEQ ID NO: 916423
guguacaauuaccuuacau

SEQ ID NO: 1155543 - RNA, 19 nt, Artificial Sequence
  Description of Artificial Sequence: Synthetic oligonucleotide
  Antisense strand to SEQ ID NO: 1155542
auguaagguaauuguacac

SEQ ID NO: 1155544 - RNA, 19 nt, Artificial Sequence
  Description of Artificial Sequence: Synthetic oligonucleotide
  Sense strand starting at position 1318 of SEQ ID NO: 916423
auauauacacgauagcgau

SEQ ID NO: 1155545 - RNA, 19 nt, Artificial Sequence
  Description of Artificial Sequence: Synthetic oligonucleotide
  Antisense strand to SEQ ID NO: 1155544
aucgcuaucguguauauau

SEQ ID NO: 1155546 - RNA, 19 nt, Artificial Sequence
  Description of Artificial Sequence: Synthetic oligonucleotide
  Sense strand starting at position 1391 of SEQ ID NO: 916423
ggguguaagugucuuaaac

SEQ ID NO: 1155547 - RNA, 19 nt, Artificial Sequence
  Description of Artificial Sequence: Synthetic oligonucleotide
  Antisense strand to SEQ ID NO: 1155546
guuuaagacacuuacaccc

SEQ ID NO: 1155548 - RNA, 19 nt, Artificial Sequence
  Description of Artificial Sequence: Synthetic oligonucleotide
  Sense strand starting at position 1421 of SEQ ID NO: 916423
ggcguaauggaagggagaa

SEQ ID NO: 1155549 - RNA, 19 nt, Artificial Sequence
  Description of Artificial Sequence: Synthetic oligonucleotide
  Antisense strand to SEQ ID NO: 1155548
uucucccuuccauuacgcc

SEQ ID NO: 1155550 - RNA, 19 nt, Artificial Sequence
  Description of Artificial Sequence: Synthetic oligonucleotide
  Sense strand starting at position 1422 of SEQ ID NO: 916423
gcguaauggaagggagaaa

SEQ ID NO: 1155551 - RNA, 19 nt, Artificial Sequence
  Description of Artificial Sequence: Synthetic oligonucleotide
  Antisense strand to SEQ ID NO: 1155550
uuucucccuuccauuacgc

SEQ ID NO: 1155552 - RNA, 19 nt, Artificial Sequence
  Description of Artificial Sequence: Synthetic oligonucleotide
  Sense strand starting at position 1636 of SEQ ID NO: 916423
aaaggcucagcccgacaua

SEQ ID NO: 1155553 - RNA, 19 nt, Artificial Sequence
  Description of Artificial Sequence: Synthetic oligonucleotide
  Antisense strand to SEQ ID NO: 1155552
uaugucgggcugagccuuu

SEQ ID NO: 1155554 - RNA, 19 nt, Artificial Sequence
  Description of Artificial Sequence: Synthetic oligonucleotide
  Sense strand starting at position 2231 of SEQ ID NO: 916423
acguuaucgcaguuugacu

SEQ ID NO: 1155555 - RNA, 19 nt, Artificial Sequence
  Description of Artificial Sequence: Synthetic oligonucleotide
  Antisense strand to SEQ ID NO: 1155554
agucaaacugcgauaacgu

SEQ ID NO: 1155556 - RNA, 19 nt, Artificial Sequence
  Description of Artificial Sequence: Synthetic oligonucleotide
  Sense strand starting at position 2397 of SEQ ID NO: 916423
cgguuugacaagggcagau

SEQ ID NO: 1155557 - RNA, 19 nt, Artificial Sequence
  Description of Artificial Sequence: Synthetic oligonucleotide
  Antisense strand to SEQ ID NO: 1155556
aucugcccuugucaaaccg

SEQ ID NO: 1155558 - RNA, 19 nt, Artificial Sequence
  Description of Artificial Sequence: Synthetic oligonucleotide
  Sense strand starting at position 2469 of SEQ ID NO: 916423
gugcuaaugguuuggagac

SEQ ID NO: 1155559 - RNA, 19 nt, Artificial Sequence
  Description of Artificial Sequence: Synthetic oligonucleotide
  Antisense strand to SEQ ID NO: 1155558
gucuccaaaccauuagcac

SEQ ID NO: 1155560 - RNA, 19 nt, Artificial Sequence
  Description of Artificial Sequence: Synthetic oligonucleotide
  Sense strand starting at position 2476 of SEQ ID NO: 916423
ugguuuggagaccgucaau

SEQ ID NO: 1155561 - RNA, 19 nt, Artificial Sequence
  Description of Artificial Sequence: Synthetic oligonucleotide
  Antisense strand to SEQ ID NO: 1155560
auugacggucuccaaacca

SEQ ID NO: 1155562 - RNA, 19 nt, Artificial Sequence
  Description of Artificial Sequence: Synthetic oligonucleotide
  Sense strand starting at position 2520 of SEQ ID NO: 916423
cccaaauucuugucccagu

SEQ ID NO: 1155563 - RNA, 19 nt, Artificial Sequence
  Description of Artificial Sequence: Synthetic oligonucleotide
  Antisense strand to SEQ ID NO: 1155562
acugggacaagaauuuggg

SEQ ID NO: 1155564 - RNA, 19 nt, Artificial Sequence
  Description of Artificial Sequence: Synthetic oligonucleotide
  Sense strand starting at position 2521 of SEQ ID NO: 916423
ccaaauucuugucccaguu

SEQ ID NO: 1155565 - RNA, 19 nt, Artificial Sequence
  Description of Artificial Sequence: Synthetic oligonucleotide
  Antisense strand to SEQ ID NO: 1155564
aacugggacaagaauuugg

SEQ ID NO: 1155566 - RNA, 19 nt, Artificial Sequence
  Description of Artificial Sequence: Synthetic oligonucleotide
  Sense strand starting at position 2563 of SEQ ID NO: 916423
uugauaguauccuucuuuc

SEQ ID NO: 1155567 - RNA, 19 nt, Artificial Sequence
  Description of Artificial Sequence: Synthetic oligonucleotide
  Antisense strand to SEQ ID NO: 1155566
gaaagaaggauacuaucaa

SEQ ID NO: 1155568 - RNA, 19 nt, Artificial Sequence
  Description of Artificial Sequence: Synthetic oligonucleotide
  Sense strand starting at position 2797 of SEQ ID NO: 916423
uagacugauuucuggauag

SEQ ID NO: 1155569 - RNA, 19 nt, Artificial Sequence
  Description of Artificial Sequence: Synthetic oligonucleotide
  Antisense strand to SEQ ID NO: 1155568
cuauccagaaaucagucua

SEQ ID NO: 1155570 - RNA, 19 nt, Artificial Sequence
  Description of Artificial Sequence: Synthetic oligonucleotide
  Sense strand starting at position 2956 of SEQ ID NO: 916423
uuugauuggcuacagcuaa

SEQ ID NO: 1155571 - RNA, 19 nt, Artificial Sequence
  Description of Artificial Sequence: Synthetic oligonucleotide
  Antisense strand to SEQ ID NO: 1155570
uuagcuguagccaaucaaa

SEQ ID NO: 1155572 - RNA, 19 nt, Artificial Sequence
  Description of Artificial Sequence: Synthetic oligonucleotide
  Sense strand starting at position 3005 of SEQ ID NO: 916423
ggaggucccuaauuauaua

SEQ ID NO: 1155573 - RNA, 19 nt, Artificial Sequence
  Description of Artificial Sequence: Synthetic oligonucleotide
  Antisense strand to SEQ ID NO: 1155572
uauauaauuagggaccucc

SEQ ID NO: 1155574 - RNA, 19 nt, Artificial Sequence
  Description of Artificial Sequence: Synthetic oligonucleotide
  Sense strand starting at position 3032 of SEQ ID NO: 916423
gcugguugucuguuuguga

SEQ ID NO: 1155575 - RNA, 19 nt, Artificial Sequence
  Description of Artificial Sequence: Synthetic oligonucleotide
  Antisense strand to SEQ ID NO: 1155574
ucacaaacagacaaccagc

SEQ ID NO: 1155576 - RNA, 19 nt, Artificial Sequence
  Description of Artificial Sequence: Synthetic oligonucleotide
  Sense strand starting at position 3045 of SEQ ID NO: 916423
uugugauugguugaaacuc

SEQ ID NO: 1155577 - RNA, 19 nt, Artificial Sequence
  Description of Artificial Sequence: Synthetic oligonucleotide
  Antisense strand to SEQ ID NO: 1155576
gaguuucaaccaaucacaa

SEQ ID NO: 1155578 - RNA, 19 nt, Artificial Sequence
  Description of Artificial Sequence: Synthetic oligonucleotide
  Sense strand starting at position 3466 of SEQ ID NO: 916423
uugcauuaacaguaucaag

SEQ ID NO: 1155579 - RNA, 19 nt, Artificial Sequence
  Description of Artificial Sequence: Synthetic oligonucleotide
  Antisense strand to SEQ ID NO: 1155578
cuugauacuguuaaugcaa

SEQ ID NO: 1155580 - RNA, 19 nt, Artificial Sequence
  Description of Artificial Sequence: Synthetic oligonucleotide
  Sense strand starting at position 3484 of SEQ ID NO: 916423
guaucaagacuccagcaaa

SEQ ID NO: 1155581 - RNA, 19 nt, Artificial Sequence
  Description of Artificial Sequence: Synthetic oligonucleotide
  Antisense strand to SEQ ID NO: 1155580
uuugcuggagucuugauac

SEQ ID NO: 1155582 - RNA, 19 nt, Artificial Sequence
  Description of Artificial Sequence: Synthetic oligonucleotide
  Sense strand starting at position 3511 of SEQ ID NO: 916423
acagcaugggaaugcuaaa

SEQ ID NO: 1155583 - RNA, 19 nt, Artificial Sequence
  Description of Artificial Sequence: Synthetic oligonucleotide
  Antisense strand to SEQ ID NO: 1155582
uuuagcauucccaugcugu

SEQ ID NO: 1155584 - RNA, 19 nt, Artificial Sequence
  Description of Artificial Sequence: Synthetic oligonucleotide
  Sense strand starting at position 3633 of SEQ ID NO: 916423
ugugcuuuaguggauacaa

SEQ ID NO: 1155585 - RNA, 19 nt, Artificial Sequence
  Description of Artificial Sequence: Synthetic oligonucleotide
  Antisense strand to SEQ ID NO: 1155584
uuguauccacuaaagcaca

SEQ ID NO: 1155586 - RNA, 19 nt, Artificial Sequence
  Description of Artificial Sequence: Synthetic oligonucleotide
  Sense strand starting at position 3681 of SEQ ID NO: 916423
ugaagauagagcuagcauu

SEQ ID NO: 1155587 - RNA, 19 nt, Artificial Sequence
  Description of Artificial Sequence: Synthetic oligonucleotide
  Antisense strand to SEQ ID NO: 1155586
aaugcuagcucuaucuuca

SEQ ID NO: 1155588 - RNA, 19 nt, Artificial Sequence
  Description of Artificial Sequence: Synthetic oligonucleotide
  Sense strand starting at position 3695 of SEQ ID NO: 916423
gcauuagguugauugcuaa

SEQ ID NO: 1155589 - RNA, 19 nt, Artificial Sequence
  Description of Artificial Sequence: Synthetic oligonucleotide
  Antisense strand to SEQ ID NO: 1155588
uuagcaaucaaccuaaugc

SEQ ID NO: 1155590 - RNA, 19 nt, Artificial Sequence
  Description of Artificial Sequence: Synthetic oligonucleotide
  Sense strand starting at position 3698 of SEQ ID NO: 916423
uuagguugauugcuaaauu

SEQ ID NO: 1155591 - RNA, 19 nt, Artificial Sequence
  Description of Artificial Sequence: Synthetic oligonucleotide
  Antisense strand to SEQ ID NO: 1155590
aauuuagcaaucaaccuaa

SEQ ID NO: 1155592 - RNA, 19 nt, Artificial Sequence
  Description of Artificial Sequence: Synthetic oligonucleotide
  Sense strand starting at position 3815 of SEQ ID NO: 916423
caggcauguugagucacau

SEQ ID NO: 1155593 - RNA, 19 nt, Artificial Sequence
  Description of Artificial Sequence: Synthetic oligonucleotide
  Antisense strand to SEQ ID NO: 1155592
augugacucaacaugccug

SEQ ID NO: 1155594 - RNA, 19 nt, Artificial Sequence
  Description of Artificial Sequence: Synthetic oligonucleotide
  Sense strand starting at position 3879 of SEQ ID NO: 916423
aggcuagaaguuugauguu

SEQ ID NO: 1155595 - RNA, 19 nt, Artificial Sequence
  Description of Artificial Sequence: Synthetic oligonucleotide
  Antisense strand to SEQ ID NO: 1155594
aacaucaaacuucuagccu

SEQ ID NO: 1155596 - RNA, 19 nt, Artificial Sequence
  Description of Artificial Sequence: Synthetic oligonucleotide
  Sense strand starting at position 102 of SEQ ID NO: 916424
agaguuaagaaacguuaua

SEQ ID NO: 1155597 - RNA, 19 nt, Artificial Sequence
  Description of Artificial Sequence: Synthetic oligonucleotide
  Antisense strand to SEQ ID NO: 1155596
uauaacguuucuuaacucu

SEQ ID NO: 1155598 - RNA, 19 nt, Artificial Sequence
  Description of Artificial Sequence: Synthetic oligonucleotide
  Sense strand starting at position 159 of SEQ ID NO: 916424
acuguuaaaguagagcuaa

SEQ ID NO: 1155599 - RNA, 19 nt, Artificial Sequence
  Description of Artificial Sequence: Synthetic oligonucleotide
  Antisense strand to SEQ ID NO: 1155598
uuagcucuacuuuaacagu

SEQ ID NO: 1155600 - RNA, 19 nt, Artificial Sequence
  Description of Artificial Sequence: Synthetic oligonucleotide
  Sense strand starting at position 178 of SEQ ID NO: 916424
agcucaugcacagagaagu

SEQ ID NO: 1155601 - RNA, 19 nt, Artificial Sequence
  Description of Artificial Sequence: Synthetic oligonucleotide
  Antisense strand to SEQ ID NO: 1155600
acuucucugugcaugagcu

SEQ ID NO: 1155602 - RNA, 19 nt, Artificial Sequence
  Description of Artificial Sequence: Synthetic oligonucleotide
  Sense strand starting at position 515 of SEQ ID NO: 916424
cauuauaacgacuguugua

SEQ ID NO: 1155603 - RNA, 19 nt, Artificial Sequence
  Description of Artificial Sequence: Synthetic oligonucleotide
  Antisense strand to SEQ ID NO: 1155602
uacaacagucguuauaaug

SEQ ID NO: 1155604 - RNA, 19 nt, Artificial Sequence
  Description of Artificial Sequence: Synthetic oligonucleotide
  Sense strand starting at position 548 of SEQ ID NO: 916424
uguacaaagccagauauau

SEQ ID NO: 1155605 - RNA, 19 nt, Artificial Sequence
  Description of Artificial Sequence: Synthetic oligonucleotide
  Antisense strand to SEQ ID NO: 1155604
auauaucuggcuuuguaca

SEQ ID NO: 1155606 - RNA, 19 nt, Artificial Sequence
  Description of Artificial Sequence: Synthetic oligonucleotide
  Sense strand starting at position 556 of SEQ ID NO: 916424
gccagauauauaggaaagu

SEQ ID NO: 1155607 - RNA, 19 nt, Artificial Sequence
  Description of Artificial Sequence: Synthetic oligonucleotide
  Antisense strand to SEQ ID NO: 1155606
acuuuccuauauaucuggc

SEQ ID NO: 1155608 - RNA, 19 nt, Artificial Sequence
  Description of Artificial Sequence: Synthetic oligonucleotide
  Sense strand starting at position 675 of SEQ ID NO: 916424
ggacgaggucugcaaucca

SEQ ID NO: 1155609 - RNA, 19 nt, Artificial Sequence
  Description of Artificial Sequence: Synthetic oligonucleotide
  Antisense strand to SEQ ID NO: 1155608
uggauugcagaccucgucc

SEQ ID NO: 1155610 - RNA, 19 nt, Artificial Sequence
  Description of Artificial Sequence: Synthetic oligonucleotide
  Sense strand starting at position 828 of SEQ ID NO: 916424
aaacauuuguuggaaggca

SEQ ID NO: 1155611 - RNA, 19 nt, Artificial Sequence
  Description of Artificial Sequence: Synthetic oligonucleotide
  Antisense strand to SEQ ID NO: 1155610
ugccuuccaacaaauguuu

SEQ ID NO: 1155612 - RNA, 19 nt, Artificial Sequence
  Description of Artificial Sequence: Synthetic oligonucleotide
  Sense strand starting at position 892 of SEQ ID NO: 916424
acaaguaagccucagucuu

SEQ ID NO: 1155613 - RNA, 19 nt, Artificial Sequence
  Description of Artificial Sequence: Synthetic oligonucleotide
  Antisense strand to SEQ ID NO: 1155612
aagacugaggcuuacuugu

SEQ ID NO: 1155614 - RNA, 19 nt, Artificial Sequence
  Description of Artificial Sequence: Synthetic oligonucleotide
  Sense strand starting at position 1049 of SEQ ID NO: 916424
auaauccaaucgguauuaa

SEQ ID NO: 1155615 - RNA, 19 nt, Artificial Sequence
  Description of Artificial Sequence: Synthetic oligonucleotide
  Antisense strand to SEQ ID NO: 1155614
uuaauaccgauuggauuau

SEQ ID NO: 1155616 - RNA, 19 nt, Artificial Sequence
  Description of Artificial Sequence: Synthetic oligonucleotide
  Sense strand starting at position 1092 of SEQ ID NO: 916424
uuugaaucccagugugaac

SEQ ID NO: 1155617 - RNA, 19 nt, Artificial Sequence
  Description of Artificial Sequence: Synthetic oligonucleotide
  Antisense strand to SEQ ID NO: 1155616
guucacacugggauucaaa

SEQ ID NO: 1155618 - RNA, 19 nt, Artificial Sequence
  Description of Artificial Sequence: Synthetic oligonucleotide
  Sense strand starting at position 1119 of SEQ ID NO: 916424
acaugaaauugugucagag

SEQ ID NO: 1155619 - RNA, 19 nt, Artificial Sequence
  Description of Artificial Sequence: Synthetic oligonucleotide
  Antisense strand to SEQ ID NO: 1155618
cucugacacaauuucaugu

SEQ ID NO: 1155620 - RNA, 19 nt, Artificial Sequence
  Description of Artificial Sequence: Synthetic oligonucleotide
  Sense strand starting at position 1275 of SEQ ID NO: 916424
ugaauuggcuuucucaagu

SEQ ID NO: 1155621 - RNA, 19 nt, Artificial Sequence
  Description of Artificial Sequence: Synthetic oligonucleotide
  Antisense strand to SEQ ID NO: 1155620
acuugagaaagccaauuca

SEQ ID NO: 1155622 - RNA, 19 nt, Artificial Sequence
  Description of Artificial Sequence: Synthetic oligonucleotide
  Sense strand starting at position 1480 of SEQ ID NO: 916424
uugaguggucuuuaagauc

SEQ ID NO: 1155623 - RNA, 19 nt, Artificial Sequence
  Description of Artificial Sequence: Synthetic oligonucleotide
  Antisense strand to SEQ ID NO: 1155622
gaucuuaaagaccacucaa

SEQ ID NO: 1155624 - RNA, 19 nt, Artificial Sequence
  Description of Artificial Sequence: Synthetic oligonucleotide
  Sense strand starting at position 1518 of SEQ ID NO: 916424
ggauaucgacccugaacga

SEQ ID NO: 1155625 - RNA, 19 nt, Artificial Sequence
  Description of Artificial Sequence: Synthetic oligonucleotide
  Antisense strand to SEQ ID NO: 1155624
ucguucagggucgauaucc

SEQ ID NO: 1155626 - RNA, 19 nt, Artificial Sequence
  Description of Artificial Sequence: Synthetic oligonucleotide
  Sense strand starting at position 1572 of SEQ ID NO: 916424
uggauuuguucuucuuggu

SEQ ID NO: 1155627 - RNA, 19 nt, Artificial Sequence
  Description of Artificial Sequence: Synthetic oligonucleotide
  Antisense strand to SEQ ID NO: 1155626
accaagaagaacaaaucca

SEQ ID NO: 1155628 - RNA, 19 nt, Artificial Sequence
  Description of Artificial Sequence: Synthetic oligonucleotide
  Sense strand starting at position 1751 of SEQ ID NO: 916424
ucuaaagugcugggagaga

SEQ ID NO: 1155629 - RNA, 19 nt, Artificial Sequence
  Description of Artificial Sequence: Synthetic oligonucleotide
  Antisense strand to SEQ ID NO: 1155628
ucucucccagcacuuuaga

SEQ ID NO: 1155630 - RNA, 19 nt, Artificial Sequence
  Description of Artificial Sequence: Synthetic oligonucleotide
  Sense strand starting at position 1772 of SEQ ID NO: 916424
uucgguguucuagaagaac

SEQ ID NO: 1155631 - RNA, 19 nt, Artificial Sequence
  Description of Artificial Sequence: Synthetic oligonucleotide
  Antisense strand to SEQ ID NO: 1155630
guucuucuagaacaccgaa

SEQ ID NO: 1155632 - RNA, 19 nt, Artificial Sequence
  Description of Artificial Sequence: Synthetic oligonucleotide
  Sense strand starting at position 1917 of SEQ ID NO: 916424
agccuugccacauggagaa

SEQ ID NO: 1155633 - RNA, 19 nt, Artificial Sequence
  Description of Artificial Sequence: Synthetic oligonucleotide
  Antisense strand to SEQ ID NO: 1155632
uucuccauguggcaaggcu

SEQ ID NO: 1155634 - RNA, 19 nt, Artificial Sequence
  Description of Artificial Sequence: Synthetic oligonucleotide
  Sense strand starting at position 2055 of SEQ ID NO: 916424
cucuaaugauaguuacaug

SEQ ID NO: 1155635 - RNA, 19 nt, Artificial Sequence
  Description of Artificial Sequence: Synthetic oligonucleotide
  Antisense strand to SEQ ID NO: 1155634
cauguaacuaucauuagag

SEQ ID NO: 1155636 - RNA, 19 nt, Artificial Sequence
  Description of Artificial Sequence: Synthetic oligonucleotide
  Sense strand starting at position 2060 of SEQ ID NO: 916424
augauaguuacaugcgaaa

SEQ ID NO: 1155637 - RNA, 19 nt, Artificial Sequence
  Description of Artificial Sequence: Synthetic oligonucleotide
  Antisense strand to SEQ ID NO: 1155636
uuucgcauguaacuaucau

SEQ ID NO: 1155638 - RNA, 19 nt, Artificial Sequence
  Description of Artificial Sequence: Synthetic oligonucleotide
  Sense strand starting at position 2241 of SEQ ID NO: 916424
gacaaagaugcaggauagu

SEQ ID NO: 1155639 - RNA, 19 nt, Artificial Sequence
  Description of Artificial Sequence: Synthetic oligonucleotide
  Antisense strand to SEQ ID NO: 1155638
acuauccugcaucuuuguc

SEQ ID NO: 1155640 - RNA, 19 nt, Artificial Sequence
  Description of Artificial Sequence: Synthetic oligonucleotide
  Sense strand starting at position 2281 of SEQ ID NO: 916424
ccauuaauuacggauagug

SEQ ID NO: 1155641 - RNA, 19 nt, Artificial Sequence
  Description of Artificial Sequence: Synthetic oligonucleotide
  Antisense strand to SEQ ID NO: 1155640
cacuauccguaauuaaugg

SEQ ID NO: 1155642 - RNA, 19 nt, Artificial Sequence
  Description of Artificial Sequence: Synthetic oligonucleotide
  Sense strand starting at position 2299 of SEQ ID NO: 916424
ggcagcaaggauugaaaca

SEQ ID NO: 1155643 - RNA, 19 nt, Artificial Sequence
  Description of Artificial Sequence: Synthetic oligonucleotide
  Antisense strand to SEQ ID NO: 1155642
uguuucaauccuugcugcc

SEQ ID NO: 1155644 - RNA, 19 nt, Artificial Sequence
  Description of Artificial Sequence: Synthetic oligonucleotide
  Sense strand starting at position 2319 of SEQ ID NO: 916424
uuuguagaacccuggagaa

SEQ ID NO: 1155645 - RNA, 19 nt, Artificial Sequence
  Description of Artificial Sequence: Synthetic oligonucleotide
  Antisense strand to SEQ ID NO: 1155644
uucuccaggguucuacaaa

SEQ ID NO: 1155646 - RNA, 19 nt, Artificial Sequence
  Description of Artificial Sequence: Synthetic oligonucleotide
  Sense strand starting at position 2394 of SEQ ID NO: 916424
caugcauaugagcagucaa

SEQ ID NO: 1155647 - RNA, 19 nt, Artificial Sequence
  Description of Artificial Sequence: Synthetic oligonucleotide
  Antisense strand to SEQ ID NO: 1155646
uugacugcucauaugcaug

SEQ ID NO: 1155648 - RNA, 19 nt, Artificial Sequence
  Description of Artificial Sequence: Synthetic oligonucleotide
  Sense strand starting at position 2463 of SEQ ID NO: 916424
acaaguuuaucuguguaua

SEQ ID NO: 1155649 - RNA, 19 nt, Artificial Sequence
  Description of Artificial Sequence: Synthetic oligonucleotide
  Antisense strand to SEQ ID NO: 1155648
uauacacagauaaacuugu

SEQ ID NO: 1155650 - RNA, 19 nt, Artificial Sequence
  Description of Artificial Sequence: Synthetic oligonucleotide
  Sense strand starting at position 2475 of SEQ ID NO: 916424
guguauaaauucucacuua

SEQ ID NO: 1155651 - RNA, 19 nt, Artificial Sequence
  Description of Artificial Sequence: Synthetic oligonucleotide
  Antisense strand to SEQ ID NO: 1155650
uaagugagaauuuauacac

SEQ ID NO: 1155652 - RNA, 19 nt, Artificial Sequence
  Description of Artificial Sequence: Synthetic oligonucleotide
  Sense strand starting at position 2830 of SEQ ID NO: 916424
cagauccucugguuguaaa

SEQ ID NO: 1155653 - RNA, 19 nt, Artificial Sequence
  Description of Artificial Sequence: Synthetic oligonucleotide
  Antisense strand to SEQ ID NO: 1155652
uuuacaaccagaggaucug

SEQ ID NO: 1155654 - RNA, 19 nt, Artificial Sequence
  Description of Artificial Sequence: Synthetic oligonucleotide
  Sense strand starting at position 2990 of SEQ ID NO: 916424
uggaaauugucacuguugu

SEQ ID NO: 1155655 - RNA, 19 nt, Artificial Sequence
  Description of Artificial Sequence: Synthetic oligonucleotide
  Antisense strand to SEQ ID NO: 1155654
acaacagugacaauuucca

SEQ ID NO: 1155656 - RNA, 19 nt, Artificial Sequence
  Description of Artificial Sequence: Synthetic oligonucleotide
  Sense strand starting at position 3001 of SEQ ID NO: 916424
acuguuguuccauaauaga

SEQ ID NO: 1155657 - RNA, 19 nt, Artificial Sequence
  Description of Artificial Sequence: Synthetic oligonucleotide
  Antisense strand to SEQ ID NO: 1155656
ucuauuauggaacaacagu

SEQ ID NO: 1155658 - RNA, 19 nt, Artificial Sequence
  Description of Artificial Sequence: Synthetic oligonucleotide
  Sense strand starting at position 3019 of SEQ ID NO: 916424
aggaaacacgcuuguugaa

SEQ ID NO: 1155659 - RNA, 19 nt, Artificial Sequence
  Description of Artificial Sequence: Synthetic oligonucleotide
  Antisense strand to SEQ ID NO: 1155658
uucaacaagcguguuuccu

SEQ ID NO: 1155660 - RNA, 19 nt, Artificial Sequence
  Description of Artificial Sequence: Synthetic oligonucleotide
  Sense strand starting at position 3363 of SEQ ID NO: 916424
aaugucccguacuuugaaa

SEQ ID NO: 1155661 - RNA, 19 nt, Artificial Sequence
  Description of Artificial Sequence: Synthetic oligonucleotide
  Antisense strand to SEQ ID NO: 1155660
uuucaaaguacgggacauu

SEQ ID NO: 1155662 - RNA, 19 nt, Artificial Sequence
  Description of Artificial Sequence: Synthetic oligonucleotide
  Sense strand starting at position 3622 of SEQ ID NO: 916424
auagaacugcuugauucua

SEQ ID NO: 1155663 - RNA, 19 nt, Artificial Sequence
  Description of Artificial Sequence: Synthetic oligonucleotide
  Antisense strand to SEQ ID NO: 1155662
uagaaucaagcaguucuau

SEQ ID NO: 1155664 - RNA, 19 nt, Artificial Sequence
  Description of Artificial Sequence: Synthetic oligonucleotide
  Sense strand starting at position 3624 of SEQ ID NO: 916424
agaacugcuugauucuagu

SEQ ID NO: 1155665 - RNA, 19 nt, Artificial Sequence
  Description of Artificial Sequence: Synthetic oligonucleotide
  Antisense strand to SEQ ID NO: 1155664
acuagaaucaagcaguucu

SEQ ID NO: 1155666 - RNA, 19 nt, Artificial Sequence
  Description of Artificial Sequence: Synthetic oligonucleotide
  Sense strand starting at position 3818 of SEQ ID NO: 916424
auggaugagucaucuaggu

SEQ ID NO: 1155667 - RNA, 19 nt, Artificial Sequence
  Description of Artificial Sequence: Synthetic oligonucleotide
  Antisense strand to SEQ ID NO: 1155666
accuagaugacucauccau

SEQ ID NO: 1155668 - RNA, 19 nt, Artificial Sequence
  Description of Artificial Sequence: Synthetic oligonucleotide
  Sense strand starting at position 3820 of SEQ ID NO: 916424
ggaugagucaucuaggucu

SEQ ID NO: 1155669 - RNA, 19 nt, Artificial Sequence
  Description of Artificial Sequence: Synthetic oligonucleotide
  Antisense strand to SEQ ID NO: 1155668
agaccuagaugacucaucc

SEQ ID NO: 1155670 - RNA, 19 nt, Artificial Sequence
  Description of Artificial Sequence: Synthetic oligonucleotide
  Sense strand starting at position 3822 of SEQ ID NO: 916424
augagucaucuaggucucu

SEQ ID NO: 1155671 - RNA, 19 nt, Artificial Sequence
  Description of Artificial Sequence: Synthetic oligonucleotide
  Antisense strand to SEQ ID NO: 1155670
agagaccuagaugacucau

SEQ ID NO: 1155672 - RNA, 19 nt, Artificial Sequence
  Description of Artificial Sequence: Synthetic oligonucleotide
  Sense strand starting at position 3933 of SEQ ID NO: 916424
cuaucaugugaucaaagua

SEQ ID NO: 1155673 - RNA, 19 nt, Artificial Sequence
  Description of Artificial Sequence: Synthetic oligonucleotide
  Antisense strand to SEQ ID NO: 1155672
uacuuugaucacaugauag

SEQ ID NO: 1155674 - RNA, 19 nt, Artificial Sequence
  Description of Artificial Sequence: Synthetic oligonucleotide
  Sense strand starting at position 3940 of SEQ ID NO: 916424
gugaucaaaguauacuuau

SEQ ID NO: 1155675 - RNA, 19 nt, Artificial Sequence
  Description of Artificial Sequence: Synthetic oligonucleotide
  Antisense strand to SEQ ID NO: 1155674
auaaguauacuuugaucac

SEQ ID NO: 1155676 - RNA, 19 nt, Artificial Sequence
  Description of Artificial Sequence: Synthetic oligonucleotide
  Sense strand starting at position 109 of SEQ ID NO: 916425
cauggaaugguuugucaau

SEQ ID NO: 1155677 - RNA, 19 nt, Artificial Sequence
  Description of Artificial Sequence: Synthetic oligonucleotide
  Antisense strand to SEQ ID NO: 1155676
auugacaaaccauuccaug

SEQ ID NO: 1155678 - RNA, 19 nt, Artificial Sequence
  Description of Artificial Sequence: Synthetic oligonucleotide
  Sense strand starting at position 110 of SEQ ID NO: 916425
auggaaugguuugucaaua

SEQ ID NO: 1155679 - RNA, 19 nt, Artificial Sequence
  Description of Artificial Sequence: Synthetic oligonucleotide
  Antisense strand to SEQ ID NO: 1155678
uauugacaaaccauuccau

SEQ ID NO: 1155680 - RNA, 19 nt, Artificial Sequence
  Description of Artificial Sequence: Synthetic oligonucleotide
  Sense strand starting at position 111 of SEQ ID NO: 916425
uggaaugguuugucaauaa

SEQ ID NO: 1155681 - RNA, 19 nt, Artificial Sequence
  Description of Artificial Sequence: Synthetic oligonucleotide
  Antisense strand to SEQ ID NO: 1155680
uuauugacaaaccauucca

SEQ ID NO: 1155682 - RNA, 19 nt, Artificial Sequence
  Description of Artificial Sequence: Synthetic oligonucleotide
  Sense strand starting at position 115 of SEQ ID NO: 916425
augguuugucaauaaguuu

SEQ ID NO: 1155683 - RNA, 19 nt, Artificial Sequence
  Description of Artificial Sequence: Synthetic oligonucleotide
  Antisense strand to SEQ ID NO: 1155682
aaacuuauugacaaaccau

SEQ ID NO: 1155684 - RNA, 19 nt, Artificial Sequence
  Description of Artificial Sequence: Synthetic oligonucleotide
  Sense strand starting at position 251 of SEQ ID NO: 916425
auaugaguaucugaagaua

SEQ ID NO: 1155685 - RNA, 19 nt, Artificial Sequence
  Description of Artificial Sequence: Synthetic oligonucleotide
  Antisense strand to SEQ ID NO: 1155684
uaucuucagauacucauau

SEQ ID NO: 1155686 - RNA, 19 nt, Artificial Sequence
  Description of Artificial Sequence: Synthetic oligonucleotide
  Sense strand starting at position 308 of SEQ ID NO: 916425
uuauucuucccaggagcau

SEQ ID NO: 1155687 - RNA, 19 nt, Artificial Sequence
  Description of Artificial Sequence: Synthetic oligonucleotide
  Antisense strand to SEQ ID NO: 1155686
augcuccugggaagaauaa

SEQ ID NO: 1155688 - RNA, 19 nt, Artificial Sequence
  Description of Artificial Sequence: Synthetic oligonucleotide
  Sense strand starting at position 1009 of SEQ ID NO: 916425
ugagcaucugcugagcaaa

SEQ ID NO: 1155689 - RNA, 19 nt, Artificial Sequence
  Description of Artificial Sequence: Synthetic oligonucleotide
  Antisense strand to SEQ ID NO: 1155688
uuugcucagcagaugcuca

SEQ ID NO: 1155690 - RNA, 19 nt, Artificial Sequence
  Description of Artificial Sequence: Synthetic oligonucleotide
  Sense strand starting at position 1046 of SEQ ID NO: 916425
cucauuauuuggucagcua

SEQ ID NO: 1155691 - RNA, 19 nt, Artificial Sequence
  Description of Artificial Sequence: Synthetic oligonucleotide
  Antisense strand to SEQ ID NO: 1155690
uagcugaccaaauaaugag

SEQ ID NO: 1155692 - RNA, 19 nt, Artificial Sequence
  Description of Artificial Sequence: Synthetic oligonucleotide
  Sense strand starting at position 1087 of SEQ ID NO: 916425
gaaauuaugugaccugcaa

SEQ ID NO: 1155693 - RNA, 19 nt, Artificial Sequence
  Description of Artificial Sequence: Synthetic oligonucleotide
  Antisense strand to SEQ ID NO: 1155692
uugcaggucacauaauuuc

SEQ ID NO: 1155694 - RNA, 19 nt, Artificial Sequence
  Description of Artificial Sequence: Synthetic oligonucleotide
  Sense strand starting at position 1161 of SEQ ID NO: 916425
gaguuagaguuguuucuaa

SEQ ID NO: 1155695 - RNA, 19 nt, Artificial Sequence
  Description of Artificial Sequence: Synthetic oligonucleotide
  Antisense strand to SEQ ID NO: 1155694
uuagaaacaacucuaacuc

SEQ ID NO: 1155696 - RNA, 19 nt, Artificial Sequence
  Description of Artificial Sequence: Synthetic oligonucleotide
  Sense strand starting at position 1200 of SEQ ID NO: 916425
acacaugcuuccuuggcaa

SEQ ID NO: 1155697 - RNA, 19 nt, Artificial Sequence
  Description of Artificial Sequence: Synthetic oligonucleotide
  Antisense strand to SEQ ID NO: 1155696
uugccaaggaagcaugugu

SEQ ID NO: 1155698 - RNA, 19 nt, Artificial Sequence
  Description of Artificial Sequence: Synthetic oligonucleotide
  Sense strand starting at position 1422 of SEQ ID NO: 916425
uuagauaaacuuggaaugu

SEQ ID NO: 1155699 - RNA, 19 nt, Artificial Sequence
  Description of Artificial Sequence: Synthetic oligonucleotide
  Antisense strand to SEQ ID NO: 1155698
acauuccaaguuuaucuaa

SEQ ID NO: 1155700 - RNA, 19 nt, Artificial Sequence
  Description of Artificial Sequence: Synthetic oligonucleotide
  Sense strand starting at position 1453 of SEQ ID NO: 916425
cuaagaagccucgggucaa

SEQ ID NO: 1155701 - RNA, 19 nt, Artificial Sequence
  Description of Artificial Sequence: Synthetic oligonucleotide
  Antisense strand to SEQ ID NO: 1155700
uugacccgaggcuucuuag

SEQ ID NO: 1155702 - RNA, 19 nt, Artificial Sequence
  Description of Artificial Sequence: Synthetic oligonucleotide
  Sense strand starting at position 1548 of SEQ ID NO: 916425
agaguuaaauaucuguaug

SEQ ID NO: 1155703 - RNA, 19 nt, Artificial Sequence
  Description of Artificial Sequence: Synthetic oligonucleotide
  Antisense strand to SEQ ID NO: 1155702
cauacagauauuuaacucu

SEQ ID NO: 1155704 - RNA, 19 nt, Artificial Sequence
  Description of Artificial Sequence: Synthetic oligonucleotide
  Sense strand starting at position 1550 of SEQ ID NO: 916425
aguuaaauaucuguaugcu

SEQ ID NO: 1155705 - RNA, 19 nt, Artificial Sequence
  Description of Artificial Sequence: Synthetic oligonucleotide
  Antisense strand to SEQ ID NO: 1155704
agcauacagauauuuaacu

SEQ ID NO: 1155706 - RNA, 19 nt, Artificial Sequence
  Description of Artificial Sequence: Synthetic oligonucleotide
  Sense strand starting at position 1551 of SEQ ID NO: 916425
guuaaauaucuguaugcua

SEQ ID NO: 1155707 - RNA, 19 nt, Artificial Sequence
  Description of Artificial Sequence: Synthetic oligonucleotide
  Antisense strand to SEQ ID NO: 1155706
uagcauacagauauuuaac

SEQ ID NO: 1155708 - RNA, 19 nt, Artificial Sequence
  Description of Artificial Sequence: Synthetic oligonucleotide
  Sense strand starting at position 1578 of SEQ ID NO: 916425
cuggauugcucauuagaau

SEQ ID NO: 1155709 - RNA, 19 nt, Artificial Sequence
  Description of Artificial Sequence: Synthetic oligonucleotide
  Antisense strand to SEQ ID NO: 1155708
auucuaaugagcaauccag

SEQ ID NO: 1155710 - RNA, 19 nt, Artificial Sequence
  Description of Artificial Sequence: Synthetic oligonucleotide
  Sense strand starting at position 1680 of SEQ ID NO: 916425
uaaugcaaagcuugugagu

SEQ ID NO: 1155711 - RNA, 19 nt, Artificial Sequence
  Description of Artificial Sequence: Synthetic oligonucleotide
  Antisense strand to SEQ ID NO: 1155710
acucacaagcuuugcauua

SEQ ID NO: 1155712 - RNA, 19 nt, Artificial Sequence
  Description of Artificial Sequence: Synthetic oligonucleotide
  Sense strand starting at position 2033 of SEQ ID NO: 916425
gggugaauauuacaauuaa

SEQ ID NO: 1155713 - RNA, 19 nt, Artificial Sequence
  Description of Artificial Sequence: Synthetic oligonucleotide
  Antisense strand to SEQ ID NO: 1155712
uuaauuguaauauucaccc

SEQ ID NO: 1155714 - RNA, 19 nt, Artificial Sequence
  Description of Artificial Sequence: Synthetic oligonucleotide
  Sense strand starting at position 2397 of SEQ ID NO: 916425
cauagaggucgaugacuau

SEQ ID NO: 1155715 - RNA, 19 nt, Artificial Sequence
  Description of Artificial Sequence: Synthetic oligonucleotide
  Antisense strand to SEQ ID NO: 1155714
auagucaucgaccucuaug

SEQ ID NO: 1155716 - RNA, 19 nt, Artificial Sequence
  Description of Artificial Sequence: Synthetic oligonucleotide
  Sense strand starting at position 2400 of SEQ ID NO: 916425
agaggucgaugacuauaga

SEQ ID NO: 1155717 - RNA, 19 nt, Artificial Sequence
  Description of Artificial Sequence: Synthetic oligonucleotide
  Antisense strand to SEQ ID NO: 1155716
ucuauagucaucgaccucu

SEQ ID NO: 1155718 - RNA, 19 nt, Artificial Sequence
  Description of Artificial Sequence: Synthetic oligonucleotide
  Sense strand starting at position 2464 of SEQ ID NO: 916425
uucuguucucugugaaucu

SEQ ID NO: 1155719 - RNA, 19 nt, Artificial Sequence
  Description of Artificial Sequence: Synthetic oligonucleotide
  Antisense strand to SEQ ID NO: 1155718
agauucacagagaacagaa

SEQ ID NO: 1155720 - RNA, 19 nt, Artificial Sequence
  Description of Artificial Sequence: Synthetic oligonucleotide
  Sense strand starting at position 2471 of SEQ ID NO: 916425
cucugugaaucuuuaggca

SEQ ID NO: 1155721 - RNA, 19 nt, Artificial Sequence
  Description of Artificial Sequence: Synthetic oligonucleotide
  Antisense strand to SEQ ID NO: 1155720
ugccuaaagauucacagag

SEQ ID NO: 1155722 - RNA, 19 nt, Artificial Sequence
  Description of Artificial Sequence: Synthetic oligonucleotide
  Sense strand starting at position 2480 of SEQ ID NO: 916425
ucuuuaggcaugggaggaa

SEQ ID NO: 1155723 - RNA, 19 nt, Artificial Sequence
  Description of Artificial Sequence: Synthetic oligonucleotide
  Antisense strand to SEQ ID NO: 1155722
uuccucccaugccuaaaga

SEQ ID NO: 1155724 - RNA, 19 nt, Artificial Sequence
  Description of Artificial Sequence: Synthetic oligonucleotide
  Sense strand starting at position 2532 of SEQ ID NO: 916425
gugaguaugacuuagucac

SEQ ID NO: 1155725 - RNA, 19 nt, Artificial Sequence
  Description of Artificial Sequence: Synthetic oligonucleotide
  Antisense strand to SEQ ID NO: 1155724
gugacuaagucauacucac

SEQ ID NO: 1155726 - RNA, 19 nt, Artificial Sequence
  Description of Artificial Sequence: Synthetic oligonucleotide
  Sense strand starting at position 2534 of SEQ ID NO: 916425
gaguaugacuuagucaccu

SEQ ID NO: 1155727 - RNA, 19 nt, Artificial Sequence
  Description of Artificial Sequence: Synthetic oligonucleotide
  Antisense strand to SEQ ID NO: 1155726
aggugacuaagucauacuc

SEQ ID NO: 1155728 - RNA, 19 nt, Artificial Sequence
  Description of Artificial Sequence: Synthetic oligonucleotide
  Sense strand starting at position 2552 of SEQ ID NO: 916425
uagugaugguauucuagau

SEQ ID NO: 1155729 - RNA, 19 nt, Artificial Sequence
  Description of Artificial Sequence: Synthetic oligonucleotide
  Antisense strand to SEQ ID NO: 1155728
aucuagaauaccaucacua

SEQ ID NO: 1155730 - RNA, 19 nt, Artificial Sequence
  Description of Artificial Sequence: Synthetic oligonucleotide
  Sense strand starting at position 2556 of SEQ ID NO: 916425
gaugguauucuagauuacg

SEQ ID NO: 1155731 - RNA, 19 nt, Artificial Sequence
  Description of Artificial Sequence: Synthetic oligonucleotide
  Antisense strand to SEQ ID NO: 1155730
cguaaucuagaauaccauc

SEQ ID NO: 1155732 - RNA, 19 nt, Artificial Sequence
  Description of Artificial Sequence: Synthetic oligonucleotide
  Sense strand starting at position 2689 of SEQ ID NO: 916425
gcugccagagaguauguau

SEQ ID NO: 1155733 - RNA, 19 nt, Artificial Sequence
  Description of Artificial Sequence: Synthetic oligonucleotide
  Antisense strand to SEQ ID NO: 1155732
auacauacucucuggcagc

SEQ ID NO: 1155734 - RNA, 19 nt, Artificial Sequence
  Description of Artificial Sequence: Synthetic oligonucleotide
  Sense strand starting at position 2821 of SEQ ID NO: 916425
gcaggagaacuguaaugca

SEQ ID NO: 1155735 - RNA, 19 nt, Artificial Sequence
  Description of Artificial Sequence: Synthetic oligonucleotide
  Antisense strand to SEQ ID NO: 1155734
ugcauuacaguucuccugc

SEQ ID NO: 1155736 - RNA, 19 nt, Artificial Sequence
  Description of Artificial Sequence: Synthetic oligonucleotide
  Sense strand starting at position 2836 of SEQ ID NO: 916425
ugcagaaaugguuaggagu

SEQ ID NO: 1155737 - RNA, 19 nt, Artificial Sequence
  Description of Artificial Sequence: Synthetic oligonucleotide
  Antisense strand to SEQ ID NO: 1155736
acuccuaaccauuucugca

SEQ ID NO: 1155738 - RNA, 19 nt, Artificial Sequence
  Description of Artificial Sequence: Synthetic oligonucleotide
  Sense strand starting at position 2926 of SEQ ID NO: 916425
ggcacugagaagcaguaaa

SEQ ID NO: 1155739 - RNA, 19 nt, Artificial Sequence
  Description of Artificial Sequence: Synthetic oligonucleotide
  Antisense strand to SEQ ID NO: 1155738
uuuacugcuucucagugcc

SEQ ID NO: 1155740 - RNA, 19 nt, Artificial Sequence
  Description of Artificial Sequence: Synthetic oligonucleotide
  Sense strand starting at position 3017 of SEQ ID NO: 916425
agucuaaauuugcucgcuu

SEQ ID NO: 1155741 - RNA, 19 nt, Artificial Sequence
  Description of Artificial Sequence: Synthetic oligonucleotide
  Antisense strand to SEQ ID NO: 1155740
aagcgagcaaauuuagacu

SEQ ID NO: 1155742 - RNA, 19 nt, Artificial Sequence
  Description of Artificial Sequence: Synthetic oligonucleotide
  Sense strand starting at position 3018 of SEQ ID NO: 916425
gucuaaauuugcucgcuuu

SEQ ID NO: 1155743 - RNA, 19 nt, Artificial Sequence
  Description of Artificial Sequence: Synthetic oligonucleotide
  Antisense strand to SEQ ID NO: 1155742
aaagcgagcaaauuuagac

SEQ ID NO: 1155744 - RNA, 19 nt, Artificial Sequence
  Description of Artificial Sequence: Synthetic oligonucleotide
  Sense strand starting at position 3050 of SEQ ID NO: 916425
gcauaaucagccugugaua

SEQ ID NO: 1155745 - RNA, 19 nt, Artificial Sequence
  Description of Artificial Sequence: Synthetic oligonucleotide
  Antisense strand to SEQ ID NO: 1155744
uaucacaggcugauuaugc

SEQ ID NO: 1155746 - RNA, 19 nt, Artificial Sequence
  Description of Artificial Sequence: Synthetic oligonucleotide
  Sense strand starting at position 3052 of SEQ ID NO: 916425
auaaucagccugugauacu

SEQ ID NO: 1155747 - RNA, 19 nt, Artificial Sequence
  Description of Artificial Sequence: Synthetic oligonucleotide
  Antisense strand to SEQ ID NO: 1155746
aguaucacaggcugauuau

SEQ ID NO: 1155748 - RNA, 19 nt, Artificial Sequence
  Description of Artificial Sequence: Synthetic oligonucleotide
  Sense strand starting at position 3237 of SEQ ID NO: 916425
ccagaauacucauuauggu

SEQ ID NO: 1155749 - RNA, 19 nt, Artificial Sequence
  Description of Artificial Sequence: Synthetic oligonucleotide
  Antisense strand to SEQ ID NO: 1155748
accauaaugaguauucugg

SEQ ID NO: 1155750 - RNA, 19 nt, Artificial Sequence
  Description of Artificial Sequence: Synthetic oligonucleotide
  Sense strand starting at position 3272 of SEQ ID NO: 916425
uuucgaucugccuaagaac

SEQ ID NO: 1155751 - RNA, 19 nt, Artificial Sequence
  Description of Artificial Sequence: Synthetic oligonucleotide
  Antisense strand to SEQ ID NO: 1155750
guucuuaggcagaucgaaa

SEQ ID NO: 1155752 - RNA, 19 nt, Artificial Sequence
  Description of Artificial Sequence: Synthetic oligonucleotide
  Sense strand starting at position 3343 of SEQ ID NO: 916425
agagauuaaugguuuguaa

SEQ ID NO: 1155753 - RNA, 19 nt, Artificial Sequence
  Description of Artificial Sequence: Synthetic oligonucleotide
  Antisense strand to SEQ ID NO: 1155752
uuacaaaccauuaaucucu

SEQ ID NO: 1155754 - RNA, 19 nt, Artificial Sequence
  Description of Artificial Sequence: Synthetic oligonucleotide
  Sense strand starting at position 3445 of SEQ ID NO: 916425
gugaauaaauggcauuuga

SEQ ID NO: 1155755 - RNA, 19 nt, Artificial Sequence
  Description of Artificial Sequence: Synthetic oligonucleotide
  Antisense strand to SEQ ID NO: 1155754
ucaaaugccauuuauucac

SEQ ID NO: 1155756 - RNA, 19 nt, Artificial Sequence
  Description of Artificial Sequence: Synthetic oligonucleotide
  Sense strand starting at position 174 of SEQ ID NO: 916426
ggaagcucauaguuucuga

SEQ ID NO: 1155757 - RNA, 19 nt, Artificial Sequence
  Description of Artificial Sequence: Synthetic oligonucleotide
  Antisense strand to SEQ ID NO: 1155756
ucagaaacuaugagcuucc

SEQ ID NO: 1155758 - RNA, 19 nt, Artificial Sequence
  Description of Artificial Sequence: Synthetic oligonucleotide
  Sense strand starting at position 210 of SEQ ID NO: 916426
gguucuuaccggcaaugga

SEQ ID NO: 1155759 - RNA, 19 nt, Artificial Sequence
  Description of Artificial Sequence: Synthetic oligonucleotide
  Antisense strand to SEQ ID NO: 1155758
uccauugccgguaagaacc

SEQ ID NO: 1155760 - RNA, 19 nt, Artificial Sequence
  Description of Artificial Sequence: Synthetic oligonucleotide
  Sense strand starting at position 238 of SEQ ID NO: 916426
cuuagugcagaugaugaua

SEQ ID NO: 1155761 - RNA, 19 nt, Artificial Sequence
  Description of Artificial Sequence: Synthetic oligonucleotide
  Antisense strand to SEQ ID NO: 1155760
uaucaucaucugcacuaag

SEQ ID NO: 1155762 - RNA, 19 nt, Artificial Sequence
  Description of Artificial Sequence: Synthetic oligonucleotide
  Sense strand starting at position 289 of SEQ ID NO: 916426
uucugaggucuuuaacuac

SEQ ID NO: 1155763 - RNA, 19 nt, Artificial Sequence
  Description of Artificial Sequence: Synthetic oligonucleotide
  Antisense strand to SEQ ID NO: 1155762
guaguuaaagaccucagaa

SEQ ID NO: 1155764 - RNA, 19 nt, Artificial Sequence
  Description of Artificial Sequence: Synthetic oligonucleotide
  Sense strand starting at position 429 of SEQ ID NO: 916426
ccaacagauugcguuaaag

SEQ ID NO: 1155765 - RNA, 19 nt, Artificial Sequence
  Description of Artificial Sequence: Synthetic oligonucleotide
  Antisense strand to SEQ ID NO: 1155764
cuuuaacgcaaucuguugg

SEQ ID NO: 1155766 - RNA, 19 nt, Artificial Sequence
  Description of Artificial Sequence: Synthetic oligonucleotide
  Sense strand starting at position 431 of SEQ ID NO: 916426
aacagauugcguuaaaguc

SEQ ID NO: 1155767 - RNA, 19 nt, Artificial Sequence
  Description of Artificial Sequence: Synthetic oligonucleotide
  Antisense strand to SEQ ID NO: 1155766
gacuuuaacgcaaucuguu

SEQ ID NO: 1155768 - RNA, 19 nt, Artificial Sequence
  Description of Artificial Sequence: Synthetic oligonucleotide
  Sense strand starting at position 502 of SEQ ID NO: 916426
acuguacucucagcaggau

SEQ ID NO: 1155769 - RNA, 19 nt, Artificial Sequence
  Description of Artificial Sequence: Synthetic oligonucleotide
  Antisense strand to SEQ ID NO: 1155768
auccugcugagaguacagu

SEQ ID NO: 1155770 - RNA, 19 nt, Artificial Sequence
  Description of Artificial Sequence: Synthetic oligonucleotide
  Sense strand starting at position 1059 of SEQ ID NO: 916426
cgccgcuuucgaucucgaa

SEQ ID NO: 1155771 - RNA, 19 nt, Artificial Sequence
  Description of Artificial Sequence: Synthetic oligonucleotide
  Antisense strand to SEQ ID NO: 1155770
uucgagaucgaaagcggcg

SEQ ID NO: 1155772 - RNA, 19 nt, Artificial Sequence
  Description of Artificial Sequence: Synthetic oligonucleotide
  Sense strand starting at position 1563 of SEQ ID NO: 916426
ggaagaaaguguucuguuc

SEQ ID NO: 1155773 - RNA, 19 nt, Artificial Sequence
  Description of Artificial Sequence: Synthetic oligonucleotide
  Antisense strand to SEQ ID NO: 1155772
gaacagaacacuuucuucc

SEQ ID NO: 1155774 - RNA, 19 nt, Artificial Sequence
  Description of Artificial Sequence: Synthetic oligonucleotide
  Sense strand starting at position 2306 of SEQ ID NO: 916426
aaauguuugggauguaauu

SEQ ID NO: 1155775 - RNA, 19 nt, Artificial Sequence
  Description of Artificial Sequence: Synthetic oligonucleotide
  Antisense strand to SEQ ID NO: 1155774
aauuacaucccaaacauuu

SEQ ID NO: 1155776 - RNA, 19 nt, Artificial Sequence
  Description of Artificial Sequence: Synthetic oligonucleotide
  Sense strand starting at position 2308 of SEQ ID NO: 916426
auguuugggauguaauuac

SEQ ID NO: 1155777 - RNA, 19 nt, Artificial Sequence
  Description of Artificial Sequence: Synthetic oligonucleotide
  Antisense strand to SEQ ID NO: 1155776
guaauuacaucccaaacau

SEQ ID NO: 1155778 - RNA, 19 nt, Artificial Sequence
  Description of Artificial Sequence: Synthetic oligonucleotide
  Sense strand starting at position 2330 of SEQ ID NO: 916426
ugcaguuaauuucuguuga

SEQ ID NO: 1155779 - RNA, 19 nt, Artificial Sequence
  Description of Artificial Sequence: Synthetic oligonucleotide
  Antisense strand to SEQ ID NO: 1155778
ucaacagaaauuaacugca

SEQ ID NO: 1155780 - RNA, 19 nt, Artificial Sequence
  Description of Artificial Sequence: Synthetic oligonucleotide
  Sense strand starting at position 2355 of SEQ ID NO: 916426
ucggaauguugaccuauaa

SEQ ID NO: 1155781 - RNA, 19 nt, Artificial Sequence
  Description of Artificial Sequence: Synthetic oligonucleotide
  Antisense strand to SEQ ID NO: 1155780
uuauaggucaacauuccga

SEQ ID NO: 1155782 - RNA, 19 nt, Artificial Sequence
  Description of Artificial Sequence: Synthetic oligonucleotide
  Sense strand starting at position 2435 of SEQ ID NO: 916426
ugaguauauugccuggaga

SEQ ID NO: 1155783 - RNA, 19 nt, Artificial Sequence
  Description of Artificial Sequence: Synthetic oligonucleotide
  Antisense strand to SEQ ID NO: 1155782
ucuccaggcaauauacuca

SEQ ID NO: 1155784 - RNA, 19 nt, Artificial Sequence
  Description of Artificial Sequence: Synthetic oligonucleotide
  Sense strand starting at position 2436 of SEQ ID NO: 916426
gaguauauugccuggagaa

SEQ ID NO: 1155785 - RNA, 19 nt, Artificial Sequence
  Description of Artificial Sequence: Synthetic oligonucleotide
  Antisense strand to SEQ ID NO: 1155784
uucuccaggcaauauacuc

SEQ ID NO: 1155786 - RNA, 19 nt, Artificial Sequence
  Description of Artificial Sequence: Synthetic oligonucleotide
  Sense strand starting at position 2437 of SEQ ID NO: 916426
aguauauugccuggagaaa

SEQ ID NO: 1155787 - RNA, 19 nt, Artificial Sequence
  Description of Artificial Sequence: Synthetic oligonucleotide
  Antisense strand to SEQ ID NO: 1155786
uuucuccaggcaauauacu

SEQ ID NO: 1155788 - RNA, 19 nt, Artificial Sequence
  Description of Artificial Sequence: Synthetic oligonucleotide
  Sense strand starting at position 2566 of SEQ ID NO: 916426
caguaaauguagcuuagaa

SEQ ID NO: 1155789 - RNA, 19 nt, Artificial Sequence
  Description of Artificial Sequence: Synthetic oligonucleotide
  Antisense strand to SEQ ID NO: 1155788
uucuaagcuacauuuacug

SEQ ID NO: 1155790 - RNA, 19 nt, Artificial Sequence
  Description of Artificial Sequence: Synthetic oligonucleotide
  Sense strand starting at position 2568 of SEQ ID NO: 916426
guaaauguagcuuagaaac

SEQ ID NO: 1155791 - RNA, 19 nt, Artificial Sequence
  Description of Artificial Sequence: Synthetic oligonucleotide
  Antisense strand to SEQ ID NO: 1155790
guuucuaagcuacauuuac

SEQ ID NO: 1155792 - RNA, 19 nt, Artificial Sequence
  Description of Artificial Sequence: Synthetic oligonucleotide
  Sense strand starting at position 2773 of SEQ ID NO: 916426
agagaugccacuuaucgau

SEQ ID NO: 1155793 - RNA, 19 nt, Artificial Sequence
  Description of Artificial Sequence: Synthetic oligonucleotide
  Antisense strand to SEQ ID NO: 1155792
aucgauaaguggcaucucu

SEQ ID NO: 1155794 - RNA, 19 nt, Artificial Sequence
  Description of Artificial Sequence: Synthetic oligonucleotide
  Sense strand starting at position 2780 of SEQ ID NO: 916426
ccacuuaucgauugauuaa

SEQ ID NO: 1155795 - RNA, 19 nt, Artificial Sequence
  Description of Artificial Sequence: Synthetic oligonucleotide
  Antisense strand to SEQ ID NO: 1155794
uuaaucaaucgauaagugg

SEQ ID NO: 1155796 - RNA, 19 nt, Artificial Sequence
  Description of Artificial Sequence: Synthetic oligonucleotide
  Sense strand starting at position 2783 of SEQ ID NO: 916426
cuuaucgauugauuaacau

SEQ ID NO: 1155797 - RNA, 19 nt, Artificial Sequence
  Description of Artificial Sequence: Synthetic oligonucleotide
  Antisense strand to SEQ ID NO: 1155796
auguuaaucaaucgauaag

SEQ ID NO: 1155798 - RNA, 19 nt, Artificial Sequence
  Description of Artificial Sequence: Synthetic oligonucleotide
  Sense strand starting at position 2798 of SEQ ID NO: 916426
acauauaugccaggaauug

SEQ ID NO: 1155799 - RNA, 19 nt, Artificial Sequence
  Description of Artificial Sequence: Synthetic oligonucleotide
  Antisense strand to SEQ ID NO: 1155798
caauuccuggcauauaugu

SEQ ID NO: 1155800 - RNA, 19 nt, Artificial Sequence
  Description of Artificial Sequence: Synthetic oligonucleotide
  Sense strand starting at position 2890 of SEQ ID NO: 916426
cuguaaucuagugggagau

SEQ ID NO: 1155801 - RNA, 19 nt, Artificial Sequence
  Description of Artificial Sequence: Synthetic oligonucleotide
  Antisense strand to SEQ ID NO: 1155800
aucucccacuagauuacag

SEQ ID NO: 1155802 - RNA, 19 nt, Artificial Sequence
  Description of Artificial Sequence: Synthetic oligonucleotide
  Sense strand starting at position 2925 of SEQ ID NO: 916426
ugacuuuagagucaguuga

SEQ ID NO: 1155803 - RNA, 19 nt, Artificial Sequence
  Description of Artificial Sequence: Synthetic oligonucleotide
  Antisense strand to SEQ ID NO: 1155802
ucaacugacucuaaaguca

SEQ ID NO: 1155804 - RNA, 19 nt, Artificial Sequence
  Description of Artificial Sequence: Synthetic oligonucleotide
  Sense strand starting at position 2927 of SEQ ID NO: 916426
acuuuagagucaguugauc

SEQ ID NO: 1155805 - RNA, 19 nt, Artificial Sequence
  Description of Artificial Sequence: Synthetic oligonucleotide
  Antisense strand to SEQ ID NO: 1155804
gaucaacugacucuaaagu

SEQ ID NO: 1155806 - RNA, 19 nt, Artificial Sequence
  Description of Artificial Sequence: Synthetic oligonucleotide
  Sense strand starting at position 2929 of SEQ ID NO: 916426
uuuagagucaguugaucag

SEQ ID NO: 1155807 - RNA, 19 nt, Artificial Sequence
  Description of Artificial Sequence: Synthetic oligonucleotide
  Antisense strand to SEQ ID NO: 1155806
cugaucaacugacucuaaa

SEQ ID NO: 1155808 - RNA, 19 nt, Artificial Sequence
  Description of Artificial Sequence: Synthetic oligonucleotide
  Sense strand starting at position 2932 of SEQ ID NO: 916426
agagucaguugaucaggau

SEQ ID NO: 1155809 - RNA, 19 nt, Artificial Sequence
  Description of Artificial Sequence: Synthetic oligonucleotide
  Antisense strand to SEQ ID NO: 1155808
auccugaucaacugacucu

SEQ ID NO: 1155810 - RNA, 19 nt, Artificial Sequence
  Description of Artificial Sequence: Synthetic oligonucleotide
  Sense strand starting at position 2933 of SEQ ID NO: 916426
gagucaguugaucaggauu

SEQ ID NO: 1155811 - RNA, 19 nt, Artificial Sequence
  Description of Artificial Sequence: Synthetic oligonucleotide
  Antisense strand to SEQ ID NO: 1155810
aauccugaucaacugacuc

SEQ ID NO: 1155812 - RNA, 19 nt, Artificial Sequence
  Description of Artificial Sequence: Synthetic oligonucleotide
  Sense strand starting at position 2949 of SEQ ID NO: 916426
auuaaauuacgagagccuu

SEQ ID NO: 1155813 - RNA, 19 nt, Artificial Sequence
  Description of Artificial Sequence: Synthetic oligonucleotide
  Antisense strand to SEQ ID NO: 1155812
aaggcucucguaauuuaau

SEQ ID NO: 1155814 - RNA, 19 nt, Artificial Sequence
  Description of Artificial Sequence: Synthetic oligonucleotide
  Sense strand starting at position 3157 of SEQ ID NO: 916426
ugaauuguuugggcuaaca

SEQ ID NO: 1155815 - RNA, 19 nt, Artificial Sequence
  Description of Artificial Sequence: Synthetic oligonucleotide
  Antisense strand to SEQ ID NO: 1155814
uguuagcccaaacaauuca

SEQ ID NO: 1155816 - RNA, 19 nt, Artificial Sequence
  Description of Artificial Sequence: Synthetic oligonucleotide
  Sense strand starting at position 3330 of SEQ ID NO: 916426
gccaaagaugauuggccau

SEQ ID NO: 1155817 - RNA, 19 nt, Artificial Sequence
  Description of Artificial Sequence: Synthetic oligonucleotide
  Antisense strand to SEQ ID NO: 1155816
auggccaaucaucuuuggc

SEQ ID NO: 1155818 - RNA, 19 nt, Artificial Sequence
  Description of Artificial Sequence: Synthetic oligonucleotide
  Sense strand starting at position 3442 of SEQ ID NO: 916426
auuugagucuuagucaugu

SEQ ID NO: 1155819 - RNA, 19 nt, Artificial Sequence
  Description of Artificial Sequence: Synthetic oligonucleotide
  Antisense strand to SEQ ID NO: 1155818
acaugacuaagacucaaau

SEQ ID NO: 1155820 - RNA, 19 nt, Artificial Sequence
  Description of Artificial Sequence: Synthetic oligonucleotide
  Sense strand starting at position 3444 of SEQ ID NO: 916426
uugagucuuagucauguac

SEQ ID NO: 1155821 - RNA, 19 nt, Artificial Sequence
  Description of Artificial Sequence: Synthetic oligonucleotide
  Antisense strand to SEQ ID NO: 1155820
guacaugacuaagacucaa

SEQ ID NO: 1155822 - RNA, 19 nt, Artificial Sequence
  Description of Artificial Sequence: Synthetic oligonucleotide
  Sense strand starting at position 3505 of SEQ ID NO: 916426
ucugucauacaauggaaau

SEQ ID NO: 1155823 - RNA, 19 nt, Artificial Sequence
  Description of Artificial Sequence: Synthetic oligonucleotide
  Antisense strand to SEQ ID NO: 1155822
auuuccauuguaugacaga

SEQ ID NO: 1155824 - RNA, 19 nt, Artificial Sequence
  Description of Artificial Sequence: Synthetic oligonucleotide
  Sense strand starting at position 3607 of SEQ ID NO: 916426
uggagucauacaugugacu

SEQ ID NO: 1155825 - RNA, 19 nt, Artificial Sequence
  Description of Artificial Sequence: Synthetic oligonucleotide
  Antisense strand to SEQ ID NO: 1155824
agucacauguaugacucca

SEQ ID NO: 1155826 - RNA, 19 nt, Artificial Sequence
  Description of Artificial Sequence: Synthetic oligonucleotide
  Sense strand starting at position 3771 of SEQ ID NO: 916426
gugagcaaaccauaagcuu

SEQ ID NO: 1155827 - RNA, 19 nt, Artificial Sequence
  Description of Artificial Sequence: Synthetic oligonucleotide
  Antisense strand to SEQ ID NO: 1155826
aagcuuaugguuugcucac

SEQ ID NO: 1155828 - RNA, 19 nt, Artificial Sequence
  Description of Artificial Sequence: Synthetic oligonucleotide
  Sense strand starting at position 3906 of SEQ ID NO: 916426
uugagaugagcgcaaugau

SEQ ID NO: 1155829 - RNA, 19 nt, Artificial Sequence
  Description of Artificial Sequence: Synthetic oligonucleotide
  Antisense strand to SEQ ID NO: 1155828
aucauugcgcucaucucaa

SEQ ID NO: 1155830 - RNA, 19 nt, Artificial Sequence
  Description of Artificial Sequence: Synthetic oligonucleotide
  Sense strand starting at position 3920 of SEQ ID NO: 916426
augauaccagaguguguua

SEQ ID NO: 1155831 - RNA, 19 nt, Artificial Sequence
  Description of Artificial Sequence: Synthetic oligonucleotide
  Antisense strand to SEQ ID NO: 1155830
uaacacacucugguaucau

SEQ ID NO: 1155832 - RNA, 19 nt, Artificial Sequence
  Description of Artificial Sequence: Synthetic oligonucleotide
  Sense strand starting at position 3922 of SEQ ID NO: 916426
gauaccagaguguguuaca

SEQ ID NO: 1155833 - RNA, 19 nt, Artificial Sequence
  Description of Artificial Sequence: Synthetic oligonucleotide
  Antisense strand to SEQ ID NO: 1155832
uguaacacacucugguauc

SEQ ID NO: 1155834 - RNA, 19 nt, Artificial Sequence
  Description of Artificial Sequence: Synthetic oligonucleotide
  Sense strand starting at position 3923 of SEQ ID NO: 916426
auaccagaguguguuacaa

SEQ ID NO: 1155835 - RNA, 19 nt, Artificial Sequence
  Description of Artificial Sequence: Synthetic oligonucleotide
  Antisense strand to SEQ ID NO: 1155834
uuguaacacacucugguau

SEQ ID NO: 1155836 - RNA, 19 nt, Artificial Sequence
  Description of Artificial Sequence: Synthetic oligonucleotide
  Sense strand starting at position 570 of SEQ ID NO: 916427
ucaaacuuguggucauaag

SEQ ID NO: 1155837 - RNA, 19 nt, Artificial Sequence
  Description of Artificial Sequence: Synthetic oligonucleotide
  Antisense strand to SEQ ID NO: 1155836
cuuaugaccacaaguuuga

SEQ ID NO: 1155838 - RNA, 19 nt, Artificial Sequence
  Description of Artificial Sequence: Synthetic oligonucleotide
  Sense strand starting at position 926 of SEQ ID NO: 916427
ccggcugaauuucuuuaca

SEQ ID NO: 1155839 - RNA, 19 nt, Artificial Sequence
  Description of Artificial Sequence: Synthetic oligonucleotide
  Antisense strand to SEQ ID NO: 1155838
uguaaagaaauucagccgg

SEQ ID NO: 1155840 - RNA, 19 nt, Artificial Sequence
  Description of Artificial Sequence: Synthetic oligonucleotide
  Sense strand starting at position 979 of SEQ ID NO: 916427
gcgucaucaccuuacauuu

SEQ ID NO: 1155841 - RNA, 19 nt, Artificial Sequence
  Description of Artificial Sequence: Synthetic oligonucleotide
  Antisense strand to SEQ ID NO: 1155840
aaauguaaggugaugacgc

SEQ ID NO: 1155842 - RNA, 19 nt, Artificial Sequence
  Description of Artificial Sequence: Synthetic oligonucleotide
  Sense strand starting at position 1073 of SEQ ID NO: 916427
acuuaacgacuguaaacuu

SEQ ID NO: 1155843 - RNA, 19 nt, Artificial Sequence
  Description of Artificial Sequence: Synthetic oligonucleotide
  Antisense strand to SEQ ID NO: 1155842
aaguuuacagucguuaagu

SEQ ID NO: 1155844 - RNA, 19 nt, Artificial Sequence
  Description of Artificial Sequence: Synthetic oligonucleotide
  Sense strand starting at position 1182 of SEQ ID NO: 916427
gccuuucuucgaguucuuu

SEQ ID NO: 1155845 - RNA, 19 nt, Artificial Sequence
  Description of Artificial Sequence: Synthetic oligonucleotide
  Antisense strand to SEQ ID NO: 1155844
aaagaacucgaagaaaggc

SEQ ID NO: 1155846 - RNA, 19 nt, Artificial Sequence
  Description of Artificial Sequence: Synthetic oligonucleotide
  Sense strand starting at position 1188 of SEQ ID NO: 916427
cuucgaguucuuuaaagac

SEQ ID NO: 1155847 - RNA, 19 nt, Artificial Sequence
  Description of Artificial Sequence: Synthetic oligonucleotide
  Antisense strand to SEQ ID NO: 1155846
gucuuuaaagaacucgaag

SEQ ID NO: 1155848 - RNA, 19 nt, Artificial Sequence
  Description of Artificial Sequence: Synthetic oligonucleotide
  Sense strand starting at position 1312 of SEQ ID NO: 916427
caacuacgucuguaaagag

SEQ ID NO: 1155849 - RNA, 19 nt, Artificial Sequence
  Description of Artificial Sequence: Synthetic oligonucleotide
  Antisense strand to SEQ ID NO: 1155848
cucuuuacagacguaguug

SEQ ID NO: 1155850 - RNA, 19 nt, Artificial Sequence
  Description of Artificial Sequence: Synthetic oligonucleotide
  Sense strand starting at position 1470 of SEQ ID NO: 916427
guguuacaaccugaaacca

SEQ ID NO: 1155851 - RNA, 19 nt, Artificial Sequence
  Description of Artificial Sequence: Synthetic oligonucleotide
  Antisense strand to SEQ ID NO: 1155850
ugguuucagguuguaacac

SEQ ID NO: 1155852 - RNA, 19 nt, Artificial Sequence
  Description of Artificial Sequence: Synthetic oligonucleotide
  Sense strand starting at position 1526 of SEQ ID NO: 916427
uguagacuccacgaaggua

SEQ ID NO: 1155853 - RNA, 19 nt, Artificial Sequence
  Description of Artificial Sequence: Synthetic oligonucleotide
  Antisense strand to SEQ ID NO: 1155852
uaccuucguggagucuaca

SEQ ID NO: 1155854 - RNA, 19 nt, Artificial Sequence
  Description of Artificial Sequence: Synthetic oligonucleotide
  Sense strand starting at position 1584 of SEQ ID NO: 916427
ugcauacuuguugaacgaa

SEQ ID NO: 1155855 - RNA, 19 nt, Artificial Sequence
  Description of Artificial Sequence: Synthetic oligonucleotide
  Antisense strand to SEQ ID NO: 1155854
uucguucaacaaguaugca

SEQ ID NO: 1155856 - RNA, 19 nt, Artificial Sequence
  Description of Artificial Sequence: Synthetic oligonucleotide
  Sense strand starting at position 1838 of SEQ ID NO: 916427
cggacuggagcucaaguau

SEQ ID NO: 1155857 - RNA, 19 nt, Artificial Sequence
  Description of Artificial Sequence: Synthetic oligonucleotide
  Antisense strand to SEQ ID NO: 1155856
auacuugagcuccaguccg

SEQ ID NO: 1155858 - RNA, 19 nt, Artificial Sequence
  Description of Artificial Sequence: Synthetic oligonucleotide
  Sense strand starting at position 1866 of SEQ ID NO: 916427
agugucaagaaacgaaauu

SEQ ID NO: 1155859 - RNA, 19 nt, Artificial Sequence
  Description of Artificial Sequence: Synthetic oligonucleotide
  Antisense strand to SEQ ID NO: 1155858
aauuucguuucuugacacu

SEQ ID NO: 1155860 - RNA, 19 nt, Artificial Sequence
  Description of Artificial Sequence: Synthetic oligonucleotide
  Sense strand starting at position 2290 of SEQ ID NO: 916427
ggacccuacuugucagaua

SEQ ID NO: 1155861 - RNA, 19 nt, Artificial Sequence
  Description of Artificial Sequence: Synthetic oligonucleotide
  Antisense strand to SEQ ID NO: 1155860
uaucugacaaguagggucc

SEQ ID NO: 1155862 - RNA, 19 nt, Artificial Sequence
  Description of Artificial Sequence: Synthetic oligonucleotide
  Sense strand starting at position 2336 of SEQ ID NO: 916427
gaccucagcguuuacauga

SEQ ID NO: 1155863 - RNA, 19 nt, Artificial Sequence
  Description of Artificial Sequence: Synthetic oligonucleotide
  Antisense strand to SEQ ID NO: 1155862
ucauguaaacgcugagguc

SEQ ID NO: 1155864 - RNA, 19 nt, Artificial Sequence
  Description of Artificial Sequence: Synthetic oligonucleotide
  Sense strand starting at position 2346 of SEQ ID NO: 916427
uuuacaugauacucaugua

SEQ ID NO: 1155865 - RNA, 19 nt, Artificial Sequence
  Description of Artificial Sequence: Synthetic oligonucleotide
  Antisense strand to SEQ ID NO: 1155864
uacaugaguaucauguaaa

SEQ ID NO: 1155866 - RNA, 19 nt, Artificial Sequence
  Description of Artificial Sequence: Synthetic oligonucleotide
  Sense strand starting at position 2456 of SEQ ID NO: 916427
gggugauggccucacagau

SEQ ID NO: 1155867 - RNA, 19 nt, Artificial Sequence
  Description of Artificial Sequence: Synthetic oligonucleotide
  Antisense strand to SEQ ID NO: 1155866
aucugugaggccaucaccc

SEQ ID NO: 1155868 - RNA, 19 nt, Artificial Sequence
  Description of Artificial Sequence: Synthetic oligonucleotide
  Sense strand starting at position 2543 of SEQ ID NO: 916427
acucaaagcgguuaccaaa

SEQ ID NO: 1155869 - RNA, 19 nt, Artificial Sequence
  Description of Artificial Sequence: Synthetic oligonucleotide
  Antisense strand to SEQ ID NO: 1155868
uuugguaaccgcuuugagu

SEQ ID NO: 1155870 - RNA, 19 nt, Artificial Sequence
  Description of Artificial Sequence: Synthetic oligonucleotide
  Sense strand starting at position 2692 of SEQ ID NO: 916427
gucuuagcucacgaauaac

SEQ ID NO: 1155871 - RNA, 19 nt, Artificial Sequence
  Description of Artificial Sequence: Synthetic oligonucleotide
  Antisense strand to SEQ ID NO: 1155870
guuauucgugagcuaagac

SEQ ID NO: 1155872 - RNA, 19 nt, Artificial Sequence
  Description of Artificial Sequence: Synthetic oligonucleotide
  Sense strand starting at position 2761 of SEQ ID NO: 916427
cuguguuguacucuugcuu

SEQ ID NO: 1155873 - RNA, 19 nt, Artificial Sequence
  Description of Artificial Sequence: Synthetic oligonucleotide
  Antisense strand to SEQ ID NO: 1155872
aagcaagaguacaacacag

SEQ ID NO: 1155874 - RNA, 19 nt, Artificial Sequence
  Description of Artificial Sequence: Synthetic oligonucleotide
  Sense strand starting at position 2782 of SEQ ID NO: 916427
aacacuugugaacgauaug

SEQ ID NO: 1155875 - RNA, 19 nt, Artificial Sequence
  Description of Artificial Sequence: Synthetic oligonucleotide
  Antisense strand to SEQ ID NO: 1155874
cauaucguucacaaguguu

SEQ ID NO: 1155876 - RNA, 19 nt, Artificial Sequence
  Description of Artificial Sequence: Synthetic oligonucleotide
  Sense strand starting at position 2785 of SEQ ID NO: 916427
acuugugaacgauaugggu

SEQ ID NO: 1155877 - RNA, 19 nt, Artificial Sequence
  Description of Artificial Sequence: Synthetic oligonucleotide
  Antisense strand to SEQ ID NO: 1155876
acccauaucguucacaagu

SEQ ID NO: 1155878 - RNA, 19 nt, Artificial Sequence
  Description of Artificial Sequence: Synthetic oligonucleotide
  Sense strand starting at position 2787 of SEQ ID NO: 916427
uugugaacgauauggguga

SEQ ID NO: 1155879 - RNA, 19 nt, Artificial Sequence
  Description of Artificial Sequence: Synthetic oligonucleotide
  Antisense strand to SEQ ID NO: 1155878
ucacccauaucguucacaa

SEQ ID NO: 1155880 - RNA, 19 nt, Artificial Sequence
  Description of Artificial Sequence: Synthetic oligonucleotide
  Sense strand starting at position 2791 of SEQ ID NO: 916427
gaacgauaugggugaguaa

SEQ ID NO: 1155881 - RNA, 19 nt, Artificial Sequence
  Description of Artificial Sequence: Synthetic oligonucleotide
  Antisense strand to SEQ ID NO: 1155880
uuacucacccauaucguuc

SEQ ID NO: 1155882 - RNA, 19 nt, Artificial Sequence
  Description of Artificial Sequence: Synthetic oligonucleotide
  Sense strand starting at position 2792 of SEQ ID NO: 916427
aacgauaugggugaguaau

SEQ ID NO: 1155883 - RNA, 19 nt, Artificial Sequence
  Description of Artificial Sequence: Synthetic oligonucleotide
  Antisense strand to SEQ ID NO: 1155882
auuacucacccauaucguu

SEQ ID NO: 1155884 - RNA, 19 nt, Artificial Sequence
  Description of Artificial Sequence: Synthetic oligonucleotide
  Sense strand starting at position 2794 of SEQ ID NO: 916427
cgauaugggugaguaauua

SEQ ID NO: 1155885 - RNA, 19 nt, Artificial Sequence
  Description of Artificial Sequence: Synthetic oligonucleotide
  Antisense strand to SEQ ID NO: 1155884
uaauuacucacccauaucg

SEQ ID NO: 1155886 - RNA, 19 nt, Artificial Sequence
  Description of Artificial Sequence: Synthetic oligonucleotide
  Sense strand starting at position 2798 of SEQ ID NO: 916427
augggugaguaauuaaugu

SEQ ID NO: 1155887 - RNA, 19 nt, Artificial Sequence
  Description of Artificial Sequence: Synthetic oligonucleotide
  Antisense strand to SEQ ID NO: 1155886
acauuaauuacucacccau

SEQ ID NO: 1155888 - RNA, 19 nt, Artificial Sequence
  Description of Artificial Sequence: Synthetic oligonucleotide
  Sense strand starting at position 2939 of SEQ ID NO: 916427
auuuguaagcaauguuucu

SEQ ID NO: 1155889 - RNA, 19 nt, Artificial Sequence
  Description of Artificial Sequence: Synthetic oligonucleotide
  Antisense strand to SEQ ID NO: 1155888
agaaacauugcuuacaaau

SEQ ID NO: 1155890 - RNA, 19 nt, Artificial Sequence
  Description of Artificial Sequence: Synthetic oligonucleotide
  Sense strand starting at position 2944 of SEQ ID NO: 916427
uaagcaauguuucuagaga

SEQ ID NO: 1155891 - RNA, 19 nt, Artificial Sequence
  Description of Artificial Sequence: Synthetic oligonucleotide
  Antisense strand to SEQ ID NO: 1155890
ucucuagaaacauugcuua

SEQ ID NO: 1155892 - RNA, 19 nt, Artificial Sequence
  Description of Artificial Sequence: Synthetic oligonucleotide
  Sense strand starting at position 2993 of SEQ ID NO: 916427
uaaugauggccugguaaac

SEQ ID NO: 1155893 - RNA, 19 nt, Artificial Sequence
  Description of Artificial Sequence: Synthetic oligonucleotide
  Antisense strand to SEQ ID NO: 1155892
guuuaccaggccaucauua

SEQ ID NO: 1155894 - RNA, 19 nt, Artificial Sequence
  Description of Artificial Sequence: Synthetic oligonucleotide
  Sense strand starting at position 3066 of SEQ ID NO: 916427
cuuuaaauuuguguccuuu

SEQ ID NO: 1155895 - RNA, 19 nt, Artificial Sequence
  Description of Artificial Sequence: Synthetic oligonucleotide
  Antisense strand to SEQ ID NO: 1155894
aaaggacacaaauuuaaag

SEQ ID NO: 1155896 - RNA, 19 nt, Artificial Sequence
  Description of Artificial Sequence: Synthetic oligonucleotide
  Sense strand starting at position 3091 of SEQ ID NO: 916427
ccaugcauaguauggaaau

SEQ ID NO: 1155897 - RNA, 19 nt, Artificial Sequence
  Description of Artificial Sequence: Synthetic oligonucleotide
  Antisense strand to SEQ ID NO: 1155896
auuuccauacuaugcaugg

SEQ ID NO: 1155898 - RNA, 19 nt, Artificial Sequence
  Description of Artificial Sequence: Synthetic oligonucleotide
  Sense strand starting at position 3120 of SEQ ID NO: 916427
agaauauagcaagguuaaa

SEQ ID NO: 1155899 - RNA, 19 nt, Artificial Sequence
  Description of Artificial Sequence: Synthetic oligonucleotide
  Antisense strand to SEQ ID NO: 1155898
uuuaaccuugcuauauucu

SEQ ID NO: 1155900 - RNA, 19 nt, Artificial Sequence
  Description of Artificial Sequence: Synthetic oligonucleotide
  Sense strand starting at position 3343 of SEQ ID NO: 916427
auauucugauaguccauau

SEQ ID NO: 1155901 - RNA, 19 nt, Artificial Sequence
  Description of Artificial Sequence: Synthetic oligonucleotide
  Antisense strand to SEQ ID NO: 1155900
auauggacuaucagaauau

SEQ ID NO: 1155902 - RNA, 19 nt, Artificial Sequence
  Description of Artificial Sequence: Synthetic oligonucleotide
  Sense strand starting at position 3365 of SEQ ID NO: 916427
cuguaucuuguuuaacaua

SEQ ID NO: 1155903 - RNA, 19 nt, Artificial Sequence
  Description of Artificial Sequence: Synthetic oligonucleotide
  Antisense strand to SEQ ID NO: 1155902
uauguuaaacaagauacag

SEQ ID NO: 1155904 - RNA, 19 nt, Artificial Sequence
  Description of Artificial Sequence: Synthetic oligonucleotide
  Sense strand starting at position 3482 of SEQ ID NO: 916427
uuacaagugcuuuaaacag

SEQ ID NO: 1155905 - RNA, 19 nt, Artificial Sequence
  Description of Artificial Sequence: Synthetic oligonucleotide
  Antisense strand to SEQ ID NO: 1155904
cuguuuaaagcacuuguaa

SEQ ID NO: 1155906 - RNA, 19 nt, Artificial Sequence
  Description of Artificial Sequence: Synthetic oligonucleotide
  Sense strand starting at position 3491 of SEQ ID NO: 916427
cuuuaaacagcugaguaaa

SEQ ID NO: 1155907 - RNA, 19 nt, Artificial Sequence
  Description of Artificial Sequence: Synthetic oligonucleotide
  Antisense strand to SEQ ID NO: 1155906
uuuacucagcuguuuaaag

SEQ ID NO: 1155908 - RNA, 19 nt, Artificial Sequence
  Description of Artificial Sequence: Synthetic oligonucleotide
  Sense strand starting at position 3690 of SEQ ID NO: 916427
ugggaaacuuuaucuccua

SEQ ID NO: 1155909 - RNA, 19 nt, Artificial Sequence
  Description of Artificial Sequence: Synthetic oligonucleotide
  Antisense strand to SEQ ID NO: 1155908
uaggagauaaaguuuccca

SEQ ID NO: 1155910 - RNA, 19 nt, Artificial Sequence
  Description of Artificial Sequence: Synthetic oligonucleotide
  Sense strand starting at position 3721 of SEQ ID NO: 916427
ggcuuaaggguccaacuaa

SEQ ID NO: 1155911 - RNA, 19 nt, Artificial Sequence
  Description of Artificial Sequence: Synthetic oligonucleotide
  Antisense strand to SEQ ID NO: 1155910
uuaguuggacccuuaagcc

SEQ ID NO: 1155912 - RNA, 19 nt, Artificial Sequence
  Description of Artificial Sequence: Synthetic oligonucleotide
  Sense strand starting at position 3856 of SEQ ID NO: 916427
cuacaugaugcagaacagu

SEQ ID NO: 1155913 - RNA, 19 nt, Artificial Sequence
  Description of Artificial Sequence: Synthetic oligonucleotide
  Antisense strand to SEQ ID NO: 1155912
acuguucugcaucauguag

SEQ ID NO: 1155914 - RNA, 19 nt, Artificial Sequence
  Description of Artificial Sequence: Synthetic oligonucleotide
  Sense strand starting at position 3976 of SEQ ID NO: 916427
gcccauucccuagauaaug

SEQ ID NO: 1155915 - RNA, 19 nt, Artificial Sequence
  Description of Artificial Sequence: Synthetic oligonucleotide
  Antisense strand to SEQ ID NO: 1155914
cauuaucuagggaaugggc

SEQ ID NO: 1155916 - RNA, 19 nt, Artificial Sequence
  Description of Artificial Sequence: Synthetic oligonucleotide
  Sense strand starting at position 22 of SEQ ID NO: 916428
gccaucgaucuagaacaaa

SEQ ID NO: 1155917 - RNA, 19 nt, Artificial Sequence
  Description of Artificial Sequence: Synthetic oligonucleotide
  Antisense strand to SEQ ID NO: 1155916
uuuguucuagaucgauggc

SEQ ID NO: 1155918 - RNA, 19 nt, Artificial Sequence
  Description of Artificial Sequence: Synthetic oligonucleotide
  Sense strand starting at position 33 of SEQ ID NO: 916428
agaacaaagucauagcuuu

SEQ ID NO: 1155919 - RNA, 19 nt, Artificial Sequence
  Description of Artificial Sequence: Synthetic oligonucleotide
  Antisense strand to SEQ ID NO: 1155918
aaagcuaugacuuuguucu

SEQ ID NO: 1155920 - RNA, 19 nt, Artificial Sequence
  Description of Artificial Sequence: Synthetic oligonucleotide
  Sense strand starting at position 84 of SEQ ID NO: 916428
ucagauuguagcugcaaga

SEQ ID NO: 1155921 - RNA, 19 nt, Artificial Sequence
  Description of Artificial Sequence: Synthetic oligonucleotide
  Antisense strand to SEQ ID NO: 1155920
ucuugcagcuacaaucuga

SEQ ID NO: 1155922 - RNA, 19 nt, Artificial Sequence
  Description of Artificial Sequence: Synthetic oligonucleotide
  Sense strand starting at position 133 of SEQ ID NO: 916428
gcguaauagccaggaaggu

SEQ ID NO: 1155923 - RNA, 19 nt, Artificial Sequence
  Description of Artificial Sequence: Synthetic oligonucleotide
  Antisense strand to SEQ ID NO: 1155922
accuuccuggcuauuacgc

SEQ ID NO: 1155924 - RNA, 19 nt, Artificial Sequence
  Description of Artificial Sequence: Synthetic oligonucleotide
  Sense strand starting at position 207 of SEQ ID NO: 916428
cucucuagccucuagauga

SEQ ID NO: 1155925 - RNA, 19 nt, Artificial Sequence
  Description of Artificial Sequence: Synthetic oligonucleotide
  Antisense strand to SEQ ID NO: 1155924
ucaucuagaggcuagagag

SEQ ID NO: 1155926 - RNA, 19 nt, Artificial Sequence
  Description of Artificial Sequence: Synthetic oligonucleotide
  Sense strand starting at position 349 of SEQ ID NO: 916428
ccucccuguucucuaggaa

SEQ ID NO: 1155927 - RNA, 19 nt, Artificial Sequence
  Description of Artificial Sequence: Synthetic oligonucleotide
  Antisense strand to SEQ ID NO: 1155926
uuccuagagaacagggagg

SEQ ID NO: 1155928 - RNA, 19 nt, Artificial Sequence
  Description of Artificial Sequence: Synthetic oligonucleotide
  Sense strand starting at position 350 of SEQ ID NO: 916428
cucccuguucucuaggaau

SEQ ID NO: 1155929 - RNA, 19 nt, Artificial Sequence
  Description of Artificial Sequence: Synthetic oligonucleotide
  Antisense strand to SEQ ID NO: 1155928
auuccuagagaacagggag

SEQ ID NO: 1155930 - RNA, 19 nt, Artificial Sequence
  Description of Artificial Sequence: Synthetic oligonucleotide
  Sense strand starting at position 402 of SEQ ID NO: 916428
gggugugccucugcaauau

SEQ ID NO: 1155931 - RNA, 19 nt, Artificial Sequence
  Description of Artificial Sequence: Synthetic oligonucleotide
  Antisense strand to SEQ ID NO: 1155930
auauugcagaggcacaccc

SEQ ID NO: 1155932 - RNA, 19 nt, Artificial Sequence
  Description of Artificial Sequence: Synthetic oligonucleotide
  Sense strand starting at position 516 of SEQ ID NO: 916428
cuuuccuguccucacagau

SEQ ID NO: 1155933 - RNA, 19 nt, Artificial Sequence
  Description of Artificial Sequence: Synthetic oligonucleotide
  Antisense strand to SEQ ID NO: 1155932
aucugugaggacaggaaag

SEQ ID NO: 1155934 - RNA, 19 nt, Artificial Sequence
  Description of Artificial Sequence: Synthetic oligonucleotide
  Sense strand starting at position 697 of SEQ ID NO: 916428
cauuuacuaucuggagaug

SEQ ID NO: 1155935 - RNA, 19 nt, Artificial Sequence
  Description of Artificial Sequence: Synthetic oligonucleotide
  Antisense strand to SEQ ID NO: 1155934
caucuccagauaguaaaug

SEQ ID NO: 1155936 - RNA, 19 nt, Artificial Sequence
  Description of Artificial Sequence: Synthetic oligonucleotide
  Sense strand starting at position 776 of SEQ ID NO: 916428
aagcaaggcugagaaagau

SEQ ID NO: 1155937 - RNA, 19 nt, Artificial Sequence
  Description of Artificial Sequence: Synthetic oligonucleotide
  Antisense strand to SEQ ID NO: 1155936
aucuuucucagccuugcuu

SEQ ID NO: 1155938 - RNA, 19 nt, Artificial Sequence
  Description of Artificial Sequence: Synthetic oligonucleotide
  Sense strand starting at position 827 of SEQ ID NO: 916428
cccagaauugaguagucca

SEQ ID NO: 1155939 - RNA, 19 nt, Artificial Sequence
  Description of Artificial Sequence: Synthetic oligonucleotide
  Antisense strand to SEQ ID NO: 1155938
uggacuacucaauucuggg

SEQ ID NO: 1155940 - RNA, 19 nt, Artificial Sequence
  Description of Artificial Sequence: Synthetic oligonucleotide
  Sense strand starting at position 830 of SEQ ID NO: 916428
agaauugaguaguccacuu

SEQ ID NO: 1155941 - RNA, 19 nt, Artificial Sequence
  Description of Artificial Sequence: Synthetic oligonucleotide
  Antisense strand to SEQ ID NO: 1155940
aaguggacuacucaauucu

SEQ ID NO: 1155942 - RNA, 19 nt, Artificial Sequence
  Description of Artificial Sequence: Synthetic oligonucleotide
  Sense strand starting at position 859 of SEQ ID NO: 916428
gguucaguugucgcucuaa

SEQ ID NO: 1155943 - RNA, 19 nt, Artificial Sequence
  Description of Artificial Sequence: Synthetic oligonucleotide
  Antisense strand to SEQ ID NO: 1155942
uuagagcgacaacugaacc

SEQ ID NO: 1155944 - RNA, 19 nt, Artificial Sequence
  Description of Artificial Sequence: Synthetic oligonucleotide
  Sense strand starting at position 862 of SEQ ID NO: 916428
ucaguugucgcucuaagug

SEQ ID NO: 1155945 - RNA, 19 nt, Artificial Sequence
  Description of Artificial Sequence: Synthetic oligonucleotide
  Antisense strand to SEQ ID NO: 1155944
cacuuagagcgacaacuga

SEQ ID NO: 1155946 - RNA, 19 nt, Artificial Sequence
  Description of Artificial Sequence: Synthetic oligonucleotide
  Sense strand starting at position 1203 of SEQ ID NO: 916428
agcugaguuugcccucaac

SEQ ID NO: 1155947 - RNA, 19 nt, Artificial Sequence
  Description of Artificial Sequence: Synthetic oligonucleotide
  Antisense strand to SEQ ID NO: 1155946
guugagggcaaacucagcu

SEQ ID NO: 1155948 - RNA, 19 nt, Artificial Sequence
  Description of Artificial Sequence: Synthetic oligonucleotide
  Sense strand starting at position 1206 of SEQ ID NO: 916428
ugaguuugcccucaaccca

SEQ ID NO: 1155949 - RNA, 19 nt, Artificial Sequence
  Description of Artificial Sequence: Synthetic oligonucleotide
  Antisense strand to SEQ ID NO: 1155948
uggguugagggcaaacuca

SEQ ID NO: 1155950 - RNA, 19 nt, Artificial Sequence
  Description of Artificial Sequence: Synthetic oligonucleotide
  Sense strand starting at position 1251 of SEQ ID NO: 916428
cgauuaucagacuaaggca

SEQ ID NO: 1155951 - RNA, 19 nt, Artificial Sequence
  Description of Artificial Sequence: Synthetic oligonucleotide
  Antisense strand to SEQ ID NO: 1155950
ugccuuagucugauaaucg

SEQ ID NO: 1155952 - RNA, 19 nt, Artificial Sequence
  Description of Artificial Sequence: Synthetic oligonucleotide
  Sense strand starting at position 1606 of SEQ ID NO: 916428
uggaauagcuguucucgca

SEQ ID NO: 1155953 - RNA, 19 nt, Artificial Sequence
  Description of Artificial Sequence: Synthetic oligonucleotide
  Antisense strand to SEQ ID NO: 1155952
ugcgagaacagcuauucca

SEQ ID NO: 1155954 - RNA, 19 nt, Artificial Sequence
  Description of Artificial Sequence: Synthetic oligonucleotide
  Sense strand starting at position 1638 of SEQ ID NO: 916428
guagucaggugcuuccaua

SEQ ID NO: 1155955 - RNA, 19 nt, Artificial Sequence
  Description of Artificial Sequence: Synthetic oligonucleotide
  Antisense strand to SEQ ID NO: 1155954
uauggaagcaccugacuac

SEQ ID NO: 1155956 - RNA, 19 nt, Artificial Sequence
  Description of Artificial Sequence: Synthetic oligonucleotide
  Sense strand starting at position 2052 of SEQ ID NO: 916428
gucguucaucgcuggagga

SEQ ID NO: 1155957 - RNA, 19 nt, Artificial Sequence
  Description of Artificial Sequence: Synthetic oligonucleotide
  Antisense strand to SEQ ID NO: 1155956
uccuccagcgaugaacgac

SEQ ID NO: 1155958 - RNA, 19 nt, Artificial Sequence
  Description of Artificial Sequence: Synthetic oligonucleotide
  Sense strand starting at position 2144 of SEQ ID NO: 916428
ugucucucuuaucugggaa

SEQ ID NO: 1155959 - RNA, 19 nt, Artificial Sequence
  Description of Artificial Sequence: Synthetic oligonucleotide
  Antisense strand to SEQ ID NO: 1155958
uucccagauaagagagaca

SEQ ID NO: 1155960 - RNA, 19 nt, Artificial Sequence
  Description of Artificial Sequence: Synthetic oligonucleotide
  Sense strand starting at position 2163 of SEQ ID NO: 916428
aagugaagguuccuggauu

SEQ ID NO: 1155961 - RNA, 19 nt, Artificial Sequence
  Description of Artificial Sequence: Synthetic oligonucleotide
  Antisense strand to SEQ ID NO: 1155960
aauccaggaaccuucacuu

SEQ ID NO: 1155962 - RNA, 19 nt, Artificial Sequence
  Description of Artificial Sequence: Synthetic oligonucleotide
  Sense strand starting at position 2164 of SEQ ID NO: 916428
agugaagguuccuggauuu

SEQ ID NO: 1155963 - RNA, 19 nt, Artificial Sequence
  Description of Artificial Sequence: Synthetic oligonucleotide
  Antisense strand to SEQ ID NO: 1155962
aaauccaggaaccuucacu

SEQ ID NO: 1155964 - RNA, 19 nt, Artificial Sequence
  Description of Artificial Sequence: Synthetic oligonucleotide
  Sense strand starting at position 2200 of SEQ ID NO: 916428
uuaguaugaccuugguuaa

SEQ ID NO: 1155965 - RNA, 19 nt, Artificial Sequence
  Description of Artificial Sequence: Synthetic oligonucleotide
  Antisense strand to SEQ ID NO: 1155964
uuaaccaaggucauacuaa

SEQ ID NO: 1155966 - RNA, 19 nt, Artificial Sequence
  Description of Artificial Sequence: Synthetic oligonucleotide
  Sense strand starting at position 2201 of SEQ ID NO: 916428
uaguaugaccuugguuaaa

SEQ ID NO: 1155967 - RNA, 19 nt, Artificial Sequence
  Description of Artificial Sequence: Synthetic oligonucleotide
  Antisense strand to SEQ ID NO: 1155966
uuuaaccaaggucauacua

SEQ ID NO: 1155968 - RNA, 19 nt, Artificial Sequence
  Description of Artificial Sequence: Synthetic oligonucleotide
  Sense strand starting at position 2203 of SEQ ID NO: 916428
guaugaccuugguuaaaug

SEQ ID NO: 1155969 - RNA, 19 nt, Artificial Sequence
  Description of Artificial Sequence: Synthetic oligonucleotide
  Antisense strand to SEQ ID NO: 1155968
cauuuaaccaaggucauac

SEQ ID NO: 1155970 - RNA, 19 nt, Artificial Sequence
  Description of Artificial Sequence: Synthetic oligonucleotide
  Sense strand starting at position 2213 of SEQ ID NO: 916428
gguuaaaugaaccguuuga

SEQ ID NO: 1155971 - RNA, 19 nt, Artificial Sequence
  Description of Artificial Sequence: Synthetic oligonucleotide
  Antisense strand to SEQ ID NO: 1155970
ucaaacgguucauuuaacc

SEQ ID NO: 1155972 - RNA, 19 nt, Artificial Sequence
  Description of Artificial Sequence: Synthetic oligonucleotide
  Sense strand starting at position 2217 of SEQ ID NO: 916428
aaaugaaccguuugaagca

SEQ ID NO: 1155973 - RNA, 19 nt, Artificial Sequence
  Description of Artificial Sequence: Synthetic oligonucleotide
  Antisense strand to SEQ ID NO: 1155972
ugcuucaaacgguucauuu

SEQ ID NO: 1155974 - RNA, 19 nt, Artificial Sequence
  Description of Artificial Sequence: Synthetic oligonucleotide
  Sense strand starting at position 2406 of SEQ ID NO: 916428
agaccuagugugugcuaga

SEQ ID NO: 1155975 - RNA, 19 nt, Artificial Sequence
  Description of Artificial Sequence: Synthetic oligonucleotide
  Antisense strand to SEQ ID NO: 1155974
ucuagcacacacuaggucu

SEQ ID NO: 1155976 - RNA, 19 nt, Artificial Sequence
  Description of Artificial Sequence: Synthetic oligonucleotide
  Sense strand starting at position 2407 of SEQ ID NO: 916428
gaccuagugugugcuagaa

SEQ ID NO: 1155977 - RNA, 19 nt, Artificial Sequence
  Description of Artificial Sequence: Synthetic oligonucleotide
  Antisense strand to SEQ ID NO: 1155976
uucuagcacacacuagguc

SEQ ID NO: 1155978 - RNA, 19 nt, Artificial Sequence
  Description of Artificial Sequence: Synthetic oligonucleotide
  Sense strand starting at position 2411 of SEQ ID NO: 916428
uagugugugcuagaacaaa

SEQ ID NO: 1155979 - RNA, 19 nt, Artificial Sequence
  Description of Artificial Sequence: Synthetic oligonucleotide
  Antisense strand to SEQ ID NO: 1155978
uuuguucuagcacacacua

SEQ ID NO: 1155980 - RNA, 19 nt, Artificial Sequence
  Description of Artificial Sequence: Synthetic oligonucleotide
  Sense strand starting at position 2465 of SEQ ID NO: 916428
ccuugcaacuuugugaaga

SEQ ID NO: 1155981 - RNA, 19 nt, Artificial Sequence
  Description of Artificial Sequence: Synthetic oligonucleotide
  Antisense strand to SEQ ID NO: 1155980
ucuucacaaaguugcaagg

SEQ ID NO: 1155982 - RNA, 19 nt, Artificial Sequence
  Description of Artificial Sequence: Synthetic oligonucleotide
  Sense strand starting at position 2467 of SEQ ID NO: 916428
uugcaacuuugugaagaaa

SEQ ID NO: 1155983 - RNA, 19 nt, Artificial Sequence
  Description of Artificial Sequence: Synthetic oligonucleotide
  Antisense strand to SEQ ID NO: 1155982
uuucuucacaaaguugcaa

SEQ ID NO: 1155984 - RNA, 19 nt, Artificial Sequence
  Description of Artificial Sequence: Synthetic oligonucleotide
  Sense strand starting at position 2515 of SEQ ID NO: 916428
ugagucaaacauuagcuaa

SEQ ID NO: 1155985 - RNA, 19 nt, Artificial Sequence
  Description of Artificial Sequence: Synthetic oligonucleotide
  Antisense strand to SEQ ID NO: 1155984
uuagcuaauguuugacuca

SEQ ID NO: 1155986 - RNA, 19 nt, Artificial Sequence
  Description of Artificial Sequence: Synthetic oligonucleotide
  Sense strand starting at position 2554 of SEQ ID NO: 916428
acuuuauagucguuaucuc

SEQ ID NO: 1155987 - RNA, 19 nt, Artificial Sequence
  Description of Artificial Sequence: Synthetic oligonucleotide
  Antisense strand to SEQ ID NO: 1155986
gagauaacgacuauaaagu

SEQ ID NO: 1155988 - RNA, 19 nt, Artificial Sequence
  Description of Artificial Sequence: Synthetic oligonucleotide
  Sense strand starting at position 2555 of SEQ ID NO: 916428
cuuuauagucguuaucuca

SEQ ID NO: 1155989 - RNA, 19 nt, Artificial Sequence
  Description of Artificial Sequence: Synthetic oligonucleotide
  Antisense strand to SEQ ID NO: 1155988
ugagauaacgacuauaaag

SEQ ID NO: 1155990 - RNA, 19 nt, Artificial Sequence
  Description of Artificial Sequence: Synthetic oligonucleotide
  Sense strand starting at position 2595 of SEQ ID NO: 916428
ucggacuccuagucucaaa

SEQ ID NO: 1155991 - RNA, 19 nt, Artificial Sequence
  Description of Artificial Sequence: Synthetic oligonucleotide
  Antisense strand to SEQ ID NO: 1155990
uuugagacuaggaguccga

SEQ ID NO: 1155992 - RNA, 19 nt, Artificial Sequence
  Description of Artificial Sequence: Synthetic oligonucleotide
  Sense strand starting at position 2701 of SEQ ID NO: 916428
ggaagauguugugauucag

SEQ ID NO: 1155993 - RNA, 19 nt, Artificial Sequence
  Description of Artificial Sequence: Synthetic oligonucleotide
  Antisense strand to SEQ ID NO: 1155992
cugaaucacaacaucuucc

SEQ ID NO: 1155994 - RNA, 19 nt, Artificial Sequence
  Description of Artificial Sequence: Synthetic oligonucleotide
  Sense strand starting at position 3433 of SEQ ID NO: 916428
ugcauaguucagugagcag

SEQ ID NO: 1155995 - RNA, 19 nt, Artificial Sequence
  Description of Artificial Sequence: Synthetic oligonucleotide
  Antisense strand to SEQ ID NO: 1155994
cugcucacugaacuaugca

SEQ ID NO: 1155996 - RNA, 19 nt, Artificial Sequence
  Description of Artificial Sequence: Synthetic oligonucleotide
  Sense strand starting at position 268 of SEQ ID NO: 916429
agcuguuugccagcaaugu

SEQ ID NO: 1155997 - RNA, 19 nt, Artificial Sequence
  Description of Artificial Sequence: Synthetic oligonucleotide
  Antisense strand to SEQ ID NO: 1155996
acauugcuggcaaacagcu

SEQ ID NO: 1155998 - RNA, 19 nt, Artificial Sequence
  Description of Artificial Sequence: Synthetic oligonucleotide
  Sense strand starting at position 347 of SEQ ID NO: 916429
ucucuaugacauggaucua

SEQ ID NO: 1155999 - RNA, 19 nt, Artificial Sequence
  Description of Artificial Sequence: Synthetic oligonucleotide
  Antisense strand to SEQ ID NO: 1155998
uagauccaugucauagaga

SEQ ID NO: 1156000 - RNA, 19 nt, Artificial Sequence
  Description of Artificial Sequence: Synthetic oligonucleotide
  Sense strand starting at position 366 of SEQ ID NO: 916429
uuaaaucugagagguuguu

SEQ ID NO: 1156001 - RNA, 19 nt, Artificial Sequence
  Description of Artificial Sequence: Synthetic oligonucleotide
  Antisense strand to SEQ ID NO: 1156000
aacaaccucucagauuuaa

SEQ ID NO: 1156002 - RNA, 19 nt, Artificial Sequence
  Description of Artificial Sequence: Synthetic oligonucleotide
  Sense strand starting at position 421 of SEQ ID NO: 916429
gcagaauuaaaguggcaga

SEQ ID NO: 1156003 - RNA, 19 nt, Artificial Sequence
  Description of Artificial Sequence: Synthetic oligonucleotide
  Antisense strand to SEQ ID NO: 1156002
ucugccacuuuaauucugc

SEQ ID NO: 1156004 - RNA, 19 nt, Artificial Sequence
  Description of Artificial Sequence: Synthetic oligonucleotide
  Sense strand starting at position 456 of SEQ ID NO: 916429
ccuaguauucugggaugaa

SEQ ID NO: 1156005 - RNA, 19 nt, Artificial Sequence
  Description of Artificial Sequence: Synthetic oligonucleotide
  Antisense strand to SEQ ID NO: 1156004
uucaucccagaauacuagg

SEQ ID NO: 1156006 - RNA, 19 nt, Artificial Sequence
  Description of Artificial Sequence: Synthetic oligonucleotide
  Sense strand starting at position 492 of SEQ ID NO: 916429
ucuggugacuucucaaauc

SEQ ID NO: 1156007 - RNA, 19 nt, Artificial Sequence
  Description of Artificial Sequence: Synthetic oligonucleotide
  Antisense strand to SEQ ID NO: 1156006
gauuugagaagucaccaga

SEQ ID NO: 1156008 - RNA, 19 nt, Artificial Sequence
  Description of Artificial Sequence: Synthetic oligonucleotide
  Sense strand starting at position 1145 of SEQ ID NO: 916429
cugaguucucaguacuaua

SEQ ID NO: 1156009 - RNA, 19 nt, Artificial Sequence
  Description of Artificial Sequence: Synthetic oligonucleotide
  Antisense strand to SEQ ID NO: 1156008
uauaguacugagaacucag

SEQ ID NO: 1156010 - RNA, 19 nt, Artificial Sequence
  Description of Artificial Sequence: Synthetic oligonucleotide
  Sense strand starting at position 1214 of SEQ ID NO: 916429
ucuugaaacuggguaaucu

SEQ ID NO: 1156011 - RNA, 19 nt, Artificial Sequence
  Description of Artificial Sequence: Synthetic oligonucleotide
  Antisense strand to SEQ ID NO: 1156010
agauuacccaguuucaaga

SEQ ID NO: 1156012 - RNA, 19 nt, Artificial Sequence
  Description of Artificial Sequence: Synthetic oligonucleotide
  Sense strand starting at position 1231 of SEQ ID NO: 916429
cugucucuaguugaccaaa

SEQ ID NO: 1156013 - RNA, 19 nt, Artificial Sequence
  Description of Artificial Sequence: Synthetic oligonucleotide
  Antisense strand to SEQ ID NO: 1156012
uuuggucaacuagagacag

SEQ ID NO: 1156014 - RNA, 19 nt, Artificial Sequence
  Description of Artificial Sequence: Synthetic oligonucleotide
  Sense strand starting at position 1250 of SEQ ID NO: 916429
augguuccucuugacuauu

SEQ ID NO: 1156015 - RNA, 19 nt, Artificial Sequence
  Description of Artificial Sequence: Synthetic oligonucleotide
  Antisense strand to SEQ ID NO: 1156014
aauagucaagaggaaccau

SEQ ID NO: 1156016 - RNA, 19 nt, Artificial Sequence
  Description of Artificial Sequence: Synthetic oligonucleotide
  Sense strand starting at position 1253 of SEQ ID NO: 916429
guuccucuugacuauuaca

SEQ ID NO: 1156017 - RNA, 19 nt, Artificial Sequence
  Description of Artificial Sequence: Synthetic oligonucleotide
  Antisense strand to SEQ ID NO: 1156016
uguaauagucaagaggaac

SEQ ID NO: 1156018 - RNA, 19 nt, Artificial Sequence
  Description of Artificial Sequence: Synthetic oligonucleotide
  Sense strand starting at position 1298 of SEQ ID NO: 916429
ggaacugucaaauaacguu

SEQ ID NO: 1156019 - RNA, 19 nt, Artificial Sequence
  Description of Artificial Sequence: Synthetic oligonucleotide
  Antisense strand to SEQ ID NO: 1156018
aacguuauuugacaguucc

SEQ ID NO: 1156020 - RNA, 19 nt, Artificial Sequence
  Description of Artificial Sequence: Synthetic oligonucleotide
  Sense strand starting at position 1465 of SEQ ID NO: 916429
caagauagagaauguaguu

SEQ ID NO: 1156021 - RNA, 19 nt, Artificial Sequence
  Description of Artificial Sequence: Synthetic oligonucleotide
  Antisense strand to SEQ ID NO: 1156020
aacuacauucucuaucuug

SEQ ID NO: 1156022 - RNA, 19 nt, Artificial Sequence
  Description of Artificial Sequence: Synthetic oligonucleotide
  Sense strand starting at position 1519 of SEQ ID NO: 916429
gcauauuuauuggagggaa

SEQ ID NO: 1156023 - RNA, 19 nt, Artificial Sequence
  Description of Artificial Sequence: Synthetic oligonucleotide
  Antisense strand to SEQ ID NO: 1156022
uucccuccaauaaauaugc

SEQ ID NO: 1156024 - RNA, 19 nt, Artificial Sequence
  Description of Artificial Sequence: Synthetic oligonucleotide
  Sense strand starting at position 1585 of SEQ ID NO: 916429
auguuacuucuguaggaua

SEQ ID NO: 1156025 - RNA, 19 nt, Artificial Sequence
  Description of Artificial Sequence: Synthetic oligonucleotide
  Antisense strand to SEQ ID NO: 1156024
uauccuacagaaguaacau

SEQ ID NO: 1156026 - RNA, 19 nt, Artificial Sequence
  Description of Artificial Sequence: Synthetic oligonucleotide
  Sense strand starting at position 1808 of SEQ ID NO: 916429
ucuuauaucucagugauga

SEQ ID NO: 1156027 - RNA, 19 nt, Artificial Sequence
  Description of Artificial Sequence: Synthetic oligonucleotide
  Antisense strand to SEQ ID NO: 1156026
ucaucacugagauauaaga

SEQ ID NO: 1156028 - RNA, 19 nt, Artificial Sequence
  Description of Artificial Sequence: Synthetic oligonucleotide
  Sense strand starting at position 1809 of SEQ ID NO: 916429
cuuauaucucagugaugac

SEQ ID NO: 1156029 - RNA, 19 nt, Artificial Sequence
  Description of Artificial Sequence: Synthetic oligonucleotide
  Antisense strand to SEQ ID NO: 1156028
gucaucacugagauauaag

SEQ ID NO: 1156030 - RNA, 19 nt, Artificial Sequence
  Description of Artificial Sequence: Synthetic oligonucleotide
  Sense strand starting at position 2210 of SEQ ID NO: 916429
gaagucacuccauaggcuu

SEQ ID NO: 1156031 - RNA, 19 nt, Artificial Sequence
  Description of Artificial Sequence: Synthetic oligonucleotide
  Antisense strand to SEQ ID NO: 1156030
aagccuauggagugacuuc

SEQ ID NO: 1156032 - RNA, 19 nt, Artificial Sequence
  Description of Artificial Sequence: Synthetic oligonucleotide
  Sense strand starting at position 2216 of SEQ ID NO: 916429
acuccauaggcuuacagau

SEQ ID NO: 1156033 - RNA, 19 nt, Artificial Sequence
  Description of Artificial Sequence: Synthetic oligonucleotide
  Antisense strand to SEQ ID NO: 1156032
aucuguaagccuauggagu

SEQ ID NO: 1156034 - RNA, 19 nt, Artificial Sequence
  Description of Artificial Sequence: Synthetic oligonucleotide
  Sense strand starting at position 2294 of SEQ ID NO: 916429
gguaacccaguuuaaucau

SEQ ID NO: 1156035 - RNA, 19 nt, Artificial Sequence
  Description of Artificial Sequence: Synthetic oligonucleotide
  Antisense strand to SEQ ID NO: 1156034
augauuaaacuggguuacc

SEQ ID NO: 1156036 - RNA, 19 nt, Artificial Sequence
  Description of Artificial Sequence: Synthetic oligonucleotide
  Sense strand starting at position 2344 of SEQ ID NO: 916429
guaugaauuagucagcaag

SEQ ID NO: 1156037 - RNA, 19 nt, Artificial Sequence
  Description of Artificial Sequence: Synthetic oligonucleotide
  Antisense strand to SEQ ID NO: 1156036
cuugcugacuaauucauac

SEQ ID NO: 1156038 - RNA, 19 nt, Artificial Sequence
  Description of Artificial Sequence: Synthetic oligonucleotide
  Sense strand starting at position 2347 of SEQ ID NO: 916429
ugaauuagucagcaagcaa

SEQ ID NO: 1156039 - RNA, 19 nt, Artificial Sequence
  Description of Artificial Sequence: Synthetic oligonucleotide
  Antisense strand to SEQ ID NO: 1156038
uugcuugcugacuaauuca

SEQ ID NO: 1156040 - RNA, 19 nt, Artificial Sequence
  Description of Artificial Sequence: Synthetic oligonucleotide
  Sense strand starting at position 2432 of SEQ ID NO: 916429
gugucauuucaacgauacg

SEQ ID NO: 1156041 - RNA, 19 nt, Artificial Sequence
  Description of Artificial Sequence: Synthetic oligonucleotide
  Antisense strand to SEQ ID NO: 1156040
cguaucguugaaaugacac

SEQ ID NO: 1156042 - RNA, 19 nt, Artificial Sequence
  Description of Artificial Sequence: Synthetic oligonucleotide
  Sense strand starting at position 2564 of SEQ ID NO: 916429
ggaauucuguaaucucucu

SEQ ID NO: 1156043 - RNA, 19 nt, Artificial Sequence
  Description of Artificial Sequence: Synthetic oligonucleotide
  Antisense strand to SEQ ID NO: 1156042
agagagauuacagaauucc

SEQ ID NO: 1156044 - RNA, 19 nt, Artificial Sequence
  Description of Artificial Sequence: Synthetic oligonucleotide
  Sense strand starting at position 3021 of SEQ ID NO: 916429
auaacuaguggccacuaua

SEQ ID NO: 1156045 - RNA, 19 nt, Artificial Sequence
  Description of Artificial Sequence: Synthetic oligonucleotide
  Antisense strand to SEQ ID NO: 1156044
uauaguggccacuaguuau

SEQ ID NO: 1156046 - RNA, 19 nt, Artificial Sequence
  Description of Artificial Sequence: Synthetic oligonucleotide
  Sense strand starting at position 3031 of SEQ ID NO: 916429
gccacuauaccagauagca

SEQ ID NO: 1156047 - RNA, 19 nt, Artificial Sequence
  Description of Artificial Sequence: Synthetic oligonucleotide
  Antisense strand to SEQ ID NO: 1156046
ugcuaucugguauaguggc

SEQ ID NO: 1156048 - RNA, 19 nt, Artificial Sequence
  Description of Artificial Sequence: Synthetic oligonucleotide
  Sense strand starting at position 3106 of SEQ ID NO: 916429
cuacuaagagaauguugau

SEQ ID NO: 1156049 - RNA, 19 nt, Artificial Sequence
  Description of Artificial Sequence: Synthetic oligonucleotide
  Antisense strand to SEQ ID NO: 1156048
aucaacauucucuuaguag

SEQ ID NO: 1156050 - RNA, 19 nt, Artificial Sequence
  Description of Artificial Sequence: Synthetic oligonucleotide
  Sense strand starting at position 3112 of SEQ ID NO: 916429
agagaauguugauccuguu

SEQ ID NO: 1156051 - RNA, 19 nt, Artificial Sequence
  Description of Artificial Sequence: Synthetic oligonucleotide
  Antisense strand to SEQ ID NO: 1156050
aacaggaucaacauucucu

SEQ ID NO: 1156052 - RNA, 19 nt, Artificial Sequence
  Description of Artificial Sequence: Synthetic oligonucleotide
  Sense strand starting at position 3161 of SEQ ID NO: 916429
ggauccaucuuuccaaaug

SEQ ID NO: 1156053 - RNA, 19 nt, Artificial Sequence
  Description of Artificial Sequence: Synthetic oligonucleotide
  Antisense strand to SEQ ID NO: 1156052
cauuuggaaagauggaucc

SEQ ID NO: 1156054 - RNA, 19 nt, Artificial Sequence
  Description of Artificial Sequence: Synthetic oligonucleotide
  Sense strand starting at position 3217 of SEQ ID NO: 916429
acaaacuauucugcaagga

SEQ ID NO: 1156055 - RNA, 19 nt, Artificial Sequence
  Description of Artificial Sequence: Synthetic oligonucleotide
  Antisense strand to SEQ ID NO: 1156054
uccuugcagaauaguuugu

SEQ ID NO: 1156056 - RNA, 19 nt, Artificial Sequence
  Description of Artificial Sequence: Synthetic oligonucleotide
  Sense strand starting at position 3446 of SEQ ID NO: 916429
gggcucauuaaugagaguu

SEQ ID NO: 1156057 - RNA, 19 nt, Artificial Sequence
  Description of Artificial Sequence: Synthetic oligonucleotide
  Antisense strand to SEQ ID NO: 1156056
aacucucauuaaugagccc

SEQ ID NO: 1156058 - RNA, 19 nt, Artificial Sequence
  Description of Artificial Sequence: Synthetic oligonucleotide
  Sense strand starting at position 3527 of SEQ ID NO: 916429
auaucauaugucugugaua

SEQ ID NO: 1156059 - RNA, 19 nt, Artificial Sequence
  Description of Artificial Sequence: Synthetic oligonucleotide
  Antisense strand to SEQ ID NO: 1156058
uaucacagacauaugauau

SEQ ID NO: 1156060 - RNA, 19 nt, Artificial Sequence
  Description of Artificial Sequence: Synthetic oligonucleotide
  Sense strand starting at position 3529 of SEQ ID NO: 916429
aucauaugucugugauaca

SEQ ID NO: 1156061 - RNA, 19 nt, Artificial Sequence
  Description of Artificial Sequence: Synthetic oligonucleotide
  Antisense strand to SEQ ID NO: 1156060
uguaucacagacauaugau

SEQ ID NO: 1156062 - RNA, 19 nt, Artificial Sequence
  Description of Artificial Sequence: Synthetic oligonucleotide
  Sense strand starting at position 3540 of SEQ ID NO: 916429
gugauacagacugguauga

SEQ ID NO: 1156063 - RNA, 19 nt, Artificial Sequence
  Description of Artificial Sequence: Synthetic oligonucleotide
  Antisense strand to SEQ ID NO: 1156062
ucauaccagucuguaucac

SEQ ID NO: 1156064 - RNA, 19 nt, Artificial Sequence
  Description of Artificial Sequence: Synthetic oligonucleotide
  Sense strand starting at position 3573 of SEQ ID NO: 916429
uccggaauagucuauauuc

SEQ ID NO: 1156065 - RNA, 19 nt, Artificial Sequence
  Description of Artificial Sequence: Synthetic oligonucleotide
  Antisense strand to SEQ ID NO: 1156064
gaauauagacuauuccgga

SEQ ID NO: 1156066 - RNA, 19 nt, Artificial Sequence
  Description of Artificial Sequence: Synthetic oligonucleotide
  Sense strand starting at position 3641 of SEQ ID NO: 916429
guuuaacaagcauacuaga

SEQ ID NO: 1156067 - RNA, 19 nt, Artificial Sequence
  Description of Artificial Sequence: Synthetic oligonucleotide
  Antisense strand to SEQ ID NO: 1156066
ucuaguaugcuuguuaaac

SEQ ID NO: 1156068 - RNA, 19 nt, Artificial Sequence
  Description of Artificial Sequence: Synthetic oligonucleotide
  Sense strand starting at position 3673 of SEQ ID NO: 916429
ugaauagauaaguguaguu

SEQ ID NO: 1156069 - RNA, 19 nt, Artificial Sequence
  Description of Artificial Sequence: Synthetic oligonucleotide
  Antisense strand to SEQ ID NO: 1156068
aacuacacuuaucuauuca

SEQ ID NO: 1156070 - RNA, 19 nt, Artificial Sequence
  Description of Artificial Sequence: Synthetic oligonucleotide
  Sense strand starting at position 3778 of SEQ ID NO: 916429
acuugcaaaugauuagauu

SEQ ID NO: 1156071 - RNA, 19 nt, Artificial Sequence
  Description of Artificial Sequence: Synthetic oligonucleotide
  Antisense strand to SEQ ID NO: 1156070
aaucuaaucauuugcaagu

SEQ ID NO: 1156072 - RNA, 19 nt, Artificial Sequence
  Description of Artificial Sequence: Synthetic oligonucleotide
  Sense strand starting at position 3787 of SEQ ID NO: 916429
ugauuagauuaaguaggua

SEQ ID NO: 1156073 - RNA, 19 nt, Artificial Sequence
  Description of Artificial Sequence: Synthetic oligonucleotide
  Antisense strand to SEQ ID NO: 1156072
uaccuacuuaaucuaauca

SEQ ID NO: 1156074 - RNA, 19 nt, Artificial Sequence
  Description of Artificial Sequence: Synthetic oligonucleotide
  Sense strand starting at position 3791 of SEQ ID NO: 916429
uagauuaaguagguaaacu

SEQ ID NO: 1156075 - RNA, 19 nt, Artificial Sequence
  Description of Artificial Sequence: Synthetic oligonucleotide
  Antisense strand to SEQ ID NO: 1156074
aguuuaccuacuuaaucua

SEQ ID NO: 1156076 - RNA, 19 nt, Artificial Sequence
  Description of Artificial Sequence: Synthetic oligonucleotide
  Sense strand starting at position 46 of SEQ ID NO: 916430
aaaccuguccuggagcuau

SEQ ID NO: 1156077 - RNA, 19 nt, Artificial Sequence
  Description of Artificial Sequence: Synthetic oligonucleotide
  Antisense strand to SEQ ID NO: 1156076
auagcuccaggacagguuu

SEQ ID NO: 1156078 - RNA, 19 nt, Artificial Sequence
  Description of Artificial Sequence: Synthetic oligonucleotide
  Sense strand starting at position 82 of SEQ ID NO: 916430
guaggugaauaagaaauuu

SEQ ID NO: 1156079 - RNA, 19 nt, Artificial Sequence
  Description of Artificial Sequence: Synthetic oligonucleotide
  Antisense strand to SEQ ID NO: 1156078
aaauuucuuauucaccuac

SEQ ID NO: 1156080 - RNA, 19 nt, Artificial Sequence
  Description of Artificial Sequence: Synthetic oligonucleotide
  Sense strand starting at position 439 of SEQ ID NO: 916430
cuuugaaagagcugagaca

SEQ ID NO: 1156081 - RNA, 19 nt, Artificial Sequence
  Description of Artificial Sequence: Synthetic oligonucleotide
  Antisense strand to SEQ ID NO: 1156080
ugucucagcucuuucaaag

SEQ ID NO: 1156082 - RNA, 19 nt, Artificial Sequence
  Description of Artificial Sequence: Synthetic oligonucleotide
  Sense strand starting at position 527 of SEQ ID NO: 916430
uuuggaagaugagagauuu

SEQ ID NO: 1156083 - RNA, 19 nt, Artificial Sequence
  Description of Artificial Sequence: Synthetic oligonucleotide
  Antisense strand to SEQ ID NO: 1156082
aaaucucucaucuuccaaa

SEQ ID NO: 1156084 - RNA, 19 nt, Artificial Sequence
  Description of Artificial Sequence: Synthetic oligonucleotide
  Sense strand starting at position 617 of SEQ ID NO: 916430
uccguaauugauuaacauu

SEQ ID NO: 1156085 - RNA, 19 nt, Artificial Sequence
  Description of Artificial Sequence: Synthetic oligonucleotide
  Antisense strand to SEQ ID NO: 1156084
aauguuaaucaauuacgga

SEQ ID NO: 1156086 - RNA, 19 nt, Artificial Sequence
  Description of Artificial Sequence: Synthetic oligonucleotide
  Sense strand starting at position 689 of SEQ ID NO: 916430
agacgcugcauugauaaua

SEQ ID NO: 1156087 - RNA, 19 nt, Artificial Sequence
  Description of Artificial Sequence: Synthetic oligonucleotide
  Antisense strand to SEQ ID NO: 1156086
uauuaucaaugcagcgucu

SEQ ID NO: 1156088 - RNA, 19 nt, Artificial Sequence
  Description of Artificial Sequence: Synthetic oligonucleotide
  Sense strand starting at position 714 of SEQ ID NO: 916430
acaaucauuucucagagga

SEQ ID NO: 1156089 - RNA, 19 nt, Artificial Sequence
  Description of Artificial Sequence: Synthetic oligonucleotide
  Antisense strand to SEQ ID NO: 1156088
uccucugagaaaugauugu

SEQ ID NO: 1156090 - RNA, 19 nt, Artificial Sequence
  Description of Artificial Sequence: Synthetic oligonucleotide
  Sense strand starting at position 781 of SEQ ID NO: 916430
uaggacuuguagguccaaa

SEQ ID NO: 1156091 - RNA, 19 nt, Artificial Sequence
  Description of Artificial Sequence: Synthetic oligonucleotide
  Antisense strand to SEQ ID NO: 1156090
uuuggaccuacaaguccua

SEQ ID NO: 1156092 - RNA, 19 nt, Artificial Sequence
  Description of Artificial Sequence: Synthetic oligonucleotide
  Sense strand starting at position 869 of SEQ ID NO: 916430
aaugcuuuaguugaugaau

SEQ ID NO: 1156093 - RNA, 19 nt, Artificial Sequence
  Description of Artificial Sequence: Synthetic oligonucleotide
  Antisense strand to SEQ ID NO: 1156092
auucaucaacuaaagcauu

SEQ ID NO: 1156094 - RNA, 19 nt, Artificial Sequence
  Description of Artificial Sequence: Synthetic oligonucleotide
  Sense strand starting at position 872 of SEQ ID NO: 916430
gcuuuaguugaugaaugau

SEQ ID NO: 1156095 - RNA, 19 nt, Artificial Sequence
  Description of Artificial Sequence: Synthetic oligonucleotide
  Antisense strand to SEQ ID NO: 1156094
aucauucaucaacuaaagc

SEQ ID NO: 1156096 - RNA, 19 nt, Artificial Sequence
  Description of Artificial Sequence: Synthetic oligonucleotide
  Sense strand starting at position 1318 of SEQ ID NO: 916430
acggaacuuuggcuggaau

SEQ ID NO: 1156097 - RNA, 19 nt, Artificial Sequence
  Description of Artificial Sequence: Synthetic oligonucleotide
  Antisense strand to SEQ ID NO: 1156096
auuccagccaaaguuccgu

SEQ ID NO: 1156098 - RNA, 19 nt, Artificial Sequence
  Description of Artificial Sequence: Synthetic oligonucleotide
  Sense strand starting at position 1320 of SEQ ID NO: 916430
ggaacuuuggcuggaaucu

SEQ ID NO: 1156099 - RNA, 19 nt, Artificial Sequence
  Description of Artificial Sequence: Synthetic oligonucleotide
  Antisense strand to SEQ ID NO: 1156098
agauuccagccaaaguucc

SEQ ID NO: 1156100 - RNA, 19 nt, Artificial Sequence
  Description of Artificial Sequence: Synthetic oligonucleotide
  Sense strand starting at position 1345 of SEQ ID NO: 916430
ggucuuauacuauggagau

SEQ ID NO: 1156101 - RNA, 19 nt, Artificial Sequence
  Description of Artificial Sequence: Synthetic oligonucleotide
  Antisense strand to SEQ ID NO: 1156100
aucuccauaguauaagacc

SEQ ID NO: 1156102 - RNA, 19 nt, Artificial Sequence
  Description of Artificial Sequence: Synthetic oligonucleotide
  Sense strand starting at position 1359 of SEQ ID NO: 916430
gagaucuguccagguggau

SEQ ID NO: 1156103 - RNA, 19 nt, Artificial Sequence
  Description of Artificial Sequence: Synthetic oligonucleotide
  Antisense strand to SEQ ID NO: 1156102
auccaccuggacagaucuc

SEQ ID NO: 1156104 - RNA, 19 nt, Artificial Sequence
  Description of Artificial Sequence: Synthetic oligonucleotide
  Sense strand starting at position 1413 of SEQ ID NO: 916430
aguaguuguggaaguaguu

SEQ ID NO: 1156105 - RNA, 19 nt, Artificial Sequence
  Description of Artificial Sequence: Synthetic oligonucleotide
  Antisense strand to SEQ ID NO: 1156104
aacuacuuccacaacuacu

SEQ ID NO: 1156106 - RNA, 19 nt, Artificial Sequence
  Description of Artificial Sequence: Synthetic oligonucleotide
  Sense strand starting at position 1810 of SEQ ID NO: 916430
aucagcuagguuuaauaau

SEQ ID NO: 1156107 - RNA, 19 nt, Artificial Sequence
  Description of Artificial Sequence: Synthetic oligonucleotide
  Antisense strand to SEQ ID NO: 1156106
auuauuaaaccuagcugau

SEQ ID NO: 1156108 - RNA, 19 nt, Artificial Sequence
  Description of Artificial Sequence: Synthetic oligonucleotide
  Sense strand starting at position 1862 of SEQ ID NO: 916430
ucaugaggauauguaagua

SEQ ID NO: 1156109 - RNA, 19 nt, Artificial Sequence
  Description of Artificial Sequence: Synthetic oligonucleotide
  Antisense strand to SEQ ID NO: 1156108
uacuuacauauccucauga

SEQ ID NO: 1156110 - RNA, 19 nt, Artificial Sequence
  Description of Artificial Sequence: Synthetic oligonucleotide
  Sense strand starting at position 1866 of SEQ ID NO: 916430
gaggauauguaaguaccaa

SEQ ID NO: 1156111 - RNA, 19 nt, Artificial Sequence
  Description of Artificial Sequence: Synthetic oligonucleotide
  Antisense strand to SEQ ID NO: 1156110
uugguacuuacauauccuc

SEQ ID NO: 1156112 - RNA, 19 nt, Artificial Sequence
  Description of Artificial Sequence: Synthetic oligonucleotide
  Sense strand starting at position 1894 of SEQ ID NO: 916430
uccugaucuuggcuaagga

SEQ ID NO: 1156113 - RNA, 19 nt, Artificial Sequence
  Description of Artificial Sequence: Synthetic oligonucleotide
  Antisense strand to SEQ ID NO: 1156112
uccuuagccaagaucagga

SEQ ID NO: 1156114 - RNA, 19 nt, Artificial Sequence
  Description of Artificial Sequence: Synthetic oligonucleotide
  Sense strand starting at position 1895 of SEQ ID NO: 916430
ccugaucuuggcuaaggau

SEQ ID NO: 1156115 - RNA, 19 nt, Artificial Sequence
  Description of Artificial Sequence: Synthetic oligonucleotide
  Antisense strand to SEQ ID NO: 1156114
auccuuagccaagaucagg

SEQ ID NO: 1156116 - RNA, 19 nt, Artificial Sequence
  Description of Artificial Sequence: Synthetic oligonucleotide
  Sense strand starting at position 1985 of SEQ ID NO: 916430
agaccuuuaugacuacagu

SEQ ID NO: 1156117 - RNA, 19 nt, Artificial Sequence
  Description of Artificial Sequence: Synthetic oligonucleotide
  Antisense strand to SEQ ID NO: 1156116
acuguagucauaaaggucu

SEQ ID NO: 1156118 - RNA, 19 nt, Artificial Sequence
  Description of Artificial Sequence: Synthetic oligonucleotide
  Sense strand starting at position 2026 of SEQ ID NO: 916430
cucuuagaacuaugaggua

SEQ ID NO: 1156119 - RNA, 19 nt, Artificial Sequence
  Description of Artificial Sequence: Synthetic oligonucleotide
  Antisense strand to SEQ ID NO: 1156118
uaccucauaguucuaagag

SEQ ID NO: 1156120 - RNA, 19 nt, Artificial Sequence
  Description of Artificial Sequence: Synthetic oligonucleotide
  Sense strand starting at position 2040 of SEQ ID NO: 916430
agguaaugucuccauagua

SEQ ID NO: 1156121 - RNA, 19 nt, Artificial Sequence
  Description of Artificial Sequence: Synthetic oligonucleotide
  Antisense strand to SEQ ID NO: 1156120
uacuauggagacauuaccu

SEQ ID NO: 1156122 - RNA, 19 nt, Artificial Sequence
  Description of Artificial Sequence: Synthetic oligonucleotide
  Sense strand starting at position 2112 of SEQ ID NO: 916430
guuugcagacauuaaauaa

SEQ ID NO: 1156123 - RNA, 19 nt, Artificial Sequence
  Description of Artificial Sequence: Synthetic oligonucleotide
  Antisense strand to SEQ ID NO: 1156122
uuauuuaaugucugcaaac

SEQ ID NO: 1156124 - RNA, 19 nt, Artificial Sequence
  Description of Artificial Sequence: Synthetic oligonucleotide
  Sense strand starting at position 2143 of SEQ ID NO: 916430
uuaggaaagccauaucuuc

SEQ ID NO: 1156125 - RNA, 19 nt, Artificial Sequence
  Description of Artificial Sequence: Synthetic oligonucleotide
  Antisense strand to SEQ ID NO: 1156124
gaagauauggcuuuccuaa

SEQ ID NO: 1156126 - RNA, 19 nt, Artificial Sequence
  Description of Artificial Sequence: Synthetic oligonucleotide
  Sense strand starting at position 2286 of SEQ ID NO: 916430
ggacaaauacuuugagcac

SEQ ID NO: 1156127 - RNA, 19 nt, Artificial Sequence
  Description of Artificial Sequence: Synthetic oligonucleotide
  Antisense strand to SEQ ID NO: 1156126
gugcucaaaguauuugucc

SEQ ID NO: 1156128 - RNA, 19 nt, Artificial Sequence
  Description of Artificial Sequence: Synthetic oligonucleotide
  Sense strand starting at position 2356 of SEQ ID NO: 916430
agaagucuauugguagaaa

SEQ ID NO: 1156129 - RNA, 19 nt, Artificial Sequence
  Description of Artificial Sequence: Synthetic oligonucleotide
  Antisense strand to SEQ ID NO: 1156128
uuucuaccaauagacuucu

SEQ ID NO: 1156130 - RNA, 19 nt, Artificial Sequence
  Description of Artificial Sequence: Synthetic oligonucleotide
  Sense strand starting at position 2417 of SEQ ID NO: 916430
augccagcaguaugauuua

SEQ ID NO: 1156131 - RNA, 19 nt, Artificial Sequence
  Description of Artificial Sequence: Synthetic oligonucleotide
  Antisense strand to SEQ ID NO: 1156130
uaaaucauacugcuggcau

SEQ ID NO: 1156132 - RNA, 19 nt, Artificial Sequence
  Description of Artificial Sequence: Synthetic oligonucleotide
  Sense strand starting at position 2850 of SEQ ID NO: 916430
ugaacauuaugggccaauu

SEQ ID NO: 1156133 - RNA, 19 nt, Artificial Sequence
  Description of Artificial Sequence: Synthetic oligonucleotide
  Antisense strand to SEQ ID NO: 1156132
aauuggcccauaauguuca

SEQ ID NO: 1156134 - RNA, 19 nt, Artificial Sequence
  Description of Artificial Sequence: Synthetic oligonucleotide
  Sense strand starting at position 2859 of SEQ ID NO: 916430
ugggccaauuauguaaaua

SEQ ID NO: 1156135 - RNA, 19 nt, Artificial Sequence
  Description of Artificial Sequence: Synthetic oligonucleotide
  Antisense strand to SEQ ID NO: 1156134
uauuuacauaauuggccca

SEQ ID NO: 1156136 - RNA, 19 nt, Artificial Sequence
  Description of Artificial Sequence: Synthetic oligonucleotide
  Sense strand starting at position 2877 of SEQ ID NO: 916430
auagcaucagaagguuuau

SEQ ID NO: 1156137 - RNA, 19 nt, Artificial Sequence
  Description of Artificial Sequence: Synthetic oligonucleotide
  Antisense strand to SEQ ID NO: 1156136
auaaaccuucugaugcuau

SEQ ID NO: 1156138 - RNA, 19 nt, Artificial Sequence
  Description of Artificial Sequence: Synthetic oligonucleotide
  Sense strand starting at position 2936 of SEQ ID NO: 916430
ugucauuucuugucacucu

SEQ ID NO: 1156139 - RNA, 19 nt, Artificial Sequence
  Description of Artificial Sequence: Synthetic oligonucleotide
  Antisense strand to SEQ ID NO: 1156138
agagugacaagaaaugaca

SEQ ID NO: 1156140 - RNA, 19 nt, Artificial Sequence
  Description of Artificial Sequence: Synthetic oligonucleotide
  Sense strand starting at position 3308 of SEQ ID NO: 916430
guaaauguaagaggauguu

SEQ ID NO: 1156141 - RNA, 19 nt, Artificial Sequence
  Description of Artificial Sequence: Synthetic oligonucleotide
  Antisense strand to SEQ ID NO: 1156140
aacauccucuuacauuuac

SEQ ID NO: 1156142 - RNA, 19 nt, Artificial Sequence
  Description of Artificial Sequence: Synthetic oligonucleotide
  Sense strand starting at position 3311 of SEQ ID NO: 916430
aauguaagaggauguugau

SEQ ID NO: 1156143 - RNA, 19 nt, Artificial Sequence
  Description of Artificial Sequence: Synthetic oligonucleotide
  Antisense strand to SEQ ID NO: 1156142
aucaacauccucuuacauu

SEQ ID NO: 1156144 - RNA, 19 nt, Artificial Sequence
  Description of Artificial Sequence: Synthetic oligonucleotide
  Sense strand starting at position 3324 of SEQ ID NO: 916430
guugauaguagucauuaaa

SEQ ID NO: 1156145 - RNA, 19 nt, Artificial Sequence
  Description of Artificial Sequence: Synthetic oligonucleotide
  Antisense strand to SEQ ID NO: 1156144
uuuaaugacuacuaucaac

SEQ ID NO: 1156146 - RNA, 19 nt, Artificial Sequence
  Description of Artificial Sequence: Synthetic oligonucleotide
  Sense strand starting at position 3351 of SEQ ID NO: 916430
ucggguauuaguggcauuu

SEQ ID NO: 1156147 - RNA, 19 nt, Artificial Sequence
  Description of Artificial Sequence: Synthetic oligonucleotide
  Antisense strand to SEQ ID NO: 1156146
aaaugccacuaauacccga

SEQ ID NO: 1156148 - RNA, 19 nt, Artificial Sequence
  Description of Artificial Sequence: Synthetic oligonucleotide
  Sense strand starting at position 3543 of SEQ ID NO: 916430
ggccaaagggagugaauua

SEQ ID NO: 1156149 - RNA, 19 nt, Artificial Sequence
  Description of Artificial Sequence: Synthetic oligonucleotide
  Antisense strand to SEQ ID NO: 1156148
uaauucacucccuuuggcc

SEQ ID NO: 1156150 - RNA, 19 nt, Artificial Sequence
  Description of Artificial Sequence: Synthetic oligonucleotide
  Sense strand starting at position 3873 of SEQ ID NO: 916430
auaccaaagucuuuaggau

SEQ ID NO: 1156151 - RNA, 19 nt, Artificial Sequence
  Description of Artificial Sequence: Synthetic oligonucleotide
  Antisense strand to SEQ ID NO: 1156150
auccuaaagacuuugguau

SEQ ID NO: 1156152 - RNA, 19 nt, Artificial Sequence
  Description of Artificial Sequence: Synthetic oligonucleotide
  Sense strand starting at position 3941 of SEQ ID NO: 916430
agacguuuccaagaguuau

SEQ ID NO: 1156153 - RNA, 19 nt, Artificial Sequence
  Description of Artificial Sequence: Synthetic oligonucleotide
  Antisense strand to SEQ ID NO: 1156152
auaacucuuggaaacgucu

SEQ ID NO: 1156154 - RNA, 19 nt, Artificial Sequence
  Description of Artificial Sequence: Synthetic oligonucleotide
  Sense strand starting at position 3945 of SEQ ID NO: 916430
guuuccaagaguuaucagu

SEQ ID NO: 1156155 - RNA, 19 nt, Artificial Sequence
  Description of Artificial Sequence: Synthetic oligonucleotide
  Antisense strand to SEQ ID NO: 1156154
acugauaacucuuggaaac

SEQ ID NO: 1156156 - RNA, 19 nt, Artificial Sequence
  Description of Artificial Sequence: Synthetic oligonucleotide
  Sense strand starting at position 220 of SEQ ID NO: 916431
aggucacucaguuauuagu

SEQ ID NO: 1156157 - RNA, 19 nt, Artificial Sequence
  Description of Artificial Sequence: Synthetic oligonucleotide
  Antisense strand to SEQ ID NO: 1156156
acuaauaacugagugaccu

SEQ ID NO: 1156158 - RNA, 19 nt, Artificial Sequence
  Description of Artificial Sequence: Synthetic oligonucleotide
  Sense strand starting at position 222 of SEQ ID NO: 916431
gucacucaguuauuaguga

SEQ ID NO: 1156159 - RNA, 19 nt, Artificial Sequence
  Description of Artificial Sequence: Synthetic oligonucleotide
  Antisense strand to SEQ ID NO: 1156158
ucacuaauaacugagugac

SEQ ID NO: 1156160 - RNA, 19 nt, Artificial Sequence
  Description of Artificial Sequence: Synthetic oligonucleotide
  Sense strand starting at position 452 of SEQ ID NO: 916431
ucgggcuuuguugcuaauu

SEQ ID NO: 1156161 - RNA, 19 nt, Artificial Sequence
  Description of Artificial Sequence: Synthetic oligonucleotide
  Antisense strand to SEQ ID NO: 1156160
aauuagcaacaaagcccga

SEQ ID NO: 1156162 - RNA, 19 nt, Artificial Sequence
  Description of Artificial Sequence: Synthetic oligonucleotide
  Sense strand starting at position 453 of SEQ ID NO: 916431
cgggcuuuguugcuaauuu

SEQ ID NO: 1156163 - RNA, 19 nt, Artificial Sequence
  Description of Artificial Sequence: Synthetic oligonucleotide
  Antisense strand to SEQ ID NO: 1156162
aaauuagcaacaaagcccg

SEQ ID NO: 1156164 - RNA, 19 nt, Artificial Sequence
  Description of Artificial Sequence: Synthetic oligonucleotide
  Sense strand starting at position 562 of SEQ ID NO: 916431
aaaugugaccucugcagga

SEQ ID NO: 1156165 - RNA, 19 nt, Artificial Sequence
  Description of Artificial Sequence: Synthetic oligonucleotide
  Antisense strand to SEQ ID NO: 1156164
uccugcagaggucacauuu

SEQ ID NO: 1156166 - RNA, 19 nt, Artificial Sequence
  Description of Artificial Sequence: Synthetic oligonucleotide
  Sense strand starting at position 575 of SEQ ID NO: 916431
gcaggagucgacugaggaa

SEQ ID NO: 1156167 - RNA, 19 nt, Artificial Sequence
  Description of Artificial Sequence: Synthetic oligonucleotide
  Antisense strand to SEQ ID NO: 1156166
uuccucagucgacuccugc

SEQ ID NO: 1156168 - RNA, 19 nt, Artificial Sequence
  Description of Artificial Sequence: Synthetic oligonucleotide
  Sense strand starting at position 622 of SEQ ID NO: 916431
gaagaacuccugcgagaga

SEQ ID NO: 1156169 - RNA, 19 nt, Artificial Sequence
  Description of Artificial Sequence: Synthetic oligonucleotide
  Antisense strand to SEQ ID NO: 1156168
ucucucgcaggaguucuuc

SEQ ID NO: 1156170 - RNA, 19 nt, Artificial Sequence
  Description of Artificial Sequence: Synthetic oligonucleotide
  Sense strand starting at position 686 of SEQ ID NO: 916431
uggaauagguggcuacauu

SEQ ID NO: 1156171 - RNA, 19 nt, Artificial Sequence
  Description of Artificial Sequence: Synthetic oligonucleotide
  Antisense strand to SEQ ID NO: 1156170
aauguagccaccuauucca

SEQ ID NO: 1156172 - RNA, 19 nt, Artificial Sequence
  Description of Artificial Sequence: Synthetic oligonucleotide
  Sense strand starting at position 822 of SEQ ID NO: 916431
uuaagaaaugccuggaggu

SEQ ID NO: 1156173 - RNA, 19 nt, Artificial Sequence
  Description of Artificial Sequence: Synthetic oligonucleotide
  Antisense strand to SEQ ID NO: 1156172
accuccaggcauuucuuaa

SEQ ID NO: 1156174 - RNA, 19 nt, Artificial Sequence
  Description of Artificial Sequence: Synthetic oligonucleotide
  Sense strand starting at position 823 of SEQ ID NO: 916431
uaagaaaugccuggaggug

SEQ ID NO: 1156175 - RNA, 19 nt, Artificial Sequence
  Description of Artificial Sequence: Synthetic oligonucleotide
  Antisense strand to SEQ ID NO: 1156174
caccuccaggcauuucuua

SEQ ID NO: 1156176 - RNA, 19 nt, Artificial Sequence
  Description of Artificial Sequence: Synthetic oligonucleotide
  Sense strand starting at position 874 of SEQ ID NO: 916431
ucaugaacucucugaaguc

SEQ ID NO: 1156177 - RNA, 19 nt, Artificial Sequence
  Description of Artificial Sequence: Synthetic oligonucleotide
  Antisense strand to SEQ ID NO: 1156176
gacuucagagaguucauga

SEQ ID NO: 1156178 - RNA, 19 nt, Artificial Sequence
  Description of Artificial Sequence: Synthetic oligonucleotide
  Sense strand starting at position 1135 of SEQ ID NO: 916431
caggacuaacuuggucaaa

SEQ ID NO: 1156179 - RNA, 19 nt, Artificial Sequence
  Description of Artificial Sequence: Synthetic oligonucleotide
  Antisense strand to SEQ ID NO: 1156178
uuugaccaaguuaguccug

SEQ ID NO: 1156180 - RNA, 19 nt, Artificial Sequence
  Description of Artificial Sequence: Synthetic oligonucleotide
  Sense strand starting at position 1148 of SEQ ID NO: 916431
gucaaagaaccauaguuuc

SEQ ID NO: 1156181 - RNA, 19 nt, Artificial Sequence
  Description of Artificial Sequence: Synthetic oligonucleotide
  Antisense strand to SEQ ID NO: 1156180
gaaacuaugguucuuugac

SEQ ID NO: 1156182 - RNA, 19 nt, Artificial Sequence
  Description of Artificial Sequence: Synthetic oligonucleotide
  Sense strand starting at position 1156 of SEQ ID NO: 916431
accauaguuucugcaccau

SEQ ID NO: 1156183 - RNA, 19 nt, Artificial Sequence
  Description of Artificial Sequence: Synthetic oligonucleotide
  Antisense strand to SEQ ID NO: 1156182
auggugcagaaacuauggu

SEQ ID NO: 1156184 - RNA, 19 nt, Artificial Sequence
  Description of Artificial Sequence: Synthetic oligonucleotide
  Sense strand starting at position 1388 of SEQ ID NO: 916431
uuuacaaagcuuugucaga

SEQ ID NO: 1156185 - RNA, 19 nt, Artificial Sequence
  Description of Artificial Sequence: Synthetic oligonucleotide
  Antisense strand to SEQ ID NO: 1156184
ucugacaaagcuuuguaaa

SEQ ID NO: 1156186 - RNA, 19 nt, Artificial Sequence
  Description of Artificial Sequence: Synthetic oligonucleotide
  Sense strand starting at position 1395 of SEQ ID NO: 916431
agcuuugucagaggucaag

SEQ ID NO: 1156187 - RNA, 19 nt, Artificial Sequence
  Description of Artificial Sequence: Synthetic oligonucleotide
  Antisense strand to SEQ ID NO: 1156186
cuugaccucugacaaagcu

SEQ ID NO: 1156188 - RNA, 19 nt, Artificial Sequence
  Description of Artificial Sequence: Synthetic oligonucleotide
  Sense strand starting at position 1771 of SEQ ID NO: 916431
uugacuuguucuguacaua

SEQ ID NO: 1156189 - RNA, 19 nt, Artificial Sequence
  Description of Artificial Sequence: Synthetic oligonucleotide
  Antisense strand to SEQ ID NO: 1156188
uauguacagaacaagucaa

SEQ ID NO: 1156190 - RNA, 19 nt, Artificial Sequence
  Description of Artificial Sequence: Synthetic oligonucleotide
  Sense strand starting at position 1772 of SEQ ID NO: 916431
ugacuuguucuguacauag

SEQ ID NO: 1156191 - RNA, 19 nt, Artificial Sequence
  Description of Artificial Sequence: Synthetic oligonucleotide
  Antisense strand to SEQ ID NO: 1156190
cuauguacagaacaaguca

SEQ ID NO: 1156192 - RNA, 19 nt, Artificial Sequence
  Description of Artificial Sequence: Synthetic oligonucleotide
  Sense strand starting at position 1911 of SEQ ID NO: 916431
ccaguaugugugagugugu

SEQ ID NO: 1156193 - RNA, 19 nt, Artificial Sequence
  Description of Artificial Sequence: Synthetic oligonucleotide
  Antisense strand to SEQ ID NO: 1156192
acacacucacacauacugg

SEQ ID NO: 1156194 - RNA, 19 nt, Artificial Sequence
  Description of Artificial Sequence: Synthetic oligonucleotide
  Sense strand starting at position 2127 of SEQ ID NO: 916431
ccaacuguaugaucuguua

SEQ ID NO: 1156195 - RNA, 19 nt, Artificial Sequence
  Description of Artificial Sequence: Synthetic oligonucleotide
  Antisense strand to SEQ ID NO: 1156194
uaacagaucauacaguugg

SEQ ID NO: 1156196 - RNA, 19 nt, Artificial Sequence
  Description of Artificial Sequence: Synthetic oligonucleotide
  Sense strand starting at position 2238 of SEQ ID NO: 916431
ugggauuauuccucugccu

SEQ ID NO: 1156197 - RNA, 19 nt, Artificial Sequence
  Description of Artificial Sequence: Synthetic oligonucleotide
  Antisense strand to SEQ ID NO: 1156196
aggcagaggaauaauccca

SEQ ID NO: 1156198 - RNA, 19 nt, Artificial Sequence
  Description of Artificial Sequence: Synthetic oligonucleotide
  Sense strand starting at position 2240 of SEQ ID NO: 916431
ggauuauuccucugccuac

SEQ ID NO: 1156199 - RNA, 19 nt, Artificial Sequence
  Description of Artificial Sequence: Synthetic oligonucleotide
  Antisense strand to SEQ ID NO: 1156198
guaggcagaggaauaaucc

SEQ ID NO: 1156200 - RNA, 19 nt, Artificial Sequence
  Description of Artificial Sequence: Synthetic oligonucleotide
  Sense strand starting at position 2264 of SEQ ID NO: 916431
caucauucgcgguaauuag

SEQ ID NO: 1156201 - RNA, 19 nt, Artificial Sequence
  Description of Artificial Sequence: Synthetic oligonucleotide
  Antisense strand to SEQ ID NO: 1156200
cuaauuaccgcgaaugaug

SEQ ID NO: 1156202 - RNA, 19 nt, Artificial Sequence
  Description of Artificial Sequence: Synthetic oligonucleotide
  Sense strand starting at position 2301 of SEQ ID NO: 916431
gcaguaagauuccugauau

SEQ ID NO: 1156203 - RNA, 19 nt, Artificial Sequence
  Description of Artificial Sequence: Synthetic oligonucleotide
  Antisense strand to SEQ ID NO: 1156202
auaucaggaaucuuacugc

SEQ ID NO: 1156204 - RNA, 19 nt, Artificial Sequence
  Description of Artificial Sequence: Synthetic oligonucleotide
  Sense strand starting at position 2643 of SEQ ID NO: 916431
ugauaauuagaugggucau

SEQ ID NO: 1156205 - RNA, 19 nt, Artificial Sequence
  Description of Artificial Sequence: Synthetic oligonucleotide
  Antisense strand to SEQ ID NO: 1156204
augacccaucuaauuauca

SEQ ID NO: 1156206 - RNA, 19 nt, Artificial Sequence
  Description of Artificial Sequence: Synthetic oligonucleotide
  Sense strand starting at position 2700 of SEQ ID NO: 916431
uaaagcugacaggguauua

SEQ ID NO: 1156207 - RNA, 19 nt, Artificial Sequence
  Description of Artificial Sequence: Synthetic oligonucleotide
  Antisense strand to SEQ ID NO: 1156206
uaauacccugucagcuuua

SEQ ID NO: 1156208 - RNA, 19 nt, Artificial Sequence
  Description of Artificial Sequence: Synthetic oligonucleotide
  Sense strand starting at position 2718 of SEQ ID NO: 916431
accugacaguaauuagguu

SEQ ID NO: 1156209 - RNA, 19 nt, Artificial Sequence
  Description of Artificial Sequence: Synthetic oligonucleotide
  Antisense strand to SEQ ID NO: 1156208
aaccuaauuacugucaggu

SEQ ID NO: 1156210 - RNA, 19 nt, Artificial Sequence
  Description of Artificial Sequence: Synthetic oligonucleotide
  Sense strand starting at position 2907 of SEQ ID NO: 916431
gaugaagaggcuugccacu

SEQ ID NO: 1156211 - RNA, 19 nt, Artificial Sequence
  Description of Artificial Sequence: Synthetic oligonucleotide
  Antisense strand to SEQ ID NO: 1156210
aguggcaagccucuucauc

SEQ ID NO: 1156212 - RNA, 19 nt, Artificial Sequence
  Description of Artificial Sequence: Synthetic oligonucleotide
  Sense strand starting at position 2909 of SEQ ID NO: 916431
ugaagaggcuugccacuua

SEQ ID NO: 1156213 - RNA, 19 nt, Artificial Sequence
  Description of Artificial Sequence: Synthetic oligonucleotide
  Antisense strand to SEQ ID NO: 1156212
uaaguggcaagccucuuca

SEQ ID NO: 1156214 - RNA, 19 nt, Artificial Sequence
  Description of Artificial Sequence: Synthetic oligonucleotide
  Sense strand starting at position 2924 of SEQ ID NO: 916431
cuuaauguacugcacagau

SEQ ID NO: 1156215 - RNA, 19 nt, Artificial Sequence
  Description of Artificial Sequence: Synthetic oligonucleotide
  Antisense strand to SEQ ID NO: 1156214
aucugugcaguacauuaag

SEQ ID NO: 1156216 - RNA, 19 nt, Artificial Sequence
  Description of Artificial Sequence: Synthetic oligonucleotide
  Sense strand starting at position 2955 of SEQ ID NO: 916431
gguugccgacaaugaaaua

SEQ ID NO: 1156217 - RNA, 19 nt, Artificial Sequence
  Description of Artificial Sequence: Synthetic oligonucleotide
  Antisense strand to SEQ ID NO: 1156216
uauuucauugucggcaacc

SEQ ID NO: 1156218 - RNA, 19 nt, Artificial Sequence
  Description of Artificial Sequence: Synthetic oligonucleotide
  Sense strand starting at position 2998 of SEQ ID NO: 916431
gugaacaagagguggaauu

SEQ ID NO: 1156219 - RNA, 19 nt, Artificial Sequence
  Description of Artificial Sequence: Synthetic oligonucleotide
  Antisense strand to SEQ ID NO: 1156218
aauuccaccucuuguucac

SEQ ID NO: 1156220 - RNA, 19 nt, Artificial Sequence
  Description of Artificial Sequence: Synthetic oligonucleotide
  Sense strand starting at position 3209 of SEQ ID NO: 916431
agaguaaacuacccaguuu

SEQ ID NO: 1156221 - RNA, 19 nt, Artificial Sequence
  Description of Artificial Sequence: Synthetic oligonucleotide
  Antisense strand to SEQ ID NO: 1156220
aaacuggguaguuuacucu

SEQ ID NO: 1156222 - RNA, 19 nt, Artificial Sequence
  Description of Artificial Sequence: Synthetic oligonucleotide
  Sense strand starting at position 3240 of SEQ ID NO: 916431
uuuggaaaucuuugcgaaa

SEQ ID NO: 1156223 - RNA, 19 nt, Artificial Sequence
  Description of Artificial Sequence: Synthetic oligonucleotide
  Antisense strand to SEQ ID NO: 1156222
uuucgcaaagauuuccaaa

SEQ ID NO: 1156224 - RNA, 19 nt, Artificial Sequence
  Description of Artificial Sequence: Synthetic oligonucleotide
  Sense strand starting at position 3241 of SEQ ID NO: 916431
uuggaaaucuuugcgaaag

SEQ ID NO: 1156225 - RNA, 19 nt, Artificial Sequence
  Description of Artificial Sequence: Synthetic oligonucleotide
  Antisense strand to SEQ ID NO: 1156224
cuuucgcaaagauuuccaa

SEQ ID NO: 1156226 - RNA, 19 nt, Artificial Sequence
  Description of Artificial Sequence: Synthetic oligonucleotide
  Sense strand starting at position 3251 of SEQ ID NO: 916431
uugcgaaaggauugcuaua

SEQ ID NO: 1156227 - RNA, 19 nt, Artificial Sequence
  Description of Artificial Sequence: Synthetic oligonucleotide
  Antisense strand to SEQ ID NO: 1156226
uauagcaauccuuucgcaa

SEQ ID NO: 1156228 - RNA, 19 nt, Artificial Sequence
  Description of Artificial Sequence: Synthetic oligonucleotide
  Sense strand starting at position 3253 of SEQ ID NO: 916431
gcgaaaggauugcuauaaa

SEQ ID NO: 1156229 - RNA, 19 nt, Artificial Sequence
  Description of Artificial Sequence: Synthetic oligonucleotide
  Antisense strand to SEQ ID NO: 1156228
uuuauagcaauccuuucgc

SEQ ID NO: 1156230 - RNA, 19 nt, Artificial Sequence
  Description of Artificial Sequence: Synthetic oligonucleotide
  Sense strand starting at position 3328 of SEQ ID NO: 916431
ucaucagacguuugaugag

SEQ ID NO: 1156231 - RNA, 19 nt, Artificial Sequence
  Description of Artificial Sequence: Synthetic oligonucleotide
  Antisense strand to SEQ ID NO: 1156230
cucaucaaacgucugauga

SEQ ID NO: 1156232 - RNA, 19 nt, Artificial Sequence
  Description of Artificial Sequence: Synthetic oligonucleotide
  Sense strand starting at position 3640 of SEQ ID NO: 916431
gcggguguucaguuacgau

SEQ ID NO: 1156233 - RNA, 19 nt, Artificial Sequence
  Description of Artificial Sequence: Synthetic oligonucleotide
  Antisense strand to SEQ ID NO: 1156232
aucguaacugaacacccgc

SEQ ID NO: 1156234 - RNA, 19 nt, Artificial Sequence
  Description of Artificial Sequence: Synthetic oligonucleotide
  Sense strand starting at position 3785 of SEQ ID NO: 916431
gugaaaggucucggucaag

SEQ ID NO: 1156235 - RNA, 19 nt, Artificial Sequence
  Description of Artificial Sequence: Synthetic oligonucleotide
  Antisense strand to SEQ ID NO: 1156234
cuugaccgagaccuuucac

SEQ ID NO: 1156236 - RNA, 19 nt, Artificial Sequence
  Description of Artificial Sequence: Synthetic oligonucleotide
  Sense strand starting at position 169 of SEQ ID NO: 916432
cuugauuucgcuuaagugu

SEQ ID NO: 1156237 - RNA, 19 nt, Artificial Sequence
  Description of Artificial Sequence: Synthetic oligonucleotide
  Antisense strand to SEQ ID NO: 1156236
acacuuaagcgaaaucaag

SEQ ID NO: 1156238 - RNA, 19 nt, Artificial Sequence
  Description of Artificial Sequence: Synthetic oligonucleotide
  Sense strand starting at position 335 of SEQ ID NO: 916432
aaugauggcgaaugacaaa

SEQ ID NO: 1156239 - RNA, 19 nt, Artificial Sequence
  Description of Artificial Sequence: Synthetic oligonucleotide
  Antisense strand to SEQ ID NO: 1156238
uuugucauucgccaucauu

SEQ ID NO: 1156240 - RNA, 19 nt, Artificial Sequence
  Description of Artificial Sequence: Synthetic oligonucleotide
  Sense strand starting at position 545 of SEQ ID NO: 916432
gcugcaucaguuugaaucu

SEQ ID NO: 1156241 - RNA, 19 nt, Artificial Sequence
  Description of Artificial Sequence: Synthetic oligonucleotide
  Antisense strand to SEQ ID NO: 1156240
agauucaaacugaugcagc

SEQ ID NO: 1156242 - RNA, 19 nt, Artificial Sequence
  Description of Artificial Sequence: Synthetic oligonucleotide
  Sense strand starting at position 702 of SEQ ID NO: 916432
uauuauggcugcguggaga

SEQ ID NO: 1156243 - RNA, 19 nt, Artificial Sequence
  Description of Artificial Sequence: Synthetic oligonucleotide
  Antisense strand to SEQ ID NO: 1156242
ucuccacgcagccauaaua

SEQ ID NO: 1156244 - RNA, 19 nt, Artificial Sequence
  Description of Artificial Sequence: Synthetic oligonucleotide
  Sense strand starting at position 931 of SEQ ID NO: 916432
cauggugaacuuugacuau

SEQ ID NO: 1156245 - RNA, 19 nt, Artificial Sequence
  Description of Artificial Sequence: Synthetic oligonucleotide
  Antisense strand to SEQ ID NO: 1156244
auagucaaaguucaccaug

SEQ ID NO: 1156246 - RNA, 19 nt, Artificial Sequence
  Description of Artificial Sequence: Synthetic oligonucleotide
  Sense strand starting at position 934 of SEQ ID NO: 916432
ggugaacuuugacuauuau

SEQ ID NO: 1156247 - RNA, 19 nt, Artificial Sequence
  Description of Artificial Sequence: Synthetic oligonucleotide
  Antisense strand to SEQ ID NO: 1156246
auaauagucaaaguucacc

SEQ ID NO: 1156248 - RNA, 19 nt, Artificial Sequence
  Description of Artificial Sequence: Synthetic oligonucleotide
  Sense strand starting at position 935 of SEQ ID NO: 916432
gugaacuuugacuauuauc

SEQ ID NO: 1156249 - RNA, 19 nt, Artificial Sequence
  Description of Artificial Sequence: Synthetic oligonucleotide
  Antisense strand to SEQ ID NO: 1156248
gauaauagucaaaguucac

SEQ ID NO: 1156250 - RNA, 19 nt, Artificial Sequence
  Description of Artificial Sequence: Synthetic oligonucleotide
  Sense strand starting at position 1137 of SEQ ID NO: 916432
uccaguuuaugccucauua

SEQ ID NO: 1156251 - RNA, 19 nt, Artificial Sequence
  Description of Artificial Sequence: Synthetic oligonucleotide
  Antisense strand to SEQ ID NO: 1156250
uaaugaggcauaaacugga

SEQ ID NO: 1156252 - RNA, 19 nt, Artificial Sequence
  Description of Artificial Sequence: Synthetic oligonucleotide
  Sense strand starting at position 1322 of SEQ ID NO: 916432
uagcgcuucuccuugggaa

SEQ ID NO: 1156253 - RNA, 19 nt, Artificial Sequence
  Description of Artificial Sequence: Synthetic oligonucleotide
  Antisense strand to SEQ ID NO: 1156252
uucccaaggagaagcgcua

SEQ ID NO: 1156254 - RNA, 19 nt, Artificial Sequence
  Description of Artificial Sequence: Synthetic oligonucleotide
  Sense strand starting at position 1323 of SEQ ID NO: 916432
agcgcuucuccuugggaaa

SEQ ID NO: 1156255 - RNA, 19 nt, Artificial Sequence
  Description of Artificial Sequence: Synthetic oligonucleotide
  Antisense strand to SEQ ID NO: 1156254
uuucccaaggagaagcgcu

SEQ ID NO: 1156256 - RNA, 19 nt, Artificial Sequence
  Description of Artificial Sequence: Synthetic oligonucleotide
  Sense strand starting at position 1324 of SEQ ID NO: 916432
gcgcuucuccuugggaaag

SEQ ID NO: 1156257 - RNA, 19 nt, Artificial Sequence
  Description of Artificial Sequence: Synthetic oligonucleotide
  Antisense strand to SEQ ID NO: 1156256
cuuucccaaggagaagcgc

SEQ ID NO: 1156258 - RNA, 19 nt, Artificial Sequence
  Description of Artificial Sequence: Synthetic oligonucleotide
  Sense strand starting at position 1330 of SEQ ID NO: 916432
cuccuugggaaaggucaaa

SEQ ID NO: 1156259 - RNA, 19 nt, Artificial Sequence
  Description of Artificial Sequence: Synthetic oligonucleotide
  Antisense strand to SEQ ID NO: 1156258
uuugaccuuucccaaggag

SEQ ID NO: 1156260 - RNA, 19 nt, Artificial Sequence
  Description of Artificial Sequence: Synthetic oligonucleotide
  Sense strand starting at position 1447 of SEQ ID NO: 916432
ugguguugaccgcaucuga

SEQ ID NO: 1156261 - RNA, 19 nt, Artificial Sequence
  Description of Artificial Sequence: Synthetic oligonucleotide
  Antisense strand to SEQ ID NO: 1156260
ucagaugcggucaacacca

SEQ ID NO: 1156262 - RNA, 19 nt, Artificial Sequence
  Description of Artificial Sequence: Synthetic oligonucleotide
  Sense strand starting at position 1634 of SEQ ID NO: 916432
aggucacucaguuauuagu

SEQ ID NO: 1156263 - RNA, 19 nt, Artificial Sequence
  Description of Artificial Sequence: Synthetic oligonucleotide
  Antisense strand to SEQ ID NO: 1156262
acuaauaacugagugaccu

SEQ ID NO: 1156264 - RNA, 19 nt, Artificial Sequence
  Description of Artificial Sequence: Synthetic oligonucleotide
  Sense strand starting at position 1636 of SEQ ID NO: 916432
gucacucaguuauuaguga

SEQ ID NO: 1156265 - RNA, 19 nt, Artificial Sequence
  Description of Artificial Sequence: Synthetic oligonucleotide
  Antisense strand to SEQ ID NO: 1156264
ucacuaauaacugagugac

SEQ ID NO: 1156266 - RNA, 19 nt, Artificial Sequence
  Description of Artificial Sequence: Synthetic oligonucleotide
  Sense strand starting at position 1866 of SEQ ID NO: 916432
ucgggcuuuguugcuaauu

SEQ ID NO: 1156267 - RNA, 19 nt, Artificial Sequence
  Description of Artificial Sequence: Synthetic oligonucleotide
  Antisense strand to SEQ ID NO: 1156266
aauuagcaacaaagcccga

SEQ ID NO: 1156268 - RNA, 19 nt, Artificial Sequence
  Description of Artificial Sequence: Synthetic oligonucleotide
  Sense strand starting at position 1867 of SEQ ID NO: 916432
cgggcuuuguugcuaauuu

SEQ ID NO: 1156269 - RNA, 19 nt, Artificial Sequence
  Description of Artificial Sequence: Synthetic oligonucleotide
  Antisense strand to SEQ ID NO: 1156268
aaauuagcaacaaagcccg

SEQ ID NO: 1156270 - RNA, 19 nt, Artificial Sequence
  Description of Artificial Sequence: Synthetic oligonucleotide
  Sense strand starting at position 1976 of SEQ ID NO: 916432
aaaugugaccucugcagga

SEQ ID NO: 1156271 - RNA, 19 nt, Artificial Sequence
  Description of Artificial Sequence: Synthetic oligonucleotide
  Antisense strand to SEQ ID NO: 1156270
uccugcagaggucacauuu

SEQ ID NO: 1156272 - RNA, 19 nt, Artificial Sequence
  Description of Artificial Sequence: Synthetic oligonucleotide
  Sense strand starting at position 1989 of SEQ ID NO: 916432
gcaggagucgacugaggaa

SEQ ID NO: 1156273 - RNA, 19 nt, Artificial Sequence
  Description of Artificial Sequence: Synthetic oligonucleotide
  Antisense strand to SEQ ID NO: 1156272
uuccucagucgacuccugc

SEQ ID NO: 1156274 - RNA, 19 nt, Artificial Sequence
  Description of Artificial Sequence: Synthetic oligonucleotide
  Sense strand starting at position 2036 of SEQ ID NO: 916432
gaagaacuccugcgagaga

SEQ ID NO: 1156275 - RNA, 19 nt, Artificial Sequence
  Description of Artificial Sequence: Synthetic oligonucleotide
  Antisense strand to SEQ ID NO: 1156274
ucucucgcaggaguucuuc

SEQ ID NO: 1156276 - RNA, 19 nt, Artificial Sequence
  Description of Artificial Sequence: Synthetic oligonucleotide
  Sense strand starting at position 2100 of SEQ ID NO: 916432
uggaauagguggcuacauu

SEQ ID NO: 1156277 - RNA, 19 nt, Artificial Sequence
  Description of Artificial Sequence: Synthetic oligonucleotide
  Antisense strand to SEQ ID NO: 1156276
aauguagccaccuauucca

SEQ ID NO: 1156278 - RNA, 19 nt, Artificial Sequence
  Description of Artificial Sequence: Synthetic oligonucleotide
  Sense strand starting at position 2236 of SEQ ID NO: 916432
uuaagaaaugccuggaggu

SEQ ID NO: 1156279 - RNA, 19 nt, Artificial Sequence
  Description of Artificial Sequence: Synthetic oligonucleotide
  Antisense strand to SEQ ID NO: 1156278
accuccaggcauuucuuaa

SEQ ID NO: 1156280 - RNA, 19 nt, Artificial Sequence
  Description of Artificial Sequence: Synthetic oligonucleotide
  Sense strand starting at position 2237 of SEQ ID NO: 916432
uaagaaaugccuggaggug

SEQ ID NO: 1156281 - RNA, 19 nt, Artificial Sequence
  Description of Artificial Sequence: Synthetic oligonucleotide
  Antisense strand to SEQ ID NO: 1156280
caccuccaggcauuucuua

SEQ ID NO: 1156282 - RNA, 19 nt, Artificial Sequence
  Description of Artificial Sequence: Synthetic oligonucleotide
  Sense strand starting at position 2269 of SEQ ID NO: 916432
gucugucugugacuuccau

SEQ ID NO: 1156283 - RNA, 19 nt, Artificial Sequence
  Description of Artificial Sequence: Synthetic oligonucleotide
  Antisense strand to SEQ ID NO: 1156282
auggaagucacagacagac

SEQ ID NO: 1156284 - RNA, 19 nt, Artificial Sequence
  Description of Artificial Sequence: Synthetic oligonucleotide
  Sense strand starting at position 2288 of SEQ ID NO: 916432
ucaugaacucucugaaguc

SEQ ID NO: 1156285 - RNA, 19 nt, Artificial Sequence
  Description of Artificial Sequence: Synthetic oligonucleotide
  Antisense strand to SEQ ID NO: 1156284
gacuucagagaguucauga

SEQ ID NO: 1156286 - RNA, 19 nt, Artificial Sequence
  Description of Artificial Sequence: Synthetic oligonucleotide
  Sense strand starting at position 2405 of SEQ ID NO: 916432
cugugaacuuguucuccau

SEQ ID NO: 1156287 - RNA, 19 nt, Artificial Sequence
  Description of Artificial Sequence: Synthetic oligonucleotide
  Antisense strand to SEQ ID NO: 1156286
auggagaacaaguucacag

SEQ ID NO: 1156288 - RNA, 19 nt, Artificial Sequence
  Description of Artificial Sequence: Synthetic oligonucleotide
  Sense strand starting at position 2549 of SEQ ID NO: 916432
caggacuaacuuggucaaa

SEQ ID NO: 1156289 - RNA, 19 nt, Artificial Sequence
  Description of Artificial Sequence: Synthetic oligonucleotide
  Antisense strand to SEQ ID NO: 1156288
uuugaccaaguuaguccug

SEQ ID NO: 1156290 - RNA, 19 nt, Artificial Sequence
  Description of Artificial Sequence: Synthetic oligonucleotide
  Sense strand starting at position 2562 of SEQ ID NO: 916432
gucaaagaaccauaguuuc

SEQ ID NO: 1156291 - RNA, 19 nt, Artificial Sequence
  Description of Artificial Sequence: Synthetic oligonucleotide
  Antisense strand to SEQ ID NO: 1156290
gaaacuaugguucuuugac

SEQ ID NO: 1156292 - RNA, 19 nt, Artificial Sequence
  Description of Artificial Sequence: Synthetic oligonucleotide
  Sense strand starting at position 2570 of SEQ ID NO: 916432
accauaguuucugcaccau

SEQ ID NO: 1156293 - RNA, 19 nt, Artificial Sequence
  Description of Artificial Sequence: Synthetic oligonucleotide
  Antisense strand to SEQ ID NO: 1156292
auggugcagaaacuauggu

SEQ ID NO: 1156294 - RNA, 19 nt, Artificial Sequence
  Description of Artificial Sequence: Synthetic oligonucleotide
  Sense strand starting at position 2704 of SEQ ID NO: 916432
ggccacugguagcuuuaaa

SEQ ID NO: 1156295 - RNA, 19 nt, Artificial Sequence
  Description of Artificial Sequence: Synthetic oligonucleotide
  Antisense strand to SEQ ID NO: 1156294
uuuaaagcuaccaguggcc

SEQ ID NO: 1156296 - RNA, 19 nt, Artificial Sequence
  Description of Artificial Sequence: Synthetic oligonucleotide
  Sense strand starting at position 2802 of SEQ ID NO: 916432
uuuacaaagcuuugucaga

SEQ ID NO: 1156297 - RNA, 19 nt, Artificial Sequence
  Description of Artificial Sequence: Synthetic oligonucleotide
  Antisense strand to SEQ ID NO: 1156296
ucugacaaagcuuuguaaa

SEQ ID NO: 1156298 - RNA, 19 nt, Artificial Sequence
  Description of Artificial Sequence: Synthetic oligonucleotide
  Sense strand starting at position 2809 of SEQ ID NO: 916432
agcuuugucagaggucaag

SEQ ID NO: 1156299 - RNA, 19 nt, Artificial Sequence
  Description of Artificial Sequence: Synthetic oligonucleotide
  Antisense strand to SEQ ID NO: 1156298
cuugaccucugacaaagcu

SEQ ID NO: 1156300 - RNA, 19 nt, Artificial Sequence
  Description of Artificial Sequence: Synthetic oligonucleotide
  Sense strand starting at position 3185 of SEQ ID NO: 916432
uugacuuguucuguacaua

SEQ ID NO: 1156301 - RNA, 19 nt, Artificial Sequence
  Description of Artificial Sequence: Synthetic oligonucleotide
  Antisense strand to SEQ ID NO: 1156300
uauguacagaacaagucaa

SEQ ID NO: 1156302 - RNA, 19 nt, Artificial Sequence
  Description of Artificial Sequence: Synthetic oligonucleotide
  Sense strand starting at position 3186 of SEQ ID NO: 916432
ugacuuguucuguacauag

SEQ ID NO: 1156303 - RNA, 19 nt, Artificial Sequence
  Description of Artificial Sequence: Synthetic oligonucleotide
  Antisense strand to SEQ ID NO: 1156302
cuauguacagaacaaguca

SEQ ID NO: 1156304 - RNA, 19 nt, Artificial Sequence
  Description of Artificial Sequence: Synthetic oligonucleotide
  Sense strand starting at position 3325 of SEQ ID NO: 916432
ccaguaugugugagugugu

SEQ ID NO: 1156305 - RNA, 19 nt, Artificial Sequence
  Description of Artificial Sequence: Synthetic oligonucleotide
  Antisense strand to SEQ ID NO: 1156304
acacacucacacauacugg

SEQ ID NO: 1156306 - RNA, 19 nt, Artificial Sequence
  Description of Artificial Sequence: Synthetic oligonucleotide
  Sense strand starting at position 3541 of SEQ ID NO: 916432
ccaacuguaugaucuguua

SEQ ID NO: 1156307 - RNA, 19 nt, Artificial Sequence
  Description of Artificial Sequence: Synthetic oligonucleotide
  Antisense strand to SEQ ID NO: 1156306
uaacagaucauacaguugg

SEQ ID NO: 1156308 - RNA, 19 nt, Artificial Sequence
  Description of Artificial Sequence: Synthetic oligonucleotide
  Sense strand starting at position 3652 of SEQ ID NO: 916432
ugggauuauuccucugccu

SEQ ID NO: 1156309 - RNA, 19 nt, Artificial Sequence
  Description of Artificial Sequence: Synthetic oligonucleotide
  Antisense strand to SEQ ID NO: 1156308
aggcagaggaauaauccca

SEQ ID NO: 1156310 - RNA, 19 nt, Artificial Sequence
  Description of Artificial Sequence: Synthetic oligonucleotide
  Sense strand starting at position 3654 of SEQ ID NO: 916432
ggauuauuccucugccuac

SEQ ID NO: 1156311 - RNA, 19 nt, Artificial Sequence
  Description of Artificial Sequence: Synthetic oligonucleotide
  Antisense strand to SEQ ID NO: 1156310
guaggcagaggaauaaucc

SEQ ID NO: 1156312 - RNA, 19 nt, Artificial Sequence
  Description of Artificial Sequence: Synthetic oligonucleotide
  Sense strand starting at position 3678 of SEQ ID NO: 916432
caucauucgcgguaauuag

SEQ ID NO: 1156313 - RNA, 19 nt, Artificial Sequence
  Description of Artificial Sequence: Synthetic oligonucleotide
  Antisense strand to SEQ ID NO: 1156312
cuaauuaccgcgaaugaug

SEQ ID NO: 1156314 - RNA, 19 nt, Artificial Sequence
  Description of Artificial Sequence: Synthetic oligonucleotide
  Sense strand starting at position 3715 of SEQ ID NO: 916432
gcaguaagauuccugauau

SEQ ID NO: 1156315 - RNA, 19 nt, Artificial Sequence
  Description of Artificial Sequence: Synthetic oligonucleotide
  Antisense strand to SEQ ID NO: 1156314
auaucaggaaucuuacugc

SEQ ID NO: 1156316 - RNA, 19 nt, Artificial Sequence
  Description of Artificial Sequence: Synthetic oligonucleotide
  Sense strand starting at position 50 of SEQ ID NO: 916433
agaagaacaugucugggua

SEQ ID NO: 1156317 - RNA, 19 nt, Artificial Sequence
  Description of Artificial Sequence: Synthetic oligonucleotide
  Antisense strand to SEQ ID NO: 1156316
uacccagacauguucuucu

SEQ ID NO: 1156318 - RNA, 19 nt, Artificial Sequence
  Description of Artificial Sequence: Synthetic oligonucleotide
  Sense strand starting at position 53 of SEQ ID NO: 916433
agaacaugucuggguagag

SEQ ID NO: 1156319 - RNA, 19 nt, Artificial Sequence
  Description of Artificial Sequence: Synthetic oligonucleotide
  Antisense strand to SEQ ID NO: 1156318
cucuacccagacauguucu

SEQ ID NO: 1156320 - RNA, 19 nt, Artificial Sequence
  Description of Artificial Sequence: Synthetic oligonucleotide
  Sense strand starting at position 54 of SEQ ID NO: 916433
gaacaugucuggguagagu

SEQ ID NO: 1156321 - RNA, 19 nt, Artificial Sequence
  Description of Artificial Sequence: Synthetic oligonucleotide
  Antisense strand to SEQ ID NO: 1156320
acucuacccagacauguuc

SEQ ID NO: 1156322 - RNA, 19 nt, Artificial Sequence
  Description of Artificial Sequence: Synthetic oligonucleotide
  Sense strand starting at position 137 of SEQ ID NO: 916433
uuuagauuggcauguaaau

SEQ ID NO: 1156323 - RNA, 19 nt, Artificial Sequence
  Description of Artificial Sequence: Synthetic oligonucleotide
  Antisense strand to SEQ ID NO: 1156322
auuuacaugccaaucuaaa

SEQ ID NO: 1156324 - RNA, 19 nt, Artificial Sequence
  Description of Artificial Sequence: Synthetic oligonucleotide
  Sense strand starting at position 153 of SEQ ID NO: 916433
aauuguucugagggaaauu

SEQ ID NO: 1156325 - RNA, 19 nt, Artificial Sequence
  Description of Artificial Sequence: Synthetic oligonucleotide
  Antisense strand to SEQ ID NO: 1156324
aauuucccucagaacaauu

SEQ ID NO: 1156326 - RNA, 19 nt, Artificial Sequence
  Description of Artificial Sequence: Synthetic oligonucleotide
  Sense strand starting at position 164 of SEQ ID NO: 916433
gggaaauucuuauugccuc

SEQ ID NO: 1156327 - RNA, 19 nt, Artificial Sequence
  Description of Artificial Sequence: Synthetic oligonucleotide
  Antisense strand to SEQ ID NO: 1156326
gaggcaauaagaauuuccc

SEQ ID NO: 1156328 - RNA, 19 nt, Artificial Sequence
  Description of Artificial Sequence: Synthetic oligonucleotide
  Sense strand starting at position 190 of SEQ ID NO: 916433
cugccauucugaguuauuu

SEQ ID NO: 1156329 - RNA, 19 nt, Artificial Sequence
  Description of Artificial Sequence: Synthetic oligonucleotide
  Antisense strand to SEQ ID NO: 1156328
aaauaacucagaauggcag

SEQ ID NO: 1156330 - RNA, 19 nt, Artificial Sequence
  Description of Artificial Sequence: Synthetic oligonucleotide
  Sense strand starting at position 314 of SEQ ID NO: 916433
uuuaauugccuggauugca

SEQ ID NO: 1156331 - RNA, 19 nt, Artificial Sequence
  Description of Artificial Sequence: Synthetic oligonucleotide
  Antisense strand to SEQ ID NO: 1156330
ugcaauccaggcaauuaaa

SEQ ID NO: 1156332 - RNA, 19 nt, Artificial Sequence
  Description of Artificial Sequence: Synthetic oligonucleotide
  Sense strand starting at position 322 of SEQ ID NO: 916433
ccuggauugcauugugaag

SEQ ID NO: 1156333 - RNA, 19 nt, Artificial Sequence
  Description of Artificial Sequence: Synthetic oligonucleotide
  Antisense strand to SEQ ID NO: 1156332
cuucacaaugcaauccagg

SEQ ID NO: 1156334 - RNA, 19 nt, Artificial Sequence
  Description of Artificial Sequence: Synthetic oligonucleotide
  Sense strand starting at position 351 of SEQ ID NO: 916433
guugauugccuccauuaug

SEQ ID NO: 1156335 - RNA, 19 nt, Artificial Sequence
  Description of Artificial Sequence: Synthetic oligonucleotide
  Antisense strand to SEQ ID NO: 1156334
cauaauggaggcaaucaac

SEQ ID NO: 1156336 - RNA, 19 nt, Artificial Sequence
  Description of Artificial Sequence: Synthetic oligonucleotide
  Sense strand starting at position 371 of SEQ ID NO: 916433
ucccuuguucuguaccauu

SEQ ID NO: 1156337 - RNA, 19 nt, Artificial Sequence
  Description of Artificial Sequence: Synthetic oligonucleotide
  Antisense strand to SEQ ID NO: 1156336
aaugguacagaacaaggga

SEQ ID NO: 1156338 - RNA, 19 nt, Artificial Sequence
  Description of Artificial Sequence: Synthetic oligonucleotide
  Sense strand starting at position 476 of SEQ ID NO: 916433
augaaagauuugcagcacu

SEQ ID NO: 1156339 - RNA, 19 nt, Artificial Sequence
  Description of Artificial Sequence: Synthetic oligonucleotide
  Antisense strand to SEQ ID NO: 1156338
agugcugcaaaucuuucau

SEQ ID NO: 1156340 - RNA, 19 nt, Artificial Sequence
  Description of Artificial Sequence: Synthetic oligonucleotide
  Sense strand starting at position 1039 of SEQ ID NO: 916433
agcugcaaggcucagagau

SEQ ID NO: 1156341 - RNA, 19 nt, Artificial Sequence
  Description of Artificial Sequence: Synthetic oligonucleotide
  Antisense strand to SEQ ID NO: 1156340
aucucugagccuugcagcu

SEQ ID NO: 1156342 - RNA, 19 nt, Artificial Sequence
  Description of Artificial Sequence: Synthetic oligonucleotide
  Sense strand starting at position 1133 of SEQ ID NO: 916433
acaagagauuugcaagacu

SEQ ID NO: 1156343 - RNA, 19 nt, Artificial Sequence
  Description of Artificial Sequence: Synthetic oligonucleotide
  Antisense strand to SEQ ID NO: 1156342
agucuugcaaaucucuugu

SEQ ID NO: 1156344 - RNA, 19 nt, Artificial Sequence
  Description of Artificial Sequence: Synthetic oligonucleotide
  Sense strand starting at position 1220 of SEQ ID NO: 916433
caaagaaucccuugcggag

SEQ ID NO: 1156345 - RNA, 19 nt, Artificial Sequence
  Description of Artificial Sequence: Synthetic oligonucleotide
  Antisense strand to SEQ ID NO: 1156344
cuccgcaagggauucuuug

SEQ ID NO: 1156346 - RNA, 19 nt, Artificial Sequence
  Description of Artificial Sequence: Synthetic oligonucleotide
  Sense strand starting at position 1280 of SEQ ID NO: 916433
cagggaugguuugcaaaga

SEQ ID NO: 1156347 - RNA, 19 nt, Artificial Sequence
  Description of Artificial Sequence: Synthetic oligonucleotide
  Antisense strand to SEQ ID NO: 1156346
ucuuugcaaaccaucccug

SEQ ID NO: 1156348 - RNA, 19 nt, Artificial Sequence
  Description of Artificial Sequence: Synthetic oligonucleotide
  Sense strand starting at position 1285 of SEQ ID NO: 916433
augguuugcaaagaaugua

SEQ ID NO: 1156349 - RNA, 19 nt, Artificial Sequence
  Description of Artificial Sequence: Synthetic oligonucleotide
  Antisense strand to SEQ ID NO: 1156348
uacauucuuugcaaaccau

SEQ ID NO: 1156350 - RNA, 19 nt, Artificial Sequence
  Description of Artificial Sequence: Synthetic oligonucleotide
  Sense strand starting at position 1301 of SEQ ID NO: 916433
guagcaguauuuguugcau

SEQ ID NO: 1156351 - RNA, 19 nt, Artificial Sequence
  Description of Artificial Sequence: Synthetic oligonucleotide
  Antisense strand to SEQ ID NO: 1156350
augcaacaaauacugcuac

SEQ ID NO: 1156352 - RNA, 19 nt, Artificial Sequence
  Description of Artificial Sequence: Synthetic oligonucleotide
  Sense strand starting at position 1315 of SEQ ID NO: 916433
ugcaucuagcaagauuaau

SEQ ID NO: 1156353 - RNA, 19 nt, Artificial Sequence
  Description of Artificial Sequence: Synthetic oligonucleotide
  Antisense strand to SEQ ID NO: 1156352
auuaaucuugcuagaugca

SEQ ID NO: 1156354 - RNA, 19 nt, Artificial Sequence
  Description of Artificial Sequence: Synthetic oligonucleotide
  Sense strand starting at position 1321 of SEQ ID NO: 916433
uagcaagauuaauugguuu

SEQ ID NO: 1156355 - RNA, 19 nt, Artificial Sequence
  Description of Artificial Sequence: Synthetic oligonucleotide
  Antisense strand to SEQ ID NO: 1156354
aaaccaauuaaucuugcua

SEQ ID NO: 1156356 - RNA, 19 nt, Artificial Sequence
  Description of Artificial Sequence: Synthetic oligonucleotide
  Sense strand starting at position 1327 of SEQ ID NO: 916433
gauuaauugguuuaagcag

SEQ ID NO: 1156357 - RNA, 19 nt, Artificial Sequence
  Description of Artificial Sequence: Synthetic oligonucleotide
  Antisense strand to SEQ ID NO: 1156356
cugcuuaaaccaauuaauc

SEQ ID NO: 1156358 - RNA, 19 nt, Artificial Sequence
  Description of Artificial Sequence: Synthetic oligonucleotide
  Sense strand starting at position 1590 of SEQ ID NO: 916433
cuugauuucgcuuaagugu

SEQ ID NO: 1156359 - RNA, 19 nt, Artificial Sequence
  Description of Artificial Sequence: Synthetic oligonucleotide
  Antisense strand to SEQ ID NO: 1156358
acacuuaagcgaaaucaag

SEQ ID NO: 1156360 - RNA, 19 nt, Artificial Sequence
  Description of Artificial Sequence: Synthetic oligonucleotide
  Sense strand starting at position 1756 of SEQ ID NO: 916433
aaugauggcgaaugacaaa

SEQ ID NO: 1156361 - RNA, 19 nt, Artificial Sequence
  Description of Artificial Sequence: Synthetic oligonucleotide
  Antisense strand to SEQ ID NO: 1156360
uuugucauucgccaucauu

SEQ ID NO: 1156362 - RNA, 19 nt, Artificial Sequence
  Description of Artificial Sequence: Synthetic oligonucleotide
  Sense strand starting at position 2352 of SEQ ID NO: 916433
cauggugaacuuugacuau

SEQ ID NO: 1156363 - RNA, 19 nt, Artificial Sequence
  Description of Artificial Sequence: Synthetic oligonucleotide
  Antisense strand to SEQ ID NO: 1156362
auagucaaaguucaccaug

SEQ ID NO: 1156364 - RNA, 19 nt, Artificial Sequence
  Description of Artificial Sequence: Synthetic oligonucleotide
  Sense strand starting at position 2355 of SEQ ID NO: 916433
ggugaacuuugacuauuau

SEQ ID NO: 1156365 - RNA, 19 nt, Artificial Sequence
  Description of Artificial Sequence: Synthetic oligonucleotide
  Antisense strand to SEQ ID NO: 1156364
auaauagucaaaguucacc

SEQ ID NO: 1156366 - RNA, 19 nt, Artificial Sequence
  Description of Artificial Sequence: Synthetic oligonucleotide
  Sense strand starting at position 2356 of SEQ ID NO: 916433
gugaacuuugacuauuauc

SEQ ID NO: 1156367 - RNA, 19 nt, Artificial Sequence
  Description of Artificial Sequence: Synthetic oligonucleotide
  Antisense strand to SEQ ID NO: 1156366
gauaauagucaaaguucac

SEQ ID NO: 1156368 - RNA, 19 nt, Artificial Sequence
  Description of Artificial Sequence: Synthetic oligonucleotide
  Sense strand starting at position 2751 of SEQ ID NO: 916433
cuccuugggaaaggucaaa

SEQ ID NO: 1156369 - RNA, 19 nt, Artificial Sequence
  Description of Artificial Sequence: Synthetic oligonucleotide
  Antisense strand to SEQ ID NO: 1156368
uuugaccuuucccaaggag

SEQ ID NO: 1156370 - RNA, 19 nt, Artificial Sequence
  Description of Artificial Sequence: Synthetic oligonucleotide
  Sense strand starting at position 3055 of SEQ ID NO: 916433
aggucacucaguuauuagu

SEQ ID NO: 1156371 - RNA, 19 nt, Artificial Sequence
  Description of Artificial Sequence: Synthetic oligonucleotide
  Antisense strand to SEQ ID NO: 1156370
acuaauaacugagugaccu

SEQ ID NO: 1156372 - RNA, 19 nt, Artificial Sequence
  Description of Artificial Sequence: Synthetic oligonucleotide
  Sense strand starting at position 3057 of SEQ ID NO: 916433
gucacucaguuauuaguga

SEQ ID NO: 1156373 - RNA, 19 nt, Artificial Sequence
  Description of Artificial Sequence: Synthetic oligonucleotide
  Antisense strand to SEQ ID NO: 1156372
ucacuaauaacugagugac

SEQ ID NO: 1156374 - RNA, 19 nt, Artificial Sequence
  Description of Artificial Sequence: Synthetic oligonucleotide
  Sense strand starting at position 3287 of SEQ ID NO: 916433
ucgggcuuuguugcuaauu

SEQ ID NO: 1156375 - RNA, 19 nt, Artificial Sequence
  Description of Artificial Sequence: Synthetic oligonucleotide
  Antisense strand to SEQ ID NO: 1156374
aauuagcaacaaagcccga

SEQ ID NO: 1156376 - RNA, 19 nt, Artificial Sequence
  Description of Artificial Sequence: Synthetic oligonucleotide
  Sense strand starting at position 3288 of SEQ ID NO: 916433
cgggcuuuguugcuaauuu

SEQ ID NO: 1156377 - RNA, 19 nt, Artificial Sequence
  Description of Artificial Sequence: Synthetic oligonucleotide
  Antisense strand to SEQ ID NO: 1156376
aaauuagcaacaaagcccg

SEQ ID NO: 1156378 - RNA, 19 nt, Artificial Sequence
  Description of Artificial Sequence: Synthetic oligonucleotide
  Sense strand starting at position 3397 of SEQ ID NO: 916433
aaaugugaccucugcagga

SEQ ID NO: 1156379 - RNA, 19 nt, Artificial Sequence
  Description of Artificial Sequence: Synthetic oligonucleotide
  Antisense strand to SEQ ID NO: 1156378
uccugcagaggucacauuu

SEQ ID NO: 1156380 - RNA, 19 nt, Artificial Sequence
  Description of Artificial Sequence: Synthetic oligonucleotide
  Sense strand starting at position 3410 of SEQ ID NO: 916433
gcaggagucgacugaggaa

SEQ ID NO: 1156381 - RNA, 19 nt, Artificial Sequence
  Description of Artificial Sequence: Synthetic oligonucleotide
  Antisense strand to SEQ ID NO: 1156380
uuccucagucgacuccugc

SEQ ID NO: 1156382 - RNA, 19 nt, Artificial Sequence
  Description of Artificial Sequence: Synthetic oligonucleotide
  Sense strand starting at position 3457 of SEQ ID NO: 916433
gaagaacuccugcgagaga

SEQ ID NO: 1156383 - RNA, 19 nt, Artificial Sequence
  Description of Artificial Sequence: Synthetic oligonucleotide
  Antisense strand to SEQ ID NO: 1156382
ucucucgcaggaguucuuc

SEQ ID NO: 1156384 - RNA, 19 nt, Artificial Sequence
  Description of Artificial Sequence: Synthetic oligonucleotide
  Sense strand starting at position 3521 of SEQ ID NO: 916433
uggaauagguggcuacauu

SEQ ID NO: 1156385 - RNA, 19 nt, Artificial Sequence
  Description of Artificial Sequence: Synthetic oligonucleotide
  Antisense strand to SEQ ID NO: 1156384
aauguagccaccuauucca

SEQ ID NO: 1156386 - RNA, 19 nt, Artificial Sequence
  Description of Artificial Sequence: Synthetic oligonucleotide
  Sense strand starting at position 3657 of SEQ ID NO: 916433
uuaagaaaugccuggaggu

SEQ ID NO: 1156387 - RNA, 19 nt, Artificial Sequence
  Description of Artificial Sequence: Synthetic oligonucleotide
  Antisense strand to SEQ ID NO: 1156386
accuccaggcauuucuuaa

SEQ ID NO: 1156388 - RNA, 19 nt, Artificial Sequence
  Description of Artificial Sequence: Synthetic oligonucleotide
  Sense strand starting at position 3658 of SEQ ID NO: 916433
uaagaaaugccuggaggug

SEQ ID NO: 1156389 - RNA, 19 nt, Artificial Sequence
  Description of Artificial Sequence: Synthetic oligonucleotide
  Antisense strand to SEQ ID NO: 1156388
caccuccaggcauuucuua

SEQ ID NO: 1156390 - RNA, 19 nt, Artificial Sequence
  Description of Artificial Sequence: Synthetic oligonucleotide
  Sense strand starting at position 3709 of SEQ ID NO: 916433
ucaugaacucucugaaguc

SEQ ID NO: 1156391 - RNA, 19 nt, Artificial Sequence
  Description of Artificial Sequence: Synthetic oligonucleotide
  Antisense strand to SEQ ID NO: 1156390
gacuucagagaguucauga

SEQ ID NO: 1156392 - RNA, 19 nt, Artificial Sequence
  Description of Artificial Sequence: Synthetic oligonucleotide
  Sense strand starting at position 3970 of SEQ ID NO: 916433
caggacuaacuuggucaaa

SEQ ID NO: 1156393 - RNA, 19 nt, Artificial Sequence
  Description of Artificial Sequence: Synthetic oligonucleotide
  Antisense strand to SEQ ID NO: 1156392
uuugaccaaguuaguccug

SEQ ID NO: 1156394 - RNA, 19 nt, Artificial Sequence
  Description of Artificial Sequence: Synthetic oligonucleotide
  Sense strand starting at position 3983 of SEQ ID NO: 916433
gucaaagaaccauaguuuc

SEQ ID NO: 1156395 - RNA, 19 nt, Artificial Sequence
  Description of Artificial Sequence: Synthetic oligonucleotide
  Antisense strand to SEQ ID NO: 1156394
gaaacuaugguucuuugac

SEQ ID NO: 1156396 - RNA, 19 nt, Artificial Sequence
  Description of Artificial Sequence: Synthetic oligonucleotide
  Sense strand starting at position 448 of SEQ ID NO: 916434
agcugcaaggcucagagau

SEQ ID NO: 1156397 - RNA, 19 nt, Artificial Sequence
  Description of Artificial Sequence: Synthetic oligonucleotide
  Antisense strand to SEQ ID NO: 1156396
aucucugagccuugcagcu

SEQ ID NO: 1156398 - RNA, 19 nt, Artificial Sequence
  Description of Artificial Sequence: Synthetic oligonucleotide
  Sense strand starting at position 542 of SEQ ID NO: 916434
acaagagauuugcaagacu

SEQ ID NO: 1156399 - RNA, 19 nt, Artificial Sequence
  Description of Artificial Sequence: Synthetic oligonucleotide
  Antisense strand to SEQ ID NO: 1156398
agucuugcaaaucucuugu

SEQ ID NO: 1156400 - RNA, 19 nt, Artificial Sequence
  Description of Artificial Sequence: Synthetic oligonucleotide
  Sense strand starting at position 629 of SEQ ID NO: 916434
caaagaaucccuugcggag

SEQ ID NO: 1156401 - RNA, 19 nt, Artificial Sequence
  Description of Artificial Sequence: Synthetic oligonucleotide
  Antisense strand to SEQ ID NO: 1156400
cuccgcaagggauucuuug

SEQ ID NO: 1156402 - RNA, 19 nt, Artificial Sequence
  Description of Artificial Sequence: Synthetic oligonucleotide
  Sense strand starting at position 645 of SEQ ID NO: 916434
gaguuuaugcuccagccuu

SEQ ID NO: 1156403 - RNA, 19 nt, Artificial Sequence
  Description of Artificial Sequence: Synthetic oligonucleotide
  Antisense strand to SEQ ID NO: 1156402
aaggcuggagcauaaacuc

SEQ ID NO: 1156404 - RNA, 19 nt, Artificial Sequence
  Description of Artificial Sequence: Synthetic oligonucleotide
  Sense strand starting at position 689 of SEQ ID NO: 916434
cagggaugguuugcaaaga

SEQ ID NO: 1156405 - RNA, 19 nt, Artificial Sequence
  Description of Artificial Sequence: Synthetic oligonucleotide
  Antisense strand to SEQ ID NO: 1156404
ucuuugcaaaccaucccug

SEQ ID NO: 1156406 - RNA, 19 nt, Artificial Sequence
  Description of Artificial Sequence: Synthetic oligonucleotide
  Sense strand starting at position 694 of SEQ ID NO: 916434
augguuugcaaagaaugua

SEQ ID NO: 1156407 - RNA, 19 nt, Artificial Sequence
  Description of Artificial Sequence: Synthetic oligonucleotide
  Antisense strand to SEQ ID NO: 1156406
uacauucuuugcaaaccau

SEQ ID NO: 1156408 - RNA, 19 nt, Artificial Sequence
  Description of Artificial Sequence: Synthetic oligonucleotide
  Sense strand starting at position 710 of SEQ ID NO: 916434
guagcaguauuuguugcau

SEQ ID NO: 1156409 - RNA, 19 nt, Artificial Sequence
  Description of Artificial Sequence: Synthetic oligonucleotide
  Antisense strand to SEQ ID NO: 1156408
augcaacaaauacugcuac

SEQ ID NO: 1156410 - RNA, 19 nt, Artificial Sequence
  Description of Artificial Sequence: Synthetic oligonucleotide
  Sense strand starting at position 724 of SEQ ID NO: 916434
ugcaucuagcaagauuaau

SEQ ID NO: 1156411 - RNA, 19 nt, Artificial Sequence
  Description of Artificial Sequence: Synthetic oligonucleotide
  Antisense strand to SEQ ID NO: 1156410
auuaaucuugcuagaugca

SEQ ID NO: 1156412 - RNA, 19 nt, Artificial Sequence
  Description of Artificial Sequence: Synthetic oligonucleotide
  Sense strand starting at position 730 of SEQ ID NO: 916434
uagcaagauuaauugguuu

SEQ ID NO: 1156413 - RNA, 19 nt, Artificial Sequence
  Description of Artificial Sequence: Synthetic oligonucleotide
  Antisense strand to SEQ ID NO: 1156412
aaaccaauuaaucuugcua

SEQ ID NO: 1156414 - RNA, 19 nt, Artificial Sequence
  Description of Artificial Sequence: Synthetic oligonucleotide
  Sense strand starting at position 736 of SEQ ID NO: 916434
gauuaauugguuuaagcag

SEQ ID NO: 1156415 - RNA, 19 nt, Artificial Sequence
  Description of Artificial Sequence: Synthetic oligonucleotide
  Antisense strand to SEQ ID NO: 1156414
cugcuuaaaccaauuaauc

SEQ ID NO: 1156416 - RNA, 19 nt, Artificial Sequence
  Description of Artificial Sequence: Synthetic oligonucleotide
  Sense strand starting at position 999 of SEQ ID NO: 916434
cuugauuucgcuuaagugu

SEQ ID NO: 1156417 - RNA, 19 nt, Artificial Sequence
  Description of Artificial Sequence: Synthetic oligonucleotide
  Antisense strand to SEQ ID NO: 1156416
acacuuaagcgaaaucaag

SEQ ID NO: 1156418 - RNA, 19 nt, Artificial Sequence
  Description of Artificial Sequence: Synthetic oligonucleotide
  Sense strand starting at position 1165 of SEQ ID NO: 916434
aaugauggcgaaugacaaa

SEQ ID NO: 1156419 - RNA, 19 nt, Artificial Sequence
  Description of Artificial Sequence: Synthetic oligonucleotide
  Antisense strand to SEQ ID NO: 1156418
uuugucauucgccaucauu

SEQ ID NO: 1156420 - RNA, 19 nt, Artificial Sequence
  Description of Artificial Sequence: Synthetic oligonucleotide
  Sense strand starting at position 1375 of SEQ ID NO: 916434
gcugcaucaguuugaaucu

SEQ ID NO: 1156421 - RNA, 19 nt, Artificial Sequence
  Description of Artificial Sequence: Synthetic oligonucleotide
  Antisense strand to SEQ ID NO: 1156420
agauucaaacugaugcagc

SEQ ID NO: 1156422 - RNA, 19 nt, Artificial Sequence
  Description of Artificial Sequence: Synthetic oligonucleotide
  Sense strand starting at position 1532 of SEQ ID NO: 916434
uauuauggcugcguggaga

SEQ ID NO: 1156423 - RNA, 19 nt, Artificial Sequence
  Description of Artificial Sequence: Synthetic oligonucleotide
  Antisense strand to SEQ ID NO: 1156422
ucuccacgcagccauaaua

SEQ ID NO: 1156424 - RNA, 19 nt, Artificial Sequence
  Description of Artificial Sequence: Synthetic oligonucleotide
  Sense strand starting at position 1761 of SEQ ID NO: 916434
cauggugaacuuugacuau

SEQ ID NO: 1156425 - RNA, 19 nt, Artificial Sequence
  Description of Artificial Sequence: Synthetic oligonucleotide
  Antisense strand to SEQ ID NO: 1156424
auagucaaaguucaccaug

SEQ ID NO: 1156426 - RNA, 19 nt, Artificial Sequence
  Description of Artificial Sequence: Synthetic oligonucleotide
  Sense strand starting at position 1764 of SEQ ID NO: 916434
ggugaacuuugacuauuau

SEQ ID NO: 1156427 - RNA, 19 nt, Artificial Sequence
  Description of Artificial Sequence: Synthetic oligonucleotide
  Antisense strand to SEQ ID NO: 1156426
auaauagucaaaguucacc

SEQ ID NO: 1156428 - RNA, 19 nt, Artificial Sequence
  Description of Artificial Sequence: Synthetic oligonucleotide
  Sense strand starting at position 1765 of SEQ ID NO: 916434
gugaacuuugacuauuauc

SEQ ID NO: 1156429 - RNA, 19 nt, Artificial Sequence
  Description of Artificial Sequence: Synthetic oligonucleotide
  Antisense strand to SEQ ID NO: 1156428
gauaauagucaaaguucac

SEQ ID NO: 1156430 - RNA, 19 nt, Artificial Sequence
  Description of Artificial Sequence: Synthetic oligonucleotide
  Sense strand starting at position 1967 of SEQ ID NO: 916434
uccaguuuaugccucauua

SEQ ID NO: 1156431 - RNA, 19 nt, Artificial Sequence
  Description of Artificial Sequence: Synthetic oligonucleotide
  Antisense strand to SEQ ID NO: 1156430
uaaugaggcauaaacugga

SEQ ID NO: 1156432 - RNA, 19 nt, Artificial Sequence
  Description of Artificial Sequence: Synthetic oligonucleotide
  Sense strand starting at position 2153 of SEQ ID NO: 916434
agcgcuucuccuugggaaa

SEQ ID NO: 1156433 - RNA, 19 nt, Artificial Sequence
  Description of Artificial Sequence: Synthetic oligonucleotide
  Antisense strand to SEQ ID NO: 1156432
uuucccaaggagaagcgcu

SEQ ID NO: 1156434 - RNA, 19 nt, Artificial Sequence
  Description of Artificial Sequence: Synthetic oligonucleotide
  Sense strand starting at position 2154 of SEQ ID NO: 916434
gcgcuucuccuugggaaag

SEQ ID NO: 1156435 - RNA, 19 nt, Artificial Sequence
  Description of Artificial Sequence: Synthetic oligonucleotide
  Antisense strand to SEQ ID NO: 1156434
cuuucccaaggagaagcgc

SEQ ID NO: 1156436 - RNA, 19 nt, Artificial Sequence
  Description of Artificial Sequence: Synthetic oligonucleotide
  Sense strand starting at position 2160 of SEQ ID NO: 916434
cuccuugggaaaggucaaa

SEQ ID NO: 1156437 - RNA, 19 nt, Artificial Sequence
  Description of Artificial Sequence: Synthetic oligonucleotide
  Antisense strand to SEQ ID NO: 1156436
uuugaccuuucccaaggag

SEQ ID NO: 1156438 - RNA, 19 nt, Artificial Sequence
  Description of Artificial Sequence: Synthetic oligonucleotide
  Sense strand starting at position 2277 of SEQ ID NO: 916434
ugguguugaccgcaucuga

SEQ ID NO: 1156439 - RNA, 19 nt, Artificial Sequence
  Description of Artificial Sequence: Synthetic oligonucleotide
  Antisense strand to SEQ ID NO: 1156438
ucagaugcggucaacacca

SEQ ID NO: 1156440 - RNA, 19 nt, Artificial Sequence
  Description of Artificial Sequence: Synthetic oligonucleotide
  Sense strand starting at position 2464 of SEQ ID NO: 916434
aggucacucaguuauuagu

SEQ ID NO: 1156441 - RNA, 19 nt, Artificial Sequence
  Description of Artificial Sequence: Synthetic oligonucleotide
  Antisense strand to SEQ ID NO: 1156440
acuaauaacugagugaccu

SEQ ID NO: 1156442 - RNA, 19 nt, Artificial Sequence
  Description of Artificial Sequence: Synthetic oligonucleotide
  Sense strand starting at position 2466 of SEQ ID NO: 916434
gucacucaguuauuaguga

SEQ ID NO: 1156443 - RNA, 19 nt, Artificial Sequence
  Description of Artificial Sequence: Synthetic oligonucleotide
  Antisense strand to SEQ ID NO: 1156442
ucacuaauaacugagugac

SEQ ID NO: 1156444 - RNA, 19 nt, Artificial Sequence
  Description of Artificial Sequence: Synthetic oligonucleotide
  Sense strand starting at position 2696 of SEQ ID NO: 916434
ucgggcuuuguugcuaauu

SEQ ID NO: 1156445 - RNA, 19 nt, Artificial Sequence
  Description of Artificial Sequence: Synthetic oligonucleotide
  Antisense strand to SEQ ID NO: 1156444
aauuagcaacaaagcccga

SEQ ID NO: 1156446 - RNA, 19 nt, Artificial Sequence
  Description of Artificial Sequence: Synthetic oligonucleotide
  Sense strand starting at position 2697 of SEQ ID NO: 916434
cgggcuuuguugcuaauuu

SEQ ID NO: 1156447 - RNA, 19 nt, Artificial Sequence
  Description of Artificial Sequence: Synthetic oligonucleotide
  Antisense strand to SEQ ID NO: 1156446
aaauuagcaacaaagcccg

SEQ ID NO: 1156448 - RNA, 19 nt, Artificial Sequence
  Description of Artificial Sequence: Synthetic oligonucleotide
  Sense strand starting at position 2806 of SEQ ID NO: 916434
aaaugugaccucugcagga

SEQ ID NO: 1156449 - RNA, 19 nt, Artificial Sequence
  Description of Artificial Sequence: Synthetic oligonucleotide
  Antisense strand to SEQ ID NO: 1156448
uccugcagaggucacauuu

SEQ ID NO: 1156450 - RNA, 19 nt, Artificial Sequence
  Description of Artificial Sequence: Synthetic oligonucleotide
  Sense strand starting at position 2819 of SEQ ID NO: 916434
gcaggagucgacugaggaa

SEQ ID NO: 1156451 - RNA, 19 nt, Artificial Sequence
  Description of Artificial Sequence: Synthetic oligonucleotide
  Antisense strand to SEQ ID NO: 1156450
uuccucagucgacuccugc

SEQ ID NO: 1156452 - RNA, 19 nt, Artificial Sequence
  Description of Artificial Sequence: Synthetic oligonucleotide
  Sense strand starting at position 2866 of SEQ ID NO: 916434
gaagaacuccugcgagaga

SEQ ID NO: 1156453 - RNA, 19 nt, Artificial Sequence
  Description of Artificial Sequence: Synthetic oligonucleotide
  Antisense strand to SEQ ID NO: 1156452
ucucucgcaggaguucuuc

SEQ ID NO: 1156454 - RNA, 19 nt, Artificial Sequence
  Description of Artificial Sequence: Synthetic oligonucleotide
  Sense strand starting at position 2930 of SEQ ID NO: 916434
uggaauagguggcuacauu

SEQ ID NO: 1156455 - RNA, 19 nt, Artificial Sequence
  Description of Artificial Sequence: Synthetic oligonucleotide
  Antisense strand to SEQ ID NO: 1156454
aauguagccaccuauucca

SEQ ID NO: 1156456 - RNA, 19 nt, Artificial Sequence
  Description of Artificial Sequence: Synthetic oligonucleotide
  Sense strand starting at position 3066 of SEQ ID NO: 916434
uuaagaaaugccuggaggu

SEQ ID NO: 1156457 - RNA, 19 nt, Artificial Sequence
  Description of Artificial Sequence: Synthetic oligonucleotide
  Antisense strand to SEQ ID NO: 1156456
accuccaggcauuucuuaa

SEQ ID NO: 1156458 - RNA, 19 nt, Artificial Sequence
  Description of Artificial Sequence: Synthetic oligonucleotide
  Sense strand starting at position 3067 of SEQ ID NO: 916434
uaagaaaugccuggaggug

SEQ ID NO: 1156459 - RNA, 19 nt, Artificial Sequence
  Description of Artificial Sequence: Synthetic oligonucleotide
  Antisense strand to SEQ ID NO: 1156458
caccuccaggcauuucuua

SEQ ID NO: 1156460 - RNA, 19 nt, Artificial Sequence
  Description of Artificial Sequence: Synthetic oligonucleotide
  Sense strand starting at position 3118 of SEQ ID NO: 916434
ucaugaacucucugaaguc

SEQ ID NO: 1156461 - RNA, 19 nt, Artificial Sequence
  Description of Artificial Sequence: Synthetic oligonucleotide
  Antisense strand to SEQ ID NO: 1156460
gacuucagagaguucauga

SEQ ID NO: 1156462 - RNA, 19 nt, Artificial Sequence
  Description of Artificial Sequence: Synthetic oligonucleotide
  Sense strand starting at position 3235 of SEQ ID NO: 916434
cugugaacuuguucuccau

SEQ ID NO: 1156463 - RNA, 19 nt, Artificial Sequence
  Description of Artificial Sequence: Synthetic oligonucleotide
  Antisense strand to SEQ ID NO: 1156462
auggagaacaaguucacag

SEQ ID NO: 1156464 - RNA, 19 nt, Artificial Sequence
  Description of Artificial Sequence: Synthetic oligonucleotide
  Sense strand starting at position 3379 of SEQ ID NO: 916434
caggacuaacuuggucaaa

SEQ ID NO: 1156465 - RNA, 19 nt, Artificial Sequence
  Description of Artificial Sequence: Synthetic oligonucleotide
  Antisense strand to SEQ ID NO: 1156464
uuugaccaaguuaguccug

SEQ ID NO: 1156466 - RNA, 19 nt, Artificial Sequence
  Description of Artificial Sequence: Synthetic oligonucleotide
  Sense strand starting at position 3392 of SEQ ID NO: 916434
gucaaagaaccauaguuuc

SEQ ID NO: 1156467 - RNA, 19 nt, Artificial Sequence
  Description of Artificial Sequence: Synthetic oligonucleotide
  Antisense strand to SEQ ID NO: 1156466
gaaacuaugguucuuugac

SEQ ID NO: 1156468 - RNA, 19 nt, Artificial Sequence
  Description of Artificial Sequence: Synthetic oligonucleotide
  Sense strand starting at position 3400 of SEQ ID NO: 916434
accauaguuucugcaccau

SEQ ID NO: 1156469 - RNA, 19 nt, Artificial Sequence
  Description of Artificial Sequence: Synthetic oligonucleotide
  Antisense strand to SEQ ID NO: 1156468
auggugcagaaacuauggu

SEQ ID NO: 1156470 - RNA, 19 nt, Artificial Sequence
  Description of Artificial Sequence: Synthetic oligonucleotide
  Sense strand starting at position 3534 of SEQ ID NO: 916434
ggccacugguagcuuuaaa

SEQ ID NO: 1156471 - RNA, 19 nt, Artificial Sequence
  Description of Artificial Sequence: Synthetic oligonucleotide
  Antisense strand to SEQ ID NO: 1156470
uuuaaagcuaccaguggcc

SEQ ID NO: 1156472 - RNA, 19 nt, Artificial Sequence
  Description of Artificial Sequence: Synthetic oligonucleotide
  Sense strand starting at position 3632 of SEQ ID NO: 916434
uuuacaaagcuuugucaga

SEQ ID NO: 1156473 - RNA, 19 nt, Artificial Sequence
  Description of Artificial Sequence: Synthetic oligonucleotide
  Antisense strand to SEQ ID NO: 1156472
ucugacaaagcuuuguaaa

SEQ ID NO: 1156474 - RNA, 19 nt, Artificial Sequence
  Description of Artificial Sequence: Synthetic oligonucleotide
  Sense strand starting at position 3639 of SEQ ID NO: 916434
agcuuugucagaggucaag

SEQ ID NO: 1156475 - RNA, 19 nt, Artificial Sequence
  Description of Artificial Sequence: Synthetic oligonucleotide
  Antisense strand to SEQ ID NO: 1156474
cuugaccucugacaaagcu

SEQ ID NO: 1156476 - RNA, 19 nt, Artificial Sequence
  Description of Artificial Sequence: Synthetic oligonucleotide
  Sense strand starting at position 352 of SEQ ID NO: 916435
uauuauggcugcguggaga

SEQ ID NO: 1156477 - RNA, 19 nt, Artificial Sequence
  Description of Artificial Sequence: Synthetic oligonucleotide
  Antisense strand to SEQ ID NO: 1156476
ucuccacgcagccauaaua

SEQ ID NO: 1156478 - RNA, 19 nt, Artificial Sequence
  Description of Artificial Sequence: Synthetic oligonucleotide
  Sense strand starting at position 581 of SEQ ID NO: 916435
cauggugaacuuugacuau

SEQ ID NO: 1156479 - RNA, 19 nt, Artificial Sequence
  Description of Artificial Sequence: Synthetic oligonucleotide
  Antisense strand to SEQ ID NO: 1156478
auagucaaaguucaccaug

SEQ ID NO: 1156480 - RNA, 19 nt, Artificial Sequence
  Description of Artificial Sequence: Synthetic oligonucleotide
  Sense strand starting at position 584 of SEQ ID NO: 916435
ggugaacuuugacuauuau

SEQ ID NO: 1156481 - RNA, 19 nt, Artificial Sequence
  Description of Artificial Sequence: Synthetic oligonucleotide
  Antisense strand to SEQ ID NO: 1156480
auaauagucaaaguucacc

SEQ ID NO: 1156482 - RNA, 19 nt, Artificial Sequence
  Description of Artificial Sequence: Synthetic oligonucleotide
  Sense strand starting at position 585 of SEQ ID NO: 916435
gugaacuuugacuauuauc

SEQ ID NO: 1156483 - RNA, 19 nt, Artificial Sequence
  Description of Artificial Sequence: Synthetic oligonucleotide
  Antisense strand to SEQ ID NO: 1156482
gauaauagucaaaguucac

SEQ ID NO: 1156484 - RNA, 19 nt, Artificial Sequence
  Description of Artificial Sequence: Synthetic oligonucleotide
  Sense strand starting at position 787 of SEQ ID NO: 916435
uccaguuuaugccucauua

SEQ ID NO: 1156485 - RNA, 19 nt, Artificial Sequence
  Description of Artificial Sequence: Synthetic oligonucleotide
  Antisense strand to SEQ ID NO: 1156484
uaaugaggcauaaacugga

SEQ ID NO: 1156486 - RNA, 19 nt, Artificial Sequence
  Description of Artificial Sequence: Synthetic oligonucleotide
  Sense strand starting at position 973 of SEQ ID NO: 916435
agcgcuucuccuugggaaa

SEQ ID NO: 1156487 - RNA, 19 nt, Artificial Sequence
  Description of Artificial Sequence: Synthetic oligonucleotide
  Antisense strand to SEQ ID NO: 1156486
uuucccaaggagaagcgcu

SEQ ID NO: 1156488 - RNA, 19 nt, Artificial Sequence
  Description of Artificial Sequence: Synthetic oligonucleotide
  Sense strand starting at position 974 of SEQ ID NO: 916435
gcgcuucuccuugggaaag

SEQ ID NO: 1156489 - RNA, 19 nt, Artificial Sequence
  Description of Artificial Sequence: Synthetic oligonucleotide
  Antisense strand to SEQ ID NO: 1156488
cuuucccaaggagaagcgc

SEQ ID NO: 1156490 - RNA, 19 nt, Artificial Sequence
  Description of Artificial Sequence: Synthetic oligonucleotide
  Sense strand starting at position 980 of SEQ ID NO: 916435
cuccuugggaaaggucaaa

SEQ ID NO: 1156491 - RNA, 19 nt, Artificial Sequence
  Description of Artificial Sequence: Synthetic oligonucleotide
  Antisense strand to SEQ ID NO: 1156490
uuugaccuuucccaaggag

SEQ ID NO: 1156492 - RNA, 19 nt, Artificial Sequence
  Description of Artificial Sequence: Synthetic oligonucleotide
  Sense strand starting at position 1097 of SEQ ID NO: 916435
ugguguugaccgcaucuga

SEQ ID NO: 1156493 - RNA, 19 nt, Artificial Sequence
  Description of Artificial Sequence: Synthetic oligonucleotide
  Antisense strand to SEQ ID NO: 1156492
ucagaugcggucaacacca

SEQ ID NO: 1156494 - RNA, 19 nt, Artificial Sequence
  Description of Artificial Sequence: Synthetic oligonucleotide
  Sense strand starting at position 1284 of SEQ ID NO: 916435
aggucacucaguuauuagu

SEQ ID NO: 1156495 - RNA, 19 nt, Artificial Sequence
  Description of Artificial Sequence: Synthetic oligonucleotide
  Antisense strand to SEQ ID NO: 1156494
acuaauaacugagugaccu

SEQ ID NO: 1156496 - RNA, 19 nt, Artificial Sequence
  Description of Artificial Sequence: Synthetic oligonucleotide
  Sense strand starting at position 1286 of SEQ ID NO: 916435
gucacucaguuauuaguga

SEQ ID NO: 1156497 - RNA, 19 nt, Artificial Sequence
  Description of Artificial Sequence: Synthetic oligonucleotide
  Antisense strand to SEQ ID NO: 1156496
ucacuaauaacugagugac

SEQ ID NO: 1156498 - RNA, 19 nt, Artificial Sequence
  Description of Artificial Sequence: Synthetic oligonucleotide
  Sense strand starting at position 1516 of SEQ ID NO: 916435
ucgggcuuuguugcuaauu

SEQ ID NO: 1156499 - RNA, 19 nt, Artificial Sequence
  Description of Artificial Sequence: Synthetic oligonucleotide
  Antisense strand to SEQ ID NO: 1156498
aauuagcaacaaagcccga

SEQ ID NO: 1156500 - RNA, 19 nt, Artificial Sequence
  Description of Artificial Sequence: Synthetic oligonucleotide
  Sense strand starting at position 1517 of SEQ ID NO: 916435
cgggcuuuguugcuaauuu

SEQ ID NO: 1156501 - RNA, 19 nt, Artificial Sequence
  Description of Artificial Sequence: Synthetic oligonucleotide
  Antisense strand to SEQ ID NO: 1156500
aaauuagcaacaaagcccg

SEQ ID NO: 1156502 - RNA, 19 nt, Artificial Sequence
  Description of Artificial Sequence: Synthetic oligonucleotide
  Sense strand starting at position 1626 of SEQ ID NO: 916435
aaaugugaccucugcagga

SEQ ID NO: 1156503 - RNA, 19 nt, Artificial Sequence
  Description of Artificial Sequence: Synthetic oligonucleotide
  Antisense strand to SEQ ID NO: 1156502
uccugcagaggucacauuu

SEQ ID NO: 1156504 - RNA, 19 nt, Artificial Sequence
  Description of Artificial Sequence: Synthetic oligonucleotide
  Sense strand starting at position 1639 of SEQ ID NO: 916435
gcaggagucgacugaggaa

SEQ ID NO: 1156505 - RNA, 19 nt, Artificial Sequence
  Description of Artificial Sequence: Synthetic oligonucleotide
  Antisense strand to SEQ ID NO: 1156504
uuccucagucgacuccugc

SEQ ID NO: 1156506 - RNA, 19 nt, Artificial Sequence
  Description of Artificial Sequence: Synthetic oligonucleotide
  Sense strand starting at position 1686 of SEQ ID NO: 916435
gaagaacuccugcgagaga

SEQ ID NO: 1156507 - RNA, 19 nt, Artificial Sequence
  Description of Artificial Sequence: Synthetic oligonucleotide
  Antisense strand to SEQ ID NO: 1156506
ucucucgcaggaguucuuc

SEQ ID NO: 1156508 - RNA, 19 nt, Artificial Sequence
  Description of Artificial Sequence: Synthetic oligonucleotide
  Sense strand starting at position 1750 of SEQ ID NO: 916435
uggaauagguggcuacauu

SEQ ID NO: 1156509 - RNA, 19 nt, Artificial Sequence
  Description of Artificial Sequence: Synthetic oligonucleotide
  Antisense strand to SEQ ID NO: 1156508
aauguagccaccuauucca

SEQ ID NO: 1156510 - RNA, 19 nt, Artificial Sequence
  Description of Artificial Sequence: Synthetic oligonucleotide
  Sense strand starting at position 1886 of SEQ ID NO: 916435
uuaagaaaugccuggaggu

SEQ ID NO: 1156511 - RNA, 19 nt, Artificial Sequence
  Description of Artificial Sequence: Synthetic oligonucleotide
  Antisense strand to SEQ ID NO: 1156510
accuccaggcauuucuuaa

SEQ ID NO: 1156512 - RNA, 19 nt, Artificial Sequence
  Description of Artificial Sequence: Synthetic oligonucleotide
  Sense strand starting at position 1887 of SEQ ID NO: 916435
uaagaaaugccuggaggug

SEQ ID NO: 1156513 - RNA, 19 nt, Artificial Sequence
  Description of Artificial Sequence: Synthetic oligonucleotide
  Antisense strand to SEQ ID NO: 1156512
caccuccaggcauuucuua

SEQ ID NO: 1156514 - RNA, 19 nt, Artificial Sequence
  Description of Artificial Sequence: Synthetic oligonucleotide
  Sense strand starting at position 1938 of SEQ ID NO: 916435
ucaugaacucucugaaguc

SEQ ID NO: 1156515 - RNA, 19 nt, Artificial Sequence
  Description of Artificial Sequence: Synthetic oligonucleotide
  Antisense strand to SEQ ID NO: 1156514
gacuucagagaguucauga

SEQ ID NO: 1156516 - RNA, 19 nt, Artificial Sequence
  Description of Artificial Sequence: Synthetic oligonucleotide
  Sense strand starting at position 2055 of SEQ ID NO: 916435
cugugaacuuguucuccau

SEQ ID NO: 1156517 - RNA, 19 nt, Artificial Sequence
  Description of Artificial Sequence: Synthetic oligonucleotide
  Antisense strand to SEQ ID NO: 1156516
auggagaacaaguucacag

SEQ ID NO: 1156518 - RNA, 19 nt, Artificial Sequence
  Description of Artificial Sequence: Synthetic oligonucleotide
  Sense strand starting at position 2199 of SEQ ID NO: 916435
caggacuaacuuggucaaa

SEQ ID NO: 1156519 - RNA, 19 nt, Artificial Sequence
  Description of Artificial Sequence: Synthetic oligonucleotide
  Antisense strand to SEQ ID NO: 1156518
uuugaccaaguuaguccug

SEQ ID NO: 1156520 - RNA, 19 nt, Artificial Sequence
  Description of Artificial Sequence: Synthetic oligonucleotide
  Sense strand starting at position 2212 of SEQ ID NO: 916435
gucaaagaaccauaguuuc

SEQ ID NO: 1156521 - RNA, 19 nt, Artificial Sequence
  Description of Artificial Sequence: Synthetic oligonucleotide
  Antisense strand to SEQ ID NO: 1156520
gaaacuaugguucuuugac

SEQ ID NO: 1156522 - RNA, 19 nt, Artificial Sequence
  Description of Artificial Sequence: Synthetic oligonucleotide
  Sense strand starting at position 2220 of SEQ ID NO: 916435
accauaguuucugcaccau

SEQ ID NO: 1156523 - RNA, 19 nt, Artificial Sequence
  Description of Artificial Sequence: Synthetic oligonucleotide
  Antisense strand to SEQ ID NO: 1156522
auggugcagaaacuauggu

SEQ ID NO: 1156524 - RNA, 19 nt, Artificial Sequence
  Description of Artificial Sequence: Synthetic oligonucleotide
  Sense strand starting at position 2354 of SEQ ID NO: 916435
ggccacugguagcuuuaaa

SEQ ID NO: 1156525 - RNA, 19 nt, Artificial Sequence
  Description of Artificial Sequence: Synthetic oligonucleotide
  Antisense strand to SEQ ID NO: 1156524
uuuaaagcuaccaguggcc

SEQ ID NO: 1156526 - RNA, 19 nt, Artificial Sequence
  Description of Artificial Sequence: Synthetic oligonucleotide
  Sense strand starting at position 2452 of SEQ ID NO: 916435
uuuacaaagcuuugucaga

SEQ ID NO: 1156527 - RNA, 19 nt, Artificial Sequence
  Description of Artificial Sequence: Synthetic oligonucleotide
  Antisense strand to SEQ ID NO: 1156526
ucugacaaagcuuuguaaa

SEQ ID NO: 1156528 - RNA, 19 nt, Artificial Sequence
  Description of Artificial Sequence: Synthetic oligonucleotide
  Sense strand starting at position 2459 of SEQ ID NO: 916435
agcuuugucagaggucaag

SEQ ID NO: 1156529 - RNA, 19 nt, Artificial Sequence
  Description of Artificial Sequence: Synthetic oligonucleotide
  Antisense strand to SEQ ID NO: 1156528
cuugaccucugacaaagcu

SEQ ID NO: 1156530 - RNA, 19 nt, Artificial Sequence
  Description of Artificial Sequence: Synthetic oligonucleotide
  Sense strand starting at position 2835 of SEQ ID NO: 916435
uugacuuguucuguacaua

SEQ ID NO: 1156531 - RNA, 19 nt, Artificial Sequence
  Description of Artificial Sequence: Synthetic oligonucleotide
  Antisense strand to SEQ ID NO: 1156530
uauguacagaacaagucaa

SEQ ID NO: 1156532 - RNA, 19 nt, Artificial Sequence
  Description of Artificial Sequence: Synthetic oligonucleotide
  Sense strand starting at position 2836 of SEQ ID NO: 916435
ugacuuguucuguacauag

SEQ ID NO: 1156533 - RNA, 19 nt, Artificial Sequence
  Description of Artificial Sequence: Synthetic oligonucleotide
  Antisense strand to SEQ ID NO: 1156532
cuauguacagaacaaguca

SEQ ID NO: 1156534 - RNA, 19 nt, Artificial Sequence
  Description of Artificial Sequence: Synthetic oligonucleotide
  Sense strand starting at position 2975 of SEQ ID NO: 916435
ccaguaugugugagugugu

SEQ ID NO: 1156535 - RNA, 19 nt, Artificial Sequence
  Description of Artificial Sequence: Synthetic oligonucleotide
  Antisense strand to SEQ ID NO: 1156534
acacacucacacauacugg

SEQ ID NO: 1156536 - RNA, 19 nt, Artificial Sequence
  Description of Artificial Sequence: Synthetic oligonucleotide
  Sense strand starting at position 3191 of SEQ ID NO: 916435
ccaacuguaugaucuguua

SEQ ID NO: 1156537 - RNA, 19 nt, Artificial Sequence
  Description of Artificial Sequence: Synthetic oligonucleotide
  Antisense strand to SEQ ID NO: 1156536
uaacagaucauacaguugg

SEQ ID NO: 1156538 - RNA, 19 nt, Artificial Sequence
  Description of Artificial Sequence: Synthetic oligonucleotide
  Sense strand starting at position 3302 of SEQ ID NO: 916435
ugggauuauuccucugccu

SEQ ID NO: 1156539 - RNA, 19 nt, Artificial Sequence
  Description of Artificial Sequence: Synthetic oligonucleotide
  Antisense strand to SEQ ID NO: 1156538
aggcagaggaauaauccca

SEQ ID NO: 1156540 - RNA, 19 nt, Artificial Sequence
  Description of Artificial Sequence: Synthetic oligonucleotide
  Sense strand starting at position 3304 of SEQ ID NO: 916435
ggauuauuccucugccuac

SEQ ID NO: 1156541 - RNA, 19 nt, Artificial Sequence
  Description of Artificial Sequence: Synthetic oligonucleotide
  Antisense strand to SEQ ID NO: 1156540
guaggcagaggaauaaucc

SEQ ID NO: 1156542 - RNA, 19 nt, Artificial Sequence
  Description of Artificial Sequence: Synthetic oligonucleotide
  Sense strand starting at position 3328 of SEQ ID NO: 916435
caucauucgcgguaauuag

SEQ ID NO: 1156543 - RNA, 19 nt, Artificial Sequence
  Description of Artificial Sequence: Synthetic oligonucleotide
  Antisense strand to SEQ ID NO: 1156542
cuaauuaccgcgaaugaug

SEQ ID NO: 1156544 - RNA, 19 nt, Artificial Sequence
  Description of Artificial Sequence: Synthetic oligonucleotide
  Sense strand starting at position 3365 of SEQ ID NO: 916435
gcaguaagauuccugauau

SEQ ID NO: 1156545 - RNA, 19 nt, Artificial Sequence
  Description of Artificial Sequence: Synthetic oligonucleotide
  Antisense strand to SEQ ID NO: 1156544
auaucaggaaucuuacugc

SEQ ID NO: 1156546 - RNA, 19 nt, Artificial Sequence
  Description of Artificial Sequence: Synthetic oligonucleotide
  Sense strand starting at position 3707 of SEQ ID NO: 916435
ugauaauuagaugggucau

SEQ ID NO: 1156547 - RNA, 19 nt, Artificial Sequence
  Description of Artificial Sequence: Synthetic oligonucleotide
  Antisense strand to SEQ ID NO: 1156546
augacccaucuaauuauca

SEQ ID NO: 1156548 - RNA, 19 nt, Artificial Sequence
  Description of Artificial Sequence: Synthetic oligonucleotide
  Sense strand starting at position 3764 of SEQ ID NO: 916435
uaaagcugacaggguauua

SEQ ID NO: 1156549 - RNA, 19 nt, Artificial Sequence
  Description of Artificial Sequence: Synthetic oligonucleotide
  Antisense strand to SEQ ID NO: 1156548
uaauacccugucagcuuua

SEQ ID NO: 1156550 - RNA, 19 nt, Artificial Sequence
  Description of Artificial Sequence: Synthetic oligonucleotide
  Sense strand starting at position 3782 of SEQ ID NO: 916435
accugacaguaauuagguu

SEQ ID NO: 1156551 - RNA, 19 nt, Artificial Sequence
  Description of Artificial Sequence: Synthetic oligonucleotide
  Antisense strand to SEQ ID NO: 1156550
aaccuaauuacugucaggu

SEQ ID NO: 1156552 - RNA, 19 nt, Artificial Sequence
  Description of Artificial Sequence: Synthetic oligonucleotide
  Sense strand starting at position 3971 of SEQ ID NO: 916435
gaugaagaggcuugccacu

SEQ ID NO: 1156553 - RNA, 19 nt, Artificial Sequence
  Description of Artificial Sequence: Synthetic oligonucleotide
  Antisense strand to SEQ ID NO: 1156552
aguggcaagccucuucauc

SEQ ID NO: 1156554 - RNA, 19 nt, Artificial Sequence
  Description of Artificial Sequence: Synthetic oligonucleotide
  Sense strand starting at position 3973 of SEQ ID NO: 916435
ugaagaggcuugccacuua

SEQ ID NO: 1156555 - RNA, 19 nt, Artificial Sequence
  Description of Artificial Sequence: Synthetic oligonucleotide
  Antisense strand to SEQ ID NO: 1156554
uaaguggcaagccucuuca

SEQ ID NO: 1156556 - RNA, 19 nt, Artificial Sequence
  Description of Artificial Sequence: Synthetic oligonucleotide
  Sense strand starting at position 13 of SEQ ID NO: 916436
gaguuuaugcuccagccuu

SEQ ID NO: 1156557 - RNA, 19 nt, Artificial Sequence
  Description of Artificial Sequence: Synthetic oligonucleotide
  Antisense strand to SEQ ID NO: 1156556
aaggcuggagcauaaacuc

SEQ ID NO: 1156558 - RNA, 19 nt, Artificial Sequence
  Description of Artificial Sequence: Synthetic oligonucleotide
  Sense strand starting at position 57 of SEQ ID NO: 916436
cagggaugguuugcaaaga

SEQ ID NO: 1156559 - RNA, 19 nt, Artificial Sequence
  Description of Artificial Sequence: Synthetic oligonucleotide
  Antisense strand to SEQ ID NO: 1156558
ucuuugcaaaccaucccug

SEQ ID NO: 1156560 - RNA, 19 nt, Artificial Sequence
  Description of Artificial Sequence: Synthetic oligonucleotide
  Sense strand starting at position 62 of SEQ ID NO: 916436
augguuugcaaagaaugua

SEQ ID NO: 1156561 - RNA, 19 nt, Artificial Sequence
  Description of Artificial Sequence: Synthetic oligonucleotide
  Antisense strand to SEQ ID NO: 1156560
uacauucuuugcaaaccau

SEQ ID NO: 1156562 - RNA, 19 nt, Artificial Sequence
  Description of Artificial Sequence: Synthetic oligonucleotide
  Sense strand starting at position 78 of SEQ ID NO: 916436
guagcaguauuuguugcau

SEQ ID NO: 1156563 - RNA, 19 nt, Artificial Sequence
  Description of Artificial Sequence: Synthetic oligonucleotide
  Antisense strand to SEQ ID NO: 1156562
augcaacaaauacugcuac

SEQ ID NO: 1156564 - RNA, 19 nt, Artificial Sequence
  Description of Artificial Sequence: Synthetic oligonucleotide
  Sense strand starting at position 92 of SEQ ID NO: 916436
ugcaucuagcaagauuaau

SEQ ID NO: 1156565 - RNA, 19 nt, Artificial Sequence
  Description of Artificial Sequence: Synthetic oligonucleotide
  Antisense strand to SEQ ID NO: 1156564
auuaaucuugcuagaugca

SEQ ID NO: 1156566 - RNA, 19 nt, Artificial Sequence
  Description of Artificial Sequence: Synthetic oligonucleotide
  Sense strand starting at position 98 of SEQ ID NO: 916436
uagcaagauuaauugguuu

SEQ ID NO: 1156567 - RNA, 19 nt, Artificial Sequence
  Description of Artificial Sequence: Synthetic oligonucleotide
  Antisense strand to SEQ ID NO: 1156566
aaaccaauuaaucuugcua

SEQ ID NO: 1156568 - RNA, 19 nt, Artificial Sequence
  Description of Artificial Sequence: Synthetic oligonucleotide
  Sense strand starting at position 104 of SEQ ID NO: 916436
gauuaauugguuuaagcag

SEQ ID NO: 1156569 - RNA, 19 nt, Artificial Sequence
  Description of Artificial Sequence: Synthetic oligonucleotide
  Antisense strand to SEQ ID NO: 1156568
cugcuuaaaccaauuaauc

SEQ ID NO: 1156570 - RNA, 19 nt, Artificial Sequence
  Description of Artificial Sequence: Synthetic oligonucleotide
  Sense strand starting at position 367 of SEQ ID NO: 916436
cuugauuucgcuuaagugu

SEQ ID NO: 1156571 - RNA, 19 nt, Artificial Sequence
  Description of Artificial Sequence: Synthetic oligonucleotide
  Antisense strand to SEQ ID NO: 1156570
acacuuaagcgaaaucaag

SEQ ID NO: 1156572 - RNA, 19 nt, Artificial Sequence
  Description of Artificial Sequence: Synthetic oligonucleotide
  Sense strand starting at position 533 of SEQ ID NO: 916436
aaugauggcgaaugacaaa

SEQ ID NO: 1156573 - RNA, 19 nt, Artificial Sequence
  Description of Artificial Sequence: Synthetic oligonucleotide
  Antisense strand to SEQ ID NO: 1156572
uuugucauucgccaucauu

SEQ ID NO: 1156574 - RNA, 19 nt, Artificial Sequence
  Description of Artificial Sequence: Synthetic oligonucleotide
  Sense strand starting at position 1129 of SEQ ID NO: 916436
cauggugaacuuugacuau

SEQ ID NO: 1156575 - RNA, 19 nt, Artificial Sequence
  Description of Artificial Sequence: Synthetic oligonucleotide
  Antisense strand to SEQ ID NO: 1156574
auagucaaaguucaccaug

SEQ ID NO: 1156576 - RNA, 19 nt, Artificial Sequence
  Description of Artificial Sequence: Synthetic oligonucleotide
  Sense strand starting at position 1132 of SEQ ID NO: 916436
ggugaacuuugacuauuau

SEQ ID NO: 1156577 - RNA, 19 nt, Artificial Sequence
  Description of Artificial Sequence: Synthetic oligonucleotide
  Antisense strand to SEQ ID NO: 1156576
auaauagucaaaguucacc

SEQ ID NO: 1156578 - RNA, 19 nt, Artificial Sequence
  Description of Artificial Sequence: Synthetic oligonucleotide
  Sense strand starting at position 1133 of SEQ ID NO: 916436
gugaacuuugacuauuauc

SEQ ID NO: 1156579 - RNA, 19 nt, Artificial Sequence
  Description of Artificial Sequence: Synthetic oligonucleotide
  Antisense strand to SEQ ID NO: 1156578
gauaauagucaaaguucac

SEQ ID NO: 1156580 - RNA, 19 nt, Artificial Sequence
  Description of Artificial Sequence: Synthetic oligonucleotide
  Sense strand starting at position 1528 of SEQ ID NO: 916436
cuccuugggaaaggucaaa

SEQ ID NO: 1156581 - RNA, 19 nt, Artificial Sequence
  Description of Artificial Sequence: Synthetic oligonucleotide
  Antisense strand to SEQ ID NO: 1156580
uuugaccuuucccaaggag

SEQ ID NO: 1156582 - RNA, 19 nt, Artificial Sequence
  Description of Artificial Sequence: Synthetic oligonucleotide
  Sense strand starting at position 1645 of SEQ ID NO: 916436
ugguguugaccgcaucuga

SEQ ID NO: 1156583 - RNA, 19 nt, Artificial Sequence
  Description of Artificial Sequence: Synthetic oligonucleotide
  Antisense strand to SEQ ID NO: 1156582
ucagaugcggucaacacca

SEQ ID NO: 1156584 - RNA, 19 nt, Artificial Sequence
  Description of Artificial Sequence: Synthetic oligonucleotide
  Sense strand starting at position 1832 of SEQ ID NO: 916436
aggucacucaguuauuagu

SEQ ID NO: 1156585 - RNA, 19 nt, Artificial Sequence
  Description of Artificial Sequence: Synthetic oligonucleotide
  Antisense strand to SEQ ID NO: 1156584
acuaauaacugagugaccu

SEQ ID NO: 1156586 - RNA, 19 nt, Artificial Sequence
  Description of Artificial Sequence: Synthetic oligonucleotide
  Sense strand starting at position 1834 of SEQ ID NO: 916436
gucacucaguuauuaguga

SEQ ID NO: 1156587 - RNA, 19 nt, Artificial Sequence
  Description of Artificial Sequence: Synthetic oligonucleotide
  Antisense strand to SEQ ID NO: 1156586
ucacuaauaacugagugac

SEQ ID NO: 1156588 - RNA, 19 nt, Artificial Sequence
  Description of Artificial Sequence: Synthetic oligonucleotide
  Sense strand starting at position 2064 of SEQ ID NO: 916436
ucgggcuuuguugcuaauu

SEQ ID NO: 1156589 - RNA, 19 nt, Artificial Sequence
  Description of Artificial Sequence: Synthetic oligonucleotide
  Antisense strand to SEQ ID NO: 1156588
aauuagcaacaaagcccga

SEQ ID NO: 1156590 - RNA, 19 nt, Artificial Sequence
  Description of Artificial Sequence: Synthetic oligonucleotide
  Sense strand starting at position 2065 of SEQ ID NO: 916436
cgggcuuuguugcuaauuu

SEQ ID NO: 1156591 - RNA, 19 nt, Artificial Sequence
  Description of Artificial Sequence: Synthetic oligonucleotide
  Antisense strand to SEQ ID NO: 1156590
aaauuagcaacaaagcccg

SEQ ID NO: 1156592 - RNA, 19 nt, Artificial Sequence
  Description of Artificial Sequence: Synthetic oligonucleotide
  Sense strand starting at position 2174 of SEQ ID NO: 916436
aaaugugaccucugcagga

SEQ ID NO: 1156593 - RNA, 19 nt, Artificial Sequence
  Description of Artificial Sequence: Synthetic oligonucleotide
  Antisense strand to SEQ ID NO: 1156592
uccugcagaggucacauuu

SEQ ID NO: 1156594 - RNA, 19 nt, Artificial Sequence
  Description of Artificial Sequence: Synthetic oligonucleotide
  Sense strand starting at position 2187 of SEQ ID NO: 916436
gcaggagucgacugaggaa

SEQ ID NO: 1156595 - RNA, 19 nt, Artificial Sequence
  Description of Artificial Sequence: Synthetic oligonucleotide
  Antisense strand to SEQ ID NO: 1156594
uuccucagucgacuccugc

SEQ ID NO: 1156596 - RNA, 19 nt, Artificial Sequence
  Description of Artificial Sequence: Synthetic oligonucleotide
  Sense strand starting at position 2234 of SEQ ID NO: 916436
gaagaacuccugcgagaga

SEQ ID NO: 1156597 - RNA, 19 nt, Artificial Sequence
  Description of Artificial Sequence: Synthetic oligonucleotide
  Antisense strand to SEQ ID NO: 1156596
ucucucgcaggaguucuuc

SEQ ID NO: 1156598 - RNA, 19 nt, Artificial Sequence
  Description of Artificial Sequence: Synthetic oligonucleotide
  Sense strand starting at position 2298 of SEQ ID NO: 916436
uggaauagguggcuacauu

SEQ ID NO: 1156599 - RNA, 19 nt, Artificial Sequence
  Description of Artificial Sequence: Synthetic oligonucleotide
  Antisense strand to SEQ ID NO: 1156598
aauguagccaccuauucca

SEQ ID NO: 1156600 - RNA, 19 nt, Artificial Sequence
  Description of Artificial Sequence: Synthetic oligonucleotide
  Sense strand starting at position 2434 of SEQ ID NO: 916436
uuaagaaaugccuggaggu

SEQ ID NO: 1156601 - RNA, 19 nt, Artificial Sequence
  Description of Artificial Sequence: Synthetic oligonucleotide
  Antisense strand to SEQ ID NO: 1156600
accuccaggcauuucuuaa

SEQ ID NO: 1156602 - RNA, 19 nt, Artificial Sequence
  Description of Artificial Sequence: Synthetic oligonucleotide
  Sense strand starting at position 2435 of SEQ ID NO: 916436
uaagaaaugccuggaggug

SEQ ID NO: 1156603 - RNA, 19 nt, Artificial Sequence
  Description of Artificial Sequence: Synthetic oligonucleotide
  Antisense strand to SEQ ID NO: 1156602
caccuccaggcauuucuua

SEQ ID NO: 1156604 - RNA, 19 nt, Artificial Sequence
  Description of Artificial Sequence: Synthetic oligonucleotide
  Sense strand starting at position 2486 of SEQ ID NO: 916436
ucaugaacucucugaaguc

SEQ ID NO: 1156605 - RNA, 19 nt, Artificial Sequence
  Description of Artificial Sequence: Synthetic oligonucleotide
  Antisense strand to SEQ ID NO: 1156604
gacuucagagaguucauga

SEQ ID NO: 1156606 - RNA, 19 nt, Artificial Sequence
  Description of Artificial Sequence: Synthetic oligonucleotide
  Sense strand starting at position 2603 of SEQ ID NO: 916436
cugugaacuuguucuccau

SEQ ID NO: 1156607 - RNA, 19 nt, Artificial Sequence
  Description of Artificial Sequence: Synthetic oligonucleotide
  Antisense strand to SEQ ID NO: 1156606
auggagaacaaguucacag

SEQ ID NO: 1156608 - RNA, 19 nt, Artificial Sequence
  Description of Artificial Sequence: Synthetic oligonucleotide
  Sense strand starting at position 2747 of SEQ ID NO: 916436
caggacuaacuuggucaaa

SEQ ID NO: 1156609 - RNA, 19 nt, Artificial Sequence
  Description of Artificial Sequence: Synthetic oligonucleotide
  Antisense strand to SEQ ID NO: 1156608
uuugaccaaguuaguccug

SEQ ID NO: 1156610 - RNA, 19 nt, Artificial Sequence
  Description of Artificial Sequence: Synthetic oligonucleotide
  Sense strand starting at position 2760 of SEQ ID NO: 916436
gucaaagaaccauaguuuc

SEQ ID NO: 1156611 - RNA, 19 nt, Artificial Sequence
  Description of Artificial Sequence: Synthetic oligonucleotide
  Antisense strand to SEQ ID NO: 1156610
gaaacuaugguucuuugac

SEQ ID NO: 1156612 - RNA, 19 nt, Artificial Sequence
  Description of Artificial Sequence: Synthetic oligonucleotide
  Sense strand starting at position 2768 of SEQ ID NO: 916436
accauaguuucugcaccau

SEQ ID NO: 1156613 - RNA, 19 nt, Artificial Sequence
  Description of Artificial Sequence: Synthetic oligonucleotide
  Antisense strand to SEQ ID NO: 1156612
auggugcagaaacuauggu

SEQ ID NO: 1156614 - RNA, 19 nt, Artificial Sequence
  Description of Artificial Sequence: Synthetic oligonucleotide
  Sense strand starting at position 2902 of SEQ ID NO: 916436
ggccacugguagcuuuaaa

SEQ ID NO: 1156615 - RNA, 19 nt, Artificial Sequence
  Description of Artificial Sequence: Synthetic oligonucleotide
  Antisense strand to SEQ ID NO: 1156614
uuuaaagcuaccaguggcc

SEQ ID NO: 1156616 - RNA, 19 nt, Artificial Sequence
  Description of Artificial Sequence: Synthetic oligonucleotide
  Sense strand starting at position 3000 of SEQ ID NO: 916436
uuuacaaagcuuugucaga

SEQ ID NO: 1156617 - RNA, 19 nt, Artificial Sequence
  Description of Artificial Sequence: Synthetic oligonucleotide
  Antisense strand to SEQ ID NO: 1156616
ucugacaaagcuuuguaaa

SEQ ID NO: 1156618 - RNA, 19 nt, Artificial Sequence
  Description of Artificial Sequence: Synthetic oligonucleotide
  Sense strand starting at position 3007 of SEQ ID NO: 916436
agcuuugucagaggucaag

SEQ ID NO: 1156619 - RNA, 19 nt, Artificial Sequence
  Description of Artificial Sequence: Synthetic oligonucleotide
  Antisense strand to SEQ ID NO: 1156618
cuugaccucugacaaagcu

SEQ ID NO: 1156620 - RNA, 19 nt, Artificial Sequence
  Description of Artificial Sequence: Synthetic oligonucleotide
  Sense strand starting at position 3383 of SEQ ID NO: 916436
uugacuuguucuguacaua

SEQ ID NO: 1156621 - RNA, 19 nt, Artificial Sequence
  Description of Artificial Sequence: Synthetic oligonucleotide
  Antisense strand to SEQ ID NO: 1156620
uauguacagaacaagucaa

SEQ ID NO: 1156622 - RNA, 19 nt, Artificial Sequence
  Description of Artificial Sequence: Synthetic oligonucleotide
  Sense strand starting at position 3384 of SEQ ID NO: 916436
ugacuuguucuguacauag

SEQ ID NO: 1156623 - RNA, 19 nt, Artificial Sequence
  Description of Artificial Sequence: Synthetic oligonucleotide
  Antisense strand to SEQ ID NO: 1156622
cuauguacagaacaaguca

SEQ ID NO: 1156624 - RNA, 19 nt, Artificial Sequence
  Description of Artificial Sequence: Synthetic oligonucleotide
  Sense strand starting at position 3523 of SEQ ID NO: 916436
ccaguaugugugagugugu

SEQ ID NO: 1156625 - RNA, 19 nt, Artificial Sequence
  Description of Artificial Sequence: Synthetic oligonucleotide
  Antisense strand to SEQ ID NO: 1156624
acacacucacacauacugg

SEQ ID NO: 1156626 - RNA, 19 nt, Artificial Sequence
  Description of Artificial Sequence: Synthetic oligonucleotide
  Sense strand starting at position 3739 of SEQ ID NO: 916436
ccaacuguaugaucuguua

SEQ ID NO: 1156627 - RNA, 19 nt, Artificial Sequence
  Description of Artificial Sequence: Synthetic oligonucleotide
  Antisense strand to SEQ ID NO: 1156626
uaacagaucauacaguugg

SEQ ID NO: 1156628 - RNA, 19 nt, Artificial Sequence
  Description of Artificial Sequence: Synthetic oligonucleotide
  Sense strand starting at position 3850 of SEQ ID NO: 916436
ugggauuauuccucugccu

SEQ ID NO: 1156629 - RNA, 19 nt, Artificial Sequence
  Description of Artificial Sequence: Synthetic oligonucleotide
  Antisense strand to SEQ ID NO: 1156628
aggcagaggaauaauccca

SEQ ID NO: 1156630 - RNA, 19 nt, Artificial Sequence
  Description of Artificial Sequence: Synthetic oligonucleotide
  Sense strand starting at position 3852 of SEQ ID NO: 916436
ggauuauuccucugccuac

SEQ ID NO: 1156631 - RNA, 19 nt, Artificial Sequence
  Description of Artificial Sequence: Synthetic oligonucleotide
  Antisense strand to SEQ ID NO: 1156630
guaggcagaggaauaaucc

SEQ ID NO: 1156632 - RNA, 19 nt, Artificial Sequence
  Description of Artificial Sequence: Synthetic oligonucleotide
  Sense strand starting at position 3876 of SEQ ID NO: 916436
caucauucgcgguaauuag

SEQ ID NO: 1156633 - RNA, 19 nt, Artificial Sequence
  Description of Artificial Sequence: Synthetic oligonucleotide
  Antisense strand to SEQ ID NO: 1156632
cuaauuaccgcgaaugaug

SEQ ID NO: 1156634 - RNA, 19 nt, Artificial Sequence
  Description of Artificial Sequence: Synthetic oligonucleotide
  Sense strand starting at position 3913 of SEQ ID NO: 916436
gcaguaagauuccugauau

SEQ ID NO: 1156635 - RNA, 19 nt, Artificial Sequence
  Description of Artificial Sequence: Synthetic oligonucleotide
  Antisense strand to SEQ ID NO: 1156634
auaucaggaaucuuacugc

SEQ ID NO: 1156636 - RNA, 19 nt, Artificial Sequence
  Description of Artificial Sequence: Synthetic oligonucleotide
  Sense strand starting at position 2073 of SEQ ID NO: 916437
ucuggaauaggauguguua

SEQ ID NO: 1156637 - RNA, 19 nt, Artificial Sequence
  Description of Artificial Sequence: Synthetic oligonucleotide
  Antisense strand to SEQ ID NO: 1156636
uaacacauccuauuccaga

SEQ ID NO: 1156638 - RNA, 19 nt, Artificial Sequence
  Description of Artificial Sequence: Synthetic oligonucleotide
  Sense strand starting at position 2075 of SEQ ID NO: 916437
uggaauaggauguguuaua

SEQ ID NO: 1156639 - RNA, 19 nt, Artificial Sequence
  Description of Artificial Sequence: Synthetic oligonucleotide
  Antisense strand to SEQ ID NO: 1156638
uauaacacauccuauucca

SEQ ID NO: 1156640 - RNA, 19 nt, Artificial Sequence
  Description of Artificial Sequence: Synthetic oligonucleotide
  Sense strand starting at position 2076 of SEQ ID NO: 916437
ggaauaggauguguuauau

SEQ ID NO: 1156641 - RNA, 19 nt, Artificial Sequence
  Description of Artificial Sequence: Synthetic oligonucleotide
  Antisense strand to SEQ ID NO: 1156640
auauaacacauccuauucc

SEQ ID NO: 1156642 - RNA, 19 nt, Artificial Sequence
  Description of Artificial Sequence: Synthetic oligonucleotide
  Sense strand starting at position 2082 of SEQ ID NO: 916437
ggauguguuauauagcaug

SEQ ID NO: 1156643 - RNA, 19 nt, Artificial Sequence
  Description of Artificial Sequence: Synthetic oligonucleotide
  Antisense strand to SEQ ID NO: 1156642
caugcuauauaacacaucc

SEQ ID NO: 1156644 - RNA, 19 nt, Artificial Sequence
  Description of Artificial Sequence: Synthetic oligonucleotide
  Sense strand starting at position 2087 of SEQ ID NO: 916437
uguuauauagcauguacga

SEQ ID NO: 1156645 - RNA, 19 nt, Artificial Sequence
  Description of Artificial Sequence: Synthetic oligonucleotide
  Antisense strand to SEQ ID NO: 1156644
ucguacaugcuauauaaca

SEQ ID NO: 1156646 - RNA, 19 nt, Artificial Sequence
  Description of Artificial Sequence: Synthetic oligonucleotide
  Sense strand starting at position 2140 of SEQ ID NO: 916437
aaaucuaagcgagauguaa

SEQ ID NO: 1156647 - RNA, 19 nt, Artificial Sequence
  Description of Artificial Sequence: Synthetic oligonucleotide
  Antisense strand to SEQ ID NO: 1156646
uuacaucucgcuuagauuu

SEQ ID NO: 1156648 - RNA, 19 nt, Artificial Sequence
  Description of Artificial Sequence: Synthetic oligonucleotide
  Sense strand starting at position 2142 of SEQ ID NO: 916437
aucuaagcgagauguaacu

SEQ ID NO: 1156649 - RNA, 19 nt, Artificial Sequence
  Description of Artificial Sequence: Synthetic oligonucleotide
  Antisense strand to SEQ ID NO: 1156648
aguuacaucucgcuuagau

SEQ ID NO: 1156650 - RNA, 19 nt, Artificial Sequence
  Description of Artificial Sequence: Synthetic oligonucleotide
  Sense strand starting at position 2148 of SEQ ID NO: 916437
gcgagauguaacuugccgu

SEQ ID NO: 1156651 - RNA, 19 nt, Artificial Sequence
  Description of Artificial Sequence: Synthetic oligonucleotide
  Antisense strand to SEQ ID NO: 1156650
acggcaaguuacaucucgc

SEQ ID NO: 1156652 - RNA, 19 nt, Artificial Sequence
  Description of Artificial Sequence: Synthetic oligonucleotide
  Sense strand starting at position 2219 of SEQ ID NO: 916437
cuguguuaugugggauguu

SEQ ID NO: 1156653 - RNA, 19 nt, Artificial Sequence
  Description of Artificial Sequence: Synthetic oligonucleotide
  Antisense strand to SEQ ID NO: 1156652
aacaucccacauaacacag

SEQ ID NO: 1156654 - RNA, 19 nt, Artificial Sequence
  Description of Artificial Sequence: Synthetic oligonucleotide
  Sense strand starting at position 2281 of SEQ ID NO: 916437
agaugauuccuacgccaau

SEQ ID NO: 1156655 - RNA, 19 nt, Artificial Sequence
  Description of Artificial Sequence: Synthetic oligonucleotide
  Antisense strand to SEQ ID NO: 1156654
auuggcguaggaaucaucu

SEQ ID NO: 1156656 - RNA, 19 nt, Artificial Sequence
  Description of Artificial Sequence: Synthetic oligonucleotide
  Sense strand starting at position 2284 of SEQ ID NO: 916437
ugauuccuacgccaauaaa

SEQ ID NO: 1156657 - RNA, 19 nt, Artificial Sequence
  Description of Artificial Sequence: Synthetic oligonucleotide
  Antisense strand to SEQ ID NO: 1156656
uuuauuggcguaggaauca

SEQ ID NO: 1156658 - RNA, 19 nt, Artificial Sequence
  Description of Artificial Sequence: Synthetic oligonucleotide
  Sense strand starting at position 2303 of SEQ ID NO: 916437
agcacaaggucucuguauu

SEQ ID NO: 1156659 - RNA, 19 nt, Artificial Sequence
  Description of Artificial Sequence: Synthetic oligonucleotide
  Antisense strand to SEQ ID NO: 1156658
aauacagagaccuugugcu

SEQ ID NO: 1156660 - RNA, 19 nt, Artificial Sequence
  Description of Artificial Sequence: Synthetic oligonucleotide
  Sense strand starting at position 2304 of SEQ ID NO: 916437
gcacaaggucucuguauuc

SEQ ID NO: 1156661 - RNA, 19 nt, Artificial Sequence
  Description of Artificial Sequence: Synthetic oligonucleotide
  Antisense strand to SEQ ID NO: 1156660
gaauacagagaccuugugc

SEQ ID NO: 1156662 - RNA, 19 nt, Artificial Sequence
  Description of Artificial Sequence: Synthetic oligonucleotide
  Sense strand starting at position 2514 of SEQ ID NO: 916437
agauuagcuguggaagcuu

SEQ ID NO: 1156663 - RNA, 19 nt, Artificial Sequence
  Description of Artificial Sequence: Synthetic oligonucleotide
  Antisense strand to SEQ ID NO: 1156662
aagcuuccacagcuaaucu

SEQ ID NO: 1156664 - RNA, 19 nt, Artificial Sequence
  Description of Artificial Sequence: Synthetic oligonucleotide
  Sense strand starting at position 2547 of SEQ ID NO: 916437
uggagaugcaucugugaaa

SEQ ID NO: 1156665 - RNA, 19 nt, Artificial Sequence
  Description of Artificial Sequence: Synthetic oligonucleotide
  Antisense strand to SEQ ID NO: 1156664
uuucacagaugcaucucca

SEQ ID NO: 1156666 - RNA, 19 nt, Artificial Sequence
  Description of Artificial Sequence: Synthetic oligonucleotide
  Sense strand starting at position 2548 of SEQ ID NO: 916437
ggagaugcaucugugaaac

SEQ ID NO: 1156667 - RNA, 19 nt, Artificial Sequence
  Description of Artificial Sequence: Synthetic oligonucleotide
  Antisense strand to SEQ ID NO: 1156666
guuucacagaugcaucucc

SEQ ID NO: 1156668 - RNA, 19 nt, Artificial Sequence
  Description of Artificial Sequence: Synthetic oligonucleotide
  Sense strand starting at position 2558 of SEQ ID NO: 916437
cugugaaaccuguggcuag

SEQ ID NO: 1156669 - RNA, 19 nt, Artificial Sequence
  Description of Artificial Sequence: Synthetic oligonucleotide
  Antisense strand to SEQ ID NO: 1156668
cuagccacagguuucacag

SEQ ID NO: 1156670 - RNA, 19 nt, Artificial Sequence
  Description of Artificial Sequence: Synthetic oligonucleotide
  Sense strand starting at position 2576 of SEQ ID NO: 916437
ggcuccaagagcuggaaua

SEQ ID NO: 1156671 - RNA, 19 nt, Artificial Sequence
  Description of Artificial Sequence: Synthetic oligonucleotide
  Antisense strand to SEQ ID NO: 1156670
uauuccagcucuuggagcc

SEQ ID NO: 1156672 - RNA, 19 nt, Artificial Sequence
  Description of Artificial Sequence: Synthetic oligonucleotide
  Sense strand starting at position 2589 of SEQ ID NO: 916437
ggaauacuacucuguacuu

SEQ ID NO: 1156673 - RNA, 19 nt, Artificial Sequence
  Description of Artificial Sequence: Synthetic oligonucleotide
  Antisense strand to SEQ ID NO: 1156672
aaguacagaguaguauucc

SEQ ID NO: 1156674 - RNA, 19 nt, Artificial Sequence
  Description of Artificial Sequence: Synthetic oligonucleotide
  Sense strand starting at position 3121 of SEQ ID NO: 916437
guuacagucuuguucugaa

SEQ ID NO: 1156675 - RNA, 19 nt, Artificial Sequence
  Description of Artificial Sequence: Synthetic oligonucleotide
  Antisense strand to SEQ ID NO: 1156674
uucagaacaagacuguaac

SEQ ID NO: 1156676 - RNA, 19 nt, Artificial Sequence
  Description of Artificial Sequence: Synthetic oligonucleotide
  Sense strand starting at position 3220 of SEQ ID NO: 916437
guaccucuguuucuauaua

SEQ ID NO: 1156677 - RNA, 19 nt, Artificial Sequence
  Description of Artificial Sequence: Synthetic oligonucleotide
  Antisense strand to SEQ ID NO: 1156676
uauauagaaacagagguac

SEQ ID NO: 1156678 - RNA, 19 nt, Artificial Sequence
  Description of Artificial Sequence: Synthetic oligonucleotide
  Sense strand starting at position 3230 of SEQ ID NO: 916437
uucuauauagucuacugau

SEQ ID NO: 1156679 - RNA, 19 nt, Artificial Sequence
  Description of Artificial Sequence: Synthetic oligonucleotide
  Antisense strand to SEQ ID NO: 1156678
aucaguagacuauauagaa

SEQ ID NO: 1156680 - RNA, 19 nt, Artificial Sequence
  Description of Artificial Sequence: Synthetic oligonucleotide
  Sense strand starting at position 3236 of SEQ ID NO: 916437
auagucuacugauuauaug

SEQ ID NO: 1156681 - RNA, 19 nt, Artificial Sequence
  Description of Artificial Sequence: Synthetic oligonucleotide
  Antisense strand to SEQ ID NO: 1156680
cauauaaucaguagacuau

SEQ ID NO: 1156682 - RNA, 19 nt, Artificial Sequence
  Description of Artificial Sequence: Synthetic oligonucleotide
  Sense strand starting at position 3245 of SEQ ID NO: 916437
ugauuauaugacugguaga

SEQ ID NO: 1156683 - RNA, 19 nt, Artificial Sequence
  Description of Artificial Sequence: Synthetic oligonucleotide
  Antisense strand to SEQ ID NO: 1156682
ucuaccagucauauaauca

SEQ ID NO: 1156684 - RNA, 19 nt, Artificial Sequence
  Description of Artificial Sequence: Synthetic oligonucleotide
  Sense strand starting at position 3248 of SEQ ID NO: 916437
uuauaugacugguagaaau

SEQ ID NO: 1156685 - RNA, 19 nt, Artificial Sequence
  Description of Artificial Sequence: Synthetic oligonucleotide
  Antisense strand to SEQ ID NO: 1156684
auuucuaccagucauauaa

SEQ ID NO: 1156686 - RNA, 19 nt, Artificial Sequence
  Description of Artificial Sequence: Synthetic oligonucleotide
  Sense strand starting at position 3259 of SEQ ID NO: 916437
guagaaauaacgugccacu

SEQ ID NO: 1156687 - RNA, 19 nt, Artificial Sequence
  Description of Artificial Sequence: Synthetic oligonucleotide
  Antisense strand to SEQ ID NO: 1156686
aguggcacguuauuucuac

SEQ ID NO: 1156688 - RNA, 19 nt, Artificial Sequence
  Description of Artificial Sequence: Synthetic oligonucleotide
  Sense strand starting at position 3268 of SEQ ID NO: 916437
acgugccacugauaaauuu

SEQ ID NO: 1156689 - RNA, 19 nt, Artificial Sequence
  Description of Artificial Sequence: Synthetic oligonucleotide
  Antisense strand to SEQ ID NO: 1156688
aaauuuaucaguggcacgu

SEQ ID NO: 1156690 - RNA, 19 nt, Artificial Sequence
  Description of Artificial Sequence: Synthetic oligonucleotide
  Sense strand starting at position 3301 of SEQ ID NO: 916437
uguguucccagcuaguauu

SEQ ID NO: 1156691 - RNA, 19 nt, Artificial Sequence
  Description of Artificial Sequence: Synthetic oligonucleotide
  Antisense strand to SEQ ID NO: 1156690
aauacuagcugggaacaca

SEQ ID NO: 1156692 - RNA, 19 nt, Artificial Sequence
  Description of Artificial Sequence: Synthetic oligonucleotide
  Sense strand starting at position 3354 of SEQ ID NO: 916437
cgagguagcacuuagagga

SEQ ID NO: 1156693 - RNA, 19 nt, Artificial Sequence
  Description of Artificial Sequence: Synthetic oligonucleotide
  Antisense strand to SEQ ID NO: 1156692
uccucuaagugcuaccucg

SEQ ID NO: 1156694 - RNA, 19 nt, Artificial Sequence
  Description of Artificial Sequence: Synthetic oligonucleotide
  Sense strand starting at position 3358 of SEQ ID NO: 916437
guagcacuuagaggaauua

SEQ ID NO: 1156695 - RNA, 19 nt, Artificial Sequence
  Description of Artificial Sequence: Synthetic oligonucleotide
  Antisense strand to SEQ ID NO: 1156694
uaauuccucuaagugcuac

SEQ ID NO: 1156696 - RNA, 19 nt, Artificial Sequence
  Description of Artificial Sequence: Synthetic oligonucleotide
  Sense strand starting at position 3370 of SEQ ID NO: 916437
ggaauuacuuaugacaacu

SEQ ID NO: 1156697 - RNA, 19 nt, Artificial Sequence
  Description of Artificial Sequence: Synthetic oligonucleotide
  Antisense strand to SEQ ID NO: 1156696
aguugucauaaguaauucc

SEQ ID NO: 1156698 - RNA, 19 nt, Artificial Sequence
  Description of Artificial Sequence: Synthetic oligonucleotide
  Sense strand starting at position 3431 of SEQ ID NO: 916437
augaucaauucugagaacu

SEQ ID NO: 1156699 - RNA, 19 nt, Artificial Sequence
  Description of Artificial Sequence: Synthetic oligonucleotide
  Antisense strand to SEQ ID NO: 1156698
aguucucagaauugaucau

SEQ ID NO: 1156700 - RNA, 19 nt, Artificial Sequence
  Description of Artificial Sequence: Synthetic oligonucleotide
  Sense strand starting at position 3433 of SEQ ID NO: 916437
gaucaauucugagaacugg

SEQ ID NO: 1156701 - RNA, 19 nt, Artificial Sequence
  Description of Artificial Sequence: Synthetic oligonucleotide
  Antisense strand to SEQ ID NO: 1156700
ccaguucucagaauugauc

SEQ ID NO: 1156702 - RNA, 19 nt, Artificial Sequence
  Description of Artificial Sequence: Synthetic oligonucleotide
  Sense strand starting at position 3712 of SEQ ID NO: 916437
cugauaacauggccagauu

SEQ ID NO: 1156703 - RNA, 19 nt, Artificial Sequence
  Description of Artificial Sequence: Synthetic oligonucleotide
  Antisense strand to SEQ ID NO: 1156702
aaucuggccauguuaucag

SEQ ID NO: 1156704 - RNA, 19 nt, Artificial Sequence
  Description of Artificial Sequence: Synthetic oligonucleotide
  Sense strand starting at position 3792 of SEQ ID NO: 916437
uccuuaaugcucuagagcu

SEQ ID NO: 1156705 - RNA, 19 nt, Artificial Sequence
  Description of Artificial Sequence: Synthetic oligonucleotide
  Antisense strand to SEQ ID NO: 1156704
agcucuagagcauuaagga

SEQ ID NO: 1156706 - RNA, 19 nt, Artificial Sequence
  Description of Artificial Sequence: Synthetic oligonucleotide
  Sense strand starting at position 3794 of SEQ ID NO: 916437
cuuaaugcucuagagcuga

SEQ ID NO: 1156707 - RNA, 19 nt, Artificial Sequence
  Description of Artificial Sequence: Synthetic oligonucleotide
  Antisense strand to SEQ ID NO: 1156706
ucagcucuagagcauuaag

SEQ ID NO: 1156708 - RNA, 19 nt, Artificial Sequence
  Description of Artificial Sequence: Synthetic oligonucleotide
  Sense strand starting at position 3799 of SEQ ID NO: 916437
ugcucuagagcugaagaaa

SEQ ID NO: 1156709 - RNA, 19 nt, Artificial Sequence
  Description of Artificial Sequence: Synthetic oligonucleotide
  Antisense strand to SEQ ID NO: 1156708
uuucuucagcucuagagca

SEQ ID NO: 1156710 - RNA, 19 nt, Artificial Sequence
  Description of Artificial Sequence: Synthetic oligonucleotide
  Sense strand starting at position 3886 of SEQ ID NO: 916437
ccuugauguuuagauuuga

SEQ ID NO: 1156711 - RNA, 19 nt, Artificial Sequence
  Description of Artificial Sequence: Synthetic oligonucleotide
  Antisense strand to SEQ ID NO: 1156710
ucaaaucuaaacaucaagg

SEQ ID NO: 1156712 - RNA, 19 nt, Artificial Sequence
  Description of Artificial Sequence: Synthetic oligonucleotide
  Sense strand starting at position 3924 of SEQ ID NO: 916437
uuugcugagggugauauua

SEQ ID NO: 1156713 - RNA, 19 nt, Artificial Sequence
  Description of Artificial Sequence: Synthetic oligonucleotide
  Antisense strand to SEQ ID NO: 1156712
uaauaucacccucagcaaa

SEQ ID NO: 1156714 - RNA, 19 nt, Artificial Sequence
  Description of Artificial Sequence: Synthetic oligonucleotide
  Sense strand starting at position 3932 of SEQ ID NO: 916437
gggugauauuaggagaauu

SEQ ID NO: 1156715 - RNA, 19 nt, Artificial Sequence
  Description of Artificial Sequence: Synthetic oligonucleotide
  Antisense strand to SEQ ID NO: 1156714
aauucuccuaauaucaccc

SEQ ID NO: 1156716 - RNA, 19 nt, Artificial Sequence
  Description of Artificial Sequence: Synthetic oligonucleotide
  Sense strand starting at position 191 of SEQ ID NO: 916438
agguuauggcaaugaagga

SEQ ID NO: 1156717 - RNA, 19 nt, Artificial Sequence
  Description of Artificial Sequence: Synthetic oligonucleotide
  Antisense strand to SEQ ID NO: 1156716
uccuucauugccauaaccu

SEQ ID NO: 1156718 - RNA, 19 nt, Artificial Sequence
  Description of Artificial Sequence: Synthetic oligonucleotide
  Sense strand starting at position 225 of SEQ ID NO: 916438
acacguguugcccuuugua

SEQ ID NO: 1156719 - RNA, 19 nt, Artificial Sequence
  Description of Artificial Sequence: Synthetic oligonucleotide
  Antisense strand to SEQ ID NO: 1156718
uacaaagggcaacacgugu

SEQ ID NO: 1156720 - RNA, 19 nt, Artificial Sequence
  Description of Artificial Sequence: Synthetic oligonucleotide
  Sense strand starting at position 227 of SEQ ID NO: 916438
acguguugcccuuuguauu

SEQ ID NO: 1156721 - RNA, 19 nt, Artificial Sequence
  Description of Artificial Sequence: Synthetic oligonucleotide
  Antisense strand to SEQ ID NO: 1156720
aauacaaagggcaacacgu

SEQ ID NO: 1156722 - RNA, 19 nt, Artificial Sequence
  Description of Artificial Sequence: Synthetic oligonucleotide
  Sense strand starting at position 312 of SEQ ID NO: 916438
uuuagagcuauaugggaaa

SEQ ID NO: 1156723 - RNA, 19 nt, Artificial Sequence
  Description of Artificial Sequence: Synthetic oligonucleotide
  Antisense strand to SEQ ID NO: 1156722
uuucccauauagcucuaaa

SEQ ID NO: 1156724 - RNA, 19 nt, Artificial Sequence
  Description of Artificial Sequence: Synthetic oligonucleotide
  Sense strand starting at position 346 of SEQ ID NO: 916438
acagucccuguauauuaaa

SEQ ID NO: 1156725 - RNA, 19 nt, Artificial Sequence
  Description of Artificial Sequence: Synthetic oligonucleotide
  Antisense strand to SEQ ID NO: 1156724
uuuaauauacagggacugu

SEQ ID NO: 1156726 - RNA, 19 nt, Artificial Sequence
  Description of Artificial Sequence: Synthetic oligonucleotide
  Sense strand starting at position 434 of SEQ ID NO: 916438
augaguuagaaguacuagu

SEQ ID NO: 1156727 - RNA, 19 nt, Artificial Sequence
  Description of Artificial Sequence: Synthetic oligonucleotide
  Antisense strand to SEQ ID NO: 1156726
acuaguacuucuaacucau

SEQ ID NO: 1156728 - RNA, 19 nt, Artificial Sequence
  Description of Artificial Sequence: Synthetic oligonucleotide
  Sense strand starting at position 498 of SEQ ID NO: 916438
caguuaagaccucaucgau

SEQ ID NO: 1156729 - RNA, 19 nt, Artificial Sequence
  Description of Artificial Sequence: Synthetic oligonucleotide
  Antisense strand to SEQ ID NO: 1156728
aucgaugaggucuuaacug

SEQ ID NO: 1156730 - RNA, 19 nt, Artificial Sequence
  Description of Artificial Sequence: Synthetic oligonucleotide
  Sense strand starting at position 501 of SEQ ID NO: 916438
uuaagaccucaucgauauc

SEQ ID NO: 1156731 - RNA, 19 nt, Artificial Sequence
  Description of Artificial Sequence: Synthetic oligonucleotide
  Antisense strand to SEQ ID NO: 1156730
gauaucgaugaggucuuaa

SEQ ID NO: 1156732 - RNA, 19 nt, Artificial Sequence
  Description of Artificial Sequence: Synthetic oligonucleotide
  Sense strand starting at position 521 of SEQ ID NO: 916438
cccgguaaaugcuuauuua

SEQ ID NO: 1156733 - RNA, 19 nt, Artificial Sequence
  Description of Artificial Sequence: Synthetic oligonucleotide
  Antisense strand to SEQ ID NO: 1156732
uaaauaagcauuuaccggg

SEQ ID NO: 1156734 - RNA, 19 nt, Artificial Sequence
  Description of Artificial Sequence: Synthetic oligonucleotide
  Sense strand starting at position 569 of SEQ ID NO: 916438
uucuuauuccaggagucua

SEQ ID NO: 1156735 - RNA, 19 nt, Artificial Sequence
  Description of Artificial Sequence: Synthetic oligonucleotide
  Antisense strand to SEQ ID NO: 1156734
uagacuccuggaauaagaa

SEQ ID NO: 1156736 - RNA, 19 nt, Artificial Sequence
  Description of Artificial Sequence: Synthetic oligonucleotide
  Sense strand starting at position 627 of SEQ ID NO: 916438
uccucugauaagugaggau

SEQ ID NO: 1156737 - RNA, 19 nt, Artificial Sequence
  Description of Artificial Sequence: Synthetic oligonucleotide
  Antisense strand to SEQ ID NO: 1156736
auccucacuuaucagagga

SEQ ID NO: 1156738 - RNA, 19 nt, Artificial Sequence
  Description of Artificial Sequence: Synthetic oligonucleotide
  Sense strand starting at position 652 of SEQ ID NO: 916438
aacuuucugguggaucauu

SEQ ID NO: 1156739 - RNA, 19 nt, Artificial Sequence
  Description of Artificial Sequence: Synthetic oligonucleotide
  Antisense strand to SEQ ID NO: 1156738
aaugauccaccagaaaguu

SEQ ID NO: 1156740 - RNA, 19 nt, Artificial Sequence
  Description of Artificial Sequence: Synthetic oligonucleotide
  Sense strand starting at position 705 of SEQ ID NO: 916438
ggcucuauuuaucuuagca

SEQ ID NO: 1156741 - RNA, 19 nt, Artificial Sequence
  Description of Artificial Sequence: Synthetic oligonucleotide
  Antisense strand to SEQ ID NO: 1156740
ugcuaagauaaauagagcc

SEQ ID NO: 1156742 - RNA, 19 nt, Artificial Sequence
  Description of Artificial Sequence: Synthetic oligonucleotide
  Sense strand starting at position 715 of SEQ ID NO: 916438
aucuuagcauggguugaaa

SEQ ID NO: 1156743 - RNA, 19 nt, Artificial Sequence
  Description of Artificial Sequence: Synthetic oligonucleotide
  Antisense strand to SEQ ID NO: 1156742
uuucaacccaugcuaagau

SEQ ID NO: 1156744 - RNA, 19 nt, Artificial Sequence
  Description of Artificial Sequence: Synthetic oligonucleotide
  Sense strand starting at position 717 of SEQ ID NO: 916438
cuuagcauggguugaaaga

SEQ ID NO: 1156745 - RNA, 19 nt, Artificial Sequence
  Description of Artificial Sequence: Synthetic oligonucleotide
  Antisense strand to SEQ ID NO: 1156744
ucuuucaacccaugcuaag

SEQ ID NO: 1156746 - RNA, 19 nt, Artificial Sequence
  Description of Artificial Sequence: Synthetic oligonucleotide
  Sense strand starting at position 932 of SEQ ID NO: 916438
ugaauugacaggcaguuua

SEQ ID NO: 1156747 - RNA, 19 nt, Artificial Sequence
  Description of Artificial Sequence: Synthetic oligonucleotide
  Antisense strand to SEQ ID NO: 1156746
uaaacugccugucaauuca

SEQ ID NO: 1156748 - RNA, 19 nt, Artificial Sequence
  Description of Artificial Sequence: Synthetic oligonucleotide
  Sense strand starting at position 983 of SEQ ID NO: 916438
ucuggcuauccugacacuu

SEQ ID NO: 1156749 - RNA, 19 nt, Artificial Sequence
  Description of Artificial Sequence: Synthetic oligonucleotide
  Antisense strand to SEQ ID NO: 1156748
aagugucaggauagccaga

SEQ ID NO: 1156750 - RNA, 19 nt, Artificial Sequence
  Description of Artificial Sequence: Synthetic oligonucleotide
  Sense strand starting at position 1229 of SEQ ID NO: 916438
uccaacauccuuggguuaa

SEQ ID NO: 1156751 - RNA, 19 nt, Artificial Sequence
  Description of Artificial Sequence: Synthetic oligonucleotide
  Antisense strand to SEQ ID NO: 1156750
uuaacccaaggauguugga

SEQ ID NO: 1156752 - RNA, 19 nt, Artificial Sequence
  Description of Artificial Sequence: Synthetic oligonucleotide
  Sense strand starting at position 1260 of SEQ ID NO: 916438
uggccaggauauguaaaua

SEQ ID NO: 1156753 - RNA, 19 nt, Artificial Sequence
  Description of Artificial Sequence: Synthetic oligonucleotide
  Antisense strand to SEQ ID NO: 1156752
uauuuacauauccuggcca

SEQ ID NO: 1156754 - RNA, 19 nt, Artificial Sequence
  Description of Artificial Sequence: Synthetic oligonucleotide
  Sense strand starting at position 1378 of SEQ ID NO: 916438
ugugcuaccaaguaaugga

SEQ ID NO: 1156755 - RNA, 19 nt, Artificial Sequence
  Description of Artificial Sequence: Synthetic oligonucleotide
  Antisense strand to SEQ ID NO: 1156754
uccauuacuugguagcaca

SEQ ID NO: 1156756 - RNA, 19 nt, Artificial Sequence
  Description of Artificial Sequence: Synthetic oligonucleotide
  Sense strand starting at position 1401 of SEQ ID NO: 916438
uccaguuaugacuggaacu

SEQ ID NO: 1156757 - RNA, 19 nt, Artificial Sequence
  Description of Artificial Sequence: Synthetic oligonucleotide
  Antisense strand to SEQ ID NO: 1156756
aguuccagucauaacugga

SEQ ID NO: 1156758 - RNA, 19 nt, Artificial Sequence
  Description of Artificial Sequence: Synthetic oligonucleotide
  Sense strand starting at position 1402 of SEQ ID NO: 916438
ccaguuaugacuggaacug

SEQ ID NO: 1156759 - RNA, 19 nt, Artificial Sequence
  Description of Artificial Sequence: Synthetic oligonucleotide
  Antisense strand to SEQ ID NO: 1156758
caguuccagucauaacugg

SEQ ID NO: 1156760 - RNA, 19 nt, Artificial Sequence
  Description of Artificial Sequence: Synthetic oligonucleotide
  Sense strand starting at position 1403 of SEQ ID NO: 916438
caguuaugacuggaacugu

SEQ ID NO: 1156761 - RNA, 19 nt, Artificial Sequence
  Description of Artificial Sequence: Synthetic oligonucleotide
  Antisense strand to SEQ ID NO: 1156760
acaguuccagucauaacug

SEQ ID NO: 1156762 - RNA, 19 nt, Artificial Sequence
  Description of Artificial Sequence: Synthetic oligonucleotide
  Sense strand starting at position 2331 of SEQ ID NO: 916438
agacaugugacguaucuga

SEQ ID NO: 1156763 - RNA, 19 nt, Artificial Sequence
  Description of Artificial Sequence: Synthetic oligonucleotide
  Antisense strand to SEQ ID NO: 1156762
ucagauacgucacaugucu

SEQ ID NO: 1156764 - RNA, 19 nt, Artificial Sequence
  Description of Artificial Sequence: Synthetic oligonucleotide
  Sense strand starting at position 2368 of SEQ ID NO: 916438
guagaaaugucuccugagg

SEQ ID NO: 1156765 - RNA, 19 nt, Artificial Sequence
  Description of Artificial Sequence: Synthetic oligonucleotide
  Antisense strand to SEQ ID NO: 1156764
ccucaggagacauuucuac

SEQ ID NO: 1156766 - RNA, 19 nt, Artificial Sequence
  Description of Artificial Sequence: Synthetic oligonucleotide
  Sense strand starting at position 2430 of SEQ ID NO: 916438
uaguguaacccuggacaag

SEQ ID NO: 1156767 - RNA, 19 nt, Artificial Sequence
  Description of Artificial Sequence: Synthetic oligonucleotide
  Antisense strand to SEQ ID NO: 1156766
cuuguccaggguuacacua

SEQ ID NO: 1156768 - RNA, 19 nt, Artificial Sequence
  Description of Artificial Sequence: Synthetic oligonucleotide
  Sense strand starting at position 2431 of SEQ ID NO: 916438
aguguaacccuggacaagu

SEQ ID NO: 1156769 - RNA, 19 nt, Artificial Sequence
  Description of Artificial Sequence: Synthetic oligonucleotide
  Antisense strand to SEQ ID NO: 1156768
acuuguccaggguuacacu

SEQ ID NO: 1156770 - RNA, 19 nt, Artificial Sequence
  Description of Artificial Sequence: Synthetic oligonucleotide
  Sense strand starting at position 2662 of SEQ ID NO: 916438
ccugaucugcuagggaaau

SEQ ID NO: 1156771 - RNA, 19 nt, Artificial Sequence
  Description of Artificial Sequence: Synthetic oligonucleotide
  Antisense strand to SEQ ID NO: 1156770
auuucccuagcagaucagg

SEQ ID NO: 1156772 - RNA, 19 nt, Artificial Sequence
  Description of Artificial Sequence: Synthetic oligonucleotide
  Sense strand starting at position 2716 of SEQ ID NO: 916438
guaggcacacuugaauuaa

SEQ ID NO: 1156773 - RNA, 19 nt, Artificial Sequence
  Description of Artificial Sequence: Synthetic oligonucleotide
  Antisense strand to SEQ ID NO: 1156772
uuaauucaagugugccuac

SEQ ID NO: 1156774 - RNA, 19 nt, Artificial Sequence
  Description of Artificial Sequence: Synthetic oligonucleotide
  Sense strand starting at position 2869 of SEQ ID NO: 916438
ccguuuagauuuccugacu

SEQ ID NO: 1156775 - RNA, 19 nt, Artificial Sequence
  Description of Artificial Sequence: Synthetic oligonucleotide
  Antisense strand to SEQ ID NO: 1156774
agucaggaaaucuaaacgg

SEQ ID NO: 1156776 - RNA, 19 nt, Artificial Sequence
  Description of Artificial Sequence: Synthetic oligonucleotide
  Sense strand starting at position 2870 of SEQ ID NO: 916438
cguuuagauuuccugacuc

SEQ ID NO: 1156777 - RNA, 19 nt, Artificial Sequence
  Description of Artificial Sequence: Synthetic oligonucleotide
  Antisense strand to SEQ ID NO: 1156776
gagucaggaaaucuaaacg

SEQ ID NO: 1156778 - RNA, 19 nt, Artificial Sequence
  Description of Artificial Sequence: Synthetic oligonucleotide
  Sense strand starting at position 3102 of SEQ ID NO: 916438
ggauaaggaacucgguuua

SEQ ID NO: 1156779 - RNA, 19 nt, Artificial Sequence
  Description of Artificial Sequence: Synthetic oligonucleotide
  Antisense strand to SEQ ID NO: 1156778
uaaaccgaguuccuuaucc

SEQ ID NO: 1156780 - RNA, 19 nt, Artificial Sequence
  Description of Artificial Sequence: Synthetic oligonucleotide
  Sense strand starting at position 3115 of SEQ ID NO: 916438
gguuuauagcaacagauac

SEQ ID NO: 1156781 - RNA, 19 nt, Artificial Sequence
  Description of Artificial Sequence: Synthetic oligonucleotide
  Antisense strand to SEQ ID NO: 1156780
guaucuguugcuauaaacc

SEQ ID NO: 1156782 - RNA, 19 nt, Artificial Sequence
  Description of Artificial Sequence: Synthetic oligonucleotide
  Sense strand starting at position 3160 of SEQ ID NO: 916438
gacacuaacugguugugaa

SEQ ID NO: 1156783 - RNA, 19 nt, Artificial Sequence
  Description of Artificial Sequence: Synthetic oligonucleotide
  Antisense strand to SEQ ID NO: 1156782
uucacaaccaguuaguguc

SEQ ID NO: 1156784 - RNA, 19 nt, Artificial Sequence
  Description of Artificial Sequence: Synthetic oligonucleotide
  Sense strand starting at position 3174 of SEQ ID NO: 916438
gugaaucacuuguuaaaga

SEQ ID NO: 1156785 - RNA, 19 nt, Artificial Sequence
  Description of Artificial Sequence: Synthetic oligonucleotide
  Antisense strand to SEQ ID NO: 1156784
ucuuuaacaagugauucac

SEQ ID NO: 1156786 - RNA, 19 nt, Artificial Sequence
  Description of Artificial Sequence: Synthetic oligonucleotide
  Sense strand starting at position 3395 of SEQ ID NO: 916438
cugugcuauguccugcuua

SEQ ID NO: 1156787 - RNA, 19 nt, Artificial Sequence
  Description of Artificial Sequence: Synthetic oligonucleotide
  Antisense strand to SEQ ID NO: 1156786
uaagcaggacauagcacag

SEQ ID NO: 1156788 - RNA, 19 nt, Artificial Sequence
  Description of Artificial Sequence: Synthetic oligonucleotide
  Sense strand starting at position 3484 of SEQ ID NO: 916438
caaaucaagggcuguacua

SEQ ID NO: 1156789 - RNA, 19 nt, Artificial Sequence
  Description of Artificial Sequence: Synthetic oligonucleotide
  Antisense strand to SEQ ID NO: 1156788
uaguacagcccuugauuug

SEQ ID NO: 1156790 - RNA, 19 nt, Artificial Sequence
  Description of Artificial Sequence: Synthetic oligonucleotide
  Sense strand starting at position 3534 of SEQ ID NO: 916438
uguaaauauuuccagaaag

SEQ ID NO: 1156791 - RNA, 19 nt, Artificial Sequence
  Description of Artificial Sequence: Synthetic oligonucleotide
  Antisense strand to SEQ ID NO: 1156790
cuuucuggaaauauuuaca

SEQ ID NO: 1156792 - RNA, 19 nt, Artificial Sequence
  Description of Artificial Sequence: Synthetic oligonucleotide
  Sense strand starting at position 3636 of SEQ ID NO: 916438
cuaugcauuguuuaagaua

SEQ ID NO: 1156793 - RNA, 19 nt, Artificial Sequence
  Description of Artificial Sequence: Synthetic oligonucleotide
  Antisense strand to SEQ ID NO: 1156792
uaucuuaaacaaugcauag

SEQ ID NO: 1156794 - RNA, 19 nt, Artificial Sequence
  Description of Artificial Sequence: Synthetic oligonucleotide
  Sense strand starting at position 3693 of SEQ ID NO: 916438
cucgugguucgguuuguua

SEQ ID NO: 1156795 - RNA, 19 nt, Artificial Sequence
  Description of Artificial Sequence: Synthetic oligonucleotide
  Antisense strand to SEQ ID NO: 1156794
uaacaaaccgaaccacgag

SEQ ID NO: 1156796 - RNA, 19 nt, Artificial Sequence
  Description of Artificial Sequence: Synthetic oligonucleotide
  Sense strand starting at position 48 of SEQ ID NO: 916439
uaugcucuagaagguaaua

SEQ ID NO: 1156797 - RNA, 19 nt, Artificial Sequence
  Description of Artificial Sequence: Synthetic oligonucleotide
  Antisense strand to SEQ ID NO: 1156796
uauuaccuucuagagcaua

SEQ ID NO: 1156798 - RNA, 19 nt, Artificial Sequence
  Description of Artificial Sequence: Synthetic oligonucleotide
  Sense strand starting at position 97 of SEQ ID NO: 916439
gguuaauccagggaugcca

SEQ ID NO: 1156799 - RNA, 19 nt, Artificial Sequence
  Description of Artificial Sequence: Synthetic oligonucleotide
  Antisense strand to SEQ ID NO: 1156798
uggcaucccuggauuaacc

SEQ ID NO: 1156800 - RNA, 19 nt, Artificial Sequence
  Description of Artificial Sequence: Synthetic oligonucleotide
  Sense strand starting at position 455 of SEQ ID NO: 916439
guugguucaugggcaagaa

SEQ ID NO: 1156801 - RNA, 19 nt, Artificial Sequence
  Description of Artificial Sequence: Synthetic oligonucleotide
  Antisense strand to SEQ ID NO: 1156800
uucuugcccaugaaccaac

SEQ ID NO: 1156802 - RNA, 19 nt, Artificial Sequence
  Description of Artificial Sequence: Synthetic oligonucleotide
  Sense strand starting at position 589 of SEQ ID NO: 916439
uggcccuuccaaggaaaua

SEQ ID NO: 1156803 - RNA, 19 nt, Artificial Sequence
  Description of Artificial Sequence: Synthetic oligonucleotide
  Antisense strand to SEQ ID NO: 1156802
uauuuccuuggaagggcca

SEQ ID NO: 1156804 - RNA, 19 nt, Artificial Sequence
  Description of Artificial Sequence: Synthetic oligonucleotide
  Sense strand starting at position 667 of SEQ ID NO: 916439
cccagaauguaggucugaa

SEQ ID NO: 1156805 - RNA, 19 nt, Artificial Sequence
  Description of Artificial Sequence: Synthetic oligonucleotide
  Antisense strand to SEQ ID NO: 1156804
uucagaccuacauucuggg

SEQ ID NO: 1156806 - RNA, 19 nt, Artificial Sequence
  Description of Artificial Sequence: Synthetic oligonucleotide
  Sense strand starting at position 675 of SEQ ID NO: 916439
guaggucugaacuagucuu

SEQ ID NO: 1156807 - RNA, 19 nt, Artificial Sequence
  Description of Artificial Sequence: Synthetic oligonucleotide
  Antisense strand to SEQ ID NO: 1156806
aagacuaguucagaccuac

SEQ ID NO: 1156808 - RNA, 19 nt, Artificial Sequence
  Description of Artificial Sequence: Synthetic oligonucleotide
  Sense strand starting at position 682 of SEQ ID NO: 916439
ugaacuagucuugaaaguc

SEQ ID NO: 1156809 - RNA, 19 nt, Artificial Sequence
  Description of Artificial Sequence: Synthetic oligonucleotide
  Antisense strand to SEQ ID NO: 1156808
gacuuucaagacuaguuca

SEQ ID NO: 1156810 - RNA, 19 nt, Artificial Sequence
  Description of Artificial Sequence: Synthetic oligonucleotide
  Sense strand starting at position 734 of SEQ ID NO: 916439
gcuugccuauuucugaauu

SEQ ID NO: 1156811 - RNA, 19 nt, Artificial Sequence
  Description of Artificial Sequence: Synthetic oligonucleotide
  Antisense strand to SEQ ID NO: 1156810
aauucagaaauaggcaagc

SEQ ID NO: 1156812 - RNA, 19 nt, Artificial Sequence
  Description of Artificial Sequence: Synthetic oligonucleotide
  Sense strand starting at position 813 of SEQ ID NO: 916439
uaaccaauuugcguuagca

SEQ ID NO: 1156813 - RNA, 19 nt, Artificial Sequence
  Description of Artificial Sequence: Synthetic oligonucleotide
  Antisense strand to SEQ ID NO: 1156812
ugcuaacgcaaauugguua

SEQ ID NO: 1156814 - RNA, 19 nt, Artificial Sequence
  Description of Artificial Sequence: Synthetic oligonucleotide
  Sense strand starting at position 815 of SEQ ID NO: 916439
accaauuugcguuagcaac

SEQ ID NO: 1156815 - RNA, 19 nt, Artificial Sequence
  Description of Artificial Sequence: Synthetic oligonucleotide
  Antisense strand to SEQ ID NO: 1156814
guugcuaacgcaaauuggu

SEQ ID NO: 1156816 - RNA, 19 nt, Artificial Sequence
  Description of Artificial Sequence: Synthetic oligonucleotide
  Sense strand starting at position 891 of SEQ ID NO: 916439
agcaaaugguccucaauua

SEQ ID NO: 1156817 - RNA, 19 nt, Artificial Sequence
  Description of Artificial Sequence: Synthetic oligonucleotide
  Antisense strand to SEQ ID NO: 1156816
uaauugaggaccauuugcu

SEQ ID NO: 1156818 - RNA, 19 nt, Artificial Sequence
  Description of Artificial Sequence: Synthetic oligonucleotide
  Sense strand starting at position 892 of SEQ ID NO: 916439
gcaaaugguccucaauuaa

SEQ ID NO: 1156819 - RNA, 19 nt, Artificial Sequence
  Description of Artificial Sequence: Synthetic oligonucleotide
  Antisense strand to SEQ ID NO: 1156818
uuaauugaggaccauuugc

SEQ ID NO: 1156820 - RNA, 19 nt, Artificial Sequence
  Description of Artificial Sequence: Synthetic oligonucleotide
  Sense strand starting at position 978 of SEQ ID NO: 916439
gucucaaacgcuuagagaa

SEQ ID NO: 1156821 - RNA, 19 nt, Artificial Sequence
  Description of Artificial Sequence: Synthetic oligonucleotide
  Antisense strand to SEQ ID NO: 1156820
uucucuaagcguuugagac

SEQ ID NO: 1156822 - RNA, 19 nt, Artificial Sequence
  Description of Artificial Sequence: Synthetic oligonucleotide
  Sense strand starting at position 1051 of SEQ ID NO: 916439
ggccaaccucuacaagauu

SEQ ID NO: 1156823 - RNA, 19 nt, Artificial Sequence
  Description of Artificial Sequence: Synthetic oligonucleotide
  Antisense strand to SEQ ID NO: 1156822
aaucuuguagagguuggcc

SEQ ID NO: 1156824 - RNA, 19 nt, Artificial Sequence
  Description of Artificial Sequence: Synthetic oligonucleotide
  Sense strand starting at position 1105 of SEQ ID NO: 916439
gcuguuucuggagaccuuu

SEQ ID NO: 1156825 - RNA, 19 nt, Artificial Sequence
  Description of Artificial Sequence: Synthetic oligonucleotide
  Antisense strand to SEQ ID NO: 1156824
aaaggucuccagaaacagc

SEQ ID NO: 1156826 - RNA, 19 nt, Artificial Sequence
  Description of Artificial Sequence: Synthetic oligonucleotide
  Sense strand starting at position 1111 of SEQ ID NO: 916439
ucuggagaccuuugcacua

SEQ ID NO: 1156827 - RNA, 19 nt, Artificial Sequence
  Description of Artificial Sequence: Synthetic oligonucleotide
  Antisense strand to SEQ ID NO: 1156826
uagugcaaaggucuccaga

SEQ ID NO: 1156828 - RNA, 19 nt, Artificial Sequence
  Description of Artificial Sequence: Synthetic oligonucleotide
  Sense strand starting at position 2347 of SEQ ID NO: 916439
ucugaagagcugggaguuu

SEQ ID NO: 1156829 - RNA, 19 nt, Artificial Sequence
  Description of Artificial Sequence: Synthetic oligonucleotide
  Antisense strand to SEQ ID NO: 1156828
aaacucccagcucuucaga

SEQ ID NO: 1156830 - RNA, 19 nt, Artificial Sequence
  Description of Artificial Sequence: Synthetic oligonucleotide
  Sense strand starting at position 2456 of SEQ ID NO: 916439
ucauguauuagggagugca

SEQ ID NO: 1156831 - RNA, 19 nt, Artificial Sequence
  Description of Artificial Sequence: Synthetic oligonucleotide
  Antisense strand to SEQ ID NO: 1156830
ugcacucccuaauacauga

SEQ ID NO: 1156832 - RNA, 19 nt, Artificial Sequence
  Description of Artificial Sequence: Synthetic oligonucleotide
  Sense strand starting at position 2468 of SEQ ID NO: 916439
gagugcacaucuuuaaaga

SEQ ID NO: 1156833 - RNA, 19 nt, Artificial Sequence
  Description of Artificial Sequence: Synthetic oligonucleotide
  Antisense strand to SEQ ID NO: 1156832
ucuuuaaagaugugcacuc

SEQ ID NO: 1156834 - RNA, 19 nt, Artificial Sequence
  Description of Artificial Sequence: Synthetic oligonucleotide
  Sense strand starting at position 2529 of SEQ ID NO: 916439
ggcaguuaucaacaaguca

SEQ ID NO: 1156835 - RNA, 19 nt, Artificial Sequence
  Description of Artificial Sequence: Synthetic oligonucleotide
  Antisense strand to SEQ ID NO: 1156834
ugacuuguugauaacugcc

SEQ ID NO: 1156836 - RNA, 19 nt, Artificial Sequence
  Description of Artificial Sequence: Synthetic oligonucleotide
  Sense strand starting at position 2634 of SEQ ID NO: 916439
caaugccaucaaggaguua

SEQ ID NO: 1156837 - RNA, 19 nt, Artificial Sequence
  Description of Artificial Sequence: Synthetic oligonucleotide
  Antisense strand to SEQ ID NO: 1156836
uaacuccuugauggcauug

SEQ ID NO: 1156838 - RNA, 19 nt, Artificial Sequence
  Description of Artificial Sequence: Synthetic oligonucleotide
  Sense strand starting at position 2656 of SEQ ID NO: 916439
ggcucuagcguucuccgaa

SEQ ID NO: 1156839 - RNA, 19 nt, Artificial Sequence
  Description of Artificial Sequence: Synthetic oligonucleotide
  Antisense strand to SEQ ID NO: 1156838
uucggagaacgcuagagcc

SEQ ID NO: 1156840 - RNA, 19 nt, Artificial Sequence
  Description of Artificial Sequence: Synthetic oligonucleotide
  Sense strand starting at position 2697 of SEQ ID NO: 916439
cauugucugcgucaagaaa

SEQ ID NO: 1156841 - RNA, 19 nt, Artificial Sequence
  Description of Artificial Sequence: Synthetic oligonucleotide
  Antisense strand to SEQ ID NO: 1156840
uuucuugacgcagacaaug

SEQ ID NO: 1156842 - RNA, 19 nt, Artificial Sequence
  Description of Artificial Sequence: Synthetic oligonucleotide
  Sense strand starting at position 2718 of SEQ ID NO: 916439
ucaaguaaaugccuugaga

SEQ ID NO: 1156843 - RNA, 19 nt, Artificial Sequence
  Description of Artificial Sequence: Synthetic oligonucleotide
  Antisense strand to SEQ ID NO: 1156842
ucucaaggcauuuacuuga

SEQ ID NO: 1156844 - RNA, 19 nt, Artificial Sequence
  Description of Artificial Sequence: Synthetic oligonucleotide
  Sense strand starting at position 2815 of SEQ ID NO: 916439
cgaguagaucacgauguca

SEQ ID NO: 1156845 - RNA, 19 nt, Artificial Sequence
  Description of Artificial Sequence: Synthetic oligonucleotide
  Antisense strand to SEQ ID NO: 1156844
ugacaucgugaucuacucg

SEQ ID NO: 1156846 - RNA, 19 nt, Artificial Sequence
  Description of Artificial Sequence: Synthetic oligonucleotide
  Sense strand starting at position 3077 of SEQ ID NO: 916439
aagugucaaguugacuaaa

SEQ ID NO: 1156847 - RNA, 19 nt, Artificial Sequence
  Description of Artificial Sequence: Synthetic oligonucleotide
  Antisense strand to SEQ ID NO: 1156846
uuuagucaacuugacacuu

SEQ ID NO: 1156848 - RNA, 19 nt, Artificial Sequence
  Description of Artificial Sequence: Synthetic oligonucleotide
  Sense strand starting at position 3079 of SEQ ID NO: 916439
gugucaaguugacuaaaug

SEQ ID NO: 1156849 - RNA, 19 nt, Artificial Sequence
  Description of Artificial Sequence: Synthetic oligonucleotide
  Antisense strand to SEQ ID NO: 1156848
cauuuagucaacuugacac

SEQ ID NO: 1156850 - RNA, 19 nt, Artificial Sequence
  Description of Artificial Sequence: Synthetic oligonucleotide
  Sense strand starting at position 3213 of SEQ ID NO: 916439
uggucaguggucgaacuau

SEQ ID NO: 1156851 - RNA, 19 nt, Artificial Sequence
  Description of Artificial Sequence: Synthetic oligonucleotide
  Antisense strand to SEQ ID NO: 1156850
auaguucgaccacugacca

SEQ ID NO: 1156852 - RNA, 19 nt, Artificial Sequence
  Description of Artificial Sequence: Synthetic oligonucleotide
  Sense strand starting at position 3303 of SEQ ID NO: 916439
uacaguguucucugggaau

SEQ ID NO: 1156853 - RNA, 19 nt, Artificial Sequence
  Description of Artificial Sequence: Synthetic oligonucleotide
  Antisense strand to SEQ ID NO: 1156852
auucccagagaacacugua

SEQ ID NO: 1156854 - RNA, 19 nt, Artificial Sequence
  Description of Artificial Sequence: Synthetic oligonucleotide
  Sense strand starting at position 3305 of SEQ ID NO: 916439
caguguucucugggaauau

SEQ ID NO: 1156855 - RNA, 19 nt, Artificial Sequence
  Description of Artificial Sequence: Synthetic oligonucleotide
  Antisense strand to SEQ ID NO: 1156854
auauucccagagaacacug

SEQ ID NO: 1156856 - RNA, 19 nt, Artificial Sequence
  Description of Artificial Sequence: Synthetic oligonucleotide
  Sense strand starting at position 3347 of SEQ ID NO: 916439
gagagaucagggcaggcuu

SEQ ID NO: 1156857 - RNA, 19 nt, Artificial Sequence
  Description of Artificial Sequence: Synthetic oligonucleotide
  Antisense strand to SEQ ID NO: 1156856
aagccugcccugaucucuc

SEQ ID NO: 1156858 - RNA, 19 nt, Artificial Sequence
  Description of Artificial Sequence: Synthetic oligonucleotide
  Sense strand starting at position 3366 of SEQ ID NO: 916439
cuagaaaguugugucuaac

SEQ ID NO: 1156859 - RNA, 19 nt, Artificial Sequence
  Description of Artificial Sequence: Synthetic oligonucleotide
  Antisense strand to SEQ ID NO: 1156858
guuagacacaacuuucuag

SEQ ID NO: 1156860 - RNA, 19 nt, Artificial Sequence
  Description of Artificial Sequence: Synthetic oligonucleotide
  Sense strand starting at position 3369 of SEQ ID NO: 916439
gaaaguugugucuaacuag

SEQ ID NO: 1156861 - RNA, 19 nt, Artificial Sequence
  Description of Artificial Sequence: Synthetic oligonucleotide
  Antisense strand to SEQ ID NO: 1156860
cuaguuagacacaacuuuc

SEQ ID NO: 1156862 - RNA, 19 nt, Artificial Sequence
  Description of Artificial Sequence: Synthetic oligonucleotide
  Sense strand starting at position 3380 of SEQ ID NO: 916439
cuaacuagucuugagguuu

SEQ ID NO: 1156863 - RNA, 19 nt, Artificial Sequence
  Description of Artificial Sequence: Synthetic oligonucleotide
  Antisense strand to SEQ ID NO: 1156862
aaaccucaagacuaguuag

SEQ ID NO: 1156864 - RNA, 19 nt, Artificial Sequence
  Description of Artificial Sequence: Synthetic oligonucleotide
  Sense strand starting at position 3386 of SEQ ID NO: 916439
agucuugagguuuacauaa

SEQ ID NO: 1156865 - RNA, 19 nt, Artificial Sequence
  Description of Artificial Sequence: Synthetic oligonucleotide
  Antisense strand to SEQ ID NO: 1156864
uuauguaaaccucaagacu

SEQ ID NO: 1156866 - RNA, 19 nt, Artificial Sequence
  Description of Artificial Sequence: Synthetic oligonucleotide
  Sense strand starting at position 3540 of SEQ ID NO: 916439
gagaauaacucauucuggu

SEQ ID NO: 1156867 - RNA, 19 nt, Artificial Sequence
  Description of Artificial Sequence: Synthetic oligonucleotide
  Antisense strand to SEQ ID NO: 1156866
accagaaugaguuauucuc

SEQ ID NO: 1156868 - RNA, 19 nt, Artificial Sequence
  Description of Artificial Sequence: Synthetic oligonucleotide
  Sense strand starting at position 3594 of SEQ ID NO: 916439
ucuuguguuccauacacca

SEQ ID NO: 1156869 - RNA, 19 nt, Artificial Sequence
  Description of Artificial Sequence: Synthetic oligonucleotide
  Antisense strand to SEQ ID NO: 1156868
ugguguauggaacacaaga

SEQ ID NO: 1156870 - RNA, 19 nt, Artificial Sequence
  Description of Artificial Sequence: Synthetic oligonucleotide
  Sense strand starting at position 3684 of SEQ ID NO: 916439
gucgcaucaacugaugaau

SEQ ID NO: 1156871 - RNA, 19 nt, Artificial Sequence
  Description of Artificial Sequence: Synthetic oligonucleotide
  Antisense strand to SEQ ID NO: 1156870
auucaucaguugaugcgac

SEQ ID NO: 1156872 - RNA, 19 nt, Artificial Sequence
  Description of Artificial Sequence: Synthetic oligonucleotide
  Sense strand starting at position 3712 of SEQ ID NO: 916439
aagugugguaaucauggaa

SEQ ID NO: 1156873 - RNA, 19 nt, Artificial Sequence
  Description of Artificial Sequence: Synthetic oligonucleotide
  Antisense strand to SEQ ID NO: 1156872
uuccaugauuaccacacuu

SEQ ID NO: 1156874 - RNA, 19 nt, Artificial Sequence
  Description of Artificial Sequence: Synthetic oligonucleotide
  Sense strand starting at position 3715 of SEQ ID NO: 916439
ugugguaaucauggaauau

SEQ ID NO: 1156875 - RNA, 19 nt, Artificial Sequence
  Description of Artificial Sequence: Synthetic oligonucleotide
  Antisense strand to SEQ ID NO: 1156874
auauuccaugauuaccaca

SEQ ID NO: 1156876 - RNA, 19 nt, Artificial Sequence
  Description of Artificial Sequence: Synthetic oligonucleotide
  Sense strand starting at position 53 of SEQ ID NO: 916440
gaccaagauuauuaguuga

SEQ ID NO: 1156877 - RNA, 19 nt, Artificial Sequence
  Description of Artificial Sequence: Synthetic oligonucleotide
  Antisense strand to SEQ ID NO: 1156876
ucaacuaauaaucuugguc

SEQ ID NO: 1156878 - RNA, 19 nt, Artificial Sequence
  Description of Artificial Sequence: Synthetic oligonucleotide
  Sense strand starting at position 433 of SEQ ID NO: 916440
uggcgaugcucucuuguua

SEQ ID NO: 1156879 - RNA, 19 nt, Artificial Sequence
  Description of Artificial Sequence: Synthetic oligonucleotide
  Antisense strand to SEQ ID NO: 1156878
uaacaagagagcaucgcca

SEQ ID NO: 1156880 - RNA, 19 nt, Artificial Sequence
  Description of Artificial Sequence: Synthetic oligonucleotide
  Sense strand starting at position 440 of SEQ ID NO: 916440
gcucucuuguuacucuauu

SEQ ID NO: 1156881 - RNA, 19 nt, Artificial Sequence
  Description of Artificial Sequence: Synthetic oligonucleotide
  Antisense strand to SEQ ID NO: 1156880
aauagaguaacaagagagc

SEQ ID NO: 1156882 - RNA, 19 nt, Artificial Sequence
  Description of Artificial Sequence: Synthetic oligonucleotide
  Sense strand starting at position 465 of SEQ ID NO: 916440
gggagaaguucuuggguuu

SEQ ID NO: 1156883 - RNA, 19 nt, Artificial Sequence
  Description of Artificial Sequence: Synthetic oligonucleotide
  Antisense strand to SEQ ID NO: 1156882
aaacccaagaacuucuccc

SEQ ID NO: 1156884 - RNA, 19 nt, Artificial Sequence
  Description of Artificial Sequence: Synthetic oligonucleotide
  Sense strand starting at position 466 of SEQ ID NO: 916440
ggagaaguucuuggguuuc

SEQ ID NO: 1156885 - RNA, 19 nt, Artificial Sequence
  Description of Artificial Sequence: Synthetic oligonucleotide
  Antisense strand to SEQ ID NO: 1156884
gaaacccaagaacuucucc

SEQ ID NO: 1156886 - RNA, 19 nt, Artificial Sequence
  Description of Artificial Sequence: Synthetic oligonucleotide
  Sense strand starting at position 468 of SEQ ID NO: 916440
agaaguucuuggguuucuu

SEQ ID NO: 1156887 - RNA, 19 nt, Artificial Sequence
  Description of Artificial Sequence: Synthetic oligonucleotide
  Antisense strand to SEQ ID NO: 1156886
aagaaacccaagaacuucu

SEQ ID NO: 1156888 - RNA, 19 nt, Artificial Sequence
  Description of Artificial Sequence: Synthetic oligonucleotide
  Sense strand starting at position 496 of SEQ ID NO: 916440
gauacagucucacuucguu

SEQ ID NO: 1156889 - RNA, 19 nt, Artificial Sequence
  Description of Artificial Sequence: Synthetic oligonucleotide
  Antisense strand to SEQ ID NO: 1156888
aacgaagugagacuguauc

SEQ ID NO: 1156890 - RNA, 19 nt, Artificial Sequence
  Description of Artificial Sequence: Synthetic oligonucleotide
  Sense strand starting at position 1105 of SEQ ID NO: 916440
agcccaucuuuauaaagga

SEQ ID NO: 1156891 - RNA, 19 nt, Artificial Sequence
  Description of Artificial Sequence: Synthetic oligonucleotide
  Antisense strand to SEQ ID NO: 1156890
uccuuuauaaagaugggcu

SEQ ID NO: 1156892 - RNA, 19 nt, Artificial Sequence
  Description of Artificial Sequence: Synthetic oligonucleotide
  Sense strand starting at position 1118 of SEQ ID NO: 916440
aaaggauccugguggucaa

SEQ ID NO: 1156893 - RNA, 19 nt, Artificial Sequence
  Description of Artificial Sequence: Synthetic oligonucleotide
  Antisense strand to SEQ ID NO: 1156892
uugaccaccaggauccuuu

SEQ ID NO: 1156894 - RNA, 19 nt, Artificial Sequence
  Description of Artificial Sequence: Synthetic oligonucleotide
  Sense strand starting at position 1119 of SEQ ID NO: 916440
aaggauccugguggucaaa

SEQ ID NO: 1156895 - RNA, 19 nt, Artificial Sequence
  Description of Artificial Sequence: Synthetic oligonucleotide
  Antisense strand to SEQ ID NO: 1156894
uuugaccaccaggauccuu

SEQ ID NO: 1156896 - RNA, 19 nt, Artificial Sequence
  Description of Artificial Sequence: Synthetic oligonucleotide
  Sense strand starting at position 1380 of SEQ ID NO: 916440
ccaauccugccuugaagaa

SEQ ID NO: 1156897 - RNA, 19 nt, Artificial Sequence
  Description of Artificial Sequence: Synthetic oligonucleotide
  Antisense strand to SEQ ID NO: 1156896
uucuucaaggcaggauugg

SEQ ID NO: 1156898 - RNA, 19 nt, Artificial Sequence
  Description of Artificial Sequence: Synthetic oligonucleotide
  Sense strand starting at position 1516 of SEQ ID NO: 916440
acugaugucagguaaguau

SEQ ID NO: 1156899 - RNA, 19 nt, Artificial Sequence
  Description of Artificial Sequence: Synthetic oligonucleotide
  Antisense strand to SEQ ID NO: 1156898
auacuuaccugacaucagu

SEQ ID NO: 1156900 - RNA, 19 nt, Artificial Sequence
  Description of Artificial Sequence: Synthetic oligonucleotide
  Sense strand starting at position 1525 of SEQ ID NO: 916440
agguaaguauaccacucau

SEQ ID NO: 1156901 - RNA, 19 nt, Artificial Sequence
  Description of Artificial Sequence: Synthetic oligonucleotide
  Antisense strand to SEQ ID NO: 1156900
augagugguauacuuaccu

SEQ ID NO: 1156902 - RNA, 19 nt, Artificial Sequence
  Description of Artificial Sequence: Synthetic oligonucleotide
  Sense strand starting at position 1612 of SEQ ID NO: 916440
agaacucagugucuauaca

SEQ ID NO: 1156903 - RNA, 19 nt, Artificial Sequence
  Description of Artificial Sequence: Synthetic oligonucleotide
  Antisense strand to SEQ ID NO: 1156902
uguauagacacugaguucu

SEQ ID NO: 1156904 - RNA, 19 nt, Artificial Sequence
  Description of Artificial Sequence: Synthetic oligonucleotide
  Sense strand starting at position 1645 of SEQ ID NO: 916440
cacguaugugcauagacaa

SEQ ID NO: 1156905 - RNA, 19 nt, Artificial Sequence
  Description of Artificial Sequence: Synthetic oligonucleotide
  Antisense strand to SEQ ID NO: 1156904
uugucuaugcacauacgug

SEQ ID NO: 1156906 - RNA, 19 nt, Artificial Sequence
  Description of Artificial Sequence: Synthetic oligonucleotide
  Sense strand starting at position 1682 of SEQ ID NO: 916440
gaaagaaggcccugccuua

SEQ ID NO: 1156907 - RNA, 19 nt, Artificial Sequence
  Description of Artificial Sequence: Synthetic oligonucleotide
  Antisense strand to SEQ ID NO: 1156906
uaaggcagggccuucuuuc

SEQ ID NO: 1156908 - RNA, 19 nt, Artificial Sequence
  Description of Artificial Sequence: Synthetic oligonucleotide
  Sense strand starting at position 1701 of SEQ ID NO: 916440
gggacaguauccuuacaca

SEQ ID NO: 1156909 - RNA, 19 nt, Artificial Sequence
  Description of Artificial Sequence: Synthetic oligonucleotide
  Antisense strand to SEQ ID NO: 1156908
uguguaaggauacuguccc

SEQ ID NO: 1156910 - RNA, 19 nt, Artificial Sequence
  Description of Artificial Sequence: Synthetic oligonucleotide
  Sense strand starting at position 1806 of SEQ ID NO: 916440
cgggacugcuccuucuaua

SEQ ID NO: 1156911 - RNA, 19 nt, Artificial Sequence
  Description of Artificial Sequence: Synthetic oligonucleotide
  Antisense strand to SEQ ID NO: 1156910
uauagaaggagcagucccg

SEQ ID NO: 1156912 - RNA, 19 nt, Artificial Sequence
  Description of Artificial Sequence: Synthetic oligonucleotide
  Sense strand starting at position 1987 of SEQ ID NO: 916440
cacugcucuuugcugagau

SEQ ID NO: 1156913 - RNA, 19 nt, Artificial Sequence
  Description of Artificial Sequence: Synthetic oligonucleotide
  Antisense strand to SEQ ID NO: 1156912
aucucagcaaagagcagug

SEQ ID NO: 1156914 - RNA, 19 nt, Artificial Sequence
  Description of Artificial Sequence: Synthetic oligonucleotide
  Sense strand starting at position 1989 of SEQ ID NO: 916440
cugcucuuugcugagauaa

SEQ ID NO: 1156915 - RNA, 19 nt, Artificial Sequence
  Description of Artificial Sequence: Synthetic oligonucleotide
  Antisense strand to SEQ ID NO: 1156914
uuaucucagcaaagagcag

SEQ ID NO: 1156916 - RNA, 19 nt, Artificial Sequence
  Description of Artificial Sequence: Synthetic oligonucleotide
  Sense strand starting at position 1991 of SEQ ID NO: 916440
gcucuuugcugagauaagc

SEQ ID NO: 1156917 - RNA, 19 nt, Artificial Sequence
  Description of Artificial Sequence: Synthetic oligonucleotide
  Antisense strand to SEQ ID NO: 1156916
gcuuaucucagcaaagagc

SEQ ID NO: 1156918 - RNA, 19 nt, Artificial Sequence
  Description of Artificial Sequence: Synthetic oligonucleotide
  Sense strand starting at position 2075 of SEQ ID NO: 916440
aggugcaaucaugaucauu

SEQ ID NO: 1156919 - RNA, 19 nt, Artificial Sequence
  Description of Artificial Sequence: Synthetic oligonucleotide
  Antisense strand to SEQ ID NO: 1156918
aaugaucaugauugcaccu

SEQ ID NO: 1156920 - RNA, 19 nt, Artificial Sequence
  Description of Artificial Sequence: Synthetic oligonucleotide
  Sense strand starting at position 2663 of SEQ ID NO: 916440
uccaauuccuagggucaga

SEQ ID NO: 1156921 - RNA, 19 nt, Artificial Sequence
  Description of Artificial Sequence: Synthetic oligonucleotide
  Antisense strand to SEQ ID NO: 1156920
ucugacccuaggaauugga

SEQ ID NO: 1156922 - RNA, 19 nt, Artificial Sequence
  Description of Artificial Sequence: Synthetic oligonucleotide
  Sense strand starting at position 2727 of SEQ ID NO: 916440
gagaaucagcucuggaaua

SEQ ID NO: 1156923 - RNA, 19 nt, Artificial Sequence
  Description of Artificial Sequence: Synthetic oligonucleotide
  Antisense strand to SEQ ID NO: 1156922
uauuccagagcugauucuc

SEQ ID NO: 1156924 - RNA, 19 nt, Artificial Sequence
  Description of Artificial Sequence: Synthetic oligonucleotide
  Sense strand starting at position 2728 of SEQ ID NO: 916440
agaaucagcucuggaauag

SEQ ID NO: 1156925 - RNA, 19 nt, Artificial Sequence
  Description of Artificial Sequence: Synthetic oligonucleotide
  Antisense strand to SEQ ID NO: 1156924
cuauuccagagcugauucu

SEQ ID NO: 1156926 - RNA, 19 nt, Artificial Sequence
  Description of Artificial Sequence: Synthetic oligonucleotide
  Sense strand starting at position 2800 of SEQ ID NO: 916440
ggaagucccucuuuaguau

SEQ ID NO: 1156927 - RNA, 19 nt, Artificial Sequence
  Description of Artificial Sequence: Synthetic oligonucleotide
  Antisense strand to SEQ ID NO: 1156926
auacuaaagagggacuucc

SEQ ID NO: 1156928 - RNA, 19 nt, Artificial Sequence
  Description of Artificial Sequence: Synthetic oligonucleotide
  Sense strand starting at position 2834 of SEQ ID NO: 916440
cgcugaauuagcgaagccu

SEQ ID NO: 1156929 - RNA, 19 nt, Artificial Sequence
  Description of Artificial Sequence: Synthetic oligonucleotide
  Antisense strand to SEQ ID NO: 1156928
aggcuucgcuaauucagcg

SEQ ID NO: 1156930 - RNA, 19 nt, Artificial Sequence
  Description of Artificial Sequence: Synthetic oligonucleotide
  Sense strand starting at position 2928 of SEQ ID NO: 916440
cucaguaucucuguaucca

SEQ ID NO: 1156931 - RNA, 19 nt, Artificial Sequence
  Description of Artificial Sequence: Synthetic oligonucleotide
  Antisense strand to SEQ ID NO: 1156930
uggauacagagauacugag

SEQ ID NO: 1156932 - RNA, 19 nt, Artificial Sequence
  Description of Artificial Sequence: Synthetic oligonucleotide
  Sense strand starting at position 3000 of SEQ ID NO: 916440
guccaaagccuuugugaaa

SEQ ID NO: 1156933 - RNA, 19 nt, Artificial Sequence
  Description of Artificial Sequence: Synthetic oligonucleotide
  Antisense strand to SEQ ID NO: 1156932
uuucacaaaggcuuuggac

SEQ ID NO: 1156934 - RNA, 19 nt, Artificial Sequence
  Description of Artificial Sequence: Synthetic oligonucleotide
  Sense strand starting at position 3204 of SEQ ID NO: 916440
cauucuuccucagagagga

SEQ ID NO: 1156935 - RNA, 19 nt, Artificial Sequence
  Description of Artificial Sequence: Synthetic oligonucleotide
  Antisense strand to SEQ ID NO: 1156934
uccucucugaggaagaaug

SEQ ID NO: 1156936 - RNA, 19 nt, Artificial Sequence
  Description of Artificial Sequence: Synthetic oligonucleotide
  Sense strand starting at position 3390 of SEQ ID NO: 916440
cccugaguacucugaccuc

SEQ ID NO: 1156937 - RNA, 19 nt, Artificial Sequence
  Description of Artificial Sequence: Synthetic oligonucleotide
  Antisense strand to SEQ ID NO: 1156936
gaggucagaguacucaggg

SEQ ID NO: 1156938 - RNA, 19 nt, Artificial Sequence
  Description of Artificial Sequence: Synthetic oligonucleotide
  Sense strand starting at position 3393 of SEQ ID NO: 916440
ugaguacucugaccucauc

SEQ ID NO: 1156939 - RNA, 19 nt, Artificial Sequence
  Description of Artificial Sequence: Synthetic oligonucleotide
  Antisense strand to SEQ ID NO: 1156938
gaugaggucagaguacuca

SEQ ID NO: 1156940 - RNA, 19 nt, Artificial Sequence
  Description of Artificial Sequence: Synthetic oligonucleotide
  Sense strand starting at position 3476 of SEQ ID NO: 916440
cccugaugugcggauauca

SEQ ID NO: 1156941 - RNA, 19 nt, Artificial Sequence
  Description of Artificial Sequence: Synthetic oligonucleotide
  Antisense strand to SEQ ID NO: 1156940
ugauauccgcacaucaggg

SEQ ID NO: 1156942 - RNA, 19 nt, Artificial Sequence
  Description of Artificial Sequence: Synthetic oligonucleotide
  Sense strand starting at position 3486 of SEQ ID NO: 916440
cggauaucaccuugccauu

SEQ ID NO: 1156943 - RNA, 19 nt, Artificial Sequence
  Description of Artificial Sequence: Synthetic oligonucleotide
  Antisense strand to SEQ ID NO: 1156942
aauggcaaggugauauccg

SEQ ID NO: 1156944 - RNA, 19 nt, Artificial Sequence
  Description of Artificial Sequence: Synthetic oligonucleotide
  Sense strand starting at position 3543 of SEQ ID NO: 916440
gcaagaaagucagucccaa

SEQ ID NO: 1156945 - RNA, 19 nt, Artificial Sequence
  Description of Artificial Sequence: Synthetic oligonucleotide
  Antisense strand to SEQ ID NO: 1156944
uugggacugacuuucuugc

SEQ ID NO: 1156946 - RNA, 19 nt, Artificial Sequence
  Description of Artificial Sequence: Synthetic oligonucleotide
  Sense strand starting at position 3547 of SEQ ID NO: 916440
gaaagucagucccaagaga

SEQ ID NO: 1156947 - RNA, 19 nt, Artificial Sequence
  Description of Artificial Sequence: Synthetic oligonucleotide
  Antisense strand to SEQ ID NO: 1156946
ucucuugggacugacuuuc

SEQ ID NO: 1156948 - RNA, 19 nt, Artificial Sequence
  Description of Artificial Sequence: Synthetic oligonucleotide
  Sense strand starting at position 3603 of SEQ ID NO: 916440
ugagguggucugugugcau

SEQ ID NO: 1156949 - RNA, 19 nt, Artificial Sequence
  Description of Artificial Sequence: Synthetic oligonucleotide
  Antisense strand to SEQ ID NO: 1156948
augcacacagaccaccuca

SEQ ID NO: 1156950 - RNA, 19 nt, Artificial Sequence
  Description of Artificial Sequence: Synthetic oligonucleotide
  Sense strand starting at position 3649 of SEQ ID NO: 916440
ccugcuuccucagggaaau

SEQ ID NO: 1156951 - RNA, 19 nt, Artificial Sequence
  Description of Artificial Sequence: Synthetic oligonucleotide
  Antisense strand to SEQ ID NO: 1156950
auuucccugaggaagcagg

SEQ ID NO: 1156952 - RNA, 19 nt, Artificial Sequence
  Description of Artificial Sequence: Synthetic oligonucleotide
  Sense strand starting at position 3650 of SEQ ID NO: 916440
cugcuuccucagggaaauc

SEQ ID NO: 1156953 - RNA, 19 nt, Artificial Sequence
  Description of Artificial Sequence: Synthetic oligonucleotide
  Antisense strand to SEQ ID NO: 1156952
gauuucccugaggaagcag

SEQ ID NO: 1156954 - RNA, 19 nt, Artificial Sequence
  Description of Artificial Sequence: Synthetic oligonucleotide
  Sense strand starting at position 3789 of SEQ ID NO: 916440
ucgcuugcuguguuaccua

SEQ ID NO: 1156955 - RNA, 19 nt, Artificial Sequence
  Description of Artificial Sequence: Synthetic oligonucleotide
  Antisense strand to SEQ ID NO: 1156954
uagguaacacagcaagcga

SEQ ID NO: 1156956 - RNA, 19 nt, Artificial Sequence
  Description of Artificial Sequence: Synthetic oligonucleotide
  Sense strand starting at position 211 of SEQ ID NO: 916441
gugugacucgcgccuguaa

SEQ ID NO: 1156957 - RNA, 19 nt, Artificial Sequence
  Description of Artificial Sequence: Synthetic oligonucleotide
  Antisense strand to SEQ ID NO: 1156956
uuacaggcgcgagucacac

SEQ ID NO: 1156958 - RNA, 19 nt, Artificial Sequence
  Description of Artificial Sequence: Synthetic oligonucleotide
  Sense strand starting at position 251 of SEQ ID NO: 916441
aggcgaauggaucacuuua

SEQ ID NO: 1156959 - RNA, 19 nt, Artificial Sequence
  Description of Artificial Sequence: Synthetic oligonucleotide
  Antisense strand to SEQ ID NO: 1156958
uaaagugauccauucgccu

SEQ ID NO: 1156960 - RNA, 19 nt, Artificial Sequence
  Description of Artificial Sequence: Synthetic oligonucleotide
  Sense strand starting at position 260 of SEQ ID NO: 916441
gaucacuuuagcgcgaguu

SEQ ID NO: 1156961 - RNA, 19 nt, Artificial Sequence
  Description of Artificial Sequence: Synthetic oligonucleotide
  Antisense strand to SEQ ID NO: 1156960
aacucgcgcuaaagugauc

SEQ ID NO: 1156962 - RNA, 19 nt, Artificial Sequence
  Description of Artificial Sequence: Synthetic oligonucleotide
  Sense strand starting at position 464 of SEQ ID NO: 916441
ugcacuuuagccuagacga

SEQ ID NO: 1156963 - RNA, 19 nt, Artificial Sequence
  Description of Artificial Sequence: Synthetic oligonucleotide
  Antisense strand to SEQ ID NO: 1156962
ucgucuaggcuaaagugca

SEQ ID NO: 1156964 - RNA, 19 nt, Artificial Sequence
  Description of Artificial Sequence: Synthetic oligonucleotide
  Sense strand starting at position 1085 of SEQ ID NO: 916441
cauggugugaugugaaggu

SEQ ID NO: 1156965 - RNA, 19 nt, Artificial Sequence
  Description of Artificial Sequence: Synthetic oligonucleotide
  Antisense strand to SEQ ID NO: 1156964
accuucacaucacaccaug

SEQ ID NO: 1156966 - RNA, 19 nt, Artificial Sequence
  Description of Artificial Sequence: Synthetic oligonucleotide
  Sense strand starting at position 1089 of SEQ ID NO: 916441
gugugaugugaagguauca

SEQ ID NO: 1156967 - RNA, 19 nt, Artificial Sequence
  Description of Artificial Sequence: Synthetic oligonucleotide
  Antisense strand to SEQ ID NO: 1156966
ugauaccuucacaucacac

SEQ ID NO: 1156968 - RNA, 19 nt, Artificial Sequence
  Description of Artificial Sequence: Synthetic oligonucleotide
  Sense strand starting at position 1114 of SEQ ID NO: 916441
ccugcugaccuccgaauau

SEQ ID NO: 1156969 - RNA, 19 nt, Artificial Sequence
  Description of Artificial Sequence: Synthetic oligonucleotide
  Antisense strand to SEQ ID NO: 1156968
auauucggaggucagcagg

SEQ ID NO: 1156970 - RNA, 19 nt, Artificial Sequence
  Description of Artificial Sequence: Synthetic oligonucleotide
  Sense strand starting at position 1292 of SEQ ID NO: 916441
ggauaacacugagaacaca

SEQ ID NO: 1156971 - RNA, 19 nt, Artificial Sequence
  Description of Artificial Sequence: Synthetic oligonucleotide
  Antisense strand to SEQ ID NO: 1156970
uguguucucaguguuaucc

SEQ ID NO: 1156972 - RNA, 19 nt, Artificial Sequence
  Description of Artificial Sequence: Synthetic oligonucleotide
  Sense strand starting at position 1330 of SEQ ID NO: 916441
uagcaaguuugauuagauc

SEQ ID NO: 1156973 - RNA, 19 nt, Artificial Sequence
  Description of Artificial Sequence: Synthetic oligonucleotide
  Antisense strand to SEQ ID NO: 1156972
gaucuaaucaaacuugcua

SEQ ID NO: 1156974 - RNA, 19 nt, Artificial Sequence
  Description of Artificial Sequence: Synthetic oligonucleotide
  Sense strand starting at position 1336 of SEQ ID NO: 916441
guuugauuagaucagcuca

SEQ ID NO: 1156975 - RNA, 19 nt, Artificial Sequence
  Description of Artificial Sequence: Synthetic oligonucleotide
  Antisense strand to SEQ ID NO: 1156974
ugagcugaucuaaucaaac

SEQ ID NO: 1156976 - RNA, 19 nt, Artificial Sequence
  Description of Artificial Sequence: Synthetic oligonucleotide
  Sense strand starting at position 1338 of SEQ ID NO: 916441
uugauuagaucagcucauu

SEQ ID NO: 1156977 - RNA, 19 nt, Artificial Sequence
  Description of Artificial Sequence: Synthetic oligonucleotide
  Antisense strand to SEQ ID NO: 1156976
aaugagcugaucuaaucaa

SEQ ID NO: 1156978 - RNA, 19 nt, Artificial Sequence
  Description of Artificial Sequence: Synthetic oligonucleotide
  Sense strand starting at position 1565 of SEQ ID NO: 916441
agguguagcaggcauguua

SEQ ID NO: 1156979 - RNA, 19 nt, Artificial Sequence
  Description of Artificial Sequence: Synthetic oligonucleotide
  Antisense strand to SEQ ID NO: 1156978
uaacaugccugcuacaccu

SEQ ID NO: 1156980 - RNA, 19 nt, Artificial Sequence
  Description of Artificial Sequence: Synthetic oligonucleotide
  Sense strand starting at position 2206 of SEQ ID NO: 916441
ggugguuuaguccaugcua

SEQ ID NO: 1156981 - RNA, 19 nt, Artificial Sequence
  Description of Artificial Sequence: Synthetic oligonucleotide
  Antisense strand to SEQ ID NO: 1156980
uagcauggacuaaaccacc

SEQ ID NO: 1156982 - RNA, 19 nt, Artificial Sequence
  Description of Artificial Sequence: Synthetic oligonucleotide
  Sense strand starting at position 2356 of SEQ ID NO: 916441
gaugguuccucuuugcuua

SEQ ID NO: 1156983 - RNA, 19 nt, Artificial Sequence
  Description of Artificial Sequence: Synthetic oligonucleotide
  Antisense strand to SEQ ID NO: 1156982
uaagcaaagaggaaccauc

SEQ ID NO: 1156984 - RNA, 19 nt, Artificial Sequence
  Description of Artificial Sequence: Synthetic oligonucleotide
  Sense strand starting at position 2460 of SEQ ID NO: 916441
uguuguccaugcucaauaa

SEQ ID NO: 1156985 - RNA, 19 nt, Artificial Sequence
  Description of Artificial Sequence: Synthetic oligonucleotide
  Antisense strand to SEQ ID NO: 1156984
uuauugagcauggacaaca

SEQ ID NO: 1156986 - RNA, 19 nt, Artificial Sequence
  Description of Artificial Sequence: Synthetic oligonucleotide
  Sense strand starting at position 2461 of SEQ ID NO: 916441
guuguccaugcucaauaaa

SEQ ID NO: 1156987 - RNA, 19 nt, Artificial Sequence
  Description of Artificial Sequence: Synthetic oligonucleotide
  Antisense strand to SEQ ID NO: 1156986
uuuauugagcauggacaac

SEQ ID NO: 1156988 - RNA, 19 nt, Artificial Sequence
  Description of Artificial Sequence: Synthetic oligonucleotide
  Sense strand starting at position 2527 of SEQ ID NO: 916441
gugaaaugaguuugggaag

SEQ ID NO: 1156989 - RNA, 19 nt, Artificial Sequence
  Description of Artificial Sequence: Synthetic oligonucleotide
  Antisense strand to SEQ ID NO: 1156988
cuucccaaacucauuucac

SEQ ID NO: 1156990 - RNA, 19 nt, Artificial Sequence
  Description of Artificial Sequence: Synthetic oligonucleotide
  Sense strand starting at position 2539 of SEQ ID NO: 916441
ugggaagcacuagguuaaa

SEQ ID NO: 1156991 - RNA, 19 nt, Artificial Sequence
  Description of Artificial Sequence: Synthetic oligonucleotide
  Antisense strand to SEQ ID NO: 1156990
uuuaaccuagugcuuccca

SEQ ID NO: 1156992 - RNA, 19 nt, Artificial Sequence
  Description of Artificial Sequence: Synthetic oligonucleotide
  Sense strand starting at position 2604 of SEQ ID NO: 916441
gaugauaggccuuguguug

SEQ ID NO: 1156993 - RNA, 19 nt, Artificial Sequence
  Description of Artificial Sequence: Synthetic oligonucleotide
  Antisense strand to SEQ ID NO: 1156992
caacacaaggccuaucauc

SEQ ID NO: 1156994 - RNA, 19 nt, Artificial Sequence
  Description of Artificial Sequence: Synthetic oligonucleotide
  Sense strand starting at position 2613 of SEQ ID NO: 916441
ccuuguguugaucauggaa

SEQ ID NO: 1156995 - RNA, 19 nt, Artificial Sequence
  Description of Artificial Sequence: Synthetic oligonucleotide
  Antisense strand to SEQ ID NO: 1156994
uuccaugaucaacacaagg

SEQ ID NO: 1156996 - RNA, 19 nt, Artificial Sequence
  Description of Artificial Sequence: Synthetic oligonucleotide
  Sense strand starting at position 2616 of SEQ ID NO: 916441
uguguugaucauggaaacu

SEQ ID NO: 1156997 - RNA, 19 nt, Artificial Sequence
  Description of Artificial Sequence: Synthetic oligonucleotide
  Antisense strand to SEQ ID NO: 1156996
aguuuccaugaucaacaca

SEQ ID NO: 1156998 - RNA, 19 nt, Artificial Sequence
  Description of Artificial Sequence: Synthetic oligonucleotide
  Sense strand starting at position 2643 of SEQ ID NO: 916441
gguacaugacagugcauua

SEQ ID NO: 1156999 - RNA, 19 nt, Artificial Sequence
  Description of Artificial Sequence: Synthetic oligonucleotide
  Antisense strand to SEQ ID NO: 1156998
uaaugcacugucauguacc

SEQ ID NO: 1157000 - RNA, 19 nt, Artificial Sequence
  Description of Artificial Sequence: Synthetic oligonucleotide
  Sense strand starting at position 2648 of SEQ ID NO: 916441
augacagugcauuauacuu

SEQ ID NO: 1157001 - RNA, 19 nt, Artificial Sequence
  Description of Artificial Sequence: Synthetic oligonucleotide
  Antisense strand to SEQ ID NO: 1157000
aaguauaaugcacugucau

SEQ ID NO: 1157002 - RNA, 19 nt, Artificial Sequence
  Description of Artificial Sequence: Synthetic oligonucleotide
  Sense strand starting at position 2698 of SEQ ID NO: 916441
guaagcaagcuuuaacaaa

SEQ ID NO: 1157003 - RNA, 19 nt, Artificial Sequence
  Description of Artificial Sequence: Synthetic oligonucleotide
  Antisense strand to SEQ ID NO: 1157002
uuuguuaaagcuugcuuac

SEQ ID NO: 1157004 - RNA, 19 nt, Artificial Sequence
  Description of Artificial Sequence: Synthetic oligonucleotide
  Sense strand starting at position 2721 of SEQ ID NO: 916441
uguuaauuacugcgaaccu

SEQ ID NO: 1157005 - RNA, 19 nt, Artificial Sequence
  Description of Artificial Sequence: Synthetic oligonucleotide
  Antisense strand to SEQ ID NO: 1157004
agguucgcaguaauuaaca

SEQ ID NO: 1157006 - RNA, 19 nt, Artificial Sequence
  Description of Artificial Sequence: Synthetic oligonucleotide
  Sense strand starting at position 2759 of SEQ ID NO: 916441
uacagugucccuggaacau

SEQ ID NO: 1157007 - RNA, 19 nt, Artificial Sequence
  Description of Artificial Sequence: Synthetic oligonucleotide
  Antisense strand to SEQ ID NO: 1157006
auguuccagggacacugua

SEQ ID NO: 1157008 - RNA, 19 nt, Artificial Sequence
  Description of Artificial Sequence: Synthetic oligonucleotide
  Sense strand starting at position 3121 of SEQ ID NO: 916441
aggccaaugcuggagucau

SEQ ID NO: 1157009 - RNA, 19 nt, Artificial Sequence
  Description of Artificial Sequence: Synthetic oligonucleotide
  Antisense strand to SEQ ID NO: 1157008
augacuccagcauuggccu

SEQ ID NO: 1157010 - RNA, 19 nt, Artificial Sequence
  Description of Artificial Sequence: Synthetic oligonucleotide
  Sense strand starting at position 3135 of SEQ ID NO: 916441
gucauaccucaauguaggu

SEQ ID NO: 1157011 - RNA, 19 nt, Artificial Sequence
  Description of Artificial Sequence: Synthetic oligonucleotide
  Antisense strand to SEQ ID NO: 1157010
accuacauugagguaugac

SEQ ID NO: 1157012 - RNA, 19 nt, Artificial Sequence
  Description of Artificial Sequence: Synthetic oligonucleotide
  Sense strand starting at position 3140 of SEQ ID NO: 916441
accucaauguagguuguua

SEQ ID NO: 1157013 - RNA, 19 nt, Artificial Sequence
  Description of Artificial Sequence: Synthetic oligonucleotide
  Antisense strand to SEQ ID NO: 1157012
uaacaaccuacauugaggu

SEQ ID NO: 1157014 - RNA, 19 nt, Artificial Sequence
  Description of Artificial Sequence: Synthetic oligonucleotide
  Sense strand starting at position 3144 of SEQ ID NO: 916441
caauguagguuguuaagau

SEQ ID NO: 1157015 - RNA, 19 nt, Artificial Sequence
  Description of Artificial Sequence: Synthetic oligonucleotide
  Antisense strand to SEQ ID NO: 1157014
aucuuaacaaccuacauug

SEQ ID NO: 1157016 - RNA, 19 nt, Artificial Sequence
  Description of Artificial Sequence: Synthetic oligonucleotide
  Sense strand starting at position 3190 of SEQ ID NO: 916441
ggcaaauuccuguacacca

SEQ ID NO: 1157017 - RNA, 19 nt, Artificial Sequence
  Description of Artificial Sequence: Synthetic oligonucleotide
  Antisense strand to SEQ ID NO: 1157016
ugguguacaggaauuugcc

SEQ ID NO: 1157018 - RNA, 19 nt, Artificial Sequence
  Description of Artificial Sequence: Synthetic oligonucleotide
  Sense strand starting at position 3209 of SEQ ID NO: 916441
aggguuuccuuccuguaau

SEQ ID NO: 1157019 - RNA, 19 nt, Artificial Sequence
  Description of Artificial Sequence: Synthetic oligonucleotide
  Antisense strand to SEQ ID NO: 1157018
auuacaggaaggaaacccu

SEQ ID NO: 1157020 - RNA, 19 nt, Artificial Sequence
  Description of Artificial Sequence: Synthetic oligonucleotide
  Sense strand starting at position 3516 of SEQ ID NO: 916441
gguuuccugaucuaggcua

SEQ ID NO: 1157021 - RNA, 19 nt, Artificial Sequence
  Description of Artificial Sequence: Synthetic oligonucleotide
  Antisense strand to SEQ ID NO: 1157020
uagccuagaucaggaaacc

SEQ ID NO: 1157022 - RNA, 19 nt, Artificial Sequence
  Description of Artificial Sequence: Synthetic oligonucleotide
  Sense strand starting at position 3518 of SEQ ID NO: 916441
uuuccugaucuaggcuaua

SEQ ID NO: 1157023 - RNA, 19 nt, Artificial Sequence
  Description of Artificial Sequence: Synthetic oligonucleotide
  Antisense strand to SEQ ID NO: 1157022
uauagccuagaucaggaaa

SEQ ID NO: 1157024 - RNA, 19 nt, Artificial Sequence
  Description of Artificial Sequence: Synthetic oligonucleotide
  Sense strand starting at position 3521 of SEQ ID NO: 916441
ccugaucuaggcuauaguu

SEQ ID NO: 1157025 - RNA, 19 nt, Artificial Sequence
  Description of Artificial Sequence: Synthetic oligonucleotide
  Antisense strand to SEQ ID NO: 1157024
aacuauagccuagaucagg

SEQ ID NO: 1157026 - RNA, 19 nt, Artificial Sequence
  Description of Artificial Sequence: Synthetic oligonucleotide
  Sense strand starting at position 3529 of SEQ ID NO: 916441
aggcuauaguuccugguuu

SEQ ID NO: 1157027 - RNA, 19 nt, Artificial Sequence
  Description of Artificial Sequence: Synthetic oligonucleotide
  Antisense strand to SEQ ID NO: 1157026
aaaccaggaacuauagccu

SEQ ID NO: 1157028 - RNA, 19 nt, Artificial Sequence
  Description of Artificial Sequence: Synthetic oligonucleotide
  Sense strand starting at position 3590 of SEQ ID NO: 916441
caggauuggucccuuugga

SEQ ID NO: 1157029 - RNA, 19 nt, Artificial Sequence
  Description of Artificial Sequence: Synthetic oligonucleotide
  Antisense strand to SEQ ID NO: 1157028
uccaaagggaccaauccug

SEQ ID NO: 1157030 - RNA, 19 nt, Artificial Sequence
  Description of Artificial Sequence: Synthetic oligonucleotide
  Sense strand starting at position 3622 of SEQ ID NO: 916441
ggcuuuggccuuuauccua

SEQ ID NO: 1157031 - RNA, 19 nt, Artificial Sequence
  Description of Artificial Sequence: Synthetic oligonucleotide
  Antisense strand to SEQ ID NO: 1157030
uaggauaaaggccaaagcc

SEQ ID NO: 1157032 - RNA, 19 nt, Artificial Sequence
  Description of Artificial Sequence: Synthetic oligonucleotide
  Sense strand starting at position 3629 of SEQ ID NO: 916441
gccuuuauccuacagagga

SEQ ID NO: 1157033 - RNA, 19 nt, Artificial Sequence
  Description of Artificial Sequence: Synthetic oligonucleotide
  Antisense strand to SEQ ID NO: 1157032
uccucuguaggauaaaggc

SEQ ID NO: 1157034 - RNA, 19 nt, Artificial Sequence
  Description of Artificial Sequence: Synthetic oligonucleotide
  Sense strand starting at position 3817 of SEQ ID NO: 916441
gcaccauucccaugagauu

SEQ ID NO: 1157035 - RNA, 19 nt, Artificial Sequence
  Description of Artificial Sequence: Synthetic oligonucleotide
  Antisense strand to SEQ ID NO: 1157034
aaucucaugggaauggugc

SEQ ID NO: 1157036 - RNA, 19 nt, Artificial Sequence
  Description of Artificial Sequence: Synthetic oligonucleotide
  Sense strand starting at position 110 of SEQ ID NO: 916442
aaguguuacgauuauaagc

SEQ ID NO: 1157037 - RNA, 19 nt, Artificial Sequence
  Description of Artificial Sequence: Synthetic oligonucleotide
  Antisense strand to SEQ ID NO: 1157036
gcuuauaaucguaacacuu

SEQ ID NO: 1157038 - RNA, 19 nt, Artificial Sequence
  Description of Artificial Sequence: Synthetic oligonucleotide
  Sense strand starting at position 135 of SEQ ID NO: 916442
cgcugcguccugucaaaug

SEQ ID NO: 1157039 - RNA, 19 nt, Artificial Sequence
  Description of Artificial Sequence: Synthetic oligonucleotide
  Antisense strand to SEQ ID NO: 1157038
cauuugacaggacgcagcg

SEQ ID NO: 1157040 - RNA, 19 nt, Artificial Sequence
  Description of Artificial Sequence: Synthetic oligonucleotide
  Sense strand starting at position 238 of SEQ ID NO: 916442
ugcaaauaagccuagacua

SEQ ID NO: 1157041 - RNA, 19 nt, Artificial Sequence
  Description of Artificial Sequence: Synthetic oligonucleotide
  Antisense strand to SEQ ID NO: 1157040
uagucuaggcuuauuugca

SEQ ID NO: 1157042 - RNA, 19 nt, Artificial Sequence
  Description of Artificial Sequence: Synthetic oligonucleotide
  Sense strand starting at position 262 of SEQ ID NO: 916442
cugauaaauuuggaugaug

SEQ ID NO: 1157043 - RNA, 19 nt, Artificial Sequence
  Description of Artificial Sequence: Synthetic oligonucleotide
  Antisense strand to SEQ ID NO: 1157042
caucauccaaauuuaucag

SEQ ID NO: 1157044 - RNA, 19 nt, Artificial Sequence
  Description of Artificial Sequence: Synthetic oligonucleotide
  Sense strand starting at position 271 of SEQ ID NO: 916442
uuggaugaugucuggguga

SEQ ID NO: 1157045 - RNA, 19 nt, Artificial Sequence
  Description of Artificial Sequence: Synthetic oligonucleotide
  Antisense strand to SEQ ID NO: 1157044
ucacccagacaucauccaa

SEQ ID NO: 1157046 - RNA, 19 nt, Artificial Sequence
  Description of Artificial Sequence: Synthetic oligonucleotide
  Sense strand starting at position 273 of SEQ ID NO: 916442
ggaugaugucugggugaca

SEQ ID NO: 1157047 - RNA, 19 nt, Artificial Sequence
  Description of Artificial Sequence: Synthetic oligonucleotide
  Antisense strand to SEQ ID NO: 1157046
ugucacccagacaucaucc

SEQ ID NO: 1157048 - RNA, 19 nt, Artificial Sequence
  Description of Artificial Sequence: Synthetic oligonucleotide
  Sense strand starting at position 274 of SEQ ID NO: 916442
gaugaugucugggugacac

SEQ ID NO: 1157049 - RNA, 19 nt, Artificial Sequence
  Description of Artificial Sequence: Synthetic oligonucleotide
  Antisense strand to SEQ ID NO: 1157048
gugucacccagacaucauc

SEQ ID NO: 1157050 - RNA, 19 nt, Artificial Sequence
  Description of Artificial Sequence: Synthetic oligonucleotide
  Sense strand starting at position 363 of SEQ ID NO: 916442
ugaucuuuauuuggaagaa

SEQ ID NO: 1157051 - RNA, 19 nt, Artificial Sequence
  Description of Artificial Sequence: Synthetic oligonucleotide
  Antisense strand to SEQ ID NO: 1157050
uucuuccaaauaaagauca

SEQ ID NO: 1157052 - RNA, 19 nt, Artificial Sequence
  Description of Artificial Sequence: Synthetic oligonucleotide
  Sense strand starting at position 383 of SEQ ID NO: 916442
ggaagaucuugguuugaua

SEQ ID NO: 1157053 - RNA, 19 nt, Artificial Sequence
  Description of Artificial Sequence: Synthetic oligonucleotide
  Antisense strand to SEQ ID NO: 1157052
uaucaaaccaagaucuucc

SEQ ID NO: 1157054 - RNA, 19 nt, Artificial Sequence
  Description of Artificial Sequence: Synthetic oligonucleotide
  Sense strand starting at position 391 of SEQ ID NO: 916442
uugguuugauauguaauag

SEQ ID NO: 1157055 - RNA, 19 nt, Artificial Sequence
  Description of Artificial Sequence: Synthetic oligonucleotide
  Antisense strand to SEQ ID NO: 1157054
cuauuacauaucaaaccaa

SEQ ID NO: 1157056 - RNA, 19 nt, Artificial Sequence
  Description of Artificial Sequence: Synthetic oligonucleotide
  Sense strand starting at position 397 of SEQ ID NO: 916442
ugauauguaauaggaaagu

SEQ ID NO: 1157057 - RNA, 19 nt, Artificial Sequence
  Description of Artificial Sequence: Synthetic oligonucleotide
  Antisense strand to SEQ ID NO: 1157056
acuuuccuauuacauauca

SEQ ID NO: 1157058 - RNA, 19 nt, Artificial Sequence
  Description of Artificial Sequence: Synthetic oligonucleotide
  Sense strand starting at position 428 of SEQ ID NO: 916442
aggcaagguuguuuaaaua

SEQ ID NO: 1157059 - RNA, 19 nt, Artificial Sequence
  Description of Artificial Sequence: Synthetic oligonucleotide
  Antisense strand to SEQ ID NO: 1157058
uauuuaaacaaccuugccu

SEQ ID NO: 1157060 - RNA, 19 nt, Artificial Sequence
  Description of Artificial Sequence: Synthetic oligonucleotide
  Sense strand starting at position 464 of SEQ ID NO: 916442
cauuaucuagauuggguua

SEQ ID NO: 1157061 - RNA, 19 nt, Artificial Sequence
  Description of Artificial Sequence: Synthetic oligonucleotide
  Antisense strand to SEQ ID NO: 1157060
uaacccaaucuagauaaug

SEQ ID NO: 1157062 - RNA, 19 nt, Artificial Sequence
  Description of Artificial Sequence: Synthetic oligonucleotide
  Sense strand starting at position 467 of SEQ ID NO: 916442
uaucuagauuggguuaaca

SEQ ID NO: 1157063 - RNA, 19 nt, Artificial Sequence
  Description of Artificial Sequence: Synthetic oligonucleotide
  Antisense strand to SEQ ID NO: 1157062
uguuaacccaaucuagaua

SEQ ID NO: 1157064 - RNA, 19 nt, Artificial Sequence
  Description of Artificial Sequence: Synthetic oligonucleotide
  Sense strand starting at position 483 of SEQ ID NO: 916442
acacccucuggugauauua

SEQ ID NO: 1157065 - RNA, 19 nt, Artificial Sequence
  Description of Artificial Sequence: Synthetic oligonucleotide
  Antisense strand to SEQ ID NO: 1157064
uaauaucaccagagggugu

SEQ ID NO: 1157066 - RNA, 19 nt, Artificial Sequence
  Description of Artificial Sequence: Synthetic oligonucleotide
  Sense strand starting at position 503 of SEQ ID NO: 916442
auaucaguguuucuacuga

SEQ ID NO: 1157067 - RNA, 19 nt, Artificial Sequence
  Description of Artificial Sequence: Synthetic oligonucleotide
  Antisense strand to SEQ ID NO: 1157066
ucaguagaaacacugauau

SEQ ID NO: 1157068 - RNA, 19 nt, Artificial Sequence
  Description of Artificial Sequence: Synthetic oligonucleotide
  Sense strand starting at position 948 of SEQ ID NO: 916442
cuaugcuaccuccauguau

SEQ ID NO: 1157069 - RNA, 19 nt, Artificial Sequence
  Description of Artificial Sequence: Synthetic oligonucleotide
  Antisense strand to SEQ ID NO: 1157068
auacauggagguagcauag

SEQ ID NO: 1157070 - RNA, 19 nt, Artificial Sequence
  Description of Artificial Sequence: Synthetic oligonucleotide
  Sense strand starting at position 962 of SEQ ID NO: 916442
uguauuaaaccauggagug

SEQ ID NO: 1157071 - RNA, 19 nt, Artificial Sequence
  Description of Artificial Sequence: Synthetic oligonucleotide
  Antisense strand to SEQ ID NO: 1157070
cacuccaugguuuaauaca

SEQ ID NO: 1157072 - RNA, 19 nt, Artificial Sequence
  Description of Artificial Sequence: Synthetic oligonucleotide
  Sense strand starting at position 963 of SEQ ID NO: 916442
guauuaaaccauggaguga

SEQ ID NO: 1157073 - RNA, 19 nt, Artificial Sequence
  Description of Artificial Sequence: Synthetic oligonucleotide
  Antisense strand to SEQ ID NO: 1157072
ucacuccaugguuuaauac

SEQ ID NO: 1157074 - RNA, 19 nt, Artificial Sequence
  Description of Artificial Sequence: Synthetic oligonucleotide
  Sense strand starting at position 1058 of SEQ ID NO: 916442
gaaccacacguguaauaaa

SEQ ID NO: 1157075 - RNA, 19 nt, Artificial Sequence
  Description of Artificial Sequence: Synthetic oligonucleotide
  Antisense strand to SEQ ID NO: 1157074
uuuauuacacgugugguuc

SEQ ID NO: 1157076 - RNA, 19 nt, Artificial Sequence
  Description of Artificial Sequence: Synthetic oligonucleotide
  Sense strand starting at position 1069 of SEQ ID NO: 916442
guaauaaacgcuuggaaua

SEQ ID NO: 1157077 - RNA, 19 nt, Artificial Sequence
  Description of Artificial Sequence: Synthetic oligonucleotide
  Antisense strand to SEQ ID NO: 1157076
uauuccaagcguuuauuac

SEQ ID NO: 1157078 - RNA, 19 nt, Artificial Sequence
  Description of Artificial Sequence: Synthetic oligonucleotide
  Sense strand starting at position 1143 of SEQ ID NO: 916442
augauauuccaggguaaau

SEQ ID NO: 1157079 - RNA, 19 nt, Artificial Sequence
  Description of Artificial Sequence: Synthetic oligonucleotide
  Antisense strand to SEQ ID NO: 1157078
auuuacccuggaauaucau

SEQ ID NO: 1157080 - RNA, 19 nt, Artificial Sequence
  Description of Artificial Sequence: Synthetic oligonucleotide
  Sense strand starting at position 1154 of SEQ ID NO: 916442
ggguaaaugacagguaggu

SEQ ID NO: 1157081 - RNA, 19 nt, Artificial Sequence
  Description of Artificial Sequence: Synthetic oligonucleotide
  Antisense strand to SEQ ID NO: 1157080
accuaccugucauuuaccc

SEQ ID NO: 1157082 - RNA, 19 nt, Artificial Sequence
  Description of Artificial Sequence: Synthetic oligonucleotide
  Sense strand starting at position 1246 of SEQ ID NO: 916442
auaauauaagcuggcaaua

SEQ ID NO: 1157083 - RNA, 19 nt, Artificial Sequence
  Description of Artificial Sequence: Synthetic oligonucleotide
  Antisense strand to SEQ ID NO: 1157082
uauugccagcuuauauuau

SEQ ID NO: 1157084 - RNA, 19 nt, Artificial Sequence
  Description of Artificial Sequence: Synthetic oligonucleotide
  Sense strand starting at position 1273 of SEQ ID NO: 916442
aggcgcucagaauaugaaa

SEQ ID NO: 1157085 - RNA, 19 nt, Artificial Sequence
  Description of Artificial Sequence: Synthetic oligonucleotide
  Antisense strand to SEQ ID NO: 1157084
uuucauauucugagcgccu

SEQ ID NO: 1157086 - RNA, 19 nt, Artificial Sequence
  Description of Artificial Sequence: Synthetic oligonucleotide
  Sense strand starting at position 1313 of SEQ ID NO: 916442
ggccgaaagggcuaaaguu

SEQ ID NO: 1157087 - RNA, 19 nt, Artificial Sequence
  Description of Artificial Sequence: Synthetic oligonucleotide
  Antisense strand to SEQ ID NO: 1157086
aacuuuagcccuuucggcc

SEQ ID NO: 1157088 - RNA, 19 nt, Artificial Sequence
  Description of Artificial Sequence: Synthetic oligonucleotide
  Sense strand starting at position 1727 of SEQ ID NO: 916442
gguccuuacccaggaagau

SEQ ID NO: 1157089 - RNA, 19 nt, Artificial Sequence
  Description of Artificial Sequence: Synthetic oligonucleotide
  Antisense strand to SEQ ID NO: 1157088
aucuuccuggguaaggacc

SEQ ID NO: 1157090 - RNA, 19 nt, Artificial Sequence
  Description of Artificial Sequence: Synthetic oligonucleotide
  Sense strand starting at position 2118 of SEQ ID NO: 916442
gugacuccugccgagaaug

SEQ ID NO: 1157091 - RNA, 19 nt, Artificial Sequence
  Description of Artificial Sequence: Synthetic oligonucleotide
  Antisense strand to SEQ ID NO: 1157090
cauucucggcaggagucac

SEQ ID NO: 1157092 - RNA, 19 nt, Artificial Sequence
  Description of Artificial Sequence: Synthetic oligonucleotide
  Sense strand starting at position 2466 of SEQ ID NO: 916442
aaauucuuagguuguuaga

SEQ ID NO: 1157093 - RNA, 19 nt, Artificial Sequence
  Description of Artificial Sequence: Synthetic oligonucleotide
  Antisense strand to SEQ ID NO: 1157092
ucuaacaaccuaagaauuu

SEQ ID NO: 1157094 - RNA, 19 nt, Artificial Sequence
  Description of Artificial Sequence: Synthetic oligonucleotide
  Sense strand starting at position 2931 of SEQ ID NO: 916442
guguuauugcaagagaagg

SEQ ID NO: 1157095 - RNA, 19 nt, Artificial Sequence
  Description of Artificial Sequence: Synthetic oligonucleotide
  Antisense strand to SEQ ID NO: 1157094
ccuucucuugcaauaacac

SEQ ID NO: 1157096 - RNA, 19 nt, Artificial Sequence
  Description of Artificial Sequence: Synthetic oligonucleotide
  Sense strand starting at position 2933 of SEQ ID NO: 916442
guuauugcaagagaaggua

SEQ ID NO: 1157097 - RNA, 19 nt, Artificial Sequence
  Description of Artificial Sequence: Synthetic oligonucleotide
  Antisense strand to SEQ ID NO: 1157096
uaccuucucuugcaauaac

SEQ ID NO: 1157098 - RNA, 19 nt, Artificial Sequence
  Description of Artificial Sequence: Synthetic oligonucleotide
  Sense strand starting at position 2945 of SEQ ID NO: 916442
gaagguaagugcucugaag

SEQ ID NO: 1157099 - RNA, 19 nt, Artificial Sequence
  Description of Artificial Sequence: Synthetic oligonucleotide
  Antisense strand to SEQ ID NO: 1157098
cuucagagcacuuaccuuc

SEQ ID NO: 1157100 - RNA, 19 nt, Artificial Sequence
  Description of Artificial Sequence: Synthetic oligonucleotide
  Sense strand starting at position 2947 of SEQ ID NO: 916442
agguaagugcucugaagga

SEQ ID NO: 1157101 - RNA, 19 nt, Artificial Sequence
  Description of Artificial Sequence: Synthetic oligonucleotide
  Antisense strand to SEQ ID NO: 1157100
uccuucagagcacuuaccu

SEQ ID NO: 1157102 - RNA, 19 nt, Artificial Sequence
  Description of Artificial Sequence: Synthetic oligonucleotide
  Sense strand starting at position 2969 of SEQ ID NO: 916442
ggucaagguucugugagag

SEQ ID NO: 1157103 - RNA, 19 nt, Artificial Sequence
  Description of Artificial Sequence: Synthetic oligonucleotide
  Antisense strand to SEQ ID NO: 1157102
cucucacagaaccuugacc

SEQ ID NO: 1157104 - RNA, 19 nt, Artificial Sequence
  Description of Artificial Sequence: Synthetic oligonucleotide
  Sense strand starting at position 2979 of SEQ ID NO: 916442
cugugagaguauguaacaa

SEQ ID NO: 1157105 - RNA, 19 nt, Artificial Sequence
  Description of Artificial Sequence: Synthetic oligonucleotide
  Antisense strand to SEQ ID NO: 1157104
uuguuacauacucucacag

SEQ ID NO: 1157106 - RNA, 19 nt, Artificial Sequence
  Description of Artificial Sequence: Synthetic oligonucleotide
  Sense strand starting at position 3069 of SEQ ID NO: 916442
cuuauacuucuguagcacu

SEQ ID NO: 1157107 - RNA, 19 nt, Artificial Sequence
  Description of Artificial Sequence: Synthetic oligonucleotide
  Antisense strand to SEQ ID NO: 1157106
agugcuacagaaguauaag

SEQ ID NO: 1157108 - RNA, 19 nt, Artificial Sequence
  Description of Artificial Sequence: Synthetic oligonucleotide
  Sense strand starting at position 3083 of SEQ ID NO: 916442
gcacuugcacuuuauaaag

SEQ ID NO: 1157109 - RNA, 19 nt, Artificial Sequence
  Description of Artificial Sequence: Synthetic oligonucleotide
  Antisense strand to SEQ ID NO: 1157108
cuuuauaaagugcaagugc

SEQ ID NO: 1157110 - RNA, 19 nt, Artificial Sequence
  Description of Artificial Sequence: Synthetic oligonucleotide
  Sense strand starting at position 3194 of SEQ ID NO: 916442
uuaagaaacuggguaaguu

SEQ ID NO: 1157111 - RNA, 19 nt, Artificial Sequence
  Description of Artificial Sequence: Synthetic oligonucleotide
  Antisense strand to SEQ ID NO: 1157110
aacuuacccaguuucuuaa

SEQ ID NO: 1157112 - RNA, 19 nt, Artificial Sequence
  Description of Artificial Sequence: Synthetic oligonucleotide
  Sense strand starting at position 3203 of SEQ ID NO: 916442
uggguaaguuccuuuacaa

SEQ ID NO: 1157113 - RNA, 19 nt, Artificial Sequence
  Description of Artificial Sequence: Synthetic oligonucleotide
  Antisense strand to SEQ ID NO: 1157112
uuguaaaggaacuuaccca

SEQ ID NO: 1157114 - RNA, 19 nt, Artificial Sequence
  Description of Artificial Sequence: Synthetic oligonucleotide
  Sense strand starting at position 3338 of SEQ ID NO: 916442
auaacuucuccagguuaag

SEQ ID NO: 1157115 - RNA, 19 nt, Artificial Sequence
  Description of Artificial Sequence: Synthetic oligonucleotide
  Antisense strand to SEQ ID NO: 1157114
cuuaaccuggagaaguuau

SEQ ID NO: 1157116 - RNA, 19 nt, Artificial Sequence
  Description of Artificial Sequence: Synthetic oligonucleotide
  Sense strand starting at position 23 of SEQ ID NO: 916443
augagucaugucgacacuu

SEQ ID NO: 1157117 - RNA, 19 nt, Artificial Sequence
  Description of Artificial Sequence: Synthetic oligonucleotide
  Antisense strand to SEQ ID NO: 1157116
aagugucgacaugacucau

SEQ ID NO: 1157118 - RNA, 19 nt, Artificial Sequence
  Description of Artificial Sequence: Synthetic oligonucleotide
  Sense strand starting at position 25 of SEQ ID NO: 916443
gagucaugucgacacuuuc

SEQ ID NO: 1157119 - RNA, 19 nt, Artificial Sequence
  Description of Artificial Sequence: Synthetic oligonucleotide
  Antisense strand to SEQ ID NO: 1157118
gaaagugucgacaugacuc

SEQ ID NO: 1157120 - RNA, 19 nt, Artificial Sequence
  Description of Artificial Sequence: Synthetic oligonucleotide
  Sense strand starting at position 31 of SEQ ID NO: 916443
ugucgacacuuuccaagau

SEQ ID NO: 1157121 - RNA, 19 nt, Artificial Sequence
  Description of Artificial Sequence: Synthetic oligonucleotide
  Antisense strand to SEQ ID NO: 1157120
aucuuggaaagugucgaca

SEQ ID NO: 1157122 - RNA, 19 nt, Artificial Sequence
  Description of Artificial Sequence: Synthetic oligonucleotide
  Sense strand starting at position 355 of SEQ ID NO: 916443
gcaguaucuuuccuguacu

SEQ ID NO: 1157123 - RNA, 19 nt, Artificial Sequence
  Description of Artificial Sequence: Synthetic oligonucleotide
  Antisense strand to SEQ ID NO: 1157122
aguacaggaaagauacugc

SEQ ID NO: 1157124 - RNA, 19 nt, Artificial Sequence
  Description of Artificial Sequence: Synthetic oligonucleotide
  Sense strand starting at position 434 of SEQ ID NO: 916443
caggcuucguuuccaaaug

SEQ ID NO: 1157125 - RNA, 19 nt, Artificial Sequence
  Description of Artificial Sequence: Synthetic oligonucleotide
  Antisense strand to SEQ ID NO: 1157124
cauuuggaaacgaagccug

SEQ ID NO: 1157126 - RNA, 19 nt, Artificial Sequence
  Description of Artificial Sequence: Synthetic oligonucleotide
  Sense strand starting at position 455 of SEQ ID NO: 916443
gcacgaugugccugacaga

SEQ ID NO: 1157127 - RNA, 19 nt, Artificial Sequence
  Description of Artificial Sequence: Synthetic oligonucleotide
  Antisense strand to SEQ ID NO: 1157126
ucugucaggcacaucgugc

SEQ ID NO: 1157128 - RNA, 19 nt, Artificial Sequence
  Description of Artificial Sequence: Synthetic oligonucleotide
  Sense strand starting at position 456 of SEQ ID NO: 916443
cacgaugugccugacagau

SEQ ID NO: 1157129 - RNA, 19 nt, Artificial Sequence
  Description of Artificial Sequence: Synthetic oligonucleotide
  Antisense strand to SEQ ID NO: 1157128
aucugucaggcacaucgug

SEQ ID NO: 1157130 - RNA, 19 nt, Artificial Sequence
  Description of Artificial Sequence: Synthetic oligonucleotide
  Sense strand starting at position 518 of SEQ ID NO: 916443
gggaaaguccggugucuaa

SEQ ID NO: 1157131 - RNA, 19 nt, Artificial Sequence
  Description of Artificial Sequence: Synthetic oligonucleotide
  Antisense strand to SEQ ID NO: 1157130
uuagacaccggacuuuccc

SEQ ID NO: 1157132 - RNA, 19 nt, Artificial Sequence
  Description of Artificial Sequence: Synthetic oligonucleotide
  Sense strand starting at position 585 of SEQ ID NO: 916443
aggguggacgaauguguua

SEQ ID NO: 1157133 - RNA, 19 nt, Artificial Sequence
  Description of Artificial Sequence: Synthetic oligonucleotide
  Antisense strand to SEQ ID NO: 1157132
uaacacauucguccacccu

SEQ ID NO: 1157134 - RNA, 19 nt, Artificial Sequence
  Description of Artificial Sequence: Synthetic oligonucleotide
  Sense strand starting at position 621 of SEQ ID NO: 916443
augugauauguacgcacaa

SEQ ID NO: 1157135 - RNA, 19 nt, Artificial Sequence
  Description of Artificial Sequence: Synthetic oligonucleotide
  Antisense strand to SEQ ID NO: 1157134
uugugcguacauaucacau

SEQ ID NO: 1157136 - RNA, 19 nt, Artificial Sequence
  Description of Artificial Sequence: Synthetic oligonucleotide
  Sense strand starting at position 622 of SEQ ID NO: 916443
ugugauauguacgcacaau

SEQ ID NO: 1157137 - RNA, 19 nt, Artificial Sequence
  Description of Artificial Sequence: Synthetic oligonucleotide
  Antisense strand to SEQ ID NO: 1157136
auugugcguacauaucaca

SEQ ID NO: 1157138 - RNA, 19 nt, Artificial Sequence
  Description of Artificial Sequence: Synthetic oligonucleotide
  Sense strand starting at position 623 of SEQ ID NO: 916443
gugauauguacgcacaaug

SEQ ID NO: 1157139 - RNA, 19 nt, Artificial Sequence
  Description of Artificial Sequence: Synthetic oligonucleotide
  Antisense strand to SEQ ID NO: 1157138
cauugugcguacauaucac

SEQ ID NO: 1157140 - RNA, 19 nt, Artificial Sequence
  Description of Artificial Sequence: Synthetic oligonucleotide
  Sense strand starting at position 642 of SEQ ID NO: 916443
ggacgucaguggucccaga

SEQ ID NO: 1157141 - RNA, 19 nt, Artificial Sequence
  Description of Artificial Sequence: Synthetic oligonucleotide
  Antisense strand to SEQ ID NO: 1157140
ucugggaccacugacgucc

SEQ ID NO: 1157142 - RNA, 19 nt, Artificial Sequence
  Description of Artificial Sequence: Synthetic oligonucleotide
  Sense strand starting at position 762 of SEQ ID NO: 916443
gugugaggucuccagaguc

SEQ ID NO: 1157143 - RNA, 19 nt, Artificial Sequence
  Description of Artificial Sequence: Synthetic oligonucleotide
  Antisense strand to SEQ ID NO: 1157142
gacucuggagaccucacac

SEQ ID NO: 1157144 - RNA, 19 nt, Artificial Sequence
  Description of Artificial Sequence: Synthetic oligonucleotide
  Sense strand starting at position 768 of SEQ ID NO: 916443
ggucuccagagucgucaaa

SEQ ID NO: 1157145 - RNA, 19 nt, Artificial Sequence
  Description of Artificial Sequence: Synthetic oligonucleotide
  Antisense strand to SEQ ID NO: 1157144
uuugacgacucuggagacc

SEQ ID NO: 1157146 - RNA, 19 nt, Artificial Sequence
  Description of Artificial Sequence: Synthetic oligonucleotide
  Sense strand starting at position 852 of SEQ ID NO: 916443
gguugacauuugggaagau

SEQ ID NO: 1157147 - RNA, 19 nt, Artificial Sequence
  Description of Artificial Sequence: Synthetic oligonucleotide
  Antisense strand to SEQ ID NO: 1157146
aucuucccaaaugucaacc

SEQ ID NO: 1157148 - RNA, 19 nt, Artificial Sequence
  Description of Artificial Sequence: Synthetic oligonucleotide
  Sense strand starting at position 853 of SEQ ID NO: 916443
guugacauuugggaagaug

SEQ ID NO: 1157149 - RNA, 19 nt, Artificial Sequence
  Description of Artificial Sequence: Synthetic oligonucleotide
  Antisense strand to SEQ ID NO: 1157148
caucuucccaaaugucaac

SEQ ID NO: 1157150 - RNA, 19 nt, Artificial Sequence
  Description of Artificial Sequence: Synthetic oligonucleotide
  Sense strand starting at position 868 of SEQ ID NO: 916443
gauguaaagcucugcaggu

SEQ ID NO: 1157151 - RNA, 19 nt, Artificial Sequence
  Description of Artificial Sequence: Synthetic oligonucleotide
  Antisense strand to SEQ ID NO: 1157150
accugcagagcuuuacauc

SEQ ID NO: 1157152 - RNA, 19 nt, Artificial Sequence
  Description of Artificial Sequence: Synthetic oligonucleotide
  Sense strand starting at position 1265 of SEQ ID NO: 916443
ggucaacuuuauguuaaag

SEQ ID NO: 1157153 - RNA, 19 nt, Artificial Sequence
  Description of Artificial Sequence: Synthetic oligonucleotide
  Antisense strand to SEQ ID NO: 1157152
cuuuaacauaaaguugacc

SEQ ID NO: 1157154 - RNA, 19 nt, Artificial Sequence
  Description of Artificial Sequence: Synthetic oligonucleotide
  Sense strand starting at position 1323 of SEQ ID NO: 916443
ucaugagugcccuggaggu

SEQ ID NO: 1157155 - RNA, 19 nt, Artificial Sequence
  Description of Artificial Sequence: Synthetic oligonucleotide
  Antisense strand to SEQ ID NO: 1157154
accuccagggcacucauga

SEQ ID NO: 1157156 - RNA, 19 nt, Artificial Sequence
  Description of Artificial Sequence: Synthetic oligonucleotide
  Sense strand starting at position 1395 of SEQ ID NO: 916443
gucucuauuccgggacauu

SEQ ID NO: 1157157 - RNA, 19 nt, Artificial Sequence
  Description of Artificial Sequence: Synthetic oligonucleotide
  Antisense strand to SEQ ID NO: 1157156
aaugucccggaauagagac

SEQ ID NO: 1157158 - RNA, 19 nt, Artificial Sequence
  Description of Artificial Sequence: Synthetic oligonucleotide
  Sense strand starting at position 1470 of SEQ ID NO: 916443
ucuaguuuguuucuauagu

SEQ ID NO: 1157159 - RNA, 19 nt, Artificial Sequence
  Description of Artificial Sequence: Synthetic oligonucleotide
  Antisense strand to SEQ ID NO: 1157158
acuauagaaacaaacuaga

SEQ ID NO: 1157160 - RNA, 19 nt, Artificial Sequence
  Description of Artificial Sequence: Synthetic oligonucleotide
  Sense strand starting at position 1517 of SEQ ID NO: 916443
ugcuaaaucuugucaaaga

SEQ ID NO: 1157161 - RNA, 19 nt, Artificial Sequence
  Description of Artificial Sequence: Synthetic oligonucleotide
  Antisense strand to SEQ ID NO: 1157160
ucuuugacaagauuuagca

SEQ ID NO: 1157162 - RNA, 19 nt, Artificial Sequence
  Description of Artificial Sequence: Synthetic oligonucleotide
  Sense strand starting at position 1527 of SEQ ID NO: 916443
ugucaaagacauugcaaau

SEQ ID NO: 1157163 - RNA, 19 nt, Artificial Sequence
  Description of Artificial Sequence: Synthetic oligonucleotide
  Antisense strand to SEQ ID NO: 1157162
auuugcaaugucuuugaca

SEQ ID NO: 1157164 - RNA, 19 nt, Artificial Sequence
  Description of Artificial Sequence: Synthetic oligonucleotide
  Sense strand starting at position 1549 of SEQ ID NO: 916443
cauagaucgucugcgaaac

SEQ ID NO: 1157165 - RNA, 19 nt, Artificial Sequence
  Description of Artificial Sequence: Synthetic oligonucleotide
  Antisense strand to SEQ ID NO: 1157164
guuucgcagacgaucuaug

SEQ ID NO: 1157166 - RNA, 19 nt, Artificial Sequence
  Description of Artificial Sequence: Synthetic oligonucleotide
  Sense strand starting at position 1791 of SEQ ID NO: 916443
cgagugacucgugagauug

SEQ ID NO: 1157167 - RNA, 19 nt, Artificial Sequence
  Description of Artificial Sequence: Synthetic oligonucleotide
  Antisense strand to SEQ ID NO: 1157166
caaucucacgagucacucg

SEQ ID NO: 1157168 - RNA, 19 nt, Artificial Sequence
  Description of Artificial Sequence: Synthetic oligonucleotide
  Sense strand starting at position 2078 of SEQ ID NO: 916443
acaugagaggcucagugua

SEQ ID NO: 1157169 - RNA, 19 nt, Artificial Sequence
  Description of Artificial Sequence: Synthetic oligonucleotide
  Antisense strand to SEQ ID NO: 1157168
uacacugagccucucaugu

SEQ ID NO: 1157170 - RNA, 19 nt, Artificial Sequence
  Description of Artificial Sequence: Synthetic oligonucleotide
  Sense strand starting at position 2441 of SEQ ID NO: 916443
acaugcaucugcuuaugca

SEQ ID NO: 1157171 - RNA, 19 nt, Artificial Sequence
  Description of Artificial Sequence: Synthetic oligonucleotide
  Antisense strand to SEQ ID NO: 1157170
ugcauaagcagaugcaugu

SEQ ID NO: 1157172 - RNA, 19 nt, Artificial Sequence
  Description of Artificial Sequence: Synthetic oligonucleotide
  Sense strand starting at position 2474 of SEQ ID NO: 916443
gcuguuugcucguuauuua

SEQ ID NO: 1157173 - RNA, 19 nt, Artificial Sequence
  Description of Artificial Sequence: Synthetic oligonucleotide
  Antisense strand to SEQ ID NO: 1157172
uaaauaacgagcaaacagc

SEQ ID NO: 1157174 - RNA, 19 nt, Artificial Sequence
  Description of Artificial Sequence: Synthetic oligonucleotide
  Sense strand starting at position 2475 of SEQ ID NO: 916443
cuguuugcucguuauuuau

SEQ ID NO: 1157175 - RNA, 19 nt, Artificial Sequence
  Description of Artificial Sequence: Synthetic oligonucleotide
  Antisense strand to SEQ ID NO: 1157174
auaaauaacgagcaaacag

SEQ ID NO: 1157176 - RNA, 19 nt, Artificial Sequence
  Description of Artificial Sequence: Synthetic oligonucleotide
  Sense strand starting at position 2485 of SEQ ID NO: 916443
guuauuuauuugugaucga

SEQ ID NO: 1157177 - RNA, 19 nt, Artificial Sequence
  Description of Artificial Sequence: Synthetic oligonucleotide
  Antisense strand to SEQ ID NO: 1157176
ucgaucacaaauaaauaac

SEQ ID NO: 1157178 - RNA, 19 nt, Artificial Sequence
  Description of Artificial Sequence: Synthetic oligonucleotide
  Sense strand starting at position 2486 of SEQ ID NO: 916443
uuauuuauuugugaucgac

SEQ ID NO: 1157179 - RNA, 19 nt, Artificial Sequence
  Description of Artificial Sequence: Synthetic oligonucleotide
  Antisense strand to SEQ ID NO: 1157178
gucgaucacaaauaaauaa

SEQ ID NO: 1157180 - RNA, 19 nt, Artificial Sequence
  Description of Artificial Sequence: Synthetic oligonucleotide
  Sense strand starting at position 2569 of SEQ ID NO: 916443
cucucaguccagugcaaga

SEQ ID NO: 1157181 - RNA, 19 nt, Artificial Sequence
  Description of Artificial Sequence: Synthetic oligonucleotide
  Antisense strand to SEQ ID NO: 1157180
ucuugcacuggacugagag

SEQ ID NO: 1157182 - RNA, 19 nt, Artificial Sequence
  Description of Artificial Sequence: Synthetic oligonucleotide
  Sense strand starting at position 2979 of SEQ ID NO: 916443
caugguggccucuguaaug

SEQ ID NO: 1157183 - RNA, 19 nt, Artificial Sequence
  Description of Artificial Sequence: Synthetic oligonucleotide
  Antisense strand to SEQ ID NO: 1157182
cauuacagaggccaccaug

SEQ ID NO: 1157184 - RNA, 19 nt, Artificial Sequence
  Description of Artificial Sequence: Synthetic oligonucleotide
  Sense strand starting at position 3344 of SEQ ID NO: 916443
acacguguugcuuaggcau

SEQ ID NO: 1157185 - RNA, 19 nt, Artificial Sequence
  Description of Artificial Sequence: Synthetic oligonucleotide
  Antisense strand to SEQ ID NO: 1157184
augccuaagcaacacgugu

SEQ ID NO: 1157186 - RNA, 19 nt, Artificial Sequence
  Description of Artificial Sequence: Synthetic oligonucleotide
  Sense strand starting at position 3441 of SEQ ID NO: 916443
cuaggcugccgacaauuau

SEQ ID NO: 1157187 - RNA, 19 nt, Artificial Sequence
  Description of Artificial Sequence: Synthetic oligonucleotide
  Antisense strand to SEQ ID NO: 1157186
auaauugucggcagccuag

SEQ ID NO: 1157188 - RNA, 19 nt, Artificial Sequence
  Description of Artificial Sequence: Synthetic oligonucleotide
  Sense strand starting at position 3448 of SEQ ID NO: 916443
gccgacaauuaucugaaga

SEQ ID NO: 1157189 - RNA, 19 nt, Artificial Sequence
  Description of Artificial Sequence: Synthetic oligonucleotide
  Antisense strand to SEQ ID NO: 1157188
ucuucagauaauugucggc

SEQ ID NO: 1157190 - RNA, 19 nt, Artificial Sequence
  Description of Artificial Sequence: Synthetic oligonucleotide
  Sense strand starting at position 3581 of SEQ ID NO: 916443
cgcagaggcuuccucacaa

SEQ ID NO: 1157191 - RNA, 19 nt, Artificial Sequence
  Description of Artificial Sequence: Synthetic oligonucleotide
  Antisense strand to SEQ ID NO: 1157190
uugugaggaagccucugcg

SEQ ID NO: 1157192 - RNA, 19 nt, Artificial Sequence
  Description of Artificial Sequence: Synthetic oligonucleotide
  Sense strand starting at position 3857 of SEQ ID NO: 916443
aaauuuacaucauggugga

SEQ ID NO: 1157193 - RNA, 19 nt, Artificial Sequence
  Description of Artificial Sequence: Synthetic oligonucleotide
  Antisense strand to SEQ ID NO: 1157192
uccaccaugauguaaauuu

SEQ ID NO: 1157194 - RNA, 19 nt, Artificial Sequence
  Description of Artificial Sequence: Synthetic oligonucleotide
  Sense strand starting at position 3944 of SEQ ID NO: 916443
ugugacuuauaucucagaa

SEQ ID NO: 1157195 - RNA, 19 nt, Artificial Sequence
  Description of Artificial Sequence: Synthetic oligonucleotide
  Antisense strand to SEQ ID NO: 1157194
uucugagauauaagucaca

SEQ ID NO: 1157196 - RNA, 19 nt, Artificial Sequence
  Description of Artificial Sequence: Synthetic oligonucleotide
  Sense strand starting at position 32 of SEQ ID NO: 916444
agcucaaacuauucgacuu

SEQ ID NO: 1157197 - RNA, 19 nt, Artificial Sequence
  Description of Artificial Sequence: Synthetic oligonucleotide
  Antisense strand to SEQ ID NO: 1157196
aagucgaauaguuugagcu

SEQ ID NO: 1157198 - RNA, 19 nt, Artificial Sequence
  Description of Artificial Sequence: Synthetic oligonucleotide
  Sense strand starting at position 285 of SEQ ID NO: 916444
auaucugaacucggaaauc

SEQ ID NO: 1157199 - RNA, 19 nt, Artificial Sequence
  Description of Artificial Sequence: Synthetic oligonucleotide
  Antisense strand to SEQ ID NO: 1157198
gauuuccgaguucagauau

SEQ ID NO: 1157200 - RNA, 19 nt, Artificial Sequence
  Description of Artificial Sequence: Synthetic oligonucleotide
  Sense strand starting at position 296 of SEQ ID NO: 916444
cggaaaucaucuccuuaag

SEQ ID NO: 1157201 - RNA, 19 nt, Artificial Sequence
  Description of Artificial Sequence: Synthetic oligonucleotide
  Antisense strand to SEQ ID NO: 1157200
cuuaaggagaugauuuccg

SEQ ID NO: 1157202 - RNA, 19 nt, Artificial Sequence
  Description of Artificial Sequence: Synthetic oligonucleotide
  Sense strand starting at position 555 of SEQ ID NO: 916444
agagcuguccaauaaguga

SEQ ID NO: 1157203 - RNA, 19 nt, Artificial Sequence
  Description of Artificial Sequence: Synthetic oligonucleotide
  Antisense strand to SEQ ID NO: 1157202
ucacuuauuggacagcucu

SEQ ID NO: 1157204 - RNA, 19 nt, Artificial Sequence
  Description of Artificial Sequence: Synthetic oligonucleotide
  Sense strand starting at position 563 of SEQ ID NO: 916444
ccaauaagugaucacagca

SEQ ID NO: 1157205 - RNA, 19 nt, Artificial Sequence
  Description of Artificial Sequence: Synthetic oligonucleotide
  Antisense strand to SEQ ID NO: 1157204
ugcugugaucacuuauugg

SEQ ID NO: 1157206 - RNA, 19 nt, Artificial Sequence
  Description of Artificial Sequence: Synthetic oligonucleotide
  Sense strand starting at position 568 of SEQ ID NO: 916444
aagugaucacagcaggguu

SEQ ID NO: 1157207 - RNA, 19 nt, Artificial Sequence
  Description of Artificial Sequence: Synthetic oligonucleotide
  Antisense strand to SEQ ID NO: 1157206
aacccugcugugaucacuu

SEQ ID NO: 1157208 - RNA, 19 nt, Artificial Sequence
  Description of Artificial Sequence: Synthetic oligonucleotide
  Sense strand starting at position 643 of SEQ ID NO: 916444
uaaggaaugugggcuagua

SEQ ID NO: 1157209 - RNA, 19 nt, Artificial Sequence
  Description of Artificial Sequence: Synthetic oligonucleotide
  Antisense strand to SEQ ID NO: 1157208
uacuagcccacauuccuua

SEQ ID NO: 1157210 - RNA, 19 nt, Artificial Sequence
  Description of Artificial Sequence: Synthetic oligonucleotide
  Sense strand starting at position 645 of SEQ ID NO: 916444
aggaaugugggcuaguauu

SEQ ID NO: 1157211 - RNA, 19 nt, Artificial Sequence
  Description of Artificial Sequence: Synthetic oligonucleotide
  Antisense strand to SEQ ID NO: 1157210
aauacuagcccacauuccu

SEQ ID NO: 1157212 - RNA, 19 nt, Artificial Sequence
  Description of Artificial Sequence: Synthetic oligonucleotide
  Sense strand starting at position 689 of SEQ ID NO: 916444
guaauuaaagacugugcua

SEQ ID NO: 1157213 - RNA, 19 nt, Artificial Sequence
  Description of Artificial Sequence: Synthetic oligonucleotide
  Antisense strand to SEQ ID NO: 1157212
uagcacagucuuuaauuac

SEQ ID NO: 1157214 - RNA, 19 nt, Artificial Sequence
  Description of Artificial Sequence: Synthetic oligonucleotide
  Sense strand starting at position 766 of SEQ ID NO: 916444
cuaauuaggucagcuacuu

SEQ ID NO: 1157215 - RNA, 19 nt, Artificial Sequence
  Description of Artificial Sequence: Synthetic oligonucleotide
  Antisense strand to SEQ ID NO: 1157214
aaguagcugaccuaauuag

SEQ ID NO: 1157216 - RNA, 19 nt, Artificial Sequence
  Description of Artificial Sequence: Synthetic oligonucleotide
  Sense strand starting at position 793 of SEQ ID NO: 916444
auguuuaaauagguaucga

SEQ ID NO: 1157217 - RNA, 19 nt, Artificial Sequence
  Description of Artificial Sequence: Synthetic oligonucleotide
  Antisense strand to SEQ ID NO: 1157216
ucgauaccuauuuaaacau

SEQ ID NO: 1157218 - RNA, 19 nt, Artificial Sequence
  Description of Artificial Sequence: Synthetic oligonucleotide
  Sense strand starting at position 794 of SEQ ID NO: 916444
uguuuaaauagguaucgaa

SEQ ID NO: 1157219 - RNA, 19 nt, Artificial Sequence
  Description of Artificial Sequence: Synthetic oligonucleotide
  Antisense strand to SEQ ID NO: 1157218
uucgauaccuauuuaaaca

SEQ ID NO: 1157220 - RNA, 19 nt, Artificial Sequence
  Description of Artificial Sequence: Synthetic oligonucleotide
  Sense strand starting at position 902 of SEQ ID NO: 916444
gcacacuagcaugaucaca

SEQ ID NO: 1157221 - RNA, 19 nt, Artificial Sequence
  Description of Artificial Sequence: Synthetic oligonucleotide
  Antisense strand to SEQ ID NO: 1157220
ugugaucaugcuagugugc

SEQ ID NO: 1157222 - RNA, 19 nt, Artificial Sequence
  Description of Artificial Sequence: Synthetic oligonucleotide
  Sense strand starting at position 957 of SEQ ID NO: 916444
guuagaugccgugaauaau

SEQ ID NO: 1157223 - RNA, 19 nt, Artificial Sequence
  Description of Artificial Sequence: Synthetic oligonucleotide
  Antisense strand to SEQ ID NO: 1157222
auuauucacggcaucuaac

SEQ ID NO: 1157224 - RNA, 19 nt, Artificial Sequence
  Description of Artificial Sequence: Synthetic oligonucleotide
  Sense strand starting at position 960 of SEQ ID NO: 916444
agaugccgugaauaaucua

SEQ ID NO: 1157225 - RNA, 19 nt, Artificial Sequence
  Description of Artificial Sequence: Synthetic oligonucleotide
  Antisense strand to SEQ ID NO: 1157224
uagauuauucacggcaucu

SEQ ID NO: 1157226 - RNA, 19 nt, Artificial Sequence
  Description of Artificial Sequence: Synthetic oligonucleotide
  Sense strand starting at position 1078 of SEQ ID NO: 916444
uuccauauguugucaauag

SEQ ID NO: 1157227 - RNA, 19 nt, Artificial Sequence
  Description of Artificial Sequence: Synthetic oligonucleotide
  Antisense strand to SEQ ID NO: 1157226
cuauugacaacauauggaa

SEQ ID NO: 1157228 - RNA, 19 nt, Artificial Sequence
  Description of Artificial Sequence: Synthetic oligonucleotide
  Sense strand starting at position 1178 of SEQ ID NO: 916444
ccugcuuucgguuaaagac

SEQ ID NO: 1157229 - RNA, 19 nt, Artificial Sequence
  Description of Artificial Sequence: Synthetic oligonucleotide
  Antisense strand to SEQ ID NO: 1157228
gucuuuaaccgaaagcagg

SEQ ID NO: 1157230 - RNA, 19 nt, Artificial Sequence
  Description of Artificial Sequence: Synthetic oligonucleotide
  Sense strand starting at position 1318 of SEQ ID NO: 916444
cuuucugauggccaacaau

SEQ ID NO: 1157231 - RNA, 19 nt, Artificial Sequence
  Description of Artificial Sequence: Synthetic oligonucleotide
  Antisense strand to SEQ ID NO: 1157230
auuguuggccaucagaaag

SEQ ID NO: 1157232 - RNA, 19 nt, Artificial Sequence
  Description of Artificial Sequence: Synthetic oligonucleotide
  Sense strand starting at position 1417 of SEQ ID NO: 916444
acauuagggcauuggaaua

SEQ ID NO: 1157233 - RNA, 19 nt, Artificial Sequence
  Description of Artificial Sequence: Synthetic oligonucleotide
  Antisense strand to SEQ ID NO: 1157232
uauuccaaugcccuaaugu

SEQ ID NO: 1157234 - RNA, 19 nt, Artificial Sequence
  Description of Artificial Sequence: Synthetic oligonucleotide
  Sense strand starting at position 1496 of SEQ ID NO: 916444
uaagauuacguaugaagug

SEQ ID NO: 1157235 - RNA, 19 nt, Artificial Sequence
  Description of Artificial Sequence: Synthetic oligonucleotide
  Antisense strand to SEQ ID NO: 1157234
cacuucauacguaaucuua

SEQ ID NO: 1157236 - RNA, 19 nt, Artificial Sequence
  Description of Artificial Sequence: Synthetic oligonucleotide
  Sense strand starting at position 1677 of SEQ ID NO: 916444
cgcaguuggcagugauuuc

SEQ ID NO: 1157237 - RNA, 19 nt, Artificial Sequence
  Description of Artificial Sequence: Synthetic oligonucleotide
  Antisense strand to SEQ ID NO: 1157236
gaaaucacugccaacugcg

SEQ ID NO: 1157238 - RNA, 19 nt, Artificial Sequence
  Description of Artificial Sequence: Synthetic oligonucleotide
  Sense strand starting at position 1803 of SEQ ID NO: 916444
gauucuggauaaucgaguu

SEQ ID NO: 1157239 - RNA, 19 nt, Artificial Sequence
  Description of Artificial Sequence: Synthetic oligonucleotide
  Antisense strand to SEQ ID NO: 1157238
aacucgauuauccagaauc

SEQ ID NO: 1157240 - RNA, 19 nt, Artificial Sequence
  Description of Artificial Sequence: Synthetic oligonucleotide
  Sense strand starting at position 1839 of SEQ ID NO: 916444
accgaccagucuuuacaau

SEQ ID NO: 1157241 - RNA, 19 nt, Artificial Sequence
  Description of Artificial Sequence: Synthetic oligonucleotide
  Antisense strand to SEQ ID NO: 1157240
auuguaaagacuggucggu

SEQ ID NO: 1157242 - RNA, 19 nt, Artificial Sequence
  Description of Artificial Sequence: Synthetic oligonucleotide
  Sense strand starting at position 1850 of SEQ ID NO: 916444
uuuacaaucugguugagga

SEQ ID NO: 1157243 - RNA, 19 nt, Artificial Sequence
  Description of Artificial Sequence: Synthetic oligonucleotide
  Antisense strand to SEQ ID NO: 1157242
uccucaaccagauuguaaa

SEQ ID NO: 1157244 - RNA, 19 nt, Artificial Sequence
  Description of Artificial Sequence: Synthetic oligonucleotide
  Sense strand starting at position 1939 of SEQ ID NO: 916444
cuuggagaaugaccgaauu

SEQ ID NO: 1157245 - RNA, 19 nt, Artificial Sequence
  Description of Artificial Sequence: Synthetic oligonucleotide
  Antisense strand to SEQ ID NO: 1157244
aauucggucauucuccaag

SEQ ID NO: 1157246 - RNA, 19 nt, Artificial Sequence
  Description of Artificial Sequence: Synthetic oligonucleotide
  Sense strand starting at position 2055 of SEQ ID NO: 916444
acucauaacucagcgagaa

SEQ ID NO: 1157247 - RNA, 19 nt, Artificial Sequence
  Description of Artificial Sequence: Synthetic oligonucleotide
  Antisense strand to SEQ ID NO: 1157246
uucucgcugaguuaugagu

SEQ ID NO: 1157248 - RNA, 19 nt, Artificial Sequence
  Description of Artificial Sequence: Synthetic oligonucleotide
  Sense strand starting at position 2056 of SEQ ID NO: 916444
cucauaacucagcgagaac

SEQ ID NO: 1157249 - RNA, 19 nt, Artificial Sequence
  Description of Artificial Sequence: Synthetic oligonucleotide
  Antisense strand to SEQ ID NO: 1157248
guucucgcugaguuaugag

SEQ ID NO: 1157250 - RNA, 19 nt, Artificial Sequence
  Description of Artificial Sequence: Synthetic oligonucleotide
  Sense strand starting at position 2074 of SEQ ID NO: 916444
cugcaaacuccugaugugu

SEQ ID NO: 1157251 - RNA, 19 nt, Artificial Sequence
  Description of Artificial Sequence: Synthetic oligonucleotide
  Antisense strand to SEQ ID NO: 1157250
acacaucaggaguuugcag

SEQ ID NO: 1157252 - RNA, 19 nt, Artificial Sequence
  Description of Artificial Sequence: Synthetic oligonucleotide
  Sense strand starting at position 2339 of SEQ ID NO: 916444
gaaggagcuauacggcaaa

SEQ ID NO: 1157253 - RNA, 19 nt, Artificial Sequence
  Description of Artificial Sequence: Synthetic oligonucleotide
  Antisense strand to SEQ ID NO: 1157252
uuugccguauagcuccuuc

SEQ ID NO: 1157254 - RNA, 19 nt, Artificial Sequence
  Description of Artificial Sequence: Synthetic oligonucleotide
  Sense strand starting at position 3200 of SEQ ID NO: 916444
cgucgugggaaacauauau

SEQ ID NO: 1157255 - RNA, 19 nt, Artificial Sequence
  Description of Artificial Sequence: Synthetic oligonucleotide
  Antisense strand to SEQ ID NO: 1157254
auauauguuucccacgacg

SEQ ID NO: 1157256 - RNA, 19 nt, Artificial Sequence
  Description of Artificial Sequence: Synthetic oligonucleotide
  Sense strand starting at position 3260 of SEQ ID NO: 916444
gcuaguucucggaguugga

SEQ ID NO: 1157257 - RNA, 19 nt, Artificial Sequence
  Description of Artificial Sequence: Synthetic oligonucleotide
  Antisense strand to SEQ ID NO: 1157256
uccaacuccgagaacuagc

SEQ ID NO: 1157258 - RNA, 19 nt, Artificial Sequence
  Description of Artificial Sequence: Synthetic oligonucleotide
  Sense strand starting at position 3276 of SEQ ID NO: 916444
ggagguauuuaggagaacu

SEQ ID NO: 1157259 - RNA, 19 nt, Artificial Sequence
  Description of Artificial Sequence: Synthetic oligonucleotide
  Antisense strand to SEQ ID NO: 1157258
aguucuccuaaauaccucc

SEQ ID NO: 1157260 - RNA, 19 nt, Artificial Sequence
  Description of Artificial Sequence: Synthetic oligonucleotide
  Sense strand starting at position 3580 of SEQ ID NO: 916444
cuaauagaccucgauggca

SEQ ID NO: 1157261 - RNA, 19 nt, Artificial Sequence
  Description of Artificial Sequence: Synthetic oligonucleotide
  Antisense strand to SEQ ID NO: 1157260
ugccaucgaggucuauuag

SEQ ID NO: 1157262 - RNA, 19 nt, Artificial Sequence
  Description of Artificial Sequence: Synthetic oligonucleotide
  Sense strand starting at position 3582 of SEQ ID NO: 916444
aauagaccucgauggcaau

SEQ ID NO: 1157263 - RNA, 19 nt, Artificial Sequence
  Description of Artificial Sequence: Synthetic oligonucleotide
  Antisense strand to SEQ ID NO: 1157262
auugccaucgaggucuauu

SEQ ID NO: 1157264 - RNA, 19 nt, Artificial Sequence
  Description of Artificial Sequence: Synthetic oligonucleotide
  Sense strand starting at position 3589 of SEQ ID NO: 916444
cucgauggcaaucauagau

SEQ ID NO: 1157265 - RNA, 19 nt, Artificial Sequence
  Description of Artificial Sequence: Synthetic oligonucleotide
  Antisense strand to SEQ ID NO: 1157264
aucuaugauugccaucgag

SEQ ID NO: 1157266 - RNA, 19 nt, Artificial Sequence
  Description of Artificial Sequence: Synthetic oligonucleotide
  Sense strand starting at position 3703 of SEQ ID NO: 916444
guccacuugcgcuuugagu

SEQ ID NO: 1157267 - RNA, 19 nt, Artificial Sequence
  Description of Artificial Sequence: Synthetic oligonucleotide
  Antisense strand to SEQ ID NO: 1157266
acucaaagcgcaaguggac

SEQ ID NO: 1157268 - RNA, 19 nt, Artificial Sequence
  Description of Artificial Sequence: Synthetic oligonucleotide
  Sense strand starting at position 3704 of SEQ ID NO: 916444
uccacuugcgcuuugagua

SEQ ID NO: 1157269 - RNA, 19 nt, Artificial Sequence
  Description of Artificial Sequence: Synthetic oligonucleotide
  Antisense strand to SEQ ID NO: 1157268
uacucaaagcgcaagugga

SEQ ID NO: 1157270 - RNA, 19 nt, Artificial Sequence
  Description of Artificial Sequence: Synthetic oligonucleotide
  Sense strand starting at position 3829 of SEQ ID NO: 916444
ugaaguuuguuccuuaacu

SEQ ID NO: 1157271 - RNA, 19 nt, Artificial Sequence
  Description of Artificial Sequence: Synthetic oligonucleotide
  Antisense strand to SEQ ID NO: 1157270
aguuaaggaacaaacuuca

SEQ ID NO: 1157272 - RNA, 19 nt, Artificial Sequence
  Description of Artificial Sequence: Synthetic oligonucleotide
  Sense strand starting at position 3852 of SEQ ID NO: 916444
ggugaucagcgccacaaga

SEQ ID NO: 1157273 - RNA, 19 nt, Artificial Sequence
  Description of Artificial Sequence: Synthetic oligonucleotide
  Antisense strand to SEQ ID NO: 1157272
ucuuguggcgcugaucacc

SEQ ID NO: 1157274 - RNA, 19 nt, Artificial Sequence
  Description of Artificial Sequence: Synthetic oligonucleotide
  Sense strand starting at position 3942 of SEQ ID NO: 916444
uagagaacguaacuaaugu

SEQ ID NO: 1157275 - RNA, 19 nt, Artificial Sequence
  Description of Artificial Sequence: Synthetic oligonucleotide
  Antisense strand to SEQ ID NO: 1157274
acauuaguuacguucucua

SEQ ID NO: 1157276 - RNA, 19 nt, Artificial Sequence
  Description of Artificial Sequence: Synthetic oligonucleotide
  Sense strand starting at position 86 of SEQ ID NO: 916445
uuccauauguugucaauag

SEQ ID NO: 1157277 - RNA, 19 nt, Artificial Sequence
  Description of Artificial Sequence: Synthetic oligonucleotide
  Antisense strand to SEQ ID NO: 1157276
cuauugacaacauauggaa

SEQ ID NO: 1157278 - RNA, 19 nt, Artificial Sequence
  Description of Artificial Sequence: Synthetic oligonucleotide
  Sense strand starting at position 175 of SEQ ID NO: 916445
uugaaagucucccugcuuu

SEQ ID NO: 1157279 - RNA, 19 nt, Artificial Sequence
  Description of Artificial Sequence: Synthetic oligonucleotide
  Antisense strand to SEQ ID NO: 1157278
aaagcagggagacuuucaa

SEQ ID NO: 1157280 - RNA, 19 nt, Artificial Sequence
  Description of Artificial Sequence: Synthetic oligonucleotide
  Sense strand starting at position 186 of SEQ ID NO: 916445
ccugcuuucgguuaaagac

SEQ ID NO: 1157281 - RNA, 19 nt, Artificial Sequence
  Description of Artificial Sequence: Synthetic oligonucleotide
  Antisense strand to SEQ ID NO: 1157280
gucuuuaaccgaaagcagg

SEQ ID NO: 1157282 - RNA, 19 nt, Artificial Sequence
  Description of Artificial Sequence: Synthetic oligonucleotide
  Sense strand starting at position 326 of SEQ ID NO: 916445
cuuucugauggccaacaau

SEQ ID NO: 1157283 - RNA, 19 nt, Artificial Sequence
  Description of Artificial Sequence: Synthetic oligonucleotide
  Antisense strand to SEQ ID NO: 1157282
auuguuggccaucagaaag

SEQ ID NO: 1157284 - RNA, 19 nt, Artificial Sequence
  Description of Artificial Sequence: Synthetic oligonucleotide
  Sense strand starting at position 425 of SEQ ID NO: 916445
acauuagggcauuggaaua

SEQ ID NO: 1157285 - RNA, 19 nt, Artificial Sequence
  Description of Artificial Sequence: Synthetic oligonucleotide
  Antisense strand to SEQ ID NO: 1157284
uauuccaaugcccuaaugu

SEQ ID NO: 1157286 - RNA, 19 nt, Artificial Sequence
  Description of Artificial Sequence: Synthetic oligonucleotide
  Sense strand starting at position 504 of SEQ ID NO: 916445
uaagauuacguaugaagug

SEQ ID NO: 1157287 - RNA, 19 nt, Artificial Sequence
  Description of Artificial Sequence: Synthetic oligonucleotide
  Antisense strand to SEQ ID NO: 1157286
cacuucauacguaaucuua

SEQ ID NO: 1157288 - RNA, 19 nt, Artificial Sequence
  Description of Artificial Sequence: Synthetic oligonucleotide
  Sense strand starting at position 685 of SEQ ID NO: 916445
cgcaguuggcagugauuuc

SEQ ID NO: 1157289 - RNA, 19 nt, Artificial Sequence
  Description of Artificial Sequence: Synthetic oligonucleotide
  Antisense strand to SEQ ID NO: 1157288
gaaaucacugccaacugcg

SEQ ID NO: 1157290 - RNA, 19 nt, Artificial Sequence
  Description of Artificial Sequence: Synthetic oligonucleotide
  Sense strand starting at position 811 of SEQ ID NO: 916445
gauucuggauaaucgaguu

SEQ ID NO: 1157291 - RNA, 19 nt, Artificial Sequence
  Description of Artificial Sequence: Synthetic oligonucleotide
  Antisense strand to SEQ ID NO: 1157290
aacucgauuauccagaauc

SEQ ID NO: 1157292 - RNA, 19 nt, Artificial Sequence
  Description of Artificial Sequence: Synthetic oligonucleotide
  Sense strand starting at position 847 of SEQ ID NO: 916445
accgaccagucuuuacaau

SEQ ID NO: 1157293 - RNA, 19 nt, Artificial Sequence
  Description of Artificial Sequence: Synthetic oligonucleotide
  Antisense strand to SEQ ID NO: 1157292
auuguaaagacuggucggu

SEQ ID NO: 1157294 - RNA, 19 nt, Artificial Sequence
  Description of Artificial Sequence: Synthetic oligonucleotide
  Sense strand starting at position 858 of SEQ ID NO: 916445
uuuacaaucugguugagga

SEQ ID NO: 1157295 - RNA, 19 nt, Artificial Sequence
  Description of Artificial Sequence: Synthetic oligonucleotide
  Antisense strand to SEQ ID NO: 1157294
uccucaaccagauuguaaa

SEQ ID NO: 1157296 - RNA, 19 nt, Artificial Sequence
  Description of Artificial Sequence: Synthetic oligonucleotide
  Sense strand starting at position 881 of SEQ ID NO: 916445
gaacuuacggucugcuaau

SEQ ID NO: 1157297 - RNA, 19 nt, Artificial Sequence
  Description of Artificial Sequence: Synthetic oligonucleotide
  Antisense strand to SEQ ID NO: 1157296
auuagcagaccguaaguuc

SEQ ID NO: 1157298 - RNA, 19 nt, Artificial Sequence
  Description of Artificial Sequence: Synthetic oligonucleotide
  Sense strand starting at position 947 of SEQ ID NO: 916445
cuuggagaaugaccgaauu

SEQ ID NO: 1157299 - RNA, 19 nt, Artificial Sequence
  Description of Artificial Sequence: Synthetic oligonucleotide
  Antisense strand to SEQ ID NO: 1157298
aauucggucauucuccaag

SEQ ID NO: 1157300 - RNA, 19 nt, Artificial Sequence
  Description of Artificial Sequence: Synthetic oligonucleotide
  Sense strand starting at position 1063 of SEQ ID NO: 916445
acucauaacucagcgagaa

SEQ ID NO: 1157301 - RNA, 19 nt, Artificial Sequence
  Description of Artificial Sequence: Synthetic oligonucleotide
  Antisense strand to SEQ ID NO: 1157300
uucucgcugaguuaugagu

SEQ ID NO: 1157302 - RNA, 19 nt, Artificial Sequence
  Description of Artificial Sequence: Synthetic oligonucleotide
  Sense strand starting at position 1064 of SEQ ID NO: 916445
cucauaacucagcgagaac

SEQ ID NO: 1157303 - RNA, 19 nt, Artificial Sequence
  Description of Artificial Sequence: Synthetic oligonucleotide
  Antisense strand to SEQ ID NO: 1157302
guucucgcugaguuaugag

SEQ ID NO: 1157304 - RNA, 19 nt, Artificial Sequence
  Description of Artificial Sequence: Synthetic oligonucleotide
  Sense strand starting at position 1082 of SEQ ID NO: 916445
cugcaaacuccugaugugu

SEQ ID NO: 1157305 - RNA, 19 nt, Artificial Sequence
  Description of Artificial Sequence: Synthetic oligonucleotide
  Antisense strand to SEQ ID NO: 1157304
acacaucaggaguuugcag

SEQ ID NO: 1157306 - RNA, 19 nt, Artificial Sequence
  Description of Artificial Sequence: Synthetic oligonucleotide
  Sense strand starting at position 1347 of SEQ ID NO: 916445
gaaggagcuauacggcaaa

SEQ ID NO: 1157307 - RNA, 19 nt, Artificial Sequence
  Description of Artificial Sequence: Synthetic oligonucleotide
  Antisense strand to SEQ ID NO: 1157306
uuugccguauagcuccuuc

SEQ ID NO: 1157308 - RNA, 19 nt, Artificial Sequence
  Description of Artificial Sequence: Synthetic oligonucleotide
  Sense strand starting at position 2208 of SEQ ID NO: 916445
cgucgugggaaacauauau

SEQ ID NO: 1157309 - RNA, 19 nt, Artificial Sequence
  Description of Artificial Sequence: Synthetic oligonucleotide
  Antisense strand to SEQ ID NO: 1157308
auauauguuucccacgacg

SEQ ID NO: 1157310 - RNA, 19 nt, Artificial Sequence
  Description of Artificial Sequence: Synthetic oligonucleotide
  Sense strand starting at position 2268 of SEQ ID NO: 916445
gcuaguucucggaguugga

SEQ ID NO: 1157311 - RNA, 19 nt, Artificial Sequence
  Description of Artificial Sequence: Synthetic oligonucleotide
  Antisense strand to SEQ ID NO: 1157310
uccaacuccgagaacuagc

SEQ ID NO: 1157312 - RNA, 19 nt, Artificial Sequence
  Description of Artificial Sequence: Synthetic oligonucleotide
  Sense strand starting at position 2284 of SEQ ID NO: 916445
ggagguauuuaggagaacu

SEQ ID NO: 1157313 - RNA, 19 nt, Artificial Sequence
  Description of Artificial Sequence: Synthetic oligonucleotide
  Antisense strand to SEQ ID NO: 1157312
aguucuccuaaauaccucc

SEQ ID NO: 1157314 - RNA, 19 nt, Artificial Sequence
  Description of Artificial Sequence: Synthetic oligonucleotide
  Sense strand starting at position 2588 of SEQ ID NO: 916445
cuaauagaccucgauggca

SEQ ID NO: 1157315 - RNA, 19 nt, Artificial Sequence
  Description of Artificial Sequence: Synthetic oligonucleotide
  Antisense strand to SEQ ID NO: 1157314
ugccaucgaggucuauuag

SEQ ID NO: 1157316 - RNA, 19 nt, Artificial Sequence
  Description of Artificial Sequence: Synthetic oligonucleotide
  Sense strand starting at position 2590 of SEQ ID NO: 916445
aauagaccucgauggcaau

SEQ ID NO: 1157317 - RNA, 19 nt, Artificial Sequence
  Description of Artificial Sequence: Synthetic oligonucleotide
  Antisense strand to SEQ ID NO: 1157316
auugccaucgaggucuauu

SEQ ID NO: 1157318 - RNA, 19 nt, Artificial Sequence
  Description of Artificial Sequence: Synthetic oligonucleotide
  Sense strand starting at position 2597 of SEQ ID NO: 916445
cucgauggcaaucauagau

SEQ ID NO: 1157319 - RNA, 19 nt, Artificial Sequence
  Description of Artificial Sequence: Synthetic oligonucleotide
  Antisense strand to SEQ ID NO: 1157318
aucuaugauugccaucgag

SEQ ID NO: 1157320 - RNA, 19 nt, Artificial Sequence
  Description of Artificial Sequence: Synthetic oligonucleotide
  Sense strand starting at position 2711 of SEQ ID NO: 916445
guccacuugcgcuuugagu

SEQ ID NO: 1157321 - RNA, 19 nt, Artificial Sequence
  Description of Artificial Sequence: Synthetic oligonucleotide
  Antisense strand to SEQ ID NO: 1157320
acucaaagcgcaaguggac

SEQ ID NO: 1157322 - RNA, 19 nt, Artificial Sequence
  Description of Artificial Sequence: Synthetic oligonucleotide
  Sense strand starting at position 2712 of SEQ ID NO: 916445
uccacuugcgcuuugagua

SEQ ID NO: 1157323 - RNA, 19 nt, Artificial Sequence
  Description of Artificial Sequence: Synthetic oligonucleotide
  Antisense strand to SEQ ID NO: 1157322
uacucaaagcgcaagugga

SEQ ID NO: 1157324 - RNA, 19 nt, Artificial Sequence
  Description of Artificial Sequence: Synthetic oligonucleotide
  Sense strand starting at position 2834 of SEQ ID NO: 916445
cagugaaguuuguuccuua

SEQ ID NO: 1157325 - RNA, 19 nt, Artificial Sequence
  Description of Artificial Sequence: Synthetic oligonucleotide
  Antisense strand to SEQ ID NO: 1157324
uaaggaacaaacuucacug

SEQ ID NO: 1157326 - RNA, 19 nt, Artificial Sequence
  Description of Artificial Sequence: Synthetic oligonucleotide
  Sense strand starting at position 2835 of SEQ ID NO: 916445
agugaaguuuguuccuuaa

SEQ ID NO: 1157327 - RNA, 19 nt, Artificial Sequence
  Description of Artificial Sequence: Synthetic oligonucleotide
  Antisense strand to SEQ ID NO: 1157326
uuaaggaacaaacuucacu

SEQ ID NO: 1157328 - RNA, 19 nt, Artificial Sequence
  Description of Artificial Sequence: Synthetic oligonucleotide
  Sense strand starting at position 2837 of SEQ ID NO: 916445
ugaaguuuguuccuuaacu

SEQ ID NO: 1157329 - RNA, 19 nt, Artificial Sequence
  Description of Artificial Sequence: Synthetic oligonucleotide
  Antisense strand to SEQ ID NO: 1157328
aguuaaggaacaaacuuca

SEQ ID NO: 1157330 - RNA, 19 nt, Artificial Sequence
  Description of Artificial Sequence: Synthetic oligonucleotide
  Sense strand starting at position 2860 of SEQ ID NO: 916445
ggugaucagcgccacaaga

SEQ ID NO: 1157331 - RNA, 19 nt, Artificial Sequence
  Description of Artificial Sequence: Synthetic oligonucleotide
  Antisense strand to SEQ ID NO: 1157330
ucuuguggcgcugaucacc

SEQ ID NO: 1157332 - RNA, 19 nt, Artificial Sequence
  Description of Artificial Sequence: Synthetic oligonucleotide
  Sense strand starting at position 2920 of SEQ ID NO: 916445
gccuuccuccucuggguaa

SEQ ID NO: 1157333 - RNA, 19 nt, Artificial Sequence
  Description of Artificial Sequence: Synthetic oligonucleotide
  Antisense strand to SEQ ID NO: 1157332
uuacccagaggaggaaggc

SEQ ID NO: 1157334 - RNA, 19 nt, Artificial Sequence
  Description of Artificial Sequence: Synthetic oligonucleotide
  Sense strand starting at position 2950 of SEQ ID NO: 916445
uagagaacguaacuaaugu

SEQ ID NO: 1157335 - RNA, 19 nt, Artificial Sequence
  Description of Artificial Sequence: Synthetic oligonucleotide
  Antisense strand to SEQ ID NO: 1157334
acauuaguuacguucucua

SEQ ID NO: 1157336 - RNA, 19 nt, Artificial Sequence
  Description of Artificial Sequence: Synthetic oligonucleotide
  Sense strand starting at position 2960 of SEQ ID NO: 916445
aacuaauguguuuguugca

SEQ ID NO: 1157337 - RNA, 19 nt, Artificial Sequence
  Description of Artificial Sequence: Synthetic oligonucleotide
  Antisense strand to SEQ ID NO: 1157336
ugcaacaaacacauuaguu

SEQ ID NO: 1157338 - RNA, 19 nt, Artificial Sequence
  Description of Artificial Sequence: Synthetic oligonucleotide
  Sense strand starting at position 2961 of SEQ ID NO: 916445
acuaauguguuuguugcaa

SEQ ID NO: 1157339 - RNA, 19 nt, Artificial Sequence
  Description of Artificial Sequence: Synthetic oligonucleotide
  Antisense strand to SEQ ID NO: 1157338
uugcaacaaacacauuagu

SEQ ID NO: 1157340 - RNA, 19 nt, Artificial Sequence
  Description of Artificial Sequence: Synthetic oligonucleotide
  Sense strand starting at position 3036 of SEQ ID NO: 916445
ggaagcuuaaaguaaguuu

SEQ ID NO: 1157341 - RNA, 19 nt, Artificial Sequence
  Description of Artificial Sequence: Synthetic oligonucleotide
  Antisense strand to SEQ ID NO: 1157340
aaacuuacuuuaagcuucc

SEQ ID NO: 1157342 - RNA, 19 nt, Artificial Sequence
  Description of Artificial Sequence: Synthetic oligonucleotide
  Sense strand starting at position 3114 of SEQ ID NO: 916445
gcguaaacugcucaugauu

SEQ ID NO: 1157343 - RNA, 19 nt, Artificial Sequence
  Description of Artificial Sequence: Synthetic oligonucleotide
  Antisense strand to SEQ ID NO: 1157342
aaucaugagcaguuuacgc

SEQ ID NO: 1157344 - RNA, 19 nt, Artificial Sequence
  Description of Artificial Sequence: Synthetic oligonucleotide
  Sense strand starting at position 3396 of SEQ ID NO: 916445
ucugcuugggaguagacaa

SEQ ID NO: 1157345 - RNA, 19 nt, Artificial Sequence
  Description of Artificial Sequence: Synthetic oligonucleotide
  Antisense strand to SEQ ID NO: 1157344
uugucuacucccaagcaga

SEQ ID NO: 1157346 - RNA, 19 nt, Artificial Sequence
  Description of Artificial Sequence: Synthetic oligonucleotide
  Sense strand starting at position 3844 of SEQ ID NO: 916445
gaagaaagauuccauugua

SEQ ID NO: 1157347 - RNA, 19 nt, Artificial Sequence
  Description of Artificial Sequence: Synthetic oligonucleotide
  Antisense strand to SEQ ID NO: 1157346
uacaauggaaucuuucuuc

SEQ ID NO: 1157348 - RNA, 19 nt, Artificial Sequence
  Description of Artificial Sequence: Synthetic oligonucleotide
  Sense strand starting at position 3867 of SEQ ID NO: 916445
ugccauuaugcauaagcaa

SEQ ID NO: 1157349 - RNA, 19 nt, Artificial Sequence
  Description of Artificial Sequence: Synthetic oligonucleotide
  Antisense strand to SEQ ID NO: 1157348
uugcuuaugcauaauggca

SEQ ID NO: 1157350 - RNA, 19 nt, Artificial Sequence
  Description of Artificial Sequence: Synthetic oligonucleotide
  Sense strand starting at position 3884 of SEQ ID NO: 916445
aagguaacaucaguaugga

SEQ ID NO: 1157351 - RNA, 19 nt, Artificial Sequence
  Description of Artificial Sequence: Synthetic oligonucleotide
  Antisense strand to SEQ ID NO: 1157350
uccauacugauguuaccuu

SEQ ID NO: 1157352 - RNA, 19 nt, Artificial Sequence
  Description of Artificial Sequence: Synthetic oligonucleotide
  Sense strand starting at position 3902 of SEQ ID NO: 916445
aggcuugcucuugagacau

SEQ ID NO: 1157353 - RNA, 19 nt, Artificial Sequence
  Description of Artificial Sequence: Synthetic oligonucleotide
  Antisense strand to SEQ ID NO: 1157352
augucucaagagcaagccu

SEQ ID NO: 1157354 - RNA, 19 nt, Artificial Sequence
  Description of Artificial Sequence: Synthetic oligonucleotide
  Sense strand starting at position 3908 of SEQ ID NO: 916445
gcucuugagacaugagaca

SEQ ID NO: 1157355 - RNA, 19 nt, Artificial Sequence
  Description of Artificial Sequence: Synthetic oligonucleotide
  Antisense strand to SEQ ID NO: 1157354
ugucucaugucucaagagc

SEQ ID NO: 1157356 - RNA, 19 nt, Artificial Sequence
  Description of Artificial Sequence: Synthetic oligonucleotide
  Sense strand starting at position 17 of SEQ ID NO: 916446
acacacagacuguguaauu

SEQ ID NO: 1157357 - RNA, 19 nt, Artificial Sequence
  Description of Artificial Sequence: Synthetic oligonucleotide
  Antisense strand to SEQ ID NO: 1157356
aauuacacagucugugugu

SEQ ID NO: 1157358 - RNA, 19 nt, Artificial Sequence
  Description of Artificial Sequence: Synthetic oligonucleotide
  Sense strand starting at position 44 of SEQ ID NO: 916446
gccuuacuagcuuaacaga

SEQ ID NO: 1157359 - RNA, 19 nt, Artificial Sequence
  Description of Artificial Sequence: Synthetic oligonucleotide
  Antisense strand to SEQ ID NO: 1157358
ucuguuaagcuaguaaggc

SEQ ID NO: 1157360 - RNA, 19 nt, Artificial Sequence
  Description of Artificial Sequence: Synthetic oligonucleotide
  Sense strand starting at position 52 of SEQ ID NO: 916446
agcuuaacagagugaauca

SEQ ID NO: 1157361 - RNA, 19 nt, Artificial Sequence
  Description of Artificial Sequence: Synthetic oligonucleotide
  Antisense strand to SEQ ID NO: 1157360
ugauucacucuguuaagcu

SEQ ID NO: 1157362 - RNA, 19 nt, Artificial Sequence
  Description of Artificial Sequence: Synthetic oligonucleotide
  Sense strand starting at position 350 of SEQ ID NO: 916446
cucagauaauaguagaaag

SEQ ID NO: 1157363 - RNA, 19 nt, Artificial Sequence
  Description of Artificial Sequence: Synthetic oligonucleotide
  Antisense strand to SEQ ID NO: 1157362
cuuucuacuauuaucugag

SEQ ID NO: 1157364 - RNA, 19 nt, Artificial Sequence
  Description of Artificial Sequence: Synthetic oligonucleotide
  Sense strand starting at position 569 of SEQ ID NO: 916446
ucugauaaauggcuaaaua

SEQ ID NO: 1157365 - RNA, 19 nt, Artificial Sequence
  Description of Artificial Sequence: Synthetic oligonucleotide
  Antisense strand to SEQ ID NO: 1157364
uauuuagccauuuaucaga

SEQ ID NO: 1157366 - RNA, 19 nt, Artificial Sequence
  Description of Artificial Sequence: Synthetic oligonucleotide
  Sense strand starting at position 578 of SEQ ID NO: 916446
uggcuaaauaaguaagguu

SEQ ID NO: 1157367 - RNA, 19 nt, Artificial Sequence
  Description of Artificial Sequence: Synthetic oligonucleotide
  Antisense strand to SEQ ID NO: 1157366
aaccuuacuuauuuagcca

SEQ ID NO: 1157368 - RNA, 19 nt, Artificial Sequence
  Description of Artificial Sequence: Synthetic oligonucleotide
  Sense strand starting at position 602 of SEQ ID NO: 916446
uuaccauauuagguuucua

SEQ ID NO: 1157369 - RNA, 19 nt, Artificial Sequence
  Description of Artificial Sequence: Synthetic oligonucleotide
  Antisense strand to SEQ ID NO: 1157368
uagaaaccuaauaugguaa

SEQ ID NO: 1157370 - RNA, 19 nt, Artificial Sequence
  Description of Artificial Sequence: Synthetic oligonucleotide
  Sense strand starting at position 643 of SEQ ID NO: 916446
aucugacaucuguaaugug

SEQ ID NO: 1157371 - RNA, 19 nt, Artificial Sequence
  Description of Artificial Sequence: Synthetic oligonucleotide
  Antisense strand to SEQ ID NO: 1157370
cacauuacagaugucagau

SEQ ID NO: 1157372 - RNA, 19 nt, Artificial Sequence
  Description of Artificial Sequence: Synthetic oligonucleotide
  Sense strand starting at position 658 of SEQ ID NO: 916446
ugugacaacugucuucuca

SEQ ID NO: 1157373 - RNA, 19 nt, Artificial Sequence
  Description of Artificial Sequence: Synthetic oligonucleotide
  Antisense strand to SEQ ID NO: 1157372
ugagaagacaguugucaca

SEQ ID NO: 1157374 - RNA, 19 nt, Artificial Sequence
  Description of Artificial Sequence: Synthetic oligonucleotide
  Sense strand starting at position 685 of SEQ ID NO: 916446
ucugguaacuguuuauaua

SEQ ID NO: 1157375 - RNA, 19 nt, Artificial Sequence
  Description of Artificial Sequence: Synthetic oligonucleotide
  Antisense strand to SEQ ID NO: 1157374
uauauaaacaguuaccaga

SEQ ID NO: 1157376 - RNA, 19 nt, Artificial Sequence
  Description of Artificial Sequence: Synthetic oligonucleotide
  Sense strand starting at position 686 of SEQ ID NO: 916446
cugguaacuguuuauauac

SEQ ID NO: 1157377 - RNA, 19 nt, Artificial Sequence
  Description of Artificial Sequence: Synthetic oligonucleotide
  Antisense strand to SEQ ID NO: 1157376
guauauaaacaguuaccag

SEQ ID NO: 1157378 - RNA, 19 nt, Artificial Sequence
  Description of Artificial Sequence: Synthetic oligonucleotide
  Sense strand starting at position 762 of SEQ ID NO: 916446
uguagauguauguagagaa

SEQ ID NO: 1157379 - RNA, 19 nt, Artificial Sequence
  Description of Artificial Sequence: Synthetic oligonucleotide
  Antisense strand to SEQ ID NO: 1157378
uucucuacauacaucuaca

SEQ ID NO: 1157380 - RNA, 19 nt, Artificial Sequence
  Description of Artificial Sequence: Synthetic oligonucleotide
  Sense strand starting at position 766 of SEQ ID NO: 916446
gauguauguagagaaugca

SEQ ID NO: 1157381 - RNA, 19 nt, Artificial Sequence
  Description of Artificial Sequence: Synthetic oligonucleotide
  Antisense strand to SEQ ID NO: 1157380
ugcauucucuacauacauc

SEQ ID NO: 1157382 - RNA, 19 nt, Artificial Sequence
  Description of Artificial Sequence: Synthetic oligonucleotide
  Sense strand starting at position 769 of SEQ ID NO: 916446
guauguagagaaugcauua

SEQ ID NO: 1157383 - RNA, 19 nt, Artificial Sequence
  Description of Artificial Sequence: Synthetic oligonucleotide
  Antisense strand to SEQ ID NO: 1157382
uaaugcauucucuacauac

SEQ ID NO: 1157384 - RNA, 19 nt, Artificial Sequence
  Description of Artificial Sequence: Synthetic oligonucleotide
  Sense strand starting at position 2002 of SEQ ID NO: 916446
aguuguuucugacuggagu

SEQ ID NO: 1157385 - RNA, 19 nt, Artificial Sequence
  Description of Artificial Sequence: Synthetic oligonucleotide
  Antisense strand to SEQ ID NO: 1157384
acuccagucagaaacaacu

SEQ ID NO: 1157386 - RNA, 19 nt, Artificial Sequence
  Description of Artificial Sequence: Synthetic oligonucleotide
  Sense strand starting at position 2004 of SEQ ID NO: 916446
uuguuucugacuggaguua

SEQ ID NO: 1157387 - RNA, 19 nt, Artificial Sequence
  Description of Artificial Sequence: Synthetic oligonucleotide
  Antisense strand to SEQ ID NO: 1157386
uaacuccagucagaaacaa

SEQ ID NO: 1157388 - RNA, 19 nt, Artificial Sequence
  Description of Artificial Sequence: Synthetic oligonucleotide
  Sense strand starting at position 2005 of SEQ ID NO: 916446
uguuucugacuggaguuaa

SEQ ID NO: 1157389 - RNA, 19 nt, Artificial Sequence
  Description of Artificial Sequence: Synthetic oligonucleotide
  Antisense strand to SEQ ID NO: 1157388
uuaacuccagucagaaaca

SEQ ID NO: 1157390 - RNA, 19 nt, Artificial Sequence
  Description of Artificial Sequence: Synthetic oligonucleotide
  Sense strand starting at position 2079 of SEQ ID NO: 916446
agagucacccugugaaauu

SEQ ID NO: 1157391 - RNA, 19 nt, Artificial Sequence
  Description of Artificial Sequence: Synthetic oligonucleotide
  Antisense strand to SEQ ID NO: 1157390
aauuucacagggugacucu

SEQ ID NO: 1157392 - RNA, 19 nt, Artificial Sequence
  Description of Artificial Sequence: Synthetic oligonucleotide
  Sense strand starting at position 2355 of SEQ ID NO: 916446
gggugacaggugcaacauu

SEQ ID NO: 1157393 - RNA, 19 nt, Artificial Sequence
  Description of Artificial Sequence: Synthetic oligonucleotide
  Antisense strand to SEQ ID NO: 1157392
aauguugcaccugucaccc

SEQ ID NO: 1157394 - RNA, 19 nt, Artificial Sequence
  Description of Artificial Sequence: Synthetic oligonucleotide
  Sense strand starting at position 2470 of SEQ ID NO: 916446
agccuuucuccuuaagggu

SEQ ID NO: 1157395 - RNA, 19 nt, Artificial Sequence
  Description of Artificial Sequence: Synthetic oligonucleotide
  Antisense strand to SEQ ID NO: 1157394
acccuuaaggagaaaggcu

SEQ ID NO: 1157396 - RNA, 19 nt, Artificial Sequence
  Description of Artificial Sequence: Synthetic oligonucleotide
  Sense strand starting at position 2477 of SEQ ID NO: 916446
cuccuuaaggguugucaau

SEQ ID NO: 1157397 - RNA, 19 nt, Artificial Sequence
  Description of Artificial Sequence: Synthetic oligonucleotide
  Antisense strand to SEQ ID NO: 1157396
auugacaacccuuaaggag

SEQ ID NO: 1157398 - RNA, 19 nt, Artificial Sequence
  Description of Artificial Sequence: Synthetic oligonucleotide
  Sense strand starting at position 2479 of SEQ ID NO: 916446
ccuuaaggguugucaauca

SEQ ID NO: 1157399 - RNA, 19 nt, Artificial Sequence
  Description of Artificial Sequence: Synthetic oligonucleotide
  Antisense strand to SEQ ID NO: 1157398
ugauugacaacccuuaagg

SEQ ID NO: 1157400 - RNA, 19 nt, Artificial Sequence
  Description of Artificial Sequence: Synthetic oligonucleotide
  Sense strand starting at position 2484 of SEQ ID NO: 916446
aggguugucaaucauagua

SEQ ID NO: 1157401 - RNA, 19 nt, Artificial Sequence
  Description of Artificial Sequence: Synthetic oligonucleotide
  Antisense strand to SEQ ID NO: 1157400
uacuaugauugacaacccu

SEQ ID NO: 1157402 - RNA, 19 nt, Artificial Sequence
  Description of Artificial Sequence: Synthetic oligonucleotide
  Sense strand starting at position 2556 of SEQ ID NO: 916446
ggcgguugauauuucuacu

SEQ ID NO: 1157403 - RNA, 19 nt, Artificial Sequence
  Description of Artificial Sequence: Synthetic oligonucleotide
  Antisense strand to SEQ ID NO: 1157402
aguagaaauaucaaccgcc

SEQ ID NO: 1157404 - RNA, 19 nt, Artificial Sequence
  Description of Artificial Sequence: Synthetic oligonucleotide
  Sense strand starting at position 2559 of SEQ ID NO: 916446
gguugauauuucuacuuua

SEQ ID NO: 1157405 - RNA, 19 nt, Artificial Sequence
  Description of Artificial Sequence: Synthetic oligonucleotide
  Antisense strand to SEQ ID NO: 1157404
uaaaguagaaauaucaacc

SEQ ID NO: 1157406 - RNA, 19 nt, Artificial Sequence
  Description of Artificial Sequence: Synthetic oligonucleotide
  Sense strand starting at position 2622 of SEQ ID NO: 916446
cacagaucucauggugcca

SEQ ID NO: 1157407 - RNA, 19 nt, Artificial Sequence
  Description of Artificial Sequence: Synthetic oligonucleotide
  Antisense strand to SEQ ID NO: 1157406
uggcaccaugagaucugug

SEQ ID NO: 1157408 - RNA, 19 nt, Artificial Sequence
  Description of Artificial Sequence: Synthetic oligonucleotide
  Sense strand starting at position 2703 of SEQ ID NO: 916446
ucuguuagcagaugagauu

SEQ ID NO: 1157409 - RNA, 19 nt, Artificial Sequence
  Description of Artificial Sequence: Synthetic oligonucleotide
  Antisense strand to SEQ ID NO: 1157408
aaucucaucugcuaacaga

SEQ ID NO: 1157410 - RNA, 19 nt, Artificial Sequence
  Description of Artificial Sequence: Synthetic oligonucleotide
  Sense strand starting at position 2704 of SEQ ID NO: 916446
cuguuagcagaugagauua

SEQ ID NO: 1157411 - RNA, 19 nt, Artificial Sequence
  Description of Artificial Sequence: Synthetic oligonucleotide
  Antisense strand to SEQ ID NO: 1157410
uaaucucaucugcuaacag

SEQ ID NO: 1157412 - RNA, 19 nt, Artificial Sequence
  Description of Artificial Sequence: Synthetic oligonucleotide
  Sense strand starting at position 2738 of SEQ ID NO: 916446
augccaguaccucaaugau

SEQ ID NO: 1157413 - RNA, 19 nt, Artificial Sequence
  Description of Artificial Sequence: Synthetic oligonucleotide
  Antisense strand to SEQ ID NO: 1157412
aucauugagguacuggcau

SEQ ID NO: 1157414 - RNA, 19 nt, Artificial Sequence
  Description of Artificial Sequence: Synthetic oligonucleotide
  Sense strand starting at position 2802 of SEQ ID NO: 916446
gugauaaaugucgggaguu

SEQ ID NO: 1157415 - RNA, 19 nt, Artificial Sequence
  Description of Artificial Sequence: Synthetic oligonucleotide
  Antisense strand to SEQ ID NO: 1157414
aacucccgacauuuaucac

SEQ ID NO: 1157416 - RNA, 19 nt, Artificial Sequence
  Description of Artificial Sequence: Synthetic oligonucleotide
  Sense strand starting at position 2948 of SEQ ID NO: 916446
aggcaagaauggucucaca

SEQ ID NO: 1157417 - RNA, 19 nt, Artificial Sequence
  Description of Artificial Sequence: Synthetic oligonucleotide
  Antisense strand to SEQ ID NO: 1157416
ugugagaccauucuugccu

SEQ ID NO: 1157418 - RNA, 19 nt, Artificial Sequence
  Description of Artificial Sequence: Synthetic oligonucleotide
  Sense strand starting at position 3357 of SEQ ID NO: 916446
aguauuuguuguucuguga

SEQ ID NO: 1157419 - RNA, 19 nt, Artificial Sequence
  Description of Artificial Sequence: Synthetic oligonucleotide
  Antisense strand to SEQ ID NO: 1157418
ucacagaacaacaaauacu

SEQ ID NO: 1157420 - RNA, 19 nt, Artificial Sequence
  Description of Artificial Sequence: Synthetic oligonucleotide
  Sense strand starting at position 3457 of SEQ ID NO: 916446
uggauaauauucccuugua

SEQ ID NO: 1157421 - RNA, 19 nt, Artificial Sequence
  Description of Artificial Sequence: Synthetic oligonucleotide
  Antisense strand to SEQ ID NO: 1157420
uacaagggaauauuaucca

SEQ ID NO: 1157422 - RNA, 19 nt, Artificial Sequence
  Description of Artificial Sequence: Synthetic oligonucleotide
  Sense strand starting at position 3458 of SEQ ID NO: 916446
ggauaauauucccuuguau

SEQ ID NO: 1157423 - RNA, 19 nt, Artificial Sequence
  Description of Artificial Sequence: Synthetic oligonucleotide
  Antisense strand to SEQ ID NO: 1157422
auacaagggaauauuaucc

SEQ ID NO: 1157424 - RNA, 19 nt, Artificial Sequence
  Description of Artificial Sequence: Synthetic oligonucleotide
  Sense strand starting at position 3497 of SEQ ID NO: 916446
auccaaucauccguggaca

SEQ ID NO: 1157425 - RNA, 19 nt, Artificial Sequence
  Description of Artificial Sequence: Synthetic oligonucleotide
  Antisense strand to SEQ ID NO: 1157424
uguccacggaugauuggau

SEQ ID NO: 1157426 - RNA, 19 nt, Artificial Sequence
  Description of Artificial Sequence: Synthetic oligonucleotide
  Sense strand starting at position 3498 of SEQ ID NO: 916446
uccaaucauccguggacau

SEQ ID NO: 1157427 - RNA, 19 nt, Artificial Sequence
  Description of Artificial Sequence: Synthetic oligonucleotide
  Antisense strand to SEQ ID NO: 1157426
auguccacggaugauugga

SEQ ID NO: 1157428 - RNA, 19 nt, Artificial Sequence
  Description of Artificial Sequence: Synthetic oligonucleotide
  Sense strand starting at position 3499 of SEQ ID NO: 916446
ccaaucauccguggacauu

SEQ ID NO: 1157429 - RNA, 19 nt, Artificial Sequence
  Description of Artificial Sequence: Synthetic oligonucleotide
  Antisense strand to SEQ ID NO: 1157428
aauguccacggaugauugg

SEQ ID NO: 1157430 - RNA, 19 nt, Artificial Sequence
  Description of Artificial Sequence: Synthetic oligonucleotide
  Sense strand starting at position 3545 of SEQ ID NO: 916446
agaauaaugccgcagugaa

SEQ ID NO: 1157431 - RNA, 19 nt, Artificial Sequence
  Description of Artificial Sequence: Synthetic oligonucleotide
  Antisense strand to SEQ ID NO: 1157430
uucacugcggcauuauucu

SEQ ID NO: 1157432 - RNA, 19 nt, Artificial Sequence
  Description of Artificial Sequence: Synthetic oligonucleotide
  Sense strand starting at position 3634 of SEQ ID NO: 916446
ccuagaucagaugguaguu

SEQ ID NO: 1157433 - RNA, 19 nt, Artificial Sequence
  Description of Artificial Sequence: Synthetic oligonucleotide
  Antisense strand to SEQ ID NO: 1157432
aacuaccaucugaucuagg

SEQ ID NO: 1157434 - RNA, 19 nt, Artificial Sequence
  Description of Artificial Sequence: Synthetic oligonucleotide
  Sense strand starting at position 3639 of SEQ ID NO: 916446
aucagaugguaguuuaauu

SEQ ID NO: 1157435 - RNA, 19 nt, Artificial Sequence
  Description of Artificial Sequence: Synthetic oligonucleotide
  Antisense strand to SEQ ID NO: 1157434
aauuaaacuaccaucugau

SEQ ID NO: 1157436 - RNA, 19 nt, Artificial Sequence
  Description of Artificial Sequence: Synthetic oligonucleotide
  Sense strand starting at position 8 of SEQ ID NO: 916447
gcggcaucuggaggauauu

SEQ ID NO: 1157437 - RNA, 19 nt, Artificial Sequence
  Description of Artificial Sequence: Synthetic oligonucleotide
  Antisense strand to SEQ ID NO: 1157436
aauauccuccagaugccgc

SEQ ID NO: 1157438 - RNA, 19 nt, Artificial Sequence
  Description of Artificial Sequence: Synthetic oligonucleotide
  Sense strand starting at position 145 of SEQ ID NO: 916447
gcuuccugacccuguaagu

SEQ ID NO: 1157439 - RNA, 19 nt, Artificial Sequence
  Description of Artificial Sequence: Synthetic oligonucleotide
  Antisense strand to SEQ ID NO: 1157438
acuuacagggucaggaagc

SEQ ID NO: 1157440 - RNA, 19 nt, Artificial Sequence
  Description of Artificial Sequence: Synthetic oligonucleotide
  Sense strand starting at position 199 of SEQ ID NO: 916447
gggagauaaucugguuuca

SEQ ID NO: 1157441 - RNA, 19 nt, Artificial Sequence
  Description of Artificial Sequence: Synthetic oligonucleotide
  Antisense strand to SEQ ID NO: 1157440
ugaaaccagauuaucuccc

SEQ ID NO: 1157442 - RNA, 19 nt, Artificial Sequence
  Description of Artificial Sequence: Synthetic oligonucleotide
  Sense strand starting at position 234 of SEQ ID NO: 916447
aucccaaucuggcaagaca

SEQ ID NO: 1157443 - RNA, 19 nt, Artificial Sequence
  Description of Artificial Sequence: Synthetic oligonucleotide
  Antisense strand to SEQ ID NO: 1157442
ugucuugccagauugggau

SEQ ID NO: 1157444 - RNA, 19 nt, Artificial Sequence
  Description of Artificial Sequence: Synthetic oligonucleotide
  Sense strand starting at position 261 of SEQ ID NO: 916447
gguguaugaugguauccag

SEQ ID NO: 1157445 - RNA, 19 nt, Artificial Sequence
  Description of Artificial Sequence: Synthetic oligonucleotide
  Antisense strand to SEQ ID NO: 1157444
cuggauaccaucauacacc

SEQ ID NO: 1157446 - RNA, 19 nt, Artificial Sequence
  Description of Artificial Sequence: Synthetic oligonucleotide
  Sense strand starting at position 339 of SEQ ID NO: 916447
uucucaaaucagggaccua

SEQ ID NO: 1157447 - RNA, 19 nt, Artificial Sequence
  Description of Artificial Sequence: Synthetic oligonucleotide
  Antisense strand to SEQ ID NO: 1157446
uaggucccugauuugagaa

SEQ ID NO: 1157448 - RNA, 19 nt, Artificial Sequence
  Description of Artificial Sequence: Synthetic oligonucleotide
  Sense strand starting at position 387 of SEQ ID NO: 916447
augcuuaaagcuugggcaa

SEQ ID NO: 1157449 - RNA, 19 nt, Artificial Sequence
  Description of Artificial Sequence: Synthetic oligonucleotide
  Antisense strand to SEQ ID NO: 1157448
uugcccaagcuuuaagcau

SEQ ID NO: 1157450 - RNA, 19 nt, Artificial Sequence
  Description of Artificial Sequence: Synthetic oligonucleotide
  Sense strand starting at position 389 of SEQ ID NO: 916447
gcuuaaagcuugggcaaga

SEQ ID NO: 1157451 - RNA, 19 nt, Artificial Sequence
  Description of Artificial Sequence: Synthetic oligonucleotide
  Antisense strand to SEQ ID NO: 1157450
ucuugcccaagcuuuaagc

SEQ ID NO: 1157452 - RNA, 19 nt, Artificial Sequence
  Description of Artificial Sequence: Synthetic oligonucleotide
  Sense strand starting at position 645 of SEQ ID NO: 916447
cugugaugaagccagaagu

SEQ ID NO: 1157453 - RNA, 19 nt, Artificial Sequence
  Description of Artificial Sequence: Synthetic oligonucleotide
  Antisense strand to SEQ ID NO: 1157452
acuucuggcuucaucacag

SEQ ID NO: 1157454 - RNA, 19 nt, Artificial Sequence
  Description of Artificial Sequence: Synthetic oligonucleotide
  Sense strand starting at position 732 of SEQ ID NO: 916447
agugaugacaucugacguu

SEQ ID NO: 1157455 - RNA, 19 nt, Artificial Sequence
  Description of Artificial Sequence: Synthetic oligonucleotide
  Antisense strand to SEQ ID NO: 1157454
aacgucagaugucaucacu

SEQ ID NO: 1157456 - RNA, 19 nt, Artificial Sequence
  Description of Artificial Sequence: Synthetic oligonucleotide
  Sense strand starting at position 757 of SEQ ID NO: 916447
ucucaaagcucccaggaau

SEQ ID NO: 1157457 - RNA, 19 nt, Artificial Sequence
  Description of Artificial Sequence: Synthetic oligonucleotide
  Antisense strand to SEQ ID NO: 1157456
auuccugggagcuuugaga

SEQ ID NO: 1157458 - RNA, 19 nt, Artificial Sequence
  Description of Artificial Sequence: Synthetic oligonucleotide
  Sense strand starting at position 2198 of SEQ ID NO: 916447
gguucggaguucuggaaag

SEQ ID NO: 1157459 - RNA, 19 nt, Artificial Sequence
  Description of Artificial Sequence: Synthetic oligonucleotide
  Antisense strand to SEQ ID NO: 1157458
cuuuccagaacuccgaacc

SEQ ID NO: 1157460 - RNA, 19 nt, Artificial Sequence
  Description of Artificial Sequence: Synthetic oligonucleotide
  Sense strand starting at position 2367 of SEQ ID NO: 916447
cuuugaaacucagugucau

SEQ ID NO: 1157461 - RNA, 19 nt, Artificial Sequence
  Description of Artificial Sequence: Synthetic oligonucleotide
  Antisense strand to SEQ ID NO: 1157460
augacacugaguuucaaag

SEQ ID NO: 1157462 - RNA, 19 nt, Artificial Sequence
  Description of Artificial Sequence: Synthetic oligonucleotide
  Sense strand starting at position 2368 of SEQ ID NO: 916447
uuugaaacucagugucaua

SEQ ID NO: 1157463 - RNA, 19 nt, Artificial Sequence
  Description of Artificial Sequence: Synthetic oligonucleotide
  Antisense strand to SEQ ID NO: 1157462
uaugacacugaguuucaaa

SEQ ID NO: 1157464 - RNA, 19 nt, Artificial Sequence
  Description of Artificial Sequence: Synthetic oligonucleotide
  Sense strand starting at position 2378 of SEQ ID NO: 916447
agugucauacucuaggauu

SEQ ID NO: 1157465 - RNA, 19 nt, Artificial Sequence
  Description of Artificial Sequence: Synthetic oligonucleotide
  Antisense strand to SEQ ID NO: 1157464
aauccuagaguaugacacu

SEQ ID NO: 1157466 - RNA, 19 nt, Artificial Sequence
  Description of Artificial Sequence: Synthetic oligonucleotide
  Sense strand starting at position 2535 of SEQ ID NO: 916447
gagcuuugauuuggagacu

SEQ ID NO: 1157467 - RNA, 19 nt, Artificial Sequence
  Description of Artificial Sequence: Synthetic oligonucleotide
  Antisense strand to SEQ ID NO: 1157466
agucuccaaaucaaagcuc

SEQ ID NO: 1157468 - RNA, 19 nt, Artificial Sequence
  Description of Artificial Sequence: Synthetic oligonucleotide
  Sense strand starting at position 2898 of SEQ ID NO: 916447
cuggcuugccaucaaguua

SEQ ID NO: 1157469 - RNA, 19 nt, Artificial Sequence
  Description of Artificial Sequence: Synthetic oligonucleotide
  Antisense strand to SEQ ID NO: 1157468
uaacuugauggcaagccag

SEQ ID NO: 1157470 - RNA, 19 nt, Artificial Sequence
  Description of Artificial Sequence: Synthetic oligonucleotide
  Sense strand starting at position 2933 of SEQ ID NO: 916447
gcgccaggauuuggaauaa

SEQ ID NO: 1157471 - RNA, 19 nt, Artificial Sequence
  Description of Artificial Sequence: Synthetic oligonucleotide
  Antisense strand to SEQ ID NO: 1157470
uuauuccaaauccuggcgc

SEQ ID NO: 1157472 - RNA, 19 nt, Artificial Sequence
  Description of Artificial Sequence: Synthetic oligonucleotide
  Sense strand starting at position 3046 of SEQ ID NO: 916447
gaaugauacuuugcagaag

SEQ ID NO: 1157473 - RNA, 19 nt, Artificial Sequence
  Description of Artificial Sequence: Synthetic oligonucleotide
  Antisense strand to SEQ ID NO: 1157472
cuucugcaaaguaucauuc

SEQ ID NO: 1157474 - RNA, 19 nt, Artificial Sequence
  Description of Artificial Sequence: Synthetic oligonucleotide
  Sense strand starting at position 3049 of SEQ ID NO: 916447
ugauacuuugcagaaggca

SEQ ID NO: 1157475 - RNA, 19 nt, Artificial Sequence
  Description of Artificial Sequence: Synthetic oligonucleotide
  Antisense strand to SEQ ID NO: 1157474
ugccuucugcaaaguauca

SEQ ID NO: 1157476 - RNA, 19 nt, Artificial Sequence
  Description of Artificial Sequence: Synthetic oligonucleotide
  Sense strand starting at position 3147 of SEQ ID NO: 916447
cuuagugucugacuuucua

SEQ ID NO: 1157477 - RNA, 19 nt, Artificial Sequence
  Description of Artificial Sequence: Synthetic oligonucleotide
  Antisense strand to SEQ ID NO: 1157476
uagaaagucagacacuaag

SEQ ID NO: 1157478 - RNA, 19 nt, Artificial Sequence
  Description of Artificial Sequence: Synthetic oligonucleotide
  Sense strand starting at position 3253 of SEQ ID NO: 916447
uuacguucuaguuacggaa

SEQ ID NO: 1157479 - RNA, 19 nt, Artificial Sequence
  Description of Artificial Sequence: Synthetic oligonucleotide
  Antisense strand to SEQ ID NO: 1157478
uuccguaacuagaacguaa

SEQ ID NO: 1157480 - RNA, 19 nt, Artificial Sequence
  Description of Artificial Sequence: Synthetic oligonucleotide
  Sense strand starting at position 3283 of SEQ ID NO: 916447
ccagucuguccuuggcaga

SEQ ID NO: 1157481 - RNA, 19 nt, Artificial Sequence
  Description of Artificial Sequence: Synthetic oligonucleotide
  Antisense strand to SEQ ID NO: 1157480
ucugccaaggacagacugg

SEQ ID NO: 1157482 - RNA, 19 nt, Artificial Sequence
  Description of Artificial Sequence: Synthetic oligonucleotide
  Sense strand starting at position 3284 of SEQ ID NO: 916447
cagucuguccuuggcagaa

SEQ ID NO: 1157483 - RNA, 19 nt, Artificial Sequence
  Description of Artificial Sequence: Synthetic oligonucleotide
  Antisense strand to SEQ ID NO: 1157482
uucugccaaggacagacug

SEQ ID NO: 1157484 - RNA, 19 nt, Artificial Sequence
  Description of Artificial Sequence: Synthetic oligonucleotide
  Sense strand starting at position 3319 of SEQ ID NO: 916447
ggacuugccuccuaaugac

SEQ ID NO: 1157485 - RNA, 19 nt, Artificial Sequence
  Description of Artificial Sequence: Synthetic oligonucleotide
  Antisense strand to SEQ ID NO: 1157484
gucauuaggaggcaagucc

SEQ ID NO: 1157486 - RNA, 19 nt, Artificial Sequence
  Description of Artificial Sequence: Synthetic oligonucleotide
  Sense strand starting at position 3397 of SEQ ID NO: 916447
uuuagucuccugggcuaga

SEQ ID NO: 1157487 - RNA, 19 nt, Artificial Sequence
  Description of Artificial Sequence: Synthetic oligonucleotide
  Antisense strand to SEQ ID NO: 1157486
ucuagcccaggagacuaaa

SEQ ID NO: 1157488 - RNA, 19 nt, Artificial Sequence
  Description of Artificial Sequence: Synthetic oligonucleotide
  Sense strand starting at position 3398 of SEQ ID NO: 916447
uuagucuccugggcuagaa

SEQ ID NO: 1157489 - RNA, 19 nt, Artificial Sequence
  Description of Artificial Sequence: Synthetic oligonucleotide
  Antisense strand to SEQ ID NO: 1157488
uucuagcccaggagacuaa

SEQ ID NO: 1157490 - RNA, 19 nt, Artificial Sequence
  Description of Artificial Sequence: Synthetic oligonucleotide
  Sense strand starting at position 3478 of SEQ ID NO: 916447
gugcuccaggcuugucauu

SEQ ID NO: 1157491 - RNA, 19 nt, Artificial Sequence
  Description of Artificial Sequence: Synthetic oligonucleotide
  Antisense strand to SEQ ID NO: 1157490
aaugacaagccuggagcac

SEQ ID NO: 1157492 - RNA, 19 nt, Artificial Sequence
  Description of Artificial Sequence: Synthetic oligonucleotide
  Sense strand starting at position 3504 of SEQ ID NO: 916447
ucugaaguauaucucagau

SEQ ID NO: 1157493 - RNA, 19 nt, Artificial Sequence
  Description of Artificial Sequence: Synthetic oligonucleotide
  Antisense strand to SEQ ID NO: 1157492
aucugagauauacuucaga

SEQ ID NO: 1157494 - RNA, 19 nt, Artificial Sequence
  Description of Artificial Sequence: Synthetic oligonucleotide
  Sense strand starting at position 3506 of SEQ ID NO: 916447
ugaaguauaucucagauuu

SEQ ID NO: 1157495 - RNA, 19 nt, Artificial Sequence
  Description of Artificial Sequence: Synthetic oligonucleotide
  Antisense strand to SEQ ID NO: 1157494
aaaucugagauauacuuca

SEQ ID NO: 1157496 - RNA, 19 nt, Artificial Sequence
  Description of Artificial Sequence: Synthetic oligonucleotide
  Sense strand starting at position 3531 of SEQ ID NO: 916447
uuuccacugccagagaguu

SEQ ID NO: 1157497 - RNA, 19 nt, Artificial Sequence
  Description of Artificial Sequence: Synthetic oligonucleotide
  Antisense strand to SEQ ID NO: 1157496
aacucucuggcaguggaaa

SEQ ID NO: 1157498 - RNA, 19 nt, Artificial Sequence
  Description of Artificial Sequence: Synthetic oligonucleotide
  Sense strand starting at position 3633 of SEQ ID NO: 916447
accaaaugccuacgagguu

SEQ ID NO: 1157499 - RNA, 19 nt, Artificial Sequence
  Description of Artificial Sequence: Synthetic oligonucleotide
  Antisense strand to SEQ ID NO: 1157498
aaccucguaggcauuuggu

SEQ ID NO: 1157500 - RNA, 19 nt, Artificial Sequence
  Description of Artificial Sequence: Synthetic oligonucleotide
  Sense strand starting at position 3674 of SEQ ID NO: 916447
uugggauccaagugaaauc

SEQ ID NO: 1157501 - RNA, 19 nt, Artificial Sequence
  Description of Artificial Sequence: Synthetic oligonucleotide
  Antisense strand to SEQ ID NO: 1157500
gauuucacuuggaucccaa

SEQ ID NO: 1157502 - RNA, 19 nt, Artificial Sequence
  Description of Artificial Sequence: Synthetic oligonucleotide
  Sense strand starting at position 3685 of SEQ ID NO: 916447
gugaaaucaggucgaaaca

SEQ ID NO: 1157503 - RNA, 19 nt, Artificial Sequence
  Description of Artificial Sequence: Synthetic oligonucleotide
  Antisense strand to SEQ ID NO: 1157502
uguuucgaccugauuucac

SEQ ID NO: 1157504 - RNA, 19 nt, Artificial Sequence
  Description of Artificial Sequence: Synthetic oligonucleotide
  Sense strand starting at position 3798 of SEQ ID NO: 916447
acccaucugucaggugaau

SEQ ID NO: 1157505 - RNA, 19 nt, Artificial Sequence
  Description of Artificial Sequence: Synthetic oligonucleotide
  Antisense strand to SEQ ID NO: 1157504
auucaccugacagaugggu

SEQ ID NO: 1157506 - RNA, 19 nt, Artificial Sequence
  Description of Artificial Sequence: Synthetic oligonucleotide
  Sense strand starting at position 3862 of SEQ ID NO: 916447
ucuagugggugucuauaga

SEQ ID NO: 1157507 - RNA, 19 nt, Artificial Sequence
  Description of Artificial Sequence: Synthetic oligonucleotide
  Antisense strand to SEQ ID NO: 1157506
ucuauagacacccacuaga

SEQ ID NO: 1157508 - RNA, 19 nt, Artificial Sequence
  Description of Artificial Sequence: Synthetic oligonucleotide
  Sense strand starting at position 3870 of SEQ ID NO: 916447
gugucuauagaccagucaa

SEQ ID NO: 1157509 - RNA, 19 nt, Artificial Sequence
  Description of Artificial Sequence: Synthetic oligonucleotide
  Antisense strand to SEQ ID NO: 1157508
uugacuggucuauagacac

SEQ ID NO: 1157510 - RNA, 19 nt, Artificial Sequence
  Description of Artificial Sequence: Synthetic oligonucleotide
  Sense strand starting at position 3972 of SEQ ID NO: 916447
cugucuccugaaugugaau

SEQ ID NO: 1157511 - RNA, 19 nt, Artificial Sequence
  Description of Artificial Sequence: Synthetic oligonucleotide
  Antisense strand to SEQ ID NO: 1157510
auucacauucaggagacag

SEQ ID NO: 1157512 - RNA, 19 nt, Artificial Sequence
  Description of Artificial Sequence: Synthetic oligonucleotide
  Sense strand starting at position 3974 of SEQ ID NO: 916447
gucuccugaaugugaaugu

SEQ ID NO: 1157513 - RNA, 19 nt, Artificial Sequence
  Description of Artificial Sequence: Synthetic oligonucleotide
  Antisense strand to SEQ ID NO: 1157512
acauucacauucaggagac

SEQ ID NO: 1157514 - RNA, 19 nt, Artificial Sequence
  Description of Artificial Sequence: Synthetic oligonucleotide
  Sense strand starting at position 3978 of SEQ ID NO: 916447
ccugaaugugaauguguau

SEQ ID NO: 1157515 - RNA, 19 nt, Artificial Sequence
  Description of Artificial Sequence: Synthetic oligonucleotide
  Antisense strand to SEQ ID NO: 1157514
auacacauucacauucagg

SEQ ID NO: 1157516 - RNA, 19 nt, Artificial Sequence
  Description of Artificial Sequence: Synthetic oligonucleotide
  Sense strand starting at position 131 of SEQ ID NO: 916448
acgcuucuccuccaagaaa

SEQ ID NO: 1157517 - RNA, 19 nt, Artificial Sequence
  Description of Artificial Sequence: Synthetic oligonucleotide
  Antisense strand to SEQ ID NO: 1157516
uuucuuggaggagaagcgu

SEQ ID NO: 1157518 - RNA, 19 nt, Artificial Sequence
  Description of Artificial Sequence: Synthetic oligonucleotide
  Sense strand starting at position 206 of SEQ ID NO: 916448
aucagcugguucucauauu

SEQ ID NO: 1157519 - RNA, 19 nt, Artificial Sequence
  Description of Artificial Sequence: Synthetic oligonucleotide
  Antisense strand to SEQ ID NO: 1157518
aauaugagaaccagcugau

SEQ ID NO: 1157520 - RNA, 19 nt, Artificial Sequence
  Description of Artificial Sequence: Synthetic oligonucleotide
  Sense strand starting at position 218 of SEQ ID NO: 916448
ucauauuugucagcccuau

SEQ ID NO: 1157521 - RNA, 19 nt, Artificial Sequence
  Description of Artificial Sequence: Synthetic oligonucleotide
  Antisense strand to SEQ ID NO: 1157520
auagggcugacaaauauga

SEQ ID NO: 1157522 - RNA, 19 nt, Artificial Sequence
  Description of Artificial Sequence: Synthetic oligonucleotide
  Sense strand starting at position 313 of SEQ ID NO: 916448
ucaauagaguaugccaaua

SEQ ID NO: 1157523 - RNA, 19 nt, Artificial Sequence
  Description of Artificial Sequence: Synthetic oligonucleotide
  Antisense strand to SEQ ID NO: 1157522
uauuggcauacucuauuga

SEQ ID NO: 1157524 - RNA, 19 nt, Artificial Sequence
  Description of Artificial Sequence: Synthetic oligonucleotide
  Sense strand starting at position 443 of SEQ ID NO: 916448
uuuguaauaugcuuagagu

SEQ ID NO: 1157525 - RNA, 19 nt, Artificial Sequence
  Description of Artificial Sequence: Synthetic oligonucleotide
  Antisense strand to SEQ ID NO: 1157524
acucuaagcauauuacaaa

SEQ ID NO: 1157526 - RNA, 19 nt, Artificial Sequence
  Description of Artificial Sequence: Synthetic oligonucleotide
  Sense strand starting at position 444 of SEQ ID NO: 916448
uuguaauaugcuuagagua

SEQ ID NO: 1157527 - RNA, 19 nt, Artificial Sequence
  Description of Artificial Sequence: Synthetic oligonucleotide
  Antisense strand to SEQ ID NO: 1157526
uacucuaagcauauuacaa

SEQ ID NO: 1157528 - RNA, 19 nt, Artificial Sequence
  Description of Artificial Sequence: Synthetic oligonucleotide
  Sense strand starting at position 490 of SEQ ID NO: 916448
gcugcauuacuacagagua

SEQ ID NO: 1157529 - RNA, 19 nt, Artificial Sequence
  Description of Artificial Sequence: Synthetic oligonucleotide
  Antisense strand to SEQ ID NO: 1157528
uacucuguaguaaugcagc

SEQ ID NO: 1157530 - RNA, 19 nt, Artificial Sequence
  Description of Artificial Sequence: Synthetic oligonucleotide
  Sense strand starting at position 602 of SEQ ID NO: 916448
acagacuauuaguuacuau

SEQ ID NO: 1157531 - RNA, 19 nt, Artificial Sequence
  Description of Artificial Sequence: Synthetic oligonucleotide
  Antisense strand to SEQ ID NO: 1157530
auaguaacuaauagucugu

SEQ ID NO: 1157532 - RNA, 19 nt, Artificial Sequence
  Description of Artificial Sequence: Synthetic oligonucleotide
  Sense strand starting at position 619 of SEQ ID NO: 916448
auuaguguucuguaaacuu

SEQ ID NO: 1157533 - RNA, 19 nt, Artificial Sequence
  Description of Artificial Sequence: Synthetic oligonucleotide
  Antisense strand to SEQ ID NO: 1157532
aaguuuacagaacacuaau

SEQ ID NO: 1157534 - RNA, 19 nt, Artificial Sequence
  Description of Artificial Sequence: Synthetic oligonucleotide
  Sense strand starting at position 635 of SEQ ID NO: 916448
cuuaaauuaguuuggagaa

SEQ ID NO: 1157535 - RNA, 19 nt, Artificial Sequence
  Description of Artificial Sequence: Synthetic oligonucleotide
  Antisense strand to SEQ ID NO: 1157534
uucuccaaacuaauuuaag

SEQ ID NO: 1157536 - RNA, 19 nt, Artificial Sequence
  Description of Artificial Sequence: Synthetic oligonucleotide
  Sense strand starting at position 773 of SEQ ID NO: 916448
cguaucgagcaguacuuaa

SEQ ID NO: 1157537 - RNA, 19 nt, Artificial Sequence
  Description of Artificial Sequence: Synthetic oligonucleotide
  Antisense strand to SEQ ID NO: 1157536
uuaaguacugcucgauacg

SEQ ID NO: 1157538 - RNA, 19 nt, Artificial Sequence
  Description of Artificial Sequence: Synthetic oligonucleotide
  Sense strand starting at position 788 of SEQ ID NO: 916448
uuaaauuccucugcuggua

SEQ ID NO: 1157539 - RNA, 19 nt, Artificial Sequence
  Description of Artificial Sequence: Synthetic oligonucleotide
  Antisense strand to SEQ ID NO: 1157538
uaccagcagaggaauuuaa

SEQ ID NO: 1157540 - RNA, 19 nt, Artificial Sequence
  Description of Artificial Sequence: Synthetic oligonucleotide
  Sense strand starting at position 804 of SEQ ID NO: 916448
guaaaugcuccacagccau

SEQ ID NO: 1157541 - RNA, 19 nt, Artificial Sequence
  Description of Artificial Sequence: Synthetic oligonucleotide
  Antisense strand to SEQ ID NO: 1157540
auggcuguggagcauuuac

SEQ ID NO: 1157542 - RNA, 19 nt, Artificial Sequence
  Description of Artificial Sequence: Synthetic oligonucleotide
  Sense strand starting at position 844 of SEQ ID NO: 916448
acuaaauaguuugagaaga

SEQ ID NO: 1157543 - RNA, 19 nt, Artificial Sequence
  Description of Artificial Sequence: Synthetic oligonucleotide
  Antisense strand to SEQ ID NO: 1157542
ucuucucaaacuauuuagu

SEQ ID NO: 1157544 - RNA, 19 nt, Artificial Sequence
  Description of Artificial Sequence: Synthetic oligonucleotide
  Sense strand starting at position 915 of SEQ ID NO: 916448
gcaugugucagcuuugcag

SEQ ID NO: 1157545 - RNA, 19 nt, Artificial Sequence
  Description of Artificial Sequence: Synthetic oligonucleotide
  Antisense strand to SEQ ID NO: 1157544
cugcaaagcugacacaugc

SEQ ID NO: 1157546 - RNA, 19 nt, Artificial Sequence
  Description of Artificial Sequence: Synthetic oligonucleotide
  Sense strand starting at position 967 of SEQ ID NO: 916448
aagcgauucccagagcaaa

SEQ ID NO: 1157547 - RNA, 19 nt, Artificial Sequence
  Description of Artificial Sequence: Synthetic oligonucleotide
  Antisense strand to SEQ ID NO: 1157546
uuugcucugggaaucgcuu

SEQ ID NO: 1157548 - RNA, 19 nt, Artificial Sequence
  Description of Artificial Sequence: Synthetic oligonucleotide
  Sense strand starting at position 970 of SEQ ID NO: 916448
cgauucccagagcaaauua

SEQ ID NO: 1157549 - RNA, 19 nt, Artificial Sequence
  Description of Artificial Sequence: Synthetic oligonucleotide
  Antisense strand to SEQ ID NO: 1157548
uaauuugcucugggaaucg

SEQ ID NO: 1157550 - RNA, 19 nt, Artificial Sequence
  Description of Artificial Sequence: Synthetic oligonucleotide
  Sense strand starting at position 981 of SEQ ID NO: 916448
gcaaauuaucucgaacagc

SEQ ID NO: 1157551 - RNA, 19 nt, Artificial Sequence
  Description of Artificial Sequence: Synthetic oligonucleotide
  Antisense strand to SEQ ID NO: 1157550
gcuguucgagauaauuugc

SEQ ID NO: 1157552 - RNA, 19 nt, Artificial Sequence
  Description of Artificial Sequence: Synthetic oligonucleotide
  Sense strand starting at position 1118 of SEQ ID NO: 916448
acacuugcauacuccgaaa

SEQ ID NO: 1157553 - RNA, 19 nt, Artificial Sequence
  Description of Artificial Sequence: Synthetic oligonucleotide
  Antisense strand to SEQ ID NO: 1157552
uuucggaguaugcaagugu

SEQ ID NO: 1157554 - RNA, 19 nt, Artificial Sequence
  Description of Artificial Sequence: Synthetic oligonucleotide
  Sense strand starting at position 1148 of SEQ ID NO: 916448
ccgugaauaccagagguua

SEQ ID NO: 1157555 - RNA, 19 nt, Artificial Sequence
  Description of Artificial Sequence: Synthetic oligonucleotide
  Antisense strand to SEQ ID NO: 1157554
uaaccucugguauucacgg

SEQ ID NO: 1157556 - RNA, 19 nt, Artificial Sequence
  Description of Artificial Sequence: Synthetic oligonucleotide
  Sense strand starting at position 1150 of SEQ ID NO: 916448
gugaauaccagagguuaca

SEQ ID NO: 1157557 - RNA, 19 nt, Artificial Sequence
  Description of Artificial Sequence: Synthetic oligonucleotide
  Antisense strand to SEQ ID NO: 1157556
uguaaccucugguauucac

SEQ ID NO: 1157558 - RNA, 19 nt, Artificial Sequence
  Description of Artificial Sequence: Synthetic oligonucleotide
  Sense strand starting at position 1205 of SEQ ID NO: 916448
gaaggcucccaaugcugaa

SEQ ID NO: 1157559 - RNA, 19 nt, Artificial Sequence
  Description of Artificial Sequence: Synthetic oligonucleotide
  Antisense strand to SEQ ID NO: 1157558
uucagcauugggagccuuc

SEQ ID NO: 1157560 - RNA, 19 nt, Artificial Sequence
  Description of Artificial Sequence: Synthetic oligonucleotide
  Sense strand starting at position 1218 of SEQ ID NO: 916448
gcugaaacgcucgaccuau

SEQ ID NO: 1157561 - RNA, 19 nt, Artificial Sequence
  Description of Artificial Sequence: Synthetic oligonucleotide
  Antisense strand to SEQ ID NO: 1157560
auaggucgagcguuucagc

SEQ ID NO: 1157562 - RNA, 19 nt, Artificial Sequence
  Description of Artificial Sequence: Synthetic oligonucleotide
  Sense strand starting at position 1273 of SEQ ID NO: 916448
gggucauuauaucccaaac

SEQ ID NO: 1157563 - RNA, 19 nt, Artificial Sequence
  Description of Artificial Sequence: Synthetic oligonucleotide
  Antisense strand to SEQ ID NO: 1157562
guuugggauauaaugaccc

SEQ ID NO: 1157564 - RNA, 19 nt, Artificial Sequence
  Description of Artificial Sequence: Synthetic oligonucleotide
  Sense strand starting at position 1510 of SEQ ID NO: 916448
cucagucaucccgacagca

SEQ ID NO: 1157565 - RNA, 19 nt, Artificial Sequence
  Description of Artificial Sequence: Synthetic oligonucleotide
  Antisense strand to SEQ ID NO: 1157564
ugcugucgggaugacugag

SEQ ID NO: 1157566 - RNA, 19 nt, Artificial Sequence
  Description of Artificial Sequence: Synthetic oligonucleotide
  Sense strand starting at position 1512 of SEQ ID NO: 916448
cagucaucccgacagcaug

SEQ ID NO: 1157567 - RNA, 19 nt, Artificial Sequence
  Description of Artificial Sequence: Synthetic oligonucleotide
  Antisense strand to SEQ ID NO: 1157566
caugcugucgggaugacug

SEQ ID NO: 1157568 - RNA, 19 nt, Artificial Sequence
  Description of Artificial Sequence: Synthetic oligonucleotide
  Sense strand starting at position 1966 of SEQ ID NO: 916448
ccagcuucccagcgagaga

SEQ ID NO: 1157569 - RNA, 19 nt, Artificial Sequence
  Description of Artificial Sequence: Synthetic oligonucleotide
  Antisense strand to SEQ ID NO: 1157568
ucucucgcugggaagcugg

SEQ ID NO: 1157570 - RNA, 19 nt, Artificial Sequence
  Description of Artificial Sequence: Synthetic oligonucleotide
  Sense strand starting at position 2303 of SEQ ID NO: 916448
gagguucugggcuagcaga

SEQ ID NO: 1157571 - RNA, 19 nt, Artificial Sequence
  Description of Artificial Sequence: Synthetic oligonucleotide
  Antisense strand to SEQ ID NO: 1157570
ucugcuagcccagaaccuc

SEQ ID NO: 1157572 - RNA, 19 nt, Artificial Sequence
  Description of Artificial Sequence: Synthetic oligonucleotide
  Sense strand starting at position 2703 of SEQ ID NO: 916448
cguggaucuggugaacgau

SEQ ID NO: 1157573 - RNA, 19 nt, Artificial Sequence
  Description of Artificial Sequence: Synthetic oligonucleotide
  Antisense strand to SEQ ID NO: 1157572
aucguucaccagauccacg

SEQ ID NO: 1157574 - RNA, 19 nt, Artificial Sequence
  Description of Artificial Sequence: Synthetic oligonucleotide
  Sense strand starting at position 2706 of SEQ ID NO: 916448
ggaucuggugaacgauauu

SEQ ID NO: 1157575 - RNA, 19 nt, Artificial Sequence
  Description of Artificial Sequence: Synthetic oligonucleotide
  Antisense strand to SEQ ID NO: 1157574
aauaucguucaccagaucc

SEQ ID NO: 1157576 - RNA, 19 nt, Artificial Sequence
  Description of Artificial Sequence: Synthetic oligonucleotide
  Sense strand starting at position 2808 of SEQ ID NO: 916448
gcuaaagauuucuaaacug

SEQ ID NO: 1157577 - RNA, 19 nt, Artificial Sequence
  Description of Artificial Sequence: Synthetic oligonucleotide
  Antisense strand to SEQ ID NO: 1157576
caguuuagaaaucuuuagc

SEQ ID NO: 1157578 - RNA, 19 nt, Artificial Sequence
  Description of Artificial Sequence: Synthetic oligonucleotide
  Sense strand starting at position 2930 of SEQ ID NO: 916448
gcaugcuucgauuaucaau

SEQ ID NO: 1157579 - RNA, 19 nt, Artificial Sequence
  Description of Artificial Sequence: Synthetic oligonucleotide
  Antisense strand to SEQ ID NO: 1157578
auugauaaucgaagcaugc

SEQ ID NO: 1157580 - RNA, 19 nt, Artificial Sequence
  Description of Artificial Sequence: Synthetic oligonucleotide
  Sense strand starting at position 3018 of SEQ ID NO: 916448
uugggcauucaggaguaau

SEQ ID NO: 1157581 - RNA, 19 nt, Artificial Sequence
  Description of Artificial Sequence: Synthetic oligonucleotide
  Antisense strand to SEQ ID NO: 1157580
auuacuccugaaugcccaa

SEQ ID NO: 1157582 - RNA, 19 nt, Artificial Sequence
  Description of Artificial Sequence: Synthetic oligonucleotide
  Sense strand starting at position 3197 of SEQ ID NO: 916448
acaaguaccucagugacau

SEQ ID NO: 1157583 - RNA, 19 nt, Artificial Sequence
  Description of Artificial Sequence: Synthetic oligonucleotide
  Antisense strand to SEQ ID NO: 1157582
augucacugagguacuugu

SEQ ID NO: 1157584 - RNA, 19 nt, Artificial Sequence
  Description of Artificial Sequence: Synthetic oligonucleotide
  Sense strand starting at position 3222 of SEQ ID NO: 916448
ucacuagugcuugaacaca

SEQ ID NO: 1157585 - RNA, 19 nt, Artificial Sequence
  Description of Artificial Sequence: Synthetic oligonucleotide
  Antisense strand to SEQ ID NO: 1157584
uguguucaagcacuaguga

SEQ ID NO: 1157586 - RNA, 19 nt, Artificial Sequence
  Description of Artificial Sequence: Synthetic oligonucleotide
  Sense strand starting at position 3321 of SEQ ID NO: 916448
augagaaccugagagguua

SEQ ID NO: 1157587 - RNA, 19 nt, Artificial Sequence
  Description of Artificial Sequence: Synthetic oligonucleotide
  Antisense strand to SEQ ID NO: 1157586
uaaccucucagguucucau

SEQ ID NO: 1157588 - RNA, 19 nt, Artificial Sequence
  Description of Artificial Sequence: Synthetic oligonucleotide
  Sense strand starting at position 3359 of SEQ ID NO: 916448
ucaaguaaugaauagcagu

SEQ ID NO: 1157589 - RNA, 19 nt, Artificial Sequence
  Description of Artificial Sequence: Synthetic oligonucleotide
  Antisense strand to SEQ ID NO: 1157588
acugcuauucauuacuuga

SEQ ID NO: 1157590 - RNA, 19 nt, Artificial Sequence
  Description of Artificial Sequence: Synthetic oligonucleotide
  Sense strand starting at position 3453 of SEQ ID NO: 916448
gcagguuuguaaguagaug

SEQ ID NO: 1157591 - RNA, 19 nt, Artificial Sequence
  Description of Artificial Sequence: Synthetic oligonucleotide
  Antisense strand to SEQ ID NO: 1157590
caucuacuuacaaaccugc

SEQ ID NO: 1157592 - RNA, 19 nt, Artificial Sequence
  Description of Artificial Sequence: Synthetic oligonucleotide
  Sense strand starting at position 3829 of SEQ ID NO: 916448
agccgauaucgcgucauua

SEQ ID NO: 1157593 - RNA, 19 nt, Artificial Sequence
  Description of Artificial Sequence: Synthetic oligonucleotide
  Antisense strand to SEQ ID NO: 1157592
uaaugacgcgauaucggcu

SEQ ID NO: 1157594 - RNA, 19 nt, Artificial Sequence
  Description of Artificial Sequence: Synthetic oligonucleotide
  Sense strand starting at position 3830 of SEQ ID NO: 916448
gccgauaucgcgucauuac

SEQ ID NO: 1157595 - RNA, 19 nt, Artificial Sequence
  Description of Artificial Sequence: Synthetic oligonucleotide
  Antisense strand to SEQ ID NO: 1157594
guaaugacgcgauaucggc

SEQ ID NO: 1157596 - RNA, 19 nt, Artificial Sequence
  Description of Artificial Sequence: Synthetic oligonucleotide
  Sense strand starting at position 238 of SEQ ID NO: 916449
aguauuguccaucagggau

SEQ ID NO: 1157597 - RNA, 19 nt, Artificial Sequence
  Description of Artificial Sequence: Synthetic oligonucleotide
  Antisense strand to SEQ ID NO: 1157596
aucccugauggacaauacu

SEQ ID NO: 1157598 - RNA, 19 nt, Artificial Sequence
  Description of Artificial Sequence: Synthetic oligonucleotide
  Sense strand starting at position 329 of SEQ ID NO: 916449
cugugaaucugacugauug

SEQ ID NO: 1157599 - RNA, 19 nt, Artificial Sequence
  Description of Artificial Sequence: Synthetic oligonucleotide
  Antisense strand to SEQ ID NO: 1157598
caaucagucagauucacag

SEQ ID NO: 1157600 - RNA, 19 nt, Artificial Sequence
  Description of Artificial Sequence: Synthetic oligonucleotide
  Sense strand starting at position 337 of SEQ ID NO: 916449
cugacugauugccuaggua

SEQ ID NO: 1157601 - RNA, 19 nt, Artificial Sequence
  Description of Artificial Sequence: Synthetic oligonucleotide
  Antisense strand to SEQ ID NO: 1157600
uaccuaggcaaucagucag

SEQ ID NO: 1157602 - RNA, 19 nt, Artificial Sequence
  Description of Artificial Sequence: Synthetic oligonucleotide
  Sense strand starting at position 340 of SEQ ID NO: 916449
acugauugccuagguagaa

SEQ ID NO: 1157603 - RNA, 19 nt, Artificial Sequence
  Description of Artificial Sequence: Synthetic oligonucleotide
  Antisense strand to SEQ ID NO: 1157602
uucuaccuaggcaaucagu

SEQ ID NO: 1157604 - RNA, 19 nt, Artificial Sequence
  Description of Artificial Sequence: Synthetic oligonucleotide
  Sense strand starting at position 341 of SEQ ID NO: 916449
cugauugccuagguagaaa

SEQ ID NO: 1157605 - RNA, 19 nt, Artificial Sequence
  Description of Artificial Sequence: Synthetic oligonucleotide
  Antisense strand to SEQ ID NO: 1157604
uuucuaccuaggcaaucag

SEQ ID NO: 1157606 - RNA, 19 nt, Artificial Sequence
  Description of Artificial Sequence: Synthetic oligonucleotide
  Sense strand starting at position 370 of SEQ ID NO: 916449
gguggccucagugauacau

SEQ ID NO: 1157607 - RNA, 19 nt, Artificial Sequence
  Description of Artificial Sequence: Synthetic oligonucleotide
  Antisense strand to SEQ ID NO: 1157606
auguaucacugaggccacc

SEQ ID NO: 1157608 - RNA, 19 nt, Artificial Sequence
  Description of Artificial Sequence: Synthetic oligonucleotide
  Sense strand starting at position 386 of SEQ ID NO: 916449
cauugauacuguuuauggu

SEQ ID NO: 1157609 - RNA, 19 nt, Artificial Sequence
  Description of Artificial Sequence: Synthetic oligonucleotide
  Antisense strand to SEQ ID NO: 1157608
accauaaacaguaucaaug

SEQ ID NO: 1157610 - RNA, 19 nt, Artificial Sequence
  Description of Artificial Sequence: Synthetic oligonucleotide
  Sense strand starting at position 604 of SEQ ID NO: 916449
aaguuaugaucucuggauu

SEQ ID NO: 1157611 - RNA, 19 nt, Artificial Sequence
  Description of Artificial Sequence: Synthetic oligonucleotide
  Antisense strand to SEQ ID NO: 1157610
aauccagagaucauaacuu

SEQ ID NO: 1157612 - RNA, 19 nt, Artificial Sequence
  Description of Artificial Sequence: Synthetic oligonucleotide
  Sense strand starting at position 605 of SEQ ID NO: 916449
aguuaugaucucuggauug

SEQ ID NO: 1157613 - RNA, 19 nt, Artificial Sequence
  Description of Artificial Sequence: Synthetic oligonucleotide
  Antisense strand to SEQ ID NO: 1157612
caauccagagaucauaacu

SEQ ID NO: 1157614 - RNA, 19 nt, Artificial Sequence
  Description of Artificial Sequence: Synthetic oligonucleotide
  Sense strand starting at position 607 of SEQ ID NO: 916449
uuaugaucucuggauuguc

SEQ ID NO: 1157615 - RNA, 19 nt, Artificial Sequence
  Description of Artificial Sequence: Synthetic oligonucleotide
  Antisense strand to SEQ ID NO: 1157614
gacaauccagagaucauaa

SEQ ID NO: 1157616 - RNA, 19 nt, Artificial Sequence
  Description of Artificial Sequence: Synthetic oligonucleotide
  Sense strand starting at position 663 of SEQ ID NO: 916449
agcuguuugccagaaauau

SEQ ID NO: 1157617 - RNA, 19 nt, Artificial Sequence
  Description of Artificial Sequence: Synthetic oligonucleotide
  Antisense strand to SEQ ID NO: 1157616
auauuucuggcaaacagcu

SEQ ID NO: 1157618 - RNA, 19 nt, Artificial Sequence
  Description of Artificial Sequence: Synthetic oligonucleotide
  Sense strand starting at position 1006 of SEQ ID NO: 916449
caaggauuguggucauaga

SEQ ID NO: 1157619 - RNA, 19 nt, Artificial Sequence
  Description of Artificial Sequence: Synthetic oligonucleotide
  Antisense strand to SEQ ID NO: 1157618
ucuaugaccacaauccuug

SEQ ID NO: 1157620 - RNA, 19 nt, Artificial Sequence
  Description of Artificial Sequence: Synthetic oligonucleotide
  Sense strand starting at position 1076 of SEQ ID NO: 916449
uguuccaguccacaucaau

SEQ ID NO: 1157621 - RNA, 19 nt, Artificial Sequence
  Description of Artificial Sequence: Synthetic oligonucleotide
  Antisense strand to SEQ ID NO: 1157620
auugauguggacuggaaca

SEQ ID NO: 1157622 - RNA, 19 nt, Artificial Sequence
  Description of Artificial Sequence: Synthetic oligonucleotide
  Sense strand starting at position 1422 of SEQ ID NO: 916449
guugaaauccaaggccaga

SEQ ID NO: 1157623 - RNA, 19 nt, Artificial Sequence
  Description of Artificial Sequence: Synthetic oligonucleotide
  Antisense strand to SEQ ID NO: 1157622
ucuggccuuggauuucaac

SEQ ID NO: 1157624 - RNA, 19 nt, Artificial Sequence
  Description of Artificial Sequence: Synthetic oligonucleotide
  Sense strand starting at position 1487 of SEQ ID NO: 916449
ggugguugucgcucaggua

SEQ ID NO: 1157625 - RNA, 19 nt, Artificial Sequence
  Description of Artificial Sequence: Synthetic oligonucleotide
  Antisense strand to SEQ ID NO: 1157624
uaccugagcgacaaccacc

SEQ ID NO: 1157626 - RNA, 19 nt, Artificial Sequence
  Description of Artificial Sequence: Synthetic oligonucleotide
  Sense strand starting at position 1601 of SEQ ID NO: 916449
ggaggucccugaccacaua

SEQ ID NO: 1157627 - RNA, 19 nt, Artificial Sequence
  Description of Artificial Sequence: Synthetic oligonucleotide
  Antisense strand to SEQ ID NO: 1157626
uauguggucagggaccucc

SEQ ID NO: 1157628 - RNA, 19 nt, Artificial Sequence
  Description of Artificial Sequence: Synthetic oligonucleotide
  Sense strand starting at position 2465 of SEQ ID NO: 916449
ugacguaucauggacauau

SEQ ID NO: 1157629 - RNA, 19 nt, Artificial Sequence
  Description of Artificial Sequence: Synthetic oligonucleotide
  Antisense strand to SEQ ID NO: 1157628
auauguccaugauacguca

SEQ ID NO: 1157630 - RNA, 19 nt, Artificial Sequence
  Description of Artificial Sequence: Synthetic oligonucleotide
  Sense strand starting at position 2494 of SEQ ID NO: 916449
gcagauaucuaugcaauua

SEQ ID NO: 1157631 - RNA, 19 nt, Artificial Sequence
  Description of Artificial Sequence: Synthetic oligonucleotide
  Antisense strand to SEQ ID NO: 1157630
uaauugcauagauaucugc

SEQ ID NO: 1157632 - RNA, 19 nt, Artificial Sequence
  Description of Artificial Sequence: Synthetic oligonucleotide
  Sense strand starting at position 2591 of SEQ ID NO: 916449
guuuacaaagcaugacuau

SEQ ID NO: 1157633 - RNA, 19 nt, Artificial Sequence
  Description of Artificial Sequence: Synthetic oligonucleotide
  Antisense strand to SEQ ID NO: 1157632
auagucaugcuuuguaaac

SEQ ID NO: 1157634 - RNA, 19 nt, Artificial Sequence
  Description of Artificial Sequence: Synthetic oligonucleotide
  Sense strand starting at position 2628 of SEQ ID NO: 916449
uacagaugugagcagcaau

SEQ ID NO: 1157635 - RNA, 19 nt, Artificial Sequence
  Description of Artificial Sequence: Synthetic oligonucleotide
  Antisense strand to SEQ ID NO: 1157634
auugcugcucacaucugua

SEQ ID NO: 1157636 - RNA, 19 nt, Artificial Sequence
  Description of Artificial Sequence: Synthetic oligonucleotide
  Sense strand starting at position 2660 of SEQ ID NO: 916449
uagaaaccguccuuagaag

SEQ ID NO: 1157637 - RNA, 19 nt, Artificial Sequence
  Description of Artificial Sequence: Synthetic oligonucleotide
  Antisense strand to SEQ ID NO: 1157636
cuucuaaggacgguuucua

SEQ ID NO: 1157638 - RNA, 19 nt, Artificial Sequence
  Description of Artificial Sequence: Synthetic oligonucleotide
  Sense strand starting at position 2661 of SEQ ID NO: 916449
agaaaccguccuuagaagu

SEQ ID NO: 1157639 - RNA, 19 nt, Artificial Sequence
  Description of Artificial Sequence: Synthetic oligonucleotide
  Antisense strand to SEQ ID NO: 1157638
acuucuaaggacgguuucu

SEQ ID NO: 1157640 - RNA, 19 nt, Artificial Sequence
  Description of Artificial Sequence: Synthetic oligonucleotide
  Sense strand starting at position 2765 of SEQ ID NO: 916449
ggaguuugaggucagcuua

SEQ ID NO: 1157641 - RNA, 19 nt, Artificial Sequence
  Description of Artificial Sequence: Synthetic oligonucleotide
  Antisense strand to SEQ ID NO: 1157640
uaagcugaccucaaacucc

SEQ ID NO: 1157642 - RNA, 19 nt, Artificial Sequence
  Description of Artificial Sequence: Synthetic oligonucleotide
  Sense strand starting at position 3203 of SEQ ID NO: 916449
gcaagcuagccuucugcau

SEQ ID NO: 1157643 - RNA, 19 nt, Artificial Sequence
  Description of Artificial Sequence: Synthetic oligonucleotide
  Antisense strand to SEQ ID NO: 1157642
augcagaaggcuagcuugc

SEQ ID NO: 1157644 - RNA, 19 nt, Artificial Sequence
  Description of Artificial Sequence: Synthetic oligonucleotide
  Sense strand starting at position 3222 of SEQ ID NO: 916449
guuaaauaaauucggaugu

SEQ ID NO: 1157645 - RNA, 19 nt, Artificial Sequence
  Description of Artificial Sequence: Synthetic oligonucleotide
  Antisense strand to SEQ ID NO: 1157644
acauccgaauuuauuuaac

SEQ ID NO: 1157646 - RNA, 19 nt, Artificial Sequence
  Description of Artificial Sequence: Synthetic oligonucleotide
  Sense strand starting at position 3226 of SEQ ID NO: 916449
aauaaauucggauguauuc

SEQ ID NO: 1157647 - RNA, 19 nt, Artificial Sequence
  Description of Artificial Sequence: Synthetic oligonucleotide
  Antisense strand to SEQ ID NO: 1157646
gaauacauccgaauuuauu

SEQ ID NO: 1157648 - RNA, 19 nt, Artificial Sequence
  Description of Artificial Sequence: Synthetic oligonucleotide
  Sense strand starting at position 3236 of SEQ ID NO: 916449
gauguauuccuacagugca

SEQ ID NO: 1157649 - RNA, 19 nt, Artificial Sequence
  Description of Artificial Sequence: Synthetic oligonucleotide
  Antisense strand to SEQ ID NO: 1157648
ugcacuguaggaauacauc

SEQ ID NO: 1157650 - RNA, 19 nt, Artificial Sequence
  Description of Artificial Sequence: Synthetic oligonucleotide
  Sense strand starting at position 3381 of SEQ ID NO: 916449
ucaaguucuggccaaagua

SEQ ID NO: 1157651 - RNA, 19 nt, Artificial Sequence
  Description of Artificial Sequence: Synthetic oligonucleotide
  Antisense strand to SEQ ID NO: 1157650
uacuuuggccagaacuuga

SEQ ID NO: 1157652 - RNA, 19 nt, Artificial Sequence
  Description of Artificial Sequence: Synthetic oligonucleotide
  Sense strand starting at position 3393 of SEQ ID NO: 916449
caaaguaaugugggcagaa

SEQ ID NO: 1157653 - RNA, 19 nt, Artificial Sequence
  Description of Artificial Sequence: Synthetic oligonucleotide
  Antisense strand to SEQ ID NO: 1157652
uucugcccacauuacuuug

SEQ ID NO: 1157654 - RNA, 19 nt, Artificial Sequence
  Description of Artificial Sequence: Synthetic oligonucleotide
  Sense strand starting at position 3394 of SEQ ID NO: 916449
aaaguaaugugggcagaag

SEQ ID NO: 1157655 - RNA, 19 nt, Artificial Sequence
  Description of Artificial Sequence: Synthetic oligonucleotide
  Antisense strand to SEQ ID NO: 1157654
cuucugcccacauuacuuu

SEQ ID NO: 1157656 - RNA, 19 nt, Artificial Sequence
  Description of Artificial Sequence: Synthetic oligonucleotide
  Sense strand starting at position 3395 of SEQ ID NO: 916449
aaguaaugugggcagaagu

SEQ ID NO: 1157657 - RNA, 19 nt, Artificial Sequence
  Description of Artificial Sequence: Synthetic oligonucleotide
  Antisense strand to SEQ ID NO: 1157656
acuucugcccacauuacuu

SEQ ID NO: 1157658 - RNA, 19 nt, Artificial Sequence
  Description of Artificial Sequence: Synthetic oligonucleotide
  Sense strand starting at position 3417 of SEQ ID NO: 916449
agaugucaccucuagacuu

SEQ ID NO: 1157659 - RNA, 19 nt, Artificial Sequence
  Description of Artificial Sequence: Synthetic oligonucleotide
  Antisense strand to SEQ ID NO: 1157658
aagucuagaggugacaucu

SEQ ID NO: 1157660 - RNA, 19 nt, Artificial Sequence
  Description of Artificial Sequence: Synthetic oligonucleotide
  Sense strand starting at position 3497 of SEQ ID NO: 916449
gauguugucacccagagug

SEQ ID NO: 1157661 - RNA, 19 nt, Artificial Sequence
  Description of Artificial Sequence: Synthetic oligonucleotide
  Antisense strand to SEQ ID NO: 1157660
cacucugggugacaacauc

SEQ ID NO: 1157662 - RNA, 19 nt, Artificial Sequence
  Description of Artificial Sequence: Synthetic oligonucleotide
  Sense strand starting at position 3533 of SEQ ID NO: 916449
guauauggaagucauaugu

SEQ ID NO: 1157663 - RNA, 19 nt, Artificial Sequence
  Description of Artificial Sequence: Synthetic oligonucleotide
  Antisense strand to SEQ ID NO: 1157662
acauaugacuuccauauac

SEQ ID NO: 1157664 - RNA, 19 nt, Artificial Sequence
  Description of Artificial Sequence: Synthetic oligonucleotide
  Sense strand starting at position 3568 of SEQ ID NO: 916449
guggucauccuagauuccu

SEQ ID NO: 1157665 - RNA, 19 nt, Artificial Sequence
  Description of Artificial Sequence: Synthetic oligonucleotide
  Antisense strand to SEQ ID NO: 1157664
aggaaucuaggaugaccac

SEQ ID NO: 1157666 - RNA, 19 nt, Artificial Sequence
  Description of Artificial Sequence: Synthetic oligonucleotide
  Sense strand starting at position 3651 of SEQ ID NO: 916449
ugagguaaaugagaaauaa

SEQ ID NO: 1157667 - RNA, 19 nt, Artificial Sequence
  Description of Artificial Sequence: Synthetic oligonucleotide
  Antisense strand to SEQ ID NO: 1157666
uuauuucucauuuaccuca

SEQ ID NO: 1157668 - RNA, 19 nt, Artificial Sequence
  Description of Artificial Sequence: Synthetic oligonucleotide
  Sense strand starting at position 3679 of SEQ ID NO: 916449
augugaagucaucgagauu

SEQ ID NO: 1157669 - RNA, 19 nt, Artificial Sequence
  Description of Artificial Sequence: Synthetic oligonucleotide
  Antisense strand to SEQ ID NO: 1157668
aaucucgaugacuucacau

SEQ ID NO: 1157670 - RNA, 19 nt, Artificial Sequence
  Description of Artificial Sequence: Synthetic oligonucleotide
  Sense strand starting at position 3680 of SEQ ID NO: 916449
ugugaagucaucgagauug

SEQ ID NO: 1157671 - RNA, 19 nt, Artificial Sequence
  Description of Artificial Sequence: Synthetic oligonucleotide
  Antisense strand to SEQ ID NO: 1157670
caaucucgaugacuucaca

SEQ ID NO: 1157672 - RNA, 19 nt, Artificial Sequence
  Description of Artificial Sequence: Synthetic oligonucleotide
  Sense strand starting at position 3889 of SEQ ID NO: 916449
guaagaaauaauggugauu

SEQ ID NO: 1157673 - RNA, 19 nt, Artificial Sequence
  Description of Artificial Sequence: Synthetic oligonucleotide
  Antisense strand to SEQ ID NO: 1157672
aaucaccauuauuucuuac

SEQ ID NO: 1157674 - RNA, 19 nt, Artificial Sequence
  Description of Artificial Sequence: Synthetic oligonucleotide
  Sense strand starting at position 3927 of SEQ ID NO: 916449
gaggguuugugggugauag

SEQ ID NO: 1157675 - RNA, 19 nt, Artificial Sequence
  Description of Artificial Sequence: Synthetic oligonucleotide
  Antisense strand to SEQ ID NO: 1157674
cuaucacccacaaacccuc

SEQ ID NO: 1157676 - RNA, 19 nt, Artificial Sequence
  Description of Artificial Sequence: Synthetic oligonucleotide
  Sense strand starting at position 315 of SEQ ID NO: 916450
cugucaggucccuaggaga

SEQ ID NO: 1157677 - RNA, 19 nt, Artificial Sequence
  Description of Artificial Sequence: Synthetic oligonucleotide
  Antisense strand to SEQ ID NO: 1157676
ucuccuagggaccugacag

SEQ ID NO: 1157678 - RNA, 19 nt, Artificial Sequence
  Description of Artificial Sequence: Synthetic oligonucleotide
  Sense strand starting at position 406 of SEQ ID NO: 916450
gcaauauggagauggcuua

SEQ ID NO: 1157679 - RNA, 19 nt, Artificial Sequence
  Description of Artificial Sequence: Synthetic oligonucleotide
  Antisense strand to SEQ ID NO: 1157678
uaagccaucuccauauugc

SEQ ID NO: 1157680 - RNA, 19 nt, Artificial Sequence
  Description of Artificial Sequence: Synthetic oligonucleotide
  Sense strand starting at position 475 of SEQ ID NO: 916450
gaagguagguggguucuua

SEQ ID NO: 1157681 - RNA, 19 nt, Artificial Sequence
  Description of Artificial Sequence: Synthetic oligonucleotide
  Antisense strand to SEQ ID NO: 1157680
uaagaacccaccuaccuuc

SEQ ID NO: 1157682 - RNA, 19 nt, Artificial Sequence
  Description of Artificial Sequence: Synthetic oligonucleotide
  Sense strand starting at position 505 of SEQ ID NO: 916450
agagaccugugucugugaa

SEQ ID NO: 1157683 - RNA, 19 nt, Artificial Sequence
  Description of Artificial Sequence: Synthetic oligonucleotide
  Antisense strand to SEQ ID NO: 1157682
uucacagacacaggucucu

SEQ ID NO: 1157684 - RNA, 19 nt, Artificial Sequence
  Description of Artificial Sequence: Synthetic oligonucleotide
  Sense strand starting at position 892 of SEQ ID NO: 916450
gcagguagaaguggaguaa

SEQ ID NO: 1157685 - RNA, 19 nt, Artificial Sequence
  Description of Artificial Sequence: Synthetic oligonucleotide
  Antisense strand to SEQ ID NO: 1157684
uuacuccacuucuaccugc

SEQ ID NO: 1157686 - RNA, 19 nt, Artificial Sequence
  Description of Artificial Sequence: Synthetic oligonucleotide
  Sense strand starting at position 2269 of SEQ ID NO: 916450
gcauuugcuagcuaaacgu

SEQ ID NO: 1157687 - RNA, 19 nt, Artificial Sequence
  Description of Artificial Sequence: Synthetic oligonucleotide
  Antisense strand to SEQ ID NO: 1157686
acguuuagcuagcaaaugc

SEQ ID NO: 1157688 - RNA, 19 nt, Artificial Sequence
  Description of Artificial Sequence: Synthetic oligonucleotide
  Sense strand starting at position 2300 of SEQ ID NO: 916450
uuguuaucuguagaauuag

SEQ ID NO: 1157689 - RNA, 19 nt, Artificial Sequence
  Description of Artificial Sequence: Synthetic oligonucleotide
  Antisense strand to SEQ ID NO: 1157688
cuaauucuacagauaacaa

SEQ ID NO: 1157690 - RNA, 19 nt, Artificial Sequence
  Description of Artificial Sequence: Synthetic oligonucleotide
  Sense strand starting at position 2309 of SEQ ID NO: 916450
guagaauuagcuuaacuau

SEQ ID NO: 1157691 - RNA, 19 nt, Artificial Sequence
  Description of Artificial Sequence: Synthetic oligonucleotide
  Antisense strand to SEQ ID NO: 1157690
auaguuaagcuaauucuac

SEQ ID NO: 1157692 - RNA, 19 nt, Artificial Sequence
  Description of Artificial Sequence: Synthetic oligonucleotide
  Sense strand starting at position 2338 of SEQ ID NO: 916450
agggauccaguaugaguua

SEQ ID NO: 1157693 - RNA, 19 nt, Artificial Sequence
  Description of Artificial Sequence: Synthetic oligonucleotide
  Antisense strand to SEQ ID NO: 1157692
uaacucauacuggaucccu

SEQ ID NO: 1157694 - RNA, 19 nt, Artificial Sequence
  Description of Artificial Sequence: Synthetic oligonucleotide
  Sense strand starting at position 2345 of SEQ ID NO: 916450
caguaugaguuauccugga

SEQ ID NO: 1157695 - RNA, 19 nt, Artificial Sequence
  Description of Artificial Sequence: Synthetic oligonucleotide
  Antisense strand to SEQ ID NO: 1157694
uccaggauaacucauacug

SEQ ID NO: 1157696 - RNA, 19 nt, Artificial Sequence
  Description of Artificial Sequence: Synthetic oligonucleotide
  Sense strand starting at position 2349 of SEQ ID NO: 916450
augaguuauccuggacugg

SEQ ID NO: 1157697 - RNA, 19 nt, Artificial Sequence
  Description of Artificial Sequence: Synthetic oligonucleotide
  Antisense strand to SEQ ID NO: 1157696
ccaguccaggauaacucau

SEQ ID NO: 1157698 - RNA, 19 nt, Artificial Sequence
  Description of Artificial Sequence: Synthetic oligonucleotide
  Sense strand starting at position 2350 of SEQ ID NO: 916450
ugaguuauccuggacuggu

SEQ ID NO: 1157699 - RNA, 19 nt, Artificial Sequence
  Description of Artificial Sequence: Synthetic oligonucleotide
  Antisense strand to SEQ ID NO: 1157698
accaguccaggauaacuca

SEQ ID NO: 1157700 - RNA, 19 nt, Artificial Sequence
  Description of Artificial Sequence: Synthetic oligonucleotide
  Sense strand starting at position 2554 of SEQ ID NO: 916450
gaguuugugcgagacauua

SEQ ID NO: 1157701 - RNA, 19 nt, Artificial Sequence
  Description of Artificial Sequence: Synthetic oligonucleotide
  Antisense strand to SEQ ID NO: 1157700
uaaugucucgcacaaacuc

SEQ ID NO: 1157702 - RNA, 19 nt, Artificial Sequence
  Description of Artificial Sequence: Synthetic oligonucleotide
  Sense strand starting at position 2562 of SEQ ID NO: 916450
gcgagacauuaugucaaac

SEQ ID NO: 1157703 - RNA, 19 nt, Artificial Sequence
  Description of Artificial Sequence: Synthetic oligonucleotide
  Antisense strand to SEQ ID NO: 1157702
guuugacauaaugucucgc

SEQ ID NO: 1157704 - RNA, 19 nt, Artificial Sequence
  Description of Artificial Sequence: Synthetic oligonucleotide
  Sense strand starting at position 2607 of SEQ ID NO: 916450
gcaacaguccuguaagaua

SEQ ID NO: 1157705 - RNA, 19 nt, Artificial Sequence
  Description of Artificial Sequence: Synthetic oligonucleotide
  Antisense strand to SEQ ID NO: 1157704
uaucuuacaggacuguugc

SEQ ID NO: 1157706 - RNA, 19 nt, Artificial Sequence
  Description of Artificial Sequence: Synthetic oligonucleotide
  Sense strand starting at position 2701 of SEQ ID NO: 916450
uuaccaaucuuguugugga

SEQ ID NO: 1157707 - RNA, 19 nt, Artificial Sequence
  Description of Artificial Sequence: Synthetic oligonucleotide
  Antisense strand to SEQ ID NO: 1157706
uccacaacaagauugguaa

SEQ ID NO: 1157708 - RNA, 19 nt, Artificial Sequence
  Description of Artificial Sequence: Synthetic oligonucleotide
  Sense strand starting at position 2706 of SEQ ID NO: 916450
aaucuuguuguggaaucua

SEQ ID NO: 1157709 - RNA, 19 nt, Artificial Sequence
  Description of Artificial Sequence: Synthetic oligonucleotide
  Antisense strand to SEQ ID NO: 1157708
uagauuccacaacaagauu

SEQ ID NO: 1157710 - RNA, 19 nt, Artificial Sequence
  Description of Artificial Sequence: Synthetic oligonucleotide
  Sense strand starting at position 2711 of SEQ ID NO: 916450
uguuguggaaucuaaugua

SEQ ID NO: 1157711 - RNA, 19 nt, Artificial Sequence
  Description of Artificial Sequence: Synthetic oligonucleotide
  Antisense strand to SEQ ID NO: 1157710
uacauuagauuccacaaca

SEQ ID NO: 1157712 - RNA, 19 nt, Artificial Sequence
  Description of Artificial Sequence: Synthetic oligonucleotide
  Sense strand starting at position 2877 of SEQ ID NO: 916450
cuuggaggaaugugguuaa

SEQ ID NO: 1157713 - RNA, 19 nt, Artificial Sequence
  Description of Artificial Sequence: Synthetic oligonucleotide
  Antisense strand to SEQ ID NO: 1157712
uuaaccacauuccuccaag

SEQ ID NO: 1157714 - RNA, 19 nt, Artificial Sequence
  Description of Artificial Sequence: Synthetic oligonucleotide
  Sense strand starting at position 2880 of SEQ ID NO: 916450
ggaggaaugugguuaauag

SEQ ID NO: 1157715 - RNA, 19 nt, Artificial Sequence
  Description of Artificial Sequence: Synthetic oligonucleotide
  Antisense strand to SEQ ID NO: 1157714
cuauuaaccacauuccucc

SEQ ID NO: 1157716 - RNA, 19 nt, Artificial Sequence
  Description of Artificial Sequence: Synthetic oligonucleotide
  Sense strand starting at position 2888 of SEQ ID NO: 916450
gugguuaauaggcaaaucu

SEQ ID NO: 1157717 - RNA, 19 nt, Artificial Sequence
  Description of Artificial Sequence: Synthetic oligonucleotide
  Antisense strand to SEQ ID NO: 1157716
agauuugccuauuaaccac

SEQ ID NO: 1157718 - RNA, 19 nt, Artificial Sequence
  Description of Artificial Sequence: Synthetic oligonucleotide
  Sense strand starting at position 2897 of SEQ ID NO: 916450
aggcaaaucuguuuacuug

SEQ ID NO: 1157719 - RNA, 19 nt, Artificial Sequence
  Description of Artificial Sequence: Synthetic oligonucleotide
  Antisense strand to SEQ ID NO: 1157718
caaguaaacagauuugccu

SEQ ID NO: 1157720 - RNA, 19 nt, Artificial Sequence
  Description of Artificial Sequence: Synthetic oligonucleotide
  Sense strand starting at position 3007 of SEQ ID NO: 916450
uaugaaaucuuacugaggu

SEQ ID NO: 1157721 - RNA, 19 nt, Artificial Sequence
  Description of Artificial Sequence: Synthetic oligonucleotide
  Antisense strand to SEQ ID NO: 1157720
accucaguaagauuucaua

SEQ ID NO: 1157722 - RNA, 19 nt, Artificial Sequence
  Description of Artificial Sequence: Synthetic oligonucleotide
  Sense strand starting at position 3024 of SEQ ID NO: 916450
gucuaauuuccacagucgu

SEQ ID NO: 1157723 - RNA, 19 nt, Artificial Sequence
  Description of Artificial Sequence: Synthetic oligonucleotide
  Antisense strand to SEQ ID NO: 1157722
acgacuguggaaauuagac

SEQ ID NO: 1157724 - RNA, 19 nt, Artificial Sequence
  Description of Artificial Sequence: Synthetic oligonucleotide
  Sense strand starting at position 3067 of SEQ ID NO: 916450
accuguaaggauuguuaag

SEQ ID NO: 1157725 - RNA, 19 nt, Artificial Sequence
  Description of Artificial Sequence: Synthetic oligonucleotide
  Antisense strand to SEQ ID NO: 1157724
cuuaacaauccuuacaggu

SEQ ID NO: 1157726 - RNA, 19 nt, Artificial Sequence
  Description of Artificial Sequence: Synthetic oligonucleotide
  Sense strand starting at position 3095 of SEQ ID NO: 916450
gagauaauguggguaaauc

SEQ ID NO: 1157727 - RNA, 19 nt, Artificial Sequence
  Description of Artificial Sequence: Synthetic oligonucleotide
  Antisense strand to SEQ ID NO: 1157726
gauuuacccacauuaucuc

SEQ ID NO: 1157728 - RNA, 19 nt, Artificial Sequence
  Description of Artificial Sequence: Synthetic oligonucleotide
  Sense strand starting at position 3123 of SEQ ID NO: 916450
uuaguugacccuuaguaaa

SEQ ID NO: 1157729 - RNA, 19 nt, Artificial Sequence
  Description of Artificial Sequence: Synthetic oligonucleotide
  Antisense strand to SEQ ID NO: 1157728
uuuacuaagggucaacuaa

SEQ ID NO: 1157730 - RNA, 19 nt, Artificial Sequence
  Description of Artificial Sequence: Synthetic oligonucleotide
  Sense strand starting at position 3125 of SEQ ID NO: 916450
aguugacccuuaguaaaca

SEQ ID NO: 1157731 - RNA, 19 nt, Artificial Sequence
  Description of Artificial Sequence: Synthetic oligonucleotide
  Antisense strand to SEQ ID NO: 1157730
uguuuacuaagggucaacu

SEQ ID NO: 1157732 - RNA, 19 nt, Artificial Sequence
  Description of Artificial Sequence: Synthetic oligonucleotide
  Sense strand starting at position 3228 of SEQ ID NO: 916450
ugaagagugagaugugcua

SEQ ID NO: 1157733 - RNA, 19 nt, Artificial Sequence
  Description of Artificial Sequence: Synthetic oligonucleotide
  Antisense strand to SEQ ID NO: 1157732
uagcacaucucacucuuca

SEQ ID NO: 1157734 - RNA, 19 nt, Artificial Sequence
  Description of Artificial Sequence: Synthetic oligonucleotide
  Sense strand starting at position 3230 of SEQ ID NO: 916450
aagagugagaugugcuaua

SEQ ID NO: 1157735 - RNA, 19 nt, Artificial Sequence
  Description of Artificial Sequence: Synthetic oligonucleotide
  Antisense strand to SEQ ID NO: 1157734
uauagcacaucucacucuu

SEQ ID NO: 1157736 - RNA, 19 nt, Artificial Sequence
  Description of Artificial Sequence: Synthetic oligonucleotide
  Sense strand starting at position 3235 of SEQ ID NO: 916450
ugagaugugcuauacaaau

SEQ ID NO: 1157737 - RNA, 19 nt, Artificial Sequence
  Description of Artificial Sequence: Synthetic oligonucleotide
  Antisense strand to SEQ ID NO: 1157736
auuuguauagcacaucuca

SEQ ID NO: 1157738 - RNA, 19 nt, Artificial Sequence
  Description of Artificial Sequence: Synthetic oligonucleotide
  Sense strand starting at position 3266 of SEQ ID NO: 916450
auuguuggaguguggagaa

SEQ ID NO: 1157739 - RNA, 19 nt, Artificial Sequence
  Description of Artificial Sequence: Synthetic oligonucleotide
  Antisense strand to SEQ ID NO: 1157738
uucuccacacuccaacaau

SEQ ID NO: 1157740 - RNA, 19 nt, Artificial Sequence
  Description of Artificial Sequence: Synthetic oligonucleotide
  Sense strand starting at position 3297 of SEQ ID NO: 916450
ugugguuugauguagucaa

SEQ ID NO: 1157741 - RNA, 19 nt, Artificial Sequence
  Description of Artificial Sequence: Synthetic oligonucleotide
  Antisense strand to SEQ ID NO: 1157740
uugacuacaucaaaccaca

SEQ ID NO: 1157742 - RNA, 19 nt, Artificial Sequence
  Description of Artificial Sequence: Synthetic oligonucleotide
  Sense strand starting at position 3329 of SEQ ID NO: 916450
gaguuuccuuggccaagaa

SEQ ID NO: 1157743 - RNA, 19 nt, Artificial Sequence
  Description of Artificial Sequence: Synthetic oligonucleotide
  Antisense strand to SEQ ID NO: 1157742
uucuuggccaaggaaacuc

SEQ ID NO: 1157744 - RNA, 19 nt, Artificial Sequence
  Description of Artificial Sequence: Synthetic oligonucleotide
  Sense strand starting at position 3360 of SEQ ID NO: 916450
cacauuagaugggaagaaa

SEQ ID NO: 1157745 - RNA, 19 nt, Artificial Sequence
  Description of Artificial Sequence: Synthetic oligonucleotide
  Antisense strand to SEQ ID NO: 1157744
uuucuucccaucuaaugug

SEQ ID NO: 1157746 - RNA, 19 nt, Artificial Sequence
  Description of Artificial Sequence: Synthetic oligonucleotide
  Sense strand starting at position 3377 of SEQ ID NO: 916450
aaaguugugauguaagggu

SEQ ID NO: 1157747 - RNA, 19 nt, Artificial Sequence
  Description of Artificial Sequence: Synthetic oligonucleotide
  Antisense strand to SEQ ID NO: 1157746
acccuuacaucacaacuuu

SEQ ID NO: 1157748 - RNA, 19 nt, Artificial Sequence
  Description of Artificial Sequence: Synthetic oligonucleotide
  Sense strand starting at position 3395 of SEQ ID NO: 916450
uuaggaagguguccuugaa

SEQ ID NO: 1157749 - RNA, 19 nt, Artificial Sequence
  Description of Artificial Sequence: Synthetic oligonucleotide
  Antisense strand to SEQ ID NO: 1157748
uucaaggacaccuuccuaa

SEQ ID NO: 1157750 - RNA, 19 nt, Artificial Sequence
  Description of Artificial Sequence: Synthetic oligonucleotide
  Sense strand starting at position 3906 of SEQ ID NO: 916450
cuaagugcuagggaucauu

SEQ ID NO: 1157751 - RNA, 19 nt, Artificial Sequence
  Description of Artificial Sequence: Synthetic oligonucleotide
  Antisense strand to SEQ ID NO: 1157750
aaugaucccuagcacuuag

SEQ ID NO: 1157752 - RNA, 19 nt, Artificial Sequence
  Description of Artificial Sequence: Synthetic oligonucleotide
  Sense strand starting at position 3909 of SEQ ID NO: 916450
agugcuagggaucauugua

SEQ ID NO: 1157753 - RNA, 19 nt, Artificial Sequence
  Description of Artificial Sequence: Synthetic oligonucleotide
  Antisense strand to SEQ ID NO: 1157752
uacaaugaucccuagcacu

SEQ ID NO: 1157754 - RNA, 19 nt, Artificial Sequence
  Description of Artificial Sequence: Synthetic oligonucleotide
  Sense strand starting at position 3980 of SEQ ID NO: 916450
aggaaucaccugugguaau

SEQ ID NO: 1157755 - RNA, 19 nt, Artificial Sequence
  Description of Artificial Sequence: Synthetic oligonucleotide
  Antisense strand to SEQ ID NO: 1157754
auuaccacaggugauuccu

SEQ ID NO: 1157756 - RNA, 19 nt, Artificial Sequence
  Description of Artificial Sequence: Synthetic oligonucleotide
  Sense strand starting at position 591 of SEQ ID NO: 916451
gcgcgacuuauucugcagu

SEQ ID NO: 1157757 - RNA, 19 nt, Artificial Sequence
  Description of Artificial Sequence: Synthetic oligonucleotide
  Antisense strand to SEQ ID NO: 1157756
acugcagaauaagucgcgc

SEQ ID NO: 1157758 - RNA, 19 nt, Artificial Sequence
  Description of Artificial Sequence: Synthetic oligonucleotide
  Sense strand starting at position 597 of SEQ ID NO: 916451
cuuauucugcaguggcaga

SEQ ID NO: 1157759 - RNA, 19 nt, Artificial Sequence
  Description of Artificial Sequence: Synthetic oligonucleotide
  Antisense strand to SEQ ID NO: 1157758
ucugccacugcagaauaag

SEQ ID NO: 1157760 - RNA, 19 nt, Artificial Sequence
  Description of Artificial Sequence: Synthetic oligonucleotide
  Sense strand starting at position 1054 of SEQ ID NO: 916451
auggauuauuagccaugga

SEQ ID NO: 1157761 - RNA, 19 nt, Artificial Sequence
  Description of Artificial Sequence: Synthetic oligonucleotide
  Antisense strand to SEQ ID NO: 1157760
uccauggcuaauaauccau

SEQ ID NO: 1157762 - RNA, 19 nt, Artificial Sequence
  Description of Artificial Sequence: Synthetic oligonucleotide
  Sense strand starting at position 1057 of SEQ ID NO: 916451
gauuauuagccauggauau

SEQ ID NO: 1157763 - RNA, 19 nt, Artificial Sequence
  Description of Artificial Sequence: Synthetic oligonucleotide
  Antisense strand to SEQ ID NO: 1157762
auauccauggcuaauaauc

SEQ ID NO: 1157764 - RNA, 19 nt, Artificial Sequence
  Description of Artificial Sequence: Synthetic oligonucleotide
  Sense strand starting at position 1058 of SEQ ID NO: 916451
auuauuagccauggauaua

SEQ ID NO: 1157765 - RNA, 19 nt, Artificial Sequence
  Description of Artificial Sequence: Synthetic oligonucleotide
  Antisense strand to SEQ ID NO: 1157764
uauauccauggcuaauaau

SEQ ID NO: 1157766 - RNA, 19 nt, Artificial Sequence
  Description of Artificial Sequence: Synthetic oligonucleotide
  Sense strand starting at position 1276 of SEQ ID NO: 916451
agucgacaucgcgucacua

SEQ ID NO: 1157767 - RNA, 19 nt, Artificial Sequence
  Description of Artificial Sequence: Synthetic oligonucleotide
  Antisense strand to SEQ ID NO: 1157766
uagugacgcgaugucgacu

SEQ ID NO: 1157768 - RNA, 19 nt, Artificial Sequence
  Description of Artificial Sequence: Synthetic oligonucleotide
  Sense strand starting at position 1277 of SEQ ID NO: 916451
gucgacaucgcgucacuau

SEQ ID NO: 1157769 - RNA, 19 nt, Artificial Sequence
  Description of Artificial Sequence: Synthetic oligonucleotide
  Antisense strand to SEQ ID NO: 1157768
auagugacgcgaugucgac

SEQ ID NO: 1157770 - RNA, 19 nt, Artificial Sequence
  Description of Artificial Sequence: Synthetic oligonucleotide
  Sense strand starting at position 1464 of SEQ ID NO: 916451
gccucaggcucuuauuaaa

SEQ ID NO: 1157771 - RNA, 19 nt, Artificial Sequence
  Description of Artificial Sequence: Synthetic oligonucleotide
  Antisense strand to SEQ ID NO: 1157770
uuuaauaagagccugaggc

SEQ ID NO: 1157772 - RNA, 19 nt, Artificial Sequence
  Description of Artificial Sequence: Synthetic oligonucleotide
  Sense strand starting at position 1504 of SEQ ID NO: 916451
uguggaacucuuugcccaa

SEQ ID NO: 1157773 - RNA, 19 nt, Artificial Sequence
  Description of Artificial Sequence: Synthetic oligonucleotide
  Antisense strand to SEQ ID NO: 1157772
uugggcaaagaguuccaca

SEQ ID NO: 1157774 - RNA, 19 nt, Artificial Sequence
  Description of Artificial Sequence: Synthetic oligonucleotide
  Sense strand starting at position 1505 of SEQ ID NO: 916451
guggaacucuuugcccaaa

SEQ ID NO: 1157775 - RNA, 19 nt, Artificial Sequence
  Description of Artificial Sequence: Synthetic oligonucleotide
  Antisense strand to SEQ ID NO: 1157774
uuugggcaaagaguuccac

SEQ ID NO: 1157776 - RNA, 19 nt, Artificial Sequence
  Description of Artificial Sequence: Synthetic oligonucleotide
  Sense strand starting at position 2201 of SEQ ID NO: 916451
uuucuuagcuccugucaag

SEQ ID NO: 1157777 - RNA, 19 nt, Artificial Sequence
  Description of Artificial Sequence: Synthetic oligonucleotide
  Antisense strand to SEQ ID NO: 1157776
cuugacaggagcuaagaaa

SEQ ID NO: 1157778 - RNA, 19 nt, Artificial Sequence
  Description of Artificial Sequence: Synthetic oligonucleotide
  Sense strand starting at position 2227 of SEQ ID NO: 916451
cacggaaagucauccuaua

SEQ ID NO: 1157779 - RNA, 19 nt, Artificial Sequence
  Description of Artificial Sequence: Synthetic oligonucleotide
  Antisense strand to SEQ ID NO: 1157778
uauaggaugacuuuccgug

SEQ ID NO: 1157780 - RNA, 19 nt, Artificial Sequence
  Description of Artificial Sequence: Synthetic oligonucleotide
  Sense strand starting at position 2328 of SEQ ID NO: 916451
cucucuaacccuggaguca

SEQ ID NO: 1157781 - RNA, 19 nt, Artificial Sequence
  Description of Artificial Sequence: Synthetic oligonucleotide
  Antisense strand to SEQ ID NO: 1157780
ugacuccaggguuagagag

SEQ ID NO: 1157782 - RNA, 19 nt, Artificial Sequence
  Description of Artificial Sequence: Synthetic oligonucleotide
  Sense strand starting at position 2367 of SEQ ID NO: 916451
cuguauaacuguuuaauca

SEQ ID NO: 1157783 - RNA, 19 nt, Artificial Sequence
  Description of Artificial Sequence: Synthetic oligonucleotide
  Antisense strand to SEQ ID NO: 1157782
ugauuaaacaguuauacag

SEQ ID NO: 1157784 - RNA, 19 nt, Artificial Sequence
  Description of Artificial Sequence: Synthetic oligonucleotide
  Sense strand starting at position 2368 of SEQ ID NO: 916451
uguauaacuguuuaaucac

SEQ ID NO: 1157785 - RNA, 19 nt, Artificial Sequence
  Description of Artificial Sequence: Synthetic oligonucleotide
  Antisense strand to SEQ ID NO: 1157784
gugauuaaacaguuauaca

SEQ ID NO: 1157786 - RNA, 19 nt, Artificial Sequence
  Description of Artificial Sequence: Synthetic oligonucleotide
  Sense strand starting at position 3034 of SEQ ID NO: 916451
ggacauugaucccauuccu

SEQ ID NO: 1157787 - RNA, 19 nt, Artificial Sequence
  Description of Artificial Sequence: Synthetic oligonucleotide
  Antisense strand to SEQ ID NO: 1157786
aggaaugggaucaaugucc

SEQ ID NO: 1157788 - RNA, 19 nt, Artificial Sequence
  Description of Artificial Sequence: Synthetic oligonucleotide
  Sense strand starting at position 3113 of SEQ ID NO: 916451
ggcaucagguucugacaaa

SEQ ID NO: 1157789 - RNA, 19 nt, Artificial Sequence
  Description of Artificial Sequence: Synthetic oligonucleotide
  Antisense strand to SEQ ID NO: 1157788
uuugucagaaccugaugcc

SEQ ID NO: 1157790 - RNA, 19 nt, Artificial Sequence
  Description of Artificial Sequence: Synthetic oligonucleotide
  Sense strand starting at position 3114 of SEQ ID NO: 916451
gcaucagguucugacaaau

SEQ ID NO: 1157791 - RNA, 19 nt, Artificial Sequence
  Description of Artificial Sequence: Synthetic oligonucleotide
  Antisense strand to SEQ ID NO: 1157790
auuugucagaaccugaugc

SEQ ID NO: 1157792 - RNA, 19 nt, Artificial Sequence
  Description of Artificial Sequence: Synthetic oligonucleotide
  Sense strand starting at position 3178 of SEQ ID NO: 916451
acgauaucgggacaacuuu

SEQ ID NO: 1157793 - RNA, 19 nt, Artificial Sequence
  Description of Artificial Sequence: Synthetic oligonucleotide
  Antisense strand to SEQ ID NO: 1157792
aaaguugucccgauaucgu

SEQ ID NO: 1157794 - RNA, 19 nt, Artificial Sequence
  Description of Artificial Sequence: Synthetic oligonucleotide
  Sense strand starting at position 3186 of SEQ ID NO: 916451
gggacaacuuuacuguuau

SEQ ID NO: 1157795 - RNA, 19 nt, Artificial Sequence
  Description of Artificial Sequence: Synthetic oligonucleotide
  Antisense strand to SEQ ID NO: 1157794
auaacaguaaaguuguccc

SEQ ID NO: 1157796 - RNA, 19 nt, Artificial Sequence
  Description of Artificial Sequence: Synthetic oligonucleotide
  Sense strand starting at position 3187 of SEQ ID NO: 916451
ggacaacuuuacuguuauu

SEQ ID NO: 1157797 - RNA, 19 nt, Artificial Sequence
  Description of Artificial Sequence: Synthetic oligonucleotide
  Antisense strand to SEQ ID NO: 1157796
aauaacaguaaaguugucc

SEQ ID NO: 1157798 - RNA, 19 nt, Artificial Sequence
  Description of Artificial Sequence: Synthetic oligonucleotide
  Sense strand starting at position 3918 of SEQ ID NO: 916451
cuuuguuauccaggcuacu

SEQ ID NO: 1157799 - RNA, 19 nt, Artificial Sequence
  Description of Artificial Sequence: Synthetic oligonucleotide
  Antisense strand to SEQ ID NO: 1157798
aguagccuggauaacaaag

SEQ ID NO: 1157800 - RNA, 19 nt, Artificial Sequence
  Description of Artificial Sequence: Synthetic oligonucleotide
  Sense strand starting at position 397 of SEQ ID NO: 916452
aaguuagcaggugaaacuu

SEQ ID NO: 1157801 - RNA, 19 nt, Artificial Sequence
  Description of Artificial Sequence: Synthetic oligonucleotide
  Antisense strand to SEQ ID NO: 1157800
aaguuucaccugcuaacuu

SEQ ID NO: 1157802 - RNA, 19 nt, Artificial Sequence
  Description of Artificial Sequence: Synthetic oligonucleotide
  Sense strand starting at position 433 of SEQ ID NO: 916452
ucugcauagccucaaagaa

SEQ ID NO: 1157803 - RNA, 19 nt, Artificial Sequence
  Description of Artificial Sequence: Synthetic oligonucleotide
  Antisense strand to SEQ ID NO: 1157802
uucuuugaggcuaugcaga

SEQ ID NO: 1157804 - RNA, 19 nt, Artificial Sequence
  Description of Artificial Sequence: Synthetic oligonucleotide
  Sense strand starting at position 487 of SEQ ID NO: 916452
guccacaaaucuucgauau

SEQ ID NO: 1157805 - RNA, 19 nt, Artificial Sequence
  Description of Artificial Sequence: Synthetic oligonucleotide
  Antisense strand to SEQ ID NO: 1157804
auaucgaagauuuguggac

SEQ ID NO: 1157806 - RNA, 19 nt, Artificial Sequence
  Description of Artificial Sequence: Synthetic oligonucleotide
  Sense strand starting at position 559 of SEQ ID NO: 916452
cuuggugacucccuucuaa

SEQ ID NO: 1157807 - RNA, 19 nt, Artificial Sequence
  Description of Artificial Sequence: Synthetic oligonucleotide
  Antisense strand to SEQ ID NO: 1157806
uuagaagggagucaccaag

SEQ ID NO: 1157808 - RNA, 19 nt, Artificial Sequence
  Description of Artificial Sequence: Synthetic oligonucleotide
  Sense strand starting at position 702 of SEQ ID NO: 916452
ucccucacuucucugugau

SEQ ID NO: 1157809 - RNA, 19 nt, Artificial Sequence
  Description of Artificial Sequence: Synthetic oligonucleotide
  Antisense strand to SEQ ID NO: 1157808
aucacagagaagugaggga

SEQ ID NO: 1157810 - RNA, 19 nt, Artificial Sequence
  Description of Artificial Sequence: Synthetic oligonucleotide
  Sense strand starting at position 705 of SEQ ID NO: 916452
cucacuucucugugaucuu

SEQ ID NO: 1157811 - RNA, 19 nt, Artificial Sequence
  Description of Artificial Sequence: Synthetic oligonucleotide
  Antisense strand to SEQ ID NO: 1157810
aagaucacagagaagugag

SEQ ID NO: 1157812 - RNA, 19 nt, Artificial Sequence
  Description of Artificial Sequence: Synthetic oligonucleotide
  Sense strand starting at position 843 of SEQ ID NO: 916452
aggcuaagaaauggucaca

SEQ ID NO: 1157813 - RNA, 19 nt, Artificial Sequence
  Description of Artificial Sequence: Synthetic oligonucleotide
  Antisense strand to SEQ ID NO: 1157812
ugugaccauuucuuagccu

SEQ ID NO: 1157814 - RNA, 19 nt, Artificial Sequence
  Description of Artificial Sequence: Synthetic oligonucleotide
  Sense strand starting at position 848 of SEQ ID NO: 916452
aagaaauggucacagauug

SEQ ID NO: 1157815 - RNA, 19 nt, Artificial Sequence
  Description of Artificial Sequence: Synthetic oligonucleotide
  Antisense strand to SEQ ID NO: 1157814
caaucugugaccauuucuu

SEQ ID NO: 1157816 - RNA, 19 nt, Artificial Sequence
  Description of Artificial Sequence: Synthetic oligonucleotide
  Sense strand starting at position 863 of SEQ ID NO: 916452
auugaagacuaaggagaua

SEQ ID NO: 1157817 - RNA, 19 nt, Artificial Sequence
  Description of Artificial Sequence: Synthetic oligonucleotide
  Antisense strand to SEQ ID NO: 1157816
uaucuccuuagucuucaau

SEQ ID NO: 1157818 - RNA, 19 nt, Artificial Sequence
  Description of Artificial Sequence: Synthetic oligonucleotide
  Sense strand starting at position 910 of SEQ ID NO: 916452
gacugacucuuggaccaga

SEQ ID NO: 1157819 - RNA, 19 nt, Artificial Sequence
  Description of Artificial Sequence: Synthetic oligonucleotide
  Antisense strand to SEQ ID NO: 1157818
ucugguccaagagucaguc

SEQ ID NO: 1157820 - RNA, 19 nt, Artificial Sequence
  Description of Artificial Sequence: Synthetic oligonucleotide
  Sense strand starting at position 968 of SEQ ID NO: 916452
guugguaguuuagugauua

SEQ ID NO: 1157821 - RNA, 19 nt, Artificial Sequence
  Description of Artificial Sequence: Synthetic oligonucleotide
  Antisense strand to SEQ ID NO: 1157820
uaaucacuaaacuaccaac

SEQ ID NO: 1157822 - RNA, 19 nt, Artificial Sequence
  Description of Artificial Sequence: Synthetic oligonucleotide
  Sense strand starting at position 997 of SEQ ID NO: 916452
aguguuaaucgcuuaguuu

SEQ ID NO: 1157823 - RNA, 19 nt, Artificial Sequence
  Description of Artificial Sequence: Synthetic oligonucleotide
  Antisense strand to SEQ ID NO: 1157822
aaacuaagcgauuaacacu

SEQ ID NO: 1157824 - RNA, 19 nt, Artificial Sequence
  Description of Artificial Sequence: Synthetic oligonucleotide
  Sense strand starting at position 1024 of SEQ ID NO: 916452
gugcacaguuacuuaacaa

SEQ ID NO: 1157825 - RNA, 19 nt, Artificial Sequence
  Description of Artificial Sequence: Synthetic oligonucleotide
  Antisense strand to SEQ ID NO: 1157824
uuguuaaguaacugugcac

SEQ ID NO: 1157826 - RNA, 19 nt, Artificial Sequence
  Description of Artificial Sequence: Synthetic oligonucleotide
  Sense strand starting at position 1085 of SEQ ID NO: 916452
cucuguacugucuauaaau

SEQ ID NO: 1157827 - RNA, 19 nt, Artificial Sequence
  Description of Artificial Sequence: Synthetic oligonucleotide
  Antisense strand to SEQ ID NO: 1157826
auuuauagacaguacagag

SEQ ID NO: 1157828 - RNA, 19 nt, Artificial Sequence
  Description of Artificial Sequence: Synthetic oligonucleotide
  Sense strand starting at position 1189 of SEQ ID NO: 916452
uggaucacuugagugauca

SEQ ID NO: 1157829 - RNA, 19 nt, Artificial Sequence
  Description of Artificial Sequence: Synthetic oligonucleotide
  Antisense strand to SEQ ID NO: 1157828
ugaucacucaagugaucca

SEQ ID NO: 1157830 - RNA, 19 nt, Artificial Sequence
  Description of Artificial Sequence: Synthetic oligonucleotide
  Sense strand starting at position 1199 of SEQ ID NO: 916452
gagugaucagcucgagacc

SEQ ID NO: 1157831 - RNA, 19 nt, Artificial Sequence
  Description of Artificial Sequence: Synthetic oligonucleotide
  Antisense strand to SEQ ID NO: 1157830
ggucucgagcugaucacuc

SEQ ID NO: 1157832 - RNA, 19 nt, Artificial Sequence
  Description of Artificial Sequence: Synthetic oligonucleotide
  Sense strand starting at position 1936 of SEQ ID NO: 916452
acaucuugcgugcucgaca

SEQ ID NO: 1157833 - RNA, 19 nt, Artificial Sequence
  Description of Artificial Sequence: Synthetic oligonucleotide
  Antisense strand to SEQ ID NO: 1157832
ugucgagcacgcaagaugu

SEQ ID NO: 1157834 - RNA, 19 nt, Artificial Sequence
  Description of Artificial Sequence: Synthetic oligonucleotide
  Sense strand starting at position 2003 of SEQ ID NO: 916452
uccauuaccgcaggaaguu

SEQ ID NO: 1157835 - RNA, 19 nt, Artificial Sequence
  Description of Artificial Sequence: Synthetic oligonucleotide
  Antisense strand to SEQ ID NO: 1157834
aacuuccugcgguaaugga

SEQ ID NO: 1157836 - RNA, 19 nt, Artificial Sequence
  Description of Artificial Sequence: Synthetic oligonucleotide
  Sense strand starting at position 2029 of SEQ ID NO: 916452
auggcauuguucucggaga

SEQ ID NO: 1157837 - RNA, 19 nt, Artificial Sequence
  Description of Artificial Sequence: Synthetic oligonucleotide
  Antisense strand to SEQ ID NO: 1157836
ucuccgagaacaaugccau

SEQ ID NO: 1157838 - RNA, 19 nt, Artificial Sequence
  Description of Artificial Sequence: Synthetic oligonucleotide
  Sense strand starting at position 2031 of SEQ ID NO: 916452
ggcauuguucucggagaau

SEQ ID NO: 1157839 - RNA, 19 nt, Artificial Sequence
  Description of Artificial Sequence: Synthetic oligonucleotide
  Antisense strand to SEQ ID NO: 1157838
auucuccgagaacaaugcc

SEQ ID NO: 1157840 - RNA, 19 nt, Artificial Sequence
  Description of Artificial Sequence: Synthetic oligonucleotide
  Sense strand starting at position 2034 of SEQ ID NO: 916452
auuguucucggagaaugga

SEQ ID NO: 1157841 - RNA, 19 nt, Artificial Sequence
  Description of Artificial Sequence: Synthetic oligonucleotide
  Antisense strand to SEQ ID NO: 1157840
uccauucuccgagaacaau

SEQ ID NO: 1157842 - RNA, 19 nt, Artificial Sequence
  Description of Artificial Sequence: Synthetic oligonucleotide
  Sense strand starting at position 2056 of SEQ ID NO: 916452
uuggcauuguucucagaga

SEQ ID NO: 1157843 - RNA, 19 nt, Artificial Sequence
  Description of Artificial Sequence: Synthetic oligonucleotide
  Antisense strand to SEQ ID NO: 1157842
ucucugagaacaaugccaa

SEQ ID NO: 1157844 - RNA, 19 nt, Artificial Sequence
  Description of Artificial Sequence: Synthetic oligonucleotide
  Sense strand starting at position 2076 of SEQ ID NO: 916452
uggaacuuuguuugacgua

SEQ ID NO: 1157845 - RNA, 19 nt, Artificial Sequence
  Description of Artificial Sequence: Synthetic oligonucleotide
  Antisense strand to SEQ ID NO: 1157844
uacgucaaacaaaguucca

SEQ ID NO: 1157846 - RNA, 19 nt, Artificial Sequence
  Description of Artificial Sequence: Synthetic oligonucleotide
  Sense strand starting at position 2401 of SEQ ID NO: 916452
ggguuguuuggugggcaga

SEQ ID NO: 1157847 - RNA, 19 nt, Artificial Sequence
  Description of Artificial Sequence: Synthetic oligonucleotide
  Antisense strand to SEQ ID NO: 1157846
ucugcccaccaaacaaccc

SEQ ID NO: 1157848 - RNA, 19 nt, Artificial Sequence
  Description of Artificial Sequence: Synthetic oligonucleotide
  Sense strand starting at position 2566 of SEQ ID NO: 916452
gugcuucguugcacggaga

SEQ ID NO: 1157849 - RNA, 19 nt, Artificial Sequence
  Description of Artificial Sequence: Synthetic oligonucleotide
  Antisense strand to SEQ ID NO: 1157848
ucuccgugcaacgaagcac

SEQ ID NO: 1157850 - RNA, 19 nt, Artificial Sequence
  Description of Artificial Sequence: Synthetic oligonucleotide
  Sense strand starting at position 2709 of SEQ ID NO: 916452
ccuggucuccuuuaaugaa

SEQ ID NO: 1157851 - RNA, 19 nt, Artificial Sequence
  Description of Artificial Sequence: Synthetic oligonucleotide
  Antisense strand to SEQ ID NO: 1157850
uucauuaaaggagaccagg

SEQ ID NO: 1157852 - RNA, 19 nt, Artificial Sequence
  Description of Artificial Sequence: Synthetic oligonucleotide
  Sense strand starting at position 2740 of SEQ ID NO: 916452
uccaaucugccagaagagu

SEQ ID NO: 1157853 - RNA, 19 nt, Artificial Sequence
  Description of Artificial Sequence: Synthetic oligonucleotide
  Antisense strand to SEQ ID NO: 1157852
acucuucuggcagauugga

SEQ ID NO: 1157854 - RNA, 19 nt, Artificial Sequence
  Description of Artificial Sequence: Synthetic oligonucleotide
  Sense strand starting at position 2757 of SEQ ID NO: 916452
gucauuuaaugcuauugga

SEQ ID NO: 1157855 - RNA, 19 nt, Artificial Sequence
  Description of Artificial Sequence: Synthetic oligonucleotide
  Antisense strand to SEQ ID NO: 1157854
uccaauagcauuaaaugac

SEQ ID NO: 1157856 - RNA, 19 nt, Artificial Sequence
  Description of Artificial Sequence: Synthetic oligonucleotide
  Sense strand starting at position 2765 of SEQ ID NO: 916452
augcuauuggauugaugga

SEQ ID NO: 1157857 - RNA, 19 nt, Artificial Sequence
  Description of Artificial Sequence: Synthetic oligonucleotide
  Antisense strand to SEQ ID NO: 1157856
uccaucaauccaauagcau

SEQ ID NO: 1157858 - RNA, 19 nt, Artificial Sequence
  Description of Artificial Sequence: Synthetic oligonucleotide
  Sense strand starting at position 2766 of SEQ ID NO: 916452
ugcuauuggauugauggau

SEQ ID NO: 1157859 - RNA, 19 nt, Artificial Sequence
  Description of Artificial Sequence: Synthetic oligonucleotide
  Antisense strand to SEQ ID NO: 1157858
auccaucaauccaauagca

SEQ ID NO: 1157860 - RNA, 19 nt, Artificial Sequence
  Description of Artificial Sequence: Synthetic oligonucleotide
  Sense strand starting at position 2827 of SEQ ID NO: 916452
cuccuucugucacugaaag

SEQ ID NO: 1157861 - RNA, 19 nt, Artificial Sequence
  Description of Artificial Sequence: Synthetic oligonucleotide
  Antisense strand to SEQ ID NO: 1157860
cuuucagugacagaaggag

SEQ ID NO: 1157862 - RNA, 19 nt, Artificial Sequence
  Description of Artificial Sequence: Synthetic oligonucleotide
  Sense strand starting at position 2846 of SEQ ID NO: 916452
cccgcaguucuggagauga

SEQ ID NO: 1157863 - RNA, 19 nt, Artificial Sequence
  Description of Artificial Sequence: Synthetic oligonucleotide
  Antisense strand to SEQ ID NO: 1157862
ucaucuccagaacugcggg

SEQ ID NO: 1157864 - RNA, 19 nt, Artificial Sequence
  Description of Artificial Sequence: Synthetic oligonucleotide
  Sense strand starting at position 2848 of SEQ ID NO: 916452
cgcaguucuggagaugacu

SEQ ID NO: 1157865 - RNA, 19 nt, Artificial Sequence
  Description of Artificial Sequence: Synthetic oligonucleotide
  Antisense strand to SEQ ID NO: 1157864
agucaucuccagaacugcg

SEQ ID NO: 1157866 - RNA, 19 nt, Artificial Sequence
  Description of Artificial Sequence: Synthetic oligonucleotide
  Sense strand starting at position 3149 of SEQ ID NO: 916452
ucuugaaaugcuuagugau

SEQ ID NO: 1157867 - RNA, 19 nt, Artificial Sequence
  Description of Artificial Sequence: Synthetic oligonucleotide
  Antisense strand to SEQ ID NO: 1157866
aucacuaagcauuucaaga

SEQ ID NO: 1157868 - RNA, 19 nt, Artificial Sequence
  Description of Artificial Sequence: Synthetic oligonucleotide
  Sense strand starting at position 3205 of SEQ ID NO: 916452
aggugaaaugcagauuccu

SEQ ID NO: 1157869 - RNA, 19 nt, Artificial Sequence
  Description of Artificial Sequence: Synthetic oligonucleotide
  Antisense strand to SEQ ID NO: 1157868
aggaaucugcauuucaccu

SEQ ID NO: 1157870 - RNA, 19 nt, Artificial Sequence
  Description of Artificial Sequence: Synthetic oligonucleotide
  Sense strand starting at position 3213 of SEQ ID NO: 916452
ugcagauuccuaggcuuac

SEQ ID NO: 1157871 - RNA, 19 nt, Artificial Sequence
  Description of Artificial Sequence: Synthetic oligonucleotide
  Antisense strand to SEQ ID NO: 1157870
guaagccuaggaaucugca

SEQ ID NO: 1157872 - RNA, 19 nt, Artificial Sequence
  Description of Artificial Sequence: Synthetic oligonucleotide
  Sense strand starting at position 3214 of SEQ ID NO: 916452
gcagauuccuaggcuuaca

SEQ ID NO: 1157873 - RNA, 19 nt, Artificial Sequence
  Description of Artificial Sequence: Synthetic oligonucleotide
  Antisense strand to SEQ ID NO: 1157872
uguaagccuaggaaucugc

SEQ ID NO: 1157874 - RNA, 19 nt, Artificial Sequence
  Description of Artificial Sequence: Synthetic oligonucleotide
  Sense strand starting at position 3239 of SEQ ID NO: 916452
gguucugauuuaguaguuu

SEQ ID NO: 1157875 - RNA, 19 nt, Artificial Sequence
  Description of Artificial Sequence: Synthetic oligonucleotide
  Antisense strand to SEQ ID NO: 1157874
aaacuacuaaaucagaacc

SEQ ID NO: 1157876 - RNA, 19 nt, Artificial Sequence
  Description of Artificial Sequence: Synthetic oligonucleotide
  Sense strand starting at position 3652 of SEQ ID NO: 916452
guauaauugggccaggugu

SEQ ID NO: 1157877 - RNA, 19 nt, Artificial Sequence
  Description of Artificial Sequence: Synthetic oligonucleotide
  Antisense strand to SEQ ID NO: 1157876
acaccuggcccaauuauac

SEQ ID NO: 1157878 - RNA, 19 nt, Artificial Sequence
  Description of Artificial Sequence: Synthetic oligonucleotide
  Sense strand starting at position 3972 of SEQ ID NO: 916452
uuuacaauuggaugucuuu

SEQ ID NO: 1157879 - RNA, 19 nt, Artificial Sequence
  Description of Artificial Sequence: Synthetic oligonucleotide
  Antisense strand to SEQ ID NO: 1157878
aaagacauccaauuguaaa

SEQ ID NO: 1157880 - RNA, 19 nt, Artificial Sequence
  Description of Artificial Sequence: Synthetic oligonucleotide
  Sense strand starting at position 212 of SEQ ID NO: 916453
uguguucucuaauuuguca

SEQ ID NO: 1157881 - RNA, 19 nt, Artificial Sequence
  Description of Artificial Sequence: Synthetic oligonucleotide
  Antisense strand to SEQ ID NO: 1157880
ugacaaauuagagaacaca

SEQ ID NO: 1157882 - RNA, 19 nt, Artificial Sequence
  Description of Artificial Sequence: Synthetic oligonucleotide
  Sense strand starting at position 477 of SEQ ID NO: 916453
uagguauguaugcaugagu

SEQ ID NO: 1157883 - RNA, 19 nt, Artificial Sequence
  Description of Artificial Sequence: Synthetic oligonucleotide
  Antisense strand to SEQ ID NO: 1157882
acucaugcauacauaccua

SEQ ID NO: 1157884 - RNA, 19 nt, Artificial Sequence
  Description of Artificial Sequence: Synthetic oligonucleotide
  Sense strand starting at position 491 of SEQ ID NO: 916453
ugaguugcaauguaauaug

SEQ ID NO: 1157885 - RNA, 19 nt, Artificial Sequence
  Description of Artificial Sequence: Synthetic oligonucleotide
  Antisense strand to SEQ ID NO: 1157884
cauauuacauugcaacuca

SEQ ID NO: 1157886 - RNA, 19 nt, Artificial Sequence
  Description of Artificial Sequence: Synthetic oligonucleotide
  Sense strand starting at position 999 of SEQ ID NO: 916453
ggagaguaugguggaggua

SEQ ID NO: 1157887 - RNA, 19 nt, Artificial Sequence
  Description of Artificial Sequence: Synthetic oligonucleotide
  Antisense strand to SEQ ID NO: 1157886
uaccuccaccauacucucc

SEQ ID NO: 1157888 - RNA, 19 nt, Artificial Sequence
  Description of Artificial Sequence: Synthetic oligonucleotide
  Sense strand starting at position 1002 of SEQ ID NO: 916453
gaguaugguggagguaaga

SEQ ID NO: 1157889 - RNA, 19 nt, Artificial Sequence
  Description of Artificial Sequence: Synthetic oligonucleotide
  Antisense strand to SEQ ID NO: 1157888
ucuuaccuccaccauacuc

SEQ ID NO: 1157890 - RNA, 19 nt, Artificial Sequence
  Description of Artificial Sequence: Synthetic oligonucleotide
  Sense strand starting at position 1052 of SEQ ID NO: 916453
ucuacuggcucauuagauc

SEQ ID NO: 1157891 - RNA, 19 nt, Artificial Sequence
  Description of Artificial Sequence: Synthetic oligonucleotide
  Antisense strand to SEQ ID NO: 1157890
gaucuaaugagccaguaga

SEQ ID NO: 1157892 - RNA, 19 nt, Artificial Sequence
  Description of Artificial Sequence: Synthetic oligonucleotide
  Sense strand starting at position 1237 of SEQ ID NO: 916453
uugcaaagaguuuauauuc

SEQ ID NO: 1157893 - RNA, 19 nt, Artificial Sequence
  Description of Artificial Sequence: Synthetic oligonucleotide
  Antisense strand to SEQ ID NO: 1157892
gaauauaaacucuuugcaa

SEQ ID NO: 1157894 - RNA, 19 nt, Artificial Sequence
  Description of Artificial Sequence: Synthetic oligonucleotide
  Sense strand starting at position 1254 of SEQ ID NO: 916453
ucuuucuuuggacaguaau

SEQ ID NO: 1157895 - RNA, 19 nt, Artificial Sequence
  Description of Artificial Sequence: Synthetic oligonucleotide
  Antisense strand to SEQ ID NO: 1157894
auuacuguccaaagaaaga

SEQ ID NO: 1157896 - RNA, 19 nt, Artificial Sequence
  Description of Artificial Sequence: Synthetic oligonucleotide
  Sense strand starting at position 1402 of SEQ ID NO: 916453
cuguaaaugggcuacauua

SEQ ID NO: 1157897 - RNA, 19 nt, Artificial Sequence
  Description of Artificial Sequence: Synthetic oligonucleotide
  Antisense strand to SEQ ID NO: 1157896
uaauguagcccauuuacag

SEQ ID NO: 1157898 - RNA, 19 nt, Artificial Sequence
  Description of Artificial Sequence: Synthetic oligonucleotide
  Sense strand starting at position 1415 of SEQ ID NO: 916453
acauuaaagugcucuaagu

SEQ ID NO: 1157899 - RNA, 19 nt, Artificial Sequence
  Description of Artificial Sequence: Synthetic oligonucleotide
  Antisense strand to SEQ ID NO: 1157898
acuuagagcacuuuaaugu

SEQ ID NO: 1157900 - RNA, 19 nt, Artificial Sequence
  Description of Artificial Sequence: Synthetic oligonucleotide
  Sense strand starting at position 1417 of SEQ ID NO: 916453
auuaaagugcucuaaguug

SEQ ID NO: 1157901 - RNA, 19 nt, Artificial Sequence
  Description of Artificial Sequence: Synthetic oligonucleotide
  Antisense strand to SEQ ID NO: 1157900
caacuuagagcacuuuaau

SEQ ID NO: 1157902 - RNA, 19 nt, Artificial Sequence
  Description of Artificial Sequence: Synthetic oligonucleotide
  Sense strand starting at position 1673 of SEQ ID NO: 916453
gugaguaaccaucgaauga

SEQ ID NO: 1157903 - RNA, 19 nt, Artificial Sequence
  Description of Artificial Sequence: Synthetic oligonucleotide
  Antisense strand to SEQ ID NO: 1157902
ucauucgaugguuacucac

SEQ ID NO: 1157904 - RNA, 19 nt, Artificial Sequence
  Description of Artificial Sequence: Synthetic oligonucleotide
  Sense strand starting at position 1683 of SEQ ID NO: 916453
aucgaaugaucccuacaua

SEQ ID NO: 1157905 - RNA, 19 nt, Artificial Sequence
  Description of Artificial Sequence: Synthetic oligonucleotide
  Antisense strand to SEQ ID NO: 1157904
uauguagggaucauucgau

SEQ ID NO: 1157906 - RNA, 19 nt, Artificial Sequence
  Description of Artificial Sequence: Synthetic oligonucleotide
  Sense strand starting at position 1723 of SEQ ID NO: 916453
uugaaugaguucucgaaau

SEQ ID NO: 1157907 - RNA, 19 nt, Artificial Sequence
  Description of Artificial Sequence: Synthetic oligonucleotide
  Antisense strand to SEQ ID NO: 1157906
auuucgagaacucauucaa

SEQ ID NO: 1157908 - RNA, 19 nt, Artificial Sequence
  Description of Artificial Sequence: Synthetic oligonucleotide
  Sense strand starting at position 1725 of SEQ ID NO: 916453
gaaugaguucucgaaaucu

SEQ ID NO: 1157909 - RNA, 19 nt, Artificial Sequence
  Description of Artificial Sequence: Synthetic oligonucleotide
  Antisense strand to SEQ ID NO: 1157908
agauuucgagaacucauuc

SEQ ID NO: 1157910 - RNA, 19 nt, Artificial Sequence
  Description of Artificial Sequence: Synthetic oligonucleotide
  Sense strand starting at position 1735 of SEQ ID NO: 916453
ucgaaaucuccagggugga

SEQ ID NO: 1157911 - RNA, 19 nt, Artificial Sequence
  Description of Artificial Sequence: Synthetic oligonucleotide
  Antisense strand to SEQ ID NO: 1157910
uccacccuggagauuucga

SEQ ID NO: 1157912 - RNA, 19 nt, Artificial Sequence
  Description of Artificial Sequence: Synthetic oligonucleotide
  Sense strand starting at position 2022 of SEQ ID NO: 916453
cccuacaggugcucuagaa

SEQ ID NO: 1157913 - RNA, 19 nt, Artificial Sequence
  Description of Artificial Sequence: Synthetic oligonucleotide
  Antisense strand to SEQ ID NO: 1157912
uucuagagcaccuguaggg

SEQ ID NO: 1157914 - RNA, 19 nt, Artificial Sequence
  Description of Artificial Sequence: Synthetic oligonucleotide
  Sense strand starting at position 2029 of SEQ ID NO: 916453
ggugcucuagaaggacaaa

SEQ ID NO: 1157915 - RNA, 19 nt, Artificial Sequence
  Description of Artificial Sequence: Synthetic oligonucleotide
  Antisense strand to SEQ ID NO: 1157914
uuuguccuucuagagcacc

SEQ ID NO: 1157916 - RNA, 19 nt, Artificial Sequence
  Description of Artificial Sequence: Synthetic oligonucleotide
  Sense strand starting at position 2170 of SEQ ID NO: 916453
uuguuauaauuacccaagu

SEQ ID NO: 1157917 - RNA, 19 nt, Artificial Sequence
  Description of Artificial Sequence: Synthetic oligonucleotide
  Antisense strand to SEQ ID NO: 1157916
acuuggguaauuauaacaa

SEQ ID NO: 1157918 - RNA, 19 nt, Artificial Sequence
  Description of Artificial Sequence: Synthetic oligonucleotide
  Sense strand starting at position 2171 of SEQ ID NO: 916453
uguuauaauuacccaagua

SEQ ID NO: 1157919 - RNA, 19 nt, Artificial Sequence
  Description of Artificial Sequence: Synthetic oligonucleotide
  Antisense strand to SEQ ID NO: 1157918
uacuuggguaauuauaaca

SEQ ID NO: 1157920 - RNA, 19 nt, Artificial Sequence
  Description of Artificial Sequence: Synthetic oligonucleotide
  Sense strand starting at position 2221 of SEQ ID NO: 916453
guuucugagcuacauauau

SEQ ID NO: 1157921 - RNA, 19 nt, Artificial Sequence
  Description of Artificial Sequence: Synthetic oligonucleotide
  Antisense strand to SEQ ID NO: 1157920
auauauguagcucagaaac

SEQ ID NO: 1157922 - RNA, 19 nt, Artificial Sequence
  Description of Artificial Sequence: Synthetic oligonucleotide
  Sense strand starting at position 2255 of SEQ ID NO: 916453
gugauuugcccauguauaa

SEQ ID NO: 1157923 - RNA, 19 nt, Artificial Sequence
  Description of Artificial Sequence: Synthetic oligonucleotide
  Antisense strand to SEQ ID NO: 1157922
uuauacaugggcaaaucac

SEQ ID NO: 1157924 - RNA, 19 nt, Artificial Sequence
  Description of Artificial Sequence: Synthetic oligonucleotide
  Sense strand starting at position 2306 of SEQ ID NO: 916453
agugauuugugggacauag

SEQ ID NO: 1157925 - RNA, 19 nt, Artificial Sequence
  Description of Artificial Sequence: Synthetic oligonucleotide
  Antisense strand to SEQ ID NO: 1157924
cuaugucccacaaaucacu

SEQ ID NO: 1157926 - RNA, 19 nt, Artificial Sequence
  Description of Artificial Sequence: Synthetic oligonucleotide
  Sense strand starting at position 2453 of SEQ ID NO: 916453
ggaugugggugagaaauuu

SEQ ID NO: 1157927 - RNA, 19 nt, Artificial Sequence
  Description of Artificial Sequence: Synthetic oligonucleotide
  Antisense strand to SEQ ID NO: 1157926
aaauuucucacccacaucc

SEQ ID NO: 1157928 - RNA, 19 nt, Artificial Sequence
  Description of Artificial Sequence: Synthetic oligonucleotide
  Sense strand starting at position 3015 of SEQ ID NO: 916453
auugcugauuuauagacua

SEQ ID NO: 1157929 - RNA, 19 nt, Artificial Sequence
  Description of Artificial Sequence: Synthetic oligonucleotide
  Antisense strand to SEQ ID NO: 1157928
uagucuauaaaucagcaau

SEQ ID NO: 1157930 - RNA, 19 nt, Artificial Sequence
  Description of Artificial Sequence: Synthetic oligonucleotide
  Sense strand starting at position 3291 of SEQ ID NO: 916453
uugugaaacuauccagacu

SEQ ID NO: 1157931 - RNA, 19 nt, Artificial Sequence
  Description of Artificial Sequence: Synthetic oligonucleotide
  Antisense strand to SEQ ID NO: 1157930
agucuggauaguuucacaa

SEQ ID NO: 1157932 - RNA, 19 nt, Artificial Sequence
  Description of Artificial Sequence: Synthetic oligonucleotide
  Sense strand starting at position 3382 of SEQ ID NO: 916453
uggaaauaaugccuuaguu

SEQ ID NO: 1157933 - RNA, 19 nt, Artificial Sequence
  Description of Artificial Sequence: Synthetic oligonucleotide
  Antisense strand to SEQ ID NO: 1157932
aacuaaggcauuauuucca

SEQ ID NO: 1157934 - RNA, 19 nt, Artificial Sequence
  Description of Artificial Sequence: Synthetic oligonucleotide
  Sense strand starting at position 3487 of SEQ ID NO: 916453
ggugauagaucuccuauau

SEQ ID NO: 1157935 - RNA, 19 nt, Artificial Sequence
  Description of Artificial Sequence: Synthetic oligonucleotide
  Antisense strand to SEQ ID NO: 1157934
auauaggagaucuaucacc

SEQ ID NO: 1157936 - RNA, 19 nt, Artificial Sequence
  Description of Artificial Sequence: Synthetic oligonucleotide
  Sense strand starting at position 3638 of SEQ ID NO: 916453
ugacacuguuguuuaucaa

SEQ ID NO: 1157937 - RNA, 19 nt, Artificial Sequence
  Description of Artificial Sequence: Synthetic oligonucleotide
  Antisense strand to SEQ ID NO: 1157936
uugauaaacaacaguguca

SEQ ID NO: 1157938 - RNA, 19 nt, Artificial Sequence
  Description of Artificial Sequence: Synthetic oligonucleotide
  Sense strand starting at position 3690 of SEQ ID NO: 916453
gcauuauuccuagaaacgg

SEQ ID NO: 1157939 - RNA, 19 nt, Artificial Sequence
  Description of Artificial Sequence: Synthetic oligonucleotide
  Antisense strand to SEQ ID NO: 1157938
ccguuucuaggaauaaugc

SEQ ID NO: 1157940 - RNA, 19 nt, Artificial Sequence
  Description of Artificial Sequence: Synthetic oligonucleotide
  Sense strand starting at position 3739 of SEQ ID NO: 916453
augacucuuuaaccugagu

SEQ ID NO: 1157941 - RNA, 19 nt, Artificial Sequence
  Description of Artificial Sequence: Synthetic oligonucleotide
  Antisense strand to SEQ ID NO: 1157940
acucagguuaaagagucau

SEQ ID NO: 1157942 - RNA, 19 nt, Artificial Sequence
  Description of Artificial Sequence: Synthetic oligonucleotide
  Sense strand starting at position 3744 of SEQ ID NO: 916453
ucuuuaaccugaguagacu

SEQ ID NO: 1157943 - RNA, 19 nt, Artificial Sequence
  Description of Artificial Sequence: Synthetic oligonucleotide
  Antisense strand to SEQ ID NO: 1157942
agucuacucagguuaaaga

SEQ ID NO: 1157944 - RNA, 19 nt, Artificial Sequence
  Description of Artificial Sequence: Synthetic oligonucleotide
  Sense strand starting at position 3745 of SEQ ID NO: 916453
cuuuaaccugaguagacuu

SEQ ID NO: 1157945 - RNA, 19 nt, Artificial Sequence
  Description of Artificial Sequence: Synthetic oligonucleotide
  Antisense strand to SEQ ID NO: 1157944
aagucuacucagguuaaag

SEQ ID NO: 1157946 - RNA, 19 nt, Artificial Sequence
  Description of Artificial Sequence: Synthetic oligonucleotide
  Sense strand starting at position 3810 of SEQ ID NO: 916453
acaauuuguaggugugguu

SEQ ID NO: 1157947 - RNA, 19 nt, Artificial Sequence
  Description of Artificial Sequence: Synthetic oligonucleotide
  Antisense strand to SEQ ID NO: 1157946
aaccacaccuacaaauugu

SEQ ID NO: 1157948 - RNA, 19 nt, Artificial Sequence
  Description of Artificial Sequence: Synthetic oligonucleotide
  Sense strand starting at position 3834 of SEQ ID NO: 916453
auagcauauuggcuuaaca

SEQ ID NO: 1157949 - RNA, 19 nt, Artificial Sequence
  Description of Artificial Sequence: Synthetic oligonucleotide
  Antisense strand to SEQ ID NO: 1157948
uguuaagccaauaugcuau

SEQ ID NO: 1157950 - RNA, 19 nt, Artificial Sequence
  Description of Artificial Sequence: Synthetic oligonucleotide
  Sense strand starting at position 3836 of SEQ ID NO: 916453
agcauauuggcuuaacaau

SEQ ID NO: 1157951 - RNA, 19 nt, Artificial Sequence
  Description of Artificial Sequence: Synthetic oligonucleotide
  Antisense strand to SEQ ID NO: 1157950
auuguuaagccaauaugcu

SEQ ID NO: 1157952 - RNA, 19 nt, Artificial Sequence
  Description of Artificial Sequence: Synthetic oligonucleotide
  Sense strand starting at position 3842 of SEQ ID NO: 916453
uuggcuuaacaaugcauau

SEQ ID NO: 1157953 - RNA, 19 nt, Artificial Sequence
  Description of Artificial Sequence: Synthetic oligonucleotide
  Antisense strand to SEQ ID NO: 1157952
auaugcauuguuaagccaa

SEQ ID NO: 1157954 - RNA, 19 nt, Artificial Sequence
  Description of Artificial Sequence: Synthetic oligonucleotide
  Sense strand starting at position 3857 of SEQ ID NO: 916453
auauuuccuuuagagagua

SEQ ID NO: 1157955 - RNA, 19 nt, Artificial Sequence
  Description of Artificial Sequence: Synthetic oligonucleotide
  Antisense strand to SEQ ID NO: 1157954
uacucucuaaaggaaauau

SEQ ID NO: 1157956 - RNA, 19 nt, Artificial Sequence
  Description of Artificial Sequence: Synthetic oligonucleotide
  Sense strand starting at position 3907 of SEQ ID NO: 916453
augagagauaacuguuugu

SEQ ID NO: 1157957 - RNA, 19 nt, Artificial Sequence
  Description of Artificial Sequence: Synthetic oligonucleotide
  Antisense strand to SEQ ID NO: 1157956
acaaacaguuaucucucau

SEQ ID NO: 1157958 - RNA, 19 nt, Artificial Sequence
  Description of Artificial Sequence: Synthetic oligonucleotide
  Sense strand starting at position 3962 of SEQ ID NO: 916453
auguguuguagugaaauca

SEQ ID NO: 1157959 - RNA, 19 nt, Artificial Sequence
  Description of Artificial Sequence: Synthetic oligonucleotide
  Antisense strand to SEQ ID NO: 1157958
ugauuucacuacaacacau

SEQ ID NO: 1157960 - RNA, 19 nt, Artificial Sequence
  Description of Artificial Sequence: Synthetic oligonucleotide
  Sense strand starting at position 118 of SEQ ID NO: 916454
gaaugaagguggccagaau

SEQ ID NO: 1157961 - RNA, 19 nt, Artificial Sequence
  Description of Artificial Sequence: Synthetic oligonucleotide
  Antisense strand to SEQ ID NO: 1157960
auucuggccaccuucauuc

SEQ ID NO: 1157962 - RNA, 19 nt, Artificial Sequence
  Description of Artificial Sequence: Synthetic oligonucleotide
  Sense strand starting at position 249 of SEQ ID NO: 916454
uuccgacuuugagucuuaa

SEQ ID NO: 1157963 - RNA, 19 nt, Artificial Sequence
  Description of Artificial Sequence: Synthetic oligonucleotide
  Antisense strand to SEQ ID NO: 1157962
uuaagacucaaagucggaa

SEQ ID NO: 1157964 - RNA, 19 nt, Artificial Sequence
  Description of Artificial Sequence: Synthetic oligonucleotide
  Sense strand starting at position 389 of SEQ ID NO: 916454
agauguaaauguccucaua

SEQ ID NO: 1157965 - RNA, 19 nt, Artificial Sequence
  Description of Artificial Sequence: Synthetic oligonucleotide
  Antisense strand to SEQ ID NO: 1157964
uaugaggacauuuacaucu

SEQ ID NO: 1157966 - RNA, 19 nt, Artificial Sequence
  Description of Artificial Sequence: Synthetic oligonucleotide
  Sense strand starting at position 584 of SEQ ID NO: 916454
ucucuuucucugcaugagu

SEQ ID NO: 1157967 - RNA, 19 nt, Artificial Sequence
  Description of Artificial Sequence: Synthetic oligonucleotide
  Antisense strand to SEQ ID NO: 1157966
acucaugcagagaaagaga

SEQ ID NO: 1157968 - RNA, 19 nt, Artificial Sequence
  Description of Artificial Sequence: Synthetic oligonucleotide
  Sense strand starting at position 587 of SEQ ID NO: 916454
cuuucucugcaugaguuaa

SEQ ID NO: 1157969 - RNA, 19 nt, Artificial Sequence
  Description of Artificial Sequence: Synthetic oligonucleotide
  Antisense strand to SEQ ID NO: 1157968
uuaacucaugcagagaaag

SEQ ID NO: 1157970 - RNA, 19 nt, Artificial Sequence
  Description of Artificial Sequence: Synthetic oligonucleotide
  Sense strand starting at position 589 of SEQ ID NO: 916454
uucucugcaugaguuaaca

SEQ ID NO: 1157971 - RNA, 19 nt, Artificial Sequence
  Description of Artificial Sequence: Synthetic oligonucleotide
  Antisense strand to SEQ ID NO: 1157970
uguuaacucaugcagagaa

SEQ ID NO: 1157972 - RNA, 19 nt, Artificial Sequence
  Description of Artificial Sequence: Synthetic oligonucleotide
  Sense strand starting at position 642 of SEQ ID NO: 916454
cucuaagugcuccgaagga

SEQ ID NO: 1157973 - RNA, 19 nt, Artificial Sequence
  Description of Artificial Sequence: Synthetic oligonucleotide
  Antisense strand to SEQ ID NO: 1157972
uccuucggagcacuuagag

SEQ ID NO: 1157974 - RNA, 19 nt, Artificial Sequence
  Description of Artificial Sequence: Synthetic oligonucleotide
  Sense strand starting at position 763 of SEQ ID NO: 916454
cuggguuuccuaugguaca

SEQ ID NO: 1157975 - RNA, 19 nt, Artificial Sequence
  Description of Artificial Sequence: Synthetic oligonucleotide
  Antisense strand to SEQ ID NO: 1157974
uguaccauaggaaacccag

SEQ ID NO: 1157976 - RNA, 19 nt, Artificial Sequence
  Description of Artificial Sequence: Synthetic oligonucleotide
  Sense strand starting at position 918 of SEQ ID NO: 916454
agugcugaacucuacaaga

SEQ ID NO: 1157977 - RNA, 19 nt, Artificial Sequence
  Description of Artificial Sequence: Synthetic oligonucleotide
  Antisense strand to SEQ ID NO: 1157976
ucuuguagaguucagcacu

SEQ ID NO: 1157978 - RNA, 19 nt, Artificial Sequence
  Description of Artificial Sequence: Synthetic oligonucleotide
  Sense strand starting at position 920 of SEQ ID NO: 916454
ugcugaacucuacaagagu

SEQ ID NO: 1157979 - RNA, 19 nt, Artificial Sequence
  Description of Artificial Sequence: Synthetic oligonucleotide
  Antisense strand to SEQ ID NO: 1157978
acucuuguagaguucagca

SEQ ID NO: 1157980 - RNA, 19 nt, Artificial Sequence
  Description of Artificial Sequence: Synthetic oligonucleotide
  Sense strand starting at position 935 of SEQ ID NO: 916454
gaguuugcuagugacaaag

SEQ ID NO: 1157981 - RNA, 19 nt, Artificial Sequence
  Description of Artificial Sequence: Synthetic oligonucleotide
  Antisense strand to SEQ ID NO: 1157980
cuuugucacuagcaaacuc

SEQ ID NO: 1157982 - RNA, 19 nt, Artificial Sequence
  Description of Artificial Sequence: Synthetic oligonucleotide
  Sense strand starting at position 1018 of SEQ ID NO: 916454
augcucuguauugggaaga

SEQ ID NO: 1157983 - RNA, 19 nt, Artificial Sequence
  Description of Artificial Sequence: Synthetic oligonucleotide
  Antisense strand to SEQ ID NO: 1157982
ucuucccaauacagagcau

SEQ ID NO: 1157984 - RNA, 19 nt, Artificial Sequence
  Description of Artificial Sequence: Synthetic oligonucleotide
  Sense strand starting at position 1197 of SEQ ID NO: 916454
cccguuuacauugcguaau

SEQ ID NO: 1157985 - RNA, 19 nt, Artificial Sequence
  Description of Artificial Sequence: Synthetic oligonucleotide
  Antisense strand to SEQ ID NO: 1157984
auuacgcaauguaaacggg

SEQ ID NO: 1157986 - RNA, 19 nt, Artificial Sequence
  Description of Artificial Sequence: Synthetic oligonucleotide
  Sense strand starting at position 1200 of SEQ ID NO: 916454
guuuacauugcguaaugau

SEQ ID NO: 1157987 - RNA, 19 nt, Artificial Sequence
  Description of Artificial Sequence: Synthetic oligonucleotide
  Antisense strand to SEQ ID NO: 1157986
aucauuacgcaauguaaac

SEQ ID NO: 1157988 - RNA, 19 nt, Artificial Sequence
  Description of Artificial Sequence: Synthetic oligonucleotide
  Sense strand starting at position 1281 of SEQ ID NO: 916454
ccaagaacucucggcuaua

SEQ ID NO: 1157989 - RNA, 19 nt, Artificial Sequence
  Description of Artificial Sequence: Synthetic oligonucleotide
  Antisense strand to SEQ ID NO: 1157988
uauagccgagaguucuugg

SEQ ID NO: 1157990 - RNA, 19 nt, Artificial Sequence
  Description of Artificial Sequence: Synthetic oligonucleotide
  Sense strand starting at position 1284 of SEQ ID NO: 916454
agaacucucggcuauauua

SEQ ID NO: 1157991 - RNA, 19 nt, Artificial Sequence
  Description of Artificial Sequence: Synthetic oligonucleotide
  Antisense strand to SEQ ID NO: 1157990
uaauauagccgagaguucu

SEQ ID NO: 1157992 - RNA, 19 nt, Artificial Sequence
  Description of Artificial Sequence: Synthetic oligonucleotide
  Sense strand starting at position 1577 of SEQ ID NO: 916454
ugcuuucugcccuaaggaa

SEQ ID NO: 1157993 - RNA, 19 nt, Artificial Sequence
  Description of Artificial Sequence: Synthetic oligonucleotide
  Antisense strand to SEQ ID NO: 1157992
uuccuuagggcagaaagca

SEQ ID NO: 1157994 - RNA, 19 nt, Artificial Sequence
  Description of Artificial Sequence: Synthetic oligonucleotide
  Sense strand starting at position 1721 of SEQ ID NO: 916454
agugauuaccgcgcucgga

SEQ ID NO: 1157995 - RNA, 19 nt, Artificial Sequence
  Description of Artificial Sequence: Synthetic oligonucleotide
  Antisense strand to SEQ ID NO: 1157994
uccgagcgcgguaaucacu

SEQ ID NO: 1157996 - RNA, 19 nt, Artificial Sequence
  Description of Artificial Sequence: Synthetic oligonucleotide
  Sense strand starting at position 2495 of SEQ ID NO: 916454
cgccuaucuccagaucuaa

SEQ ID NO: 1157997 - RNA, 19 nt, Artificial Sequence
  Description of Artificial Sequence: Synthetic oligonucleotide
  Antisense strand to SEQ ID NO: 1157996
uuagaucuggagauaggcg

SEQ ID NO: 1157998 - RNA, 19 nt, Artificial Sequence
  Description of Artificial Sequence: Synthetic oligonucleotide
  Sense strand starting at position 2568 of SEQ ID NO: 916454
ggaauacauugucuuuaga

SEQ ID NO: 1157999 - RNA, 19 nt, Artificial Sequence
  Description of Artificial Sequence: Synthetic oligonucleotide
  Antisense strand to SEQ ID NO: 1157998
ucuaaagacaauguauucc

SEQ ID NO: 1158000 - RNA, 19 nt, Artificial Sequence
  Description of Artificial Sequence: Synthetic oligonucleotide
  Sense strand starting at position 2718 of SEQ ID NO: 916454
cccugugaguuaucugaag

SEQ ID NO: 1158001 - RNA, 19 nt, Artificial Sequence
  Description of Artificial Sequence: Synthetic oligonucleotide
  Antisense strand to SEQ ID NO: 1158000
cuucagauaacucacaggg

SEQ ID NO: 1158002 - RNA, 19 nt, Artificial Sequence
  Description of Artificial Sequence: Synthetic oligonucleotide
  Sense strand starting at position 2732 of SEQ ID NO: 916454
ugaagcucuggucaccaaa

SEQ ID NO: 1158003 - RNA, 19 nt, Artificial Sequence
  Description of Artificial Sequence: Synthetic oligonucleotide
  Antisense strand to SEQ ID NO: 1158002
uuuggugaccagagcuuca

SEQ ID NO: 1158004 - RNA, 19 nt, Artificial Sequence
  Description of Artificial Sequence: Synthetic oligonucleotide
  Sense strand starting at position 2837 of SEQ ID NO: 916454
agcuauuagagcugagaca

SEQ ID NO: 1158005 - RNA, 19 nt, Artificial Sequence
  Description of Artificial Sequence: Synthetic oligonucleotide
  Antisense strand to SEQ ID NO: 1158004
ugucucagcucuaauagcu

SEQ ID NO: 1158006 - RNA, 19 nt, Artificial Sequence
  Description of Artificial Sequence: Synthetic oligonucleotide
  Sense strand starting at position 2838 of SEQ ID NO: 916454
gcuauuagagcugagacaa

SEQ ID NO: 1158007 - RNA, 19 nt, Artificial Sequence
  Description of Artificial Sequence: Synthetic oligonucleotide
  Antisense strand to SEQ ID NO: 1158006
uugucucagcucuaauagc

SEQ ID NO: 1158008 - RNA, 19 nt, Artificial Sequence
  Description of Artificial Sequence: Synthetic oligonucleotide
  Sense strand starting at position 2936 of SEQ ID NO: 916454
uuaugaguaugggugucua

SEQ ID NO: 1158009 - RNA, 19 nt, Artificial Sequence
  Description of Artificial Sequence: Synthetic oligonucleotide
  Antisense strand to SEQ ID NO: 1158008
uagacacccauacucauaa

SEQ ID NO: 1158010 - RNA, 19 nt, Artificial Sequence
  Description of Artificial Sequence: Synthetic oligonucleotide
  Sense strand starting at position 2940 of SEQ ID NO: 916454
gaguaugggugucuauaac

SEQ ID NO: 1158011 - RNA, 19 nt, Artificial Sequence
  Description of Artificial Sequence: Synthetic oligonucleotide
  Antisense strand to SEQ ID NO: 1158010
guuauagacacccauacuc

SEQ ID NO: 1158012 - RNA, 19 nt, Artificial Sequence
  Description of Artificial Sequence: Synthetic oligonucleotide
  Sense strand starting at position 3003 of SEQ ID NO: 916454
ucuguuaaguaccuaagua

SEQ ID NO: 1158013 - RNA, 19 nt, Artificial Sequence
  Description of Artificial Sequence: Synthetic oligonucleotide
  Antisense strand to SEQ ID NO: 1158012
uacuuagguacuuaacaga

SEQ ID NO: 1158014 - RNA, 19 nt, Artificial Sequence
  Description of Artificial Sequence: Synthetic oligonucleotide
  Sense strand starting at position 3007 of SEQ ID NO: 916454
uuaaguaccuaaguaaugu

SEQ ID NO: 1158015 - RNA, 19 nt, Artificial Sequence
  Description of Artificial Sequence: Synthetic oligonucleotide
  Antisense strand to SEQ ID NO: 1158014
acauuacuuagguacuuaa

SEQ ID NO: 1158016 - RNA, 19 nt, Artificial Sequence
  Description of Artificial Sequence: Synthetic oligonucleotide
  Sense strand starting at position 3098 of SEQ ID NO: 916454
ugugucuguccucaagauc

SEQ ID NO: 1158017 - RNA, 19 nt, Artificial Sequence
  Description of Artificial Sequence: Synthetic oligonucleotide
  Antisense strand to SEQ ID NO: 1158016
gaucuugaggacagacaca

SEQ ID NO: 1158018 - RNA, 19 nt, Artificial Sequence
  Description of Artificial Sequence: Synthetic oligonucleotide
  Sense strand starting at position 3101 of SEQ ID NO: 916454
gucuguccucaagaucacu

SEQ ID NO: 1158019 - RNA, 19 nt, Artificial Sequence
  Description of Artificial Sequence: Synthetic oligonucleotide
  Antisense strand to SEQ ID NO: 1158018
agugaucuugaggacagac

SEQ ID NO: 1158020 - RNA, 19 nt, Artificial Sequence
  Description of Artificial Sequence: Synthetic oligonucleotide
  Sense strand starting at position 3341 of SEQ ID NO: 916454
cuccuaacuccagguagaa

SEQ ID NO: 1158021 - RNA, 19 nt, Artificial Sequence
  Description of Artificial Sequence: Synthetic oligonucleotide
  Antisense strand to SEQ ID NO: 1158020
uucuaccuggaguuaggag

SEQ ID NO: 1158022 - RNA, 19 nt, Artificial Sequence
  Description of Artificial Sequence: Synthetic oligonucleotide
  Sense strand starting at position 3392 of SEQ ID NO: 916454
gcucuagacuuuguuaaua

SEQ ID NO: 1158023 - RNA, 19 nt, Artificial Sequence
  Description of Artificial Sequence: Synthetic oligonucleotide
  Antisense strand to SEQ ID NO: 1158022
uauuaacaaagucuagagc

SEQ ID NO: 1158024 - RNA, 19 nt, Artificial Sequence
  Description of Artificial Sequence: Synthetic oligonucleotide
  Sense strand starting at position 3448 of SEQ ID NO: 916454
ggauauugggucuaugucu

SEQ ID NO: 1158025 - RNA, 19 nt, Artificial Sequence
  Description of Artificial Sequence: Synthetic oligonucleotide
  Antisense strand to SEQ ID NO: 1158024
agacauagacccaauaucc

SEQ ID NO: 1158026 - RNA, 19 nt, Artificial Sequence
  Description of Artificial Sequence: Synthetic oligonucleotide
  Sense strand starting at position 3465 of SEQ ID NO: 916454
cuuguuguuauagagucuu

SEQ ID NO: 1158027 - RNA, 19 nt, Artificial Sequence
  Description of Artificial Sequence: Synthetic oligonucleotide
  Antisense strand to SEQ ID NO: 1158026
aagacucuauaacaacaag

SEQ ID NO: 1158028 - RNA, 19 nt, Artificial Sequence
  Description of Artificial Sequence: Synthetic oligonucleotide
  Sense strand starting at position 3471 of SEQ ID NO: 916454
guuauagagucuuuaacuu

SEQ ID NO: 1158029 - RNA, 19 nt, Artificial Sequence
  Description of Artificial Sequence: Synthetic oligonucleotide
  Antisense strand to SEQ ID NO: 1158028
aaguuaaagacucuauaac

SEQ ID NO: 1158030 - RNA, 19 nt, Artificial Sequence
  Description of Artificial Sequence: Synthetic oligonucleotide
  Sense strand starting at position 3541 of SEQ ID NO: 916454
aaagucauccaguggugga

SEQ ID NO: 1158031 - RNA, 19 nt, Artificial Sequence
  Description of Artificial Sequence: Synthetic oligonucleotide
  Antisense strand to SEQ ID NO: 1158030
uccaccacuggaugacuuu

SEQ ID NO: 1158032 - RNA, 19 nt, Artificial Sequence
  Description of Artificial Sequence: Synthetic oligonucleotide
  Sense strand starting at position 3565 of SEQ ID NO: 916454
agaugaaauguguggagau

SEQ ID NO: 1158033 - RNA, 19 nt, Artificial Sequence
  Description of Artificial Sequence: Synthetic oligonucleotide
  Antisense strand to SEQ ID NO: 1158032
aucuccacacauuucaucu

SEQ ID NO: 1158034 - RNA, 19 nt, Artificial Sequence
  Description of Artificial Sequence: Synthetic oligonucleotide
  Sense strand starting at position 3717 of SEQ ID NO: 916454
uuaucagaccuacagugua

SEQ ID NO: 1158035 - RNA, 19 nt, Artificial Sequence
  Description of Artificial Sequence: Synthetic oligonucleotide
  Antisense strand to SEQ ID NO: 1158034
uacacuguaggucugauaa

SEQ ID NO: 1158036 - RNA, 19 nt, Artificial Sequence
  Description of Artificial Sequence: Synthetic oligonucleotide
  Sense strand starting at position 3720 of SEQ ID NO: 916454
ucagaccuacaguguauua

SEQ ID NO: 1158037 - RNA, 19 nt, Artificial Sequence
  Description of Artificial Sequence: Synthetic oligonucleotide
  Antisense strand to SEQ ID NO: 1158036
uaauacacuguaggucuga

SEQ ID NO: 1158038 - RNA, 19 nt, Artificial Sequence
  Description of Artificial Sequence: Synthetic oligonucleotide
  Sense strand starting at position 3722 of SEQ ID NO: 916454
agaccuacaguguauuauu

SEQ ID NO: 1158039 - RNA, 19 nt, Artificial Sequence
  Description of Artificial Sequence: Synthetic oligonucleotide
  Antisense strand to SEQ ID NO: 1158038
aauaauacacuguaggucu

SEQ ID NO: 1158040 - RNA, 19 nt, Artificial Sequence
  Description of Artificial Sequence: Synthetic oligonucleotide
  Sense strand starting at position 16 of SEQ ID NO: 916455
ggcucuggugccugggaaa

SEQ ID NO: 1158041 - RNA, 19 nt, Artificial Sequence
  Description of Artificial Sequence: Synthetic oligonucleotide
  Antisense strand to SEQ ID NO: 1158040
uuucccaggcaccagagcc

SEQ ID NO: 1158042 - RNA, 19 nt, Artificial Sequence
  Description of Artificial Sequence: Synthetic oligonucleotide
  Sense strand starting at position 64 of SEQ ID NO: 916455
agacaagcuucugucaaac

SEQ ID NO: 1158043 - RNA, 19 nt, Artificial Sequence
  Description of Artificial Sequence: Synthetic oligonucleotide
  Antisense strand to SEQ ID NO: 1158042
guuugacagaagcuugucu

SEQ ID NO: 1158044 - RNA, 19 nt, Artificial Sequence
  Description of Artificial Sequence: Synthetic oligonucleotide
  Sense strand starting at position 323 of SEQ ID NO: 916455
gcaguuaucuaagcugcag

SEQ ID NO: 1158045 - RNA, 19 nt, Artificial Sequence
  Description of Artificial Sequence: Synthetic oligonucleotide
  Antisense strand to SEQ ID NO: 1158044
cugcagcuuagauaacugc

SEQ ID NO: 1158046 - RNA, 19 nt, Artificial Sequence
  Description of Artificial Sequence: Synthetic oligonucleotide
  Sense strand starting at position 343 of SEQ ID NO: 916455
ggugucaucugagucacaa

SEQ ID NO: 1158047 - RNA, 19 nt, Artificial Sequence
  Description of Artificial Sequence: Synthetic oligonucleotide
  Antisense strand to SEQ ID NO: 1158046
uugugacucagaugacacc

SEQ ID NO: 1158048 - RNA, 19 nt, Artificial Sequence
  Description of Artificial Sequence: Synthetic oligonucleotide
  Sense strand starting at position 2106 of SEQ ID NO: 916455
ugacuucuguuccgaugga

SEQ ID NO: 1158049 - RNA, 19 nt, Artificial Sequence
  Description of Artificial Sequence: Synthetic oligonucleotide
  Antisense strand to SEQ ID NO: 1158048
uccaucggaacagaaguca

SEQ ID NO: 1158050 - RNA, 19 nt, Artificial Sequence
  Description of Artificial Sequence: Synthetic oligonucleotide
  Sense strand starting at position 2180 of SEQ ID NO: 916455
ucccauccugccugagaga

SEQ ID NO: 1158051 - RNA, 19 nt, Artificial Sequence
  Description of Artificial Sequence: Synthetic oligonucleotide
  Antisense strand to SEQ ID NO: 1158050
ucucucaggcaggauggga

SEQ ID NO: 1158052 - RNA, 19 nt, Artificial Sequence
  Description of Artificial Sequence: Synthetic oligonucleotide
  Sense strand starting at position 2181 of SEQ ID NO: 916455
cccauccugccugagagaa

SEQ ID NO: 1158053 - RNA, 19 nt, Artificial Sequence
  Description of Artificial Sequence: Synthetic oligonucleotide
  Antisense strand to SEQ ID NO: 1158052
uucucucaggcaggauggg

SEQ ID NO: 1158054 - RNA, 19 nt, Artificial Sequence
  Description of Artificial Sequence: Synthetic oligonucleotide
  Sense strand starting at position 2215 of SEQ ID NO: 916455
uucucucggucauacgaaa

SEQ ID NO: 1158055 - RNA, 19 nt, Artificial Sequence
  Description of Artificial Sequence: Synthetic oligonucleotide
  Antisense strand to SEQ ID NO: 1158054
uuucguaugaccgagagaa

SEQ ID NO: 1158056 - RNA, 19 nt, Artificial Sequence
  Description of Artificial Sequence: Synthetic oligonucleotide
  Sense strand starting at position 2482 of SEQ ID NO: 916455
ccuugcucuuaucugugau

SEQ ID NO: 1158057 - RNA, 19 nt, Artificial Sequence
  Description of Artificial Sequence: Synthetic oligonucleotide
  Antisense strand to SEQ ID NO: 1158056
aucacagauaagagcaagg

SEQ ID NO: 1158058 - RNA, 19 nt, Artificial Sequence
  Description of Artificial Sequence: Synthetic oligonucleotide
  Sense strand starting at position 2486 of SEQ ID NO: 916455
gcucuuaucugugaugggu

SEQ ID NO: 1158059 - RNA, 19 nt, Artificial Sequence
  Description of Artificial Sequence: Synthetic oligonucleotide
  Antisense strand to SEQ ID NO: 1158058
acccaucacagauaagagc

SEQ ID NO: 1158060 - RNA, 19 nt, Artificial Sequence
  Description of Artificial Sequence: Synthetic oligonucleotide
  Sense strand starting at position 2488 of SEQ ID NO: 916455
ucuuaucugugauggguca

SEQ ID NO: 1158061 - RNA, 19 nt, Artificial Sequence
  Description of Artificial Sequence: Synthetic oligonucleotide
  Antisense strand to SEQ ID NO: 1158060
ugacccaucacagauaaga

SEQ ID NO: 1158062 - RNA, 19 nt, Artificial Sequence
  Description of Artificial Sequence: Synthetic oligonucleotide
  Sense strand starting at position 2606 of SEQ ID NO: 916455
ggaaguggcugaucugaag

SEQ ID NO: 1158063 - RNA, 19 nt, Artificial Sequence
  Description of Artificial Sequence: Synthetic oligonucleotide
  Antisense strand to SEQ ID NO: 1158062
cuucagaucagccacuucc

SEQ ID NO: 1158064 - RNA, 19 nt, Artificial Sequence
  Description of Artificial Sequence: Synthetic oligonucleotide
  Sense strand starting at position 2735 of SEQ ID NO: 916455
ccgugcuagcgauauauca

SEQ ID NO: 1158065 - RNA, 19 nt, Artificial Sequence
  Description of Artificial Sequence: Synthetic oligonucleotide
  Antisense strand to SEQ ID NO: 1158064
ugauauaucgcuagcacgg

SEQ ID NO: 1158066 - RNA, 19 nt, Artificial Sequence
  Description of Artificial Sequence: Synthetic oligonucleotide
  Sense strand starting at position 2745 of SEQ ID NO: 916455
gauauaucaccguguccua

SEQ ID NO: 1158067 - RNA, 19 nt, Artificial Sequence
  Description of Artificial Sequence: Synthetic oligonucleotide
  Antisense strand to SEQ ID NO: 1158066
uaggacacggugauauauc

SEQ ID NO: 1158068 - RNA, 19 nt, Artificial Sequence
  Description of Artificial Sequence: Synthetic oligonucleotide
  Sense strand starting at position 154 of SEQ ID NO: 916456
uugaaacugcauugaaaua

SEQ ID NO: 1158069 - RNA, 19 nt, Artificial Sequence
  Description of Artificial Sequence: Synthetic oligonucleotide
  Antisense strand to SEQ ID NO: 1158068
uauuucaaugcaguuucaa

SEQ ID NO: 1158070 - RNA, 19 nt, Artificial Sequence
  Description of Artificial Sequence: Synthetic oligonucleotide
  Sense strand starting at position 211 of SEQ ID NO: 916456
uaaagauagcaugguacuu

SEQ ID NO: 1158071 - RNA, 19 nt, Artificial Sequence
  Description of Artificial Sequence: Synthetic oligonucleotide
  Antisense strand to SEQ ID NO: 1158070
aaguaccaugcuaucuuua

SEQ ID NO: 1158072 - RNA, 19 nt, Artificial Sequence
  Description of Artificial Sequence: Synthetic oligonucleotide
  Sense strand starting at position 241 of SEQ ID NO: 916456
aagugcgaucugcaaggaa

SEQ ID NO: 1158073 - RNA, 19 nt, Artificial Sequence
  Description of Artificial Sequence: Synthetic oligonucleotide
  Antisense strand to SEQ ID NO: 1158072
uuccuugcagaucgcacuu

SEQ ID NO: 1158074 - RNA, 19 nt, Artificial Sequence
  Description of Artificial Sequence: Synthetic oligonucleotide
  Sense strand starting at position 391 of SEQ ID NO: 916456
guaagaaaguaaguacuua

SEQ ID NO: 1158075 - RNA, 19 nt, Artificial Sequence
  Description of Artificial Sequence: Synthetic oligonucleotide
  Antisense strand to SEQ ID NO: 1158074
uaaguacuuacuuucuuac

SEQ ID NO: 1158076 - RNA, 19 nt, Artificial Sequence
  Description of Artificial Sequence: Synthetic oligonucleotide
  Sense strand starting at position 395 of SEQ ID NO: 916456
gaaaguaaguacuuauuag

SEQ ID NO: 1158077 - RNA, 19 nt, Artificial Sequence
  Description of Artificial Sequence: Synthetic oligonucleotide
  Antisense strand to SEQ ID NO: 1158076
cuaauaaguacuuacuuuc

SEQ ID NO: 1158078 - RNA, 19 nt, Artificial Sequence
  Description of Artificial Sequence: Synthetic oligonucleotide
  Sense strand starting at position 515 of SEQ ID NO: 916456
auugaugugcuuuaguaga

SEQ ID NO: 1158079 - RNA, 19 nt, Artificial Sequence
  Description of Artificial Sequence: Synthetic oligonucleotide
  Antisense strand to SEQ ID NO: 1158078
ucuacuaaagcacaucaau

SEQ ID NO: 1158080 - RNA, 19 nt, Artificial Sequence
  Description of Artificial Sequence: Synthetic oligonucleotide
  Sense strand starting at position 654 of SEQ ID NO: 916456
ggugaaagguaccuucaga

SEQ ID NO: 1158081 - RNA, 19 nt, Artificial Sequence
  Description of Artificial Sequence: Synthetic oligonucleotide
  Antisense strand to SEQ ID NO: 1158080
ucugaagguaccuuucacc

SEQ ID NO: 1158082 - RNA, 19 nt, Artificial Sequence
  Description of Artificial Sequence: Synthetic oligonucleotide
  Sense strand starting at position 782 of SEQ ID NO: 916456
ucauuccaaugguuauaga

SEQ ID NO: 1158083 - RNA, 19 nt, Artificial Sequence
  Description of Artificial Sequence: Synthetic oligonucleotide
  Antisense strand to SEQ ID NO: 1158082
ucuauaaccauuggaauga

SEQ ID NO: 1158084 - RNA, 19 nt, Artificial Sequence
  Description of Artificial Sequence: Synthetic oligonucleotide
  Sense strand starting at position 792 of SEQ ID NO: 916456
gguuauagaguuuguagaa

SEQ ID NO: 1158085 - RNA, 19 nt, Artificial Sequence
  Description of Artificial Sequence: Synthetic oligonucleotide
  Antisense strand to SEQ ID NO: 1158084
uucuacaaacucuauaacc

SEQ ID NO: 1158086 - RNA, 19 nt, Artificial Sequence
  Description of Artificial Sequence: Synthetic oligonucleotide
  Sense strand starting at position 793 of SEQ ID NO: 916456
guuauagaguuuguagaag

SEQ ID NO: 1158087 - RNA, 19 nt, Artificial Sequence
  Description of Artificial Sequence: Synthetic oligonucleotide
  Antisense strand to SEQ ID NO: 1158086
cuucuacaaacucuauaac

SEQ ID NO: 1158088 - RNA, 19 nt, Artificial Sequence
  Description of Artificial Sequence: Synthetic oligonucleotide
  Sense strand starting at position 1054 of SEQ ID NO: 916456
uccuaagaggcuugagaac

SEQ ID NO: 1158089 - RNA, 19 nt, Artificial Sequence
  Description of Artificial Sequence: Synthetic oligonucleotide
  Antisense strand to SEQ ID NO: 1158088
guucucaagccucuuagga

SEQ ID NO: 1158090 - RNA, 19 nt, Artificial Sequence
  Description of Artificial Sequence: Synthetic oligonucleotide
  Sense strand starting at position 1124 of SEQ ID NO: 916456
ugcagaccuguggauugaa

SEQ ID NO: 1158091 - RNA, 19 nt, Artificial Sequence
  Description of Artificial Sequence: Synthetic oligonucleotide
  Antisense strand to SEQ ID NO: 1158090
uucaauccacaggucugca

SEQ ID NO: 1158092 - RNA, 19 nt, Artificial Sequence
  Description of Artificial Sequence: Synthetic oligonucleotide
  Sense strand starting at position 1132 of SEQ ID NO: 916456
uguggauugaaauaagugu

SEQ ID NO: 1158093 - RNA, 19 nt, Artificial Sequence
  Description of Artificial Sequence: Synthetic oligonucleotide
  Antisense strand to SEQ ID NO: 1158092
acacuuauuucaauccaca

SEQ ID NO: 1158094 - RNA, 19 nt, Artificial Sequence
  Description of Artificial Sequence: Synthetic oligonucleotide
  Sense strand starting at position 1192 of SEQ ID NO: 916456
ggaucugagacuuggguga

SEQ ID NO: 1158095 - RNA, 19 nt, Artificial Sequence
  Description of Artificial Sequence: Synthetic oligonucleotide
  Antisense strand to SEQ ID NO: 1158094
ucacccaagucucagaucc

SEQ ID NO: 1158096 - RNA, 19 nt, Artificial Sequence
  Description of Artificial Sequence: Synthetic oligonucleotide
  Sense strand starting at position 1196 of SEQ ID NO: 916456
cugagacuugggugagauu

SEQ ID NO: 1158097 - RNA, 19 nt, Artificial Sequence
  Description of Artificial Sequence: Synthetic oligonucleotide
  Antisense strand to SEQ ID NO: 1158096
aaucucacccaagucucag

SEQ ID NO: 1158098 - RNA, 19 nt, Artificial Sequence
  Description of Artificial Sequence: Synthetic oligonucleotide
  Sense strand starting at position 1910 of SEQ ID NO: 916456
cagacucgucgauagagaa

SEQ ID NO: 1158099 - RNA, 19 nt, Artificial Sequence
  Description of Artificial Sequence: Synthetic oligonucleotide
  Antisense strand to SEQ ID NO: 1158098
uucucuaucgacgagucug

SEQ ID NO: 1158100 - RNA, 19 nt, Artificial Sequence
  Description of Artificial Sequence: Synthetic oligonucleotide
  Sense strand starting at position 1987 of SEQ ID NO: 916456
aaaggaaguuucuuaaagu

SEQ ID NO: 1158101 - RNA, 19 nt, Artificial Sequence
  Description of Artificial Sequence: Synthetic oligonucleotide
  Antisense strand to SEQ ID NO: 1158100
acuuuaagaaacuuccuuu

SEQ ID NO: 1158102 - RNA, 19 nt, Artificial Sequence
  Description of Artificial Sequence: Synthetic oligonucleotide
  Sense strand starting at position 2177 of SEQ ID NO: 916456
gggaaaugaugagaaugga

SEQ ID NO: 1158103 - RNA, 19 nt, Artificial Sequence
  Description of Artificial Sequence: Synthetic oligonucleotide
  Antisense strand to SEQ ID NO: 1158102
uccauucucaucauuuccc

SEQ ID NO: 1158104 - RNA, 19 nt, Artificial Sequence
  Description of Artificial Sequence: Synthetic oligonucleotide
  Sense strand starting at position 2645 of SEQ ID NO: 916456
ggccuuuguggcaggugaa

SEQ ID NO: 1158105 - RNA, 19 nt, Artificial Sequence
  Description of Artificial Sequence: Synthetic oligonucleotide
  Antisense strand to SEQ ID NO: 1158104
uucaccugccacaaaggcc

SEQ ID NO: 1158106 - RNA, 19 nt, Artificial Sequence
  Description of Artificial Sequence: Synthetic oligonucleotide
  Sense strand starting at position 2766 of SEQ ID NO: 916456
uaauccugggugcauuaau

SEQ ID NO: 1158107 - RNA, 19 nt, Artificial Sequence
  Description of Artificial Sequence: Synthetic oligonucleotide
  Antisense strand to SEQ ID NO: 1158106
auuaaugcacccaggauua

SEQ ID NO: 1158108 - RNA, 19 nt, Artificial Sequence
  Description of Artificial Sequence: Synthetic oligonucleotide
  Sense strand starting at position 2817 of SEQ ID NO: 916456
cugauaaagcauggucaga

SEQ ID NO: 1158109 - RNA, 19 nt, Artificial Sequence
  Description of Artificial Sequence: Synthetic oligonucleotide
  Antisense strand to SEQ ID NO: 1158108
ucugaccaugcuuuaucag

SEQ ID NO: 1158110 - RNA, 19 nt, Artificial Sequence
  Description of Artificial Sequence: Synthetic oligonucleotide
  Sense strand starting at position 2819 of SEQ ID NO: 916456
gauaaagcauggucagacu

SEQ ID NO: 1158111 - RNA, 19 nt, Artificial Sequence
  Description of Artificial Sequence: Synthetic oligonucleotide
  Antisense strand to SEQ ID NO: 1158110
agucugaccaugcuuuauc

SEQ ID NO: 1158112 - RNA, 19 nt, Artificial Sequence
  Description of Artificial Sequence: Synthetic oligonucleotide
  Sense strand starting at position 2922 of SEQ ID NO: 916456
ugacauagguaaguaguaa

SEQ ID NO: 1158113 - RNA, 19 nt, Artificial Sequence
  Description of Artificial Sequence: Synthetic oligonucleotide
  Antisense strand to SEQ ID NO: 1158112
uuacuacuuaccuauguca

SEQ ID NO: 1158114 - RNA, 19 nt, Artificial Sequence
  Description of Artificial Sequence: Synthetic oligonucleotide
  Sense strand starting at position 3059 of SEQ ID NO: 916456
gagguaguagucuauauga

SEQ ID NO: 1158115 - RNA, 19 nt, Artificial Sequence
  Description of Artificial Sequence: Synthetic oligonucleotide
  Antisense strand to SEQ ID NO: 1158114
ucauauagacuacuaccuc

SEQ ID NO: 1158116 - RNA, 19 nt, Artificial Sequence
  Description of Artificial Sequence: Synthetic oligonucleotide
  Sense strand starting at position 3061 of SEQ ID NO: 916456
gguaguagucuauaugaag

SEQ ID NO: 1158117 - RNA, 19 nt, Artificial Sequence
  Description of Artificial Sequence: Synthetic oligonucleotide
  Antisense strand to SEQ ID NO: 1158116
cuucauauagacuacuacc

SEQ ID NO: 1158118 - RNA, 19 nt, Artificial Sequence
  Description of Artificial Sequence: Synthetic oligonucleotide
  Sense strand starting at position 3139 of SEQ ID NO: 916456
ggguuuaauugguuuacag

SEQ ID NO: 1158119 - RNA, 19 nt, Artificial Sequence
  Description of Artificial Sequence: Synthetic oligonucleotide
  Antisense strand to SEQ ID NO: 1158118
cuguaaaccaauuaaaccc

SEQ ID NO: 1158120 - RNA, 19 nt, Artificial Sequence
  Description of Artificial Sequence: Synthetic oligonucleotide
  Sense strand starting at position 3175 of SEQ ID NO: 916456
gaagcauagcuccaguaug

SEQ ID NO: 1158121 - RNA, 19 nt, Artificial Sequence
  Description of Artificial Sequence: Synthetic oligonucleotide
  Antisense strand to SEQ ID NO: 1158120
cauacuggagcuaugcuuc

SEQ ID NO: 1158122 - RNA, 19 nt, Artificial Sequence
  Description of Artificial Sequence: Synthetic oligonucleotide
  Sense strand starting at position 3532 of SEQ ID NO: 916456
aguggagauguccaugagu

SEQ ID NO: 1158123 - RNA, 19 nt, Artificial Sequence
  Description of Artificial Sequence: Synthetic oligonucleotide
  Antisense strand to SEQ ID NO: 1158122
acucauggacaucuccacu

SEQ ID NO: 1158124 - RNA, 19 nt, Artificial Sequence
  Description of Artificial Sequence: Synthetic oligonucleotide
  Sense strand starting at position 3534 of SEQ ID NO: 916456
uggagauguccaugaguca

SEQ ID NO: 1158125 - RNA, 19 nt, Artificial Sequence
  Description of Artificial Sequence: Synthetic oligonucleotide
  Antisense strand to SEQ ID NO: 1158124
ugacucauggacaucucca

SEQ ID NO: 1158126 - RNA, 19 nt, Artificial Sequence
  Description of Artificial Sequence: Synthetic oligonucleotide
  Sense strand starting at position 3535 of SEQ ID NO: 916456
ggagauguccaugagucac

SEQ ID NO: 1158127 - RNA, 19 nt, Artificial Sequence
  Description of Artificial Sequence: Synthetic oligonucleotide
  Antisense strand to SEQ ID NO: 1158126
gugacucauggacaucucc

SEQ ID NO: 1158128 - RNA, 19 nt, Artificial Sequence
  Description of Artificial Sequence: Synthetic oligonucleotide
  Sense strand starting at position 3580 of SEQ ID NO: 916456
ggaagugccagguagacau

SEQ ID NO: 1158129 - RNA, 19 nt, Artificial Sequence
  Description of Artificial Sequence: Synthetic oligonucleotide
  Antisense strand to SEQ ID NO: 1158128
augucuaccuggcacuucc

SEQ ID NO: 1158130 - RNA, 19 nt, Artificial Sequence
  Description of Artificial Sequence: Synthetic oligonucleotide
  Sense strand starting at position 3592 of SEQ ID NO: 916456
uagacaugaccacgucaca

SEQ ID NO: 1158131 - RNA, 19 nt, Artificial Sequence
  Description of Artificial Sequence: Synthetic oligonucleotide
  Antisense strand to SEQ ID NO: 1158130
ugugacguggucaugucua

SEQ ID NO: 1158132 - RNA, 19 nt, Artificial Sequence
  Description of Artificial Sequence: Synthetic oligonucleotide
  Sense strand starting at position 3611 of SEQ ID NO: 916456
uaacgugguggaugaaauu

SEQ ID NO: 1158133 - RNA, 19 nt, Artificial Sequence
  Description of Artificial Sequence: Synthetic oligonucleotide
  Antisense strand to SEQ ID NO: 1158132
aauuucauccaccacguua

SEQ ID NO: 1158134 - RNA, 19 nt, Artificial Sequence
  Description of Artificial Sequence: Synthetic oligonucleotide
  Sense strand starting at position 3625 of SEQ ID NO: 916456
aaauuaugacaguggguaa

SEQ ID NO: 1158135 - RNA, 19 nt, Artificial Sequence
  Description of Artificial Sequence: Synthetic oligonucleotide
  Antisense strand to SEQ ID NO: 1158134
uuacccacugucauaauuu

SEQ ID NO: 1158136 - RNA, 19 nt, Artificial Sequence
  Description of Artificial Sequence: Synthetic oligonucleotide
  Sense strand starting at position 3649 of SEQ ID NO: 916456
acccaagaagaguguguaa

SEQ ID NO: 1158137 - RNA, 19 nt, Artificial Sequence
  Description of Artificial Sequence: Synthetic oligonucleotide
  Antisense strand to SEQ ID NO: 1158136
uuacacacucuucuugggu

SEQ ID NO: 1158138 - RNA, 19 nt, Artificial Sequence
  Description of Artificial Sequence: Synthetic oligonucleotide
  Sense strand starting at position 3651 of SEQ ID NO: 916456
ccaagaagaguguguaaag

SEQ ID NO: 1158139 - RNA, 19 nt, Artificial Sequence
  Description of Artificial Sequence: Synthetic oligonucleotide
  Antisense strand to SEQ ID NO: 1158138
cuuuacacacucuucuugg

SEQ ID NO: 1158140 - RNA, 19 nt, Artificial Sequence
  Description of Artificial Sequence: Synthetic oligonucleotide
  Sense strand starting at position 3652 of SEQ ID NO: 916456
caagaagaguguguaaaga

SEQ ID NO: 1158141 - RNA, 19 nt, Artificial Sequence
  Description of Artificial Sequence: Synthetic oligonucleotide
  Antisense strand to SEQ ID NO: 1158140
ucuuuacacacucuucuug

SEQ ID NO: 1158142 - RNA, 19 nt, Artificial Sequence
  Description of Artificial Sequence: Synthetic oligonucleotide
  Sense strand starting at position 3662 of SEQ ID NO: 916456
guguaaagagaaggguaau

SEQ ID NO: 1158143 - RNA, 19 nt, Artificial Sequence
  Description of Artificial Sequence: Synthetic oligonucleotide
  Antisense strand to SEQ ID NO: 1158142
auuacccuucucuuuacac

SEQ ID NO: 1158144 - RNA, 19 nt, Artificial Sequence
  Description of Artificial Sequence: Synthetic oligonucleotide
  Sense strand starting at position 3878 of SEQ ID NO: 916456
ugucgugauuugguugaag

SEQ ID NO: 1158145 - RNA, 19 nt, Artificial Sequence
  Description of Artificial Sequence: Synthetic oligonucleotide
  Antisense strand to SEQ ID NO: 1158144
cuucaaccaaaucacgaca

SEQ ID NO: 1158146 - RNA, 19 nt, Artificial Sequence
  Description of Artificial Sequence: Synthetic oligonucleotide
  Sense strand starting at position 3908 of SEQ ID NO: 916456
agaguaguggauugagcaa

SEQ ID NO: 1158147 - RNA, 19 nt, Artificial Sequence
  Description of Artificial Sequence: Synthetic oligonucleotide
  Antisense strand to SEQ ID NO: 1158146
uugcucaauccacuacucu

SEQ ID NO: 1158148 - RNA, 19 nt, Artificial Sequence
  Description of Artificial Sequence: Synthetic oligonucleotide
  Sense strand starting at position 1064 of SEQ ID NO: 916457
cuuaguuauagacggaaag

SEQ ID NO: 1158149 - RNA, 19 nt, Artificial Sequence
  Description of Artificial Sequence: Synthetic oligonucleotide
  Antisense strand to SEQ ID NO: 1158148
cuuuccgucuauaacuaag

SEQ ID NO: 1158150 - RNA, 19 nt, Artificial Sequence
  Description of Artificial Sequence: Synthetic oligonucleotide
  Sense strand starting at position 1065 of SEQ ID NO: 916457
uuaguuauagacggaaaga

SEQ ID NO: 1158151 - RNA, 19 nt, Artificial Sequence
  Description of Artificial Sequence: Synthetic oligonucleotide
  Antisense strand to SEQ ID NO: 1158150
ucuuuccgucuauaacuaa

SEQ ID NO: 1158152 - RNA, 19 nt, Artificial Sequence
  Description of Artificial Sequence: Synthetic oligonucleotide
  Sense strand starting at position 1090 of SEQ ID NO: 916457
ucaccuacgucuuuagaug

SEQ ID NO: 1158153 - RNA, 19 nt, Artificial Sequence
  Description of Artificial Sequence: Synthetic oligonucleotide
  Antisense strand to SEQ ID NO: 1158152
caucuaaagacguagguga

SEQ ID NO: 1158154 - RNA, 19 nt, Artificial Sequence
  Description of Artificial Sequence: Synthetic oligonucleotide
  Sense strand starting at position 1091 of SEQ ID NO: 916457
caccuacgucuuuagauga

SEQ ID NO: 1158155 - RNA, 19 nt, Artificial Sequence
  Description of Artificial Sequence: Synthetic oligonucleotide
  Antisense strand to SEQ ID NO: 1158154
ucaucuaaagacguaggug

SEQ ID NO: 1158156 - RNA, 19 nt, Artificial Sequence
  Description of Artificial Sequence: Synthetic oligonucleotide
  Sense strand starting at position 1320 of SEQ ID NO: 916457
cccucacuuugguccaaga

SEQ ID NO: 1158157 - RNA, 19 nt, Artificial Sequence
  Description of Artificial Sequence: Synthetic oligonucleotide
  Antisense strand to SEQ ID NO: 1158156
ucuuggaccaaagugaggg

SEQ ID NO: 1158158 - RNA, 19 nt, Artificial Sequence
  Description of Artificial Sequence: Synthetic oligonucleotide
  Sense strand starting at position 1322 of SEQ ID NO: 916457
cucacuuugguccaagaac

SEQ ID NO: 1158159 - RNA, 19 nt, Artificial Sequence
  Description of Artificial Sequence: Synthetic oligonucleotide
  Antisense strand to SEQ ID NO: 1158158
guucuuggaccaaagugag

SEQ ID NO: 1158160 - RNA, 19 nt, Artificial Sequence
  Description of Artificial Sequence: Synthetic oligonucleotide
  Sense strand starting at position 1331 of SEQ ID NO: 916457
guccaagaacacugggauu

SEQ ID NO: 1158161 - RNA, 19 nt, Artificial Sequence
  Description of Artificial Sequence: Synthetic oligonucleotide
  Antisense strand to SEQ ID NO: 1158160
aaucccaguguucuuggac

SEQ ID NO: 1158162 - RNA, 19 nt, Artificial Sequence
  Description of Artificial Sequence: Synthetic oligonucleotide
  Sense strand starting at position 1669 of SEQ ID NO: 916457
ugagaacaugucggguaga

SEQ ID NO: 1158163 - RNA, 19 nt, Artificial Sequence
  Description of Artificial Sequence: Synthetic oligonucleotide
  Antisense strand to SEQ ID NO: 1158162
ucuacccgacauguucuca

SEQ ID NO: 1158164 - RNA, 19 nt, Artificial Sequence
  Description of Artificial Sequence: Synthetic oligonucleotide
  Sense strand starting at position 1735 of SEQ ID NO: 916457
ccucacaugccuugagaag

SEQ ID NO: 1158165 - RNA, 19 nt, Artificial Sequence
  Description of Artificial Sequence: Synthetic oligonucleotide
  Antisense strand to SEQ ID NO: 1158164
cuucucaaggcaugugagg

SEQ ID NO: 1158166 - RNA, 19 nt, Artificial Sequence
  Description of Artificial Sequence: Synthetic oligonucleotide
  Sense strand starting at position 1760 of SEQ ID NO: 916457
ggaacuuaccuuuaaggcu

SEQ ID NO: 1158167 - RNA, 19 nt, Artificial Sequence
  Description of Artificial Sequence: Synthetic oligonucleotide
  Antisense strand to SEQ ID NO: 1158166
agccuuaaagguaaguucc

SEQ ID NO: 1158168 - RNA, 19 nt, Artificial Sequence
  Description of Artificial Sequence: Synthetic oligonucleotide
  Sense strand starting at position 1780 of SEQ ID NO: 916457
caagaagucgacgagucuu

SEQ ID NO: 1158169 - RNA, 19 nt, Artificial Sequence
  Description of Artificial Sequence: Synthetic oligonucleotide
  Antisense strand to SEQ ID NO: 1158168
aagacucgucgacuucuug

SEQ ID NO: 1158170 - RNA, 19 nt, Artificial Sequence
  Description of Artificial Sequence: Synthetic oligonucleotide
  Sense strand starting at position 1790 of SEQ ID NO: 916457
acgagucuuaacugggaua

SEQ ID NO: 1158171 - RNA, 19 nt, Artificial Sequence
  Description of Artificial Sequence: Synthetic oligonucleotide
  Antisense strand to SEQ ID NO: 1158170
uaucccaguuaagacucgu

SEQ ID NO: 1158172 - RNA, 19 nt, Artificial Sequence
  Description of Artificial Sequence: Synthetic oligonucleotide
  Sense strand starting at position 1791 of SEQ ID NO: 916457
cgagucuuaacugggauau

SEQ ID NO: 1158173 - RNA, 19 nt, Artificial Sequence
  Description of Artificial Sequence: Synthetic oligonucleotide
  Antisense strand to SEQ ID NO: 1158172
auaucccaguuaagacucg

SEQ ID NO: 1158174 - RNA, 19 nt, Artificial Sequence
  Description of Artificial Sequence: Synthetic oligonucleotide
  Sense strand starting at position 1792 of SEQ ID NO: 916457
gagucuuaacugggauaug

SEQ ID NO: 1158175 - RNA, 19 nt, Artificial Sequence
  Description of Artificial Sequence: Synthetic oligonucleotide
  Antisense strand to SEQ ID NO: 1158174
cauaucccaguuaagacuc

SEQ ID NO: 1158176 - RNA, 19 nt, Artificial Sequence
  Description of Artificial Sequence: Synthetic oligonucleotide
  Sense strand starting at position 1795 of SEQ ID NO: 916457
ucuuaacugggauaugcau

SEQ ID NO: 1158177 - RNA, 19 nt, Artificial Sequence
  Description of Artificial Sequence: Synthetic oligonucleotide
  Antisense strand to SEQ ID NO: 1158176
augcauaucccaguuaaga

SEQ ID NO: 1158178 - RNA, 19 nt, Artificial Sequence
  Description of Artificial Sequence: Synthetic oligonucleotide
  Sense strand starting at position 2200 of SEQ ID NO: 916457
gcaauucucaggugagaga

SEQ ID NO: 1158179 - RNA, 19 nt, Artificial Sequence
  Description of Artificial Sequence: Synthetic oligonucleotide
  Antisense strand to SEQ ID NO: 1158178
ucucucaccugagaauugc

SEQ ID NO: 1158180 - RNA, 19 nt, Artificial Sequence
  Description of Artificial Sequence: Synthetic oligonucleotide
  Sense strand starting at position 2224 of SEQ ID NO: 916457
guggcuuggacccaggaau

SEQ ID NO: 1158181 - RNA, 19 nt, Artificial Sequence
  Description of Artificial Sequence: Synthetic oligonucleotide
  Antisense strand to SEQ ID NO: 1158180
auuccuggguccaagccac

SEQ ID NO: 1158182 - RNA, 19 nt, Artificial Sequence
  Description of Artificial Sequence: Synthetic oligonucleotide
  Sense strand starting at position 2244 of SEQ ID NO: 916457
agcaguagaauugguaaga

SEQ ID NO: 1158183 - RNA, 19 nt, Artificial Sequence
  Description of Artificial Sequence: Synthetic oligonucleotide
  Antisense strand to SEQ ID NO: 1158182
ucuuaccaauucuacugcu

SEQ ID NO: 1158184 - RNA, 19 nt, Artificial Sequence
  Description of Artificial Sequence: Synthetic oligonucleotide
  Sense strand starting at position 2245 of SEQ ID NO: 916457
gcaguagaauugguaagaa

SEQ ID NO: 1158185 - RNA, 19 nt, Artificial Sequence
  Description of Artificial Sequence: Synthetic oligonucleotide
  Antisense strand to SEQ ID NO: 1158184
uucuuaccaauucuacugc

SEQ ID NO: 1158186 - RNA, 19 nt, Artificial Sequence
  Description of Artificial Sequence: Synthetic oligonucleotide
  Sense strand starting at position 2253 of SEQ ID NO: 916457
auugguaagaagugaucaa

SEQ ID NO: 1158187 - RNA, 19 nt, Artificial Sequence
  Description of Artificial Sequence: Synthetic oligonucleotide
  Antisense strand to SEQ ID NO: 1158186
uugaucacuucuuaccaau

SEQ ID NO: 1158188 - RNA, 19 nt, Artificial Sequence
  Description of Artificial Sequence: Synthetic oligonucleotide
  Sense strand starting at position 2314 of SEQ ID NO: 916457
gcaguuuagauauggagua

SEQ ID NO: 1158189 - RNA, 19 nt, Artificial Sequence
  Description of Artificial Sequence: Synthetic oligonucleotide
  Antisense strand to SEQ ID NO: 1158188
uacuccauaucuaaacugc

SEQ ID NO: 1158190 - RNA, 19 nt, Artificial Sequence
  Description of Artificial Sequence: Synthetic oligonucleotide
  Sense strand starting at position 2394 of SEQ ID NO: 916457
guaguaggauuagcugaga

SEQ ID NO: 1158191 - RNA, 19 nt, Artificial Sequence
  Description of Artificial Sequence: Synthetic oligonucleotide
  Antisense strand to SEQ ID NO: 1158190
ucucagcuaauccuacuac

SEQ ID NO: 1158192 - RNA, 19 nt, Artificial Sequence
  Description of Artificial Sequence: Synthetic oligonucleotide
  Sense strand starting at position 2644 of SEQ ID NO: 916457
aucugaggugucugugauu

SEQ ID NO: 1158193 - RNA, 19 nt, Artificial Sequence
  Description of Artificial Sequence: Synthetic oligonucleotide
  Antisense strand to SEQ ID NO: 1158192
aaucacagacaccucagau

SEQ ID NO: 1158194 - RNA, 19 nt, Artificial Sequence
  Description of Artificial Sequence: Synthetic oligonucleotide
  Sense strand starting at position 2655 of SEQ ID NO: 916457
cugugauucgaguggaggu

SEQ ID NO: 1158195 - RNA, 19 nt, Artificial Sequence
  Description of Artificial Sequence: Synthetic oligonucleotide
  Antisense strand to SEQ ID NO: 1158194
accuccacucgaaucacag

SEQ ID NO: 1158196 - RNA, 19 nt, Artificial Sequence
  Description of Artificial Sequence: Synthetic oligonucleotide
  Sense strand starting at position 2682 of SEQ ID NO: 916457
ggcaguuggacauaugagu

SEQ ID NO: 1158197 - RNA, 19 nt, Artificial Sequence
  Description of Artificial Sequence: Synthetic oligonucleotide
  Antisense strand to SEQ ID NO: 1158196
acucauauguccaacugcc

SEQ ID NO: 1158198 - RNA, 19 nt, Artificial Sequence
  Description of Artificial Sequence: Synthetic oligonucleotide
  Sense strand starting at position 2693 of SEQ ID NO: 916457
auaugaguaugaguccaga

SEQ ID NO: 1158199 - RNA, 19 nt, Artificial Sequence
  Description of Artificial Sequence: Synthetic oligonucleotide
  Antisense strand to SEQ ID NO: 1158198
ucuggacucauacucauau

SEQ ID NO: 1158200 - RNA, 19 nt, Artificial Sequence
  Description of Artificial Sequence: Synthetic oligonucleotide
  Sense strand starting at position 2746 of SEQ ID NO: 916457
gggaguucagcauguggau

SEQ ID NO: 1158201 - RNA, 19 nt, Artificial Sequence
  Description of Artificial Sequence: Synthetic oligonucleotide
  Antisense strand to SEQ ID NO: 1158200
auccacaugcugaacuccc

SEQ ID NO: 1158202 - RNA, 19 nt, Artificial Sequence
  Description of Artificial Sequence: Synthetic oligonucleotide
  Sense strand starting at position 2805 of SEQ ID NO: 916457
aaggaauggccucgaugaa

SEQ ID NO: 1158203 - RNA, 19 nt, Artificial Sequence
  Description of Artificial Sequence: Synthetic oligonucleotide
  Antisense strand to SEQ ID NO: 1158202
uucaucgaggccauuccuu

SEQ ID NO: 1158204 - RNA, 19 nt, Artificial Sequence
  Description of Artificial Sequence: Synthetic oligonucleotide
  Sense strand starting at position 2834 of SEQ ID NO: 916457
caaggaaguccgugucuug

SEQ ID NO: 1158205 - RNA, 19 nt, Artificial Sequence
  Description of Artificial Sequence: Synthetic oligonucleotide
  Antisense strand to SEQ ID NO: 1158204
caagacacggacuuccuug

SEQ ID NO: 1158206 - RNA, 19 nt, Artificial Sequence
  Description of Artificial Sequence: Synthetic oligonucleotide
  Sense strand starting at position 2837 of SEQ ID NO: 916457
ggaaguccgugucuuggau

SEQ ID NO: 1158207 - RNA, 19 nt, Artificial Sequence
  Description of Artificial Sequence: Synthetic oligonucleotide
  Antisense strand to SEQ ID NO: 1158206
auccaagacacggacuucc

SEQ ID NO: 1158208 - RNA, 19 nt, Artificial Sequence
  Description of Artificial Sequence: Synthetic oligonucleotide
  Sense strand starting at position 2843 of SEQ ID NO: 916457
ccgugucuuggaugacaag

SEQ ID NO: 1158209 - RNA, 19 nt, Artificial Sequence
  Description of Artificial Sequence: Synthetic oligonucleotide
  Antisense strand to SEQ ID NO: 1158208
cuugucauccaagacacgg

SEQ ID NO: 1158210 - RNA, 19 nt, Artificial Sequence
  Description of Artificial Sequence: Synthetic oligonucleotide
  Sense strand starting at position 2844 of SEQ ID NO: 916457
cgugucuuggaugacaagu

SEQ ID NO: 1158211 - RNA, 19 nt, Artificial Sequence
  Description of Artificial Sequence: Synthetic oligonucleotide
  Antisense strand to SEQ ID NO: 1158210
acuugucauccaagacacg

SEQ ID NO: 1158212 - RNA, 19 nt, Artificial Sequence
  Description of Artificial Sequence: Synthetic oligonucleotide
  Sense strand starting at position 3011 of SEQ ID NO: 916457
caagaaacucaugguauug

SEQ ID NO: 1158213 - RNA, 19 nt, Artificial Sequence
  Description of Artificial Sequence: Synthetic oligonucleotide
  Antisense strand to SEQ ID NO: 1158212
caauaccaugaguuucuug

SEQ ID NO: 1158214 - RNA, 19 nt, Artificial Sequence
  Description of Artificial Sequence: Synthetic oligonucleotide
  Sense strand starting at position 3214 of SEQ ID NO: 916457
gcugacuuccuguggacuu

SEQ ID NO: 1158215 - RNA, 19 nt, Artificial Sequence
  Description of Artificial Sequence: Synthetic oligonucleotide
  Antisense strand to SEQ ID NO: 1158214
aaguccacaggaagucagc

SEQ ID NO: 1158216 - RNA, 19 nt, Artificial Sequence
  Description of Artificial Sequence: Synthetic oligonucleotide
  Sense strand starting at position 3272 of SEQ ID NO: 916457
ccacuugaguggcucgaua

SEQ ID NO: 1158217 - RNA, 19 nt, Artificial Sequence
  Description of Artificial Sequence: Synthetic oligonucleotide
  Antisense strand to SEQ ID NO: 1158216
uaucgagccacucaagugg

SEQ ID NO: 1158218 - RNA, 19 nt, Artificial Sequence
  Description of Artificial Sequence: Synthetic oligonucleotide
  Sense strand starting at position 3274 of SEQ ID NO: 916457
acuugaguggcucgauaca

SEQ ID NO: 1158219 - RNA, 19 nt, Artificial Sequence
  Description of Artificial Sequence: Synthetic oligonucleotide
  Antisense strand to SEQ ID NO: 1158218
uguaucgagccacucaagu

SEQ ID NO: 1158220 - RNA, 19 nt, Artificial Sequence
  Description of Artificial Sequence: Synthetic oligonucleotide
  Sense strand starting at position 3449 of SEQ ID NO: 916457
ugggcuagagucuaguaga

SEQ ID NO: 1158221 - RNA, 19 nt, Artificial Sequence
  Description of Artificial Sequence: Synthetic oligonucleotide
  Antisense strand to SEQ ID NO: 1158220
ucuacuagacucuagccca

SEQ ID NO: 1158222 - RNA, 19 nt, Artificial Sequence
  Description of Artificial Sequence: Synthetic oligonucleotide
  Sense strand starting at position 3462 of SEQ ID NO: 916457
aguagaaucucccuugcua

SEQ ID NO: 1158223 - RNA, 19 nt, Artificial Sequence
  Description of Artificial Sequence: Synthetic oligonucleotide
  Antisense strand to SEQ ID NO: 1158222
uagcaagggagauucuacu

SEQ ID NO: 1158224 - RNA, 19 nt, Artificial Sequence
  Description of Artificial Sequence: Synthetic oligonucleotide
  Sense strand starting at position 3588 of SEQ ID NO: 916457
aggcaauccugaccaguuu

SEQ ID NO: 1158225 - RNA, 19 nt, Artificial Sequence
  Description of Artificial Sequence: Synthetic oligonucleotide
  Antisense strand to SEQ ID NO: 1158224
aaacuggucaggauugccu

SEQ ID NO: 1158226 - RNA, 19 nt, Artificial Sequence
  Description of Artificial Sequence: Synthetic oligonucleotide
  Sense strand starting at position 3790 of SEQ ID NO: 916457
ggagcauguuggccaacau

SEQ ID NO: 1158227 - RNA, 19 nt, Artificial Sequence
  Description of Artificial Sequence: Synthetic oligonucleotide
  Antisense strand to SEQ ID NO: 1158226
auguuggccaacaugcucc

SEQ ID NO: 1158228 - RNA, 19 nt, Artificial Sequence
  Description of Artificial Sequence: Synthetic oligonucleotide
  Sense strand starting at position 24 of SEQ ID NO: 916458
gauuuauccuugggaaggg

SEQ ID NO: 1158229 - RNA, 19 nt, Artificial Sequence
  Description of Artificial Sequence: Synthetic oligonucleotide
  Antisense strand to SEQ ID NO: 1158228
cccuucccaaggauaaauc

SEQ ID NO: 1158230 - RNA, 19 nt, Artificial Sequence
  Description of Artificial Sequence: Synthetic oligonucleotide
  Sense strand starting at position 34 of SEQ ID NO: 916458
ugggaagggucaguuucuu

SEQ ID NO: 1158231 - RNA, 19 nt, Artificial Sequence
  Description of Artificial Sequence: Synthetic oligonucleotide
  Antisense strand to SEQ ID NO: 1158230
aagaaacugacccuuccca

SEQ ID NO: 1158232 - RNA, 19 nt, Artificial Sequence
  Description of Artificial Sequence: Synthetic oligonucleotide
  Sense strand starting at position 95 of SEQ ID NO: 916458
gagguaucaugagcaguau

SEQ ID NO: 1158233 - RNA, 19 nt, Artificial Sequence
  Description of Artificial Sequence: Synthetic oligonucleotide
  Antisense strand to SEQ ID NO: 1158232
auacugcucaugauaccuc

SEQ ID NO: 1158234 - RNA, 19 nt, Artificial Sequence
  Description of Artificial Sequence: Synthetic oligonucleotide
  Sense strand starting at position 99 of SEQ ID NO: 916458
uaucaugagcaguaucaag

SEQ ID NO: 1158235 - RNA, 19 nt, Artificial Sequence
  Description of Artificial Sequence: Synthetic oligonucleotide
  Antisense strand to SEQ ID NO: 1158234
cuugauacugcucaugaua

SEQ ID NO: 1158236 - RNA, 19 nt, Artificial Sequence
  Description of Artificial Sequence: Synthetic oligonucleotide
  Sense strand starting at position 107 of SEQ ID NO: 916458
gcaguaucaagguaagcaa

SEQ ID NO: 1158237 - RNA, 19 nt, Artificial Sequence
  Description of Artificial Sequence: Synthetic oligonucleotide
  Antisense strand to SEQ ID NO: 1158236
uugcuuaccuugauacugc

SEQ ID NO: 1158238 - RNA, 19 nt, Artificial Sequence
  Description of Artificial Sequence: Synthetic oligonucleotide
  Sense strand starting at position 137 of SEQ ID NO: 916458
uuggaauccugguugacac

SEQ ID NO: 1158239 - RNA, 19 nt, Artificial Sequence
  Description of Artificial Sequence: Synthetic oligonucleotide
  Antisense strand to SEQ ID NO: 1158238
gugucaaccaggauuccaa

SEQ ID NO: 1158240 - RNA, 19 nt, Artificial Sequence
  Description of Artificial Sequence: Synthetic oligonucleotide
  Sense strand starting at position 164 of SEQ ID NO: 916458
acuuuaagaagucgcaaga

SEQ ID NO: 1158241 - RNA, 19 nt, Artificial Sequence
  Description of Artificial Sequence: Synthetic oligonucleotide
  Antisense strand to SEQ ID NO: 1158240
ucuugcgacuucuuaaagu

SEQ ID NO: 1158242 - RNA, 19 nt, Artificial Sequence
  Description of Artificial Sequence: Synthetic oligonucleotide
  Sense strand starting at position 263 of SEQ ID NO: 916458
acuccuugcuugucaagau

SEQ ID NO: 1158243 - RNA, 19 nt, Artificial Sequence
  Description of Artificial Sequence: Synthetic oligonucleotide
  Antisense strand to SEQ ID NO: 1158242
aucuugacaagcaaggagu

SEQ ID NO: 1158244 - RNA, 19 nt, Artificial Sequence
  Description of Artificial Sequence: Synthetic oligonucleotide
  Sense strand starting at position 360 of SEQ ID NO: 916458
ucuuaugucuuaucucuga

SEQ ID NO: 1158245 - RNA, 19 nt, Artificial Sequence
  Description of Artificial Sequence: Synthetic oligonucleotide
  Antisense strand to SEQ ID NO: 1158244
ucagagauaagacauaaga

SEQ ID NO: 1158246 - RNA, 19 nt, Artificial Sequence
  Description of Artificial Sequence: Synthetic oligonucleotide
  Sense strand starting at position 364 of SEQ ID NO: 916458
augucuuaucucugagaaa

SEQ ID NO: 1158247 - RNA, 19 nt, Artificial Sequence
  Description of Artificial Sequence: Synthetic oligonucleotide
  Antisense strand to SEQ ID NO: 1158246
uuucucagagauaagacau

SEQ ID NO: 1158248 - RNA, 19 nt, Artificial Sequence
  Description of Artificial Sequence: Synthetic oligonucleotide
  Sense strand starting at position 365 of SEQ ID NO: 916458
ugucuuaucucugagaaau

SEQ ID NO: 1158249 - RNA, 19 nt, Artificial Sequence
  Description of Artificial Sequence: Synthetic oligonucleotide
  Antisense strand to SEQ ID NO: 1158248
auuucucagagauaagaca

SEQ ID NO: 1158250 - RNA, 19 nt, Artificial Sequence
  Description of Artificial Sequence: Synthetic oligonucleotide
  Sense strand starting at position 743 of SEQ ID NO: 916458
cugcauuaaguuuggaaag

SEQ ID NO: 1158251 - RNA, 19 nt, Artificial Sequence
  Description of Artificial Sequence: Synthetic oligonucleotide
  Antisense strand to SEQ ID NO: 1158250
cuuuccaaacuuaaugcag

SEQ ID NO: 1158252 - RNA, 19 nt, Artificial Sequence
  Description of Artificial Sequence: Synthetic oligonucleotide
  Sense strand starting at position 745 of SEQ ID NO: 916458
gcauuaaguuuggaaagag

SEQ ID NO: 1158253 - RNA, 19 nt, Artificial Sequence
  Description of Artificial Sequence: Synthetic oligonucleotide
  Antisense strand to SEQ ID NO: 1158252
cucuuuccaaacuuaaugc

SEQ ID NO: 1158254 - RNA, 19 nt, Artificial Sequence
  Description of Artificial Sequence: Synthetic oligonucleotide
  Sense strand starting at position 1334 of SEQ ID NO: 916458
gcucuccuuccuggagaca

SEQ ID NO: 1158255 - RNA, 19 nt, Artificial Sequence
  Description of Artificial Sequence: Synthetic oligonucleotide
  Antisense strand to SEQ ID NO: 1158254
ugucuccaggaaggagagc

SEQ ID NO: 1158256 - RNA, 19 nt, Artificial Sequence
  Description of Artificial Sequence: Synthetic oligonucleotide
  Sense strand starting at position 1363 of SEQ ID NO: 916458
ggugcuggcuccuucuauu

SEQ ID NO: 1158257 - RNA, 19 nt, Artificial Sequence
  Description of Artificial Sequence: Synthetic oligonucleotide
  Antisense strand to SEQ ID NO: 1158256
aauagaaggagccagcacc

SEQ ID NO: 1158258 - RNA, 19 nt, Artificial Sequence
  Description of Artificial Sequence: Synthetic oligonucleotide
  Sense strand starting at position 1631 of SEQ ID NO: 916458
uugccugucugcgucuaaa

SEQ ID NO: 1158259 - RNA, 19 nt, Artificial Sequence
  Description of Artificial Sequence: Synthetic oligonucleotide
  Antisense strand to SEQ ID NO: 1158258
uuuagacgcagacaggcaa

SEQ ID NO: 1158260 - RNA, 19 nt, Artificial Sequence
  Description of Artificial Sequence: Synthetic oligonucleotide
  Sense strand starting at position 1769 of SEQ ID NO: 916458
gcucaccuuuaauugagau

SEQ ID NO: 1158261 - RNA, 19 nt, Artificial Sequence
  Description of Artificial Sequence: Synthetic oligonucleotide
  Antisense strand to SEQ ID NO: 1158260
aucucaauuaaaggugagc

SEQ ID NO: 1158262 - RNA, 19 nt, Artificial Sequence
  Description of Artificial Sequence: Synthetic oligonucleotide
  Sense strand starting at position 2342 of SEQ ID NO: 916458
gucugcuggcuccaggaaa

SEQ ID NO: 1158263 - RNA, 19 nt, Artificial Sequence
  Description of Artificial Sequence: Synthetic oligonucleotide
  Antisense strand to SEQ ID NO: 1158262
uuuccuggagccagcagac

SEQ ID NO: 1158264 - RNA, 19 nt, Artificial Sequence
  Description of Artificial Sequence: Synthetic oligonucleotide
  Sense strand starting at position 2750 of SEQ ID NO: 916458
ccgagagcucuucgaguuc

SEQ ID NO: 1158265 - RNA, 19 nt, Artificial Sequence
  Description of Artificial Sequence: Synthetic oligonucleotide
  Antisense strand to SEQ ID NO: 1158264
gaacucgaagagcucucgg

SEQ ID NO: 1158266 - RNA, 19 nt, Artificial Sequence
  Description of Artificial Sequence: Synthetic oligonucleotide
  Sense strand starting at position 2761 of SEQ ID NO: 916458
ucgaguucuucugcaacaa

SEQ ID NO: 1158267 - RNA, 19 nt, Artificial Sequence
  Description of Artificial Sequence: Synthetic oligonucleotide
  Antisense strand to SEQ ID NO: 1158266
uuguugcagaagaacucga

SEQ ID NO: 1158268 - RNA, 19 nt, Artificial Sequence
  Description of Artificial Sequence: Synthetic oligonucleotide
  Sense strand starting at position 2762 of SEQ ID NO: 916458
cgaguucuucugcaacaac

SEQ ID NO: 1158269 - RNA, 19 nt, Artificial Sequence
  Description of Artificial Sequence: Synthetic oligonucleotide
  Antisense strand to SEQ ID NO: 1158268
guuguugcagaagaacucg

SEQ ID NO: 1158270 - RNA, 19 nt, Artificial Sequence
  Description of Artificial Sequence: Synthetic oligonucleotide
  Sense strand starting at position 2863 of SEQ ID NO: 916458
gcaccuuuggcaugaugua

SEQ ID NO: 1158271 - RNA, 19 nt, Artificial Sequence
  Description of Artificial Sequence: Synthetic oligonucleotide
  Antisense strand to SEQ ID NO: 1158270
uacaucaugccaaaggugc

SEQ ID NO: 1158272 - RNA, 19 nt, Artificial Sequence
  Description of Artificial Sequence: Synthetic oligonucleotide
  Sense strand starting at position 2872 of SEQ ID NO: 916458
gcaugauguacuggcaauu

SEQ ID NO: 1158273 - RNA, 19 nt, Artificial Sequence
  Description of Artificial Sequence: Synthetic oligonucleotide
  Antisense strand to SEQ ID NO: 1158272
aauugccaguacaucaugc

SEQ ID NO: 1158274 - RNA, 19 nt, Artificial Sequence
  Description of Artificial Sequence: Synthetic oligonucleotide
  Sense strand starting at position 3355 of SEQ ID NO: 916458
gcaagaugccagcaaagua

SEQ ID NO: 1158275 - RNA, 19 nt, Artificial Sequence
  Description of Artificial Sequence: Synthetic oligonucleotide
  Antisense strand to SEQ ID NO: 1158274
uacuuugcuggcaucuugc

SEQ ID NO: 1158276 - RNA, 19 nt, Artificial Sequence
  Description of Artificial Sequence: Synthetic oligonucleotide
  Sense strand starting at position 3458 of SEQ ID NO: 916458
gguggugcugucagucuuu

SEQ ID NO: 1158277 - RNA, 19 nt, Artificial Sequence
  Description of Artificial Sequence: Synthetic oligonucleotide
  Antisense strand to SEQ ID NO: 1158276
aaagacugacagcaccacc

SEQ ID NO: 1158278 - RNA, 19 nt, Artificial Sequence
  Description of Artificial Sequence: Synthetic oligonucleotide
  Sense strand starting at position 3461 of SEQ ID NO: 916458
ggugcugucagucuuuguu

SEQ ID NO: 1158279 - RNA, 19 nt, Artificial Sequence
  Description of Artificial Sequence: Synthetic oligonucleotide
  Antisense strand to SEQ ID NO: 1158278
aacaaagacugacagcacc

SEQ ID NO: 1158280 - RNA, 19 nt, Artificial Sequence
  Description of Artificial Sequence: Synthetic oligonucleotide
  Sense strand starting at position 3463 of SEQ ID NO: 916458
ugcugucagucuuuguuua

SEQ ID NO: 1158281 - RNA, 19 nt, Artificial Sequence
  Description of Artificial Sequence: Synthetic oligonucleotide
  Antisense strand to SEQ ID NO: 1158280
uaaacaaagacugacagca

SEQ ID NO: 1158282 - RNA, 19 nt, Artificial Sequence
  Description of Artificial Sequence: Synthetic oligonucleotide
  Sense strand starting at position 3465 of SEQ ID NO: 916458
cugucagucuuuguuuaga

SEQ ID NO: 1158283 - RNA, 19 nt, Artificial Sequence
  Description of Artificial Sequence: Synthetic oligonucleotide
  Antisense strand to SEQ ID NO: 1158282
ucuaaacaaagacugacag

SEQ ID NO: 1158284 - RNA, 19 nt, Artificial Sequence
  Description of Artificial Sequence: Synthetic oligonucleotide
  Sense strand starting at position 3467 of SEQ ID NO: 916458
gucagucuuuguuuagaag

SEQ ID NO: 1158285 - RNA, 19 nt, Artificial Sequence
  Description of Artificial Sequence: Synthetic oligonucleotide
  Antisense strand to SEQ ID NO: 1158284
cuucuaaacaaagacugac

SEQ ID NO: 1158286 - RNA, 19 nt, Artificial Sequence
  Description of Artificial Sequence: Synthetic oligonucleotide
  Sense strand starting at position 3487 of SEQ ID NO: 916458
ggaauuuauuauggagaaa

SEQ ID NO: 1158287 - RNA, 19 nt, Artificial Sequence
  Description of Artificial Sequence: Synthetic oligonucleotide
  Antisense strand to SEQ ID NO: 1158286
uuucuccauaauaaauucc

SEQ ID NO: 1158288 - RNA, 19 nt, Artificial Sequence
  Description of Artificial Sequence: Synthetic oligonucleotide
  Sense strand starting at position 3580 of SEQ ID NO: 916458
gagaaugggucaggcuaga

SEQ ID NO: 1158289 - RNA, 19 nt, Artificial Sequence
  Description of Artificial Sequence: Synthetic oligonucleotide
  Antisense strand to SEQ ID NO: 1158288
ucuagccugacccauucuc

SEQ ID NO: 1158290 - RNA, 19 nt, Artificial Sequence
  Description of Artificial Sequence: Synthetic oligonucleotide
  Sense strand starting at position 3597 of SEQ ID NO: 916458
gagagcagcuccuugugaa

SEQ ID NO: 1158291 - RNA, 19 nt, Artificial Sequence
  Description of Artificial Sequence: Synthetic oligonucleotide
  Antisense strand to SEQ ID NO: 1158290
uucacaaggagcugcucuc

SEQ ID NO: 1158292 - RNA, 19 nt, Artificial Sequence
  Description of Artificial Sequence: Synthetic oligonucleotide
  Sense strand starting at position 3598 of SEQ ID NO: 916458
agagcagcuccuugugaag

SEQ ID NO: 1158293 - RNA, 19 nt, Artificial Sequence
  Description of Artificial Sequence: Synthetic oligonucleotide
  Antisense strand to SEQ ID NO: 1158292
cuucacaaggagcugcucu

SEQ ID NO: 1158294 - RNA, 19 nt, Artificial Sequence
  Description of Artificial Sequence: Synthetic oligonucleotide
  Sense strand starting at position 3708 of SEQ ID NO: 916458
ggguuucaucggugcucuu

SEQ ID NO: 1158295 - RNA, 19 nt, Artificial Sequence
  Description of Artificial Sequence: Synthetic oligonucleotide
  Antisense strand to SEQ ID NO: 1158294
aagagcaccgaugaaaccc

SEQ ID NO: 1158296 - RNA, 19 nt, Artificial Sequence
  Description of Artificial Sequence: Synthetic oligonucleotide
  Sense strand starting at position 3709 of SEQ ID NO: 916458
gguuucaucggugcucuuu

SEQ ID NO: 1158297 - RNA, 19 nt, Artificial Sequence
  Description of Artificial Sequence: Synthetic oligonucleotide
  Antisense strand to SEQ ID NO: 1158296
aaagagcaccgaugaaacc

SEQ ID NO: 1158298 - RNA, 19 nt, Artificial Sequence
  Description of Artificial Sequence: Synthetic oligonucleotide
  Sense strand starting at position 3715 of SEQ ID NO: 916458
aucggugcucuuugccaau

SEQ ID NO: 1158299 - RNA, 19 nt, Artificial Sequence
  Description of Artificial Sequence: Synthetic oligonucleotide
  Antisense strand to SEQ ID NO: 1158298
auuggcaaagagcaccgau

SEQ ID NO: 1158300 - RNA, 19 nt, Artificial Sequence
  Description of Artificial Sequence: Synthetic oligonucleotide
  Sense strand starting at position 3730 of SEQ ID NO: 916458
caauguugggucuggaaac

SEQ ID NO: 1158301 - RNA, 19 nt, Artificial Sequence
  Description of Artificial Sequence: Synthetic oligonucleotide
  Antisense strand to SEQ ID NO: 1158300
guuuccagacccaacauug

SEQ ID NO: 1158302 - RNA, 19 nt, Artificial Sequence
  Description of Artificial Sequence: Synthetic oligonucleotide
  Sense strand starting at position 3755 of SEQ ID NO: 916458
aggugguaagcguggagaa

SEQ ID NO: 1158303 - RNA, 19 nt, Artificial Sequence
  Description of Artificial Sequence: Synthetic oligonucleotide
  Antisense strand to SEQ ID NO: 1158302
uucuccacgcuuaccaccu

SEQ ID NO: 1158304 - RNA, 19 nt, Artificial Sequence
  Description of Artificial Sequence: Synthetic oligonucleotide
  Sense strand starting at position 3757 of SEQ ID NO: 916458
gugguaagcguggagaaga

SEQ ID NO: 1158305 - RNA, 19 nt, Artificial Sequence
  Description of Artificial Sequence: Synthetic oligonucleotide
  Antisense strand to SEQ ID NO: 1158304
ucuucuccacgcuuaccac

SEQ ID NO: 1158306 - RNA, 19 nt, Artificial Sequence
  Description of Artificial Sequence: Synthetic oligonucleotide
  Sense strand starting at position 3938 of SEQ ID NO: 916458
cuguguuguggagacagau

SEQ ID NO: 1158307 - RNA, 19 nt, Artificial Sequence
  Description of Artificial Sequence: Synthetic oligonucleotide
  Antisense strand to SEQ ID NO: 1158306
aucugucuccacaacacag

SEQ ID NO: 1158308 - RNA, 19 nt, Artificial Sequence
  Description of Artificial Sequence: Synthetic oligonucleotide
  Sense strand starting at position 29 of SEQ ID NO: 916459
gccugugaguuuccuuuaa

SEQ ID NO: 1158309 - RNA, 19 nt, Artificial Sequence
  Description of Artificial Sequence: Synthetic oligonucleotide
  Antisense strand to SEQ ID NO: 1158308
uuaaaggaaacucacaggc

SEQ ID NO: 1158310 - RNA, 19 nt, Artificial Sequence
  Description of Artificial Sequence: Synthetic oligonucleotide
  Sense strand starting at position 31 of SEQ ID NO: 916459
cugugaguuuccuuuaagc

SEQ ID NO: 1158311 - RNA, 19 nt, Artificial Sequence
  Description of Artificial Sequence: Synthetic oligonucleotide
  Antisense strand to SEQ ID NO: 1158310
gcuuaaaggaaacucacag

SEQ ID NO: 1158312 - RNA, 19 nt, Artificial Sequence
  Description of Artificial Sequence: Synthetic oligonucleotide
  Sense strand starting at position 33 of SEQ ID NO: 916459
gugaguuuccuuuaagccu

SEQ ID NO: 1158313 - RNA, 19 nt, Artificial Sequence
  Description of Artificial Sequence: Synthetic oligonucleotide
  Antisense strand to SEQ ID NO: 1158312
aggcuuaaaggaaacucac

SEQ ID NO: 1158314 - RNA, 19 nt, Artificial Sequence
  Description of Artificial Sequence: Synthetic oligonucleotide
  Sense strand starting at position 1322 of SEQ ID NO: 916459
ccagguucguccugccauu

SEQ ID NO: 1158315 - RNA, 19 nt, Artificial Sequence
  Description of Artificial Sequence: Synthetic oligonucleotide
  Antisense strand to SEQ ID NO: 1158314
aauggcaggacgaaccugg

SEQ ID NO: 1158316 - RNA, 19 nt, Artificial Sequence
  Description of Artificial Sequence: Synthetic oligonucleotide
  Sense strand starting at position 2562 of SEQ ID NO: 916459
uggcuucuuugcccaugaa

SEQ ID NO: 1158317 - RNA, 19 nt, Artificial Sequence
  Description of Artificial Sequence: Synthetic oligonucleotide
  Antisense strand to SEQ ID NO: 1158316
uucaugggcaaagaagcca

SEQ ID NO: 1158318 - RNA, 19 nt, Artificial Sequence
  Description of Artificial Sequence: Synthetic oligonucleotide
  Sense strand starting at position 2657 of SEQ ID NO: 916459
ggcuaagggugauacauaa

SEQ ID NO: 1158319 - RNA, 19 nt, Artificial Sequence
  Description of Artificial Sequence: Synthetic oligonucleotide
  Antisense strand to SEQ ID NO: 1158318
uuauguaucacccuuagcc

SEQ ID NO: 1158320 - RNA, 19 nt, Artificial Sequence
  Description of Artificial Sequence: Synthetic oligonucleotide
  Sense strand starting at position 3018 of SEQ ID NO: 916459
ccaugugcccaauagguau

SEQ ID NO: 1158321 - RNA, 19 nt, Artificial Sequence
  Description of Artificial Sequence: Synthetic oligonucleotide
  Antisense strand to SEQ ID NO: 1158320
auaccuauugggcacaugg

SEQ ID NO: 1158322 - RNA, 19 nt, Artificial Sequence
  Description of Artificial Sequence: Synthetic oligonucleotide
  Sense strand starting at position 3048 of SEQ ID NO: 916459
augagugauggccacauca

SEQ ID NO: 1158323 - RNA, 19 nt, Artificial Sequence
  Description of Artificial Sequence: Synthetic oligonucleotide
  Antisense strand to SEQ ID NO: 1158322
ugauguggccaucacucau

SEQ ID NO: 1158324 - RNA, 19 nt, Artificial Sequence
  Description of Artificial Sequence: Synthetic oligonucleotide
  Sense strand starting at position 3050 of SEQ ID NO: 916459
gagugauggccacaucaca

SEQ ID NO: 1158325 - RNA, 19 nt, Artificial Sequence
  Description of Artificial Sequence: Synthetic oligonucleotide
  Antisense strand to SEQ ID NO: 1158324
ugugauguggccaucacuc

SEQ ID NO: 1158326 - RNA, 19 nt, Artificial Sequence
  Description of Artificial Sequence: Synthetic oligonucleotide
  Sense strand starting at position 3107 of SEQ ID NO: 916459
ccugaugucuaggucccaa

SEQ ID NO: 1158327 - RNA, 19 nt, Artificial Sequence
  Description of Artificial Sequence: Synthetic oligonucleotide
  Antisense strand to SEQ ID NO: 1158326
uugggaccuagacaucagg

SEQ ID NO: 1158328 - RNA, 19 nt, Artificial Sequence
  Description of Artificial Sequence: Synthetic oligonucleotide
  Sense strand starting at position 3161 of SEQ ID NO: 916459
agggaugucucccuuggga

SEQ ID NO: 1158329 - RNA, 19 nt, Artificial Sequence
  Description of Artificial Sequence: Synthetic oligonucleotide
  Antisense strand to SEQ ID NO: 1158328
ucccaagggagacaucccu

SEQ ID NO: 1158330 - RNA, 19 nt, Artificial Sequence
  Description of Artificial Sequence: Synthetic oligonucleotide
  Sense strand starting at position 3163 of SEQ ID NO: 916459
ggaugucucccuugggaug

SEQ ID NO: 1158331 - RNA, 19 nt, Artificial Sequence
  Description of Artificial Sequence: Synthetic oligonucleotide
  Antisense strand to SEQ ID NO: 1158330
caucccaagggagacaucc

SEQ ID NO: 1158332 - RNA, 19 nt, Artificial Sequence
  Description of Artificial Sequence: Synthetic oligonucleotide
  Sense strand starting at position 3164 of SEQ ID NO: 916459
gaugucucccuugggauga

SEQ ID NO: 1158333 - RNA, 19 nt, Artificial Sequence
  Description of Artificial Sequence: Synthetic oligonucleotide
  Antisense strand to SEQ ID NO: 1158332
ucaucccaagggagacauc

SEQ ID NO: 1158334 - RNA, 19 nt, Artificial Sequence
  Description of Artificial Sequence: Synthetic oligonucleotide
  Sense strand starting at position 3184 of SEQ ID NO: 916459
gggcuaaccucucuugaga

SEQ ID NO: 1158335 - RNA, 19 nt, Artificial Sequence
  Description of Artificial Sequence: Synthetic oligonucleotide
  Antisense strand to SEQ ID NO: 1158334
ucucaagagagguuagccc

SEQ ID NO: 1158336 - RNA, 19 nt, Artificial Sequence
  Description of Artificial Sequence: Synthetic oligonucleotide
  Sense strand starting at position 3186 of SEQ ID NO: 916459
gcuaaccucucuugagaua

SEQ ID NO: 1158337 - RNA, 19 nt, Artificial Sequence
  Description of Artificial Sequence: Synthetic oligonucleotide
  Antisense strand to SEQ ID NO: 1158336
uaucucaagagagguuagc

SEQ ID NO: 1158338 - RNA, 19 nt, Artificial Sequence
  Description of Artificial Sequence: Synthetic oligonucleotide
  Sense strand starting at position 3256 of SEQ ID NO: 916459
cuuacacuggucugucuaa

SEQ ID NO: 1158339 - RNA, 19 nt, Artificial Sequence
  Description of Artificial Sequence: Synthetic oligonucleotide
  Antisense strand to SEQ ID NO: 1158338
uuagacagaccaguguaag

SEQ ID NO: 1158340 - RNA, 19 nt, Artificial Sequence
  Description of Artificial Sequence: Synthetic oligonucleotide
  Sense strand starting at position 3281 of SEQ ID NO: 916459
gucugaugucuggacaggu

SEQ ID NO: 1158341 - RNA, 19 nt, Artificial Sequence
  Description of Artificial Sequence: Synthetic oligonucleotide
  Antisense strand to SEQ ID NO: 1158340
accuguccagacaucagac

SEQ ID NO: 1158342 - RNA, 19 nt, Artificial Sequence
  Description of Artificial Sequence: Synthetic oligonucleotide
  Sense strand starting at position 3409 of SEQ ID NO: 916459
ggcagcucaccguacagau

SEQ ID NO: 1158343 - RNA, 19 nt, Artificial Sequence
  Description of Artificial Sequence: Synthetic oligonucleotide
  Antisense strand to SEQ ID NO: 1158342
aucuguacggugagcugcc

SEQ ID NO: 1158344 - RNA, 19 nt, Artificial Sequence
  Description of Artificial Sequence: Synthetic oligonucleotide
  Sense strand starting at position 3429 of SEQ ID NO: 916459
ggccaaagauggcuggaaa

SEQ ID NO: 1158345 - RNA, 19 nt, Artificial Sequence
  Description of Artificial Sequence: Synthetic oligonucleotide
  Antisense strand to SEQ ID NO: 1158344
uuuccagccaucuuuggcc

SEQ ID NO: 1158346 - RNA, 19 nt, Artificial Sequence
  Description of Artificial Sequence: Synthetic oligonucleotide
  Sense strand starting at position 3520 of SEQ ID NO: 916459
ggaugagagucccugcuga

SEQ ID NO: 1158347 - RNA, 19 nt, Artificial Sequence
  Description of Artificial Sequence: Synthetic oligonucleotide
  Antisense strand to SEQ ID NO: 1158346
ucagcagggacucucaucc

SEQ ID NO: 1158348 - RNA, 19 nt, Artificial Sequence
  Description of Artificial Sequence: Synthetic oligonucleotide
  Sense strand starting at position 3536 of SEQ ID NO: 916459
ugagcucuuaaacgcguaa

SEQ ID NO: 1158349 - RNA, 19 nt, Artificial Sequence
  Description of Artificial Sequence: Synthetic oligonucleotide
  Antisense strand to SEQ ID NO: 1158348
uuacgcguuuaagagcuca

SEQ ID NO: 1158350 - RNA, 19 nt, Artificial Sequence
  Description of Artificial Sequence: Synthetic oligonucleotide
  Sense strand starting at position 3540 of SEQ ID NO: 916459
cucuuaaacgcguaaagga

SEQ ID NO: 1158351 - RNA, 19 nt, Artificial Sequence
  Description of Artificial Sequence: Synthetic oligonucleotide
  Antisense strand to SEQ ID NO: 1158350
uccuuuacgcguuuaagag

SEQ ID NO: 1158352 - RNA, 19 nt, Artificial Sequence
  Description of Artificial Sequence: Synthetic oligonucleotide
  Sense strand starting at position 3615 of SEQ ID NO: 916459
guggaaauuccacaugcaa

SEQ ID NO: 1158353 - RNA, 19 nt, Artificial Sequence
  Description of Artificial Sequence: Synthetic oligonucleotide
  Antisense strand to SEQ ID NO: 1158352
uugcauguggaauuuccac

SEQ ID NO: 1158354 - RNA, 19 nt, Artificial Sequence
  Description of Artificial Sequence: Synthetic oligonucleotide
  Sense strand starting at position 3654 of SEQ ID NO: 916459
aaaguaauauugggagucu

SEQ ID NO: 1158355 - RNA, 19 nt, Artificial Sequence
  Description of Artificial Sequence: Synthetic oligonucleotide
  Antisense strand to SEQ ID NO: 1158354
agacucccaauauuacuuu

SEQ ID NO: 1158356 - RNA, 19 nt, Artificial Sequence
  Description of Artificial Sequence: Synthetic oligonucleotide
  Sense strand starting at position 3663 of SEQ ID NO: 916459
uugggagucucccauauac

SEQ ID NO: 1158357 - RNA, 19 nt, Artificial Sequence
  Description of Artificial Sequence: Synthetic oligonucleotide
  Antisense strand to SEQ ID NO: 1158356
guauaugggagacucccaa

SEQ ID NO: 1158358 - RNA, 19 nt, Artificial Sequence
  Description of Artificial Sequence: Synthetic oligonucleotide
  Sense strand starting at position 3665 of SEQ ID NO: 916459
gggagucucccauauacuc

SEQ ID NO: 1158359 - RNA, 19 nt, Artificial Sequence
  Description of Artificial Sequence: Synthetic oligonucleotide
  Antisense strand to SEQ ID NO: 1158358
gaguauaugggagacuccc

SEQ ID NO: 1158360 - RNA, 19 nt, Artificial Sequence
  Description of Artificial Sequence: Synthetic oligonucleotide
  Sense strand starting at position 3950 of SEQ ID NO: 916459
guacacugaucuuacagau

SEQ ID NO: 1158361 - RNA, 19 nt, Artificial Sequence
  Description of Artificial Sequence: Synthetic oligonucleotide
  Antisense strand to SEQ ID NO: 1158360
aucuguaagaucaguguac

SEQ ID NO: 1158362 - RNA, 19 nt, Artificial Sequence
  Description of Artificial Sequence: Synthetic oligonucleotide
  Sense strand starting at position 149 of SEQ ID NO: 916460
gggagagaggugugauguu

SEQ ID NO: 1158363 - RNA, 19 nt, Artificial Sequence
  Description of Artificial Sequence: Synthetic oligonucleotide
  Antisense strand to SEQ ID NO: 1158362
aacaucacaccucucuccc

SEQ ID NO: 1158364 - RNA, 19 nt, Artificial Sequence
  Description of Artificial Sequence: Synthetic oligonucleotide
  Sense strand starting at position 189 of SEQ ID NO: 916460
ugguguuagaacuaucuag

SEQ ID NO: 1158365 - RNA, 19 nt, Artificial Sequence
  Description of Artificial Sequence: Synthetic oligonucleotide
  Antisense strand to SEQ ID NO: 1158364
cuagauaguucuaacacca

SEQ ID NO: 1158366 - RNA, 19 nt, Artificial Sequence
  Description of Artificial Sequence: Synthetic oligonucleotide
  Sense strand starting at position 235 of SEQ ID NO: 916460
ugaaauaauguguaacagu

SEQ ID NO: 1158367 - RNA, 19 nt, Artificial Sequence
  Description of Artificial Sequence: Synthetic oligonucleotide
  Antisense strand to SEQ ID NO: 1158366
acuguuacacauuauuuca

SEQ ID NO: 1158368 - RNA, 19 nt, Artificial Sequence
  Description of Artificial Sequence: Synthetic oligonucleotide
  Sense strand starting at position 249 of SEQ ID NO: 916460
acaguuaucuucucauagg

SEQ ID NO: 1158369 - RNA, 19 nt, Artificial Sequence
  Description of Artificial Sequence: Synthetic oligonucleotide
  Antisense strand to SEQ ID NO: 1158368
ccuaugagaagauaacugu

SEQ ID NO: 1158370 - RNA, 19 nt, Artificial Sequence
  Description of Artificial Sequence: Synthetic oligonucleotide
  Sense strand starting at position 263 of SEQ ID NO: 916460
auaggaacauguuucuaag

SEQ ID NO: 1158371 - RNA, 19 nt, Artificial Sequence
  Description of Artificial Sequence: Synthetic oligonucleotide
  Antisense strand to SEQ ID NO: 1158370
cuuagaaacauguuccuau

SEQ ID NO: 1158372 - RNA, 19 nt, Artificial Sequence
  Description of Artificial Sequence: Synthetic oligonucleotide
  Sense strand starting at position 374 of SEQ ID NO: 916460
acaguuguggcugaggcaa

SEQ ID NO: 1158373 - RNA, 19 nt, Artificial Sequence
  Description of Artificial Sequence: Synthetic oligonucleotide
  Antisense strand to SEQ ID NO: 1158372
uugccucagccacaacugu

SEQ ID NO: 1158374 - RNA, 19 nt, Artificial Sequence
  Description of Artificial Sequence: Synthetic oligonucleotide
  Sense strand starting at position 395 of SEQ ID NO: 916460
uugguagcccugggagaua

SEQ ID NO: 1158375 - RNA, 19 nt, Artificial Sequence
  Description of Artificial Sequence: Synthetic oligonucleotide
  Antisense strand to SEQ ID NO: 1158374
uaucucccagggcuaccaa

SEQ ID NO: 1158376 - RNA, 19 nt, Artificial Sequence
  Description of Artificial Sequence: Synthetic oligonucleotide
  Sense strand starting at position 499 of SEQ ID NO: 916460
ggaucaaaguaguuuggga

SEQ ID NO: 1158377 - RNA, 19 nt, Artificial Sequence
  Description of Artificial Sequence: Synthetic oligonucleotide
  Antisense strand to SEQ ID NO: 1158376
ucccaaacuacuuugaucc

SEQ ID NO: 1158378 - RNA, 19 nt, Artificial Sequence
  Description of Artificial Sequence: Synthetic oligonucleotide
  Sense strand starting at position 501 of SEQ ID NO: 916460
aucaaaguaguuugggaua

SEQ ID NO: 1158379 - RNA, 19 nt, Artificial Sequence
  Description of Artificial Sequence: Synthetic oligonucleotide
  Antisense strand to SEQ ID NO: 1158378
uaucccaaacuacuuugau

SEQ ID NO: 1158380 - RNA, 19 nt, Artificial Sequence
  Description of Artificial Sequence: Synthetic oligonucleotide
  Sense strand starting at position 506 of SEQ ID NO: 916460
aguaguuugggauaagcag

SEQ ID NO: 1158381 - RNA, 19 nt, Artificial Sequence
  Description of Artificial Sequence: Synthetic oligonucleotide
  Antisense strand to SEQ ID NO: 1158380
cugcuuaucccaaacuacu

SEQ ID NO: 1158382 - RNA, 19 nt, Artificial Sequence
  Description of Artificial Sequence: Synthetic oligonucleotide
  Sense strand starting at position 630 of SEQ ID NO: 916460
auacuuugauugcugacau

SEQ ID NO: 1158383 - RNA, 19 nt, Artificial Sequence
  Description of Artificial Sequence: Synthetic oligonucleotide
  Antisense strand to SEQ ID NO: 1158382
augucagcaaucaaaguau

SEQ ID NO: 1158384 - RNA, 19 nt, Artificial Sequence
  Description of Artificial Sequence: Synthetic oligonucleotide
  Sense strand starting at position 651 of SEQ ID NO: 916460
gguaacauguagccagauu

SEQ ID NO: 1158385 - RNA, 19 nt, Artificial Sequence
  Description of Artificial Sequence: Synthetic oligonucleotide
  Antisense strand to SEQ ID NO: 1158384
aaucuggcuacauguuacc

SEQ ID NO: 1158386 - RNA, 19 nt, Artificial Sequence
  Description of Artificial Sequence: Synthetic oligonucleotide
  Sense strand starting at position 662 of SEQ ID NO: 916460
gccagauucucaguaaauu

SEQ ID NO: 1158387 - RNA, 19 nt, Artificial Sequence
  Description of Artificial Sequence: Synthetic oligonucleotide
  Antisense strand to SEQ ID NO: 1158386
aauuuacugagaaucuggc

SEQ ID NO: 1158388 - RNA, 19 nt, Artificial Sequence
  Description of Artificial Sequence: Synthetic oligonucleotide
  Sense strand starting at position 765 of SEQ ID NO: 916460
gaugacauauucccagagu

SEQ ID NO: 1158389 - RNA, 19 nt, Artificial Sequence
  Description of Artificial Sequence: Synthetic oligonucleotide
  Antisense strand to SEQ ID NO: 1158388
acucugggaauaugucauc

SEQ ID NO: 1158390 - RNA, 19 nt, Artificial Sequence
  Description of Artificial Sequence: Synthetic oligonucleotide
  Sense strand starting at position 810 of SEQ ID NO: 916460
uguaaagauuugucuugcu

SEQ ID NO: 1158391 - RNA, 19 nt, Artificial Sequence
  Description of Artificial Sequence: Synthetic oligonucleotide
  Antisense strand to SEQ ID NO: 1158390
agcaagacaaaucuuuaca

SEQ ID NO: 1158392 - RNA, 19 nt, Artificial Sequence
  Description of Artificial Sequence: Synthetic oligonucleotide
  Sense strand starting at position 815 of SEQ ID NO: 916460
agauuugucuugcuuuauu

SEQ ID NO: 1158393 - RNA, 19 nt, Artificial Sequence
  Description of Artificial Sequence: Synthetic oligonucleotide
  Antisense strand to SEQ ID NO: 1158392
aauaaagcaagacaaaucu

SEQ ID NO: 1158394 - RNA, 19 nt, Artificial Sequence
  Description of Artificial Sequence: Synthetic oligonucleotide
  Sense strand starting at position 942 of SEQ ID NO: 916460
ugcugaauugaaugagagu

SEQ ID NO: 1158395 - RNA, 19 nt, Artificial Sequence
  Description of Artificial Sequence: Synthetic oligonucleotide
  Antisense strand to SEQ ID NO: 1158394
acucucauucaauucagca

SEQ ID NO: 1158396 - RNA, 19 nt, Artificial Sequence
  Description of Artificial Sequence: Synthetic oligonucleotide
  Sense strand starting at position 951 of SEQ ID NO: 916460
gaaugagaguuugcaacca

SEQ ID NO: 1158397 - RNA, 19 nt, Artificial Sequence
  Description of Artificial Sequence: Synthetic oligonucleotide
  Antisense strand to SEQ ID NO: 1158396
ugguugcaaacucucauuc

SEQ ID NO: 1158398 - RNA, 19 nt, Artificial Sequence
  Description of Artificial Sequence: Synthetic oligonucleotide
  Sense strand starting at position 1289 of SEQ ID NO: 916460
aguauuaggguccaauacu

SEQ ID NO: 1158399 - RNA, 19 nt, Artificial Sequence
  Description of Artificial Sequence: Synthetic oligonucleotide
  Antisense strand to SEQ ID NO: 1158398
aguauuggacccuaauacu

SEQ ID NO: 1158400 - RNA, 19 nt, Artificial Sequence
  Description of Artificial Sequence: Synthetic oligonucleotide
  Sense strand starting at position 1364 of SEQ ID NO: 916460
cugugucuacuuuaacuau

SEQ ID NO: 1158401 - RNA, 19 nt, Artificial Sequence
  Description of Artificial Sequence: Synthetic oligonucleotide
  Antisense strand to SEQ ID NO: 1158400
auaguuaaaguagacacag

SEQ ID NO: 1158402 - RNA, 19 nt, Artificial Sequence
  Description of Artificial Sequence: Synthetic oligonucleotide
  Sense strand starting at position 1518 of SEQ ID NO: 916460
uuugcuguugaauagcaau

SEQ ID NO: 1158403 - RNA, 19 nt, Artificial Sequence
  Description of Artificial Sequence: Synthetic oligonucleotide
  Antisense strand to SEQ ID NO: 1158402
auugcuauucaacagcaaa

SEQ ID NO: 1158404 - RNA, 19 nt, Artificial Sequence
  Description of Artificial Sequence: Synthetic oligonucleotide
  Sense strand starting at position 1629 of SEQ ID NO: 916460
uuaccuuacugucuugaca

SEQ ID NO: 1158405 - RNA, 19 nt, Artificial Sequence
  Description of Artificial Sequence: Synthetic oligonucleotide
  Antisense strand to SEQ ID NO: 1158404
ugucaagacaguaagguaa

SEQ ID NO: 1158406 - RNA, 19 nt, Artificial Sequence
  Description of Artificial Sequence: Synthetic oligonucleotide
  Sense strand starting at position 1734 of SEQ ID NO: 916460
gccagauucugagugauac

SEQ ID NO: 1158407 - RNA, 19 nt, Artificial Sequence
  Description of Artificial Sequence: Synthetic oligonucleotide
  Antisense strand to SEQ ID NO: 1158406
guaucacucagaaucuggc

SEQ ID NO: 1158408 - RNA, 19 nt, Artificial Sequence
  Description of Artificial Sequence: Synthetic oligonucleotide
  Sense strand starting at position 1735 of SEQ ID NO: 916460
ccagauucugagugauaca

SEQ ID NO: 1158409 - RNA, 19 nt, Artificial Sequence
  Description of Artificial Sequence: Synthetic oligonucleotide
  Antisense strand to SEQ ID NO: 1158408
uguaucacucagaaucugg

SEQ ID NO: 1158410 - RNA, 19 nt, Artificial Sequence
  Description of Artificial Sequence: Synthetic oligonucleotide
  Sense strand starting at position 1792 of SEQ ID NO: 916460
ccagucucugaauggaguu

SEQ ID NO: 1158411 - RNA, 19 nt, Artificial Sequence
  Description of Artificial Sequence: Synthetic oligonucleotide
  Antisense strand to SEQ ID NO: 1158410
aacuccauucagagacugg

SEQ ID NO: 1158412 - RNA, 19 nt, Artificial Sequence
  Description of Artificial Sequence: Synthetic oligonucleotide
  Sense strand starting at position 1794 of SEQ ID NO: 916460
agucucugaauggaguuau

SEQ ID NO: 1158413 - RNA, 19 nt, Artificial Sequence
  Description of Artificial Sequence: Synthetic oligonucleotide
  Antisense strand to SEQ ID NO: 1158412
auaacuccauucagagacu

SEQ ID NO: 1158414 - RNA, 19 nt, Artificial Sequence
  Description of Artificial Sequence: Synthetic oligonucleotide
  Sense strand starting at position 1798 of SEQ ID NO: 916460
ucugaauggaguuauguca

SEQ ID NO: 1158415 - RNA, 19 nt, Artificial Sequence
  Description of Artificial Sequence: Synthetic oligonucleotide
  Antisense strand to SEQ ID NO: 1158414
ugacauaacuccauucaga

SEQ ID NO: 1158416 - RNA, 19 nt, Artificial Sequence
  Description of Artificial Sequence: Synthetic oligonucleotide
  Sense strand starting at position 1897 of SEQ ID NO: 916460
gcucauucccuauggaaug

SEQ ID NO: 1158417 - RNA, 19 nt, Artificial Sequence
  Description of Artificial Sequence: Synthetic oligonucleotide
  Antisense strand to SEQ ID NO: 1158416
cauuccauagggaaugagc

SEQ ID NO: 1158418 - RNA, 19 nt, Artificial Sequence
  Description of Artificial Sequence: Synthetic oligonucleotide
  Sense strand starting at position 1920 of SEQ ID NO: 916460
agagauauguguuuaacua

SEQ ID NO: 1158419 - RNA, 19 nt, Artificial Sequence
  Description of Artificial Sequence: Synthetic oligonucleotide
  Antisense strand to SEQ ID NO: 1158418
uaguuaaacacauaucucu

SEQ ID NO: 1158420 - RNA, 19 nt, Artificial Sequence
  Description of Artificial Sequence: Synthetic oligonucleotide
  Sense strand starting at position 1986 of SEQ ID NO: 916460
aaggaagcucacugugaga

SEQ ID NO: 1158421 - RNA, 19 nt, Artificial Sequence
  Description of Artificial Sequence: Synthetic oligonucleotide
  Antisense strand to SEQ ID NO: 1158420
ucucacagugagcuuccuu

SEQ ID NO: 1158422 - RNA, 19 nt, Artificial Sequence
  Description of Artificial Sequence: Synthetic oligonucleotide
  Sense strand starting at position 1988 of SEQ ID NO: 916460
ggaagcucacugugagaac

SEQ ID NO: 1158423 - RNA, 19 nt, Artificial Sequence
  Description of Artificial Sequence: Synthetic oligonucleotide
  Antisense strand to SEQ ID NO: 1158422
guucucacagugagcuucc

SEQ ID NO: 1158424 - RNA, 19 nt, Artificial Sequence
  Description of Artificial Sequence: Synthetic oligonucleotide
  Sense strand starting at position 2191 of SEQ ID NO: 916460
uugauuuacuuggacuaac

SEQ ID NO: 1158425 - RNA, 19 nt, Artificial Sequence
  Description of Artificial Sequence: Synthetic oligonucleotide
  Antisense strand to SEQ ID NO: 1158424
guuaguccaaguaaaucaa

SEQ ID NO: 1158426 - RNA, 19 nt, Artificial Sequence
  Description of Artificial Sequence: Synthetic oligonucleotide
  Sense strand starting at position 2431 of SEQ ID NO: 916460
gagagcauucuauagcuua

SEQ ID NO: 1158427 - RNA, 19 nt, Artificial Sequence
  Description of Artificial Sequence: Synthetic oligonucleotide
  Antisense strand to SEQ ID NO: 1158426
uaagcuauagaaugcucuc

SEQ ID NO: 1158428 - RNA, 19 nt, Artificial Sequence
  Description of Artificial Sequence: Synthetic oligonucleotide
  Sense strand starting at position 2605 of SEQ ID NO: 916460
uuaucagcuccugaugcau

SEQ ID NO: 1158429 - RNA, 19 nt, Artificial Sequence
  Description of Artificial Sequence: Synthetic oligonucleotide
  Antisense strand to SEQ ID NO: 1158428
augcaucaggagcugauaa

SEQ ID NO: 1158430 - RNA, 19 nt, Artificial Sequence
  Description of Artificial Sequence: Synthetic oligonucleotide
  Sense strand starting at position 2631 of SEQ ID NO: 916460
gcaaaugagagauguacuu

SEQ ID NO: 1158431 - RNA, 19 nt, Artificial Sequence
  Description of Artificial Sequence: Synthetic oligonucleotide
  Antisense strand to SEQ ID NO: 1158430
aaguacaucucucauuugc

SEQ ID NO: 1158432 - RNA, 19 nt, Artificial Sequence
  Description of Artificial Sequence: Synthetic oligonucleotide
  Sense strand starting at position 2812 of SEQ ID NO: 916460
agcagugagacuuguggaa

SEQ ID NO: 1158433 - RNA, 19 nt, Artificial Sequence
  Description of Artificial Sequence: Synthetic oligonucleotide
  Antisense strand to SEQ ID NO: 1158432
uuccacaagucucacugcu

SEQ ID NO: 1158434 - RNA, 19 nt, Artificial Sequence
  Description of Artificial Sequence: Synthetic oligonucleotide
  Sense strand starting at position 2923 of SEQ ID NO: 916460
aguaaucuucuugaaagua

SEQ ID NO: 1158435 - RNA, 19 nt, Artificial Sequence
  Description of Artificial Sequence: Synthetic oligonucleotide
  Antisense strand to SEQ ID NO: 1158434
uacuuucaagaagauuacu

SEQ ID NO: 1158436 - RNA, 19 nt, Artificial Sequence
  Description of Artificial Sequence: Synthetic oligonucleotide
  Sense strand starting at position 3676 of SEQ ID NO: 916460
auguuacuaucaguugaga

SEQ ID NO: 1158437 - RNA, 19 nt, Artificial Sequence
  Description of Artificial Sequence: Synthetic oligonucleotide
  Antisense strand to SEQ ID NO: 1158436
ucucaacugauaguaacau

SEQ ID NO: 1158438 - RNA, 19 nt, Artificial Sequence
  Description of Artificial Sequence: Synthetic oligonucleotide
  Sense strand starting at position 3734 of SEQ ID NO: 916460
gucaaauguuaauuaagca

SEQ ID NO: 1158439 - RNA, 19 nt, Artificial Sequence
  Description of Artificial Sequence: Synthetic oligonucleotide
  Antisense strand to SEQ ID NO: 1158438
ugcuuaauuaacauuugac

SEQ ID NO: 1158440 - RNA, 19 nt, Artificial Sequence
  Description of Artificial Sequence: Synthetic oligonucleotide
  Sense strand starting at position 3822 of SEQ ID NO: 916460
uuggguaacguauaaacau

SEQ ID NO: 1158441 - RNA, 19 nt, Artificial Sequence
  Description of Artificial Sequence: Synthetic oligonucleotide
  Antisense strand to SEQ ID NO: 1158440
auguuuauacguuacccaa

SEQ ID NO: 1158442 - RNA, 19 nt, Artificial Sequence
  Description of Artificial Sequence: Synthetic oligonucleotide
  Sense strand starting at position 176 of SEQ ID NO: 916461
ugggauuacaggugcugau

SEQ ID NO: 1158443 - RNA, 19 nt, Artificial Sequence
  Description of Artificial Sequence: Synthetic oligonucleotide
  Antisense strand to SEQ ID NO: 1158442
aucagcaccuguaauccca

SEQ ID NO: 1158444 - RNA, 19 nt, Artificial Sequence
  Description of Artificial Sequence: Synthetic oligonucleotide
  Sense strand starting at position 362 of SEQ ID NO: 916461
gcaguugaccuugaagcau

SEQ ID NO: 1158445 - RNA, 19 nt, Artificial Sequence
  Description of Artificial Sequence: Synthetic oligonucleotide
  Antisense strand to SEQ ID NO: 1158444
augcuucaaggucaacugc

SEQ ID NO: 1158446 - RNA, 19 nt, Artificial Sequence
  Description of Artificial Sequence: Synthetic oligonucleotide
  Sense strand starting at position 383 of SEQ ID NO: 916461
agguuuacuuuagccacua

SEQ ID NO: 1158447 - RNA, 19 nt, Artificial Sequence
  Description of Artificial Sequence: Synthetic oligonucleotide
  Antisense strand to SEQ ID NO: 1158446
uaguggcuaaaguaaaccu

SEQ ID NO: 1158448 - RNA, 19 nt, Artificial Sequence
  Description of Artificial Sequence: Synthetic oligonucleotide
  Sense strand starting at position 384 of SEQ ID NO: 916461
gguuuacuuuagccacuaa

SEQ ID NO: 1158449 - RNA, 19 nt, Artificial Sequence
  Description of Artificial Sequence: Synthetic oligonucleotide
  Antisense strand to SEQ ID NO: 1158448
uuaguggcuaaaguaaacc

SEQ ID NO: 1158450 - RNA, 19 nt, Artificial Sequence
  Description of Artificial Sequence: Synthetic oligonucleotide
  Sense strand starting at position 475 of SEQ ID NO: 916461
uccugaacucugcaugaag

SEQ ID NO: 1158451 - RNA, 19 nt, Artificial Sequence
  Description of Artificial Sequence: Synthetic oligonucleotide
  Antisense strand to SEQ ID NO: 1158450
cuucaugcagaguucagga

SEQ ID NO: 1158452 - RNA, 19 nt, Artificial Sequence
  Description of Artificial Sequence: Synthetic oligonucleotide
  Sense strand starting at position 486 of SEQ ID NO: 916461
gcaugaagucauggagguu

SEQ ID NO: 1158453 - RNA, 19 nt, Artificial Sequence
  Description of Artificial Sequence: Synthetic oligonucleotide
  Antisense strand to SEQ ID NO: 1158452
aaccuccaugacuucaugc

SEQ ID NO: 1158454 - RNA, 19 nt, Artificial Sequence
  Description of Artificial Sequence: Synthetic oligonucleotide
  Sense strand starting at position 489 of SEQ ID NO: 916461
ugaagucauggagguuacu

SEQ ID NO: 1158455 - RNA, 19 nt, Artificial Sequence
  Description of Artificial Sequence: Synthetic oligonucleotide
  Antisense strand to SEQ ID NO: 1158454
aguaaccuccaugacuuca

SEQ ID NO: 1158456 - RNA, 19 nt, Artificial Sequence
  Description of Artificial Sequence: Synthetic oligonucleotide
  Sense strand starting at position 834 of SEQ ID NO: 916461
gaugaauccuaacuugagu

SEQ ID NO: 1158457 - RNA, 19 nt, Artificial Sequence
  Description of Artificial Sequence: Synthetic oligonucleotide
  Antisense strand to SEQ ID NO: 1158456
acucaaguuaggauucauc

SEQ ID NO: 1158458 - RNA, 19 nt, Artificial Sequence
  Description of Artificial Sequence: Synthetic oligonucleotide
  Sense strand starting at position 923 of SEQ ID NO: 916461
aucaaacagcuaugguaaa

SEQ ID NO: 1158459 - RNA, 19 nt, Artificial Sequence
  Description of Artificial Sequence: Synthetic oligonucleotide
  Antisense strand to SEQ ID NO: 1158458
uuuaccauagcuguuugau

SEQ ID NO: 1158460 - RNA, 19 nt, Artificial Sequence
  Description of Artificial Sequence: Synthetic oligonucleotide
  Sense strand starting at position 944 of SEQ ID NO: 916461
gaguaagaacucuguacga

SEQ ID NO: 1158461 - RNA, 19 nt, Artificial Sequence
  Description of Artificial Sequence: Synthetic oligonucleotide
  Antisense strand to SEQ ID NO: 1158460
ucguacagaguucuuacuc

SEQ ID NO: 1158462 - RNA, 19 nt, Artificial Sequence
  Description of Artificial Sequence: Synthetic oligonucleotide
  Sense strand starting at position 946 of SEQ ID NO: 916461
guaagaacucuguacgaag

SEQ ID NO: 1158463 - RNA, 19 nt, Artificial Sequence
  Description of Artificial Sequence: Synthetic oligonucleotide
  Antisense strand to SEQ ID NO: 1158462
cuucguacagaguucuuac

SEQ ID NO: 1158464 - RNA, 19 nt, Artificial Sequence
  Description of Artificial Sequence: Synthetic oligonucleotide
  Sense strand starting at position 1109 of SEQ ID NO: 916461
augaauaaugcauguaguc

SEQ ID NO: 1158465 - RNA, 19 nt, Artificial Sequence
  Description of Artificial Sequence: Synthetic oligonucleotide
  Antisense strand to SEQ ID NO: 1158464
gacuacaugcauuauucau

SEQ ID NO: 1158466 - RNA, 19 nt, Artificial Sequence
  Description of Artificial Sequence: Synthetic oligonucleotide
  Sense strand starting at position 1118 of SEQ ID NO: 916461
gcauguagucaauaacacu

SEQ ID NO: 1158467 - RNA, 19 nt, Artificial Sequence
  Description of Artificial Sequence: Synthetic oligonucleotide
  Antisense strand to SEQ ID NO: 1158466
aguguuauugacuacaugc

SEQ ID NO: 1158468 - RNA, 19 nt, Artificial Sequence
  Description of Artificial Sequence: Synthetic oligonucleotide
  Sense strand starting at position 1232 of SEQ ID NO: 916461
guagguaugcccuacaauu

SEQ ID NO: 1158469 - RNA, 19 nt, Artificial Sequence
  Description of Artificial Sequence: Synthetic oligonucleotide
  Antisense strand to SEQ ID NO: 1158468
aauuguagggcauaccuac

SEQ ID NO: 1158470 - RNA, 19 nt, Artificial Sequence
  Description of Artificial Sequence: Synthetic oligonucleotide
  Sense strand starting at position 1383 of SEQ ID NO: 916461
cugugaccucgggaaacua

SEQ ID NO: 1158471 - RNA, 19 nt, Artificial Sequence
  Description of Artificial Sequence: Synthetic oligonucleotide
  Antisense strand to SEQ ID NO: 1158470
uaguuucccgaggucacag

SEQ ID NO: 1158472 - RNA, 19 nt, Artificial Sequence
  Description of Artificial Sequence: Synthetic oligonucleotide
  Sense strand starting at position 1540 of SEQ ID NO: 916461
gaagaauccgaaggucauu

SEQ ID NO: 1158473 - RNA, 19 nt, Artificial Sequence
  Description of Artificial Sequence: Synthetic oligonucleotide
  Antisense strand to SEQ ID NO: 1158472
aaugaccuucggauucuuc

SEQ ID NO: 1158474 - RNA, 19 nt, Artificial Sequence
  Description of Artificial Sequence: Synthetic oligonucleotide
  Sense strand starting at position 1545 of SEQ ID NO: 916461
auccgaaggucauuaaucu

SEQ ID NO: 1158475 - RNA, 19 nt, Artificial Sequence
  Description of Artificial Sequence: Synthetic oligonucleotide
  Antisense strand to SEQ ID NO: 1158474
agauuaaugaccuucggau

SEQ ID NO: 1158476 - RNA, 19 nt, Artificial Sequence
  Description of Artificial Sequence: Synthetic oligonucleotide
  Sense strand starting at position 1546 of SEQ ID NO: 916461
uccgaaggucauuaaucuu

SEQ ID NO: 1158477 - RNA, 19 nt, Artificial Sequence
  Description of Artificial Sequence: Synthetic oligonucleotide
  Antisense strand to SEQ ID NO: 1158476
aagauuaaugaccuucgga

SEQ ID NO: 1158478 - RNA, 19 nt, Artificial Sequence
  Description of Artificial Sequence: Synthetic oligonucleotide
  Sense strand starting at position 1743 of SEQ ID NO: 916461
gaaauaaaccgucaacguc

SEQ ID NO: 1158479 - RNA, 19 nt, Artificial Sequence
  Description of Artificial Sequence: Synthetic oligonucleotide
  Antisense strand to SEQ ID NO: 1158478
gacguugacgguuuauuuc

SEQ ID NO: 1158480 - RNA, 19 nt, Artificial Sequence
  Description of Artificial Sequence: Synthetic oligonucleotide
  Sense strand starting at position 2121 of SEQ ID NO: 916461
aguggagcuugacucuuaa

SEQ ID NO: 1158481 - RNA, 19 nt, Artificial Sequence
  Description of Artificial Sequence: Synthetic oligonucleotide
  Antisense strand to SEQ ID NO: 1158480
uuaagagucaagcuccacu

SEQ ID NO: 1158482 - RNA, 19 nt, Artificial Sequence
  Description of Artificial Sequence: Synthetic oligonucleotide
  Sense strand starting at position 2361 of SEQ ID NO: 916461
gggagauggucaaagcugu

SEQ ID NO: 1158483 - RNA, 19 nt, Artificial Sequence
  Description of Artificial Sequence: Synthetic oligonucleotide
  Antisense strand to SEQ ID NO: 1158482
acagcuuugaccaucuccc

SEQ ID NO: 1158484 - RNA, 19 nt, Artificial Sequence
  Description of Artificial Sequence: Synthetic oligonucleotide
  Sense strand starting at position 2387 of SEQ ID NO: 916461
uauccugaucucgaauguu

SEQ ID NO: 1158485 - RNA, 19 nt, Artificial Sequence
  Description of Artificial Sequence: Synthetic oligonucleotide
  Antisense strand to SEQ ID NO: 1158484
aacauucgagaucaggaua

SEQ ID NO: 1158486 - RNA, 19 nt, Artificial Sequence
  Description of Artificial Sequence: Synthetic oligonucleotide
  Sense strand starting at position 2500 of SEQ ID NO: 916461
guacuucuccagcaguuaa

SEQ ID NO: 1158487 - RNA, 19 nt, Artificial Sequence
  Description of Artificial Sequence: Synthetic oligonucleotide
  Antisense strand to SEQ ID NO: 1158486
uuaacugcuggagaaguac

SEQ ID NO: 1158488 - RNA, 19 nt, Artificial Sequence
  Description of Artificial Sequence: Synthetic oligonucleotide
  Sense strand starting at position 2531 of SEQ ID NO: 916461
gcaauuuacucugcuuuga

SEQ ID NO: 1158489 - RNA, 19 nt, Artificial Sequence
  Description of Artificial Sequence: Synthetic oligonucleotide
  Antisense strand to SEQ ID NO: 1158488
ucaaagcagaguaaauugc

SEQ ID NO: 1158490 - RNA, 19 nt, Artificial Sequence
  Description of Artificial Sequence: Synthetic oligonucleotide
  Sense strand starting at position 2701 of SEQ ID NO: 916461
uagcuaugagaguaucucu

SEQ ID NO: 1158491 - RNA, 19 nt, Artificial Sequence
  Description of Artificial Sequence: Synthetic oligonucleotide
  Antisense strand to SEQ ID NO: 1158490
agagauacucucauagcua

SEQ ID NO: 1158492 - RNA, 19 nt, Artificial Sequence
  Description of Artificial Sequence: Synthetic oligonucleotide
  Sense strand starting at position 2704 of SEQ ID NO: 916461
cuaugagaguaucucugau

SEQ ID NO: 1158493 - RNA, 19 nt, Artificial Sequence
  Description of Artificial Sequence: Synthetic oligonucleotide
  Antisense strand to SEQ ID NO: 1158492
aucagagauacucucauag

SEQ ID NO: 1158494 - RNA, 19 nt, Artificial Sequence
  Description of Artificial Sequence: Synthetic oligonucleotide
  Sense strand starting at position 2732 of SEQ ID NO: 916461
ugugguuuccaucaagaca

SEQ ID NO: 1158495 - RNA, 19 nt, Artificial Sequence
  Description of Artificial Sequence: Synthetic oligonucleotide
  Antisense strand to SEQ ID NO: 1158494
ugucuugauggaaaccaca

SEQ ID NO: 1158496 - RNA, 19 nt, Artificial Sequence
  Description of Artificial Sequence: Synthetic oligonucleotide
  Sense strand starting at position 2772 of SEQ ID NO: 916461
ggaaguggagaauguaauu

SEQ ID NO: 1158497 - RNA, 19 nt, Artificial Sequence
  Description of Artificial Sequence: Synthetic oligonucleotide
  Antisense strand to SEQ ID NO: 1158496
aauuacauucuccacuucc

SEQ ID NO: 1158498 - RNA, 19 nt, Artificial Sequence
  Description of Artificial Sequence: Synthetic oligonucleotide
  Sense strand starting at position 2777 of SEQ ID NO: 916461
uggagaauguaauuacuua

SEQ ID NO: 1158499 - RNA, 19 nt, Artificial Sequence
  Description of Artificial Sequence: Synthetic oligonucleotide
  Antisense strand to SEQ ID NO: 1158498
uaaguaauuacauucucca

SEQ ID NO: 1158500 - RNA, 19 nt, Artificial Sequence
  Description of Artificial Sequence: Synthetic oligonucleotide
  Sense strand starting at position 3431 of SEQ ID NO: 916461
gcaaauggaccuuaaguca

SEQ ID NO: 1158501 - RNA, 19 nt, Artificial Sequence
  Description of Artificial Sequence: Synthetic oligonucleotide
  Antisense strand to SEQ ID NO: 1158500
ugacuuaagguccauuugc

SEQ ID NO: 1158502 - RNA, 19 nt, Artificial Sequence
  Description of Artificial Sequence: Synthetic oligonucleotide
  Sense strand starting at position 3543 of SEQ ID NO: 916461
ucccaauguuucucaaagu

SEQ ID NO: 1158503 - RNA, 19 nt, Artificial Sequence
  Description of Artificial Sequence: Synthetic oligonucleotide
  Antisense strand to SEQ ID NO: 1158502
acuuugagaaacauuggga

SEQ ID NO: 1158504 - RNA, 19 nt, Artificial Sequence
  Description of Artificial Sequence: Synthetic oligonucleotide
  Sense strand starting at position 3556 of SEQ ID NO: 916461
caaaguguggcccauggaa

SEQ ID NO: 1158505 - RNA, 19 nt, Artificial Sequence
  Description of Artificial Sequence: Synthetic oligonucleotide
  Antisense strand to SEQ ID NO: 1158504
uuccaugggccacacuuug

SEQ ID NO: 1158506 - RNA, 19 nt, Artificial Sequence
  Description of Artificial Sequence: Synthetic oligonucleotide
  Sense strand starting at position 3558 of SEQ ID NO: 916461
aaguguggcccauggaaca

SEQ ID NO: 1158507 - RNA, 19 nt, Artificial Sequence
  Description of Artificial Sequence: Synthetic oligonucleotide
  Antisense strand to SEQ ID NO: 1158506
uguuccaugggccacacuu

SEQ ID NO: 1158508 - RNA, 19 nt, Artificial Sequence
  Description of Artificial Sequence: Synthetic oligonucleotide
  Sense strand starting at position 3638 of SEQ ID NO: 916461
ccaaaucuacuguauuagu

SEQ ID NO: 1158509 - RNA, 19 nt, Artificial Sequence
  Description of Artificial Sequence: Synthetic oligonucleotide
  Antisense strand to SEQ ID NO: 1158508
acuaauacaguagauuugg

SEQ ID NO: 1158510 - RNA, 19 nt, Artificial Sequence
  Description of Artificial Sequence: Synthetic oligonucleotide
  Sense strand starting at position 3683 of SEQ ID NO: 916461
gccacaaacugagugguua

SEQ ID NO: 1158511 - RNA, 19 nt, Artificial Sequence
  Description of Artificial Sequence: Synthetic oligonucleotide
  Antisense strand to SEQ ID NO: 1158510
uaaccacucaguuuguggc

SEQ ID NO: 1158512 - RNA, 19 nt, Artificial Sequence
  Description of Artificial Sequence: Synthetic oligonucleotide
  Sense strand starting at position 3687 of SEQ ID NO: 916461
caaacugagugguuaaaga

SEQ ID NO: 1158513 - RNA, 19 nt, Artificial Sequence
  Description of Artificial Sequence: Synthetic oligonucleotide
  Antisense strand to SEQ ID NO: 1158512
ucuuuaaccacucaguuug

SEQ ID NO: 1158514 - RNA, 19 nt, Artificial Sequence
  Description of Artificial Sequence: Synthetic oligonucleotide
  Sense strand starting at position 3721 of SEQ ID NO: 916461
cucguaguucuggagacua

SEQ ID NO: 1158515 - RNA, 19 nt, Artificial Sequence
  Description of Artificial Sequence: Synthetic oligonucleotide
  Antisense strand to SEQ ID NO: 1158514
uagucuccagaacuacgag

SEQ ID NO: 1158516 - RNA, 19 nt, Artificial Sequence
  Description of Artificial Sequence: Synthetic oligonucleotide
  Sense strand starting at position 3723 of SEQ ID NO: 916461
cguaguucuggagacuaga

SEQ ID NO: 1158517 - RNA, 19 nt, Artificial Sequence
  Description of Artificial Sequence: Synthetic oligonucleotide
  Antisense strand to SEQ ID NO: 1158516
ucuagucuccagaacuacg

SEQ ID NO: 1158518 - RNA, 19 nt, Artificial Sequence
  Description of Artificial Sequence: Synthetic oligonucleotide
  Sense strand starting at position 3871 of SEQ ID NO: 916461
uucuccaucugaguauauu

SEQ ID NO: 1158519 - RNA, 19 nt, Artificial Sequence
  Description of Artificial Sequence: Synthetic oligonucleotide
  Antisense strand to SEQ ID NO: 1158518
aauauacucagauggagaa

SEQ ID NO: 1158520 - RNA, 19 nt, Artificial Sequence
  Description of Artificial Sequence: Synthetic oligonucleotide
  Sense strand starting at position 3872 of SEQ ID NO: 916461
ucuccaucugaguauauua

SEQ ID NO: 1158521 - RNA, 19 nt, Artificial Sequence
  Description of Artificial Sequence: Synthetic oligonucleotide
  Antisense strand to SEQ ID NO: 1158520
uaauauacucagauggaga

SEQ ID NO: 1158522 - RNA, 19 nt, Artificial Sequence
  Description of Artificial Sequence: Synthetic oligonucleotide
  Sense strand starting at position 29 of SEQ ID NO: 916462
gagucucaauucuuguaag

SEQ ID NO: 1158523 - RNA, 19 nt, Artificial Sequence
  Description of Artificial Sequence: Synthetic oligonucleotide
  Antisense strand to SEQ ID NO: 1158522
cuuacaagaauugagacuc

SEQ ID NO: 1158524 - RNA, 19 nt, Artificial Sequence
  Description of Artificial Sequence: Synthetic oligonucleotide
  Sense strand starting at position 41 of SEQ ID NO: 916462
uuguaaguauaaccagauu

SEQ ID NO: 1158525 - RNA, 19 nt, Artificial Sequence
  Description of Artificial Sequence: Synthetic oligonucleotide
  Antisense strand to SEQ ID NO: 1158524
aaucugguuauacuuacaa

SEQ ID NO: 1158526 - RNA, 19 nt, Artificial Sequence
  Description of Artificial Sequence: Synthetic oligonucleotide
  Sense strand starting at position 47 of SEQ ID NO: 916462
guauaaccagauuggucaa

SEQ ID NO: 1158527 - RNA, 19 nt, Artificial Sequence
  Description of Artificial Sequence: Synthetic oligonucleotide
  Antisense strand to SEQ ID NO: 1158526
uugaccaaucugguuauac

SEQ ID NO: 1158528 - RNA, 19 nt, Artificial Sequence
  Description of Artificial Sequence: Synthetic oligonucleotide
  Sense strand starting at position 66 of SEQ ID NO: 916462
auauuagcuugucuuacca

SEQ ID NO: 1158529 - RNA, 19 nt, Artificial Sequence
  Description of Artificial Sequence: Synthetic oligonucleotide
  Antisense strand to SEQ ID NO: 1158528
ugguaagacaagcuaauau

SEQ ID NO: 1158530 - RNA, 19 nt, Artificial Sequence
  Description of Artificial Sequence: Synthetic oligonucleotide
  Sense strand starting at position 76 of SEQ ID NO: 916462
gucuuaccacugcaggaua

SEQ ID NO: 1158531 - RNA, 19 nt, Artificial Sequence
  Description of Artificial Sequence: Synthetic oligonucleotide
  Antisense strand to SEQ ID NO: 1158530
uauccugcagugguaagac

SEQ ID NO: 1158532 - RNA, 19 nt, Artificial Sequence
  Description of Artificial Sequence: Synthetic oligonucleotide
  Sense strand starting at position 380 of SEQ ID NO: 916462
cuuagcacuuuaguguuaa

SEQ ID NO: 1158533 - RNA, 19 nt, Artificial Sequence
  Description of Artificial Sequence: Synthetic oligonucleotide
  Antisense strand to SEQ ID NO: 1158532
uuaacacuaaagugcuaag

SEQ ID NO: 1158534 - RNA, 19 nt, Artificial Sequence
  Description of Artificial Sequence: Synthetic oligonucleotide
  Sense strand starting at position 564 of SEQ ID NO: 916462
aacagagcuguugaguaga

SEQ ID NO: 1158535 - RNA, 19 nt, Artificial Sequence
  Description of Artificial Sequence: Synthetic oligonucleotide
  Antisense strand to SEQ ID NO: 1158534
ucuacucaacagcucuguu

SEQ ID NO: 1158536 - RNA, 19 nt, Artificial Sequence
  Description of Artificial Sequence: Synthetic oligonucleotide
  Sense strand starting at position 566 of SEQ ID NO: 916462
cagagcuguugaguagauu

SEQ ID NO: 1158537 - RNA, 19 nt, Artificial Sequence
  Description of Artificial Sequence: Synthetic oligonucleotide
  Antisense strand to SEQ ID NO: 1158536
aaucuacucaacagcucug

SEQ ID NO: 1158538 - RNA, 19 nt, Artificial Sequence
  Description of Artificial Sequence: Synthetic oligonucleotide
  Sense strand starting at position 688 of SEQ ID NO: 916462
gaauuuggauaucaaguua

SEQ ID NO: 1158539 - RNA, 19 nt, Artificial Sequence
  Description of Artificial Sequence: Synthetic oligonucleotide
  Antisense strand to SEQ ID NO: 1158538
uaacuugauauccaaauuc

SEQ ID NO: 1158540 - RNA, 19 nt, Artificial Sequence
  Description of Artificial Sequence: Synthetic oligonucleotide
  Sense strand starting at position 716 of SEQ ID NO: 916462
aaacaagacuauuccguga

SEQ ID NO: 1158541 - RNA, 19 nt, Artificial Sequence
  Description of Artificial Sequence: Synthetic oligonucleotide
  Antisense strand to SEQ ID NO: 1158540
ucacggaauagucuuguuu

SEQ ID NO: 1158542 - RNA, 19 nt, Artificial Sequence
  Description of Artificial Sequence: Synthetic oligonucleotide
  Sense strand starting at position 805 of SEQ ID NO: 916462
cagagauuauuacaucgac

SEQ ID NO: 1158543 - RNA, 19 nt, Artificial Sequence
  Description of Artificial Sequence: Synthetic oligonucleotide
  Antisense strand to SEQ ID NO: 1158542
gucgauguaauaaucucug

SEQ ID NO: 1158544 - RNA, 19 nt, Artificial Sequence
  Description of Artificial Sequence: Synthetic oligonucleotide
  Sense strand starting at position 808 of SEQ ID NO: 916462
agauuauuacaucgacaac

SEQ ID NO: 1158545 - RNA, 19 nt, Artificial Sequence
  Description of Artificial Sequence: Synthetic oligonucleotide
  Antisense strand to SEQ ID NO: 1158544
guugucgauguaauaaucu

SEQ ID NO: 1158546 - RNA, 19 nt, Artificial Sequence
  Description of Artificial Sequence: Synthetic oligonucleotide
  Sense strand starting at position 866 of SEQ ID NO: 916462
ucuugaauugugugggaga

SEQ ID NO: 1158547 - RNA, 19 nt, Artificial Sequence
  Description of Artificial Sequence: Synthetic oligonucleotide
  Antisense strand to SEQ ID NO: 1158546
ucucccacacaauucaaga

SEQ ID NO: 1158548 - RNA, 19 nt, Artificial Sequence
  Description of Artificial Sequence: Synthetic oligonucleotide
  Sense strand starting at position 868 of SEQ ID NO: 916462
uugaauugugugggagaaa

SEQ ID NO: 1158549 - RNA, 19 nt, Artificial Sequence
  Description of Artificial Sequence: Synthetic oligonucleotide
  Antisense strand to SEQ ID NO: 1158548
uuucucccacacaauucaa

SEQ ID NO: 1158550 - RNA, 19 nt, Artificial Sequence
  Description of Artificial Sequence: Synthetic oligonucleotide
  Sense strand starting at position 990 of SEQ ID NO: 916462
acugcucuuguguagggaa

SEQ ID NO: 1158551 - RNA, 19 nt, Artificial Sequence
  Description of Artificial Sequence: Synthetic oligonucleotide
  Antisense strand to SEQ ID NO: 1158550
uucccuacacaagagcagu

SEQ ID NO: 1158552 - RNA, 19 nt, Artificial Sequence
  Description of Artificial Sequence: Synthetic oligonucleotide
  Sense strand starting at position 992 of SEQ ID NO: 916462
ugcucuuguguagggaauu

SEQ ID NO: 1158553 - RNA, 19 nt, Artificial Sequence
  Description of Artificial Sequence: Synthetic oligonucleotide
  Antisense strand to SEQ ID NO: 1158552
aauucccuacacaagagca

SEQ ID NO: 1158554 - RNA, 19 nt, Artificial Sequence
  Description of Artificial Sequence: Synthetic oligonucleotide
  Sense strand starting at position 1491 of SEQ ID NO: 916462
cugccagguccucaaaugu

SEQ ID NO: 1158555 - RNA, 19 nt, Artificial Sequence
  Description of Artificial Sequence: Synthetic oligonucleotide
  Antisense strand to SEQ ID NO: 1158554
acauuugaggaccuggcag

SEQ ID NO: 1158556 - RNA, 19 nt, Artificial Sequence
  Description of Artificial Sequence: Synthetic oligonucleotide
  Sense strand starting at position 1626 of SEQ ID NO: 916462
cguauuccuuuaucgggua

SEQ ID NO: 1158557 - RNA, 19 nt, Artificial Sequence
  Description of Artificial Sequence: Synthetic oligonucleotide
  Antisense strand to SEQ ID NO: 1158556
uacccgauaaaggaauacg

SEQ ID NO: 1158558 - RNA, 19 nt, Artificial Sequence
  Description of Artificial Sequence: Synthetic oligonucleotide
  Sense strand starting at position 1640 of SEQ ID NO: 916462
ggguaucucugguuauaaa

SEQ ID NO: 1158559 - RNA, 19 nt, Artificial Sequence
  Description of Artificial Sequence: Synthetic oligonucleotide
  Antisense strand to SEQ ID NO: 1158558
uuuauaaccagagauaccc

SEQ ID NO: 1158560 - RNA, 19 nt, Artificial Sequence
  Description of Artificial Sequence: Synthetic oligonucleotide
  Sense strand starting at position 1641 of SEQ ID NO: 916462
gguaucucugguuauaaag

SEQ ID NO: 1158561 - RNA, 19 nt, Artificial Sequence
  Description of Artificial Sequence: Synthetic oligonucleotide
  Antisense strand to SEQ ID NO: 1158560
cuuuauaaccagagauacc

SEQ ID NO: 1158562 - RNA, 19 nt, Artificial Sequence
  Description of Artificial Sequence: Synthetic oligonucleotide
  Sense strand starting at position 1753 of SEQ ID NO: 916462
cuccuagugucuguuccau

SEQ ID NO: 1158563 - RNA, 19 nt, Artificial Sequence
  Description of Artificial Sequence: Synthetic oligonucleotide
  Antisense strand to SEQ ID NO: 1158562
auggaacagacacuaggag

SEQ ID NO: 1158564 - RNA, 19 nt, Artificial Sequence
  Description of Artificial Sequence: Synthetic oligonucleotide
  Sense strand starting at position 1755 of SEQ ID NO: 916462
ccuagugucuguuccauac

SEQ ID NO: 1158565 - RNA, 19 nt, Artificial Sequence
  Description of Artificial Sequence: Synthetic oligonucleotide
  Antisense strand to SEQ ID NO: 1158564
guauggaacagacacuagg

SEQ ID NO: 1158566 - RNA, 19 nt, Artificial Sequence
  Description of Artificial Sequence: Synthetic oligonucleotide
  Sense strand starting at position 1759 of SEQ ID NO: 916462
gugucuguuccauacguag

SEQ ID NO: 1158567 - RNA, 19 nt, Artificial Sequence
  Description of Artificial Sequence: Synthetic oligonucleotide
  Antisense strand to SEQ ID NO: 1158566
cuacguauggaacagacac

SEQ ID NO: 1158568 - RNA, 19 nt, Artificial Sequence
  Description of Artificial Sequence: Synthetic oligonucleotide
  Sense strand starting at position 1773 of SEQ ID NO: 916462
cguagcuaauucucuggaa

SEQ ID NO: 1158569 - RNA, 19 nt, Artificial Sequence
  Description of Artificial Sequence: Synthetic oligonucleotide
  Antisense strand to SEQ ID NO: 1158568
uuccagagaauuagcuacg

SEQ ID NO: 1158570 - RNA, 19 nt, Artificial Sequence
  Description of Artificial Sequence: Synthetic oligonucleotide
  Sense strand starting at position 1774 of SEQ ID NO: 916462
guagcuaauucucuggaau

SEQ ID NO: 1158571 - RNA, 19 nt, Artificial Sequence
  Description of Artificial Sequence: Synthetic oligonucleotide
  Antisense strand to SEQ ID NO: 1158570
auuccagagaauuagcuac

SEQ ID NO: 1158572 - RNA, 19 nt, Artificial Sequence
  Description of Artificial Sequence: Synthetic oligonucleotide
  Sense strand starting at position 1777 of SEQ ID NO: 916462
gcuaauucucuggaauuau

SEQ ID NO: 1158573 - RNA, 19 nt, Artificial Sequence
  Description of Artificial Sequence: Synthetic oligonucleotide
  Antisense strand to SEQ ID NO: 1158572
auaauuccagagaauuagc

SEQ ID NO: 1158574 - RNA, 19 nt, Artificial Sequence
  Description of Artificial Sequence: Synthetic oligonucleotide
  Sense strand starting at position 2126 of SEQ ID NO: 916462
auaugcugauguccuaaga

SEQ ID NO: 1158575 - RNA, 19 nt, Artificial Sequence
  Description of Artificial Sequence: Synthetic oligonucleotide
  Antisense strand to SEQ ID NO: 1158574
ucuuaggacaucagcauau

SEQ ID NO: 1158576 - RNA, 19 nt, Artificial Sequence
  Description of Artificial Sequence: Synthetic oligonucleotide
  Sense strand starting at position 2182 of SEQ ID NO: 916462
aaguacuggcucuggaaga

SEQ ID NO: 1158577 - RNA, 19 nt, Artificial Sequence
  Description of Artificial Sequence: Synthetic oligonucleotide
  Antisense strand to SEQ ID NO: 1158576
ucuuccagagccaguacuu

SEQ ID NO: 1158578 - RNA, 19 nt, Artificial Sequence
  Description of Artificial Sequence: Synthetic oligonucleotide
  Sense strand starting at position 2232 of SEQ ID NO: 916462
acuuucuucuguuugauua

SEQ ID NO: 1158579 - RNA, 19 nt, Artificial Sequence
  Description of Artificial Sequence: Synthetic oligonucleotide
  Antisense strand to SEQ ID NO: 1158578
uaaucaaacagaagaaagu

SEQ ID NO: 1158580 - RNA, 19 nt, Artificial Sequence
  Description of Artificial Sequence: Synthetic oligonucleotide
  Sense strand starting at position 2233 of SEQ ID NO: 916462
cuuucuucuguuugauuau

SEQ ID NO: 1158581 - RNA, 19 nt, Artificial Sequence
  Description of Artificial Sequence: Synthetic oligonucleotide
  Antisense strand to SEQ ID NO: 1158580
auaaucaaacagaagaaag

SEQ ID NO: 1158582 - RNA, 19 nt, Artificial Sequence
  Description of Artificial Sequence: Synthetic oligonucleotide
  Sense strand starting at position 2433 of SEQ ID NO: 916462
uguugucuuaaugggugua

SEQ ID NO: 1158583 - RNA, 19 nt, Artificial Sequence
  Description of Artificial Sequence: Synthetic oligonucleotide
  Antisense strand to SEQ ID NO: 1158582
uacacccauuaagacaaca

SEQ ID NO: 1158584 - RNA, 19 nt, Artificial Sequence
  Description of Artificial Sequence: Synthetic oligonucleotide
  Sense strand starting at position 2434 of SEQ ID NO: 916462
guugucuuaauggguguau

SEQ ID NO: 1158585 - RNA, 19 nt, Artificial Sequence
  Description of Artificial Sequence: Synthetic oligonucleotide
  Antisense strand to SEQ ID NO: 1158584
auacacccauuaagacaac

SEQ ID NO: 1158586 - RNA, 19 nt, Artificial Sequence
  Description of Artificial Sequence: Synthetic oligonucleotide
  Sense strand starting at position 2435 of SEQ ID NO: 916462
uugucuuaauggguguaua

SEQ ID NO: 1158587 - RNA, 19 nt, Artificial Sequence
  Description of Artificial Sequence: Synthetic oligonucleotide
  Antisense strand to SEQ ID NO: 1158586
uauacacccauuaagacaa

SEQ ID NO: 1158588 - RNA, 19 nt, Artificial Sequence
  Description of Artificial Sequence: Synthetic oligonucleotide
  Sense strand starting at position 2436 of SEQ ID NO: 916462
ugucuuaauggguguauag

SEQ ID NO: 1158589 - RNA, 19 nt, Artificial Sequence
  Description of Artificial Sequence: Synthetic oligonucleotide
  Antisense strand to SEQ ID NO: 1158588
cuauacacccauuaagaca

SEQ ID NO: 1158590 - RNA, 19 nt, Artificial Sequence
  Description of Artificial Sequence: Synthetic oligonucleotide
  Sense strand starting at position 2474 of SEQ ID NO: 916462
gcuaguuucuuacucuaga

SEQ ID NO: 1158591 - RNA, 19 nt, Artificial Sequence
  Description of Artificial Sequence: Synthetic oligonucleotide
  Antisense strand to SEQ ID NO: 1158590
ucuagaguaagaaacuagc

SEQ ID NO: 1158592 - RNA, 19 nt, Artificial Sequence
  Description of Artificial Sequence: Synthetic oligonucleotide
  Sense strand starting at position 2475 of SEQ ID NO: 916462
cuaguuucuuacucuagac

SEQ ID NO: 1158593 - RNA, 19 nt, Artificial Sequence
  Description of Artificial Sequence: Synthetic oligonucleotide
  Antisense strand to SEQ ID NO: 1158592
gucuagaguaagaaacuag

SEQ ID NO: 1158594 - RNA, 19 nt, Artificial Sequence
  Description of Artificial Sequence: Synthetic oligonucleotide
  Sense strand starting at position 3081 of SEQ ID NO: 916462
uucuguaucugccuaagag

SEQ ID NO: 1158595 - RNA, 19 nt, Artificial Sequence
  Description of Artificial Sequence: Synthetic oligonucleotide
  Antisense strand to SEQ ID NO: 1158594
cucuuaggcagauacagaa

SEQ ID NO: 1158596 - RNA, 19 nt, Artificial Sequence
  Description of Artificial Sequence: Synthetic oligonucleotide
  Sense strand starting at position 3123 of SEQ ID NO: 916462
ugucaucacuuuguaguua

SEQ ID NO: 1158597 - RNA, 19 nt, Artificial Sequence
  Description of Artificial Sequence: Synthetic oligonucleotide
  Antisense strand to SEQ ID NO: 1158596
uaacuacaaagugaugaca

SEQ ID NO: 1158598 - RNA, 19 nt, Artificial Sequence
  Description of Artificial Sequence: Synthetic oligonucleotide
  Sense strand starting at position 3154 of SEQ ID NO: 916462
aucaguggccucuaaagau

SEQ ID NO: 1158599 - RNA, 19 nt, Artificial Sequence
  Description of Artificial Sequence: Synthetic oligonucleotide
  Antisense strand to SEQ ID NO: 1158598
aucuuuagaggccacugau

SEQ ID NO: 1158600 - RNA, 19 nt, Artificial Sequence
  Description of Artificial Sequence: Synthetic oligonucleotide
  Sense strand starting at position 3899 of SEQ ID NO: 916462
aauaaauagugagacagau

SEQ ID NO: 1158601 - RNA, 19 nt, Artificial Sequence
  Description of Artificial Sequence: Synthetic oligonucleotide
  Antisense strand to SEQ ID NO: 1158600
aucugucucacuauuuauu

SEQ ID NO: 1158602 - RNA, 19 nt, Artificial Sequence
  Description of Artificial Sequence: Synthetic oligonucleotide
  Sense strand starting at position 106 of SEQ ID NO: 916463
ggaagugauuccucacaca

SEQ ID NO: 1158603 - RNA, 19 nt, Artificial Sequence
  Description of Artificial Sequence: Synthetic oligonucleotide
  Antisense strand to SEQ ID NO: 1158602
ugugugaggaaucacuucc

SEQ ID NO: 1158604 - RNA, 19 nt, Artificial Sequence
  Description of Artificial Sequence: Synthetic oligonucleotide
  Sense strand starting at position 118 of SEQ ID NO: 916463
ucacacaguugacugaaua

SEQ ID NO: 1158605 - RNA, 19 nt, Artificial Sequence
  Description of Artificial Sequence: Synthetic oligonucleotide
  Antisense strand to SEQ ID NO: 1158604
uauucagucaacuguguga

SEQ ID NO: 1158606 - RNA, 19 nt, Artificial Sequence
  Description of Artificial Sequence: Synthetic oligonucleotide
  Sense strand starting at position 237 of SEQ ID NO: 916463
ggagacuccuucuucuaga

SEQ ID NO: 1158607 - RNA, 19 nt, Artificial Sequence
  Description of Artificial Sequence: Synthetic oligonucleotide
  Antisense strand to SEQ ID NO: 1158606
ucuagaagaaggagucucc

SEQ ID NO: 1158608 - RNA, 19 nt, Artificial Sequence
  Description of Artificial Sequence: Synthetic oligonucleotide
  Sense strand starting at position 371 of SEQ ID NO: 916463
gguuaaacaccucagccau

SEQ ID NO: 1158609 - RNA, 19 nt, Artificial Sequence
  Description of Artificial Sequence: Synthetic oligonucleotide
  Antisense strand to SEQ ID NO: 1158608
auggcugagguguuuaacc

SEQ ID NO: 1158610 - RNA, 19 nt, Artificial Sequence
  Description of Artificial Sequence: Synthetic oligonucleotide
  Sense strand starting at position 655 of SEQ ID NO: 916463
acagauauuaaaugugugu

SEQ ID NO: 1158611 - RNA, 19 nt, Artificial Sequence
  Description of Artificial Sequence: Synthetic oligonucleotide
  Antisense strand to SEQ ID NO: 1158610
acacacauuuaauaucugu

SEQ ID NO: 1158612 - RNA, 19 nt, Artificial Sequence
  Description of Artificial Sequence: Synthetic oligonucleotide
  Sense strand starting at position 696 of SEQ ID NO: 916463
cgauucguggcauaaagau

SEQ ID NO: 1158613 - RNA, 19 nt, Artificial Sequence
  Description of Artificial Sequence: Synthetic oligonucleotide
  Antisense strand to SEQ ID NO: 1158612
aucuuuaugccacgaaucg

SEQ ID NO: 1158614 - RNA, 19 nt, Artificial Sequence
  Description of Artificial Sequence: Synthetic oligonucleotide
  Sense strand starting at position 802 of SEQ ID NO: 916463
acaauuagauucucaaggu

SEQ ID NO: 1158615 - RNA, 19 nt, Artificial Sequence
  Description of Artificial Sequence: Synthetic oligonucleotide
  Antisense strand to SEQ ID NO: 1158614
accuugagaaucuaauugu

SEQ ID NO: 1158616 - RNA, 19 nt, Artificial Sequence
  Description of Artificial Sequence: Synthetic oligonucleotide
  Sense strand starting at position 806 of SEQ ID NO: 916463
uuagauucucaagguacaa

SEQ ID NO: 1158617 - RNA, 19 nt, Artificial Sequence
  Description of Artificial Sequence: Synthetic oligonucleotide
  Antisense strand to SEQ ID NO: 1158616
uuguaccuugagaaucuaa

SEQ ID NO: 1158618 - RNA, 19 nt, Artificial Sequence
  Description of Artificial Sequence: Synthetic oligonucleotide
  Sense strand starting at position 819 of SEQ ID NO: 916463
guacaagaguuugucuaua

SEQ ID NO: 1158619 - RNA, 19 nt, Artificial Sequence
  Description of Artificial Sequence: Synthetic oligonucleotide
  Antisense strand to SEQ ID NO: 1158618
uauagacaaacucuuguac

SEQ ID NO: 1158620 - RNA, 19 nt, Artificial Sequence
  Description of Artificial Sequence: Synthetic oligonucleotide
  Sense strand starting at position 821 of SEQ ID NO: 916463
acaagaguuugucuauaua

SEQ ID NO: 1158621 - RNA, 19 nt, Artificial Sequence
  Description of Artificial Sequence: Synthetic oligonucleotide
  Antisense strand to SEQ ID NO: 1158620
uauauagacaaacucuugu

SEQ ID NO: 1158622 - RNA, 19 nt, Artificial Sequence
  Description of Artificial Sequence: Synthetic oligonucleotide
  Sense strand starting at position 824 of SEQ ID NO: 916463
agaguuugucuauauacuu

SEQ ID NO: 1158623 - RNA, 19 nt, Artificial Sequence
  Description of Artificial Sequence: Synthetic oligonucleotide
  Antisense strand to SEQ ID NO: 1158622
aaguauauagacaaacucu

SEQ ID NO: 1158624 - RNA, 19 nt, Artificial Sequence
  Description of Artificial Sequence: Synthetic oligonucleotide
  Sense strand starting at position 829 of SEQ ID NO: 916463
uugucuauauacuuuggaa

SEQ ID NO: 1158625 - RNA, 19 nt, Artificial Sequence
  Description of Artificial Sequence: Synthetic oligonucleotide
  Antisense strand to SEQ ID NO: 1158624
uuccaaaguauauagacaa

SEQ ID NO: 1158626 - RNA, 19 nt, Artificial Sequence
  Description of Artificial Sequence: Synthetic oligonucleotide
  Sense strand starting at position 831 of SEQ ID NO: 916463
gucuauauacuuuggaaau

SEQ ID NO: 1158627 - RNA, 19 nt, Artificial Sequence
  Description of Artificial Sequence: Synthetic oligonucleotide
  Antisense strand to SEQ ID NO: 1158626
auuuccaaaguauauagac

SEQ ID NO: 1158628 - RNA, 19 nt, Artificial Sequence
  Description of Artificial Sequence: Synthetic oligonucleotide
  Sense strand starting at position 1247 of SEQ ID NO: 916463
acaagauaauccguccauc

SEQ ID NO: 1158629 - RNA, 19 nt, Artificial Sequence
  Description of Artificial Sequence: Synthetic oligonucleotide
  Antisense strand to SEQ ID NO: 1158628
gauggacggauuaucuugu

SEQ ID NO: 1158630 - RNA, 19 nt, Artificial Sequence
  Description of Artificial Sequence: Synthetic oligonucleotide
  Sense strand starting at position 1611 of SEQ ID NO: 916463
gccagaucuuuggcuagaa

SEQ ID NO: 1158631 - RNA, 19 nt, Artificial Sequence
  Description of Artificial Sequence: Synthetic oligonucleotide
  Antisense strand to SEQ ID NO: 1158630
uucuagccaaagaucuggc

SEQ ID NO: 1158632 - RNA, 19 nt, Artificial Sequence
  Description of Artificial Sequence: Synthetic oligonucleotide
  Sense strand starting at position 1621 of SEQ ID NO: 916463
uggcuagaaccauggucaa

SEQ ID NO: 1158633 - RNA, 19 nt, Artificial Sequence
  Description of Artificial Sequence: Synthetic oligonucleotide
  Antisense strand to SEQ ID NO: 1158632
uugaccaugguucuagcca

SEQ ID NO: 1158634 - RNA, 19 nt, Artificial Sequence
  Description of Artificial Sequence: Synthetic oligonucleotide
  Sense strand starting at position 1946 of SEQ ID NO: 916463
gcggcaugugaccauagaa

SEQ ID NO: 1158635 - RNA, 19 nt, Artificial Sequence
  Description of Artificial Sequence: Synthetic oligonucleotide
  Antisense strand to SEQ ID NO: 1158634
uucuauggucacaugccgc

SEQ ID NO: 1158636 - RNA, 19 nt, Artificial Sequence
  Description of Artificial Sequence: Synthetic oligonucleotide
  Sense strand starting at position 2008 of SEQ ID NO: 916463
aacucugauuggccaguau

SEQ ID NO: 1158637 - RNA, 19 nt, Artificial Sequence
  Description of Artificial Sequence: Synthetic oligonucleotide
  Antisense strand to SEQ ID NO: 1158636
auacuggccaaucagaguu

SEQ ID NO: 1158638 - RNA, 19 nt, Artificial Sequence
  Description of Artificial Sequence: Synthetic oligonucleotide
  Sense strand starting at position 2195 of SEQ ID NO: 916463
guaggguucgagugaagag

SEQ ID NO: 1158639 - RNA, 19 nt, Artificial Sequence
  Description of Artificial Sequence: Synthetic oligonucleotide
  Antisense strand to SEQ ID NO: 1158638
cucuucacucgaacccuac

SEQ ID NO: 1158640 - RNA, 19 nt, Artificial Sequence
  Description of Artificial Sequence: Synthetic oligonucleotide
  Sense strand starting at position 2280 of SEQ ID NO: 916463
uguaguucucacgcuaggu

SEQ ID NO: 1158641 - RNA, 19 nt, Artificial Sequence
  Description of Artificial Sequence: Synthetic oligonucleotide
  Antisense strand to SEQ ID NO: 1158640
accuagcgugagaacuaca

SEQ ID NO: 1158642 - RNA, 19 nt, Artificial Sequence
  Description of Artificial Sequence: Synthetic oligonucleotide
  Sense strand starting at position 2425 of SEQ ID NO: 916463
gugcguccuggcuuucuua

SEQ ID NO: 1158643 - RNA, 19 nt, Artificial Sequence
  Description of Artificial Sequence: Synthetic oligonucleotide
  Antisense strand to SEQ ID NO: 1158642
uaagaaagccaggacgcac

SEQ ID NO: 1158644 - RNA, 19 nt, Artificial Sequence
  Description of Artificial Sequence: Synthetic oligonucleotide
  Sense strand starting at position 2426 of SEQ ID NO: 916463
ugcguccuggcuuucuuaa

SEQ ID NO: 1158645 - RNA, 19 nt, Artificial Sequence
  Description of Artificial Sequence: Synthetic oligonucleotide
  Antisense strand to SEQ ID NO: 1158644
uuaagaaagccaggacgca

SEQ ID NO: 1158646 - RNA, 19 nt, Artificial Sequence
  Description of Artificial Sequence: Synthetic oligonucleotide
  Sense strand starting at position 2586 of SEQ ID NO: 916463
agguuacuucugcaaagua

SEQ ID NO: 1158647 - RNA, 19 nt, Artificial Sequence
  Description of Artificial Sequence: Synthetic oligonucleotide
  Antisense strand to SEQ ID NO: 1158646
uacuuugcagaaguaaccu

SEQ ID NO: 1158648 - RNA, 19 nt, Artificial Sequence
  Description of Artificial Sequence: Synthetic oligonucleotide
  Sense strand starting at position 2614 of SEQ ID NO: 916463
gagcaauacgaugguaauc

SEQ ID NO: 1158649 - RNA, 19 nt, Artificial Sequence
  Description of Artificial Sequence: Synthetic oligonucleotide
  Antisense strand to SEQ ID NO: 1158648
gauuaccaucguauugcuc

SEQ ID NO: 1158650 - RNA, 19 nt, Artificial Sequence
  Description of Artificial Sequence: Synthetic oligonucleotide
  Sense strand starting at position 2630 of SEQ ID NO: 916463
aucuuugcgccuuugcuaa

SEQ ID NO: 1158651 - RNA, 19 nt, Artificial Sequence
  Description of Artificial Sequence: Synthetic oligonucleotide
  Antisense strand to SEQ ID NO: 1158650
uuagcaaaggcgcaaagau

SEQ ID NO: 1158652 - RNA, 19 nt, Artificial Sequence
  Description of Artificial Sequence: Synthetic oligonucleotide
  Sense strand starting at position 2945 of SEQ ID NO: 916463
aaagcuaacggaugcauau

SEQ ID NO: 1158653 - RNA, 19 nt, Artificial Sequence
  Description of Artificial Sequence: Synthetic oligonucleotide
  Antisense strand to SEQ ID NO: 1158652
auaugcauccguuagcuuu

SEQ ID NO: 1158654 - RNA, 19 nt, Artificial Sequence
  Description of Artificial Sequence: Synthetic oligonucleotide
  Sense strand starting at position 2984 of SEQ ID NO: 916463
uuguaagugcuuuaaacga

SEQ ID NO: 1158655 - RNA, 19 nt, Artificial Sequence
  Description of Artificial Sequence: Synthetic oligonucleotide
  Antisense strand to SEQ ID NO: 1158654
ucguuuaaagcacuuacaa

SEQ ID NO: 1158656 - RNA, 19 nt, Artificial Sequence
  Description of Artificial Sequence: Synthetic oligonucleotide
  Sense strand starting at position 2991 of SEQ ID NO: 916463
ugcuuuaaacgauaguuaa

SEQ ID NO: 1158657 - RNA, 19 nt, Artificial Sequence
  Description of Artificial Sequence: Synthetic oligonucleotide
  Antisense strand to SEQ ID NO: 1158656
uuaacuaucguuuaaagca

SEQ ID NO: 1158658 - RNA, 19 nt, Artificial Sequence
  Description of Artificial Sequence: Synthetic oligonucleotide
  Sense strand starting at position 3039 of SEQ ID NO: 916463
ggaaguaucuuaucccaag

SEQ ID NO: 1158659 - RNA, 19 nt, Artificial Sequence
  Description of Artificial Sequence: Synthetic oligonucleotide
  Antisense strand to SEQ ID NO: 1158658
cuugggauaagauacuucc

SEQ ID NO: 1158660 - RNA, 19 nt, Artificial Sequence
  Description of Artificial Sequence: Synthetic oligonucleotide
  Sense strand starting at position 3057 of SEQ ID NO: 916463
guuuacagaugaguaaauu

SEQ ID NO: 1158661 - RNA, 19 nt, Artificial Sequence
  Description of Artificial Sequence: Synthetic oligonucleotide
  Antisense strand to SEQ ID NO: 1158660
aauuuacucaucuguaaac

SEQ ID NO: 1158662 - RNA, 19 nt, Artificial Sequence
  Description of Artificial Sequence: Synthetic oligonucleotide
  Sense strand starting at position 3079 of SEQ ID NO: 916463
gcagauagaagcuaaguaa

SEQ ID NO: 1158663 - RNA, 19 nt, Artificial Sequence
  Description of Artificial Sequence: Synthetic oligonucleotide
  Antisense strand to SEQ ID NO: 1158662
uuacuuagcuucuaucugc

SEQ ID NO: 1158664 - RNA, 19 nt, Artificial Sequence
  Description of Artificial Sequence: Synthetic oligonucleotide
  Sense strand starting at position 3194 of SEQ ID NO: 916463
uucugcauuucuuuguuua

SEQ ID NO: 1158665 - RNA, 19 nt, Artificial Sequence
  Description of Artificial Sequence: Synthetic oligonucleotide
  Antisense strand to SEQ ID NO: 1158664
uaaacaaagaaaugcagaa

SEQ ID NO: 1158666 - RNA, 19 nt, Artificial Sequence
  Description of Artificial Sequence: Synthetic oligonucleotide
  Sense strand starting at position 3195 of SEQ ID NO: 916463
ucugcauuucuuuguuuau

SEQ ID NO: 1158667 - RNA, 19 nt, Artificial Sequence
  Description of Artificial Sequence: Synthetic oligonucleotide
  Antisense strand to SEQ ID NO: 1158666
auaaacaaagaaaugcaga

SEQ ID NO: 1158668 - RNA, 19 nt, Artificial Sequence
  Description of Artificial Sequence: Synthetic oligonucleotide
  Sense strand starting at position 3196 of SEQ ID NO: 916463
cugcauuucuuuguuuauu

SEQ ID NO: 1158669 - RNA, 19 nt, Artificial Sequence
  Description of Artificial Sequence: Synthetic oligonucleotide
  Antisense strand to SEQ ID NO: 1158668
aauaaacaaagaaaugcag

SEQ ID NO: 1158670 - RNA, 19 nt, Artificial Sequence
  Description of Artificial Sequence: Synthetic oligonucleotide
  Sense strand starting at position 3240 of SEQ ID NO: 916463
uaguaaucauaucuggguu

SEQ ID NO: 1158671 - RNA, 19 nt, Artificial Sequence
  Description of Artificial Sequence: Synthetic oligonucleotide
  Antisense strand to SEQ ID NO: 1158670
aacccagauaugauuacua

SEQ ID NO: 1158672 - RNA, 19 nt, Artificial Sequence
  Description of Artificial Sequence: Synthetic oligonucleotide
  Sense strand starting at position 3243 of SEQ ID NO: 916463
uaaucauaucuggguugga

SEQ ID NO: 1158673 - RNA, 19 nt, Artificial Sequence
  Description of Artificial Sequence: Synthetic oligonucleotide
  Antisense strand to SEQ ID NO: 1158672
uccaacccagauaugauua

SEQ ID NO: 1158674 - RNA, 19 nt, Artificial Sequence
  Description of Artificial Sequence: Synthetic oligonucleotide
  Sense strand starting at position 3244 of SEQ ID NO: 916463
aaucauaucuggguuggau

SEQ ID NO: 1158675 - RNA, 19 nt, Artificial Sequence
  Description of Artificial Sequence: Synthetic oligonucleotide
  Antisense strand to SEQ ID NO: 1158674
auccaacccagauaugauu

SEQ ID NO: 1158676 - RNA, 19 nt, Artificial Sequence
  Description of Artificial Sequence: Synthetic oligonucleotide
  Sense strand starting at position 3310 of SEQ ID NO: 916463
aaaguaauuugugaucaga

SEQ ID NO: 1158677 - RNA, 19 nt, Artificial Sequence
  Description of Artificial Sequence: Synthetic oligonucleotide
  Antisense strand to SEQ ID NO: 1158676
ucugaucacaaauuacuuu

SEQ ID NO: 1158678 - RNA, 19 nt, Artificial Sequence
  Description of Artificial Sequence: Synthetic oligonucleotide
  Sense strand starting at position 3810 of SEQ ID NO: 916463
gacauuaauguugagcauu

SEQ ID NO: 1158679 - RNA, 19 nt, Artificial Sequence
  Description of Artificial Sequence: Synthetic oligonucleotide
  Antisense strand to SEQ ID NO: 1158678
aaugcucaacauuaauguc

SEQ ID NO: 1158680 - RNA, 19 nt, Artificial Sequence
  Description of Artificial Sequence: Synthetic oligonucleotide
  Sense strand starting at position 3967 of SEQ ID NO: 916463
caauccguucuagaauuga

SEQ ID NO: 1158681 - RNA, 19 nt, Artificial Sequence
  Description of Artificial Sequence: Synthetic oligonucleotide
  Antisense strand to SEQ ID NO: 1158680
ucaauucuagaacggauug

SEQ ID NO: 1158682 - RNA, 19 nt, Artificial Sequence
  Description of Artificial Sequence: Synthetic oligonucleotide
  Sense strand starting at position 27 of SEQ ID NO: 916464
gucuguaucggugcuaagu

SEQ ID NO: 1158683 - RNA, 19 nt, Artificial Sequence
  Description of Artificial Sequence: Synthetic oligonucleotide
  Antisense strand to SEQ ID NO: 1158682
acuuagcaccgauacagac

SEQ ID NO: 1158684 - RNA, 19 nt, Artificial Sequence
  Description of Artificial Sequence: Synthetic oligonucleotide
  Sense strand starting at position 309 of SEQ ID NO: 916464
augcuucuggaucaaaguu

SEQ ID NO: 1158685 - RNA, 19 nt, Artificial Sequence
  Description of Artificial Sequence: Synthetic oligonucleotide
  Antisense strand to SEQ ID NO: 1158684
aacuuugauccagaagcau

SEQ ID NO: 1158686 - RNA, 19 nt, Artificial Sequence
  Description of Artificial Sequence: Synthetic oligonucleotide
  Sense strand starting at position 321 of SEQ ID NO: 916464
caaaguugaugaguuuguu

SEQ ID NO: 1158687 - RNA, 19 nt, Artificial Sequence
  Description of Artificial Sequence: Synthetic oligonucleotide
  Antisense strand to SEQ ID NO: 1158686
aacaaacucaucaacuuug

SEQ ID NO: 1158688 - RNA, 19 nt, Artificial Sequence
  Description of Artificial Sequence: Synthetic oligonucleotide
  Sense strand starting at position 367 of SEQ ID NO: 916464
ucaugauugcuguauuauc

SEQ ID NO: 1158689 - RNA, 19 nt, Artificial Sequence
  Description of Artificial Sequence: Synthetic oligonucleotide
  Antisense strand to SEQ ID NO: 1158688
gauaauacagcaaucauga

SEQ ID NO: 1158690 - RNA, 19 nt, Artificial Sequence
  Description of Artificial Sequence: Synthetic oligonucleotide
  Sense strand starting at position 852 of SEQ ID NO: 916464
aguguaguggcagauacau

SEQ ID NO: 1158691 - RNA, 19 nt, Artificial Sequence
  Description of Artificial Sequence: Synthetic oligonucleotide
  Antisense strand to SEQ ID NO: 1158690
auguaucugccacuacacu

SEQ ID NO: 1158692 - RNA, 19 nt, Artificial Sequence
  Description of Artificial Sequence: Synthetic oligonucleotide
  Sense strand starting at position 1053 of SEQ ID NO: 916464
gguuaaauacagugauuaa

SEQ ID NO: 1158693 - RNA, 19 nt, Artificial Sequence
  Description of Artificial Sequence: Synthetic oligonucleotide
  Antisense strand to SEQ ID NO: 1158692
uuaaucacuguauuuaacc

SEQ ID NO: 1158694 - RNA, 19 nt, Artificial Sequence
  Description of Artificial Sequence: Synthetic oligonucleotide
  Sense strand starting at position 1056 of SEQ ID NO: 916464
uaaauacagugauuaaggu

SEQ ID NO: 1158695 - RNA, 19 nt, Artificial Sequence
  Description of Artificial Sequence: Synthetic oligonucleotide
  Antisense strand to SEQ ID NO: 1158694
accuuaaucacuguauuua

SEQ ID NO: 1158696 - RNA, 19 nt, Artificial Sequence
  Description of Artificial Sequence: Synthetic oligonucleotide
  Sense strand starting at position 1111 of SEQ ID NO: 916464
cuuguaaucccaggacugu

SEQ ID NO: 1158697 - RNA, 19 nt, Artificial Sequence
  Description of Artificial Sequence: Synthetic oligonucleotide
  Antisense strand to SEQ ID NO: 1158696
acaguccugggauuacaag

SEQ ID NO: 1158698 - RNA, 19 nt, Artificial Sequence
  Description of Artificial Sequence: Synthetic oligonucleotide
  Sense strand starting at position 1144 of SEQ ID NO: 916464
gguggaucccuugaccuca

SEQ ID NO: 1158699 - RNA, 19 nt, Artificial Sequence
  Description of Artificial Sequence: Synthetic oligonucleotide
  Antisense strand to SEQ ID NO: 1158698
ugaggucaagggauccacc

SEQ ID NO: 1158700 - RNA, 19 nt, Artificial Sequence
  Description of Artificial Sequence: Synthetic oligonucleotide
  Sense strand starting at position 1384 of SEQ ID NO: 916464
cacucagaucugggugaca

SEQ ID NO: 1158701 - RNA, 19 nt, Artificial Sequence
  Description of Artificial Sequence: Synthetic oligonucleotide
  Antisense strand to SEQ ID NO: 1158700
ugucacccagaucugagug

SEQ ID NO: 1158702 - RNA, 19 nt, Artificial Sequence
  Description of Artificial Sequence: Synthetic oligonucleotide
  Sense strand starting at position 1386 of SEQ ID NO: 916464
cucagaucugggugacaga

SEQ ID NO: 1158703 - RNA, 19 nt, Artificial Sequence
  Description of Artificial Sequence: Synthetic oligonucleotide
  Antisense strand to SEQ ID NO: 1158702
ucugucacccagaucugag

SEQ ID NO: 1158704 - RNA, 19 nt, Artificial Sequence
  Description of Artificial Sequence: Synthetic oligonucleotide
  Sense strand starting at position 1435 of SEQ ID NO: 916464
auaauaauugcaggacugu

SEQ ID NO: 1158705 - RNA, 19 nt, Artificial Sequence
  Description of Artificial Sequence: Synthetic oligonucleotide
  Antisense strand to SEQ ID NO: 1158704
acaguccugcaauuauuau

SEQ ID NO: 1158706 - RNA, 19 nt, Artificial Sequence
  Description of Artificial Sequence: Synthetic oligonucleotide
  Sense strand starting at position 1436 of SEQ ID NO: 916464
uaauaauugcaggacugua

SEQ ID NO: 1158707 - RNA, 19 nt, Artificial Sequence
  Description of Artificial Sequence: Synthetic oligonucleotide
  Antisense strand to SEQ ID NO: 1158706
uacaguccugcaauuauua

SEQ ID NO: 1158708 - RNA, 19 nt, Artificial Sequence
  Description of Artificial Sequence: Synthetic oligonucleotide
  Sense strand starting at position 1452 of SEQ ID NO: 916464
guaguuaacgugaguucug

SEQ ID NO: 1158709 - RNA, 19 nt, Artificial Sequence
  Description of Artificial Sequence: Synthetic oligonucleotide
  Antisense strand to SEQ ID NO: 1158708
cagaacucacguuaacuac

SEQ ID NO: 1158710 - RNA, 19 nt, Artificial Sequence
  Description of Artificial Sequence: Synthetic oligonucleotide
  Sense strand starting at position 1462 of SEQ ID NO: 916464
ugaguucugccugaaaugc

SEQ ID NO: 1158711 - RNA, 19 nt, Artificial Sequence
  Description of Artificial Sequence: Synthetic oligonucleotide
  Antisense strand to SEQ ID NO: 1158710
gcauuucaggcagaacuca

SEQ ID NO: 1158712 - RNA, 19 nt, Artificial Sequence
  Description of Artificial Sequence: Synthetic oligonucleotide
  Sense strand starting at position 1471 of SEQ ID NO: 916464
ccugaaaugcuugauacuc

SEQ ID NO: 1158713 - RNA, 19 nt, Artificial Sequence
  Description of Artificial Sequence: Synthetic oligonucleotide
  Antisense strand to SEQ ID NO: 1158712
gaguaucaagcauuucagg

SEQ ID NO: 1158714 - RNA, 19 nt, Artificial Sequence
  Description of Artificial Sequence: Synthetic oligonucleotide
  Sense strand starting at position 1618 of SEQ ID NO: 916464
agacaaaucugcuuuaguu

SEQ ID NO: 1158715 - RNA, 19 nt, Artificial Sequence
  Description of Artificial Sequence: Synthetic oligonucleotide
  Antisense strand to SEQ ID NO: 1158714
aacuaaagcagauuugucu

SEQ ID NO: 1158716 - RNA, 19 nt, Artificial Sequence
  Description of Artificial Sequence: Synthetic oligonucleotide
  Sense strand starting at position 1672 of SEQ ID NO: 916464
uguauuugcuuguugucca

SEQ ID NO: 1158717 - RNA, 19 nt, Artificial Sequence
  Description of Artificial Sequence: Synthetic oligonucleotide
  Antisense strand to SEQ ID NO: 1158716
uggacaacaagcaaauaca

SEQ ID NO: 1158718 - RNA, 19 nt, Artificial Sequence
  Description of Artificial Sequence: Synthetic oligonucleotide
  Sense strand starting at position 1750 of SEQ ID NO: 916464
gcagguaggcaagaucaau

SEQ ID NO: 1158719 - RNA, 19 nt, Artificial Sequence
  Description of Artificial Sequence: Synthetic oligonucleotide
  Antisense strand to SEQ ID NO: 1158718
auugaucuugccuaccugc

SEQ ID NO: 1158720 - RNA, 19 nt, Artificial Sequence
  Description of Artificial Sequence: Synthetic oligonucleotide
  Sense strand starting at position 1756 of SEQ ID NO: 916464
aggcaagaucaauguaaca

SEQ ID NO: 1158721 - RNA, 19 nt, Artificial Sequence
  Description of Artificial Sequence: Synthetic oligonucleotide
  Antisense strand to SEQ ID NO: 1158720
uguuacauugaucuugccu

SEQ ID NO: 1158722 - RNA, 19 nt, Artificial Sequence
  Description of Artificial Sequence: Synthetic oligonucleotide
  Sense strand starting at position 1767 of SEQ ID NO: 916464
auguaacauucucuaagga

SEQ ID NO: 1158723 - RNA, 19 nt, Artificial Sequence
  Description of Artificial Sequence: Synthetic oligonucleotide
  Antisense strand to SEQ ID NO: 1158722
uccuuagagaauguuacau

SEQ ID NO: 1158724 - RNA, 19 nt, Artificial Sequence
  Description of Artificial Sequence: Synthetic oligonucleotide
  Sense strand starting at position 1899 of SEQ ID NO: 916464
uuucgagacucaucucaag

SEQ ID NO: 1158725 - RNA, 19 nt, Artificial Sequence
  Description of Artificial Sequence: Synthetic oligonucleotide
  Antisense strand to SEQ ID NO: 1158724
cuugagaugagucucgaaa

SEQ ID NO: 1158726 - RNA, 19 nt, Artificial Sequence
  Description of Artificial Sequence: Synthetic oligonucleotide
  Sense strand starting at position 2230 of SEQ ID NO: 916464
acagaauucugauuacugu

SEQ ID NO: 1158727 - RNA, 19 nt, Artificial Sequence
  Description of Artificial Sequence: Synthetic oligonucleotide
  Antisense strand to SEQ ID NO: 1158726
acaguaaucagaauucugu

SEQ ID NO: 1158728 - RNA, 19 nt, Artificial Sequence
  Description of Artificial Sequence: Synthetic oligonucleotide
  Sense strand starting at position 2262 of SEQ ID NO: 916464
caguuugugacaggauuag

SEQ ID NO: 1158729 - RNA, 19 nt, Artificial Sequence
  Description of Artificial Sequence: Synthetic oligonucleotide
  Antisense strand to SEQ ID NO: 1158728
cuaauccugucacaaacug

SEQ ID NO: 1158730 - RNA, 19 nt, Artificial Sequence
  Description of Artificial Sequence: Synthetic oligonucleotide
  Sense strand starting at position 2268 of SEQ ID NO: 916464
gugacaggauuagcuuuaa

SEQ ID NO: 1158731 - RNA, 19 nt, Artificial Sequence
  Description of Artificial Sequence: Synthetic oligonucleotide
  Antisense strand to SEQ ID NO: 1158730
uuaaagcuaauccugucac

SEQ ID NO: 1158732 - RNA, 19 nt, Artificial Sequence
  Description of Artificial Sequence: Synthetic oligonucleotide
  Sense strand starting at position 2485 of SEQ ID NO: 916464
gaaacucgugcccaaacuu

SEQ ID NO: 1158733 - RNA, 19 nt, Artificial Sequence
  Description of Artificial Sequence: Synthetic oligonucleotide
  Antisense strand to SEQ ID NO: 1158732
aaguuugggcacgaguuuc

SEQ ID NO: 1158734 - RNA, 19 nt, Artificial Sequence
  Description of Artificial Sequence: Synthetic oligonucleotide
  Sense strand starting at position 2530 of SEQ ID NO: 916464
gguagaaaucgcuagccac

SEQ ID NO: 1158735 - RNA, 19 nt, Artificial Sequence
  Description of Artificial Sequence: Synthetic oligonucleotide
  Antisense strand to SEQ ID NO: 1158734
guggcuagcgauuucuacc

SEQ ID NO: 1158736 - RNA, 19 nt, Artificial Sequence
  Description of Artificial Sequence: Synthetic oligonucleotide
  Sense strand starting at position 2613 of SEQ ID NO: 916464
ugacgucaucgcgcggaau

SEQ ID NO: 1158737 - RNA, 19 nt, Artificial Sequence
  Description of Artificial Sequence: Synthetic oligonucleotide
  Antisense strand to SEQ ID NO: 1158736
auuccgcgcgaugacguca

SEQ ID NO: 1158738 - RNA, 19 nt, Artificial Sequence
  Description of Artificial Sequence: Synthetic oligonucleotide
  Sense strand starting at position 2617 of SEQ ID NO: 916464
gucaucgcgcggaauaagu

SEQ ID NO: 1158739 - RNA, 19 nt, Artificial Sequence
  Description of Artificial Sequence: Synthetic oligonucleotide
  Antisense strand to SEQ ID NO: 1158738
acuuauuccgcgcgaugac

SEQ ID NO: 1158740 - RNA, 19 nt, Artificial Sequence
  Description of Artificial Sequence: Synthetic oligonucleotide
  Sense strand starting at position 2628 of SEQ ID NO: 916464
gaauaagugcgucaccaca

SEQ ID NO: 1158741 - RNA, 19 nt, Artificial Sequence
  Description of Artificial Sequence: Synthetic oligonucleotide
  Antisense strand to SEQ ID NO: 1158740
uguggugacgcacuuauuc

SEQ ID NO: 1158742 - RNA, 19 nt, Artificial Sequence
  Description of Artificial Sequence: Synthetic oligonucleotide
  Sense strand starting at position 2675 of SEQ ID NO: 916464
ccuagacuaaagcgugaaa

SEQ ID NO: 1158743 - RNA, 19 nt, Artificial Sequence
  Description of Artificial Sequence: Synthetic oligonucleotide
  Antisense strand to SEQ ID NO: 1158742
uuucacgcuuuagucuagg

SEQ ID NO: 1158744 - RNA, 19 nt, Artificial Sequence
  Description of Artificial Sequence: Synthetic oligonucleotide
  Sense strand starting at position 2812 of SEQ ID NO: 916464
agauuagaaaugugagcau

SEQ ID NO: 1158745 - RNA, 19 nt, Artificial Sequence
  Description of Artificial Sequence: Synthetic oligonucleotide
  Antisense strand to SEQ ID NO: 1158744
augcucacauuucuaaucu

SEQ ID NO: 1158746 - RNA, 19 nt, Artificial Sequence
  Description of Artificial Sequence: Synthetic oligonucleotide
  Sense strand starting at position 2939 of SEQ ID NO: 916464
cuuuaacugugagcuaaau

SEQ ID NO: 1158747 - RNA, 19 nt, Artificial Sequence
  Description of Artificial Sequence: Synthetic oligonucleotide
  Antisense strand to SEQ ID NO: 1158746
auuuagcucacaguuaaag

SEQ ID NO: 1158748 - RNA, 19 nt, Artificial Sequence
  Description of Artificial Sequence: Synthetic oligonucleotide
  Sense strand starting at position 2969 of SEQ ID NO: 916464
uuagaaucgaaauggcaga

SEQ ID NO: 1158749 - RNA, 19 nt, Artificial Sequence
  Description of Artificial Sequence: Synthetic oligonucleotide
  Antisense strand to SEQ ID NO: 1158748
ucugccauuucgauucuaa

SEQ ID NO: 1158750 - RNA, 19 nt, Artificial Sequence
  Description of Artificial Sequence: Synthetic oligonucleotide
  Sense strand starting at position 3278 of SEQ ID NO: 916464
auuguuucucgccagauag

SEQ ID NO: 1158751 - RNA, 19 nt, Artificial Sequence
  Description of Artificial Sequence: Synthetic oligonucleotide
  Antisense strand to SEQ ID NO: 1158750
cuaucuggcgagaaacaau

SEQ ID NO: 1158752 - RNA, 19 nt, Artificial Sequence
  Description of Artificial Sequence: Synthetic oligonucleotide
  Sense strand starting at position 3280 of SEQ ID NO: 916464
uguuucucgccagauagaa

SEQ ID NO: 1158753 - RNA, 19 nt, Artificial Sequence
  Description of Artificial Sequence: Synthetic oligonucleotide
  Antisense strand to SEQ ID NO: 1158752
uucuaucuggcgagaaaca

SEQ ID NO: 1158754 - RNA, 19 nt, Artificial Sequence
  Description of Artificial Sequence: Synthetic oligonucleotide
  Sense strand starting at position 3314 of SEQ ID NO: 916464
gaaagaaugcuccagugug

SEQ ID NO: 1158755 - RNA, 19 nt, Artificial Sequence
  Description of Artificial Sequence: Synthetic oligonucleotide
  Antisense strand to SEQ ID NO: 1158754
cacacuggagcauucuuuc

SEQ ID NO: 1158756 - RNA, 19 nt, Artificial Sequence
  Description of Artificial Sequence: Synthetic oligonucleotide
  Sense strand starting at position 3524 of SEQ ID NO: 916464
gcaagugacuaucucuaag

SEQ ID NO: 1158757 - RNA, 19 nt, Artificial Sequence
  Description of Artificial Sequence: Synthetic oligonucleotide
  Antisense strand to SEQ ID NO: 1158756
cuuagagauagucacuugc

SEQ ID NO: 1158758 - RNA, 19 nt, Artificial Sequence
  Description of Artificial Sequence: Synthetic oligonucleotide
  Sense strand starting at position 3704 of SEQ ID NO: 916464
agccauuugaucugguagu

SEQ ID NO: 1158759 - RNA, 19 nt, Artificial Sequence
  Description of Artificial Sequence: Synthetic oligonucleotide
  Antisense strand to SEQ ID NO: 1158758
acuaccagaucaaauggcu

SEQ ID NO: 1158760 - RNA, 19 nt, Artificial Sequence
  Description of Artificial Sequence: Synthetic oligonucleotide
  Sense strand starting at position 3710 of SEQ ID NO: 916464
uugaucugguagucuagaa

SEQ ID NO: 1158761 - RNA, 19 nt, Artificial Sequence
  Description of Artificial Sequence: Synthetic oligonucleotide
  Antisense strand to SEQ ID NO: 1158760
uucuagacuaccagaucaa

SEQ ID NO: 1158762 - RNA, 19 nt, Artificial Sequence
  Description of Artificial Sequence: Synthetic oligonucleotide
  Sense strand starting at position 221 of SEQ ID NO: 916465
aguguaguggcagauacau

SEQ ID NO: 1158763 - RNA, 19 nt, Artificial Sequence
  Description of Artificial Sequence: Synthetic oligonucleotide
  Antisense strand to SEQ ID NO: 1158762
auguaucugccacuacacu

SEQ ID NO: 1158764 - RNA, 19 nt, Artificial Sequence
  Description of Artificial Sequence: Synthetic oligonucleotide
  Sense strand starting at position 422 of SEQ ID NO: 916465
gguuaaauacagugauuaa

SEQ ID NO: 1158765 - RNA, 19 nt, Artificial Sequence
  Description of Artificial Sequence: Synthetic oligonucleotide
  Antisense strand to SEQ ID NO: 1158764
uuaaucacuguauuuaacc

SEQ ID NO: 1158766 - RNA, 19 nt, Artificial Sequence
  Description of Artificial Sequence: Synthetic oligonucleotide
  Sense strand starting at position 425 of SEQ ID NO: 916465
uaaauacagugauuaaggu

SEQ ID NO: 1158767 - RNA, 19 nt, Artificial Sequence
  Description of Artificial Sequence: Synthetic oligonucleotide
  Antisense strand to SEQ ID NO: 1158766
accuuaaucacuguauuua

SEQ ID NO: 1158768 - RNA, 19 nt, Artificial Sequence
  Description of Artificial Sequence: Synthetic oligonucleotide
  Sense strand starting at position 480 of SEQ ID NO: 916465
cuuguaaucccaggacugu

SEQ ID NO: 1158769 - RNA, 19 nt, Artificial Sequence
  Description of Artificial Sequence: Synthetic oligonucleotide
  Antisense strand to SEQ ID NO: 1158768
acaguccugggauuacaag

SEQ ID NO: 1158770 - RNA, 19 nt, Artificial Sequence
  Description of Artificial Sequence: Synthetic oligonucleotide
  Sense strand starting at position 513 of SEQ ID NO: 916465
gguggaucccuugaccuca

SEQ ID NO: 1158771 - RNA, 19 nt, Artificial Sequence
  Description of Artificial Sequence: Synthetic oligonucleotide
  Antisense strand to SEQ ID NO: 1158770
ugaggucaagggauccacc

SEQ ID NO: 1158772 - RNA, 19 nt, Artificial Sequence
  Description of Artificial Sequence: Synthetic oligonucleotide
  Sense strand starting at position 753 of SEQ ID NO: 916465
cacucagaucugggugaca

SEQ ID NO: 1158773 - RNA, 19 nt, Artificial Sequence
  Description of Artificial Sequence: Synthetic oligonucleotide
  Antisense strand to SEQ ID NO: 1158772
ugucacccagaucugagug

SEQ ID NO: 1158774 - RNA, 19 nt, Artificial Sequence
  Description of Artificial Sequence: Synthetic oligonucleotide
  Sense strand starting at position 755 of SEQ ID NO: 916465
cucagaucugggugacaga

SEQ ID NO: 1158775 - RNA, 19 nt, Artificial Sequence
  Description of Artificial Sequence: Synthetic oligonucleotide
  Antisense strand to SEQ ID NO: 1158774
ucugucacccagaucugag

SEQ ID NO: 1158776 - RNA, 19 nt, Artificial Sequence
  Description of Artificial Sequence: Synthetic oligonucleotide
  Sense strand starting at position 804 of SEQ ID NO: 916465
auaauaauugcaggacugu

SEQ ID NO: 1158777 - RNA, 19 nt, Artificial Sequence
  Description of Artificial Sequence: Synthetic oligonucleotide
  Antisense strand to SEQ ID NO: 1158776
acaguccugcaauuauuau

SEQ ID NO: 1158778 - RNA, 19 nt, Artificial Sequence
  Description of Artificial Sequence: Synthetic oligonucleotide
  Sense strand starting at position 805 of SEQ ID NO: 916465
uaauaauugcaggacugua

SEQ ID NO: 1158779 - RNA, 19 nt, Artificial Sequence
  Description of Artificial Sequence: Synthetic oligonucleotide
  Antisense strand to SEQ ID NO: 1158778
uacaguccugcaauuauua

SEQ ID NO: 1158780 - RNA, 19 nt, Artificial Sequence
  Description of Artificial Sequence: Synthetic oligonucleotide
  Sense strand starting at position 821 of SEQ ID NO: 916465
guaguuaacgugaguucug

SEQ ID NO: 1158781 - RNA, 19 nt, Artificial Sequence
  Description of Artificial Sequence: Synthetic oligonucleotide
  Antisense strand to SEQ ID NO: 1158780
cagaacucacguuaacuac

SEQ ID NO: 1158782 - RNA, 19 nt, Artificial Sequence
  Description of Artificial Sequence: Synthetic oligonucleotide
  Sense strand starting at position 840 of SEQ ID NO: 916465
ccugaaaugcuugauacuc

SEQ ID NO: 1158783 - RNA, 19 nt, Artificial Sequence
  Description of Artificial Sequence: Synthetic oligonucleotide
  Antisense strand to SEQ ID NO: 1158782
gaguaucaagcauuucagg

SEQ ID NO: 1158784 - RNA, 19 nt, Artificial Sequence
  Description of Artificial Sequence: Synthetic oligonucleotide
  Sense strand starting at position 987 of SEQ ID NO: 916465
agacaaaucugcuuuaguu

SEQ ID NO: 1158785 - RNA, 19 nt, Artificial Sequence
  Description of Artificial Sequence: Synthetic oligonucleotide
  Antisense strand to SEQ ID NO: 1158784
aacuaaagcagauuugucu

SEQ ID NO: 1158786 - RNA, 19 nt, Artificial Sequence
  Description of Artificial Sequence: Synthetic oligonucleotide
  Sense strand starting at position 1041 of SEQ ID NO: 916465
uguauuugcuuguugucca

SEQ ID NO: 1158787 - RNA, 19 nt, Artificial Sequence
  Description of Artificial Sequence: Synthetic oligonucleotide
  Antisense strand to SEQ ID NO: 1158786
uggacaacaagcaaauaca

SEQ ID NO: 1158788 - RNA, 19 nt, Artificial Sequence
  Description of Artificial Sequence: Synthetic oligonucleotide
  Sense strand starting at position 1119 of SEQ ID NO: 916465
gcagguaggcaagaucaau

SEQ ID NO: 1158789 - RNA, 19 nt, Artificial Sequence
  Description of Artificial Sequence: Synthetic oligonucleotide
  Antisense strand to SEQ ID NO: 1158788
auugaucuugccuaccugc

SEQ ID NO: 1158790 - RNA, 19 nt, Artificial Sequence
  Description of Artificial Sequence: Synthetic oligonucleotide
  Sense strand starting at position 1125 of SEQ ID NO: 916465
aggcaagaucaauguaaca

SEQ ID NO: 1158791 - RNA, 19 nt, Artificial Sequence
  Description of Artificial Sequence: Synthetic oligonucleotide
  Antisense strand to SEQ ID NO: 1158790
uguuacauugaucuugccu

SEQ ID NO: 1158792 - RNA, 19 nt, Artificial Sequence
  Description of Artificial Sequence: Synthetic oligonucleotide
  Sense strand starting at position 1136 of SEQ ID NO: 916465
auguaacauucucuaagga

SEQ ID NO: 1158793 - RNA, 19 nt, Artificial Sequence
  Description of Artificial Sequence: Synthetic oligonucleotide
  Antisense strand to SEQ ID NO: 1158792
uccuuagagaauguuacau

SEQ ID NO: 1158794 - RNA, 19 nt, Artificial Sequence
  Description of Artificial Sequence: Synthetic oligonucleotide
  Sense strand starting at position 1268 of SEQ ID NO: 916465
uuucgagacucaucucaag

SEQ ID NO: 1158795 - RNA, 19 nt, Artificial Sequence
  Description of Artificial Sequence: Synthetic oligonucleotide
  Antisense strand to SEQ ID NO: 1158794
cuugagaugagucucgaaa

SEQ ID NO: 1158796 - RNA, 19 nt, Artificial Sequence
  Description of Artificial Sequence: Synthetic oligonucleotide
  Sense strand starting at position 1599 of SEQ ID NO: 916465
acagaauucugauuacugu

SEQ ID NO: 1158797 - RNA, 19 nt, Artificial Sequence
  Description of Artificial Sequence: Synthetic oligonucleotide
  Antisense strand to SEQ ID NO: 1158796
acaguaaucagaauucugu

SEQ ID NO: 1158798 - RNA, 19 nt, Artificial Sequence
  Description of Artificial Sequence: Synthetic oligonucleotide
  Sense strand starting at position 1631 of SEQ ID NO: 916465
caguuugugacaggauuag

SEQ ID NO: 1158799 - RNA, 19 nt, Artificial Sequence
  Description of Artificial Sequence: Synthetic oligonucleotide
  Antisense strand to SEQ ID NO: 1158798
cuaauccugucacaaacug

SEQ ID NO: 1158800 - RNA, 19 nt, Artificial Sequence
  Description of Artificial Sequence: Synthetic oligonucleotide
  Sense strand starting at position 1637 of SEQ ID NO: 916465
gugacaggauuagcuuuaa

SEQ ID NO: 1158801 - RNA, 19 nt, Artificial Sequence
  Description of Artificial Sequence: Synthetic oligonucleotide
  Antisense strand to SEQ ID NO: 1158800
uuaaagcuaauccugucac

SEQ ID NO: 1158802 - RNA, 19 nt, Artificial Sequence
  Description of Artificial Sequence: Synthetic oligonucleotide
  Sense strand starting at position 1854 of SEQ ID NO: 916465
gaaacucgugcccaaacuu

SEQ ID NO: 1158803 - RNA, 19 nt, Artificial Sequence
  Description of Artificial Sequence: Synthetic oligonucleotide
  Antisense strand to SEQ ID NO: 1158802
aaguuugggcacgaguuuc

SEQ ID NO: 1158804 - RNA, 19 nt, Artificial Sequence
  Description of Artificial Sequence: Synthetic oligonucleotide
  Sense strand starting at position 1982 of SEQ ID NO: 916465
ugacgucaucgcgcggaau

SEQ ID NO: 1158805 - RNA, 19 nt, Artificial Sequence
  Description of Artificial Sequence: Synthetic oligonucleotide
  Antisense strand to SEQ ID NO: 1158804
auuccgcgcgaugacguca

SEQ ID NO: 1158806 - RNA, 19 nt, Artificial Sequence
  Description of Artificial Sequence: Synthetic oligonucleotide
  Sense strand starting at position 1986 of SEQ ID NO: 916465
gucaucgcgcggaauaagu

SEQ ID NO: 1158807 - RNA, 19 nt, Artificial Sequence
  Description of Artificial Sequence: Synthetic oligonucleotide
  Antisense strand to SEQ ID NO: 1158806
acuuauuccgcgcgaugac

SEQ ID NO: 1158808 - RNA, 19 nt, Artificial Sequence
  Description of Artificial Sequence: Synthetic oligonucleotide
  Sense strand starting at position 1997 of SEQ ID NO: 916465
gaauaagugcgucaccaca

SEQ ID NO: 1158809 - RNA, 19 nt, Artificial Sequence
  Description of Artificial Sequence: Synthetic oligonucleotide
  Antisense strand to SEQ ID NO: 1158808
uguggugacgcacuuauuc

SEQ ID NO: 1158810 - RNA, 19 nt, Artificial Sequence
  Description of Artificial Sequence: Synthetic oligonucleotide
  Sense strand starting at position 2044 of SEQ ID NO: 916465
ccuagacuaaagcgugaaa

SEQ ID NO: 1158811 - RNA, 19 nt, Artificial Sequence
  Description of Artificial Sequence: Synthetic oligonucleotide
  Antisense strand to SEQ ID NO: 1158810
uuucacgcuuuagucuagg

SEQ ID NO: 1158812 - RNA, 19 nt, Artificial Sequence
  Description of Artificial Sequence: Synthetic oligonucleotide
  Sense strand starting at position 2181 of SEQ ID NO: 916465
agauuagaaaugugagcau

SEQ ID NO: 1158813 - RNA, 19 nt, Artificial Sequence
  Description of Artificial Sequence: Synthetic oligonucleotide
  Antisense strand to SEQ ID NO: 1158812
augcucacauuucuaaucu

SEQ ID NO: 1158814 - RNA, 19 nt, Artificial Sequence
  Description of Artificial Sequence: Synthetic oligonucleotide
  Sense strand starting at position 2308 of SEQ ID NO: 916465
cuuuaacugugagcuaaau

SEQ ID NO: 1158815 - RNA, 19 nt, Artificial Sequence
  Description of Artificial Sequence: Synthetic oligonucleotide
  Antisense strand to SEQ ID NO: 1158814
auuuagcucacaguuaaag

SEQ ID NO: 1158816 - RNA, 19 nt, Artificial Sequence
  Description of Artificial Sequence: Synthetic oligonucleotide
  Sense strand starting at position 2338 of SEQ ID NO: 916465
uuagaaucgaaauggcaga

SEQ ID NO: 1158817 - RNA, 19 nt, Artificial Sequence
  Description of Artificial Sequence: Synthetic oligonucleotide
  Antisense strand to SEQ ID NO: 1158816
ucugccauuucgauucuaa

SEQ ID NO: 1158818 - RNA, 19 nt, Artificial Sequence
  Description of Artificial Sequence: Synthetic oligonucleotide
  Sense strand starting at position 2647 of SEQ ID NO: 916465
auuguuucucgccagauag

SEQ ID NO: 1158819 - RNA, 19 nt, Artificial Sequence
  Description of Artificial Sequence: Synthetic oligonucleotide
  Antisense strand to SEQ ID NO: 1158818
cuaucuggcgagaaacaau

SEQ ID NO: 1158820 - RNA, 19 nt, Artificial Sequence
  Description of Artificial Sequence: Synthetic oligonucleotide
  Sense strand starting at position 2649 of SEQ ID NO: 916465
uguuucucgccagauagaa

SEQ ID NO: 1158821 - RNA, 19 nt, Artificial Sequence
  Description of Artificial Sequence: Synthetic oligonucleotide
  Antisense strand to SEQ ID NO: 1158820
uucuaucuggcgagaaaca

SEQ ID NO: 1158822 - RNA, 19 nt, Artificial Sequence
  Description of Artificial Sequence: Synthetic oligonucleotide
  Sense strand starting at position 2683 of SEQ ID NO: 916465
gaaagaaugcuccagugug

SEQ ID NO: 1158823 - RNA, 19 nt, Artificial Sequence
  Description of Artificial Sequence: Synthetic oligonucleotide
  Antisense strand to SEQ ID NO: 1158822
cacacuggagcauucuuuc

SEQ ID NO: 1158824 - RNA, 19 nt, Artificial Sequence
  Description of Artificial Sequence: Synthetic oligonucleotide
  Sense strand starting at position 2893 of SEQ ID NO: 916465
gcaagugacuaucucuaag

SEQ ID NO: 1158825 - RNA, 19 nt, Artificial Sequence
  Description of Artificial Sequence: Synthetic oligonucleotide
  Antisense strand to SEQ ID NO: 1158824
cuuagagauagucacuugc

SEQ ID NO: 1158826 - RNA, 19 nt, Artificial Sequence
  Description of Artificial Sequence: Synthetic oligonucleotide
  Sense strand starting at position 3073 of SEQ ID NO: 916465
agccauuugaucugguagu

SEQ ID NO: 1158827 - RNA, 19 nt, Artificial Sequence
  Description of Artificial Sequence: Synthetic oligonucleotide
  Antisense strand to SEQ ID NO: 1158826
acuaccagaucaaauggcu

SEQ ID NO: 1158828 - RNA, 19 nt, Artificial Sequence
  Description of Artificial Sequence: Synthetic oligonucleotide
  Sense strand starting at position 3079 of SEQ ID NO: 916465
uugaucugguagucuagaa

SEQ ID NO: 1158829 - RNA, 19 nt, Artificial Sequence
  Description of Artificial Sequence: Synthetic oligonucleotide
  Antisense strand to SEQ ID NO: 1158828
uucuagacuaccagaucaa

SEQ ID NO: 1158830 - RNA, 19 nt, Artificial Sequence
  Description of Artificial Sequence: Synthetic oligonucleotide
  Sense strand starting at position 3786 of SEQ ID NO: 916465
aacggaaguguuugaauug

SEQ ID NO: 1158831 - RNA, 19 nt, Artificial Sequence
  Description of Artificial Sequence: Synthetic oligonucleotide
  Antisense strand to SEQ ID NO: 1158830
caauucaaacacuuccguu

SEQ ID NO: 1158832 - RNA, 19 nt, Artificial Sequence
  Description of Artificial Sequence: Synthetic oligonucleotide
  Sense strand starting at position 3827 of SEQ ID NO: 916465
guauguucagugggaugaa

SEQ ID NO: 1158833 - RNA, 19 nt, Artificial Sequence
  Description of Artificial Sequence: Synthetic oligonucleotide
  Antisense strand to SEQ ID NO: 1158832
uucaucccacugaacauac

SEQ ID NO: 1158834 - RNA, 19 nt, Artificial Sequence
  Description of Artificial Sequence: Synthetic oligonucleotide
  Sense strand starting at position 3912 of SEQ ID NO: 916465
cuaagaaauucgguauagc

SEQ ID NO: 1158835 - RNA, 19 nt, Artificial Sequence
  Description of Artificial Sequence: Synthetic oligonucleotide
  Antisense strand to SEQ ID NO: 1158834
gcuauaccgaauuucuuag

SEQ ID NO: 1158836 - RNA, 19 nt, Artificial Sequence
  Description of Artificial Sequence: Synthetic oligonucleotide
  Sense strand starting at position 3913 of SEQ ID NO: 916465
uaagaaauucgguauagcu

SEQ ID NO: 1158837 - RNA, 19 nt, Artificial Sequence
  Description of Artificial Sequence: Synthetic oligonucleotide
  Antisense strand to SEQ ID NO: 1158836
agcuauaccgaauuucuua

SEQ ID NO: 1158838 - RNA, 19 nt, Artificial Sequence
  Description of Artificial Sequence: Synthetic oligonucleotide
  Sense strand starting at position 3921 of SEQ ID NO: 916465
ucgguauagcuagagcaua

SEQ ID NO: 1158839 - RNA, 19 nt, Artificial Sequence
  Description of Artificial Sequence: Synthetic oligonucleotide
  Antisense strand to SEQ ID NO: 1158838
uaugcucuagcuauaccga

SEQ ID NO: 1158840 - RNA, 19 nt, Artificial Sequence
  Description of Artificial Sequence: Synthetic oligonucleotide
  Sense strand starting at position 3980 of SEQ ID NO: 916465
uuuccuugaguccauauua

SEQ ID NO: 1158841 - RNA, 19 nt, Artificial Sequence
  Description of Artificial Sequence: Synthetic oligonucleotide
  Antisense strand to SEQ ID NO: 1158840
uaauauggacucaaggaaa

SEQ ID NO: 1158842 - RNA, 19 nt, Artificial Sequence
  Description of Artificial Sequence: Synthetic oligonucleotide
  Sense strand starting at position 118 of SEQ ID NO: 916466
auuggaauauuacucagua

SEQ ID NO: 1158843 - RNA, 19 nt, Artificial Sequence
  Description of Artificial Sequence: Synthetic oligonucleotide
  Antisense strand to SEQ ID NO: 1158842
uacugaguaauauuccaau

SEQ ID NO: 1158844 - RNA, 19 nt, Artificial Sequence
  Description of Artificial Sequence: Synthetic oligonucleotide
  Sense strand starting at position 119 of SEQ ID NO: 916466
uuggaauauuacucaguaa

SEQ ID NO: 1158845 - RNA, 19 nt, Artificial Sequence
  Description of Artificial Sequence: Synthetic oligonucleotide
  Antisense strand to SEQ ID NO: 1158844
uuacugaguaauauuccaa

SEQ ID NO: 1158846 - RNA, 19 nt, Artificial Sequence
  Description of Artificial Sequence: Synthetic oligonucleotide
  Sense strand starting at position 224 of SEQ ID NO: 916466
auaugaaucuaacuguaug

SEQ ID NO: 1158847 - RNA, 19 nt, Artificial Sequence
  Description of Artificial Sequence: Synthetic oligonucleotide
  Antisense strand to SEQ ID NO: 1158846
cauacaguuagauucauau

SEQ ID NO: 1158848 - RNA, 19 nt, Artificial Sequence
  Description of Artificial Sequence: Synthetic oligonucleotide
  Sense strand starting at position 281 of SEQ ID NO: 916466
gccaguggucaccaggaga

SEQ ID NO: 1158849 - RNA, 19 nt, Artificial Sequence
  Description of Artificial Sequence: Synthetic oligonucleotide
  Antisense strand to SEQ ID NO: 1158848
ucuccuggugaccacuggc

SEQ ID NO: 1158850 - RNA, 19 nt, Artificial Sequence
  Description of Artificial Sequence: Synthetic oligonucleotide
  Sense strand starting at position 310 of SEQ ID NO: 916466
gaggaugaaucgguggagu

SEQ ID NO: 1158851 - RNA, 19 nt, Artificial Sequence
  Description of Artificial Sequence: Synthetic oligonucleotide
  Antisense strand to SEQ ID NO: 1158850
acuccaccgauucauccuc

SEQ ID NO: 1158852 - RNA, 19 nt, Artificial Sequence
  Description of Artificial Sequence: Synthetic oligonucleotide
  Sense strand starting at position 321 of SEQ ID NO: 916466
gguggagugcaagggauau

SEQ ID NO: 1158853 - RNA, 19 nt, Artificial Sequence
  Description of Artificial Sequence: Synthetic oligonucleotide
  Antisense strand to SEQ ID NO: 1158852
auaucccuugcacuccacc

SEQ ID NO: 1158854 - RNA, 19 nt, Artificial Sequence
  Description of Artificial Sequence: Synthetic oligonucleotide
  Sense strand starting at position 349 of SEQ ID NO: 916466
ugagacuauucuguauaac

SEQ ID NO: 1158855 - RNA, 19 nt, Artificial Sequence
  Description of Artificial Sequence: Synthetic oligonucleotide
  Antisense strand to SEQ ID NO: 1158854
guuauacagaauagucuca

SEQ ID NO: 1158856 - RNA, 19 nt, Artificial Sequence
  Description of Artificial Sequence: Synthetic oligonucleotide
  Sense strand starting at position 379 of SEQ ID NO: 916466
ggauacauguuauugaaca

SEQ ID NO: 1158857 - RNA, 19 nt, Artificial Sequence
  Description of Artificial Sequence: Synthetic oligonucleotide
  Antisense strand to SEQ ID NO: 1158856
uguucaauaacauguaucc

SEQ ID NO: 1158858 - RNA, 19 nt, Artificial Sequence
  Description of Artificial Sequence: Synthetic oligonucleotide
  Sense strand starting at position 432 of SEQ ID NO: 916466
agugaacauuaugugaacu

SEQ ID NO: 1158859 - RNA, 19 nt, Artificial Sequence
  Description of Artificial Sequence: Synthetic oligonucleotide
  Antisense strand to SEQ ID NO: 1158858
aguucacauaauguucacu

SEQ ID NO: 1158860 - RNA, 19 nt, Artificial Sequence
  Description of Artificial Sequence: Synthetic oligonucleotide
  Sense strand starting at position 440 of SEQ ID NO: 916466
uuaugugaacuauggacuu

SEQ ID NO: 1158861 - RNA, 19 nt, Artificial Sequence
  Description of Artificial Sequence: Synthetic oligonucleotide
  Antisense strand to SEQ ID NO: 1158860
aaguccauaguucacauaa

SEQ ID NO: 1158862 - RNA, 19 nt, Artificial Sequence
  Description of Artificial Sequence: Synthetic oligonucleotide
  Sense strand starting at position 738 of SEQ ID NO: 916466
aguaacaaguggucaucua

SEQ ID NO: 1158863 - RNA, 19 nt, Artificial Sequence
  Description of Artificial Sequence: Synthetic oligonucleotide
  Antisense strand to SEQ ID NO: 1158862
uagaugaccacuuguuacu

SEQ ID NO: 1158864 - RNA, 19 nt, Artificial Sequence
  Description of Artificial Sequence: Synthetic oligonucleotide
  Sense strand starting at position 739 of SEQ ID NO: 916466
guaacaaguggucaucuaa

SEQ ID NO: 1158865 - RNA, 19 nt, Artificial Sequence
  Description of Artificial Sequence: Synthetic oligonucleotide
  Antisense strand to SEQ ID NO: 1158864
uuagaugaccacuuguuac

SEQ ID NO: 1158866 - RNA, 19 nt, Artificial Sequence
  Description of Artificial Sequence: Synthetic oligonucleotide
  Sense strand starting at position 773 of SEQ ID NO: 916466
ugacgugguauugaguaua

SEQ ID NO: 1158867 - RNA, 19 nt, Artificial Sequence
  Description of Artificial Sequence: Synthetic oligonucleotide
  Antisense strand to SEQ ID NO: 1158866
uauacucaauaccacguca

SEQ ID NO: 1158868 - RNA, 19 nt, Artificial Sequence
  Description of Artificial Sequence: Synthetic oligonucleotide
  Sense strand starting at position 776 of SEQ ID NO: 916466
cgugguauugaguauagau

SEQ ID NO: 1158869 - RNA, 19 nt, Artificial Sequence
  Description of Artificial Sequence: Synthetic oligonucleotide
  Antisense strand to SEQ ID NO: 1158868
aucuauacucaauaccacg

SEQ ID NO: 1158870 - RNA, 19 nt, Artificial Sequence
  Description of Artificial Sequence: Synthetic oligonucleotide
  Sense strand starting at position 905 of SEQ ID NO: 916466
uucagaagucggugaaaua

SEQ ID NO: 1158871 - RNA, 19 nt, Artificial Sequence
  Description of Artificial Sequence: Synthetic oligonucleotide
  Antisense strand to SEQ ID NO: 1158870
uauuucaccgacuucugaa

SEQ ID NO: 1158872 - RNA, 19 nt, Artificial Sequence
  Description of Artificial Sequence: Synthetic oligonucleotide
  Sense strand starting at position 1168 of SEQ ID NO: 916466
guaugcagcauugagagaa

SEQ ID NO: 1158873 - RNA, 19 nt, Artificial Sequence
  Description of Artificial Sequence: Synthetic oligonucleotide
  Antisense strand to SEQ ID NO: 1158872
uucucucaaugcugcauac

SEQ ID NO: 1158874 - RNA, 19 nt, Artificial Sequence
  Description of Artificial Sequence: Synthetic oligonucleotide
  Sense strand starting at position 1172 of SEQ ID NO: 916466
gcagcauugagagaagugu

SEQ ID NO: 1158875 - RNA, 19 nt, Artificial Sequence
  Description of Artificial Sequence: Synthetic oligonucleotide
  Antisense strand to SEQ ID NO: 1158874
acacuucucucaaugcugc

SEQ ID NO: 1158876 - RNA, 19 nt, Artificial Sequence
  Description of Artificial Sequence: Synthetic oligonucleotide
  Sense strand starting at position 1207 of SEQ ID NO: 916466
auuaaagaggcucagcaau

SEQ ID NO: 1158877 - RNA, 19 nt, Artificial Sequence
  Description of Artificial Sequence: Synthetic oligonucleotide
  Antisense strand to SEQ ID NO: 1158876
auugcugagccucuuuaau

SEQ ID NO: 1158878 - RNA, 19 nt, Artificial Sequence
  Description of Artificial Sequence: Synthetic oligonucleotide
  Sense strand starting at position 1276 of SEQ ID NO: 916466
ugaagucgaguugaaucuu

SEQ ID NO: 1158879 - RNA, 19 nt, Artificial Sequence
  Description of Artificial Sequence: Synthetic oligonucleotide
  Antisense strand to SEQ ID NO: 1158878
aagauucaacucgacuuca

SEQ ID NO: 1158880 - RNA, 19 nt, Artificial Sequence
  Description of Artificial Sequence: Synthetic oligonucleotide
  Sense strand starting at position 1284 of SEQ ID NO: 916466
aguugaaucuuguugaaag

SEQ ID NO: 1158881 - RNA, 19 nt, Artificial Sequence
  Description of Artificial Sequence: Synthetic oligonucleotide
  Antisense strand to SEQ ID NO: 1158880
cuuucaacaagauucaacu

SEQ ID NO: 1158882 - RNA, 19 nt, Artificial Sequence
  Description of Artificial Sequence: Synthetic oligonucleotide
  Sense strand starting at position 1413 of SEQ ID NO: 916466
cgucuuacagcacacuaua

SEQ ID NO: 1158883 - RNA, 19 nt, Artificial Sequence
  Description of Artificial Sequence: Synthetic oligonucleotide
  Antisense strand to SEQ ID NO: 1158882
uauagugugcuguaagacg

SEQ ID NO: 1158884 - RNA, 19 nt, Artificial Sequence
  Description of Artificial Sequence: Synthetic oligonucleotide
  Sense strand starting at position 1440 of SEQ ID NO: 916466
agaugcuuauaacuguaua

SEQ ID NO: 1158885 - RNA, 19 nt, Artificial Sequence
  Description of Artificial Sequence: Synthetic oligonucleotide
  Antisense strand to SEQ ID NO: 1158884
uauacaguuauaagcaucu

SEQ ID NO: 1158886 - RNA, 19 nt, Artificial Sequence
  Description of Artificial Sequence: Synthetic oligonucleotide
  Sense strand starting at position 1541 of SEQ ID NO: 916466
uuucucuuccuuugaggaa

SEQ ID NO: 1158887 - RNA, 19 nt, Artificial Sequence
  Description of Artificial Sequence: Synthetic oligonucleotide
  Antisense strand to SEQ ID NO: 1158886
uuccucaaaggaagagaaa

SEQ ID NO: 1158888 - RNA, 19 nt, Artificial Sequence
  Description of Artificial Sequence: Synthetic oligonucleotide
  Sense strand starting at position 2510 of SEQ ID NO: 916466
ucaauuaaagauggcaauu

SEQ ID NO: 1158889 - RNA, 19 nt, Artificial Sequence
  Description of Artificial Sequence: Synthetic oligonucleotide
  Antisense strand to SEQ ID NO: 1158888
aauugccaucuuuaauuga

SEQ ID NO: 1158890 - RNA, 19 nt, Artificial Sequence
  Description of Artificial Sequence: Synthetic oligonucleotide
  Sense strand starting at position 2520 of SEQ ID NO: 916466
auggcaauucuugaguuaa

SEQ ID NO: 1158891 - RNA, 19 nt, Artificial Sequence
  Description of Artificial Sequence: Synthetic oligonucleotide
  Antisense strand to SEQ ID NO: 1158890
uuaacucaagaauugccau

SEQ ID NO: 1158892 - RNA, 19 nt, Artificial Sequence
  Description of Artificial Sequence: Synthetic oligonucleotide
  Sense strand starting at position 2522 of SEQ ID NO: 916466
ggcaauucuugaguuaaau

SEQ ID NO: 1158893 - RNA, 19 nt, Artificial Sequence
  Description of Artificial Sequence: Synthetic oligonucleotide
  Antisense strand to SEQ ID NO: 1158892
auuuaacucaagaauugcc

SEQ ID NO: 1158894 - RNA, 19 nt, Artificial Sequence
  Description of Artificial Sequence: Synthetic oligonucleotide
  Sense strand starting at position 2534 of SEQ ID NO: 916466
guuaaauauuaucugcaag

SEQ ID NO: 1158895 - RNA, 19 nt, Artificial Sequence
  Description of Artificial Sequence: Synthetic oligonucleotide
  Antisense strand to SEQ ID NO: 1158894
cuugcagauaauauuuaac

SEQ ID NO: 1158896 - RNA, 19 nt, Artificial Sequence
  Description of Artificial Sequence: Synthetic oligonucleotide
  Sense strand starting at position 2574 of SEQ ID NO: 916466
uggcuuucugcgggauuua

SEQ ID NO: 1158897 - RNA, 19 nt, Artificial Sequence
  Description of Artificial Sequence: Synthetic oligonucleotide
  Antisense strand to SEQ ID NO: 1158896
uaaaucccgcagaaagcca

SEQ ID NO: 1158898 - RNA, 19 nt, Artificial Sequence
  Description of Artificial Sequence: Synthetic oligonucleotide
  Sense strand starting at position 2575 of SEQ ID NO: 916466
ggcuuucugcgggauuuau

SEQ ID NO: 1158899 - RNA, 19 nt, Artificial Sequence
  Description of Artificial Sequence: Synthetic oligonucleotide
  Antisense strand to SEQ ID NO: 1158898
auaaaucccgcagaaagcc

SEQ ID NO: 1158900 - RNA, 19 nt, Artificial Sequence
  Description of Artificial Sequence: Synthetic oligonucleotide
  Sense strand starting at position 2584 of SEQ ID NO: 916466
cgggauuuauuguuuguag

SEQ ID NO: 1158901 - RNA, 19 nt, Artificial Sequence
  Description of Artificial Sequence: Synthetic oligonucleotide
  Antisense strand to SEQ ID NO: 1158900
cuacaaacaauaaaucccg

SEQ ID NO: 1158902 - RNA, 19 nt, Artificial Sequence
  Description of Artificial Sequence: Synthetic oligonucleotide
  Sense strand starting at position 2855 of SEQ ID NO: 916466
ugccauauggucuaaccuu

SEQ ID NO: 1158903 - RNA, 19 nt, Artificial Sequence
  Description of Artificial Sequence: Synthetic oligonucleotide
  Antisense strand to SEQ ID NO: 1158902
aagguuagaccauauggca

SEQ ID NO: 1158904 - RNA, 19 nt, Artificial Sequence
  Description of Artificial Sequence: Synthetic oligonucleotide
  Sense strand starting at position 2862 of SEQ ID NO: 916466
uggucuaaccuuugacagu

SEQ ID NO: 1158905 - RNA, 19 nt, Artificial Sequence
  Description of Artificial Sequence: Synthetic oligonucleotide
  Antisense strand to SEQ ID NO: 1158904
acugucaaagguuagacca

SEQ ID NO: 1158906 - RNA, 19 nt, Artificial Sequence
  Description of Artificial Sequence: Synthetic oligonucleotide
  Sense strand starting at position 3008 of SEQ ID NO: 916466
gacugagaaugcuugugaa

SEQ ID NO: 1158907 - RNA, 19 nt, Artificial Sequence
  Description of Artificial Sequence: Synthetic oligonucleotide
  Antisense strand to SEQ ID NO: 1158906
uucacaagcauucucaguc

SEQ ID NO: 1158908 - RNA, 19 nt, Artificial Sequence
  Description of Artificial Sequence: Synthetic oligonucleotide
  Sense strand starting at position 3039 of SEQ ID NO: 916466
gugugaaacuaacucuacu

SEQ ID NO: 1158909 - RNA, 19 nt, Artificial Sequence
  Description of Artificial Sequence: Synthetic oligonucleotide
  Antisense strand to SEQ ID NO: 1158908
aguagaguuaguuucacac

SEQ ID NO: 1158910 - RNA, 19 nt, Artificial Sequence
  Description of Artificial Sequence: Synthetic oligonucleotide
  Sense strand starting at position 3094 of SEQ ID NO: 916466
uaaagcuagguuugaaaga

SEQ ID NO: 1158911 - RNA, 19 nt, Artificial Sequence
  Description of Artificial Sequence: Synthetic oligonucleotide
  Antisense strand to SEQ ID NO: 1158910
ucuuucaaaccuagcuuua

SEQ ID NO: 1158912 - RNA, 19 nt, Artificial Sequence
  Description of Artificial Sequence: Synthetic oligonucleotide
  Sense strand starting at position 3139 of SEQ ID NO: 916466
guaauuucccauugcagug

SEQ ID NO: 1158913 - RNA, 19 nt, Artificial Sequence
  Description of Artificial Sequence: Synthetic oligonucleotide
  Antisense strand to SEQ ID NO: 1158912
cacugcaaugggaaauuac

SEQ ID NO: 1158914 - RNA, 19 nt, Artificial Sequence
  Description of Artificial Sequence: Synthetic oligonucleotide
  Sense strand starting at position 3176 of SEQ ID NO: 916466
gggacugaucugcaagugu

SEQ ID NO: 1158915 - RNA, 19 nt, Artificial Sequence
  Description of Artificial Sequence: Synthetic oligonucleotide
  Antisense strand to SEQ ID NO: 1158914
acacuugcagaucaguccc

SEQ ID NO: 1158916 - RNA, 19 nt, Artificial Sequence
  Description of Artificial Sequence: Synthetic oligonucleotide
  Sense strand starting at position 3318 of SEQ ID NO: 916466
uucguauucggugcuuuaa

SEQ ID NO: 1158917 - RNA, 19 nt, Artificial Sequence
  Description of Artificial Sequence: Synthetic oligonucleotide
  Antisense strand to SEQ ID NO: 1158916
uuaaagcaccgaauacgaa

SEQ ID NO: 1158918 - RNA, 19 nt, Artificial Sequence
  Description of Artificial Sequence: Synthetic oligonucleotide
  Sense strand starting at position 3319 of SEQ ID NO: 916466
ucguauucggugcuuuaau

SEQ ID NO: 1158919 - RNA, 19 nt, Artificial Sequence
  Description of Artificial Sequence: Synthetic oligonucleotide
  Antisense strand to SEQ ID NO: 1158918
auuaaagcaccgaauacga

SEQ ID NO: 1158920 - RNA, 19 nt, Artificial Sequence
  Description of Artificial Sequence: Synthetic oligonucleotide
  Sense strand starting at position 3708 of SEQ ID NO: 916466
caguuaugacagugaacaa

SEQ ID NO: 1158921 - RNA, 19 nt, Artificial Sequence
  Description of Artificial Sequence: Synthetic oligonucleotide
  Antisense strand to SEQ ID NO: 1158920
uuguucacugucauaacug

SEQ ID NO: 1158922 - RNA, 19 nt, Artificial Sequence
  Description of Artificial Sequence: Synthetic oligonucleotide
  Sense strand starting at position 48 of SEQ ID NO: 916467
cccagcucugagcaggauu

SEQ ID NO: 1158923 - RNA, 19 nt, Artificial Sequence
  Description of Artificial Sequence: Synthetic oligonucleotide
  Antisense strand to SEQ ID NO: 1158922
aauccugcucagagcuggg

SEQ ID NO: 1158924 - RNA, 19 nt, Artificial Sequence
  Description of Artificial Sequence: Synthetic oligonucleotide
  Sense strand starting at position 124 of SEQ ID NO: 916467
ucuuguucugaaggaagaa

SEQ ID NO: 1158925 - RNA, 19 nt, Artificial Sequence
  Description of Artificial Sequence: Synthetic oligonucleotide
  Antisense strand to SEQ ID NO: 1158924
uucuuccuucagaacaaga

SEQ ID NO: 1158926 - RNA, 19 nt, Artificial Sequence
  Description of Artificial Sequence: Synthetic oligonucleotide
  Sense strand starting at position 154 of SEQ ID NO: 916467
ggaaguuacacgggcuuua

SEQ ID NO: 1158927 - RNA, 19 nt, Artificial Sequence
  Description of Artificial Sequence: Synthetic oligonucleotide
  Antisense strand to SEQ ID NO: 1158926
uaaagcccguguaacuucc

SEQ ID NO: 1158928 - RNA, 19 nt, Artificial Sequence
  Description of Artificial Sequence: Synthetic oligonucleotide
  Sense strand starting at position 238 of SEQ ID NO: 916467
uguggagucagguaaauuc

SEQ ID NO: 1158929 - RNA, 19 nt, Artificial Sequence
  Description of Artificial Sequence: Synthetic oligonucleotide
  Antisense strand to SEQ ID NO: 1158928
gaauuuaccugacuccaca

SEQ ID NO: 1158930 - RNA, 19 nt, Artificial Sequence
  Description of Artificial Sequence: Synthetic oligonucleotide
  Sense strand starting at position 310 of SEQ ID NO: 916467
ugaggacuuacgggaguua

SEQ ID NO: 1158931 - RNA, 19 nt, Artificial Sequence
  Description of Artificial Sequence: Synthetic oligonucleotide
  Antisense strand to SEQ ID NO: 1158930
uaacucccguaaguccuca

SEQ ID NO: 1158932 - RNA, 19 nt, Artificial Sequence
  Description of Artificial Sequence: Synthetic oligonucleotide
  Sense strand starting at position 345 of SEQ ID NO: 916467
ggaaauccagauuggcuau

SEQ ID NO: 1158933 - RNA, 19 nt, Artificial Sequence
  Description of Artificial Sequence: Synthetic oligonucleotide
  Antisense strand to SEQ ID NO: 1158932
auagccaaucuggauuucc

SEQ ID NO: 1158934 - RNA, 19 nt, Artificial Sequence
  Description of Artificial Sequence: Synthetic oligonucleotide
  Sense strand starting at position 475 of SEQ ID NO: 916467
gcaagaggcauuggaaauu

SEQ ID NO: 1158935 - RNA, 19 nt, Artificial Sequence
  Description of Artificial Sequence: Synthetic oligonucleotide
  Antisense strand to SEQ ID NO: 1158934
aauuuccaaugccucuugc

SEQ ID NO: 1158936 - RNA, 19 nt, Artificial Sequence
  Description of Artificial Sequence: Synthetic oligonucleotide
  Sense strand starting at position 623 of SEQ ID NO: 916467
agaagucuuuaggcaauua

SEQ ID NO: 1158937 - RNA, 19 nt, Artificial Sequence
  Description of Artificial Sequence: Synthetic oligonucleotide
  Antisense strand to SEQ ID NO: 1158936
uaauugccuaaagacuucu

SEQ ID NO: 1158938 - RNA, 19 nt, Artificial Sequence
  Description of Artificial Sequence: Synthetic oligonucleotide
  Sense strand starting at position 680 of SEQ ID NO: 916467
auugcaggucuugaucaua

SEQ ID NO: 1158939 - RNA, 19 nt, Artificial Sequence
  Description of Artificial Sequence: Synthetic oligonucleotide
  Antisense strand to SEQ ID NO: 1158938
uaugaucaagaccugcaau

SEQ ID NO: 1158940 - RNA, 19 nt, Artificial Sequence
  Description of Artificial Sequence: Synthetic oligonucleotide
  Sense strand starting at position 683 of SEQ ID NO: 916467
gcaggucuugaucauauua

SEQ ID NO: 1158941 - RNA, 19 nt, Artificial Sequence
  Description of Artificial Sequence: Synthetic oligonucleotide
  Antisense strand to SEQ ID NO: 1158940
uaauaugaucaagaccugc

SEQ ID NO: 1158942 - RNA, 19 nt, Artificial Sequence
  Description of Artificial Sequence: Synthetic oligonucleotide
  Sense strand starting at position 696 of SEQ ID NO: 916467
auauuauauggaugaaguc

SEQ ID NO: 1158943 - RNA, 19 nt, Artificial Sequence
  Description of Artificial Sequence: Synthetic oligonucleotide
  Antisense strand to SEQ ID NO: 1158942
gacuucauccauauaauau

SEQ ID NO: 1158944 - RNA, 19 nt, Artificial Sequence
  Description of Artificial Sequence: Synthetic oligonucleotide
  Sense strand starting at position 720 of SEQ ID NO: 916467
gcagauuccaugugacaga

SEQ ID NO: 1158945 - RNA, 19 nt, Artificial Sequence
  Description of Artificial Sequence: Synthetic oligonucleotide
  Antisense strand to SEQ ID NO: 1158944
ucugucacauggaaucugc

SEQ ID NO: 1158946 - RNA, 19 nt, Artificial Sequence
  Description of Artificial Sequence: Synthetic oligonucleotide
  Sense strand starting at position 750 of SEQ ID NO: 916467
ugaggaauauuuggaaaua

SEQ ID NO: 1158947 - RNA, 19 nt, Artificial Sequence
  Description of Artificial Sequence: Synthetic oligonucleotide
  Antisense strand to SEQ ID NO: 1158946
uauuuccaaauauuccuca

SEQ ID NO: 1158948 - RNA, 19 nt, Artificial Sequence
  Description of Artificial Sequence: Synthetic oligonucleotide
  Sense strand starting at position 788 of SEQ ID NO: 916467
ugacauauaucucccuguu

SEQ ID NO: 1158949 - RNA, 19 nt, Artificial Sequence
  Description of Artificial Sequence: Synthetic oligonucleotide
  Antisense strand to SEQ ID NO: 1158948
aacagggagauauauguca

SEQ ID NO: 1158950 - RNA, 19 nt, Artificial Sequence
  Description of Artificial Sequence: Synthetic oligonucleotide
  Sense strand starting at position 1002 of SEQ ID NO: 916467
ucaagcgauucuccaaacu

SEQ ID NO: 1158951 - RNA, 19 nt, Artificial Sequence
  Description of Artificial Sequence: Synthetic oligonucleotide
  Antisense strand to SEQ ID NO: 1158950
aguuuggagaaucgcuuga

SEQ ID NO: 1158952 - RNA, 19 nt, Artificial Sequence
  Description of Artificial Sequence: Synthetic oligonucleotide
  Sense strand starting at position 1546 of SEQ ID NO: 916467
aucaaauucugggucauua

SEQ ID NO: 1158953 - RNA, 19 nt, Artificial Sequence
  Description of Artificial Sequence: Synthetic oligonucleotide
  Antisense strand to SEQ ID NO: 1158952
uaaugacccagaauuugau

SEQ ID NO: 1158954 - RNA, 19 nt, Artificial Sequence
  Description of Artificial Sequence: Synthetic oligonucleotide
  Sense strand starting at position 1714 of SEQ ID NO: 916467
gggcuucauccuuggaagu

SEQ ID NO: 1158955 - RNA, 19 nt, Artificial Sequence
  Description of Artificial Sequence: Synthetic oligonucleotide
  Antisense strand to SEQ ID NO: 1158954
acuuccaaggaugaagccc

SEQ ID NO: 1158956 - RNA, 19 nt, Artificial Sequence
  Description of Artificial Sequence: Synthetic oligonucleotide
  Sense strand starting at position 1724 of SEQ ID NO: 916467
cuuggaaguuucuucuuau

SEQ ID NO: 1158957 - RNA, 19 nt, Artificial Sequence
  Description of Artificial Sequence: Synthetic oligonucleotide
  Antisense strand to SEQ ID NO: 1158956
auaagaagaaacuuccaag

SEQ ID NO: 1158958 - RNA, 19 nt, Artificial Sequence
  Description of Artificial Sequence: Synthetic oligonucleotide
  Sense strand starting at position 1725 of SEQ ID NO: 916467
uuggaaguuucuucuuauu

SEQ ID NO: 1158959 - RNA, 19 nt, Artificial Sequence
  Description of Artificial Sequence: Synthetic oligonucleotide
  Antisense strand to SEQ ID NO: 1158958
aauaagaagaaacuuccaa

SEQ ID NO: 1158960 - RNA, 19 nt, Artificial Sequence
  Description of Artificial Sequence: Synthetic oligonucleotide
  Sense strand starting at position 1852 of SEQ ID NO: 916467
uucugagacuccuccagau

SEQ ID NO: 1158961 - RNA, 19 nt, Artificial Sequence
  Description of Artificial Sequence: Synthetic oligonucleotide
  Antisense strand to SEQ ID NO: 1158960
aucuggaggagucucagaa

SEQ ID NO: 1158962 - RNA, 19 nt, Artificial Sequence
  Description of Artificial Sequence: Synthetic oligonucleotide
  Sense strand starting at position 2020 of SEQ ID NO: 916467
acucgaagauaagucugau

SEQ ID NO: 1158963 - RNA, 19 nt, Artificial Sequence
  Description of Artificial Sequence: Synthetic oligonucleotide
  Antisense strand to SEQ ID NO: 1158962
aucagacuuaucuucgagu

SEQ ID NO: 1158964 - RNA, 19 nt, Artificial Sequence
  Description of Artificial Sequence: Synthetic oligonucleotide
  Sense strand starting at position 2050 of SEQ ID NO: 916467
agcugaacacuggaguuua

SEQ ID NO: 1158965 - RNA, 19 nt, Artificial Sequence
  Description of Artificial Sequence: Synthetic oligonucleotide
  Antisense strand to SEQ ID NO: 1158964
uaaacuccaguguucagcu

SEQ ID NO: 1158966 - RNA, 19 nt, Artificial Sequence
  Description of Artificial Sequence: Synthetic oligonucleotide
  Sense strand starting at position 2124 of SEQ ID NO: 916467
ucuggagagucacuuucua

SEQ ID NO: 1158967 - RNA, 19 nt, Artificial Sequence
  Description of Artificial Sequence: Synthetic oligonucleotide
  Antisense strand to SEQ ID NO: 1158966
uagaaagugacucuccaga

SEQ ID NO: 1158968 - RNA, 19 nt, Artificial Sequence
  Description of Artificial Sequence: Synthetic oligonucleotide
  Sense strand starting at position 2128 of SEQ ID NO: 916467
gagagucacuuucuagcaa

SEQ ID NO: 1158969 - RNA, 19 nt, Artificial Sequence
  Description of Artificial Sequence: Synthetic oligonucleotide
  Antisense strand to SEQ ID NO: 1158968
uugcuagaaagugacucuc

SEQ ID NO: 1158970 - RNA, 19 nt, Artificial Sequence
  Description of Artificial Sequence: Synthetic oligonucleotide
  Sense strand starting at position 2357 of SEQ ID NO: 916467
guggaaaccuuagucaaga

SEQ ID NO: 1158971 - RNA, 19 nt, Artificial Sequence
  Description of Artificial Sequence: Synthetic oligonucleotide
  Antisense strand to SEQ ID NO: 1158970
ucuugacuaagguuuccac

SEQ ID NO: 1158972 - RNA, 19 nt, Artificial Sequence
  Description of Artificial Sequence: Synthetic oligonucleotide
  Sense strand starting at position 2362 of SEQ ID NO: 916467
aaccuuagucaagaggcuu

SEQ ID NO: 1158973 - RNA, 19 nt, Artificial Sequence
  Description of Artificial Sequence: Synthetic oligonucleotide
  Antisense strand to SEQ ID NO: 1158972
aagccucuugacuaagguu

SEQ ID NO: 1158974 - RNA, 19 nt, Artificial Sequence
  Description of Artificial Sequence: Synthetic oligonucleotide
  Sense strand starting at position 2375 of SEQ ID NO: 916467
aggcuuucugagggaaaca

SEQ ID NO: 1158975 - RNA, 19 nt, Artificial Sequence
  Description of Artificial Sequence: Synthetic oligonucleotide
  Antisense strand to SEQ ID NO: 1158974
uguuucccucagaaagccu

SEQ ID NO: 1158976 - RNA, 19 nt, Artificial Sequence
  Description of Artificial Sequence: Synthetic oligonucleotide
  Sense strand starting at position 2394 of SEQ ID NO: 916467
acaaguuagucacuugaca

SEQ ID NO: 1158977 - RNA, 19 nt, Artificial Sequence
  Description of Artificial Sequence: Synthetic oligonucleotide
  Antisense strand to SEQ ID NO: 1158976
ugucaagugacuaacuugu

SEQ ID NO: 1158978 - RNA, 19 nt, Artificial Sequence
  Description of Artificial Sequence: Synthetic oligonucleotide
  Sense strand starting at position 2461 of SEQ ID NO: 916467
gagggcacuucuguuugau

SEQ ID NO: 1158979 - RNA, 19 nt, Artificial Sequence
  Description of Artificial Sequence: Synthetic oligonucleotide
  Antisense strand to SEQ ID NO: 1158978
aucaaacagaagugcccuc

SEQ ID NO: 1158980 - RNA, 19 nt, Artificial Sequence
  Description of Artificial Sequence: Synthetic oligonucleotide
  Sense strand starting at position 2463 of SEQ ID NO: 916467
gggcacuucuguuugauuu

SEQ ID NO: 1158981 - RNA, 19 nt, Artificial Sequence
  Description of Artificial Sequence: Synthetic oligonucleotide
  Antisense strand to SEQ ID NO: 1158980
aaaucaaacagaagugccc

SEQ ID NO: 1158982 - RNA, 19 nt, Artificial Sequence
  Description of Artificial Sequence: Synthetic oligonucleotide
  Sense strand starting at position 2486 of SEQ ID NO: 916467
agaacuugugauugcagau

SEQ ID NO: 1158983 - RNA, 19 nt, Artificial Sequence
  Description of Artificial Sequence: Synthetic oligonucleotide
  Antisense strand to SEQ ID NO: 1158982
aucugcaaucacaaguucu

SEQ ID NO: 1158984 - RNA, 19 nt, Artificial Sequence
  Description of Artificial Sequence: Synthetic oligonucleotide
  Sense strand starting at position 2946 of SEQ ID NO: 916467
ggugacaaauuagcucaaa

SEQ ID NO: 1158985 - RNA, 19 nt, Artificial Sequence
  Description of Artificial Sequence: Synthetic oligonucleotide
  Antisense strand to SEQ ID NO: 1158984
uuugagcuaauuugucacc

SEQ ID NO: 1158986 - RNA, 19 nt, Artificial Sequence
  Description of Artificial Sequence: Synthetic oligonucleotide
  Sense strand starting at position 2947 of SEQ ID NO: 916467
gugacaaauuagcucaaag

SEQ ID NO: 1158987 - RNA, 19 nt, Artificial Sequence
  Description of Artificial Sequence: Synthetic oligonucleotide
  Antisense strand to SEQ ID NO: 1158986
cuuugagcuaauuugucac

SEQ ID NO: 1158988 - RNA, 19 nt, Artificial Sequence
  Description of Artificial Sequence: Synthetic oligonucleotide
  Sense strand starting at position 2999 of SEQ ID NO: 916467
uaugaagcauuagugauaa

SEQ ID NO: 1158989 - RNA, 19 nt, Artificial Sequence
  Description of Artificial Sequence: Synthetic oligonucleotide
  Antisense strand to SEQ ID NO: 1158988
uuaucacuaaugcuucaua

SEQ ID NO: 1158990 - RNA, 19 nt, Artificial Sequence
  Description of Artificial Sequence: Synthetic oligonucleotide
  Sense strand starting at position 3255 of SEQ ID NO: 916467
aguaguuaagacugaauag

SEQ ID NO: 1158991 - RNA, 19 nt, Artificial Sequence
  Description of Artificial Sequence: Synthetic oligonucleotide
  Antisense strand to SEQ ID NO: 1158990
cuauucagucuuaacuacu

SEQ ID NO: 1158992 - RNA, 19 nt, Artificial Sequence
  Description of Artificial Sequence: Synthetic oligonucleotide
  Sense strand starting at position 3423 of SEQ ID NO: 916467
ugcaaagacucagacauuu

SEQ ID NO: 1158993 - RNA, 19 nt, Artificial Sequence
  Description of Artificial Sequence: Synthetic oligonucleotide
  Antisense strand to SEQ ID NO: 1158992
aaaugucugagucuuugca

SEQ ID NO: 1158994 - RNA, 19 nt, Artificial Sequence
  Description of Artificial Sequence: Synthetic oligonucleotide
  Sense strand starting at position 3534 of SEQ ID NO: 916467
augagauuccauggcuauu

SEQ ID NO: 1158995 - RNA, 19 nt, Artificial Sequence
  Description of Artificial Sequence: Synthetic oligonucleotide
  Antisense strand to SEQ ID NO: 1158994
aauagccauggaaucucau

SEQ ID NO: 1158996 - RNA, 19 nt, Artificial Sequence
  Description of Artificial Sequence: Synthetic oligonucleotide
  Sense strand starting at position 3624 of SEQ ID NO: 916467
agucauauuaaguauaggu

SEQ ID NO: 1158997 - RNA, 19 nt, Artificial Sequence
  Description of Artificial Sequence: Synthetic oligonucleotide
  Antisense strand to SEQ ID NO: 1158996
accuauacuuaauaugacu

SEQ ID NO: 1158998 - RNA, 19 nt, Artificial Sequence
  Description of Artificial Sequence: Synthetic oligonucleotide
  Sense strand starting at position 3653 of SEQ ID NO: 916467
gcuauauaauucuuugaag

SEQ ID NO: 1158999 - RNA, 19 nt, Artificial Sequence
  Description of Artificial Sequence: Synthetic oligonucleotide
  Antisense strand to SEQ ID NO: 1158998
cuucaaagaauuauauagc

SEQ ID NO: 1159000 - RNA, 19 nt, Artificial Sequence
  Description of Artificial Sequence: Synthetic oligonucleotide
  Sense strand starting at position 3888 of SEQ ID NO: 916467
gagacagggucucuacuua

SEQ ID NO: 1159001 - RNA, 19 nt, Artificial Sequence
  Description of Artificial Sequence: Synthetic oligonucleotide
  Antisense strand to SEQ ID NO: 1159000
uaaguagagacccugucuc

SEQ ID NO: 1159002 - RNA, 19 nt, Artificial Sequence
  Description of Artificial Sequence: Synthetic oligonucleotide
  Sense strand starting at position 653 of SEQ ID NO: 916468
ccagguagucuaggaugau

SEQ ID NO: 1159003 - RNA, 19 nt, Artificial Sequence
  Description of Artificial Sequence: Synthetic oligonucleotide
  Antisense strand to SEQ ID NO: 1159002
aucauccuagacuaccugg

SEQ ID NO: 1159004 - RNA, 19 nt, Artificial Sequence
  Description of Artificial Sequence: Synthetic oligonucleotide
  Sense strand starting at position 656 of SEQ ID NO: 916468
gguagucuaggaugauuca

SEQ ID NO: 1159005 - RNA, 19 nt, Artificial Sequence
  Description of Artificial Sequence: Synthetic oligonucleotide
  Antisense strand to SEQ ID NO: 1159004
ugaaucauccuagacuacc

SEQ ID NO: 1159006 - RNA, 19 nt, Artificial Sequence
  Description of Artificial Sequence: Synthetic oligonucleotide
  Sense strand starting at position 750 of SEQ ID NO: 916468
cacauuagacuguggacau

SEQ ID NO: 1159007 - RNA, 19 nt, Artificial Sequence
  Description of Artificial Sequence: Synthetic oligonucleotide
  Antisense strand to SEQ ID NO: 1159006
auguccacagucuaaugug

SEQ ID NO: 1159008 - RNA, 19 nt, Artificial Sequence
  Description of Artificial Sequence: Synthetic oligonucleotide
  Sense strand starting at position 1447 of SEQ ID NO: 916468
ggauucuucugacucagca

SEQ ID NO: 1159009 - RNA, 19 nt, Artificial Sequence
  Description of Artificial Sequence: Synthetic oligonucleotide
  Antisense strand to SEQ ID NO: 1159008
ugcugagucagaagaaucc

SEQ ID NO: 1159010 - RNA, 19 nt, Artificial Sequence
  Description of Artificial Sequence: Synthetic oligonucleotide
  Sense strand starting at position 1473 of SEQ ID NO: 916468
agcaguaaccgucaagaag

SEQ ID NO: 1159011 - RNA, 19 nt, Artificial Sequence
  Description of Artificial Sequence: Synthetic oligonucleotide
  Antisense strand to SEQ ID NO: 1159010
cuucuugacgguuacugcu

SEQ ID NO: 1159012 - RNA, 19 nt, Artificial Sequence
  Description of Artificial Sequence: Synthetic oligonucleotide
  Sense strand starting at position 1668 of SEQ ID NO: 916468
acagauaaauucuggaaag

SEQ ID NO: 1159013 - RNA, 19 nt, Artificial Sequence
  Description of Artificial Sequence: Synthetic oligonucleotide
  Antisense strand to SEQ ID NO: 1159012
cuuuccagaauuuaucugu

SEQ ID NO: 1159014 - RNA, 19 nt, Artificial Sequence
  Description of Artificial Sequence: Synthetic oligonucleotide
  Sense strand starting at position 1669 of SEQ ID NO: 916468
cagauaaauucuggaaagg

SEQ ID NO: 1159015 - RNA, 19 nt, Artificial Sequence
  Description of Artificial Sequence: Synthetic oligonucleotide
  Antisense strand to SEQ ID NO: 1159014
ccuuuccagaauuuaucug

SEQ ID NO: 1159016 - RNA, 19 nt, Artificial Sequence
  Description of Artificial Sequence: Synthetic oligonucleotide
  Sense strand starting at position 1753 of SEQ ID NO: 916468
ucacauggacugugucuua

SEQ ID NO: 1159017 - RNA, 19 nt, Artificial Sequence
  Description of Artificial Sequence: Synthetic oligonucleotide
  Antisense strand to SEQ ID NO: 1159016
uaagacacaguccauguga

SEQ ID NO: 1159018 - RNA, 19 nt, Artificial Sequence
  Description of Artificial Sequence: Synthetic oligonucleotide
  Sense strand starting at position 1756 of SEQ ID NO: 916468
cauggacugugucuuacaa

SEQ ID NO: 1159019 - RNA, 19 nt, Artificial Sequence
  Description of Artificial Sequence: Synthetic oligonucleotide
  Antisense strand to SEQ ID NO: 1159018
uuguaagacacaguccaug

SEQ ID NO: 1159020 - RNA, 19 nt, Artificial Sequence
  Description of Artificial Sequence: Synthetic oligonucleotide
  Sense strand starting at position 1893 of SEQ ID NO: 916468
cuucucaaaggucaugauu

SEQ ID NO: 1159021 - RNA, 19 nt, Artificial Sequence
  Description of Artificial Sequence: Synthetic oligonucleotide
  Antisense strand to SEQ ID NO: 1159020
aaucaugaccuuugagaag

SEQ ID NO: 1159022 - RNA, 19 nt, Artificial Sequence
  Description of Artificial Sequence: Synthetic oligonucleotide
  Sense strand starting at position 1895 of SEQ ID NO: 916468
ucucaaaggucaugauuuc

SEQ ID NO: 1159023 - RNA, 19 nt, Artificial Sequence
  Description of Artificial Sequence: Synthetic oligonucleotide
  Antisense strand to SEQ ID NO: 1159022
gaaaucaugaccuuugaga

SEQ ID NO: 1159024 - RNA, 19 nt, Artificial Sequence
  Description of Artificial Sequence: Synthetic oligonucleotide
  Sense strand starting at position 2027 of SEQ ID NO: 916468
aaggaaucuuccucccgga

SEQ ID NO: 1159025 - RNA, 19 nt, Artificial Sequence
  Description of Artificial Sequence: Synthetic oligonucleotide
  Antisense strand to SEQ ID NO: 1159024
uccgggaggaagauuccuu

SEQ ID NO: 1159026 - RNA, 19 nt, Artificial Sequence
  Description of Artificial Sequence: Synthetic oligonucleotide
  Sense strand starting at position 2046 of SEQ ID NO: 916468
gagccaucuucugugcaug

SEQ ID NO: 1159027 - RNA, 19 nt, Artificial Sequence
  Description of Artificial Sequence: Synthetic oligonucleotide
  Antisense strand to SEQ ID NO: 1159026
caugcacagaagauggcuc

SEQ ID NO: 1159028 - RNA, 19 nt, Artificial Sequence
  Description of Artificial Sequence: Synthetic oligonucleotide
  Sense strand starting at position 2115 of SEQ ID NO: 916468
gucgcuguugcugagaaag

SEQ ID NO: 1159029 - RNA, 19 nt, Artificial Sequence
  Description of Artificial Sequence: Synthetic oligonucleotide
  Antisense strand to SEQ ID NO: 1159028
cuuucucagcaacagcgac

SEQ ID NO: 1159030 - RNA, 19 nt, Artificial Sequence
  Description of Artificial Sequence: Synthetic oligonucleotide
  Sense strand starting at position 2177 of SEQ ID NO: 916468
gcugcugauugaccaaaca

SEQ ID NO: 1159031 - RNA, 19 nt, Artificial Sequence
  Description of Artificial Sequence: Synthetic oligonucleotide
  Antisense strand to SEQ ID NO: 1159030
uguuuggucaaucagcagc

SEQ ID NO: 1159032 - RNA, 19 nt, Artificial Sequence
  Description of Artificial Sequence: Synthetic oligonucleotide
  Sense strand starting at position 2389 of SEQ ID NO: 916468
ccggaaacguuuccaaaug

SEQ ID NO: 1159033 - RNA, 19 nt, Artificial Sequence
  Description of Artificial Sequence: Synthetic oligonucleotide
  Antisense strand to SEQ ID NO: 1159032
cauuuggaaacguuuccgg

SEQ ID NO: 1159034 - RNA, 19 nt, Artificial Sequence
  Description of Artificial Sequence: Synthetic oligonucleotide
  Sense strand starting at position 2432 of SEQ ID NO: 916468
uguauuuauuuggaagcca

SEQ ID NO: 1159035 - RNA, 19 nt, Artificial Sequence
  Description of Artificial Sequence: Synthetic oligonucleotide
  Antisense strand to SEQ ID NO: 1159034
uggcuuccaaauaaauaca

SEQ ID NO: 1159036 - RNA, 19 nt, Artificial Sequence
  Description of Artificial Sequence: Synthetic oligonucleotide
  Sense strand starting at position 2461 of SEQ ID NO: 916468
gguggagagauguguaacu

SEQ ID NO: 1159037 - RNA, 19 nt, Artificial Sequence
  Description of Artificial Sequence: Synthetic oligonucleotide
  Antisense strand to SEQ ID NO: 1159036
aguuacacaucucuccacc

SEQ ID NO: 1159038 - RNA, 19 nt, Artificial Sequence
  Description of Artificial Sequence: Synthetic oligonucleotide
  Sense strand starting at position 2463 of SEQ ID NO: 916468
uggagagauguguaacugu

SEQ ID NO: 1159039 - RNA, 19 nt, Artificial Sequence
  Description of Artificial Sequence: Synthetic oligonucleotide
  Antisense strand to SEQ ID NO: 1159038
acaguuacacaucucucca

SEQ ID NO: 1159040 - RNA, 19 nt, Artificial Sequence
  Description of Artificial Sequence: Synthetic oligonucleotide
  Sense strand starting at position 2501 of SEQ ID NO: 916468
ucccgaagccauuaguuua

SEQ ID NO: 1159041 - RNA, 19 nt, Artificial Sequence
  Description of Artificial Sequence: Synthetic oligonucleotide
  Antisense strand to SEQ ID NO: 1159040
uaaacuaauggcuucggga

SEQ ID NO: 1159042 - RNA, 19 nt, Artificial Sequence
  Description of Artificial Sequence: Synthetic oligonucleotide
  Sense strand starting at position 2504 of SEQ ID NO: 916468
cgaagccauuaguuuaaua

SEQ ID NO: 1159043 - RNA, 19 nt, Artificial Sequence
  Description of Artificial Sequence: Synthetic oligonucleotide
  Antisense strand to SEQ ID NO: 1159042
uauuaaacuaauggcuucg

SEQ ID NO: 1159044 - RNA, 19 nt, Artificial Sequence
  Description of Artificial Sequence: Synthetic oligonucleotide
  Sense strand starting at position 2521 of SEQ ID NO: 916468
uagcaccauuuguggaaau

SEQ ID NO: 1159045 - RNA, 19 nt, Artificial Sequence
  Description of Artificial Sequence: Synthetic oligonucleotide
  Antisense strand to SEQ ID NO: 1159044
auuuccacaaauggugcua

SEQ ID NO: 1159046 - RNA, 19 nt, Artificial Sequence
  Description of Artificial Sequence: Synthetic oligonucleotide
  Sense strand starting at position 2522 of SEQ ID NO: 916468
agcaccauuuguggaaaua

SEQ ID NO: 1159047 - RNA, 19 nt, Artificial Sequence
  Description of Artificial Sequence: Synthetic oligonucleotide
  Antisense strand to SEQ ID NO: 1159046
uauuuccacaaauggugcu

SEQ ID NO: 1159048 - RNA, 19 nt, Artificial Sequence
  Description of Artificial Sequence: Synthetic oligonucleotide
  Sense strand starting at position 2639 of SEQ ID NO: 916468
ggacaagcuguguggacuu

SEQ ID NO: 1159049 - RNA, 19 nt, Artificial Sequence
  Description of Artificial Sequence: Synthetic oligonucleotide
  Antisense strand to SEQ ID NO: 1159048
aaguccacacagcuugucc

SEQ ID NO: 1159050 - RNA, 19 nt, Artificial Sequence
  Description of Artificial Sequence: Synthetic oligonucleotide
  Sense strand starting at position 2646 of SEQ ID NO: 916468
cuguguggacuuugaguca

SEQ ID NO: 1159051 - RNA, 19 nt, Artificial Sequence
  Description of Artificial Sequence: Synthetic oligonucleotide
  Antisense strand to SEQ ID NO: 1159050
ugacucaaaguccacacag

SEQ ID NO: 1159052 - RNA, 19 nt, Artificial Sequence
  Description of Artificial Sequence: Synthetic oligonucleotide
  Sense strand starting at position 2649 of SEQ ID NO: 916468
uguggacuuugagucagau

SEQ ID NO: 1159053 - RNA, 19 nt, Artificial Sequence
  Description of Artificial Sequence: Synthetic oligonucleotide
  Antisense strand to SEQ ID NO: 1159052
aucugacucaaaguccaca

SEQ ID NO: 1159054 - RNA, 19 nt, Artificial Sequence
  Description of Artificial Sequence: Synthetic oligonucleotide
  Sense strand starting at position 2724 of SEQ ID NO: 916468
gagagccuuugcucuguga

SEQ ID NO: 1159055 - RNA, 19 nt, Artificial Sequence
  Description of Artificial Sequence: Synthetic oligonucleotide
  Antisense strand to SEQ ID NO: 1159054
ucacagagcaaaggcucuc

SEQ ID NO: 1159056 - RNA, 19 nt, Artificial Sequence
  Description of Artificial Sequence: Synthetic oligonucleotide
  Sense strand starting at position 2726 of SEQ ID NO: 916468
gagccuuugcucugugaua

SEQ ID NO: 1159057 - RNA, 19 nt, Artificial Sequence
  Description of Artificial Sequence: Synthetic oligonucleotide
  Antisense strand to SEQ ID NO: 1159056
uaucacagagcaaaggcuc

SEQ ID NO: 1159058 - RNA, 19 nt, Artificial Sequence
  Description of Artificial Sequence: Synthetic oligonucleotide
  Sense strand starting at position 2733 of SEQ ID NO: 916468
ugcucugugauauguaagu

SEQ ID NO: 1159059 - RNA, 19 nt, Artificial Sequence
  Description of Artificial Sequence: Synthetic oligonucleotide
  Antisense strand to SEQ ID NO: 1159058
acuuacauaucacagagca

SEQ ID NO: 1159060 - RNA, 19 nt, Artificial Sequence
  Description of Artificial Sequence: Synthetic oligonucleotide
  Sense strand starting at position 2735 of SEQ ID NO: 916468
cucugugauauguaaguga

SEQ ID NO: 1159061 - RNA, 19 nt, Artificial Sequence
  Description of Artificial Sequence: Synthetic oligonucleotide
  Antisense strand to SEQ ID NO: 1159060
ucacuuacauaucacagag

SEQ ID NO: 1159062 - RNA, 19 nt, Artificial Sequence
  Description of Artificial Sequence: Synthetic oligonucleotide
  Sense strand starting at position 2738 of SEQ ID NO: 916468
ugugauauguaagugaaau

SEQ ID NO: 1159063 - RNA, 19 nt, Artificial Sequence
  Description of Artificial Sequence: Synthetic oligonucleotide
  Antisense strand to SEQ ID NO: 1159062
auuucacuuacauaucaca

SEQ ID NO: 1159064 - RNA, 19 nt, Artificial Sequence
  Description of Artificial Sequence: Synthetic oligonucleotide
  Sense strand starting at position 2739 of SEQ ID NO: 916468
gugauauguaagugaaaug

SEQ ID NO: 1159065 - RNA, 19 nt, Artificial Sequence
  Description of Artificial Sequence: Synthetic oligonucleotide
  Antisense strand to SEQ ID NO: 1159064
cauuucacuuacauaucac

SEQ ID NO: 1159066 - RNA, 19 nt, Artificial Sequence
  Description of Artificial Sequence: Synthetic oligonucleotide
  Sense strand starting at position 2751 of SEQ ID NO: 916468
ugaaaugcuagcugugaca

SEQ ID NO: 1159067 - RNA, 19 nt, Artificial Sequence
  Description of Artificial Sequence: Synthetic oligonucleotide
  Antisense strand to SEQ ID NO: 1159066
ugucacagcuagcauuuca

SEQ ID NO: 1159068 - RNA, 19 nt, Artificial Sequence
  Description of Artificial Sequence: Synthetic oligonucleotide
  Sense strand starting at position 2753 of SEQ ID NO: 916468
aaaugcuagcugugacacu

SEQ ID NO: 1159069 - RNA, 19 nt, Artificial Sequence
  Description of Artificial Sequence: Synthetic oligonucleotide
  Antisense strand to SEQ ID NO: 1159068
agugucacagcuagcauuu

SEQ ID NO: 1159070 - RNA, 19 nt, Artificial Sequence
  Description of Artificial Sequence: Synthetic oligonucleotide
  Sense strand starting at position 2824 of SEQ ID NO: 916468
ggucgucacaaggauuaaa

SEQ ID NO: 1159071 - RNA, 19 nt, Artificial Sequence
  Description of Artificial Sequence: Synthetic oligonucleotide
  Antisense strand to SEQ ID NO: 1159070
uuuaauccuugugacgacc

SEQ ID NO: 1159072 - RNA, 19 nt, Artificial Sequence
  Description of Artificial Sequence: Synthetic oligonucleotide
  Sense strand starting at position 2834 of SEQ ID NO: 916468
aggauuaaaugacaaagaa

SEQ ID NO: 1159073 - RNA, 19 nt, Artificial Sequence
  Description of Artificial Sequence: Synthetic oligonucleotide
  Antisense strand to SEQ ID NO: 1159072
uucuuugucauuuaauccu

SEQ ID NO: 1159074 - RNA, 19 nt, Artificial Sequence
  Description of Artificial Sequence: Synthetic oligonucleotide
  Sense strand starting at position 2873 of SEQ ID NO: 916468
gcucuugcugugccaugau

SEQ ID NO: 1159075 - RNA, 19 nt, Artificial Sequence
  Description of Artificial Sequence: Synthetic oligonucleotide
  Antisense strand to SEQ ID NO: 1159074
aucauggcacagcaagagc

SEQ ID NO: 1159076 - RNA, 19 nt, Artificial Sequence
  Description of Artificial Sequence: Synthetic oligonucleotide
  Sense strand starting at position 3271 of SEQ ID NO: 916468
gaguacuauuuggaagucu

SEQ ID NO: 1159077 - RNA, 19 nt, Artificial Sequence
  Description of Artificial Sequence: Synthetic oligonucleotide
  Antisense strand to SEQ ID NO: 1159076
agacuuccaaauaguacuc

SEQ ID NO: 1159078 - RNA, 19 nt, Artificial Sequence
  Description of Artificial Sequence: Synthetic oligonucleotide
  Sense strand starting at position 3652 of SEQ ID NO: 916468
ucugcuaggcuuuacacaa

SEQ ID NO: 1159079 - RNA, 19 nt, Artificial Sequence
  Description of Artificial Sequence: Synthetic oligonucleotide
  Antisense strand to SEQ ID NO: 1159078
uuguguaaagccuagcaga

SEQ ID NO: 1159080 - RNA, 19 nt, Artificial Sequence
  Description of Artificial Sequence: Synthetic oligonucleotide
  Sense strand starting at position 3764 of SEQ ID NO: 916468
cugggacucugucuuacaa

SEQ ID NO: 1159081 - RNA, 19 nt, Artificial Sequence
  Description of Artificial Sequence: Synthetic oligonucleotide
  Antisense strand to SEQ ID NO: 1159080
uuguaagacagagucccag

SEQ ID NO: 1159082 - RNA, 19 nt, Artificial Sequence
  Description of Artificial Sequence: Synthetic oligonucleotide
  Sense strand starting at position 17 of SEQ ID NO: 916469
ggcagacauuuccaccuca

SEQ ID NO: 1159083 - RNA, 19 nt, Artificial Sequence
  Description of Artificial Sequence: Synthetic oligonucleotide
  Antisense strand to SEQ ID NO: 1159082
ugagguggaaaugucugcc

SEQ ID NO: 1159084 - RNA, 19 nt, Artificial Sequence
  Description of Artificial Sequence: Synthetic oligonucleotide
  Sense strand starting at position 83 of SEQ ID NO: 916469
ggcugaggaccugaaugua

SEQ ID NO: 1159085 - RNA, 19 nt, Artificial Sequence
  Description of Artificial Sequence: Synthetic oligonucleotide
  Antisense strand to SEQ ID NO: 1159084
uacauucagguccucagcc

SEQ ID NO: 1159086 - RNA, 19 nt, Artificial Sequence
  Description of Artificial Sequence: Synthetic oligonucleotide
  Sense strand starting at position 129 of SEQ ID NO: 916469
ggacuucuuacaggguuga

SEQ ID NO: 1159087 - RNA, 19 nt, Artificial Sequence
  Description of Artificial Sequence: Synthetic oligonucleotide
  Antisense strand to SEQ ID NO: 1159086
ucaacccuguaagaagucc

SEQ ID NO: 1159088 - RNA, 19 nt, Artificial Sequence
  Description of Artificial Sequence: Synthetic oligonucleotide
  Sense strand starting at position 130 of SEQ ID NO: 916469
gacuucuuacaggguugau

SEQ ID NO: 1159089 - RNA, 19 nt, Artificial Sequence
  Description of Artificial Sequence: Synthetic oligonucleotide
  Antisense strand to SEQ ID NO: 1159088
aucaacccuguaagaaguc

SEQ ID NO: 1159090 - RNA, 19 nt, Artificial Sequence
  Description of Artificial Sequence: Synthetic oligonucleotide
  Sense strand starting at position 180 of SEQ ID NO: 916469
gagggaggacugugcauua

SEQ ID NO: 1159091 - RNA, 19 nt, Artificial Sequence
  Description of Artificial Sequence: Synthetic oligonucleotide
  Antisense strand to SEQ ID NO: 1159090
uaaugcacaguccucccuc

SEQ ID NO: 1159092 - RNA, 19 nt, Artificial Sequence
  Description of Artificial Sequence: Synthetic oligonucleotide
  Sense strand starting at position 185 of SEQ ID NO: 916469
aggacugugcauuacgaga

SEQ ID NO: 1159093 - RNA, 19 nt, Artificial Sequence
  Description of Artificial Sequence: Synthetic oligonucleotide
  Antisense strand to SEQ ID NO: 1159092
ucucguaaugcacaguccu

SEQ ID NO: 1159094 - RNA, 19 nt, Artificial Sequence
  Description of Artificial Sequence: Synthetic oligonucleotide
  Sense strand starting at position 207 of SEQ ID NO: 916469
cgggcugugagugguagaa

SEQ ID NO: 1159095 - RNA, 19 nt, Artificial Sequence
  Description of Artificial Sequence: Synthetic oligonucleotide
  Antisense strand to SEQ ID NO: 1159094
uucuaccacucacagcccg

SEQ ID NO: 1159096 - RNA, 19 nt, Artificial Sequence
  Description of Artificial Sequence: Synthetic oligonucleotide
  Sense strand starting at position 211 of SEQ ID NO: 916469
cugugagugguagaaccaa

SEQ ID NO: 1159097 - RNA, 19 nt, Artificial Sequence
  Description of Artificial Sequence: Synthetic oligonucleotide
  Antisense strand to SEQ ID NO: 1159096
uugguucuaccacucacag

SEQ ID NO: 1159098 - RNA, 19 nt, Artificial Sequence
  Description of Artificial Sequence: Synthetic oligonucleotide
  Sense strand starting at position 229 of SEQ ID NO: 916469
agaguccucuuccuagaaa

SEQ ID NO: 1159099 - RNA, 19 nt, Artificial Sequence
  Description of Artificial Sequence: Synthetic oligonucleotide
  Antisense strand to SEQ ID NO: 1159098
uuucuaggaagaggacucu

SEQ ID NO: 1159100 - RNA, 19 nt, Artificial Sequence
  Description of Artificial Sequence: Synthetic oligonucleotide
  Sense strand starting at position 334 of SEQ ID NO: 916469
aggaaauccugagccaugu

SEQ ID NO: 1159101 - RNA, 19 nt, Artificial Sequence
  Description of Artificial Sequence: Synthetic oligonucleotide
  Antisense strand to SEQ ID NO: 1159100
acauggcucaggauuuccu

SEQ ID NO: 1159102 - RNA, 19 nt, Artificial Sequence
  Description of Artificial Sequence: Synthetic oligonucleotide
  Sense strand starting at position 371 of SEQ ID NO: 916469
uguccauaacugggaugga

SEQ ID NO: 1159103 - RNA, 19 nt, Artificial Sequence
  Description of Artificial Sequence: Synthetic oligonucleotide
  Antisense strand to SEQ ID NO: 1159102
uccaucccaguuauggaca

SEQ ID NO: 1159104 - RNA, 19 nt, Artificial Sequence
  Description of Artificial Sequence: Synthetic oligonucleotide
  Sense strand starting at position 387 of SEQ ID NO: 916469
ggauauuuagcuggugucu

SEQ ID NO: 1159105 - RNA, 19 nt, Artificial Sequence
  Description of Artificial Sequence: Synthetic oligonucleotide
  Antisense strand to SEQ ID NO: 1159104
agacaccagcuaaauaucc

SEQ ID NO: 1159106 - RNA, 19 nt, Artificial Sequence
  Description of Artificial Sequence: Synthetic oligonucleotide
  Sense strand starting at position 462 of SEQ ID NO: 916469
ggaugaaugauacgcuuga

SEQ ID NO: 1159107 - RNA, 19 nt, Artificial Sequence
  Description of Artificial Sequence: Synthetic oligonucleotide
  Antisense strand to SEQ ID NO: 1159106
ucaagcguaucauucaucc

SEQ ID NO: 1159108 - RNA, 19 nt, Artificial Sequence
  Description of Artificial Sequence: Synthetic oligonucleotide
  Sense strand starting at position 528 of SEQ ID NO: 916469
ggcccuaaagcucagagaa

SEQ ID NO: 1159109 - RNA, 19 nt, Artificial Sequence
  Description of Artificial Sequence: Synthetic oligonucleotide
  Antisense strand to SEQ ID NO: 1159108
uucucugagcuuuagggcc

SEQ ID NO: 1159110 - RNA, 19 nt, Artificial Sequence
  Description of Artificial Sequence: Synthetic oligonucleotide
  Sense strand starting at position 665 of SEQ ID NO: 916469
uggaguccaccuugagaac

SEQ ID NO: 1159111 - RNA, 19 nt, Artificial Sequence
  Description of Artificial Sequence: Synthetic oligonucleotide
  Antisense strand to SEQ ID NO: 1159110
guucucaagguggacucca

SEQ ID NO: 1159112 - RNA, 19 nt, Artificial Sequence
  Description of Artificial Sequence: Synthetic oligonucleotide
  Sense strand starting at position 683 of SEQ ID NO: 916469
cugcaagggaaauguguuu

SEQ ID NO: 1159113 - RNA, 19 nt, Artificial Sequence
  Description of Artificial Sequence: Synthetic oligonucleotide
  Antisense strand to SEQ ID NO: 1159112
aaacacauuucccuugcag

SEQ ID NO: 1159114 - RNA, 19 nt, Artificial Sequence
  Description of Artificial Sequence: Synthetic oligonucleotide
  Sense strand starting at position 688 of SEQ ID NO: 916469
agggaaauguguuuagagg

SEQ ID NO: 1159115 - RNA, 19 nt, Artificial Sequence
  Description of Artificial Sequence: Synthetic oligonucleotide
  Antisense strand to SEQ ID NO: 1159114
ccucuaaacacauuucccu

SEQ ID NO: 1159116 - RNA, 19 nt, Artificial Sequence
  Description of Artificial Sequence: Synthetic oligonucleotide
  Sense strand starting at position 690 of SEQ ID NO: 916469
ggaaauguguuuagaggga

SEQ ID NO: 1159117 - RNA, 19 nt, Artificial Sequence
  Description of Artificial Sequence: Synthetic oligonucleotide
  Antisense strand to SEQ ID NO: 1159116
ucccucuaaacacauuucc

SEQ ID NO: 1159118 - RNA, 19 nt, Artificial Sequence
  Description of Artificial Sequence: Synthetic oligonucleotide
  Sense strand starting at position 694 of SEQ ID NO: 916469
auguguuuagagggaugca

SEQ ID NO: 1159119 - RNA, 19 nt, Artificial Sequence
  Description of Artificial Sequence: Synthetic oligonucleotide
  Antisense strand to SEQ ID NO: 1159118
ugcaucccucuaaacacau

SEQ ID NO: 1159120 - RNA, 19 nt, Artificial Sequence
  Description of Artificial Sequence: Synthetic oligonucleotide
  Sense strand starting at position 966 of SEQ ID NO: 916469
gaguuugaggaguguuugu

SEQ ID NO: 1159121 - RNA, 19 nt, Artificial Sequence
  Description of Artificial Sequence: Synthetic oligonucleotide
  Antisense strand to SEQ ID NO: 1159120
acaaacacuccucaaacuc

SEQ ID NO: 1159122 - RNA, 19 nt, Artificial Sequence
  Description of Artificial Sequence: Synthetic oligonucleotide
  Sense strand starting at position 970 of SEQ ID NO: 916469
uugaggaguguuuguggga

SEQ ID NO: 1159123 - RNA, 19 nt, Artificial Sequence
  Description of Artificial Sequence: Synthetic oligonucleotide
  Antisense strand to SEQ ID NO: 1159122
ucccacaaacacuccucaa

SEQ ID NO: 1159124 - RNA, 19 nt, Artificial Sequence
  Description of Artificial Sequence: Synthetic oligonucleotide
  Sense strand starting at position 971 of SEQ ID NO: 916469
ugaggaguguuugugggaa

SEQ ID NO: 1159125 - RNA, 19 nt, Artificial Sequence
  Description of Artificial Sequence: Synthetic oligonucleotide
  Antisense strand to SEQ ID NO: 1159124
uucccacaaacacuccuca

SEQ ID NO: 1159126 - RNA, 19 nt, Artificial Sequence
  Description of Artificial Sequence: Synthetic oligonucleotide
  Sense strand starting at position 1212 of SEQ ID NO: 916469
acaggugcucucugacuaa

SEQ ID NO: 1159127 - RNA, 19 nt, Artificial Sequence
  Description of Artificial Sequence: Synthetic oligonucleotide
  Antisense strand to SEQ ID NO: 1159126
uuagucagagagcaccugu

SEQ ID NO: 1159128 - RNA, 19 nt, Artificial Sequence
  Description of Artificial Sequence: Synthetic oligonucleotide
  Sense strand starting at position 1215 of SEQ ID NO: 916469
ggugcucucugacuaaucu

SEQ ID NO: 1159129 - RNA, 19 nt, Artificial Sequence
  Description of Artificial Sequence: Synthetic oligonucleotide
  Antisense strand to SEQ ID NO: 1159128
agauuagucagagagcacc

SEQ ID NO: 1159130 - RNA, 19 nt, Artificial Sequence
  Description of Artificial Sequence: Synthetic oligonucleotide
  Sense strand starting at position 1216 of SEQ ID NO: 916469
gugcucucugacuaaucuu

SEQ ID NO: 1159131 - RNA, 19 nt, Artificial Sequence
  Description of Artificial Sequence: Synthetic oligonucleotide
  Antisense strand to SEQ ID NO: 1159130
aagauuagucagagagcac

SEQ ID NO: 1159132 - RNA, 19 nt, Artificial Sequence
  Description of Artificial Sequence: Synthetic oligonucleotide
  Sense strand starting at position 1342 of SEQ ID NO: 916469
guggagaugguggguauau

SEQ ID NO: 1159133 - RNA, 19 nt, Artificial Sequence
  Description of Artificial Sequence: Synthetic oligonucleotide
  Antisense strand to SEQ ID NO: 1159132
auauacccaccaucuccac

SEQ ID NO: 1159134 - RNA, 19 nt, Artificial Sequence
  Description of Artificial Sequence: Synthetic oligonucleotide
  Sense strand starting at position 1424 of SEQ ID NO: 916469
ucucuuccugaggaugagu

SEQ ID NO: 1159135 - RNA, 19 nt, Artificial Sequence
  Description of Artificial Sequence: Synthetic oligonucleotide
  Antisense strand to SEQ ID NO: 1159134
acucauccucaggaagaga

SEQ ID NO: 1159136 - RNA, 19 nt, Artificial Sequence
  Description of Artificial Sequence: Synthetic oligonucleotide
  Sense strand starting at position 2240 of SEQ ID NO: 916469
ccuuucuacaucggagaga

SEQ ID NO: 1159137 - RNA, 19 nt, Artificial Sequence
  Description of Artificial Sequence: Synthetic oligonucleotide
  Antisense strand to SEQ ID NO: 1159136
ucucuccgauguagaaagg

SEQ ID NO: 1159138 - RNA, 19 nt, Artificial Sequence
  Description of Artificial Sequence: Synthetic oligonucleotide
  Sense strand starting at position 2333 of SEQ ID NO: 916469
ccuugauugucaccacuca

SEQ ID NO: 1159139 - RNA, 19 nt, Artificial Sequence
  Description of Artificial Sequence: Synthetic oligonucleotide
  Antisense strand to SEQ ID NO: 1159138
ugaguggugacaaucaagg

SEQ ID NO: 1159140 - RNA, 19 nt, Artificial Sequence
  Description of Artificial Sequence: Synthetic oligonucleotide
  Sense strand starting at position 2401 of SEQ ID NO: 916469
uccaguguuccuggaugac

SEQ ID NO: 1159141 - RNA, 19 nt, Artificial Sequence
  Description of Artificial Sequence: Synthetic oligonucleotide
  Antisense strand to SEQ ID NO: 1159140
gucauccaggaacacugga

SEQ ID NO: 1159142 - RNA, 19 nt, Artificial Sequence
  Description of Artificial Sequence: Synthetic oligonucleotide
  Sense strand starting at position 2434 of SEQ ID NO: 916469
ucaagauuccucuggaccu

SEQ ID NO: 1159143 - RNA, 19 nt, Artificial Sequence
  Description of Artificial Sequence: Synthetic oligonucleotide
  Antisense strand to SEQ ID NO: 1159142
agguccagaggaaucuuga

SEQ ID NO: 1159144 - RNA, 19 nt, Artificial Sequence
  Description of Artificial Sequence: Synthetic oligonucleotide
  Sense strand starting at position 2660 of SEQ ID NO: 916469
uuaaucuuaggcggccaaa

SEQ ID NO: 1159145 - RNA, 19 nt, Artificial Sequence
  Description of Artificial Sequence: Synthetic oligonucleotide
  Antisense strand to SEQ ID NO: 1159144
uuuggccgccuaagauuaa

SEQ ID NO: 1159146 - RNA, 19 nt, Artificial Sequence
  Description of Artificial Sequence: Synthetic oligonucleotide
  Sense strand starting at position 2743 of SEQ ID NO: 916469
ggugccuaguccuucuaau

SEQ ID NO: 1159147 - RNA, 19 nt, Artificial Sequence
  Description of Artificial Sequence: Synthetic oligonucleotide
  Antisense strand to SEQ ID NO: 1159146
auuagaaggacuaggcacc

SEQ ID NO: 1159148 - RNA, 19 nt, Artificial Sequence
  Description of Artificial Sequence: Synthetic oligonucleotide
  Sense strand starting at position 2801 of SEQ ID NO: 916469
agguuuccucgccaguuaa

SEQ ID NO: 1159149 - RNA, 19 nt, Artificial Sequence
  Description of Artificial Sequence: Synthetic oligonucleotide
  Antisense strand to SEQ ID NO: 1159148
uuaacuggcgaggaaaccu

SEQ ID NO: 1159150 - RNA, 19 nt, Artificial Sequence
  Description of Artificial Sequence: Synthetic oligonucleotide
  Sense strand starting at position 2964 of SEQ ID NO: 916469
cugucugagacggacuuaa

SEQ ID NO: 1159151 - RNA, 19 nt, Artificial Sequence
  Description of Artificial Sequence: Synthetic oligonucleotide
  Antisense strand to SEQ ID NO: 1159150
uuaaguccgucucagacag

SEQ ID NO: 1159152 - RNA, 19 nt, Artificial Sequence
  Description of Artificial Sequence: Synthetic oligonucleotide
  Sense strand starting at position 3083 of SEQ ID NO: 916469
gcagccucuccggaccaau

SEQ ID NO: 1159153 - RNA, 19 nt, Artificial Sequence
  Description of Artificial Sequence: Synthetic oligonucleotide
  Antisense strand to SEQ ID NO: 1159152
auugguccggagaggcugc

SEQ ID NO: 1159154 - RNA, 19 nt, Artificial Sequence
  Description of Artificial Sequence: Synthetic oligonucleotide
  Sense strand starting at position 3201 of SEQ ID NO: 916469
aaguaaucgcaaugggagu

SEQ ID NO: 1159155 - RNA, 19 nt, Artificial Sequence
  Description of Artificial Sequence: Synthetic oligonucleotide
  Antisense strand to SEQ ID NO: 1159154
acucccauugcgauuacuu

SEQ ID NO: 1159156 - RNA, 19 nt, Artificial Sequence
  Description of Artificial Sequence: Synthetic oligonucleotide
  Sense strand starting at position 3202 of SEQ ID NO: 916469
aguaaucgcaaugggagua

SEQ ID NO: 1159157 - RNA, 19 nt, Artificial Sequence
  Description of Artificial Sequence: Synthetic oligonucleotide
  Antisense strand to SEQ ID NO: 1159156
uacucccauugcgauuacu

SEQ ID NO: 1159158 - RNA, 19 nt, Artificial Sequence
  Description of Artificial Sequence: Synthetic oligonucleotide
  Sense strand starting at position 3798 of SEQ ID NO: 916469
cuaggugagccgucucgua

SEQ ID NO: 1159159 - RNA, 19 nt, Artificial Sequence
  Description of Artificial Sequence: Synthetic oligonucleotide
  Antisense strand to SEQ ID NO: 1159158
uacgagacggcucaccuag

SEQ ID NO: 1159160 - RNA, 19 nt, Artificial Sequence
  Description of Artificial Sequence: Synthetic oligonucleotide
  Sense strand starting at position 3818 of SEQ ID NO: 916469
cgauuccuucagggcgaaa

SEQ ID NO: 1159161 - RNA, 19 nt, Artificial Sequence
  Description of Artificial Sequence: Synthetic oligonucleotide
  Antisense strand to SEQ ID NO: 1159160
uuucgcccugaaggaaucg

SEQ ID NO: 1159162 - RNA, 19 nt, Artificial Sequence
  Description of Artificial Sequence: Synthetic oligonucleotide
  Sense strand starting at position 423 of SEQ ID NO: 916470
ccuggucuuccuuaaugua

SEQ ID NO: 1159163 - RNA, 19 nt, Artificial Sequence
  Description of Artificial Sequence: Synthetic oligonucleotide
  Antisense strand to SEQ ID NO: 1159162
uacauuaaggaagaccagg

SEQ ID NO: 1159164 - RNA, 19 nt, Artificial Sequence
  Description of Artificial Sequence: Synthetic oligonucleotide
  Sense strand starting at position 462 of SEQ ID NO: 916470
ccuuuaaaggguuaaguuu

SEQ ID NO: 1159165 - RNA, 19 nt, Artificial Sequence
  Description of Artificial Sequence: Synthetic oligonucleotide
  Antisense strand to SEQ ID NO: 1159164
aaacuuaacccuuuaaagg

SEQ ID NO: 1159166 - RNA, 19 nt, Artificial Sequence
  Description of Artificial Sequence: Synthetic oligonucleotide
  Sense strand starting at position 469 of SEQ ID NO: 916470
aggguuaaguuucuuugga

SEQ ID NO: 1159167 - RNA, 19 nt, Artificial Sequence
  Description of Artificial Sequence: Synthetic oligonucleotide
  Antisense strand to SEQ ID NO: 1159166
uccaaagaaacuuaacccu

SEQ ID NO: 1159168 - RNA, 19 nt, Artificial Sequence
  Description of Artificial Sequence: Synthetic oligonucleotide
  Sense strand starting at position 470 of SEQ ID NO: 916470
ggguuaaguuucuuuggaa

SEQ ID NO: 1159169 - RNA, 19 nt, Artificial Sequence
  Description of Artificial Sequence: Synthetic oligonucleotide
  Antisense strand to SEQ ID NO: 1159168
uuccaaagaaacuuaaccc

SEQ ID NO: 1159170 - RNA, 19 nt, Artificial Sequence
  Description of Artificial Sequence: Synthetic oligonucleotide
  Sense strand starting at position 471 of SEQ ID NO: 916470
gguuaaguuucuuuggaau

SEQ ID NO: 1159171 - RNA, 19 nt, Artificial Sequence
  Description of Artificial Sequence: Synthetic oligonucleotide
  Antisense strand to SEQ ID NO: 1159170
auuccaaagaaacuuaacc

SEQ ID NO: 1159172 - RNA, 19 nt, Artificial Sequence
  Description of Artificial Sequence: Synthetic oligonucleotide
  Sense strand starting at position 559 of SEQ ID NO: 916470
acuaguaacugucuugaag

SEQ ID NO: 1159173 - RNA, 19 nt, Artificial Sequence
  Description of Artificial Sequence: Synthetic oligonucleotide
  Antisense strand to SEQ ID NO: 1159172
cuucaagacaguuacuagu

SEQ ID NO: 1159174 - RNA, 19 nt, Artificial Sequence
  Description of Artificial Sequence: Synthetic oligonucleotide
  Sense strand starting at position 598 of SEQ ID NO: 916470
ccaauagaugccuguccuu

SEQ ID NO: 1159175 - RNA, 19 nt, Artificial Sequence
  Description of Artificial Sequence: Synthetic oligonucleotide
  Antisense strand to SEQ ID NO: 1159174
aaggacaggcaucuauugg

SEQ ID NO: 1159176 - RNA, 19 nt, Artificial Sequence
  Description of Artificial Sequence: Synthetic oligonucleotide
  Sense strand starting at position 685 of SEQ ID NO: 916470
aacuuuaagcgucaauguu

SEQ ID NO: 1159177 - RNA, 19 nt, Artificial Sequence
  Description of Artificial Sequence: Synthetic oligonucleotide
  Antisense strand to SEQ ID NO: 1159176
aacauugacgcuuaaaguu

SEQ ID NO: 1159178 - RNA, 19 nt, Artificial Sequence
  Description of Artificial Sequence: Synthetic oligonucleotide
  Sense strand starting at position 691 of SEQ ID NO: 916470
aagcgucaauguuuaauuu

SEQ ID NO: 1159179 - RNA, 19 nt, Artificial Sequence
  Description of Artificial Sequence: Synthetic oligonucleotide
  Antisense strand to SEQ ID NO: 1159178
aaauuaaacauugacgcuu

SEQ ID NO: 1159180 - RNA, 19 nt, Artificial Sequence
  Description of Artificial Sequence: Synthetic oligonucleotide
  Sense strand starting at position 731 of SEQ ID NO: 916470
uacagcugucaagacagau

SEQ ID NO: 1159181 - RNA, 19 nt, Artificial Sequence
  Description of Artificial Sequence: Synthetic oligonucleotide
  Antisense strand to SEQ ID NO: 1159180
aucugucuugacagcugua

SEQ ID NO: 1159182 - RNA, 19 nt, Artificial Sequence
  Description of Artificial Sequence: Synthetic oligonucleotide
  Sense strand starting at position 860 of SEQ ID NO: 916470
uugguuuaagugcaguuaa

SEQ ID NO: 1159183 - RNA, 19 nt, Artificial Sequence
  Description of Artificial Sequence: Synthetic oligonucleotide
  Antisense strand to SEQ ID NO: 1159182
uuaacugcacuuaaaccaa

SEQ ID NO: 1159184 - RNA, 19 nt, Artificial Sequence
  Description of Artificial Sequence: Synthetic oligonucleotide
  Sense strand starting at position 1086 of SEQ ID NO: 916470
cuccaaguucuguagacca

SEQ ID NO: 1159185 - RNA, 19 nt, Artificial Sequence
  Description of Artificial Sequence: Synthetic oligonucleotide
  Antisense strand to SEQ ID NO: 1159184
uggucuacagaacuuggag

SEQ ID NO: 1159186 - RNA, 19 nt, Artificial Sequence
  Description of Artificial Sequence: Synthetic oligonucleotide
  Sense strand starting at position 1137 of SEQ ID NO: 916470
gaucgaaacguguaguagu

SEQ ID NO: 1159187 - RNA, 19 nt, Artificial Sequence
  Description of Artificial Sequence: Synthetic oligonucleotide
  Antisense strand to SEQ ID NO: 1159186
acuacuacacguuucgauc

SEQ ID NO: 1159188 - RNA, 19 nt, Artificial Sequence
  Description of Artificial Sequence: Synthetic oligonucleotide
  Sense strand starting at position 2448 of SEQ ID NO: 916470
gcaguagcagcucuguuua

SEQ ID NO: 1159189 - RNA, 19 nt, Artificial Sequence
  Description of Artificial Sequence: Synthetic oligonucleotide
  Antisense strand to SEQ ID NO: 1159188
uaaacagagcugcuacugc

SEQ ID NO: 1159190 - RNA, 19 nt, Artificial Sequence
  Description of Artificial Sequence: Synthetic oligonucleotide
  Sense strand starting at position 2474 of SEQ ID NO: 916470
uuaaccuuacguggaguua

SEQ ID NO: 1159191 - RNA, 19 nt, Artificial Sequence
  Description of Artificial Sequence: Synthetic oligonucleotide
  Antisense strand to SEQ ID NO: 1159190
uaacuccacguaagguuaa

SEQ ID NO: 1159192 - RNA, 19 nt, Artificial Sequence
  Description of Artificial Sequence: Synthetic oligonucleotide
  Sense strand starting at position 2475 of SEQ ID NO: 916470
uaaccuuacguggaguuau

SEQ ID NO: 1159193 - RNA, 19 nt, Artificial Sequence
  Description of Artificial Sequence: Synthetic oligonucleotide
  Antisense strand to SEQ ID NO: 1159192
auaacuccacguaagguua

SEQ ID NO: 1159194 - RNA, 19 nt, Artificial Sequence
  Description of Artificial Sequence: Synthetic oligonucleotide
  Sense strand starting at position 2485 of SEQ ID NO: 916470
uggaguuauuuccugcauu

SEQ ID NO: 1159195 - RNA, 19 nt, Artificial Sequence
  Description of Artificial Sequence: Synthetic oligonucleotide
  Antisense strand to SEQ ID NO: 1159194
aaugcaggaaauaacucca

SEQ ID NO: 1159196 - RNA, 19 nt, Artificial Sequence
  Description of Artificial Sequence: Synthetic oligonucleotide
  Sense strand starting at position 2486 of SEQ ID NO: 916470
ggaguuauuuccugcauuu

SEQ ID NO: 1159197 - RNA, 19 nt, Artificial Sequence
  Description of Artificial Sequence: Synthetic oligonucleotide
  Antisense strand to SEQ ID NO: 1159196
aaaugcaggaaauaacucc

SEQ ID NO: 1159198 - RNA, 19 nt, Artificial Sequence
  Description of Artificial Sequence: Synthetic oligonucleotide
  Sense strand starting at position 2620 of SEQ ID NO: 916470
ccgagaaguggucaagcua

SEQ ID NO: 1159199 - RNA, 19 nt, Artificial Sequence
  Description of Artificial Sequence: Synthetic oligonucleotide
  Antisense strand to SEQ ID NO: 1159198
uagcuugaccacuucucgg

SEQ ID NO: 1159200 - RNA, 19 nt, Artificial Sequence
  Description of Artificial Sequence: Synthetic oligonucleotide
  Sense strand starting at position 2708 of SEQ ID NO: 916470
ugacuaaucgucugucaau

SEQ ID NO: 1159201 - RNA, 19 nt, Artificial Sequence
  Description of Artificial Sequence: Synthetic oligonucleotide
  Antisense strand to SEQ ID NO: 1159200
auugacagacgauuaguca

SEQ ID NO: 1159202 - RNA, 19 nt, Artificial Sequence
  Description of Artificial Sequence: Synthetic oligonucleotide
  Sense strand starting at position 2709 of SEQ ID NO: 916470
gacuaaucgucugucaaug

SEQ ID NO: 1159203 - RNA, 19 nt, Artificial Sequence
  Description of Artificial Sequence: Synthetic oligonucleotide
  Antisense strand to SEQ ID NO: 1159202
cauugacagacgauuaguc

SEQ ID NO: 1159204 - RNA, 19 nt, Artificial Sequence
  Description of Artificial Sequence: Synthetic oligonucleotide
  Sense strand starting at position 2741 of SEQ ID NO: 916470
guauuaauugcacaucagu

SEQ ID NO: 1159205 - RNA, 19 nt, Artificial Sequence
  Description of Artificial Sequence: Synthetic oligonucleotide
  Antisense strand to SEQ ID NO: 1159204
acugaugugcaauuaauac

SEQ ID NO: 1159206 - RNA, 19 nt, Artificial Sequence
  Description of Artificial Sequence: Synthetic oligonucleotide
  Sense strand starting at position 2752 of SEQ ID NO: 916470
acaucaguaugugccaaau

SEQ ID NO: 1159207 - RNA, 19 nt, Artificial Sequence
  Description of Artificial Sequence: Synthetic oligonucleotide
  Antisense strand to SEQ ID NO: 1159206
auuuggcacauacugaugu

SEQ ID NO: 1159208 - RNA, 19 nt, Artificial Sequence
  Description of Artificial Sequence: Synthetic oligonucleotide
  Sense strand starting at position 2932 of SEQ ID NO: 916470
uucguauuagaugauuaag

SEQ ID NO: 1159209 - RNA, 19 nt, Artificial Sequence
  Description of Artificial Sequence: Synthetic oligonucleotide
  Antisense strand to SEQ ID NO: 1159208
cuuaaucaucuaauacgaa

SEQ ID NO: 1159210 - RNA, 19 nt, Artificial Sequence
  Description of Artificial Sequence: Synthetic oligonucleotide
  Sense strand starting at position 2934 of SEQ ID NO: 916470
cguauuagaugauuaagga

SEQ ID NO: 1159211 - RNA, 19 nt, Artificial Sequence
  Description of Artificial Sequence: Synthetic oligonucleotide
  Antisense strand to SEQ ID NO: 1159210
uccuuaaucaucuaauacg

SEQ ID NO: 1159212 - RNA, 19 nt, Artificial Sequence
  Description of Artificial Sequence: Synthetic oligonucleotide
  Sense strand starting at position 2995 of SEQ ID NO: 916470
augagaaagggcuggcuau

SEQ ID NO: 1159213 - RNA, 19 nt, Artificial Sequence
  Description of Artificial Sequence: Synthetic oligonucleotide
  Antisense strand to SEQ ID NO: 1159212
auagccagcccuuucucau

SEQ ID NO: 1159214 - RNA, 19 nt, Artificial Sequence
  Description of Artificial Sequence: Synthetic oligonucleotide
  Sense strand starting at position 2996 of SEQ ID NO: 916470
ugagaaagggcuggcuauu

SEQ ID NO: 1159215 - RNA, 19 nt, Artificial Sequence
  Description of Artificial Sequence: Synthetic oligonucleotide
  Antisense strand to SEQ ID NO: 1159214
aauagccagcccuuucuca

SEQ ID NO: 1159216 - RNA, 19 nt, Artificial Sequence
  Description of Artificial Sequence: Synthetic oligonucleotide
  Sense strand starting at position 3090 of SEQ ID NO: 916470
cagcaagaaggucauugua

SEQ ID NO: 1159217 - RNA, 19 nt, Artificial Sequence
  Description of Artificial Sequence: Synthetic oligonucleotide
  Antisense strand to SEQ ID NO: 1159216
uacaaugaccuucuugcug

SEQ ID NO: 1159218 - RNA, 19 nt, Artificial Sequence
  Description of Artificial Sequence: Synthetic oligonucleotide
  Sense strand starting at position 3111 of SEQ ID NO: 916470
uggaguagaucgaguagga

SEQ ID NO: 1159219 - RNA, 19 nt, Artificial Sequence
  Description of Artificial Sequence: Synthetic oligonucleotide
  Antisense strand to SEQ ID NO: 1159218
uccuacucgaucuacucca

SEQ ID NO: 1159220 - RNA, 19 nt, Artificial Sequence
  Description of Artificial Sequence: Synthetic oligonucleotide
  Sense strand starting at position 3134 of SEQ ID NO: 916470
acugauaaagggugagguu

SEQ ID NO: 1159221 - RNA, 19 nt, Artificial Sequence
  Description of Artificial Sequence: Synthetic oligonucleotide
  Antisense strand to SEQ ID NO: 1159220
aaccucacccuuuaucagu

SEQ ID NO: 1159222 - RNA, 19 nt, Artificial Sequence
  Description of Artificial Sequence: Synthetic oligonucleotide
  Sense strand starting at position 3441 of SEQ ID NO: 916470
ucacucugcuuuguagaga

SEQ ID NO: 1159223 - RNA, 19 nt, Artificial Sequence
  Description of Artificial Sequence: Synthetic oligonucleotide
  Antisense strand to SEQ ID NO: 1159222
ucucuacaaagcagaguga

SEQ ID NO: 1159224 - RNA, 19 nt, Artificial Sequence
  Description of Artificial Sequence: Synthetic oligonucleotide
  Sense strand starting at position 3444 of SEQ ID NO: 916470
cucugcuuuguagagaaua

SEQ ID NO: 1159225 - RNA, 19 nt, Artificial Sequence
  Description of Artificial Sequence: Synthetic oligonucleotide
  Antisense strand to SEQ ID NO: 1159224
uauucucuacaaagcagag

SEQ ID NO: 1159226 - RNA, 19 nt, Artificial Sequence
  Description of Artificial Sequence: Synthetic oligonucleotide
  Sense strand starting at position 3490 of SEQ ID NO: 916470
gagcuauuaggaggcuauu

SEQ ID NO: 1159227 - RNA, 19 nt, Artificial Sequence
  Description of Artificial Sequence: Synthetic oligonucleotide
  Antisense strand to SEQ ID NO: 1159226
aauagccuccuaauagcuc

SEQ ID NO: 1159228 - RNA, 19 nt, Artificial Sequence
  Description of Artificial Sequence: Synthetic oligonucleotide
  Sense strand starting at position 3503 of SEQ ID NO: 916470
gcuauuggagaauaaugca

SEQ ID NO: 1159229 - RNA, 19 nt, Artificial Sequence
  Description of Artificial Sequence: Synthetic oligonucleotide
  Antisense strand to SEQ ID NO: 1159228
ugcauuauucuccaauagc

SEQ ID NO: 1159230 - RNA, 19 nt, Artificial Sequence
  Description of Artificial Sequence: Synthetic oligonucleotide
  Sense strand starting at position 3528 of SEQ ID NO: 916470
agauuauuacacugucuga

SEQ ID NO: 1159231 - RNA, 19 nt, Artificial Sequence
  Description of Artificial Sequence: Synthetic oligonucleotide
  Antisense strand to SEQ ID NO: 1159230
ucagacaguguaauaaucu

SEQ ID NO: 1159232 - RNA, 19 nt, Artificial Sequence
  Description of Artificial Sequence: Synthetic oligonucleotide
  Sense strand starting at position 3559 of SEQ ID NO: 916470
gcgguaaagguguagagaa

SEQ ID NO: 1159233 - RNA, 19 nt, Artificial Sequence
  Description of Artificial Sequence: Synthetic oligonucleotide
  Antisense strand to SEQ ID NO: 1159232
uucucuacaccuuuaccgc

SEQ ID NO: 1159234 - RNA, 19 nt, Artificial Sequence
  Description of Artificial Sequence: Synthetic oligonucleotide
  Sense strand starting at position 3560 of SEQ ID NO: 916470
cgguaaagguguagagaag

SEQ ID NO: 1159235 - RNA, 19 nt, Artificial Sequence
  Description of Artificial Sequence: Synthetic oligonucleotide
  Antisense strand to SEQ ID NO: 1159234
cuucucuacaccuuuaccg

SEQ ID NO: 1159236 - RNA, 19 nt, Artificial Sequence
  Description of Artificial Sequence: Synthetic oligonucleotide
  Sense strand starting at position 3751 of SEQ ID NO: 916470
gagauugggucucuccaca

SEQ ID NO: 1159237 - RNA, 19 nt, Artificial Sequence
  Description of Artificial Sequence: Synthetic oligonucleotide
  Antisense strand to SEQ ID NO: 1159236
uguggagagacccaaucuc

SEQ ID NO: 1159238 - RNA, 19 nt, Artificial Sequence
  Description of Artificial Sequence: Synthetic oligonucleotide
  Sense strand starting at position 3856 of SEQ ID NO: 916470
cgugccuggcugagaagau

SEQ ID NO: 1159239 - RNA, 19 nt, Artificial Sequence
  Description of Artificial Sequence: Synthetic oligonucleotide
  Antisense strand to SEQ ID NO: 1159238
aucuucucagccaggcacg

SEQ ID NO: 1159240 - RNA, 19 nt, Artificial Sequence
  Description of Artificial Sequence: Synthetic oligonucleotide
  Sense strand starting at position 3894 of SEQ ID NO: 916470
gagguaacauugucaggac

SEQ ID NO: 1159241 - RNA, 19 nt, Artificial Sequence
  Description of Artificial Sequence: Synthetic oligonucleotide
  Antisense strand to SEQ ID NO: 1159240
guccugacaauguuaccuc

SEQ ID NO: 1159242 - RNA, 19 nt, Artificial Sequence
  Description of Artificial Sequence: Synthetic oligonucleotide
  Sense strand starting at position 336 of SEQ ID NO: 916471
agaagcuucccuuggagau

SEQ ID NO: 1159243 - RNA, 19 nt, Artificial Sequence
  Description of Artificial Sequence: Synthetic oligonucleotide
  Antisense strand to SEQ ID NO: 1159242
aucuccaagggaagcuucu

SEQ ID NO: 1159244 - RNA, 19 nt, Artificial Sequence
  Description of Artificial Sequence: Synthetic oligonucleotide
  Sense strand starting at position 337 of SEQ ID NO: 916471
gaagcuucccuuggagauc

SEQ ID NO: 1159245 - RNA, 19 nt, Artificial Sequence
  Description of Artificial Sequence: Synthetic oligonucleotide
  Antisense strand to SEQ ID NO: 1159244
gaucuccaagggaagcuuc

SEQ ID NO: 1159246 - RNA, 19 nt, Artificial Sequence
  Description of Artificial Sequence: Synthetic oligonucleotide
  Sense strand starting at position 439 of SEQ ID NO: 916471
ccuagaauuugggaugggu

SEQ ID NO: 1159247 - RNA, 19 nt, Artificial Sequence
  Description of Artificial Sequence: Synthetic oligonucleotide
  Antisense strand to SEQ ID NO: 1159246
acccaucccaaauucuagg

SEQ ID NO: 1159248 - RNA, 19 nt, Artificial Sequence
  Description of Artificial Sequence: Synthetic oligonucleotide
  Sense strand starting at position 448 of SEQ ID NO: 916471
ugggauggguagucuuuaa

SEQ ID NO: 1159249 - RNA, 19 nt, Artificial Sequence
  Description of Artificial Sequence: Synthetic oligonucleotide
  Antisense strand to SEQ ID NO: 1159248
uuaaagacuacccauccca

SEQ ID NO: 1159250 - RNA, 19 nt, Artificial Sequence
  Description of Artificial Sequence: Synthetic oligonucleotide
  Sense strand starting at position 452 of SEQ ID NO: 916471
auggguagucuuuaagacu

SEQ ID NO: 1159251 - RNA, 19 nt, Artificial Sequence
  Description of Artificial Sequence: Synthetic oligonucleotide
  Antisense strand to SEQ ID NO: 1159250
agucuuaaagacuacccau

SEQ ID NO: 1159252 - RNA, 19 nt, Artificial Sequence
  Description of Artificial Sequence: Synthetic oligonucleotide
  Sense strand starting at position 607 of SEQ ID NO: 916471
ucgguuuccacguacuaaa

SEQ ID NO: 1159253 - RNA, 19 nt, Artificial Sequence
  Description of Artificial Sequence: Synthetic oligonucleotide
  Antisense strand to SEQ ID NO: 1159252
uuuaguacguggaaaccga

SEQ ID NO: 1159254 - RNA, 19 nt, Artificial Sequence
  Description of Artificial Sequence: Synthetic oligonucleotide
  Sense strand starting at position 654 of SEQ ID NO: 916471
aaggguguuucccuuuaau

SEQ ID NO: 1159255 - RNA, 19 nt, Artificial Sequence
  Description of Artificial Sequence: Synthetic oligonucleotide
  Antisense strand to SEQ ID NO: 1159254
auuaaagggaaacacccuu

SEQ ID NO: 1159256 - RNA, 19 nt, Artificial Sequence
  Description of Artificial Sequence: Synthetic oligonucleotide
  Sense strand starting at position 657 of SEQ ID NO: 916471
gguguuucccuuuaaucau

SEQ ID NO: 1159257 - RNA, 19 nt, Artificial Sequence
  Description of Artificial Sequence: Synthetic oligonucleotide
  Antisense strand to SEQ ID NO: 1159256
augauuaaagggaaacacc

SEQ ID NO: 1159258 - RNA, 19 nt, Artificial Sequence
  Description of Artificial Sequence: Synthetic oligonucleotide
  Sense strand starting at position 709 of SEQ ID NO: 916471
ggcacuauucugggacaac

SEQ ID NO: 1159259 - RNA, 19 nt, Artificial Sequence
  Description of Artificial Sequence: Synthetic oligonucleotide
  Antisense strand to SEQ ID NO: 1159258
guugucccagaauagugcc

SEQ ID NO: 1159260 - RNA, 19 nt, Artificial Sequence
  Description of Artificial Sequence: Synthetic oligonucleotide
  Sense strand starting at position 719 of SEQ ID NO: 916471
ugggacaacuuugcccaua

SEQ ID NO: 1159261 - RNA, 19 nt, Artificial Sequence
  Description of Artificial Sequence: Synthetic oligonucleotide
  Antisense strand to SEQ ID NO: 1159260
uaugggcaaaguuguccca

SEQ ID NO: 1159262 - RNA, 19 nt, Artificial Sequence
  Description of Artificial Sequence: Synthetic oligonucleotide
  Sense strand starting at position 720 of SEQ ID NO: 916471
gggacaacuuugcccauaa

SEQ ID NO: 1159263 - RNA, 19 nt, Artificial Sequence
  Description of Artificial Sequence: Synthetic oligonucleotide
  Antisense strand to SEQ ID NO: 1159262
uuaugggcaaaguuguccc

SEQ ID NO: 1159264 - RNA, 19 nt, Artificial Sequence
  Description of Artificial Sequence: Synthetic oligonucleotide
  Sense strand starting at position 721 of SEQ ID NO: 916471
ggacaacuuugcccauaaa

SEQ ID NO: 1159265 - RNA, 19 nt, Artificial Sequence
  Description of Artificial Sequence: Synthetic oligonucleotide
  Antisense strand to SEQ ID NO: 1159264
uuuaugggcaaaguugucc

SEQ ID NO: 1159266 - RNA, 19 nt, Artificial Sequence
  Description of Artificial Sequence: Synthetic oligonucleotide
  Sense strand starting at position 757 of SEQ ID NO: 916471
ucuuuagaaugagauagaa

SEQ ID NO: 1159267 - RNA, 19 nt, Artificial Sequence
  Description of Artificial Sequence: Synthetic oligonucleotide
  Antisense strand to SEQ ID NO: 1159266
uucuaucucauucuaaaga

SEQ ID NO: 1159268 - RNA, 19 nt, Artificial Sequence
  Description of Artificial Sequence: Synthetic oligonucleotide
  Sense strand starting at position 2280 of SEQ ID NO: 916471
cauggaaggugagugguua

SEQ ID NO: 1159269 - RNA, 19 nt, Artificial Sequence
  Description of Artificial Sequence: Synthetic oligonucleotide
  Antisense strand to SEQ ID NO: 1159268
uaaccacucaccuuccaug

SEQ ID NO: 1159270 - RNA, 19 nt, Artificial Sequence
  Description of Artificial Sequence: Synthetic oligonucleotide
  Sense strand starting at position 2281 of SEQ ID NO: 916471
auggaaggugagugguuaa

SEQ ID NO: 1159271 - RNA, 19 nt, Artificial Sequence
  Description of Artificial Sequence: Synthetic oligonucleotide
  Antisense strand to SEQ ID NO: 1159270
uuaaccacucaccuuccau

SEQ ID NO: 1159272 - RNA, 19 nt, Artificial Sequence
  Description of Artificial Sequence: Synthetic oligonucleotide
  Sense strand starting at position 2284 of SEQ ID NO: 916471
gaaggugagugguuaaaug

SEQ ID NO: 1159273 - RNA, 19 nt, Artificial Sequence
  Description of Artificial Sequence: Synthetic oligonucleotide
  Antisense strand to SEQ ID NO: 1159272
cauuuaaccacucaccuuc

SEQ ID NO: 1159274 - RNA, 19 nt, Artificial Sequence
  Description of Artificial Sequence: Synthetic oligonucleotide
  Sense strand starting at position 2352 of SEQ ID NO: 916471
aagaaagagcugugcaagu

SEQ ID NO: 1159275 - RNA, 19 nt, Artificial Sequence
  Description of Artificial Sequence: Synthetic oligonucleotide
  Antisense strand to SEQ ID NO: 1159274
acuugcacagcucuuucuu

SEQ ID NO: 1159276 - RNA, 19 nt, Artificial Sequence
  Description of Artificial Sequence: Synthetic oligonucleotide
  Sense strand starting at position 2354 of SEQ ID NO: 916471
gaaagagcugugcaagugu

SEQ ID NO: 1159277 - RNA, 19 nt, Artificial Sequence
  Description of Artificial Sequence: Synthetic oligonucleotide
  Antisense strand to SEQ ID NO: 1159276
acacuugcacagcucuuuc

SEQ ID NO: 1159278 - RNA, 19 nt, Artificial Sequence
  Description of Artificial Sequence: Synthetic oligonucleotide
  Sense strand starting at position 2463 of SEQ ID NO: 916471
gggaaagagagguguguaa

SEQ ID NO: 1159279 - RNA, 19 nt, Artificial Sequence
  Description of Artificial Sequence: Synthetic oligonucleotide
  Antisense strand to SEQ ID NO: 1159278
uuacacaccucucuuuccc

SEQ ID NO: 1159280 - RNA, 19 nt, Artificial Sequence
  Description of Artificial Sequence: Synthetic oligonucleotide
  Sense strand starting at position 2485 of SEQ ID NO: 916471
auggaaucggauugucuga

SEQ ID NO: 1159281 - RNA, 19 nt, Artificial Sequence
  Description of Artificial Sequence: Synthetic oligonucleotide
  Antisense strand to SEQ ID NO: 1159280
ucagacaauccgauuccau

SEQ ID NO: 1159282 - RNA, 19 nt, Artificial Sequence
  Description of Artificial Sequence: Synthetic oligonucleotide
  Sense strand starting at position 2487 of SEQ ID NO: 916471
ggaaucggauugucugaga

SEQ ID NO: 1159283 - RNA, 19 nt, Artificial Sequence
  Description of Artificial Sequence: Synthetic oligonucleotide
  Antisense strand to SEQ ID NO: 1159282
ucucagacaauccgauucc

SEQ ID NO: 1159284 - RNA, 19 nt, Artificial Sequence
  Description of Artificial Sequence: Synthetic oligonucleotide
  Sense strand starting at position 2504 of SEQ ID NO: 916471
gaaacagaagccugugauu

SEQ ID NO: 1159285 - RNA, 19 nt, Artificial Sequence
  Description of Artificial Sequence: Synthetic oligonucleotide
  Antisense strand to SEQ ID NO: 1159284
aaucacaggcuucuguuuc

SEQ ID NO: 1159286 - RNA, 19 nt, Artificial Sequence
  Description of Artificial Sequence: Synthetic oligonucleotide
  Sense strand starting at position 2506 of SEQ ID NO: 916471
aacagaagccugugauugu

SEQ ID NO: 1159287 - RNA, 19 nt, Artificial Sequence
  Description of Artificial Sequence: Synthetic oligonucleotide
  Antisense strand to SEQ ID NO: 1159286
acaaucacaggcuucuguu

SEQ ID NO: 1159288 - RNA, 19 nt, Artificial Sequence
  Description of Artificial Sequence: Synthetic oligonucleotide
  Sense strand starting at position 2509 of SEQ ID NO: 916471
agaagccugugauuguaau

SEQ ID NO: 1159289 - RNA, 19 nt, Artificial Sequence
  Description of Artificial Sequence: Synthetic oligonucleotide
  Antisense strand to SEQ ID NO: 1159288
auuacaaucacaggcuucu

SEQ ID NO: 1159290 - RNA, 19 nt, Artificial Sequence
  Description of Artificial Sequence: Synthetic oligonucleotide
  Sense strand starting at position 2510 of SEQ ID NO: 916471
gaagccugugauuguaaug

SEQ ID NO: 1159291 - RNA, 19 nt, Artificial Sequence
  Description of Artificial Sequence: Synthetic oligonucleotide
  Antisense strand to SEQ ID NO: 1159290
cauuacaaucacaggcuuc

SEQ ID NO: 1159292 - RNA, 19 nt, Artificial Sequence
  Description of Artificial Sequence: Synthetic oligonucleotide
  Sense strand starting at position 2517 of SEQ ID NO: 916471
gugauuguaaugugugaag

SEQ ID NO: 1159293 - RNA, 19 nt, Artificial Sequence
  Description of Artificial Sequence: Synthetic oligonucleotide
  Antisense strand to SEQ ID NO: 1159292
cuucacacauuacaaucac

SEQ ID NO: 1159294 - RNA, 19 nt, Artificial Sequence
  Description of Artificial Sequence: Synthetic oligonucleotide
  Sense strand starting at position 2519 of SEQ ID NO: 916471
gauuguaaugugugaagga

SEQ ID NO: 1159295 - RNA, 19 nt, Artificial Sequence
  Description of Artificial Sequence: Synthetic oligonucleotide
  Antisense strand to SEQ ID NO: 1159294
uccuucacacauuacaauc

SEQ ID NO: 1159296 - RNA, 19 nt, Artificial Sequence
  Description of Artificial Sequence: Synthetic oligonucleotide
  Sense strand starting at position 2572 of SEQ ID NO: 916471
aagggaugggagugucuuu

SEQ ID NO: 1159297 - RNA, 19 nt, Artificial Sequence
  Description of Artificial Sequence: Synthetic oligonucleotide
  Antisense strand to SEQ ID NO: 1159296
aaagacacucccaucccuu

SEQ ID NO: 1159298 - RNA, 19 nt, Artificial Sequence
  Description of Artificial Sequence: Synthetic oligonucleotide
  Sense strand starting at position 2579 of SEQ ID NO: 916471
gggagugucuuuccuggua

SEQ ID NO: 1159299 - RNA, 19 nt, Artificial Sequence
  Description of Artificial Sequence: Synthetic oligonucleotide
  Antisense strand to SEQ ID NO: 1159298
uaccaggaaagacacuccc

SEQ ID NO: 1159300 - RNA, 19 nt, Artificial Sequence
  Description of Artificial Sequence: Synthetic oligonucleotide
  Sense strand starting at position 2660 of SEQ ID NO: 916471
uauggagacuucccucuga

SEQ ID NO: 1159301 - RNA, 19 nt, Artificial Sequence
  Description of Artificial Sequence: Synthetic oligonucleotide
  Antisense strand to SEQ ID NO: 1159300
ucagagggaagucuccaua

SEQ ID NO: 1159302 - RNA, 19 nt, Artificial Sequence
  Description of Artificial Sequence: Synthetic oligonucleotide
  Sense strand starting at position 2775 of SEQ ID NO: 916471
agcucauugggucaaacau

SEQ ID NO: 1159303 - RNA, 19 nt, Artificial Sequence
  Description of Artificial Sequence: Synthetic oligonucleotide
  Antisense strand to SEQ ID NO: 1159302
auguuugacccaaugagcu

SEQ ID NO: 1159304 - RNA, 19 nt, Artificial Sequence
  Description of Artificial Sequence: Synthetic oligonucleotide
  Sense strand starting at position 2902 of SEQ ID NO: 916471
acaguaauguucccaugaa

SEQ ID NO: 1159305 - RNA, 19 nt, Artificial Sequence
  Description of Artificial Sequence: Synthetic oligonucleotide
  Antisense strand to SEQ ID NO: 1159304
uucaugggaacauuacugu

SEQ ID NO: 1159306 - RNA, 19 nt, Artificial Sequence
  Description of Artificial Sequence: Synthetic oligonucleotide
  Sense strand starting at position 3009 of SEQ ID NO: 916471
gacaguaagcugugaaggu

SEQ ID NO: 1159307 - RNA, 19 nt, Artificial Sequence
  Description of Artificial Sequence: Synthetic oligonucleotide
  Antisense strand to SEQ ID NO: 1159306
accuucacagcuuacuguc

SEQ ID NO: 1159308 - RNA, 19 nt, Artificial Sequence
  Description of Artificial Sequence: Synthetic oligonucleotide
  Sense strand starting at position 3025 of SEQ ID NO: 916471
ggucuuauguggaagguga

SEQ ID NO: 1159309 - RNA, 19 nt, Artificial Sequence
  Description of Artificial Sequence: Synthetic oligonucleotide
  Antisense strand to SEQ ID NO: 1159308
ucaccuuccacauaagacc

SEQ ID NO: 1159310 - RNA, 19 nt, Artificial Sequence
  Description of Artificial Sequence: Synthetic oligonucleotide
  Sense strand starting at position 3266 of SEQ ID NO: 916471
agaggaggcaucuguauua

SEQ ID NO: 1159311 - RNA, 19 nt, Artificial Sequence
  Description of Artificial Sequence: Synthetic oligonucleotide
  Antisense strand to SEQ ID NO: 1159310
uaauacagaugccuccucu

SEQ ID NO: 1159312 - RNA, 19 nt, Artificial Sequence
  Description of Artificial Sequence: Synthetic oligonucleotide
  Sense strand starting at position 3345 of SEQ ID NO: 916471
uauucucagccagaugguu

SEQ ID NO: 1159313 - RNA, 19 nt, Artificial Sequence
  Description of Artificial Sequence: Synthetic oligonucleotide
  Antisense strand to SEQ ID NO: 1159312
aaccaucuggcugagaaua

SEQ ID NO: 1159314 - RNA, 19 nt, Artificial Sequence
  Description of Artificial Sequence: Synthetic oligonucleotide
  Sense strand starting at position 3534 of SEQ ID NO: 916471
aucuacuugugucuaccua

SEQ ID NO: 1159315 - RNA, 19 nt, Artificial Sequence
  Description of Artificial Sequence: Synthetic oligonucleotide
  Antisense strand to SEQ ID NO: 1159314
uagguagacacaaguagau

SEQ ID NO: 1159316 - RNA, 19 nt, Artificial Sequence
  Description of Artificial Sequence: Synthetic oligonucleotide
  Sense strand starting at position 3577 of SEQ ID NO: 916471
gaacaaguguguucuggac

SEQ ID NO: 1159317 - RNA, 19 nt, Artificial Sequence
  Description of Artificial Sequence: Synthetic oligonucleotide
  Antisense strand to SEQ ID NO: 1159316
guccagaacacacuuguuc

SEQ ID NO: 1159318 - RNA, 19 nt, Artificial Sequence
  Description of Artificial Sequence: Synthetic oligonucleotide
  Sense strand starting at position 3650 of SEQ ID NO: 916471
ccaaaugaguagucacaag

SEQ ID NO: 1159319 - RNA, 19 nt, Artificial Sequence
  Description of Artificial Sequence: Synthetic oligonucleotide
  Antisense strand to SEQ ID NO: 1159318
cuugugacuacucauuugg

SEQ ID NO: 1159320 - RNA, 19 nt, Artificial Sequence
  Description of Artificial Sequence: Synthetic oligonucleotide
  Sense strand starting at position 3946 of SEQ ID NO: 916471
aggucuuugcauuaacacu

SEQ ID NO: 1159321 - RNA, 19 nt, Artificial Sequence
  Description of Artificial Sequence: Synthetic oligonucleotide
  Antisense strand to SEQ ID NO: 1159320
aguguuaaugcaaagaccu

SEQ ID NO: 1159322 - RNA, 19 nt, Artificial Sequence
  Description of Artificial Sequence: Synthetic oligonucleotide
  Sense strand starting at position 46 of SEQ ID NO: 916472
gagauucugucuccuuugu

SEQ ID NO: 1159323 - RNA, 19 nt, Artificial Sequence
  Description of Artificial Sequence: Synthetic oligonucleotide
  Antisense strand to SEQ ID NO: 1159322
acaaaggagacagaaucuc

SEQ ID NO: 1159324 - RNA, 19 nt, Artificial Sequence
  Description of Artificial Sequence: Synthetic oligonucleotide
  Sense strand starting at position 93 of SEQ ID NO: 916472
augagacacucaguuucuu

SEQ ID NO: 1159325 - RNA, 19 nt, Artificial Sequence
  Description of Artificial Sequence: Synthetic oligonucleotide
  Antisense strand to SEQ ID NO: 1159324
aagaaacugagugucucau

SEQ ID NO: 1159326 - RNA, 19 nt, Artificial Sequence
  Description of Artificial Sequence: Synthetic oligonucleotide
  Sense strand starting at position 105 of SEQ ID NO: 916472
guuucuucccaaugguaau

SEQ ID NO: 1159327 - RNA, 19 nt, Artificial Sequence
  Description of Artificial Sequence: Synthetic oligonucleotide
  Antisense strand to SEQ ID NO: 1159326
auuaccauugggaagaaac

SEQ ID NO: 1159328 - RNA, 19 nt, Artificial Sequence
  Description of Artificial Sequence: Synthetic oligonucleotide
  Sense strand starting at position 199 of SEQ ID NO: 916472
auaacucacugagauaggu

SEQ ID NO: 1159329 - RNA, 19 nt, Artificial Sequence
  Description of Artificial Sequence: Synthetic oligonucleotide
  Antisense strand to SEQ ID NO: 1159328
accuaucucagugaguuau

SEQ ID NO: 1159330 - RNA, 19 nt, Artificial Sequence
  Description of Artificial Sequence: Synthetic oligonucleotide
  Sense strand starting at position 208 of SEQ ID NO: 916472
ugagauagguacuaauauu

SEQ ID NO: 1159331 - RNA, 19 nt, Artificial Sequence
  Description of Artificial Sequence: Synthetic oligonucleotide
  Antisense strand to SEQ ID NO: 1159330
aauauuaguaccuaucuca

SEQ ID NO: 1159332 - RNA, 19 nt, Artificial Sequence
  Description of Artificial Sequence: Synthetic oligonucleotide
  Sense strand starting at position 282 of SEQ ID NO: 916472
agauuacacuacuaguaag

SEQ ID NO: 1159333 - RNA, 19 nt, Artificial Sequence
  Description of Artificial Sequence: Synthetic oligonucleotide
  Antisense strand to SEQ ID NO: 1159332
cuuacuaguaguguaaucu

SEQ ID NO: 1159334 - RNA, 19 nt, Artificial Sequence
  Description of Artificial Sequence: Synthetic oligonucleotide
  Sense strand starting at position 301 of SEQ ID NO: 916472
uggcaguguuggguucgaa

SEQ ID NO: 1159335 - RNA, 19 nt, Artificial Sequence
  Description of Artificial Sequence: Synthetic oligonucleotide
  Antisense strand to SEQ ID NO: 1159334
uucgaacccaacacugcca

SEQ ID NO: 1159336 - RNA, 19 nt, Artificial Sequence
  Description of Artificial Sequence: Synthetic oligonucleotide
  Sense strand starting at position 313 of SEQ ID NO: 916472
guucgaacacucugaauac

SEQ ID NO: 1159337 - RNA, 19 nt, Artificial Sequence
  Description of Artificial Sequence: Synthetic oligonucleotide
  Antisense strand to SEQ ID NO: 1159336
guauucagaguguucgaac

SEQ ID NO: 1159338 - RNA, 19 nt, Artificial Sequence
  Description of Artificial Sequence: Synthetic oligonucleotide
  Sense strand starting at position 703 of SEQ ID NO: 916472
gcaacagaugauggacuua

SEQ ID NO: 1159339 - RNA, 19 nt, Artificial Sequence
  Description of Artificial Sequence: Synthetic oligonucleotide
  Antisense strand to SEQ ID NO: 1159338
uaaguccaucaucuguugc

SEQ ID NO: 1159340 - RNA, 19 nt, Artificial Sequence
  Description of Artificial Sequence: Synthetic oligonucleotide
  Sense strand starting at position 756 of SEQ ID NO: 916472
ggaaacaauggcugcaaau

SEQ ID NO: 1159341 - RNA, 19 nt, Artificial Sequence
  Description of Artificial Sequence: Synthetic oligonucleotide
  Antisense strand to SEQ ID NO: 1159340
auuugcagccauuguuucc

SEQ ID NO: 1159342 - RNA, 19 nt, Artificial Sequence
  Description of Artificial Sequence: Synthetic oligonucleotide
  Sense strand starting at position 834 of SEQ ID NO: 916472
ccaauacugaccggcagau

SEQ ID NO: 1159343 - RNA, 19 nt, Artificial Sequence
  Description of Artificial Sequence: Synthetic oligonucleotide
  Antisense strand to SEQ ID NO: 1159342
aucugccggucaguauugg

SEQ ID NO: 1159344 - RNA, 19 nt, Artificial Sequence
  Description of Artificial Sequence: Synthetic oligonucleotide
  Sense strand starting at position 1175 of SEQ ID NO: 916472
gugguauugggauagugcu

SEQ ID NO: 1159345 - RNA, 19 nt, Artificial Sequence
  Description of Artificial Sequence: Synthetic oligonucleotide
  Antisense strand to SEQ ID NO: 1159344
agcacuaucccaauaccac

SEQ ID NO: 1159346 - RNA, 19 nt, Artificial Sequence
  Description of Artificial Sequence: Synthetic oligonucleotide
  Sense strand starting at position 1183 of SEQ ID NO: 916472
gggauagugcugcagccaa

SEQ ID NO: 1159347 - RNA, 19 nt, Artificial Sequence
  Description of Artificial Sequence: Synthetic oligonucleotide
  Antisense strand to SEQ ID NO: 1159346
uuggcugcagcacuauccc

SEQ ID NO: 1159348 - RNA, 19 nt, Artificial Sequence
  Description of Artificial Sequence: Synthetic oligonucleotide
  Sense strand starting at position 1202 of SEQ ID NO: 916472
gaacuuaacgacugaaagu

SEQ ID NO: 1159349 - RNA, 19 nt, Artificial Sequence
  Description of Artificial Sequence: Synthetic oligonucleotide
  Antisense strand to SEQ ID NO: 1159348
acuuucagucguuaaguuc

SEQ ID NO: 1159350 - RNA, 19 nt, Artificial Sequence
  Description of Artificial Sequence: Synthetic oligonucleotide
  Sense strand starting at position 1215 of SEQ ID NO: 916472
gaaaguaacugggauaucu

SEQ ID NO: 1159351 - RNA, 19 nt, Artificial Sequence
  Description of Artificial Sequence: Synthetic oligonucleotide
  Antisense strand to SEQ ID NO: 1159350
agauaucccaguuacuuuc

SEQ ID NO: 1159352 - RNA, 19 nt, Artificial Sequence
  Description of Artificial Sequence: Synthetic oligonucleotide
  Sense strand starting at position 1280 of SEQ ID NO: 916472
ugagaagacuuacaagaga

SEQ ID NO: 1159353 - RNA, 19 nt, Artificial Sequence
  Description of Artificial Sequence: Synthetic oligonucleotide
  Antisense strand to SEQ ID NO: 1159352
ucucuuguaagucuucuca

SEQ ID NO: 1159354 - RNA, 19 nt, Artificial Sequence
  Description of Artificial Sequence: Synthetic oligonucleotide
  Sense strand starting at position 1316 of SEQ ID NO: 916472
caaacaaucggcugagaau

SEQ ID NO: 1159355 - RNA, 19 nt, Artificial Sequence
  Description of Artificial Sequence: Synthetic oligonucleotide
  Antisense strand to SEQ ID NO: 1159354
auucucagccgauuguuug

SEQ ID NO: 1159356 - RNA, 19 nt, Artificial Sequence
  Description of Artificial Sequence: Synthetic oligonucleotide
  Sense strand starting at position 1385 of SEQ ID NO: 916472
gggauuuccuaagaacaca

SEQ ID NO: 1159357 - RNA, 19 nt, Artificial Sequence
  Description of Artificial Sequence: Synthetic oligonucleotide
  Antisense strand to SEQ ID NO: 1159356
uguguucuuaggaaauccc

SEQ ID NO: 1159358 - RNA, 19 nt, Artificial Sequence
  Description of Artificial Sequence: Synthetic oligonucleotide
  Sense strand starting at position 1423 of SEQ ID NO: 916472
ucaugcuaguaacuaaaga

SEQ ID NO: 1159359 - RNA, 19 nt, Artificial Sequence
  Description of Artificial Sequence: Synthetic oligonucleotide
  Antisense strand to SEQ ID NO: 1159358
ucuuuaguuacuagcauga

SEQ ID NO: 1159360 - RNA, 19 nt, Artificial Sequence
  Description of Artificial Sequence: Synthetic oligonucleotide
  Sense strand starting at position 1452 of SEQ ID NO: 916472
augccugauagguguagga

SEQ ID NO: 1159361 - RNA, 19 nt, Artificial Sequence
  Description of Artificial Sequence: Synthetic oligonucleotide
  Antisense strand to SEQ ID NO: 1159360
uccuacaccuaucaggcau

SEQ ID NO: 1159362 - RNA, 19 nt, Artificial Sequence
  Description of Artificial Sequence: Synthetic oligonucleotide
  Sense strand starting at position 1454 of SEQ ID NO: 916472
gccugauagguguaggaga

SEQ ID NO: 1159363 - RNA, 19 nt, Artificial Sequence
  Description of Artificial Sequence: Synthetic oligonucleotide
  Antisense strand to SEQ ID NO: 1159362
ucuccuacaccuaucaggc

SEQ ID NO: 1159364 - RNA, 19 nt, Artificial Sequence
  Description of Artificial Sequence: Synthetic oligonucleotide
  Sense strand starting at position 1606 of SEQ ID NO: 916472
gaaggcguggagugaucaa

SEQ ID NO: 1159365 - RNA, 19 nt, Artificial Sequence
  Description of Artificial Sequence: Synthetic oligonucleotide
  Antisense strand to SEQ ID NO: 1159364
uugaucacuccacgccuuc

SEQ ID NO: 1159366 - RNA, 19 nt, Artificial Sequence
  Description of Artificial Sequence: Synthetic oligonucleotide
  Sense strand starting at position 1609 of SEQ ID NO: 916472
ggcguggagugaucaagga

SEQ ID NO: 1159367 - RNA, 19 nt, Artificial Sequence
  Description of Artificial Sequence: Synthetic oligonucleotide
  Antisense strand to SEQ ID NO: 1159366
uccuugaucacuccacgcc

SEQ ID NO: 1159368 - RNA, 19 nt, Artificial Sequence
  Description of Artificial Sequence: Synthetic oligonucleotide
  Sense strand starting at position 1610 of SEQ ID NO: 916472
gcguggagugaucaaggau

SEQ ID NO: 1159369 - RNA, 19 nt, Artificial Sequence
  Description of Artificial Sequence: Synthetic oligonucleotide
  Antisense strand to SEQ ID NO: 1159368
auccuugaucacuccacgc

SEQ ID NO: 1159370 - RNA, 19 nt, Artificial Sequence
  Description of Artificial Sequence: Synthetic oligonucleotide
  Sense strand starting at position 1622 of SEQ ID NO: 916472
caaggauaauaggagaagu

SEQ ID NO: 1159371 - RNA, 19 nt, Artificial Sequence
  Description of Artificial Sequence: Synthetic oligonucleotide
  Antisense strand to SEQ ID NO: 1159370
acuucuccuauuauccuug

SEQ ID NO: 1159372 - RNA, 19 nt, Artificial Sequence
  Description of Artificial Sequence: Synthetic oligonucleotide
  Sense strand starting at position 2416 of SEQ ID NO: 916472
agaagagacguuuagguuu

SEQ ID NO: 1159373 - RNA, 19 nt, Artificial Sequence
  Description of Artificial Sequence: Synthetic oligonucleotide
  Antisense strand to SEQ ID NO: 1159372
aaaccuaaacgucucuucu

SEQ ID NO: 1159374 - RNA, 19 nt, Artificial Sequence
  Description of Artificial Sequence: Synthetic oligonucleotide
  Sense strand starting at position 2499 of SEQ ID NO: 916472
ucucuuguuguggagaaug

SEQ ID NO: 1159375 - RNA, 19 nt, Artificial Sequence
  Description of Artificial Sequence: Synthetic oligonucleotide
  Antisense strand to SEQ ID NO: 1159374
cauucuccacaacaagaga

SEQ ID NO: 1159376 - RNA, 19 nt, Artificial Sequence
  Description of Artificial Sequence: Synthetic oligonucleotide
  Sense strand starting at position 2501 of SEQ ID NO: 916472
ucuuguuguggagaaugaa

SEQ ID NO: 1159377 - RNA, 19 nt, Artificial Sequence
  Description of Artificial Sequence: Synthetic oligonucleotide
  Antisense strand to SEQ ID NO: 1159376
uucauucuccacaacaaga

SEQ ID NO: 1159378 - RNA, 19 nt, Artificial Sequence
  Description of Artificial Sequence: Synthetic oligonucleotide
  Sense strand starting at position 2504 of SEQ ID NO: 916472
uguuguggagaaugaaaug

SEQ ID NO: 1159379 - RNA, 19 nt, Artificial Sequence
  Description of Artificial Sequence: Synthetic oligonucleotide
  Antisense strand to SEQ ID NO: 1159378
cauuucauucuccacaaca

SEQ ID NO: 1159380 - RNA, 19 nt, Artificial Sequence
  Description of Artificial Sequence: Synthetic oligonucleotide
  Sense strand starting at position 2515 of SEQ ID NO: 916472
augaaauggccaugucaua

SEQ ID NO: 1159381 - RNA, 19 nt, Artificial Sequence
  Description of Artificial Sequence: Synthetic oligonucleotide
  Antisense strand to SEQ ID NO: 1159380
uaugacauggccauuucau

SEQ ID NO: 1159382 - RNA, 19 nt, Artificial Sequence
  Description of Artificial Sequence: Synthetic oligonucleotide
  Sense strand starting at position 2566 of SEQ ID NO: 916472
gcucuuaacggucagaguu

SEQ ID NO: 1159383 - RNA, 19 nt, Artificial Sequence
  Description of Artificial Sequence: Synthetic oligonucleotide
  Antisense strand to SEQ ID NO: 1159382
aacucugaccguuaagagc

SEQ ID NO: 1159384 - RNA, 19 nt, Artificial Sequence
  Description of Artificial Sequence: Synthetic oligonucleotide
  Sense strand starting at position 2594 of SEQ ID NO: 916472
ggaguuaccaugugcggaa

SEQ ID NO: 1159385 - RNA, 19 nt, Artificial Sequence
  Description of Artificial Sequence: Synthetic oligonucleotide
  Antisense strand to SEQ ID NO: 1159384
uuccgcacaugguaacucc

SEQ ID NO: 1159386 - RNA, 19 nt, Artificial Sequence
  Description of Artificial Sequence: Synthetic oligonucleotide
  Sense strand starting at position 2595 of SEQ ID NO: 916472
gaguuaccaugugcggaau

SEQ ID NO: 1159387 - RNA, 19 nt, Artificial Sequence
  Description of Artificial Sequence: Synthetic oligonucleotide
  Antisense strand to SEQ ID NO: 1159386
auuccgcacaugguaacuc

SEQ ID NO: 1159388 - RNA, 19 nt, Artificial Sequence
  Description of Artificial Sequence: Synthetic oligonucleotide
  Sense strand starting at position 2606 of SEQ ID NO: 916472
ugcggaauuagugacaaag

SEQ ID NO: 1159389 - RNA, 19 nt, Artificial Sequence
  Description of Artificial Sequence: Synthetic oligonucleotide
  Antisense strand to SEQ ID NO: 1159388
cuuugucacuaauuccgca

SEQ ID NO: 1159390 - RNA, 19 nt, Artificial Sequence
  Description of Artificial Sequence: Synthetic oligonucleotide
  Sense strand starting at position 3345 of SEQ ID NO: 916472
ggccaaacaucucuaggga

SEQ ID NO: 1159391 - RNA, 19 nt, Artificial Sequence
  Description of Artificial Sequence: Synthetic oligonucleotide
  Antisense strand to SEQ ID NO: 1159390
ucccuagagauguuuggcc

SEQ ID NO: 1159392 - RNA, 19 nt, Artificial Sequence
  Description of Artificial Sequence: Synthetic oligonucleotide
  Sense strand starting at position 3366 of SEQ ID NO: 916472
agaugaaauugagaaguaa

SEQ ID NO: 1159393 - RNA, 19 nt, Artificial Sequence
  Description of Artificial Sequence: Synthetic oligonucleotide
  Antisense strand to SEQ ID NO: 1159392
uuacuucucaauuucaucu

SEQ ID NO: 1159394 - RNA, 19 nt, Artificial Sequence
  Description of Artificial Sequence: Synthetic oligonucleotide
  Sense strand starting at position 3693 of SEQ ID NO: 916472
uggcuaagaguuuggcaau

SEQ ID NO: 1159395 - RNA, 19 nt, Artificial Sequence
  Description of Artificial Sequence: Synthetic oligonucleotide
  Antisense strand to SEQ ID NO: 1159394
auugccaaacucuuagcca

SEQ ID NO: 1159396 - RNA, 19 nt, Artificial Sequence
  Description of Artificial Sequence: Synthetic oligonucleotide
  Sense strand starting at position 3699 of SEQ ID NO: 916472
agaguuuggcaauaaguau

SEQ ID NO: 1159397 - RNA, 19 nt, Artificial Sequence
  Description of Artificial Sequence: Synthetic oligonucleotide
  Antisense strand to SEQ ID NO: 1159396
auacuuauugccaaacucu

SEQ ID NO: 1159398 - RNA, 19 nt, Artificial Sequence
  Description of Artificial Sequence: Synthetic oligonucleotide
  Sense strand starting at position 3713 of SEQ ID NO: 916472
aguauauauuaugcaagga

SEQ ID NO: 1159399 - RNA, 19 nt, Artificial Sequence
  Description of Artificial Sequence: Synthetic oligonucleotide
  Antisense strand to SEQ ID NO: 1159398
uccuugcauaauauauacu

SEQ ID NO: 1159400 - RNA, 19 nt, Artificial Sequence
  Description of Artificial Sequence: Synthetic oligonucleotide
  Sense strand starting at position 3735 of SEQ ID NO: 916472
acauaccuguuauugagaa

SEQ ID NO: 1159401 - RNA, 19 nt, Artificial Sequence
  Description of Artificial Sequence: Synthetic oligonucleotide
  Antisense strand to SEQ ID NO: 1159400
uucucaauaacagguaugu

SEQ ID NO: 1159402 - RNA, 19 nt, Artificial Sequence
  Description of Artificial Sequence: Synthetic oligonucleotide
  Sense strand starting at position 186 of SEQ ID NO: 916473
ggguuagcuggcagcgaau

SEQ ID NO: 1159403 - RNA, 19 nt, Artificial Sequence
  Description of Artificial Sequence: Synthetic oligonucleotide
  Antisense strand to SEQ ID NO: 1159402
auucgcugccagcuaaccc

SEQ ID NO: 1159404 - RNA, 19 nt, Artificial Sequence
  Description of Artificial Sequence: Synthetic oligonucleotide
  Sense strand starting at position 206 of SEQ ID NO: 916473
aggcaauacuccuaaagca

SEQ ID NO: 1159405 - RNA, 19 nt, Artificial Sequence
  Description of Artificial Sequence: Synthetic oligonucleotide
  Antisense strand to SEQ ID NO: 1159404
ugcuuuaggaguauugccu

SEQ ID NO: 1159406 - RNA, 19 nt, Artificial Sequence
  Description of Artificial Sequence: Synthetic oligonucleotide
  Sense strand starting at position 220 of SEQ ID NO: 916473
aagcacagugcuuaaguua

SEQ ID NO: 1159407 - RNA, 19 nt, Artificial Sequence
  Description of Artificial Sequence: Synthetic oligonucleotide
  Antisense strand to SEQ ID NO: 1159406
uaacuuaagcacugugcuu

SEQ ID NO: 1159408 - RNA, 19 nt, Artificial Sequence
  Description of Artificial Sequence: Synthetic oligonucleotide
  Sense strand starting at position 234 of SEQ ID NO: 916473
aguuacagauccuccuaga

SEQ ID NO: 1159409 - RNA, 19 nt, Artificial Sequence
  Description of Artificial Sequence: Synthetic oligonucleotide
  Antisense strand to SEQ ID NO: 1159408
ucuaggaggaucuguaacu

SEQ ID NO: 1159410 - RNA, 19 nt, Artificial Sequence
  Description of Artificial Sequence: Synthetic oligonucleotide
  Sense strand starting at position 264 of SEQ ID NO: 916473
uaaggaaugugggaagaca

SEQ ID NO: 1159411 - RNA, 19 nt, Artificial Sequence
  Description of Artificial Sequence: Synthetic oligonucleotide
  Antisense strand to SEQ ID NO: 1159410
ugucuucccacauuccuua

SEQ ID NO: 1159412 - RNA, 19 nt, Artificial Sequence
  Description of Artificial Sequence: Synthetic oligonucleotide
  Sense strand starting at position 359 of SEQ ID NO: 916473
agagcaaucggguaccaga

SEQ ID NO: 1159413 - RNA, 19 nt, Artificial Sequence
  Description of Artificial Sequence: Synthetic oligonucleotide
  Antisense strand to SEQ ID NO: 1159412
ucugguacccgauugcucu

SEQ ID NO: 1159414 - RNA, 19 nt, Artificial Sequence
  Description of Artificial Sequence: Synthetic oligonucleotide
  Sense strand starting at position 446 of SEQ ID NO: 916473
ugugaagauccguaccuga

SEQ ID NO: 1159415 - RNA, 19 nt, Artificial Sequence
  Description of Artificial Sequence: Synthetic oligonucleotide
  Antisense strand to SEQ ID NO: 1159414
ucagguacggaucuucaca

SEQ ID NO: 1159416 - RNA, 19 nt, Artificial Sequence
  Description of Artificial Sequence: Synthetic oligonucleotide
  Sense strand starting at position 628 of SEQ ID NO: 916473
ggaggauuaaacugagcga

SEQ ID NO: 1159417 - RNA, 19 nt, Artificial Sequence
  Description of Artificial Sequence: Synthetic oligonucleotide
  Antisense strand to SEQ ID NO: 1159416
ucgcucaguuuaauccucc

SEQ ID NO: 1159418 - RNA, 19 nt, Artificial Sequence
  Description of Artificial Sequence: Synthetic oligonucleotide
  Sense strand starting at position 631 of SEQ ID NO: 916473
ggauuaaacugagcgaagu

SEQ ID NO: 1159419 - RNA, 19 nt, Artificial Sequence
  Description of Artificial Sequence: Synthetic oligonucleotide
  Antisense strand to SEQ ID NO: 1159418
acuucgcucaguuuaaucc

SEQ ID NO: 1159420 - RNA, 19 nt, Artificial Sequence
  Description of Artificial Sequence: Synthetic oligonucleotide
  Sense strand starting at position 632 of SEQ ID NO: 916473
gauuaaacugagcgaagua

SEQ ID NO: 1159421 - RNA, 19 nt, Artificial Sequence
  Description of Artificial Sequence: Synthetic oligonucleotide
  Antisense strand to SEQ ID NO: 1159420
uacuucgcucaguuuaauc

SEQ ID NO: 1159422 - RNA, 19 nt, Artificial Sequence
  Description of Artificial Sequence: Synthetic oligonucleotide
  Sense strand starting at position 753 of SEQ ID NO: 916473
ugaggaguccucugccgua

SEQ ID NO: 1159423 - RNA, 19 nt, Artificial Sequence
  Description of Artificial Sequence: Synthetic oligonucleotide
  Antisense strand to SEQ ID NO: 1159422
uacggcagaggacuccuca

SEQ ID NO: 1159424 - RNA, 19 nt, Artificial Sequence
  Description of Artificial Sequence: Synthetic oligonucleotide
  Sense strand starting at position 982 of SEQ ID NO: 916473
uggcuuagucuacaaccau

SEQ ID NO: 1159425 - RNA, 19 nt, Artificial Sequence
  Description of Artificial Sequence: Synthetic oligonucleotide
  Antisense strand to SEQ ID NO: 1159424
augguuguagacuaagcca

SEQ ID NO: 1159426 - RNA, 19 nt, Artificial Sequence
  Description of Artificial Sequence: Synthetic oligonucleotide
  Sense strand starting at position 1129 of SEQ ID NO: 916473
ccaggaguaugggcacauu

SEQ ID NO: 1159427 - RNA, 19 nt, Artificial Sequence
  Description of Artificial Sequence: Synthetic oligonucleotide
  Antisense strand to SEQ ID NO: 1159426
aaugugcccauacuccugg

SEQ ID NO: 1159428 - RNA, 19 nt, Artificial Sequence
  Description of Artificial Sequence: Synthetic oligonucleotide
  Sense strand starting at position 1140 of SEQ ID NO: 916473
ggcacauucccauaaugcu

SEQ ID NO: 1159429 - RNA, 19 nt, Artificial Sequence
  Description of Artificial Sequence: Synthetic oligonucleotide
  Antisense strand to SEQ ID NO: 1159428
agcauuaugggaaugugcc

SEQ ID NO: 1159430 - RNA, 19 nt, Artificial Sequence
  Description of Artificial Sequence: Synthetic oligonucleotide
  Sense strand starting at position 1165 of SEQ ID NO: 916473
cuaggaaguuucccagagu

SEQ ID NO: 1159431 - RNA, 19 nt, Artificial Sequence
  Description of Artificial Sequence: Synthetic oligonucleotide
  Antisense strand to SEQ ID NO: 1159430
acucugggaaacuuccuag

SEQ ID NO: 1159432 - RNA, 19 nt, Artificial Sequence
  Description of Artificial Sequence: Synthetic oligonucleotide
  Sense strand starting at position 1166 of SEQ ID NO: 916473
uaggaaguuucccagagug

SEQ ID NO: 1159433 - RNA, 19 nt, Artificial Sequence
  Description of Artificial Sequence: Synthetic oligonucleotide
  Antisense strand to SEQ ID NO: 1159432
cacucugggaaacuuccua

SEQ ID NO: 1159434 - RNA, 19 nt, Artificial Sequence
  Description of Artificial Sequence: Synthetic oligonucleotide
  Sense strand starting at position 1168 of SEQ ID NO: 916473
ggaaguuucccagaguguc

SEQ ID NO: 1159435 - RNA, 19 nt, Artificial Sequence
  Description of Artificial Sequence: Synthetic oligonucleotide
  Antisense strand to SEQ ID NO: 1159434
gacacucugggaaacuucc

SEQ ID NO: 1159436 - RNA, 19 nt, Artificial Sequence
  Description of Artificial Sequence: Synthetic oligonucleotide
  Sense strand starting at position 1195 of SEQ ID NO: 916473
guuguucucuacccaggaa

SEQ ID NO: 1159437 - RNA, 19 nt, Artificial Sequence
  Description of Artificial Sequence: Synthetic oligonucleotide
  Antisense strand to SEQ ID NO: 1159436
uuccuggguagagaacaac

SEQ ID NO: 1159438 - RNA, 19 nt, Artificial Sequence
  Description of Artificial Sequence: Synthetic oligonucleotide
  Sense strand starting at position 1198 of SEQ ID NO: 916473
guucucuacccaggaagau

SEQ ID NO: 1159439 - RNA, 19 nt, Artificial Sequence
  Description of Artificial Sequence: Synthetic oligonucleotide
  Antisense strand to SEQ ID NO: 1159438
aucuuccuggguagagaac

SEQ ID NO: 1159440 - RNA, 19 nt, Artificial Sequence
  Description of Artificial Sequence: Synthetic oligonucleotide
  Sense strand starting at position 1311 of SEQ ID NO: 916473
aucagacaaucgcugauau

SEQ ID NO: 1159441 - RNA, 19 nt, Artificial Sequence
  Description of Artificial Sequence: Synthetic oligonucleotide
  Antisense strand to SEQ ID NO: 1159440
auaucagcgauugucugau

SEQ ID NO: 1159442 - RNA, 19 nt, Artificial Sequence
  Description of Artificial Sequence: Synthetic oligonucleotide
  Sense strand starting at position 1312 of SEQ ID NO: 916473
ucagacaaucgcugauaua

SEQ ID NO: 1159443 - RNA, 19 nt, Artificial Sequence
  Description of Artificial Sequence: Synthetic oligonucleotide
  Antisense strand to SEQ ID NO: 1159442
uauaucagcgauugucuga

SEQ ID NO: 1159444 - RNA, 19 nt, Artificial Sequence
  Description of Artificial Sequence: Synthetic oligonucleotide
  Sense strand starting at position 1313 of SEQ ID NO: 916473
cagacaaucgcugauauag

SEQ ID NO: 1159445 - RNA, 19 nt, Artificial Sequence
  Description of Artificial Sequence: Synthetic oligonucleotide
  Antisense strand to SEQ ID NO: 1159444
cuauaucagcgauugucug

SEQ ID NO: 1159446 - RNA, 19 nt, Artificial Sequence
  Description of Artificial Sequence: Synthetic oligonucleotide
  Sense strand starting at position 1324 of SEQ ID NO: 916473
ugauauaguucauucgggu

SEQ ID NO: 1159447 - RNA, 19 nt, Artificial Sequence
  Description of Artificial Sequence: Synthetic oligonucleotide
  Antisense strand to SEQ ID NO: 1159446
acccgaaugaacuauauca

SEQ ID NO: 1159448 - RNA, 19 nt, Artificial Sequence
  Description of Artificial Sequence: Synthetic oligonucleotide
  Sense strand starting at position 1340 of SEQ ID NO: 916473
ggucuuaagaggugaggau

SEQ ID NO: 1159449 - RNA, 19 nt, Artificial Sequence
  Description of Artificial Sequence: Synthetic oligonucleotide
  Antisense strand to SEQ ID NO: 1159448
auccucaccucuuaagacc

SEQ ID NO: 1159450 - RNA, 19 nt, Artificial Sequence
  Description of Artificial Sequence: Synthetic oligonucleotide
  Sense strand starting at position 1450 of SEQ ID NO: 916473
uuccgauuaucuccaagag

SEQ ID NO: 1159451 - RNA, 19 nt, Artificial Sequence
  Description of Artificial Sequence: Synthetic oligonucleotide
  Antisense strand to SEQ ID NO: 1159450
cucuuggagauaaucggaa

SEQ ID NO: 1159452 - RNA, 19 nt, Artificial Sequence
  Description of Artificial Sequence: Synthetic oligonucleotide
  Sense strand starting at position 1466 of SEQ ID NO: 916473
gagagccuguccuccgaua

SEQ ID NO: 1159453 - RNA, 19 nt, Artificial Sequence
  Description of Artificial Sequence: Synthetic oligonucleotide
  Antisense strand to SEQ ID NO: 1159452
uaucggaggacaggcucuc

SEQ ID NO: 1159454 - RNA, 19 nt, Artificial Sequence
  Description of Artificial Sequence: Synthetic oligonucleotide
  Sense strand starting at position 1468 of SEQ ID NO: 916473
gagccuguccuccgauaga

SEQ ID NO: 1159455 - RNA, 19 nt, Artificial Sequence
  Description of Artificial Sequence: Synthetic oligonucleotide
  Antisense strand to SEQ ID NO: 1159454
ucuaucggaggacaggcuc

SEQ ID NO: 1159456 - RNA, 19 nt, Artificial Sequence
  Description of Artificial Sequence: Synthetic oligonucleotide
  Sense strand starting at position 2740 of SEQ ID NO: 916473
uugugacaguuucuacuua

SEQ ID NO: 1159457 - RNA, 19 nt, Artificial Sequence
  Description of Artificial Sequence: Synthetic oligonucleotide
  Antisense strand to SEQ ID NO: 1159456
uaaguagaaacugucacaa

SEQ ID NO: 1159458 - RNA, 19 nt, Artificial Sequence
  Description of Artificial Sequence: Synthetic oligonucleotide
  Sense strand starting at position 2944 of SEQ ID NO: 916473
acgguaagaucccuuggca

SEQ ID NO: 1159459 - RNA, 19 nt, Artificial Sequence
  Description of Artificial Sequence: Synthetic oligonucleotide
  Antisense strand to SEQ ID NO: 1159458
ugccaagggaucuuaccgu

SEQ ID NO: 1159460 - RNA, 19 nt, Artificial Sequence
  Description of Artificial Sequence: Synthetic oligonucleotide
  Sense strand starting at position 2947 of SEQ ID NO: 916473
guaagaucccuuggcaagu

SEQ ID NO: 1159461 - RNA, 19 nt, Artificial Sequence
  Description of Artificial Sequence: Synthetic oligonucleotide
  Antisense strand to SEQ ID NO: 1159460
acuugccaagggaucuuac

SEQ ID NO: 1159462 - RNA, 19 nt, Artificial Sequence
  Description of Artificial Sequence: Synthetic oligonucleotide
  Sense strand starting at position 3048 of SEQ ID NO: 916473
ggaugagacuccgcuguaa

SEQ ID NO: 1159463 - RNA, 19 nt, Artificial Sequence
  Description of Artificial Sequence: Synthetic oligonucleotide
  Antisense strand to SEQ ID NO: 1159462
uuacagcggagucucaucc

SEQ ID NO: 1159464 - RNA, 19 nt, Artificial Sequence
  Description of Artificial Sequence: Synthetic oligonucleotide
  Sense strand starting at position 3050 of SEQ ID NO: 916473
augagacuccgcuguaaau

SEQ ID NO: 1159465 - RNA, 19 nt, Artificial Sequence
  Description of Artificial Sequence: Synthetic oligonucleotide
  Antisense strand to SEQ ID NO: 1159464
auuuacagcggagucucau

SEQ ID NO: 1159466 - RNA, 19 nt, Artificial Sequence
  Description of Artificial Sequence: Synthetic oligonucleotide
  Sense strand starting at position 3052 of SEQ ID NO: 916473
gagacuccgcuguaaaucu

SEQ ID NO: 1159467 - RNA, 19 nt, Artificial Sequence
  Description of Artificial Sequence: Synthetic oligonucleotide
  Antisense strand to SEQ ID NO: 1159466
agauuuacagcggagucuc

SEQ ID NO: 1159468 - RNA, 19 nt, Artificial Sequence
  Description of Artificial Sequence: Synthetic oligonucleotide
  Sense strand starting at position 3060 of SEQ ID NO: 916473
gcuguaaaucucgacccga

SEQ ID NO: 1159469 - RNA, 19 nt, Artificial Sequence
  Description of Artificial Sequence: Synthetic oligonucleotide
  Antisense strand to SEQ ID NO: 1159468
ucgggucgagauuuacagc

SEQ ID NO: 1159470 - RNA, 19 nt, Artificial Sequence
  Description of Artificial Sequence: Synthetic oligonucleotide
  Sense strand starting at position 3127 of SEQ ID NO: 916473
ggacuugcugucugguaca

SEQ ID NO: 1159471 - RNA, 19 nt, Artificial Sequence
  Description of Artificial Sequence: Synthetic oligonucleotide
  Antisense strand to SEQ ID NO: 1159470
uguaccagacagcaagucc

SEQ ID NO: 1159472 - RNA, 19 nt, Artificial Sequence
  Description of Artificial Sequence: Synthetic oligonucleotide
  Sense strand starting at position 3281 of SEQ ID NO: 916473
ggcgcuguucugagagaag

SEQ ID NO: 1159473 - RNA, 19 nt, Artificial Sequence
  Description of Artificial Sequence: Synthetic oligonucleotide
  Antisense strand to SEQ ID NO: 1159472
cuucucucagaacagcgcc

SEQ ID NO: 1159474 - RNA, 19 nt, Artificial Sequence
  Description of Artificial Sequence: Synthetic oligonucleotide
  Sense strand starting at position 3413 of SEQ ID NO: 916473
ggugaaacguagucucgcu

SEQ ID NO: 1159475 - RNA, 19 nt, Artificial Sequence
  Description of Artificial Sequence: Synthetic oligonucleotide
  Antisense strand to SEQ ID NO: 1159474
agcgagacuacguuucacc

SEQ ID NO: 1159476 - RNA, 19 nt, Artificial Sequence
  Description of Artificial Sequence: Synthetic oligonucleotide
  Sense strand starting at position 3716 of SEQ ID NO: 916473
acucgagaugucgacaauc

SEQ ID NO: 1159477 - RNA, 19 nt, Artificial Sequence
  Description of Artificial Sequence: Synthetic oligonucleotide
  Antisense strand to SEQ ID NO: 1159476
gauugucgacaucucgagu

SEQ ID NO: 1159478 - RNA, 19 nt, Artificial Sequence
  Description of Artificial Sequence: Synthetic oligonucleotide
  Sense strand starting at position 3801 of SEQ ID NO: 916473
ggccaagaaauaugggagu

SEQ ID NO: 1159479 - RNA, 19 nt, Artificial Sequence
  Description of Artificial Sequence: Synthetic oligonucleotide
  Antisense strand to SEQ ID NO: 1159478
acucccauauuucuuggcc

SEQ ID NO: 1159480 - RNA, 19 nt, Artificial Sequence
  Description of Artificial Sequence: Synthetic oligonucleotide
  Sense strand starting at position 3812 of SEQ ID NO: 916473
augggagucccuuauagug

SEQ ID NO: 1159481 - RNA, 19 nt, Artificial Sequence
  Description of Artificial Sequence: Synthetic oligonucleotide
  Antisense strand to SEQ ID NO: 1159480
cacuauaagggacucccau

SEQ ID NO: 1159482 - RNA, 19 nt, Artificial Sequence
  Description of Artificial Sequence: Synthetic oligonucleotide
  Sense strand starting at position 508 of SEQ ID NO: 916474
ggcgcuucaugacuagagu

SEQ ID NO: 1159483 - RNA, 19 nt, Artificial Sequence
  Description of Artificial Sequence: Synthetic oligonucleotide
  Antisense strand to SEQ ID NO: 1159482
acucuagucaugaagcgcc

SEQ ID NO: 1159484 - RNA, 19 nt, Artificial Sequence
  Description of Artificial Sequence: Synthetic oligonucleotide
  Sense strand starting at position 509 of SEQ ID NO: 916474
gcgcuucaugacuagaguu

SEQ ID NO: 1159485 - RNA, 19 nt, Artificial Sequence
  Description of Artificial Sequence: Synthetic oligonucleotide
  Antisense strand to SEQ ID NO: 1159484
aacucuagucaugaagcgc

SEQ ID NO: 1159486 - RNA, 19 nt, Artificial Sequence
  Description of Artificial Sequence: Synthetic oligonucleotide
  Sense strand starting at position 649 of SEQ ID NO: 916474
ucuauauaguccuugacca

SEQ ID NO: 1159487 - RNA, 19 nt, Artificial Sequence
  Description of Artificial Sequence: Synthetic oligonucleotide
  Antisense strand to SEQ ID NO: 1159486
uggucaaggacuauauaga

SEQ ID NO: 1159488 - RNA, 19 nt, Artificial Sequence
  Description of Artificial Sequence: Synthetic oligonucleotide
  Sense strand starting at position 650 of SEQ ID NO: 916474
cuauauaguccuugaccau

SEQ ID NO: 1159489 - RNA, 19 nt, Artificial Sequence
  Description of Artificial Sequence: Synthetic oligonucleotide
  Antisense strand to SEQ ID NO: 1159488
auggucaaggacuauauag

SEQ ID NO: 1159490 - RNA, 19 nt, Artificial Sequence
  Description of Artificial Sequence: Synthetic oligonucleotide
  Sense strand starting at position 1092 of SEQ ID NO: 916474
ucuucuucucacuggagga

SEQ ID NO: 1159491 - RNA, 19 nt, Artificial Sequence
  Description of Artificial Sequence: Synthetic oligonucleotide
  Antisense strand to SEQ ID NO: 1159490
uccuccagugagaagaaga

SEQ ID NO: 1159492 - RNA, 19 nt, Artificial Sequence
  Description of Artificial Sequence: Synthetic oligonucleotide
  Sense strand starting at position 1206 of SEQ ID NO: 916474
cgaacuucuuccucuugau

SEQ ID NO: 1159493 - RNA, 19 nt, Artificial Sequence
  Description of Artificial Sequence: Synthetic oligonucleotide
  Antisense strand to SEQ ID NO: 1159492
aucaagaggaagaaguucg

SEQ ID NO: 1159494 - RNA, 19 nt, Artificial Sequence
  Description of Artificial Sequence: Synthetic oligonucleotide
  Sense strand starting at position 1504 of SEQ ID NO: 916474
gcacaaggcucugccaaua

SEQ ID NO: 1159495 - RNA, 19 nt, Artificial Sequence
  Description of Artificial Sequence: Synthetic oligonucleotide
  Antisense strand to SEQ ID NO: 1159494
uauuggcagagccuugugc

SEQ ID NO: 1159496 - RNA, 19 nt, Artificial Sequence
  Description of Artificial Sequence: Synthetic oligonucleotide
  Sense strand starting at position 1640 of SEQ ID NO: 916474
ggaggagcuucuccguuua

SEQ ID NO: 1159497 - RNA, 19 nt, Artificial Sequence
  Description of Artificial Sequence: Synthetic oligonucleotide
  Antisense strand to SEQ ID NO: 1159496
uaaacggagaagcuccucc

SEQ ID NO: 1159498 - RNA, 19 nt, Artificial Sequence
  Description of Artificial Sequence: Synthetic oligonucleotide
  Sense strand starting at position 1645 of SEQ ID NO: 916474
agcuucuccguuuagggau

SEQ ID NO: 1159499 - RNA, 19 nt, Artificial Sequence
  Description of Artificial Sequence: Synthetic oligonucleotide
  Antisense strand to SEQ ID NO: 1159498
aucccuaaacggagaagcu

SEQ ID NO: 1159500 - RNA, 19 nt, Artificial Sequence
  Description of Artificial Sequence: Synthetic oligonucleotide
  Sense strand starting at position 1736 of SEQ ID NO: 916474
gccugaugccaucagggau

SEQ ID NO: 1159501 - RNA, 19 nt, Artificial Sequence
  Description of Artificial Sequence: Synthetic oligonucleotide
  Antisense strand to SEQ ID NO: 1159500
aucccugauggcaucaggc

SEQ ID NO: 1159502 - RNA, 19 nt, Artificial Sequence
  Description of Artificial Sequence: Synthetic oligonucleotide
  Sense strand starting at position 1739 of SEQ ID NO: 916474
ugaugccaucagggaugaa

SEQ ID NO: 1159503 - RNA, 19 nt, Artificial Sequence
  Description of Artificial Sequence: Synthetic oligonucleotide
  Antisense strand to SEQ ID NO: 1159502
uucaucccugauggcauca

SEQ ID NO: 1159504 - RNA, 19 nt, Artificial Sequence
  Description of Artificial Sequence: Synthetic oligonucleotide
  Sense strand starting at position 1769 of SEQ ID NO: 916474
cugagaaucuagcaagaga

SEQ ID NO: 1159505 - RNA, 19 nt, Artificial Sequence
  Description of Artificial Sequence: Synthetic oligonucleotide
  Antisense strand to SEQ ID NO: 1159504
ucucuugcuagauucucag

SEQ ID NO: 1159506 - RNA, 19 nt, Artificial Sequence
  Description of Artificial Sequence: Synthetic oligonucleotide
  Sense strand starting at position 1910 of SEQ ID NO: 916474
gguagaguuccuuggccau

SEQ ID NO: 1159507 - RNA, 19 nt, Artificial Sequence
  Description of Artificial Sequence: Synthetic oligonucleotide
  Antisense strand to SEQ ID NO: 1159506
auggccaaggaacucuacc

SEQ ID NO: 1159508 - RNA, 19 nt, Artificial Sequence
  Description of Artificial Sequence: Synthetic oligonucleotide
  Sense strand starting at position 2223 of SEQ ID NO: 916474
guggaaucagcagaugcuu

SEQ ID NO: 1159509 - RNA, 19 nt, Artificial Sequence
  Description of Artificial Sequence: Synthetic oligonucleotide
  Antisense strand to SEQ ID NO: 1159508
aagcaucugcugauuccac

SEQ ID NO: 1159510 - RNA, 19 nt, Artificial Sequence
  Description of Artificial Sequence: Synthetic oligonucleotide
  Sense strand starting at position 2361 of SEQ ID NO: 916474
caaggauucugaccaggug

SEQ ID NO: 1159511 - RNA, 19 nt, Artificial Sequence
  Description of Artificial Sequence: Synthetic oligonucleotide
  Antisense strand to SEQ ID NO: 1159510
caccuggucagaauccuug

SEQ ID NO: 1159512 - RNA, 19 nt, Artificial Sequence
  Description of Artificial Sequence: Synthetic oligonucleotide
  Sense strand starting at position 2541 of SEQ ID NO: 916474
ugccaauaauagccuuaga

SEQ ID NO: 1159513 - RNA, 19 nt, Artificial Sequence
  Description of Artificial Sequence: Synthetic oligonucleotide
  Antisense strand to SEQ ID NO: 1159512
ucuaaggcuauuauuggca

SEQ ID NO: 1159514 - RNA, 19 nt, Artificial Sequence
  Description of Artificial Sequence: Synthetic oligonucleotide
  Sense strand starting at position 2551 of SEQ ID NO: 916474
agccuuagacaucagucuu

SEQ ID NO: 1159515 - RNA, 19 nt, Artificial Sequence
  Description of Artificial Sequence: Synthetic oligonucleotide
  Antisense strand to SEQ ID NO: 1159514
aagacugaugucuaaggcu

SEQ ID NO: 1159516 - RNA, 19 nt, Artificial Sequence
  Description of Artificial Sequence: Synthetic oligonucleotide
  Sense strand starting at position 2563 of SEQ ID NO: 916474
cagucuugugaaggucacu

SEQ ID NO: 1159517 - RNA, 19 nt, Artificial Sequence
  Description of Artificial Sequence: Synthetic oligonucleotide
  Antisense strand to SEQ ID NO: 1159516
agugaccuucacaagacug

SEQ ID NO: 1159518 - RNA, 19 nt, Artificial Sequence
  Description of Artificial Sequence: Synthetic oligonucleotide
  Sense strand starting at position 2592 of SEQ ID NO: 916474
agaguaugauaacagcuau

SEQ ID NO: 1159519 - RNA, 19 nt, Artificial Sequence
  Description of Artificial Sequence: Synthetic oligonucleotide
  Antisense strand to SEQ ID NO: 1159518
auagcuguuaucauacucu

SEQ ID NO: 1159520 - RNA, 19 nt, Artificial Sequence
  Description of Artificial Sequence: Synthetic oligonucleotide
  Sense strand starting at position 2603 of SEQ ID NO: 916474
acagcuauggacugcagaa

SEQ ID NO: 1159521 - RNA, 19 nt, Artificial Sequence
  Description of Artificial Sequence: Synthetic oligonucleotide
  Antisense strand to SEQ ID NO: 1159520
uucugcaguccauagcugu

SEQ ID NO: 1159522 - RNA, 19 nt, Artificial Sequence
  Description of Artificial Sequence: Synthetic oligonucleotide
  Sense strand starting at position 2674 of SEQ ID NO: 916474
ugguaucuccuagguuaag

SEQ ID NO: 1159523 - RNA, 19 nt, Artificial Sequence
  Description of Artificial Sequence: Synthetic oligonucleotide
  Antisense strand to SEQ ID NO: 1159522
cuuaaccuaggagauacca

SEQ ID NO: 1159524 - RNA, 19 nt, Artificial Sequence
  Description of Artificial Sequence: Synthetic oligonucleotide
  Sense strand starting at position 2686 of SEQ ID NO: 916474
gguuaagcgccuugacuau

SEQ ID NO: 1159525 - RNA, 19 nt, Artificial Sequence
  Description of Artificial Sequence: Synthetic oligonucleotide
  Antisense strand to SEQ ID NO: 1159524
auagucaaggcgcuuaacc

SEQ ID NO: 1159526 - RNA, 19 nt, Artificial Sequence
  Description of Artificial Sequence: Synthetic oligonucleotide
  Sense strand starting at position 2692 of SEQ ID NO: 916474
gcgccuugacuauaaacua

SEQ ID NO: 1159527 - RNA, 19 nt, Artificial Sequence
  Description of Artificial Sequence: Synthetic oligonucleotide
  Antisense strand to SEQ ID NO: 1159526
uaguuuauagucaaggcgc

SEQ ID NO: 1159528 - RNA, 19 nt, Artificial Sequence
  Description of Artificial Sequence: Synthetic oligonucleotide
  Sense strand starting at position 2700 of SEQ ID NO: 916474
acuauaaacuagcaagaga

SEQ ID NO: 1159529 - RNA, 19 nt, Artificial Sequence
  Description of Artificial Sequence: Synthetic oligonucleotide
  Antisense strand to SEQ ID NO: 1159528
ucucuugcuaguuuauagu

SEQ ID NO: 1159530 - RNA, 19 nt, Artificial Sequence
  Description of Artificial Sequence: Synthetic oligonucleotide
  Sense strand starting at position 2721 of SEQ ID NO: 916474
agggauucuuuggcccaca

SEQ ID NO: 1159531 - RNA, 19 nt, Artificial Sequence
  Description of Artificial Sequence: Synthetic oligonucleotide
  Antisense strand to SEQ ID NO: 1159530
ugugggccaaagaaucccu

SEQ ID NO: 1159532 - RNA, 19 nt, Artificial Sequence
  Description of Artificial Sequence: Synthetic oligonucleotide
  Sense strand starting at position 2722 of SEQ ID NO: 916474
gggauucuuuggcccacau

SEQ ID NO: 1159533 - RNA, 19 nt, Artificial Sequence
  Description of Artificial Sequence: Synthetic oligonucleotide
  Antisense strand to SEQ ID NO: 1159532
augugggccaaagaauccc

SEQ ID NO: 1159534 - RNA, 19 nt, Artificial Sequence
  Description of Artificial Sequence: Synthetic oligonucleotide
  Sense strand starting at position 2902 of SEQ ID NO: 916474
guauuuccaugagauacca

SEQ ID NO: 1159535 - RNA, 19 nt, Artificial Sequence
  Description of Artificial Sequence: Synthetic oligonucleotide
  Antisense strand to SEQ ID NO: 1159534
ugguaucucauggaaauac

SEQ ID NO: 1159536 - RNA, 19 nt, Artificial Sequence
  Description of Artificial Sequence: Synthetic oligonucleotide
  Sense strand starting at position 2946 of SEQ ID NO: 916474
uugggaacugcgugauuau

SEQ ID NO: 1159537 - RNA, 19 nt, Artificial Sequence
  Description of Artificial Sequence: Synthetic oligonucleotide
  Antisense strand to SEQ ID NO: 1159536
auaaucacgcaguucccaa

SEQ ID NO: 1159538 - RNA, 19 nt, Artificial Sequence
  Description of Artificial Sequence: Synthetic oligonucleotide
  Sense strand starting at position 2947 of SEQ ID NO: 916474
ugggaacugcgugauuauc

SEQ ID NO: 1159539 - RNA, 19 nt, Artificial Sequence
  Description of Artificial Sequence: Synthetic oligonucleotide
  Antisense strand to SEQ ID NO: 1159538
gauaaucacgcaguuccca

SEQ ID NO: 1159540 - RNA, 19 nt, Artificial Sequence
  Description of Artificial Sequence: Synthetic oligonucleotide
  Sense strand starting at position 2949 of SEQ ID NO: 916474
ggaacugcgugauuaucaa

SEQ ID NO: 1159541 - RNA, 19 nt, Artificial Sequence
  Description of Artificial Sequence: Synthetic oligonucleotide
  Antisense strand to SEQ ID NO: 1159540
uugauaaucacgcaguucc

SEQ ID NO: 1159542 - RNA, 19 nt, Artificial Sequence
  Description of Artificial Sequence: Synthetic oligonucleotide
  Sense strand starting at position 3059 of SEQ ID NO: 916474
cucuuagcucaguguucua

SEQ ID NO: 1159543 - RNA, 19 nt, Artificial Sequence
  Description of Artificial Sequence: Synthetic oligonucleotide
  Antisense strand to SEQ ID NO: 1159542
uagaacacugagcuaagag

SEQ ID NO: 1159544 - RNA, 19 nt, Artificial Sequence
  Description of Artificial Sequence: Synthetic oligonucleotide
  Sense strand starting at position 3300 of SEQ ID NO: 916474
ugaagucaccucugcaacu

SEQ ID NO: 1159545 - RNA, 19 nt, Artificial Sequence
  Description of Artificial Sequence: Synthetic oligonucleotide
  Antisense strand to SEQ ID NO: 1159544
aguugcagaggugacuuca

SEQ ID NO: 1159546 - RNA, 19 nt, Artificial Sequence
  Description of Artificial Sequence: Synthetic oligonucleotide
  Sense strand starting at position 3331 of SEQ ID NO: 916474
ccaaguagccuugguuuga

SEQ ID NO: 1159547 - RNA, 19 nt, Artificial Sequence
  Description of Artificial Sequence: Synthetic oligonucleotide
  Antisense strand to SEQ ID NO: 1159546
ucaaaccaaggcuacuugg

SEQ ID NO: 1159548 - RNA, 19 nt, Artificial Sequence
  Description of Artificial Sequence: Synthetic oligonucleotide
  Sense strand starting at position 3613 of SEQ ID NO: 916474
ccuagacugccagauccaa

SEQ ID NO: 1159549 - RNA, 19 nt, Artificial Sequence
  Description of Artificial Sequence: Synthetic oligonucleotide
  Antisense strand to SEQ ID NO: 1159548
uuggaucuggcagucuagg

SEQ ID NO: 1159550 - RNA, 19 nt, Artificial Sequence
  Description of Artificial Sequence: Synthetic oligonucleotide
  Sense strand starting at position 3686 of SEQ ID NO: 916474
guacgucuacuuccgguua

SEQ ID NO: 1159551 - RNA, 19 nt, Artificial Sequence
  Description of Artificial Sequence: Synthetic oligonucleotide
  Antisense strand to SEQ ID NO: 1159550
uaaccggaaguagacguac

SEQ ID NO: 1159552 - RNA, 19 nt, Artificial Sequence
  Description of Artificial Sequence: Synthetic oligonucleotide
  Sense strand starting at position 3691 of SEQ ID NO: 916474
ucuacuuccgguuaacgaa

SEQ ID NO: 1159553 - RNA, 19 nt, Artificial Sequence
  Description of Artificial Sequence: Synthetic oligonucleotide
  Antisense strand to SEQ ID NO: 1159552
uucguuaaccggaaguaga

SEQ ID NO: 1159554 - RNA, 19 nt, Artificial Sequence
  Description of Artificial Sequence: Synthetic oligonucleotide
  Sense strand starting at position 3771 of SEQ ID NO: 916474
ugguacggaaaguguaaau

SEQ ID NO: 1159555 - RNA, 19 nt, Artificial Sequence
  Description of Artificial Sequence: Synthetic oligonucleotide
  Antisense strand to SEQ ID NO: 1159554
auuuacacuuuccguacca

SEQ ID NO: 1159556 - RNA, 19 nt, Artificial Sequence
  Description of Artificial Sequence: Synthetic oligonucleotide
  Sense strand starting at position 3793 of SEQ ID NO: 916474
uuaccaauagcggaaagua

SEQ ID NO: 1159557 - RNA, 19 nt, Artificial Sequence
  Description of Artificial Sequence: Synthetic oligonucleotide
  Antisense strand to SEQ ID NO: 1159556
uacuuuccgcuauugguaa

SEQ ID NO: 1159558 - RNA, 19 nt, Artificial Sequence
  Description of Artificial Sequence: Synthetic oligonucleotide
  Sense strand starting at position 3808 of SEQ ID NO: 916474
aguaaaggcuuuccuaguu

SEQ ID NO: 1159559 - RNA, 19 nt, Artificial Sequence
  Description of Artificial Sequence: Synthetic oligonucleotide
  Antisense strand to SEQ ID NO: 1159558
aacuaggaaagccuuuacu

SEQ ID NO: 1159560 - RNA, 19 nt, Artificial Sequence
  Description of Artificial Sequence: Synthetic oligonucleotide
  Sense strand starting at position 3814 of SEQ ID NO: 916474
ggcuuuccuaguugggaca

SEQ ID NO: 1159561 - RNA, 19 nt, Artificial Sequence
  Description of Artificial Sequence: Synthetic oligonucleotide
  Antisense strand to SEQ ID NO: 1159560
ugucccaacuaggaaagcc

SEQ ID NO: 1159562 - RNA, 19 nt, Artificial Sequence
  Description of Artificial Sequence: Synthetic oligonucleotide
  Sense strand starting at position 30 of SEQ ID NO: 916475
gccugaugccaucagggau

SEQ ID NO: 1159563 - RNA, 19 nt, Artificial Sequence
  Description of Artificial Sequence: Synthetic oligonucleotide
  Antisense strand to SEQ ID NO: 1159562
aucccugauggcaucaggc

SEQ ID NO: 1159564 - RNA, 19 nt, Artificial Sequence
  Description of Artificial Sequence: Synthetic oligonucleotide
  Sense strand starting at position 33 of SEQ ID NO: 916475
ugaugccaucagggaugaa

SEQ ID NO: 1159565 - RNA, 19 nt, Artificial Sequence
  Description of Artificial Sequence: Synthetic oligonucleotide
  Antisense strand to SEQ ID NO: 1159564
uucaucccugauggcauca

SEQ ID NO: 1159566 - RNA, 19 nt, Artificial Sequence
  Description of Artificial Sequence: Synthetic oligonucleotide
  Sense strand starting at position 517 of SEQ ID NO: 916475
guggaaucagcagaugcuu

SEQ ID NO: 1159567 - RNA, 19 nt, Artificial Sequence
  Description of Artificial Sequence: Synthetic oligonucleotide
  Antisense strand to SEQ ID NO: 1159566
aagcaucugcugauuccac

SEQ ID NO: 1159568 - RNA, 19 nt, Artificial Sequence
  Description of Artificial Sequence: Synthetic oligonucleotide
  Sense strand starting at position 655 of SEQ ID NO: 916475
caaggauucugaccaggug

SEQ ID NO: 1159569 - RNA, 19 nt, Artificial Sequence
  Description of Artificial Sequence: Synthetic oligonucleotide
  Antisense strand to SEQ ID NO: 1159568
caccuggucagaauccuug

SEQ ID NO: 1159570 - RNA, 19 nt, Artificial Sequence
  Description of Artificial Sequence: Synthetic oligonucleotide
  Sense strand starting at position 835 of SEQ ID NO: 916475
ugccaauaauagccuuaga

SEQ ID NO: 1159571 - RNA, 19 nt, Artificial Sequence
  Description of Artificial Sequence: Synthetic oligonucleotide
  Antisense strand to SEQ ID NO: 1159570
ucuaaggcuauuauuggca

SEQ ID NO: 1159572 - RNA, 19 nt, Artificial Sequence
  Description of Artificial Sequence: Synthetic oligonucleotide
  Sense strand starting at position 845 of SEQ ID NO: 916475
agccuuagacaucagucuu

SEQ ID NO: 1159573 - RNA, 19 nt, Artificial Sequence
  Description of Artificial Sequence: Synthetic oligonucleotide
  Antisense strand to SEQ ID NO: 1159572
aagacugaugucuaaggcu

SEQ ID NO: 1159574 - RNA, 19 nt, Artificial Sequence
  Description of Artificial Sequence: Synthetic oligonucleotide
  Sense strand starting at position 857 of SEQ ID NO: 916475
cagucuugugaaggucacu

SEQ ID NO: 1159575 - RNA, 19 nt, Artificial Sequence
  Description of Artificial Sequence: Synthetic oligonucleotide
  Antisense strand to SEQ ID NO: 1159574
agugaccuucacaagacug

SEQ ID NO: 1159576 - RNA, 19 nt, Artificial Sequence
  Description of Artificial Sequence: Synthetic oligonucleotide
  Sense strand starting at position 897 of SEQ ID NO: 916475
acagcuauggacugcagaa

SEQ ID NO: 1159577 - RNA, 19 nt, Artificial Sequence
  Description of Artificial Sequence: Synthetic oligonucleotide
  Antisense strand to SEQ ID NO: 1159576
uucugcaguccauagcugu

SEQ ID NO: 1159578 - RNA, 19 nt, Artificial Sequence
  Description of Artificial Sequence: Synthetic oligonucleotide
  Sense strand starting at position 968 of SEQ ID NO: 916475
ugguaucuccuagguuaag

SEQ ID NO: 1159579 - RNA, 19 nt, Artificial Sequence
  Description of Artificial Sequence: Synthetic oligonucleotide
  Antisense strand to SEQ ID NO: 1159578
cuuaaccuaggagauacca

SEQ ID NO: 1159580 - RNA, 19 nt, Artificial Sequence
  Description of Artificial Sequence: Synthetic oligonucleotide
  Sense strand starting at position 986 of SEQ ID NO: 916475
gcgccuugacuauaaacua

SEQ ID NO: 1159581 - RNA, 19 nt, Artificial Sequence
  Description of Artificial Sequence: Synthetic oligonucleotide
  Antisense strand to SEQ ID NO: 1159580
uaguuuauagucaaggcgc

SEQ ID NO: 1159582 - RNA, 19 nt, Artificial Sequence
  Description of Artificial Sequence: Synthetic oligonucleotide
  Sense strand starting at position 1015 of SEQ ID NO: 916475
agggauucuuuggcccaca

SEQ ID NO: 1159583 - RNA, 19 nt, Artificial Sequence
  Description of Artificial Sequence: Synthetic oligonucleotide
  Antisense strand to SEQ ID NO: 1159582
ugugggccaaagaaucccu

SEQ ID NO: 1159584 - RNA, 19 nt, Artificial Sequence
  Description of Artificial Sequence: Synthetic oligonucleotide
  Sense strand starting at position 1016 of SEQ ID NO: 916475
gggauucuuuggcccacau

SEQ ID NO: 1159585 - RNA, 19 nt, Artificial Sequence
  Description of Artificial Sequence: Synthetic oligonucleotide
  Antisense strand to SEQ ID NO: 1159584
augugggccaaagaauccc

SEQ ID NO: 1159586 - RNA, 19 nt, Artificial Sequence
  Description of Artificial Sequence: Synthetic oligonucleotide
  Sense strand starting at position 1196 of SEQ ID NO: 916475
guauuuccaugagauacca

SEQ ID NO: 1159587 - RNA, 19 nt, Artificial Sequence
  Description of Artificial Sequence: Synthetic oligonucleotide
  Antisense strand to SEQ ID NO: 1159586
ugguaucucauggaaauac

SEQ ID NO: 1159588 - RNA, 19 nt, Artificial Sequence
  Description of Artificial Sequence: Synthetic oligonucleotide
  Sense strand starting at position 1240 of SEQ ID NO: 916475
uugggaacugcgugauuau

SEQ ID NO: 1159589 - RNA, 19 nt, Artificial Sequence
  Description of Artificial Sequence: Synthetic oligonucleotide
  Antisense strand to SEQ ID NO: 1159588
auaaucacgcaguucccaa

SEQ ID NO: 1159590 - RNA, 19 nt, Artificial Sequence
  Description of Artificial Sequence: Synthetic oligonucleotide
  Sense strand starting at position 1241 of SEQ ID NO: 916475
ugggaacugcgugauuauc

SEQ ID NO: 1159591 - RNA, 19 nt, Artificial Sequence
  Description of Artificial Sequence: Synthetic oligonucleotide
  Antisense strand to SEQ ID NO: 1159590
gauaaucacgcaguuccca

SEQ ID NO: 1159592 - RNA, 19 nt, Artificial Sequence
  Description of Artificial Sequence: Synthetic oligonucleotide
  Sense strand starting at position 1243 of SEQ ID NO: 916475
ggaacugcgugauuaucaa

SEQ ID NO: 1159593 - RNA, 19 nt, Artificial Sequence
  Description of Artificial Sequence: Synthetic oligonucleotide
  Antisense strand to SEQ ID NO: 1159592
uugauaaucacgcaguucc

SEQ ID NO: 1159594 - RNA, 19 nt, Artificial Sequence
  Description of Artificial Sequence: Synthetic oligonucleotide
  Sense strand starting at position 1594 of SEQ ID NO: 916475
ugaagucaccucugcaacu

SEQ ID NO: 1159595 - RNA, 19 nt, Artificial Sequence
  Description of Artificial Sequence: Synthetic oligonucleotide
  Antisense strand to SEQ ID NO: 1159594
aguugcagaggugacuuca

SEQ ID NO: 1159596 - RNA, 19 nt, Artificial Sequence
  Description of Artificial Sequence: Synthetic oligonucleotide
  Sense strand starting at position 1907 of SEQ ID NO: 916475
ccuagacugccagauccaa

SEQ ID NO: 1159597 - RNA, 19 nt, Artificial Sequence
  Description of Artificial Sequence: Synthetic oligonucleotide
  Antisense strand to SEQ ID NO: 1159596
uuggaucuggcagucuagg

SEQ ID NO: 1159598 - RNA, 19 nt, Artificial Sequence
  Description of Artificial Sequence: Synthetic oligonucleotide
  Sense strand starting at position 1980 of SEQ ID NO: 916475
guacgucuacuuccgguua

SEQ ID NO: 1159599 - RNA, 19 nt, Artificial Sequence
  Description of Artificial Sequence: Synthetic oligonucleotide
  Antisense strand to SEQ ID NO: 1159598
uaaccggaaguagacguac

SEQ ID NO: 1159600 - RNA, 19 nt, Artificial Sequence
  Description of Artificial Sequence: Synthetic oligonucleotide
  Sense strand starting at position 1985 of SEQ ID NO: 916475
ucuacuuccgguuaacgaa

SEQ ID NO: 1159601 - RNA, 19 nt, Artificial Sequence
  Description of Artificial Sequence: Synthetic oligonucleotide
  Antisense strand to SEQ ID NO: 1159600
uucguuaaccggaaguaga

SEQ ID NO: 1159602 - RNA, 19 nt, Artificial Sequence
  Description of Artificial Sequence: Synthetic oligonucleotide
  Sense strand starting at position 2065 of SEQ ID NO: 916475
ugguacggaaaguguaaau

SEQ ID NO: 1159603 - RNA, 19 nt, Artificial Sequence
  Description of Artificial Sequence: Synthetic oligonucleotide
  Antisense strand to SEQ ID NO: 1159602
auuuacacuuuccguacca

SEQ ID NO: 1159604 - RNA, 19 nt, Artificial Sequence
  Description of Artificial Sequence: Synthetic oligonucleotide
  Sense strand starting at position 2087 of SEQ ID NO: 916475
uuaccaauagcggaaagua

SEQ ID NO: 1159605 - RNA, 19 nt, Artificial Sequence
  Description of Artificial Sequence: Synthetic oligonucleotide
  Antisense strand to SEQ ID NO: 1159604
uacuuuccgcuauugguaa

SEQ ID NO: 1159606 - RNA, 19 nt, Artificial Sequence
  Description of Artificial Sequence: Synthetic oligonucleotide
  Sense strand starting at position 2102 of SEQ ID NO: 916475
aguaaaggcuuuccuaguu

SEQ ID NO: 1159607 - RNA, 19 nt, Artificial Sequence
  Description of Artificial Sequence: Synthetic oligonucleotide
  Antisense strand to SEQ ID NO: 1159606
aacuaggaaagccuuuacu

SEQ ID NO: 1159608 - RNA, 19 nt, Artificial Sequence
  Description of Artificial Sequence: Synthetic oligonucleotide
  Sense strand starting at position 2108 of SEQ ID NO: 916475
ggcuuuccuaguugggaca

SEQ ID NO: 1159609 - RNA, 19 nt, Artificial Sequence
  Description of Artificial Sequence: Synthetic oligonucleotide
  Antisense strand to SEQ ID NO: 1159608
ugucccaacuaggaaagcc

SEQ ID NO: 1159610 - RNA, 19 nt, Artificial Sequence
  Description of Artificial Sequence: Synthetic oligonucleotide
  Sense strand starting at position 2278 of SEQ ID NO: 916475
uccaaauucccacgaggua

SEQ ID NO: 1159611 - RNA, 19 nt, Artificial Sequence
  Description of Artificial Sequence: Synthetic oligonucleotide
  Antisense strand to SEQ ID NO: 1159610
uaccucgugggaauuugga

SEQ ID NO: 1159612 - RNA, 19 nt, Artificial Sequence
  Description of Artificial Sequence: Synthetic oligonucleotide
  Sense strand starting at position 2279 of SEQ ID NO: 916475
ccaaauucccacgagguau

SEQ ID NO: 1159613 - RNA, 19 nt, Artificial Sequence
  Description of Artificial Sequence: Synthetic oligonucleotide
  Antisense strand to SEQ ID NO: 1159612
auaccucgugggaauuugg

SEQ ID NO: 1159614 - RNA, 19 nt, Artificial Sequence
  Description of Artificial Sequence: Synthetic oligonucleotide
  Sense strand starting at position 2319 of SEQ ID NO: 916475
gaccuuaugcauuguuuga

SEQ ID NO: 1159615 - RNA, 19 nt, Artificial Sequence
  Description of Artificial Sequence: Synthetic oligonucleotide
  Antisense strand to SEQ ID NO: 1159614
ucaaacaaugcauaagguc

SEQ ID NO: 1159616 - RNA, 19 nt, Artificial Sequence
  Description of Artificial Sequence: Synthetic oligonucleotide
  Sense strand starting at position 2330 of SEQ ID NO: 916475
uuguuugacuccuccagag

SEQ ID NO: 1159617 - RNA, 19 nt, Artificial Sequence
  Description of Artificial Sequence: Synthetic oligonucleotide
  Antisense strand to SEQ ID NO: 1159616
cucuggaggagucaaacaa

SEQ ID NO: 1159618 - RNA, 19 nt, Artificial Sequence
  Description of Artificial Sequence: Synthetic oligonucleotide
  Sense strand starting at position 2396 of SEQ ID NO: 916475
gagauaauguagccaggga

SEQ ID NO: 1159619 - RNA, 19 nt, Artificial Sequence
  Description of Artificial Sequence: Synthetic oligonucleotide
  Antisense strand to SEQ ID NO: 1159618
ucccuggcuacauuaucuc

SEQ ID NO: 1159620 - RNA, 19 nt, Artificial Sequence
  Description of Artificial Sequence: Synthetic oligonucleotide
  Sense strand starting at position 2411 of SEQ ID NO: 916475
gggagauguggcggacaga

SEQ ID NO: 1159621 - RNA, 19 nt, Artificial Sequence
  Description of Artificial Sequence: Synthetic oligonucleotide
  Antisense strand to SEQ ID NO: 1159620
ucuguccgccacaucuccc

SEQ ID NO: 1159622 - RNA, 19 nt, Artificial Sequence
  Description of Artificial Sequence: Synthetic oligonucleotide
  Sense strand starting at position 2507 of SEQ ID NO: 916475
ggaguagugucgacuuggu

SEQ ID NO: 1159623 - RNA, 19 nt, Artificial Sequence
  Description of Artificial Sequence: Synthetic oligonucleotide
  Antisense strand to SEQ ID NO: 1159622
accaagucgacacuacucc

SEQ ID NO: 1159624 - RNA, 19 nt, Artificial Sequence
  Description of Artificial Sequence: Synthetic oligonucleotide
  Sense strand starting at position 2743 of SEQ ID NO: 916475
uccuuugcgagguacuaaa

SEQ ID NO: 1159625 - RNA, 19 nt, Artificial Sequence
  Description of Artificial Sequence: Synthetic oligonucleotide
  Antisense strand to SEQ ID NO: 1159624
uuuaguaccucgcaaagga

SEQ ID NO: 1159626 - RNA, 19 nt, Artificial Sequence
  Description of Artificial Sequence: Synthetic oligonucleotide
  Sense strand starting at position 2814 of SEQ ID NO: 916475
uccaaagcuguccaucaga

SEQ ID NO: 1159627 - RNA, 19 nt, Artificial Sequence
  Description of Artificial Sequence: Synthetic oligonucleotide
  Antisense strand to SEQ ID NO: 1159626
ucugauggacagcuuugga

SEQ ID NO: 1159628 - RNA, 19 nt, Artificial Sequence
  Description of Artificial Sequence: Synthetic oligonucleotide
  Sense strand starting at position 2823 of SEQ ID NO: 916475
guccaucagaggugucaag

SEQ ID NO: 1159629 - RNA, 19 nt, Artificial Sequence
  Description of Artificial Sequence: Synthetic oligonucleotide
  Antisense strand to SEQ ID NO: 1159628
cuugacaccucugauggac

SEQ ID NO: 1159630 - RNA, 19 nt, Artificial Sequence
  Description of Artificial Sequence: Synthetic oligonucleotide
  Sense strand starting at position 2853 of SEQ ID NO: 916475
uggacauugcuagggaauu

SEQ ID NO: 1159631 - RNA, 19 nt, Artificial Sequence
  Description of Artificial Sequence: Synthetic oligonucleotide
  Antisense strand to SEQ ID NO: 1159630
aauucccuagcaaugucca

SEQ ID NO: 1159632 - RNA, 19 nt, Artificial Sequence
  Description of Artificial Sequence: Synthetic oligonucleotide
  Sense strand starting at position 2965 of SEQ ID NO: 916475
cuuguuuaaugaguaugua

SEQ ID NO: 1159633 - RNA, 19 nt, Artificial Sequence
  Description of Artificial Sequence: Synthetic oligonucleotide
  Antisense strand to SEQ ID NO: 1159632
uacauacucauuaaacaag

SEQ ID NO: 1159634 - RNA, 19 nt, Artificial Sequence
  Description of Artificial Sequence: Synthetic oligonucleotide
  Sense strand starting at position 2966 of SEQ ID NO: 916475
uuguuuaaugaguauguac

SEQ ID NO: 1159635 - RNA, 19 nt, Artificial Sequence
  Description of Artificial Sequence: Synthetic oligonucleotide
  Antisense strand to SEQ ID NO: 1159634
guacauacucauuaaacaa

SEQ ID NO: 1159636 - RNA, 19 nt, Artificial Sequence
  Description of Artificial Sequence: Synthetic oligonucleotide
  Sense strand starting at position 2968 of SEQ ID NO: 916475
guuuaaugaguauguacuu

SEQ ID NO: 1159637 - RNA, 19 nt, Artificial Sequence
  Description of Artificial Sequence: Synthetic oligonucleotide
  Antisense strand to SEQ ID NO: 1159636
aaguacauacucauuaaac

SEQ ID NO: 1159638 - RNA, 19 nt, Artificial Sequence
  Description of Artificial Sequence: Synthetic oligonucleotide
  Sense strand starting at position 3524 of SEQ ID NO: 916475
acauguccaagugguagua

SEQ ID NO: 1159639 - RNA, 19 nt, Artificial Sequence
  Description of Artificial Sequence: Synthetic oligonucleotide
  Antisense strand to SEQ ID NO: 1159638
uacuaccacuuggacaugu

SEQ ID NO: 1159640 - RNA, 19 nt, Artificial Sequence
  Description of Artificial Sequence: Synthetic oligonucleotide
  Sense strand starting at position 3542 of SEQ ID NO: 916475
aguaguaauucuucucucu

SEQ ID NO: 1159641 - RNA, 19 nt, Artificial Sequence
  Description of Artificial Sequence: Synthetic oligonucleotide
  Antisense strand to SEQ ID NO: 1159640
agagagaagaauuacuacu

SEQ ID NO: 1159642 - RNA, 19 nt, Artificial Sequence
  Description of Artificial Sequence: Synthetic oligonucleotide
  Sense strand starting at position 83 of SEQ ID NO: 916476
ggauauaagugauuaacuu

SEQ ID NO: 1159643 - RNA, 19 nt, Artificial Sequence
  Description of Artificial Sequence: Synthetic oligonucleotide
  Antisense strand to SEQ ID NO: 1159642
aaguuaaucacuuauaucc

SEQ ID NO: 1159644 - RNA, 19 nt, Artificial Sequence
  Description of Artificial Sequence: Synthetic oligonucleotide
  Sense strand starting at position 191 of SEQ ID NO: 916476
gcugauuacccuuaucuug

SEQ ID NO: 1159645 - RNA, 19 nt, Artificial Sequence
  Description of Artificial Sequence: Synthetic oligonucleotide
  Antisense strand to SEQ ID NO: 1159644
caagauaaggguaaucagc

SEQ ID NO: 1159646 - RNA, 19 nt, Artificial Sequence
  Description of Artificial Sequence: Synthetic oligonucleotide
  Sense strand starting at position 217 of SEQ ID NO: 916476
cugaaucauggagguuuga

SEQ ID NO: 1159647 - RNA, 19 nt, Artificial Sequence
  Description of Artificial Sequence: Synthetic oligonucleotide
  Antisense strand to SEQ ID NO: 1159646
ucaaaccuccaugauucag

SEQ ID NO: 1159648 - RNA, 19 nt, Artificial Sequence
  Description of Artificial Sequence: Synthetic oligonucleotide
  Sense strand starting at position 349 of SEQ ID NO: 916476
ugcuuuauggcccaggaaa

SEQ ID NO: 1159649 - RNA, 19 nt, Artificial Sequence
  Description of Artificial Sequence: Synthetic oligonucleotide
  Antisense strand to SEQ ID NO: 1159648
uuuccugggccauaaagca

SEQ ID NO: 1159650 - RNA, 19 nt, Artificial Sequence
  Description of Artificial Sequence: Synthetic oligonucleotide
  Sense strand starting at position 485 of SEQ ID NO: 916476
gauggaggccuccauuagu

SEQ ID NO: 1159651 - RNA, 19 nt, Artificial Sequence
  Description of Artificial Sequence: Synthetic oligonucleotide
  Antisense strand to SEQ ID NO: 1159650
acuaauggaggccuccauc

SEQ ID NO: 1159652 - RNA, 19 nt, Artificial Sequence
  Description of Artificial Sequence: Synthetic oligonucleotide
  Sense strand starting at position 488 of SEQ ID NO: 916476
ggaggccuccauuagugaa

SEQ ID NO: 1159653 - RNA, 19 nt, Artificial Sequence
  Description of Artificial Sequence: Synthetic oligonucleotide
  Antisense strand to SEQ ID NO: 1159652
uucacuaauggaggccucc

SEQ ID NO: 1159654 - RNA, 19 nt, Artificial Sequence
  Description of Artificial Sequence: Synthetic oligonucleotide
  Sense strand starting at position 626 of SEQ ID NO: 916476
guaaacuuagcccaagguu

SEQ ID NO: 1159655 - RNA, 19 nt, Artificial Sequence
  Description of Artificial Sequence: Synthetic oligonucleotide
  Antisense strand to SEQ ID NO: 1159654
aaccuugggcuaaguuuac

SEQ ID NO: 1159656 - RNA, 19 nt, Artificial Sequence
  Description of Artificial Sequence: Synthetic oligonucleotide
  Sense strand starting at position 682 of SEQ ID NO: 916476
aaacuuagcccagguuaga

SEQ ID NO: 1159657 - RNA, 19 nt, Artificial Sequence
  Description of Artificial Sequence: Synthetic oligonucleotide
  Antisense strand to SEQ ID NO: 1159656
ucuaaccugggcuaaguuu

SEQ ID NO: 1159658 - RNA, 19 nt, Artificial Sequence
  Description of Artificial Sequence: Synthetic oligonucleotide
  Sense strand starting at position 861 of SEQ ID NO: 916476
uugaguacaguccaauuaa

SEQ ID NO: 1159659 - RNA, 19 nt, Artificial Sequence
  Description of Artificial Sequence: Synthetic oligonucleotide
  Antisense strand to SEQ ID NO: 1159658
uuaauuggacuguacucaa

SEQ ID NO: 1159660 - RNA, 19 nt, Artificial Sequence
  Description of Artificial Sequence: Synthetic oligonucleotide
  Sense strand starting at position 872 of SEQ ID NO: 916476
ccaauuaaugaaugauguu

SEQ ID NO: 1159661 - RNA, 19 nt, Artificial Sequence
  Description of Artificial Sequence: Synthetic oligonucleotide
  Antisense strand to SEQ ID NO: 1159660
aacaucauucauuaauugg

SEQ ID NO: 1159662 - RNA, 19 nt, Artificial Sequence
  Description of Artificial Sequence: Synthetic oligonucleotide
  Sense strand starting at position 961 of SEQ ID NO: 916476
agacgagcuccuuaauaag

SEQ ID NO: 1159663 - RNA, 19 nt, Artificial Sequence
  Description of Artificial Sequence: Synthetic oligonucleotide
  Antisense strand to SEQ ID NO: 1159662
cuuauuaaggagcucgucu

SEQ ID NO: 1159664 - RNA, 19 nt, Artificial Sequence
  Description of Artificial Sequence: Synthetic oligonucleotide
  Sense strand starting at position 1121 of SEQ ID NO: 916476
guucuugucggauaacuaa

SEQ ID NO: 1159665 - RNA, 19 nt, Artificial Sequence
  Description of Artificial Sequence: Synthetic oligonucleotide
  Antisense strand to SEQ ID NO: 1159664
uuaguuauccgacaagaac

SEQ ID NO: 1159666 - RNA, 19 nt, Artificial Sequence
  Description of Artificial Sequence: Synthetic oligonucleotide
  Sense strand starting at position 1185 of SEQ ID NO: 916476
ccgaguacacaauauuaug

SEQ ID NO: 1159667 - RNA, 19 nt, Artificial Sequence
  Description of Artificial Sequence: Synthetic oligonucleotide
  Antisense strand to SEQ ID NO: 1159666
cauaauauuguguacucgg

SEQ ID NO: 1159668 - RNA, 19 nt, Artificial Sequence
  Description of Artificial Sequence: Synthetic oligonucleotide
  Sense strand starting at position 1372 of SEQ ID NO: 916476
uuuaacauacgcuaagaau

SEQ ID NO: 1159669 - RNA, 19 nt, Artificial Sequence
  Description of Artificial Sequence: Synthetic oligonucleotide
  Antisense strand to SEQ ID NO: 1159668
auucuuagcguauguuaaa

SEQ ID NO: 1159670 - RNA, 19 nt, Artificial Sequence
  Description of Artificial Sequence: Synthetic oligonucleotide
  Sense strand starting at position 1893 of SEQ ID NO: 916476
ccgacaguuaacuggagaa

SEQ ID NO: 1159671 - RNA, 19 nt, Artificial Sequence
  Description of Artificial Sequence: Synthetic oligonucleotide
  Antisense strand to SEQ ID NO: 1159670
uucuccaguuaacugucgg

SEQ ID NO: 1159672 - RNA, 19 nt, Artificial Sequence
  Description of Artificial Sequence: Synthetic oligonucleotide
  Sense strand starting at position 2084 of SEQ ID NO: 916476
ccauuaggauuugaccaau

SEQ ID NO: 1159673 - RNA, 19 nt, Artificial Sequence
  Description of Artificial Sequence: Synthetic oligonucleotide
  Antisense strand to SEQ ID NO: 1159672
auuggucaaauccuaaugg

SEQ ID NO: 1159674 - RNA, 19 nt, Artificial Sequence
  Description of Artificial Sequence: Synthetic oligonucleotide
  Sense strand starting at position 2323 of SEQ ID NO: 916476
ggugcuugacagcaucaaa

SEQ ID NO: 1159675 - RNA, 19 nt, Artificial Sequence
  Description of Artificial Sequence: Synthetic oligonucleotide
  Antisense strand to SEQ ID NO: 1159674
uuugaugcugucaagcacc

SEQ ID NO: 1159676 - RNA, 19 nt, Artificial Sequence
  Description of Artificial Sequence: Synthetic oligonucleotide
  Sense strand starting at position 2361 of SEQ ID NO: 916476
ugcuaacaucuaugagaaa

SEQ ID NO: 1159677 - RNA, 19 nt, Artificial Sequence
  Description of Artificial Sequence: Synthetic oligonucleotide
  Antisense strand to SEQ ID NO: 1159676
uuucucauagauguuagca

SEQ ID NO: 1159678 - RNA, 19 nt, Artificial Sequence
  Description of Artificial Sequence: Synthetic oligonucleotide
  Sense strand starting at position 2631 of SEQ ID NO: 916476
acguuuauugaagaugguu

SEQ ID NO: 1159679 - RNA, 19 nt, Artificial Sequence
  Description of Artificial Sequence: Synthetic oligonucleotide
  Antisense strand to SEQ ID NO: 1159678
aaccaucuucaauaaacgu

SEQ ID NO: 1159680 - RNA, 19 nt, Artificial Sequence
  Description of Artificial Sequence: Synthetic oligonucleotide
  Sense strand starting at position 2639 of SEQ ID NO: 916476
ugaagaugguugucucaac

SEQ ID NO: 1159681 - RNA, 19 nt, Artificial Sequence
  Description of Artificial Sequence: Synthetic oligonucleotide
  Antisense strand to SEQ ID NO: 1159680
guugagacaaccaucuuca

SEQ ID NO: 1159682 - RNA, 19 nt, Artificial Sequence
  Description of Artificial Sequence: Synthetic oligonucleotide
  Sense strand starting at position 2640 of SEQ ID NO: 916476
gaagaugguugucucaacu

SEQ ID NO: 1159683 - RNA, 19 nt, Artificial Sequence
  Description of Artificial Sequence: Synthetic oligonucleotide
  Antisense strand to SEQ ID NO: 1159682
aguugagacaaccaucuuc

SEQ ID NO: 1159684 - RNA, 19 nt, Artificial Sequence
  Description of Artificial Sequence: Synthetic oligonucleotide
  Sense strand starting at position 2746 of SEQ ID NO: 916476
gauaaauguuucuugacag

SEQ ID NO: 1159685 - RNA, 19 nt, Artificial Sequence
  Description of Artificial Sequence: Synthetic oligonucleotide
  Antisense strand to SEQ ID NO: 1159684
cugucaagaaacauuuauc

SEQ ID NO: 1159686 - RNA, 19 nt, Artificial Sequence
  Description of Artificial Sequence: Synthetic oligonucleotide
  Sense strand starting at position 2804 of SEQ ID NO: 916476
uccagauaguucucugaua

SEQ ID NO: 1159687 - RNA, 19 nt, Artificial Sequence
  Description of Artificial Sequence: Synthetic oligonucleotide
  Antisense strand to SEQ ID NO: 1159686
uaucagagaacuaucugga

SEQ ID NO: 1159688 - RNA, 19 nt, Artificial Sequence
  Description of Artificial Sequence: Synthetic oligonucleotide
  Sense strand starting at position 2805 of SEQ ID NO: 916476
ccagauaguucucugauau

SEQ ID NO: 1159689 - RNA, 19 nt, Artificial Sequence
  Description of Artificial Sequence: Synthetic oligonucleotide
  Antisense strand to SEQ ID NO: 1159688
auaucagagaacuaucugg

SEQ ID NO: 1159690 - RNA, 19 nt, Artificial Sequence
  Description of Artificial Sequence: Synthetic oligonucleotide
  Sense strand starting at position 2872 of SEQ ID NO: 916476
ucaauaaugguguaaugug

SEQ ID NO: 1159691 - RNA, 19 nt, Artificial Sequence
  Description of Artificial Sequence: Synthetic oligonucleotide
  Antisense strand to SEQ ID NO: 1159690
cacauuacaccauuauuga

SEQ ID NO: 1159692 - RNA, 19 nt, Artificial Sequence
  Description of Artificial Sequence: Synthetic oligonucleotide
  Sense strand starting at position 2954 of SEQ ID NO: 916476
agucauuucggacggcaga

SEQ ID NO: 1159693 - RNA, 19 nt, Artificial Sequence
  Description of Artificial Sequence: Synthetic oligonucleotide
  Antisense strand to SEQ ID NO: 1159692
ucugccguccgaaaugacu

SEQ ID NO: 1159694 - RNA, 19 nt, Artificial Sequence
  Description of Artificial Sequence: Synthetic oligonucleotide
  Sense strand starting at position 2955 of SEQ ID NO: 916476
gucauuucggacggcagaa

SEQ ID NO: 1159695 - RNA, 19 nt, Artificial Sequence
  Description of Artificial Sequence: Synthetic oligonucleotide
  Antisense strand to SEQ ID NO: 1159694
uucugccguccgaaaugac

SEQ ID NO: 1159696 - RNA, 19 nt, Artificial Sequence
  Description of Artificial Sequence: Synthetic oligonucleotide
  Sense strand starting at position 2975 of SEQ ID NO: 916476
augcgucaggaggaaauau

SEQ ID NO: 1159697 - RNA, 19 nt, Artificial Sequence
  Description of Artificial Sequence: Synthetic oligonucleotide
  Antisense strand to SEQ ID NO: 1159696
auauuuccuccugacgcau

SEQ ID NO: 1159698 - RNA, 19 nt, Artificial Sequence
  Description of Artificial Sequence: Synthetic oligonucleotide
  Sense strand starting at position 3065 of SEQ ID NO: 916476
aggcuucuuccaggaacaa

SEQ ID NO: 1159699 - RNA, 19 nt, Artificial Sequence
  Description of Artificial Sequence: Synthetic oligonucleotide
  Antisense strand to SEQ ID NO: 1159698
uuguuccuggaagaagccu

SEQ ID NO: 1159700 - RNA, 19 nt, Artificial Sequence
  Description of Artificial Sequence: Synthetic oligonucleotide
  Sense strand starting at position 3066 of SEQ ID NO: 916476
ggcuucuuccaggaacaac

SEQ ID NO: 1159701 - RNA, 19 nt, Artificial Sequence
  Description of Artificial Sequence: Synthetic oligonucleotide
  Antisense strand to SEQ ID NO: 1159700
guuguuccuggaagaagcc

SEQ ID NO: 1159702 - RNA, 19 nt, Artificial Sequence
  Description of Artificial Sequence: Synthetic oligonucleotide
  Sense strand starting at position 3100 of SEQ ID NO: 916476
acauuugucauguguugac

SEQ ID NO: 1159703 - RNA, 19 nt, Artificial Sequence
  Description of Artificial Sequence: Synthetic oligonucleotide
  Antisense strand to SEQ ID NO: 1159702
gucaacacaugacaaaugu

SEQ ID NO: 1159704 - RNA, 19 nt, Artificial Sequence
  Description of Artificial Sequence: Synthetic oligonucleotide
  Sense strand starting at position 3107 of SEQ ID NO: 916476
ucauguguugacugaauaa

SEQ ID NO: 1159705 - RNA, 19 nt, Artificial Sequence
  Description of Artificial Sequence: Synthetic oligonucleotide
  Antisense strand to SEQ ID NO: 1159704
uuauucagucaacacauga

SEQ ID NO: 1159706 - RNA, 19 nt, Artificial Sequence
  Description of Artificial Sequence: Synthetic oligonucleotide
  Sense strand starting at position 3207 of SEQ ID NO: 916476
ccugaauccugauugaugu

SEQ ID NO: 1159707 - RNA, 19 nt, Artificial Sequence
  Description of Artificial Sequence: Synthetic oligonucleotide
  Antisense strand to SEQ ID NO: 1159706
acaucaaucaggauucagg

SEQ ID NO: 1159708 - RNA, 19 nt, Artificial Sequence
  Description of Artificial Sequence: Synthetic oligonucleotide
  Sense strand starting at position 3342 of SEQ ID NO: 916476
gauuaauguuaauugguga

SEQ ID NO: 1159709 - RNA, 19 nt, Artificial Sequence
  Description of Artificial Sequence: Synthetic oligonucleotide
  Antisense strand to SEQ ID NO: 1159708
ucaccaauuaacauuaauc

SEQ ID NO: 1159710 - RNA, 19 nt, Artificial Sequence
  Description of Artificial Sequence: Synthetic oligonucleotide
  Sense strand starting at position 3345 of SEQ ID NO: 916476
uaauguuaauuggugauga

SEQ ID NO: 1159711 - RNA, 19 nt, Artificial Sequence
  Description of Artificial Sequence: Synthetic oligonucleotide
  Antisense strand to SEQ ID NO: 1159710
ucaucaccaauuaacauua

SEQ ID NO: 1159712 - RNA, 19 nt, Artificial Sequence
  Description of Artificial Sequence: Synthetic oligonucleotide
  Sense strand starting at position 3363 of SEQ ID NO: 916476
acagcaucucugucgugua

SEQ ID NO: 1159713 - RNA, 19 nt, Artificial Sequence
  Description of Artificial Sequence: Synthetic oligonucleotide
  Antisense strand to SEQ ID NO: 1159712
uacacgacagagaugcugu

SEQ ID NO: 1159714 - RNA, 19 nt, Artificial Sequence
  Description of Artificial Sequence: Synthetic oligonucleotide
  Sense strand starting at position 3373 of SEQ ID NO: 916476
ugucguguaaauuaagaau

SEQ ID NO: 1159715 - RNA, 19 nt, Artificial Sequence
  Description of Artificial Sequence: Synthetic oligonucleotide
  Antisense strand to SEQ ID NO: 1159714
auucuuaauuuacacgaca

SEQ ID NO: 1159716 - RNA, 19 nt, Artificial Sequence
  Description of Artificial Sequence: Synthetic oligonucleotide
  Sense strand starting at position 3379 of SEQ ID NO: 916476
guaaauuaagaauggcaca

SEQ ID NO: 1159717 - RNA, 19 nt, Artificial Sequence
  Description of Artificial Sequence: Synthetic oligonucleotide
  Antisense strand to SEQ ID NO: 1159716
ugugccauucuuaauuuac

SEQ ID NO: 1159718 - RNA, 19 nt, Artificial Sequence
  Description of Artificial Sequence: Synthetic oligonucleotide
  Sense strand starting at position 3773 of SEQ ID NO: 916476
gugacuaccuuaguaaaug

SEQ ID NO: 1159719 - RNA, 19 nt, Artificial Sequence
  Description of Artificial Sequence: Synthetic oligonucleotide
  Antisense strand to SEQ ID NO: 1159718
cauuuacuaagguagucac

SEQ ID NO: 1159720 - RNA, 19 nt, Artificial Sequence
  Description of Artificial Sequence: Synthetic oligonucleotide
  Sense strand starting at position 3903 of SEQ ID NO: 916476
ucacaugugcucgcagcaa

SEQ ID NO: 1159721 - RNA, 19 nt, Artificial Sequence
  Description of Artificial Sequence: Synthetic oligonucleotide
  Antisense strand to SEQ ID NO: 1159720
uugcugcgagcacauguga

SEQ ID NO: 1159722 - RNA, 19 nt, Artificial Sequence
  Description of Artificial Sequence: Synthetic oligonucleotide
  Sense strand starting at position 82 of SEQ ID NO: 916477
acaagaucucgccauugca

SEQ ID NO: 1159723 - RNA, 19 nt, Artificial Sequence
  Description of Artificial Sequence: Synthetic oligonucleotide
  Antisense strand to SEQ ID NO: 1159722
ugcaauggcgagaucuugu

SEQ ID NO: 1159724 - RNA, 19 nt, Artificial Sequence
  Description of Artificial Sequence: Synthetic oligonucleotide
  Sense strand starting at position 579 of SEQ ID NO: 916477
ucaguauuggcaggaguga

SEQ ID NO: 1159725 - RNA, 19 nt, Artificial Sequence
  Description of Artificial Sequence: Synthetic oligonucleotide
  Antisense strand to SEQ ID NO: 1159724
ucacuccugccaauacuga

SEQ ID NO: 1159726 - RNA, 19 nt, Artificial Sequence
  Description of Artificial Sequence: Synthetic oligonucleotide
  Sense strand starting at position 580 of SEQ ID NO: 916477
caguauuggcaggagugaa

SEQ ID NO: 1159727 - RNA, 19 nt, Artificial Sequence
  Description of Artificial Sequence: Synthetic oligonucleotide
  Antisense strand to SEQ ID NO: 1159726
uucacuccugccaauacug

SEQ ID NO: 1159728 - RNA, 19 nt, Artificial Sequence
  Description of Artificial Sequence: Synthetic oligonucleotide
  Sense strand starting at position 620 of SEQ ID NO: 916477
gcaaguuaccaguagcaau

SEQ ID NO: 1159729 - RNA, 19 nt, Artificial Sequence
  Description of Artificial Sequence: Synthetic oligonucleotide
  Antisense strand to SEQ ID NO: 1159728
auugcuacugguaacuugc

SEQ ID NO: 1159730 - RNA, 19 nt, Artificial Sequence
  Description of Artificial Sequence: Synthetic oligonucleotide
  Sense strand starting at position 1013 of SEQ ID NO: 916477
cagaaauagucacacggga

SEQ ID NO: 1159731 - RNA, 19 nt, Artificial Sequence
  Description of Artificial Sequence: Synthetic oligonucleotide
  Antisense strand to SEQ ID NO: 1159730
ucccgugugacuauuucug

SEQ ID NO: 1159732 - RNA, 19 nt, Artificial Sequence
  Description of Artificial Sequence: Synthetic oligonucleotide
  Sense strand starting at position 1015 of SEQ ID NO: 916477
gaaauagucacacgggaug

SEQ ID NO: 1159733 - RNA, 19 nt, Artificial Sequence
  Description of Artificial Sequence: Synthetic oligonucleotide
  Antisense strand to SEQ ID NO: 1159732
caucccgugugacuauuuc

SEQ ID NO: 1159734 - RNA, 19 nt, Artificial Sequence
  Description of Artificial Sequence: Synthetic oligonucleotide
  Sense strand starting at position 1043 of SEQ ID NO: 916477
agcggcacuaucuguaaua

SEQ ID NO: 1159735 - RNA, 19 nt, Artificial Sequence
  Description of Artificial Sequence: Synthetic oligonucleotide
  Antisense strand to SEQ ID NO: 1159734
uauuacagauagugccgcu

SEQ ID NO: 1159736 - RNA, 19 nt, Artificial Sequence
  Description of Artificial Sequence: Synthetic oligonucleotide
  Sense strand starting at position 1044 of SEQ ID NO: 916477
gcggcacuaucuguaauac

SEQ ID NO: 1159737 - RNA, 19 nt, Artificial Sequence
  Description of Artificial Sequence: Synthetic oligonucleotide
  Antisense strand to SEQ ID NO: 1159736
guauuacagauagugccgc

SEQ ID NO: 1159738 - RNA, 19 nt, Artificial Sequence
  Description of Artificial Sequence: Synthetic oligonucleotide
  Sense strand starting at position 1045 of SEQ ID NO: 916477
cggcacuaucuguaauacu

SEQ ID NO: 1159739 - RNA, 19 nt, Artificial Sequence
  Description of Artificial Sequence: Synthetic oligonucleotide
  Antisense strand to SEQ ID NO: 1159738
aguauuacagauagugccg

SEQ ID NO: 1159740 - RNA, 19 nt, Artificial Sequence
  Description of Artificial Sequence: Synthetic oligonucleotide
  Sense strand starting at position 1124 of SEQ ID NO: 916477
guauacucaugcuguggaa

SEQ ID NO: 1159741 - RNA, 19 nt, Artificial Sequence
  Description of Artificial Sequence: Synthetic oligonucleotide
  Antisense strand to SEQ ID NO: 1159740
uuccacagcaugaguauac

SEQ ID NO: 1159742 - RNA, 19 nt, Artificial Sequence
  Description of Artificial Sequence: Synthetic oligonucleotide
  Sense strand starting at position 1126 of SEQ ID NO: 916477
auacucaugcuguggaaua

SEQ ID NO: 1159743 - RNA, 19 nt, Artificial Sequence
  Description of Artificial Sequence: Synthetic oligonucleotide
  Antisense strand to SEQ ID NO: 1159742
uauuccacagcaugaguau

SEQ ID NO: 1159744 - RNA, 19 nt, Artificial Sequence
  Description of Artificial Sequence: Synthetic oligonucleotide
  Sense strand starting at position 1219 of SEQ ID NO: 916477
ucaucuuguuaguacaaca

SEQ ID NO: 1159745 - RNA, 19 nt, Artificial Sequence
  Description of Artificial Sequence: Synthetic oligonucleotide
  Antisense strand to SEQ ID NO: 1159744
uguuguacuaacaagauga

SEQ ID NO: 1159746 - RNA, 19 nt, Artificial Sequence
  Description of Artificial Sequence: Synthetic oligonucleotide
  Sense strand starting at position 1425 of SEQ ID NO: 916477
auuaaauacugggagguca

SEQ ID NO: 1159747 - RNA, 19 nt, Artificial Sequence
  Description of Artificial Sequence: Synthetic oligonucleotide
  Antisense strand to SEQ ID NO: 1159746
ugaccucccaguauuuaau

SEQ ID NO: 1159748 - RNA, 19 nt, Artificial Sequence
  Description of Artificial Sequence: Synthetic oligonucleotide
  Sense strand starting at position 1489 of SEQ ID NO: 916477
cgcuuaacaauguaaugga

SEQ ID NO: 1159749 - RNA, 19 nt, Artificial Sequence
  Description of Artificial Sequence: Synthetic oligonucleotide
  Antisense strand to SEQ ID NO: 1159748
uccauuacauuguuaagcg

SEQ ID NO: 1159750 - RNA, 19 nt, Artificial Sequence
  Description of Artificial Sequence: Synthetic oligonucleotide
  Sense strand starting at position 1549 of SEQ ID NO: 916477
cugaccaguucuuaacagu

SEQ ID NO: 1159751 - RNA, 19 nt, Artificial Sequence
  Description of Artificial Sequence: Synthetic oligonucleotide
  Antisense strand to SEQ ID NO: 1159750
acuguuaagaacuggucag

SEQ ID NO: 1159752 - RNA, 19 nt, Artificial Sequence
  Description of Artificial Sequence: Synthetic oligonucleotide
  Sense strand starting at position 1579 of SEQ ID NO: 916477
cgcaguuacgccagaggua

SEQ ID NO: 1159753 - RNA, 19 nt, Artificial Sequence
  Description of Artificial Sequence: Synthetic oligonucleotide
  Antisense strand to SEQ ID NO: 1159752
uaccucuggcguaacugcg

SEQ ID NO: 1159754 - RNA, 19 nt, Artificial Sequence
  Description of Artificial Sequence: Synthetic oligonucleotide
  Sense strand starting at position 2036 of SEQ ID NO: 916477
ggagacaagucaggacuua

SEQ ID NO: 1159755 - RNA, 19 nt, Artificial Sequence
  Description of Artificial Sequence: Synthetic oligonucleotide
  Antisense strand to SEQ ID NO: 1159754
uaaguccugacuugucucc

SEQ ID NO: 1159756 - RNA, 19 nt, Artificial Sequence
  Description of Artificial Sequence: Synthetic oligonucleotide
  Sense strand starting at position 2073 of SEQ ID NO: 916477
ucggaacgugucugaacuu

SEQ ID NO: 1159757 - RNA, 19 nt, Artificial Sequence
  Description of Artificial Sequence: Synthetic oligonucleotide
  Antisense strand to SEQ ID NO: 1159756
aaguucagacacguuccga

SEQ ID NO: 1159758 - RNA, 19 nt, Artificial Sequence
  Description of Artificial Sequence: Synthetic oligonucleotide
  Sense strand starting at position 2299 of SEQ ID NO: 916477
ccgcgagagccguccgaaa

SEQ ID NO: 1159759 - RNA, 19 nt, Artificial Sequence
  Description of Artificial Sequence: Synthetic oligonucleotide
  Antisense strand to SEQ ID NO: 1159758
uuucggacggcucucgcgg

SEQ ID NO: 1159760 - RNA, 19 nt, Artificial Sequence
  Description of Artificial Sequence: Synthetic oligonucleotide
  Sense strand starting at position 2300 of SEQ ID NO: 916477
cgcgagagccguccgaaau

SEQ ID NO: 1159761 - RNA, 19 nt, Artificial Sequence
  Description of Artificial Sequence: Synthetic oligonucleotide
  Antisense strand to SEQ ID NO: 1159760
auuucggacggcucucgcg

SEQ ID NO: 1159762 - RNA, 19 nt, Artificial Sequence
  Description of Artificial Sequence: Synthetic oligonucleotide
  Sense strand starting at position 2301 of SEQ ID NO: 916477
gcgagagccguccgaaauc

SEQ ID NO: 1159763 - RNA, 19 nt, Artificial Sequence
  Description of Artificial Sequence: Synthetic oligonucleotide
  Antisense strand to SEQ ID NO: 1159762
gauuucggacggcucucgc

SEQ ID NO: 1159764 - RNA, 19 nt, Artificial Sequence
  Description of Artificial Sequence: Synthetic oligonucleotide
  Sense strand starting at position 3065 of SEQ ID NO: 916477
gcaagguuuggcgcuguga

SEQ ID NO: 1159765 - RNA, 19 nt, Artificial Sequence
  Description of Artificial Sequence: Synthetic oligonucleotide
  Antisense strand to SEQ ID NO: 1159764
ucacagcgccaaaccuugc

SEQ ID NO: 1159766 - RNA, 19 nt, Artificial Sequence
  Description of Artificial Sequence: Synthetic oligonucleotide
  Sense strand starting at position 3067 of SEQ ID NO: 916477
aagguuuggcgcugugaca

SEQ ID NO: 1159767 - RNA, 19 nt, Artificial Sequence
  Description of Artificial Sequence: Synthetic oligonucleotide
  Antisense strand to SEQ ID NO: 1159766
ugucacagcgccaaaccuu

SEQ ID NO: 1159768 - RNA, 19 nt, Artificial Sequence
  Description of Artificial Sequence: Synthetic oligonucleotide
  Sense strand starting at position 3098 of SEQ ID NO: 916477
uugcgcuauguuuguauuu

SEQ ID NO: 1159769 - RNA, 19 nt, Artificial Sequence
  Description of Artificial Sequence: Synthetic oligonucleotide
  Antisense strand to SEQ ID NO: 1159768
aaauacaaacauagcgcaa

SEQ ID NO: 1159770 - RNA, 19 nt, Artificial Sequence
  Description of Artificial Sequence: Synthetic oligonucleotide
  Sense strand starting at position 3100 of SEQ ID NO: 916477
gcgcuauguuuguauuucu

SEQ ID NO: 1159771 - RNA, 19 nt, Artificial Sequence
  Description of Artificial Sequence: Synthetic oligonucleotide
  Antisense strand to SEQ ID NO: 1159770
agaaauacaaacauagcgc

SEQ ID NO: 1159772 - RNA, 19 nt, Artificial Sequence
  Description of Artificial Sequence: Synthetic oligonucleotide
  Sense strand starting at position 3107 of SEQ ID NO: 916477
guuuguauuucuuguguuu

SEQ ID NO: 1159773 - RNA, 19 nt, Artificial Sequence
  Description of Artificial Sequence: Synthetic oligonucleotide
  Antisense strand to SEQ ID NO: 1159772
aaacacaagaaauacaaac

SEQ ID NO: 1159774 - RNA, 19 nt, Artificial Sequence
  Description of Artificial Sequence: Synthetic oligonucleotide
  Sense strand starting at position 3109 of SEQ ID NO: 916477
uuguauuucuuguguuuac

SEQ ID NO: 1159775 - RNA, 19 nt, Artificial Sequence
  Description of Artificial Sequence: Synthetic oligonucleotide
  Antisense strand to SEQ ID NO: 1159774
guaaacacaagaaauacaa

SEQ ID NO: 1159776 - RNA, 19 nt, Artificial Sequence
  Description of Artificial Sequence: Synthetic oligonucleotide
  Sense strand starting at position 3110 of SEQ ID NO: 916477
uguauuucuuguguuuaca

SEQ ID NO: 1159777 - RNA, 19 nt, Artificial Sequence
  Description of Artificial Sequence: Synthetic oligonucleotide
  Antisense strand to SEQ ID NO: 1159776
uguaaacacaagaaauaca

SEQ ID NO: 1159778 - RNA, 19 nt, Artificial Sequence
  Description of Artificial Sequence: Synthetic oligonucleotide
  Sense strand starting at position 3141 of SEQ ID NO: 916477
gguggaaacugcgacaaau

SEQ ID NO: 1159779 - RNA, 19 nt, Artificial Sequence
  Description of Artificial Sequence: Synthetic oligonucleotide
  Antisense strand to SEQ ID NO: 1159778
auuugucgcaguuuccacc

SEQ ID NO: 1159780 - RNA, 19 nt, Artificial Sequence
  Description of Artificial Sequence: Synthetic oligonucleotide
  Sense strand starting at position 3244 of SEQ ID NO: 916477
guuguacccaaaugaguua

SEQ ID NO: 1159781 - RNA, 19 nt, Artificial Sequence
  Description of Artificial Sequence: Synthetic oligonucleotide
  Antisense strand to SEQ ID NO: 1159780
uaacucauuuggguacaac

SEQ ID NO: 1159782 - RNA, 19 nt, Artificial Sequence
  Description of Artificial Sequence: Synthetic oligonucleotide
  Sense strand starting at position 3309 of SEQ ID NO: 916477
ggcuuauacaccggugcau

SEQ ID NO: 1159783 - RNA, 19 nt, Artificial Sequence
  Description of Artificial Sequence: Synthetic oligonucleotide
  Antisense strand to SEQ ID NO: 1159782
augcaccgguguauaagcc

SEQ ID NO: 1159784 - RNA, 19 nt, Artificial Sequence
  Description of Artificial Sequence: Synthetic oligonucleotide
  Sense strand starting at position 3330 of SEQ ID NO: 916477
agcuguucugguuggagaa

SEQ ID NO: 1159785 - RNA, 19 nt, Artificial Sequence
  Description of Artificial Sequence: Synthetic oligonucleotide
  Antisense strand to SEQ ID NO: 1159784
uucuccaaccagaacagcu

SEQ ID NO: 1159786 - RNA, 19 nt, Artificial Sequence
  Description of Artificial Sequence: Synthetic oligonucleotide
  Sense strand starting at position 3331 of SEQ ID NO: 916477
gcuguucugguuggagaac

SEQ ID NO: 1159787 - RNA, 19 nt, Artificial Sequence
  Description of Artificial Sequence: Synthetic oligonucleotide
  Antisense strand to SEQ ID NO: 1159786
guucuccaaccagaacagc

SEQ ID NO: 1159788 - RNA, 19 nt, Artificial Sequence
  Description of Artificial Sequence: Synthetic oligonucleotide
  Sense strand starting at position 3333 of SEQ ID NO: 916477
uguucugguuggagaacga

SEQ ID NO: 1159789 - RNA, 19 nt, Artificial Sequence
  Description of Artificial Sequence: Synthetic oligonucleotide
  Antisense strand to SEQ ID NO: 1159788
ucguucuccaaccagaaca

SEQ ID NO: 1159790 - RNA, 19 nt, Artificial Sequence
  Description of Artificial Sequence: Synthetic oligonucleotide
  Sense strand starting at position 3608 of SEQ ID NO: 916477
gcaggacaauccugugaac

SEQ ID NO: 1159791 - RNA, 19 nt, Artificial Sequence
  Description of Artificial Sequence: Synthetic oligonucleotide
  Antisense strand to SEQ ID NO: 1159790
guucacaggauuguccugc

SEQ ID NO: 1159792 - RNA, 19 nt, Artificial Sequence
  Description of Artificial Sequence: Synthetic oligonucleotide
  Sense strand starting at position 3714 of SEQ ID NO: 916477
aaaguuuggguuuguuaau

SEQ ID NO: 1159793 - RNA, 19 nt, Artificial Sequence
  Description of Artificial Sequence: Synthetic oligonucleotide
  Antisense strand to SEQ ID NO: 1159792
auuaacaaacccaaacuuu

SEQ ID NO: 1159794 - RNA, 19 nt, Artificial Sequence
  Description of Artificial Sequence: Synthetic oligonucleotide
  Sense strand starting at position 3799 of SEQ ID NO: 916477
cccacagagauguggcaaa

SEQ ID NO: 1159795 - RNA, 19 nt, Artificial Sequence
  Description of Artificial Sequence: Synthetic oligonucleotide
  Antisense strand to SEQ ID NO: 1159794
uuugccacaucucuguggg

SEQ ID NO: 1159796 - RNA, 19 nt, Artificial Sequence
  Description of Artificial Sequence: Synthetic oligonucleotide
  Sense strand starting at position 3835 of SEQ ID NO: 916477
cucauaaauugaggacaua

SEQ ID NO: 1159797 - RNA, 19 nt, Artificial Sequence
  Description of Artificial Sequence: Synthetic oligonucleotide
  Antisense strand to SEQ ID NO: 1159796
uauguccucaauuuaugag

SEQ ID NO: 1159798 - RNA, 19 nt, Artificial Sequence
  Description of Artificial Sequence: Synthetic oligonucleotide
  Sense strand starting at position 3855 of SEQ ID NO: 916477
agaauugaguuagcuaaac

SEQ ID NO: 1159799 - RNA, 19 nt, Artificial Sequence
  Description of Artificial Sequence: Synthetic oligonucleotide
  Antisense strand to SEQ ID NO: 1159798
guuuagcuaacucaauucu

SEQ ID NO: 1159800 - RNA, 19 nt, Artificial Sequence
  Description of Artificial Sequence: Synthetic oligonucleotide
  Sense strand starting at position 3907 of SEQ ID NO: 916477
uuucuucucuggccaguaa

SEQ ID NO: 1159801 - RNA, 19 nt, Artificial Sequence
  Description of Artificial Sequence: Synthetic oligonucleotide
  Antisense strand to SEQ ID NO: 1159800
uuacuggccagagaagaaa

SEQ ID NO: 1159802 - RNA, 19 nt, Artificial Sequence
  Description of Artificial Sequence: Synthetic oligonucleotide
  Sense strand starting at position 168 of SEQ ID NO: 916478
cagaaauagucacacggga

SEQ ID NO: 1159803 - RNA, 19 nt, Artificial Sequence
  Description of Artificial Sequence: Synthetic oligonucleotide
  Antisense strand to SEQ ID NO: 1159802
ucccgugugacuauuucug

SEQ ID NO: 1159804 - RNA, 19 nt, Artificial Sequence
  Description of Artificial Sequence: Synthetic oligonucleotide
  Sense strand starting at position 170 of SEQ ID NO: 916478
gaaauagucacacgggaug

SEQ ID NO: 1159805 - RNA, 19 nt, Artificial Sequence
  Description of Artificial Sequence: Synthetic oligonucleotide
  Antisense strand to SEQ ID NO: 1159804
caucccgugugacuauuuc

SEQ ID NO: 1159806 - RNA, 19 nt, Artificial Sequence
  Description of Artificial Sequence: Synthetic oligonucleotide
  Sense strand starting at position 198 of SEQ ID NO: 916478
agcggcacuaucuguaaua

SEQ ID NO: 1159807 - RNA, 19 nt, Artificial Sequence
  Description of Artificial Sequence: Synthetic oligonucleotide
  Antisense strand to SEQ ID NO: 1159806
uauuacagauagugccgcu

SEQ ID NO: 1159808 - RNA, 19 nt, Artificial Sequence
  Description of Artificial Sequence: Synthetic oligonucleotide
  Sense strand starting at position 199 of SEQ ID NO: 916478
gcggcacuaucuguaauac

SEQ ID NO: 1159809 - RNA, 19 nt, Artificial Sequence
  Description of Artificial Sequence: Synthetic oligonucleotide
  Antisense strand to SEQ ID NO: 1159808
guauuacagauagugccgc

SEQ ID NO: 1159810 - RNA, 19 nt, Artificial Sequence
  Description of Artificial Sequence: Synthetic oligonucleotide
  Sense strand starting at position 200 of SEQ ID NO: 916478
cggcacuaucuguaauacu

SEQ ID NO: 1159811 - RNA, 19 nt, Artificial Sequence
  Description of Artificial Sequence: Synthetic oligonucleotide
  Antisense strand to SEQ ID NO: 1159810
aguauuacagauagugccg

SEQ ID NO: 1159812 - RNA, 19 nt, Artificial Sequence
  Description of Artificial Sequence: Synthetic oligonucleotide
  Sense strand starting at position 281 of SEQ ID NO: 916478
auacucaugcuguggaaua

SEQ ID NO: 1159813 - RNA, 19 nt, Artificial Sequence
  Description of Artificial Sequence: Synthetic oligonucleotide
  Antisense strand to SEQ ID NO: 1159812
uauuccacagcaugaguau

SEQ ID NO: 1159814 - RNA, 19 nt, Artificial Sequence
  Description of Artificial Sequence: Synthetic oligonucleotide
  Sense strand starting at position 580 of SEQ ID NO: 916478
auuaaauacugggagguca

SEQ ID NO: 1159815 - RNA, 19 nt, Artificial Sequence
  Description of Artificial Sequence: Synthetic oligonucleotide
  Antisense strand to SEQ ID NO: 1159814
ugaccucccaguauuuaau

SEQ ID NO: 1159816 - RNA, 19 nt, Artificial Sequence
  Description of Artificial Sequence: Synthetic oligonucleotide
  Sense strand starting at position 644 of SEQ ID NO: 916478
cgcuuaacaauguaaugga

SEQ ID NO: 1159817 - RNA, 19 nt, Artificial Sequence
  Description of Artificial Sequence: Synthetic oligonucleotide
  Antisense strand to SEQ ID NO: 1159816
uccauuacauuguuaagcg

SEQ ID NO: 1159818 - RNA, 19 nt, Artificial Sequence
  Description of Artificial Sequence: Synthetic oligonucleotide
  Sense strand starting at position 734 of SEQ ID NO: 916478
cgcaguuacgccagaggua

SEQ ID NO: 1159819 - RNA, 19 nt, Artificial Sequence
  Description of Artificial Sequence: Synthetic oligonucleotide
  Antisense strand to SEQ ID NO: 1159818
uaccucuggcguaacugcg

SEQ ID NO: 1159820 - RNA, 19 nt, Artificial Sequence
  Description of Artificial Sequence: Synthetic oligonucleotide
  Sense strand starting at position 1228 of SEQ ID NO: 916478
ucggaacgugucugaacuu

SEQ ID NO: 1159821 - RNA, 19 nt, Artificial Sequence
  Description of Artificial Sequence: Synthetic oligonucleotide
  Antisense strand to SEQ ID NO: 1159820
aaguucagacacguuccga

SEQ ID NO: 1159822 - RNA, 19 nt, Artificial Sequence
  Description of Artificial Sequence: Synthetic oligonucleotide
  Sense strand starting at position 1454 of SEQ ID NO: 916478
ccgcgagagccguccgaaa

SEQ ID NO: 1159823 - RNA, 19 nt, Artificial Sequence
  Description of Artificial Sequence: Synthetic oligonucleotide
  Antisense strand to SEQ ID NO: 1159822
uuucggacggcucucgcgg

SEQ ID NO: 1159824 - RNA, 19 nt, Artificial Sequence
  Description of Artificial Sequence: Synthetic oligonucleotide
  Sense strand starting at position 1455 of SEQ ID NO: 916478
cgcgagagccguccgaaau

SEQ ID NO: 1159825 - RNA, 19 nt, Artificial Sequence
  Description of Artificial Sequence: Synthetic oligonucleotide
  Antisense strand to SEQ ID NO: 1159824
auuucggacggcucucgcg

SEQ ID NO: 1159826 - RNA, 19 nt, Artificial Sequence
  Description of Artificial Sequence: Synthetic oligonucleotide
  Sense strand starting at position 2220 of SEQ ID NO: 916478
gcaagguuuggcgcuguga

SEQ ID NO: 1159827 - RNA, 19 nt, Artificial Sequence
  Description of Artificial Sequence: Synthetic oligonucleotide
  Antisense strand to SEQ ID NO: 1159826
ucacagcgccaaaccuugc

SEQ ID NO: 1159828 - RNA, 19 nt, Artificial Sequence
  Description of Artificial Sequence: Synthetic oligonucleotide
  Sense strand starting at position 2253 of SEQ ID NO: 916478
uugcgcuauguuuguauuu

SEQ ID NO: 1159829 - RNA, 19 nt, Artificial Sequence
  Description of Artificial Sequence: Synthetic oligonucleotide
  Antisense strand to SEQ ID NO: 1159828
aaauacaaacauagcgcaa

SEQ ID NO: 1159830 - RNA, 19 nt, Artificial Sequence
  Description of Artificial Sequence: Synthetic oligonucleotide
  Sense strand starting at position 2265 of SEQ ID NO: 916478
uguauuucuuguguuuaca

SEQ ID NO: 1159831 - RNA, 19 nt, Artificial Sequence
  Description of Artificial Sequence: Synthetic oligonucleotide
  Antisense strand to SEQ ID NO: 1159830
uguaaacacaagaaauaca

SEQ ID NO: 1159832 - RNA, 19 nt, Artificial Sequence
  Description of Artificial Sequence: Synthetic oligonucleotide
  Sense strand starting at position 2399 of SEQ ID NO: 916478
guuguacccaaaugaguua

SEQ ID NO: 1159833 - RNA, 19 nt, Artificial Sequence
  Description of Artificial Sequence: Synthetic oligonucleotide
  Antisense strand to SEQ ID NO: 1159832
uaacucauuuggguacaac

SEQ ID NO: 1159834 - RNA, 19 nt, Artificial Sequence
  Description of Artificial Sequence: Synthetic oligonucleotide
  Sense strand starting at position 2485 of SEQ ID NO: 916478
agcuguucugguuggagaa

SEQ ID NO: 1159835 - RNA, 19 nt, Artificial Sequence
  Description of Artificial Sequence: Synthetic oligonucleotide
  Antisense strand to SEQ ID NO: 1159834
uucuccaaccagaacagcu

SEQ ID NO: 1159836 - RNA, 19 nt, Artificial Sequence
  Description of Artificial Sequence: Synthetic oligonucleotide
  Sense strand starting at position 2486 of SEQ ID NO: 916478
gcuguucugguuggagaac

SEQ ID NO: 1159837 - RNA, 19 nt, Artificial Sequence
  Description of Artificial Sequence: Synthetic oligonucleotide
  Antisense strand to SEQ ID NO: 1159836
guucuccaaccagaacagc

SEQ ID NO: 1159838 - RNA, 19 nt, Artificial Sequence
  Description of Artificial Sequence: Synthetic oligonucleotide
  Sense strand starting at position 2488 of SEQ ID NO: 916478
uguucugguuggagaacga

SEQ ID NO: 1159839 - RNA, 19 nt, Artificial Sequence
  Description of Artificial Sequence: Synthetic oligonucleotide
  Antisense strand to SEQ ID NO: 1159838
ucguucuccaaccagaaca

SEQ ID NO: 1159840 - RNA, 19 nt, Artificial Sequence
  Description of Artificial Sequence: Synthetic oligonucleotide
  Sense strand starting at position 2869 of SEQ ID NO: 916478
aaaguuuggguuuguuaau

SEQ ID NO: 1159841 - RNA, 19 nt, Artificial Sequence
  Description of Artificial Sequence: Synthetic oligonucleotide
  Antisense strand to SEQ ID NO: 1159840
auuaacaaacccaaacuuu

SEQ ID NO: 1159842 - RNA, 19 nt, Artificial Sequence
  Description of Artificial Sequence: Synthetic oligonucleotide
  Sense strand starting at position 2954 of SEQ ID NO: 916478
cccacagagauguggcaaa

SEQ ID NO: 1159843 - RNA, 19 nt, Artificial Sequence
  Description of Artificial Sequence: Synthetic oligonucleotide
  Antisense strand to SEQ ID NO: 1159842
uuugccacaucucuguggg

SEQ ID NO: 1159844 - RNA, 19 nt, Artificial Sequence
  Description of Artificial Sequence: Synthetic oligonucleotide
  Sense strand starting at position 2990 of SEQ ID NO: 916478
cucauaaauugaggacaua

SEQ ID NO: 1159845 - RNA, 19 nt, Artificial Sequence
  Description of Artificial Sequence: Synthetic oligonucleotide
  Antisense strand to SEQ ID NO: 1159844
uauguccucaauuuaugag

SEQ ID NO: 1159846 - RNA, 19 nt, Artificial Sequence
  Description of Artificial Sequence: Synthetic oligonucleotide
  Sense strand starting at position 3010 of SEQ ID NO: 916478
agaauugaguuagcuaaac

SEQ ID NO: 1159847 - RNA, 19 nt, Artificial Sequence
  Description of Artificial Sequence: Synthetic oligonucleotide
  Antisense strand to SEQ ID NO: 1159846
guuuagcuaacucaauucu

SEQ ID NO: 1159848 - RNA, 19 nt, Artificial Sequence
  Description of Artificial Sequence: Synthetic oligonucleotide
  Sense strand starting at position 3062 of SEQ ID NO: 916478
uuucuucucuggccaguaa

SEQ ID NO: 1159849 - RNA, 19 nt, Artificial Sequence
  Description of Artificial Sequence: Synthetic oligonucleotide
  Antisense strand to SEQ ID NO: 1159848
uuacuggccagagaagaaa

SEQ ID NO: 1159850 - RNA, 19 nt, Artificial Sequence
  Description of Artificial Sequence: Synthetic oligonucleotide
  Sense strand starting at position 3219 of SEQ ID NO: 916478
aguggucacucaguugauu

SEQ ID NO: 1159851 - RNA, 19 nt, Artificial Sequence
  Description of Artificial Sequence: Synthetic oligonucleotide
  Antisense strand to SEQ ID NO: 1159850
aaucaacugagugaccacu

SEQ ID NO: 1159852 - RNA, 19 nt, Artificial Sequence
  Description of Artificial Sequence: Synthetic oligonucleotide
  Sense strand starting at position 3237 of SEQ ID NO: 916478
uuaaguugauugccaauau

SEQ ID NO: 1159853 - RNA, 19 nt, Artificial Sequence
  Description of Artificial Sequence: Synthetic oligonucleotide
  Antisense strand to SEQ ID NO: 1159852
auauuggcaaucaacuuaa

SEQ ID NO: 1159854 - RNA, 19 nt, Artificial Sequence
  Description of Artificial Sequence: Synthetic oligonucleotide
  Sense strand starting at position 3241 of SEQ ID NO: 916478
guugauugccaauauuauu

SEQ ID NO: 1159855 - RNA, 19 nt, Artificial Sequence
  Description of Artificial Sequence: Synthetic oligonucleotide
  Antisense strand to SEQ ID NO: 1159854
aauaauauuggcaaucaac

SEQ ID NO: 1159856 - RNA, 19 nt, Artificial Sequence
  Description of Artificial Sequence: Synthetic oligonucleotide
  Sense strand starting at position 3343 of SEQ ID NO: 916478
agugcuugacccuggauga

SEQ ID NO: 1159857 - RNA, 19 nt, Artificial Sequence
  Description of Artificial Sequence: Synthetic oligonucleotide
  Antisense strand to SEQ ID NO: 1159856
ucauccagggucaagcacu

SEQ ID NO: 1159858 - RNA, 19 nt, Artificial Sequence
  Description of Artificial Sequence: Synthetic oligonucleotide
  Sense strand starting at position 3344 of SEQ ID NO: 916478
gugcuugacccuggaugaa

SEQ ID NO: 1159859 - RNA, 19 nt, Artificial Sequence
  Description of Artificial Sequence: Synthetic oligonucleotide
  Antisense strand to SEQ ID NO: 1159858
uucauccagggucaagcac

SEQ ID NO: 1159860 - RNA, 19 nt, Artificial Sequence
  Description of Artificial Sequence: Synthetic oligonucleotide
  Sense strand starting at position 3711 of SEQ ID NO: 916478
agagauaagugauagaggu

SEQ ID NO: 1159861 - RNA, 19 nt, Artificial Sequence
  Description of Artificial Sequence: Synthetic oligonucleotide
  Antisense strand to SEQ ID NO: 1159860
accucuaucacuuaucucu

SEQ ID NO: 1159862 - RNA, 19 nt, Artificial Sequence
  Description of Artificial Sequence: Synthetic oligonucleotide
  Sense strand starting at position 3715 of SEQ ID NO: 916478
auaagugauagagguugau

SEQ ID NO: 1159863 - RNA, 19 nt, Artificial Sequence
  Description of Artificial Sequence: Synthetic oligonucleotide
  Antisense strand to SEQ ID NO: 1159862
aucaaccucuaucacuuau

SEQ ID NO: 1159864 - RNA, 19 nt, Artificial Sequence
  Description of Artificial Sequence: Synthetic oligonucleotide
  Sense strand starting at position 3718 of SEQ ID NO: 916478
agugauagagguugauauu

SEQ ID NO: 1159865 - RNA, 19 nt, Artificial Sequence
  Description of Artificial Sequence: Synthetic oligonucleotide
  Antisense strand to SEQ ID NO: 1159864
aauaucaaccucuaucacu

SEQ ID NO: 1159866 - RNA, 19 nt, Artificial Sequence
  Description of Artificial Sequence: Synthetic oligonucleotide
  Sense strand starting at position 3721 of SEQ ID NO: 916478
gauagagguugauauuugu

SEQ ID NO: 1159867 - RNA, 19 nt, Artificial Sequence
  Description of Artificial Sequence: Synthetic oligonucleotide
  Antisense strand to SEQ ID NO: 1159866
acaaauaucaaccucuauc

SEQ ID NO: 1159868 - RNA, 19 nt, Artificial Sequence
  Description of Artificial Sequence: Synthetic oligonucleotide
  Sense strand starting at position 3753 of SEQ ID NO: 916478
aacgaauggguuugugcua

SEQ ID NO: 1159869 - RNA, 19 nt, Artificial Sequence
  Description of Artificial Sequence: Synthetic oligonucleotide
  Antisense strand to SEQ ID NO: 1159868
uagcacaaacccauucguu

SEQ ID NO: 1159870 - RNA, 19 nt, Artificial Sequence
  Description of Artificial Sequence: Synthetic oligonucleotide
  Sense strand starting at position 3858 of SEQ ID NO: 916478
gaaagauggugagacuuaa

SEQ ID NO: 1159871 - RNA, 19 nt, Artificial Sequence
  Description of Artificial Sequence: Synthetic oligonucleotide
  Antisense strand to SEQ ID NO: 1159870
uuaagucucaccaucuuuc

SEQ ID NO: 1159872 - RNA, 19 nt, Artificial Sequence
  Description of Artificial Sequence: Synthetic oligonucleotide
  Sense strand starting at position 3939 of SEQ ID NO: 916478
agaggacuguuugagauac

SEQ ID NO: 1159873 - RNA, 19 nt, Artificial Sequence
  Description of Artificial Sequence: Synthetic oligonucleotide
  Antisense strand to SEQ ID NO: 1159872
guaucucaaacaguccucu

SEQ ID NO: 1159874 - RNA, 19 nt, Artificial Sequence
  Description of Artificial Sequence: Synthetic oligonucleotide
  Sense strand starting at position 3941 of SEQ ID NO: 916478
aggacuguuugagauacaa

SEQ ID NO: 1159875 - RNA, 19 nt, Artificial Sequence
  Description of Artificial Sequence: Synthetic oligonucleotide
  Antisense strand to SEQ ID NO: 1159874
uuguaucucaaacaguccu

SEQ ID NO: 1159876 - RNA, 19 nt, Artificial Sequence
  Description of Artificial Sequence: Synthetic oligonucleotide
  Sense strand starting at position 3962 of SEQ ID NO: 916478
aauaaauccguuugacuug

SEQ ID NO: 1159877 - RNA, 19 nt, Artificial Sequence
  Description of Artificial Sequence: Synthetic oligonucleotide
  Antisense strand to SEQ ID NO: 1159876
caagucaaacggauuuauu

SEQ ID NO: 1159878 - RNA, 19 nt, Artificial Sequence
  Description of Artificial Sequence: Synthetic oligonucleotide
  Sense strand starting at position 3967 of SEQ ID NO: 916478
auccguuugacuugcauga

SEQ ID NO: 1159879 - RNA, 19 nt, Artificial Sequence
  Description of Artificial Sequence: Synthetic oligonucleotide
  Antisense strand to SEQ ID NO: 1159878
ucaugcaagucaaacggau

SEQ ID NO: 1159880 - RNA, 19 nt, Artificial Sequence
  Description of Artificial Sequence: Synthetic oligonucleotide
  Sense strand starting at position 3971 of SEQ ID NO: 916478
guuugacuugcaugaaagu

SEQ ID NO: 1159881 - RNA, 19 nt, Artificial Sequence
  Description of Artificial Sequence: Synthetic oligonucleotide
  Antisense strand to SEQ ID NO: 1159880
acuuucaugcaagucaaac

SEQ ID NO: 1159882 - RNA, 19 nt, Artificial Sequence
  Description of Artificial Sequence: Synthetic oligonucleotide
  Sense strand starting at position 18 of SEQ ID NO: 916479
ugaucaauauguuugcuaa

SEQ ID NO: 1159883 - RNA, 19 nt, Artificial Sequence
  Description of Artificial Sequence: Synthetic oligonucleotide
  Antisense strand to SEQ ID NO: 1159882
uuagcaaacauauugauca

SEQ ID NO: 1159884 - RNA, 19 nt, Artificial Sequence
  Description of Artificial Sequence: Synthetic oligonucleotide
  Sense strand starting at position 29 of SEQ ID NO: 916479
uuugcuaaucuauggaagu

SEQ ID NO: 1159885 - RNA, 19 nt, Artificial Sequence
  Description of Artificial Sequence: Synthetic oligonucleotide
  Antisense strand to SEQ ID NO: 1159884
acuuccauagauuagcaaa

SEQ ID NO: 1159886 - RNA, 19 nt, Artificial Sequence
  Description of Artificial Sequence: Synthetic oligonucleotide
  Sense strand starting at position 39 of SEQ ID NO: 916479
uauggaagucccugaaccu

SEQ ID NO: 1159887 - RNA, 19 nt, Artificial Sequence
  Description of Artificial Sequence: Synthetic oligonucleotide
  Antisense strand to SEQ ID NO: 1159886
agguucagggacuuccaua

SEQ ID NO: 1159888 - RNA, 19 nt, Artificial Sequence
  Description of Artificial Sequence: Synthetic oligonucleotide
  Sense strand starting at position 49 of SEQ ID NO: 916479
ccugaaccugacugauacu

SEQ ID NO: 1159889 - RNA, 19 nt, Artificial Sequence
  Description of Artificial Sequence: Synthetic oligonucleotide
  Antisense strand to SEQ ID NO: 1159888
aguaucagucagguucagg

SEQ ID NO: 1159890 - RNA, 19 nt, Artificial Sequence
  Description of Artificial Sequence: Synthetic oligonucleotide
  Sense strand starting at position 55 of SEQ ID NO: 916479
ccugacugauacuaaauga

SEQ ID NO: 1159891 - RNA, 19 nt, Artificial Sequence
  Description of Artificial Sequence: Synthetic oligonucleotide
  Antisense strand to SEQ ID NO: 1159890
ucauuuaguaucagucagg

SEQ ID NO: 1159892 - RNA, 19 nt, Artificial Sequence
  Description of Artificial Sequence: Synthetic oligonucleotide
  Sense strand starting at position 148 of SEQ ID NO: 916479
ucacaauacuaagagaaag

SEQ ID NO: 1159893 - RNA, 19 nt, Artificial Sequence
  Description of Artificial Sequence: Synthetic oligonucleotide
  Antisense strand to SEQ ID NO: 1159892
cuuucucuuaguauuguga

SEQ ID NO: 1159894 - RNA, 19 nt, Artificial Sequence
  Description of Artificial Sequence: Synthetic oligonucleotide
  Sense strand starting at position 259 of SEQ ID NO: 916479
augauacuaugucuuugua

SEQ ID NO: 1159895 - RNA, 19 nt, Artificial Sequence
  Description of Artificial Sequence: Synthetic oligonucleotide
  Antisense strand to SEQ ID NO: 1159894
uacaaagacauaguaucau

SEQ ID NO: 1159896 - RNA, 19 nt, Artificial Sequence
  Description of Artificial Sequence: Synthetic oligonucleotide
  Sense strand starting at position 262 of SEQ ID NO: 916479
auacuaugucuuuguaggu

SEQ ID NO: 1159897 - RNA, 19 nt, Artificial Sequence
  Description of Artificial Sequence: Synthetic oligonucleotide
  Antisense strand to SEQ ID NO: 1159896
accuacaaagacauaguau

SEQ ID NO: 1159898 - RNA, 19 nt, Artificial Sequence
  Description of Artificial Sequence: Synthetic oligonucleotide
  Sense strand starting at position 263 of SEQ ID NO: 916479
uacuaugucuuuguaggua

SEQ ID NO: 1159899 - RNA, 19 nt, Artificial Sequence
  Description of Artificial Sequence: Synthetic oligonucleotide
  Antisense strand to SEQ ID NO: 1159898
uaccuacaaagacauagua

SEQ ID NO: 1159900 - RNA, 19 nt, Artificial Sequence
  Description of Artificial Sequence: Synthetic oligonucleotide
  Sense strand starting at position 455 of SEQ ID NO: 916479
caguguaaacaaggauuaa

SEQ ID NO: 1159901 - RNA, 19 nt, Artificial Sequence
  Description of Artificial Sequence: Synthetic oligonucleotide
  Antisense strand to SEQ ID NO: 1159900
uuaauccuuguuuacacug

SEQ ID NO: 1159902 - RNA, 19 nt, Artificial Sequence
  Description of Artificial Sequence: Synthetic oligonucleotide
  Sense strand starting at position 476 of SEQ ID NO: 916479
gggaaauaaugcuucuauc

SEQ ID NO: 1159903 - RNA, 19 nt, Artificial Sequence
  Description of Artificial Sequence: Synthetic oligonucleotide
  Antisense strand to SEQ ID NO: 1159902
gauagaagcauuauuuccc

SEQ ID NO: 1159904 - RNA, 19 nt, Artificial Sequence
  Description of Artificial Sequence: Synthetic oligonucleotide
  Sense strand starting at position 642 of SEQ ID NO: 916479
auuauauucuacgcuugaa

SEQ ID NO: 1159905 - RNA, 19 nt, Artificial Sequence
  Description of Artificial Sequence: Synthetic oligonucleotide
  Antisense strand to SEQ ID NO: 1159904
uucaagcguagaauauaau

SEQ ID NO: 1159906 - RNA, 19 nt, Artificial Sequence
  Description of Artificial Sequence: Synthetic oligonucleotide
  Sense strand starting at position 646 of SEQ ID NO: 916479
uauucuacgcuugaaacgu

SEQ ID NO: 1159907 - RNA, 19 nt, Artificial Sequence
  Description of Artificial Sequence: Synthetic oligonucleotide
  Antisense strand to SEQ ID NO: 1159906
acguuucaagcguagaaua

SEQ ID NO: 1159908 - RNA, 19 nt, Artificial Sequence
  Description of Artificial Sequence: Synthetic oligonucleotide
  Sense strand starting at position 661 of SEQ ID NO: 916479
acguaauugccuuacaucu

SEQ ID NO: 1159909 - RNA, 19 nt, Artificial Sequence
  Description of Artificial Sequence: Synthetic oligonucleotide
  Antisense strand to SEQ ID NO: 1159908
agauguaaggcaauuacgu

SEQ ID NO: 1159910 - RNA, 19 nt, Artificial Sequence
  Description of Artificial Sequence: Synthetic oligonucleotide
  Sense strand starting at position 668 of SEQ ID NO: 916479
ugccuuacaucuguuuaca

SEQ ID NO: 1159911 - RNA, 19 nt, Artificial Sequence
  Description of Artificial Sequence: Synthetic oligonucleotide
  Antisense strand to SEQ ID NO: 1159910
uguaaacagauguaaggca

SEQ ID NO: 1159912 - RNA, 19 nt, Artificial Sequence
  Description of Artificial Sequence: Synthetic oligonucleotide
  Sense strand starting at position 715 of SEQ ID NO: 916479
guacucuccugggcacaua

SEQ ID NO: 1159913 - RNA, 19 nt, Artificial Sequence
  Description of Artificial Sequence: Synthetic oligonucleotide
  Antisense strand to SEQ ID NO: 1159912
uaugugcccaggagaguac

SEQ ID NO: 1159914 - RNA, 19 nt, Artificial Sequence
  Description of Artificial Sequence: Synthetic oligonucleotide
  Sense strand starting at position 806 of SEQ ID NO: 916479
cagguuuaacaacgugaau

SEQ ID NO: 1159915 - RNA, 19 nt, Artificial Sequence
  Description of Artificial Sequence: Synthetic oligonucleotide
  Antisense strand to SEQ ID NO: 1159914
auucacguuguuaaaccug

SEQ ID NO: 1159916 - RNA, 19 nt, Artificial Sequence
  Description of Artificial Sequence: Synthetic oligonucleotide
  Sense strand starting at position 808 of SEQ ID NO: 916479
gguuuaacaacgugaaugu

SEQ ID NO: 1159917 - RNA, 19 nt, Artificial Sequence
  Description of Artificial Sequence: Synthetic oligonucleotide
  Antisense strand to SEQ ID NO: 1159916
acauucacguuguuaaacc

SEQ ID NO: 1159918 - RNA, 19 nt, Artificial Sequence
  Description of Artificial Sequence: Synthetic oligonucleotide
  Sense strand starting at position 809 of SEQ ID NO: 916479
guuuaacaacgugaauguu

SEQ ID NO: 1159919 - RNA, 19 nt, Artificial Sequence
  Description of Artificial Sequence: Synthetic oligonucleotide
  Antisense strand to SEQ ID NO: 1159918
aacauucacguuguuaaac

SEQ ID NO: 1159920 - RNA, 19 nt, Artificial Sequence
  Description of Artificial Sequence: Synthetic oligonucleotide
  Sense strand starting at position 965 of SEQ ID NO: 916479
ccaggcuuccacgagaaca

SEQ ID NO: 1159921 - RNA, 19 nt, Artificial Sequence
  Description of Artificial Sequence: Synthetic oligonucleotide
  Antisense strand to SEQ ID NO: 1159920
uguucucguggaagccugg

SEQ ID NO: 1159922 - RNA, 19 nt, Artificial Sequence
  Description of Artificial Sequence: Synthetic oligonucleotide
  Sense strand starting at position 967 of SEQ ID NO: 916479
aggcuuccacgagaacaau

SEQ ID NO: 1159923 - RNA, 19 nt, Artificial Sequence
  Description of Artificial Sequence: Synthetic oligonucleotide
  Antisense strand to SEQ ID NO: 1159922
auuguucucguggaagccu

SEQ ID NO: 1159924 - RNA, 19 nt, Artificial Sequence
  Description of Artificial Sequence: Synthetic oligonucleotide
  Sense strand starting at position 1004 of SEQ ID NO: 916479
aagauuaaggcaggcgauu

SEQ ID NO: 1159925 - RNA, 19 nt, Artificial Sequence
  Description of Artificial Sequence: Synthetic oligonucleotide
  Antisense strand to SEQ ID NO: 1159924
aaucgccugccuuaaucuu

SEQ ID NO: 1159926 - RNA, 19 nt, Artificial Sequence
  Description of Artificial Sequence: Synthetic oligonucleotide
  Sense strand starting at position 1041 of SEQ ID NO: 916479
ugucaauuaucagaaagag

SEQ ID NO: 1159927 - RNA, 19 nt, Artificial Sequence
  Description of Artificial Sequence: Synthetic oligonucleotide
  Antisense strand to SEQ ID NO: 1159926
cucuuucugauaauugaca

SEQ ID NO: 1159928 - RNA, 19 nt, Artificial Sequence
  Description of Artificial Sequence: Synthetic oligonucleotide
  Sense strand starting at position 1271 of SEQ ID NO: 916479
acggcucuccagcauagua

SEQ ID NO: 1159929 - RNA, 19 nt, Artificial Sequence
  Description of Artificial Sequence: Synthetic oligonucleotide
  Antisense strand to SEQ ID NO: 1159928
uacuaugcuggagagccgu

SEQ ID NO: 1159930 - RNA, 19 nt, Artificial Sequence
  Description of Artificial Sequence: Synthetic oligonucleotide
  Sense strand starting at position 1305 of SEQ ID NO: 916479
gcggcugucgauguuuaca

SEQ ID NO: 1159931 - RNA, 19 nt, Artificial Sequence
  Description of Artificial Sequence: Synthetic oligonucleotide
  Antisense strand to SEQ ID NO: 1159930
uguaaacaucgacagccgc

SEQ ID NO: 1159932 - RNA, 19 nt, Artificial Sequence
  Description of Artificial Sequence: Synthetic oligonucleotide
  Sense strand starting at position 1314 of SEQ ID NO: 916479
gauguuuacaaucgcggga

SEQ ID NO: 1159933 - RNA, 19 nt, Artificial Sequence
  Description of Artificial Sequence: Synthetic oligonucleotide
  Antisense strand to SEQ ID NO: 1159932
ucccgcgauuguaaacauc

SEQ ID NO: 1159934 - RNA, 19 nt, Artificial Sequence
  Description of Artificial Sequence: Synthetic oligonucleotide
  Sense strand starting at position 1329 of SEQ ID NO: 916479
gggagcuucgggugcaaga

SEQ ID NO: 1159935 - RNA, 19 nt, Artificial Sequence
  Description of Artificial Sequence: Synthetic oligonucleotide
  Antisense strand to SEQ ID NO: 1159934
ucuugcacccgaagcuccc

SEQ ID NO: 1159936 - RNA, 19 nt, Artificial Sequence
  Description of Artificial Sequence: Synthetic oligonucleotide
  Sense strand starting at position 1616 of SEQ ID NO: 916479
ccgagacuuccacaugcaa

SEQ ID NO: 1159937 - RNA, 19 nt, Artificial Sequence
  Description of Artificial Sequence: Synthetic oligonucleotide
  Antisense strand to SEQ ID NO: 1159936
uugcauguggaagucucgg

SEQ ID NO: 1159938 - RNA, 19 nt, Artificial Sequence
  Description of Artificial Sequence: Synthetic oligonucleotide
  Sense strand starting at position 2966 of SEQ ID NO: 916479
gggaauguguccucagagg

SEQ ID NO: 1159939 - RNA, 19 nt, Artificial Sequence
  Description of Artificial Sequence: Synthetic oligonucleotide
  Antisense strand to SEQ ID NO: 1159938
ccucugaggacacauuccc

SEQ ID NO: 1159940 - RNA, 19 nt, Artificial Sequence
  Description of Artificial Sequence: Synthetic oligonucleotide
  Sense strand starting at position 3128 of SEQ ID NO: 916479
aggcuucgcccagggauau

SEQ ID NO: 1159941 - RNA, 19 nt, Artificial Sequence
  Description of Artificial Sequence: Synthetic oligonucleotide
  Antisense strand to SEQ ID NO: 1159940
auaucccugggcgaagccu

SEQ ID NO: 1159942 - RNA, 19 nt, Artificial Sequence
  Description of Artificial Sequence: Synthetic oligonucleotide
  Sense strand starting at position 3167 of SEQ ID NO: 916479
gcgcuuacuguguuccaga

SEQ ID NO: 1159943 - RNA, 19 nt, Artificial Sequence
  Description of Artificial Sequence: Synthetic oligonucleotide
  Antisense strand to SEQ ID NO: 1159942
ucuggaacacaguaagcgc

SEQ ID NO: 1159944 - RNA, 19 nt, Artificial Sequence
  Description of Artificial Sequence: Synthetic oligonucleotide
  Sense strand starting at position 3190 of SEQ ID NO: 916479
gugcguuuaauacagaaau

SEQ ID NO: 1159945 - RNA, 19 nt, Artificial Sequence
  Description of Artificial Sequence: Synthetic oligonucleotide
  Antisense strand to SEQ ID NO: 1159944
auuucuguauuaaacgcac

SEQ ID NO: 1159946 - RNA, 19 nt, Artificial Sequence
  Description of Artificial Sequence: Synthetic oligonucleotide
  Sense strand starting at position 3192 of SEQ ID NO: 916479
gcguuuaauacagaaaugu

SEQ ID NO: 1159947 - RNA, 19 nt, Artificial Sequence
  Description of Artificial Sequence: Synthetic oligonucleotide
  Antisense strand to SEQ ID NO: 1159946
acauuucuguauuaaacgc

SEQ ID NO: 1159948 - RNA, 19 nt, Artificial Sequence
  Description of Artificial Sequence: Synthetic oligonucleotide
  Sense strand starting at position 3298 of SEQ ID NO: 916479
gugccagaaucuguuauaa

SEQ ID NO: 1159949 - RNA, 19 nt, Artificial Sequence
  Description of Artificial Sequence: Synthetic oligonucleotide
  Antisense strand to SEQ ID NO: 1159948
uuauaacagauucuggcac

SEQ ID NO: 1159950 - RNA, 19 nt, Artificial Sequence
  Description of Artificial Sequence: Synthetic oligonucleotide
  Sense strand starting at position 3364 of SEQ ID NO: 916479
uggcgucauucauuggaua

SEQ ID NO: 1159951 - RNA, 19 nt, Artificial Sequence
  Description of Artificial Sequence: Synthetic oligonucleotide
  Antisense strand to SEQ ID NO: 1159950
uauccaaugaaugacgcca

SEQ ID NO: 1159952 - RNA, 19 nt, Artificial Sequence
  Description of Artificial Sequence: Synthetic oligonucleotide
  Sense strand starting at position 3365 of SEQ ID NO: 916479
ggcgucauucauuggauaa

SEQ ID NO: 1159953 - RNA, 19 nt, Artificial Sequence
  Description of Artificial Sequence: Synthetic oligonucleotide
  Antisense strand to SEQ ID NO: 1159952
uuauccaaugaaugacgcc

SEQ ID NO: 1159954 - RNA, 19 nt, Artificial Sequence
  Description of Artificial Sequence: Synthetic oligonucleotide
  Sense strand starting at position 3597 of SEQ ID NO: 916479
aauccuagccgagguuuaa

SEQ ID NO: 1159955 - RNA, 19 nt, Artificial Sequence
  Description of Artificial Sequence: Synthetic oligonucleotide
  Antisense strand to SEQ ID NO: 1159954
uuaaaccucggcuaggauu

SEQ ID NO: 1159956 - RNA, 19 nt, Artificial Sequence
  Description of Artificial Sequence: Synthetic oligonucleotide
  Sense strand starting at position 3893 of SEQ ID NO: 916479
gagaguguauaauaagaga

SEQ ID NO: 1159957 - RNA, 19 nt, Artificial Sequence
  Description of Artificial Sequence: Synthetic oligonucleotide
  Antisense strand to SEQ ID NO: 1159956
ucucuuauuauacacucuc

SEQ ID NO: 1159958 - RNA, 19 nt, Artificial Sequence
  Description of Artificial Sequence: Synthetic oligonucleotide
  Sense strand starting at position 3912 of SEQ ID NO: 916479
agucuuaagacacgugaac

SEQ ID NO: 1159959 - RNA, 19 nt, Artificial Sequence
  Description of Artificial Sequence: Synthetic oligonucleotide
  Antisense strand to SEQ ID NO: 1159958
guucacgugucuuaagacu

SEQ ID NO: 1159960 - RNA, 19 nt, Artificial Sequence
  Description of Artificial Sequence: Synthetic oligonucleotide
  Sense strand starting at position 3968 of SEQ ID NO: 916479
acucaugagcaacauguua

SEQ ID NO: 1159961 - RNA, 19 nt, Artificial Sequence
  Description of Artificial Sequence: Synthetic oligonucleotide
  Antisense strand to SEQ ID NO: 1159960
uaacauguugcucaugagu

SEQ ID NO: 1159962 - RNA, 19 nt, Artificial Sequence
  Description of Artificial Sequence: Synthetic oligonucleotide
  Sense strand starting at position 40 of SEQ ID NO: 916480
gucccugcaggguagaauu

SEQ ID NO: 1159963 - RNA, 19 nt, Artificial Sequence
  Description of Artificial Sequence: Synthetic oligonucleotide
  Antisense strand to SEQ ID NO: 1159962
aauucuacccugcagggac

SEQ ID NO: 1159964 - RNA, 19 nt, Artificial Sequence
  Description of Artificial Sequence: Synthetic oligonucleotide
  Sense strand starting at position 198 of SEQ ID NO: 916480
aaguuauuagcuuacagug

SEQ ID NO: 1159965 - RNA, 19 nt, Artificial Sequence
  Description of Artificial Sequence: Synthetic oligonucleotide
  Antisense strand to SEQ ID NO: 1159964
cacuguaagcuaauaacuu

SEQ ID NO: 1159966 - RNA, 19 nt, Artificial Sequence
  Description of Artificial Sequence: Synthetic oligonucleotide
  Sense strand starting at position 203 of SEQ ID NO: 916480
auuagcuuacagugaggaa

SEQ ID NO: 1159967 - RNA, 19 nt, Artificial Sequence
  Description of Artificial Sequence: Synthetic oligonucleotide
  Antisense strand to SEQ ID NO: 1159966
uuccucacuguaagcuaau

SEQ ID NO: 1159968 - RNA, 19 nt, Artificial Sequence
  Description of Artificial Sequence: Synthetic oligonucleotide
  Sense strand starting at position 427 of SEQ ID NO: 916480
acgggaugcacauauuaug

SEQ ID NO: 1159969 - RNA, 19 nt, Artificial Sequence
  Description of Artificial Sequence: Synthetic oligonucleotide
  Antisense strand to SEQ ID NO: 1159968
cauaauaugugcaucccgu

SEQ ID NO: 1159970 - RNA, 19 nt, Artificial Sequence
  Description of Artificial Sequence: Synthetic oligonucleotide
  Sense strand starting at position 518 of SEQ ID NO: 916480
uagcgcaaugcguuccuua

SEQ ID NO: 1159971 - RNA, 19 nt, Artificial Sequence
  Description of Artificial Sequence: Synthetic oligonucleotide
  Antisense strand to SEQ ID NO: 1159970
uaaggaacgcauugcgcua

SEQ ID NO: 1159972 - RNA, 19 nt, Artificial Sequence
  Description of Artificial Sequence: Synthetic oligonucleotide
  Sense strand starting at position 606 of SEQ ID NO: 916480
uuaugugcaguccaugaca

SEQ ID NO: 1159973 - RNA, 19 nt, Artificial Sequence
  Description of Artificial Sequence: Synthetic oligonucleotide
  Antisense strand to SEQ ID NO: 1159972
ugucauggacugcacauaa

SEQ ID NO: 1159974 - RNA, 19 nt, Artificial Sequence
  Description of Artificial Sequence: Synthetic oligonucleotide
  Sense strand starting at position 857 of SEQ ID NO: 916480
gggagcuacuuacuagacu

SEQ ID NO: 1159975 - RNA, 19 nt, Artificial Sequence
  Description of Artificial Sequence: Synthetic oligonucleotide
  Antisense strand to SEQ ID NO: 1159974
agucuaguaaguagcuccc

SEQ ID NO: 1159976 - RNA, 19 nt, Artificial Sequence
  Description of Artificial Sequence: Synthetic oligonucleotide
  Sense strand starting at position 866 of SEQ ID NO: 916480
uuacuagacuuggccuuua

SEQ ID NO: 1159977 - RNA, 19 nt, Artificial Sequence
  Description of Artificial Sequence: Synthetic oligonucleotide
  Antisense strand to SEQ ID NO: 1159976
uaaaggccaagucuaguaa

SEQ ID NO: 1159978 - RNA, 19 nt, Artificial Sequence
  Description of Artificial Sequence: Synthetic oligonucleotide
  Sense strand starting at position 876 of SEQ ID NO: 916480
uggccuuuaauagagagua

SEQ ID NO: 1159979 - RNA, 19 nt, Artificial Sequence
  Description of Artificial Sequence: Synthetic oligonucleotide
  Antisense strand to SEQ ID NO: 1159978
uacucucuauuaaaggcca

SEQ ID NO: 1159980 - RNA, 19 nt, Artificial Sequence
  Description of Artificial Sequence: Synthetic oligonucleotide
  Sense strand starting at position 1188 of SEQ ID NO: 916480
aggcacugucuccaaagua

SEQ ID NO: 1159981 - RNA, 19 nt, Artificial Sequence
  Description of Artificial Sequence: Synthetic oligonucleotide
  Antisense strand to SEQ ID NO: 1159980
uacuuuggagacagugccu

SEQ ID NO: 1159982 - RNA, 19 nt, Artificial Sequence
  Description of Artificial Sequence: Synthetic oligonucleotide
  Sense strand starting at position 1339 of SEQ ID NO: 916480
aggauacucugggcccaaa

SEQ ID NO: 1159983 - RNA, 19 nt, Artificial Sequence
  Description of Artificial Sequence: Synthetic oligonucleotide
  Antisense strand to SEQ ID NO: 1159982
uuugggcccagaguauccu

SEQ ID NO: 1159984 - RNA, 19 nt, Artificial Sequence
  Description of Artificial Sequence: Synthetic oligonucleotide
  Sense strand starting at position 1435 of SEQ ID NO: 916480
ggaauacucucggcugaca

SEQ ID NO: 1159985 - RNA, 19 nt, Artificial Sequence
  Description of Artificial Sequence: Synthetic oligonucleotide
  Antisense strand to SEQ ID NO: 1159984
ugucagccgagaguauucc

SEQ ID NO: 1159986 - RNA, 19 nt, Artificial Sequence
  Description of Artificial Sequence: Synthetic oligonucleotide
  Sense strand starting at position 1485 of SEQ ID NO: 916480
ugagaucucccuuggugga

SEQ ID NO: 1159987 - RNA, 19 nt, Artificial Sequence
  Description of Artificial Sequence: Synthetic oligonucleotide
  Antisense strand to SEQ ID NO: 1159986
uccaccaagggagaucuca

SEQ ID NO: 1159988 - RNA, 19 nt, Artificial Sequence
  Description of Artificial Sequence: Synthetic oligonucleotide
  Sense strand starting at position 1486 of SEQ ID NO: 916480
gagaucucccuugguggau

SEQ ID NO: 1159989 - RNA, 19 nt, Artificial Sequence
  Description of Artificial Sequence: Synthetic oligonucleotide
  Antisense strand to SEQ ID NO: 1159988
auccaccaagggagaucuc

SEQ ID NO: 1159990 - RNA, 19 nt, Artificial Sequence
  Description of Artificial Sequence: Synthetic oligonucleotide
  Sense strand starting at position 1490 of SEQ ID NO: 916480
ucucccuugguggauuaaa

SEQ ID NO: 1159991 - RNA, 19 nt, Artificial Sequence
  Description of Artificial Sequence: Synthetic oligonucleotide
  Antisense strand to SEQ ID NO: 1159990
uuuaauccaccaagggaga

SEQ ID NO: 1159992 - RNA, 19 nt, Artificial Sequence
  Description of Artificial Sequence: Synthetic oligonucleotide
  Sense strand starting at position 2233 of SEQ ID NO: 916480
ggcuucagagauuguugga

SEQ ID NO: 1159993 - RNA, 19 nt, Artificial Sequence
  Description of Artificial Sequence: Synthetic oligonucleotide
  Antisense strand to SEQ ID NO: 1159992
uccaacaaucucugaagcc

SEQ ID NO: 1159994 - RNA, 19 nt, Artificial Sequence
  Description of Artificial Sequence: Synthetic oligonucleotide
  Sense strand starting at position 2287 of SEQ ID NO: 916480
guacccucucguguuuauu

SEQ ID NO: 1159995 - RNA, 19 nt, Artificial Sequence
  Description of Artificial Sequence: Synthetic oligonucleotide
  Antisense strand to SEQ ID NO: 1159994
aauaaacacgagaggguac

SEQ ID NO: 1159996 - RNA, 19 nt, Artificial Sequence
  Description of Artificial Sequence: Synthetic oligonucleotide
  Sense strand starting at position 2289 of SEQ ID NO: 916480
acccucucguguuuauuua

SEQ ID NO: 1159997 - RNA, 19 nt, Artificial Sequence
  Description of Artificial Sequence: Synthetic oligonucleotide
  Antisense strand to SEQ ID NO: 1159996
uaaauaaacacgagagggu

SEQ ID NO: 1159998 - RNA, 19 nt, Artificial Sequence
  Description of Artificial Sequence: Synthetic oligonucleotide
  Sense strand starting at position 2290 of SEQ ID NO: 916480
cccucucguguuuauuuau

SEQ ID NO: 1159999 - RNA, 19 nt, Artificial Sequence
  Description of Artificial Sequence: Synthetic oligonucleotide
  Antisense strand to SEQ ID NO: 1159998
auaaauaaacacgagaggg

SEQ ID NO: 1160000 - RNA, 19 nt, Artificial Sequence
  Description of Artificial Sequence: Synthetic oligonucleotide
  Sense strand starting at position 2293 of SEQ ID NO: 916480
ucucguguuuauuuauuga

SEQ ID NO: 1160001 - RNA, 19 nt, Artificial Sequence
  Description of Artificial Sequence: Synthetic oligonucleotide
  Antisense strand to SEQ ID NO: 1160000
ucaauaaauaaacacgaga

SEQ ID NO: 1160002 - RNA, 19 nt, Artificial Sequence
  Description of Artificial Sequence: Synthetic oligonucleotide
  Sense strand starting at position 2296 of SEQ ID NO: 916480
cguguuuauuuauugacca

SEQ ID NO: 1160003 - RNA, 19 nt, Artificial Sequence
  Description of Artificial Sequence: Synthetic oligonucleotide
  Antisense strand to SEQ ID NO: 1160002
uggucaauaaauaaacacg

SEQ ID NO: 1160004 - RNA, 19 nt, Artificial Sequence
  Description of Artificial Sequence: Synthetic oligonucleotide
  Sense strand starting at position 2705 of SEQ ID NO: 916480
uugagaguuuaagugugaa

SEQ ID NO: 1160005 - RNA, 19 nt, Artificial Sequence
  Description of Artificial Sequence: Synthetic oligonucleotide
  Antisense strand to SEQ ID NO: 1160004
uucacacuuaaacucucaa

SEQ ID NO: 1160006 - RNA, 19 nt, Artificial Sequence
  Description of Artificial Sequence: Synthetic oligonucleotide
  Sense strand starting at position 2772 of SEQ ID NO: 916480
ucugguaagaaaugaguuu

SEQ ID NO: 1160007 - RNA, 19 nt, Artificial Sequence
  Description of Artificial Sequence: Synthetic oligonucleotide
  Antisense strand to SEQ ID NO: 1160006
aaacucauuucuuaccaga

SEQ ID NO: 1160008 - RNA, 19 nt, Artificial Sequence
  Description of Artificial Sequence: Synthetic oligonucleotide
  Sense strand starting at position 2784 of SEQ ID NO: 916480
ugaguuuggaaucggcaaa

SEQ ID NO: 1160009 - RNA, 19 nt, Artificial Sequence
  Description of Artificial Sequence: Synthetic oligonucleotide
  Antisense strand to SEQ ID NO: 1160008
uuugccgauuccaaacuca

SEQ ID NO: 1160010 - RNA, 19 nt, Artificial Sequence
  Description of Artificial Sequence: Synthetic oligonucleotide
  Sense strand starting at position 2785 of SEQ ID NO: 916480
gaguuuggaaucggcaaau

SEQ ID NO: 1160011 - RNA, 19 nt, Artificial Sequence
  Description of Artificial Sequence: Synthetic oligonucleotide
  Antisense strand to SEQ ID NO: 1160010
auuugccgauuccaaacuc

SEQ ID NO: 1160012 - RNA, 19 nt, Artificial Sequence
  Description of Artificial Sequence: Synthetic oligonucleotide
  Sense strand starting at position 2850 of SEQ ID NO: 916480
cugauuauccgugauuacc

SEQ ID NO: 1160013 - RNA, 19 nt, Artificial Sequence
  Description of Artificial Sequence: Synthetic oligonucleotide
  Antisense strand to SEQ ID NO: 1160012
gguaaucacggauaaucag

SEQ ID NO: 1160014 - RNA, 19 nt, Artificial Sequence
  Description of Artificial Sequence: Synthetic oligonucleotide
  Sense strand starting at position 2908 of SEQ ID NO: 916480
gggaacucagcuuguugga

SEQ ID NO: 1160015 - RNA, 19 nt, Artificial Sequence
  Description of Artificial Sequence: Synthetic oligonucleotide
  Antisense strand to SEQ ID NO: 1160014
uccaacaagcugaguuccc

SEQ ID NO: 1160016 - RNA, 19 nt, Artificial Sequence
  Description of Artificial Sequence: Synthetic oligonucleotide
  Sense strand starting at position 3008 of SEQ ID NO: 916480
acuggagccucauuaagaa

SEQ ID NO: 1160017 - RNA, 19 nt, Artificial Sequence
  Description of Artificial Sequence: Synthetic oligonucleotide
  Antisense strand to SEQ ID NO: 1160016
uucuuaaugaggcuccagu

SEQ ID NO: 1160018 - RNA, 19 nt, Artificial Sequence
  Description of Artificial Sequence: Synthetic oligonucleotide
  Sense strand starting at position 3017 of SEQ ID NO: 916480
ucauuaagaacguggauga

SEQ ID NO: 1160019 - RNA, 19 nt, Artificial Sequence
  Description of Artificial Sequence: Synthetic oligonucleotide
  Antisense strand to SEQ ID NO: 1160018
ucauccacguucuuaauga

SEQ ID NO: 1160020 - RNA, 19 nt, Artificial Sequence
  Description of Artificial Sequence: Synthetic oligonucleotide
  Sense strand starting at position 3135 of SEQ ID NO: 916480
gagaguguaccuuacggaa

SEQ ID NO: 1160021 - RNA, 19 nt, Artificial Sequence
  Description of Artificial Sequence: Synthetic oligonucleotide
  Antisense strand to SEQ ID NO: 1160020
uuccguaagguacacucuc

SEQ ID NO: 1160022 - RNA, 19 nt, Artificial Sequence
  Description of Artificial Sequence: Synthetic oligonucleotide
  Sense strand starting at position 3159 of SEQ ID NO: 916480
gccacaugccaggaaguau

SEQ ID NO: 1160023 - RNA, 19 nt, Artificial Sequence
  Description of Artificial Sequence: Synthetic oligonucleotide
  Antisense strand to SEQ ID NO: 1160022
auacuuccuggcauguggc

SEQ ID NO: 1160024 - RNA, 19 nt, Artificial Sequence
  Description of Artificial Sequence: Synthetic oligonucleotide
  Sense strand starting at position 3234 of SEQ ID NO: 916480
gcaguuguccaagauuaag

SEQ ID NO: 1160025 - RNA, 19 nt, Artificial Sequence
  Description of Artificial Sequence: Synthetic oligonucleotide
  Antisense strand to SEQ ID NO: 1160024
cuuaaucuuggacaacugc

SEQ ID NO: 1160026 - RNA, 19 nt, Artificial Sequence
  Description of Artificial Sequence: Synthetic oligonucleotide
  Sense strand starting at position 3253 of SEQ ID NO: 916480
augagcugggccuagaaua

SEQ ID NO: 1160027 - RNA, 19 nt, Artificial Sequence
  Description of Artificial Sequence: Synthetic oligonucleotide
  Antisense strand to SEQ ID NO: 1160026
uauucuaggcccagcucau

SEQ ID NO: 1160028 - RNA, 19 nt, Artificial Sequence
  Description of Artificial Sequence: Synthetic oligonucleotide
  Sense strand starting at position 3272 of SEQ ID NO: 916480
ggguguugacccugauaag

SEQ ID NO: 1160029 - RNA, 19 nt, Artificial Sequence
  Description of Artificial Sequence: Synthetic oligonucleotide
  Antisense strand to SEQ ID NO: 1160028
cuuaucagggucaacaccc

SEQ ID NO: 1160030 - RNA, 19 nt, Artificial Sequence
  Description of Artificial Sequence: Synthetic oligonucleotide
  Sense strand starting at position 3331 of SEQ ID NO: 916480
uuaauauggauuggugacu

SEQ ID NO: 1160031 - RNA, 19 nt, Artificial Sequence
  Description of Artificial Sequence: Synthetic oligonucleotide
  Antisense strand to SEQ ID NO: 1160030
agucaccaauccauauuaa

SEQ ID NO: 1160032 - RNA, 19 nt, Artificial Sequence
  Description of Artificial Sequence: Synthetic oligonucleotide
  Sense strand starting at position 3340 of SEQ ID NO: 916480
auuggugacugauuggaua

SEQ ID NO: 1160033 - RNA, 19 nt, Artificial Sequence
  Description of Artificial Sequence: Synthetic oligonucleotide
  Antisense strand to SEQ ID NO: 1160032
uauccaaucagucaccaau

SEQ ID NO: 1160034 - RNA, 19 nt, Artificial Sequence
  Description of Artificial Sequence: Synthetic oligonucleotide
  Sense strand starting at position 3354 of SEQ ID NO: 916480
ggauauaguuuaguccacu

SEQ ID NO: 1160035 - RNA, 19 nt, Artificial Sequence
  Description of Artificial Sequence: Synthetic oligonucleotide
  Antisense strand to SEQ ID NO: 1160034
aguggacuaaacuauaucc

SEQ ID NO: 1160036 - RNA, 19 nt, Artificial Sequence
  Description of Artificial Sequence: Synthetic oligonucleotide
  Sense strand starting at position 3396 of SEQ ID NO: 916480
gccugauugaagggaacuu

SEQ ID NO: 1160037 - RNA, 19 nt, Artificial Sequence
  Description of Artificial Sequence: Synthetic oligonucleotide
  Antisense strand to SEQ ID NO: 1160036
aaguucccuucaaucaggc

SEQ ID NO: 1160038 - RNA, 19 nt, Artificial Sequence
  Description of Artificial Sequence: Synthetic oligonucleotide
  Sense strand starting at position 3518 of SEQ ID NO: 916480
ucagguugauguccaacua

SEQ ID NO: 1160039 - RNA, 19 nt, Artificial Sequence
  Description of Artificial Sequence: Synthetic oligonucleotide
  Antisense strand to SEQ ID NO: 1160038
uaguuggacaucaaccuga

SEQ ID NO: 1160040 - RNA, 19 nt, Artificial Sequence
  Description of Artificial Sequence: Synthetic oligonucleotide
  Sense strand starting at position 3563 of SEQ ID NO: 916480
auaaucuggcuccagcaaa

SEQ ID NO: 1160041 - RNA, 19 nt, Artificial Sequence
  Description of Artificial Sequence: Synthetic oligonucleotide
  Antisense strand to SEQ ID NO: 1160040
uuugcuggagccagauuau

SEQ ID NO: 1160042 - RNA, 19 nt, Artificial Sequence
  Description of Artificial Sequence: Synthetic oligonucleotide
  Sense strand starting at position 26 of SEQ ID NO: 916481
acuagaauaugcucuaaug

SEQ ID NO: 1160043 - RNA, 19 nt, Artificial Sequence
  Description of Artificial Sequence: Synthetic oligonucleotide
  Antisense strand to SEQ ID NO: 1160042
cauuagagcauauucuagu

SEQ ID NO: 1160044 - RNA, 19 nt, Artificial Sequence
  Description of Artificial Sequence: Synthetic oligonucleotide
  Sense strand starting at position 108 of SEQ ID NO: 916481
acagaauucguuuaaugac

SEQ ID NO: 1160045 - RNA, 19 nt, Artificial Sequence
  Description of Artificial Sequence: Synthetic oligonucleotide
  Antisense strand to SEQ ID NO: 1160044
gucauuaaacgaauucugu

SEQ ID NO: 1160046 - RNA, 19 nt, Artificial Sequence
  Description of Artificial Sequence: Synthetic oligonucleotide
  Sense strand starting at position 254 of SEQ ID NO: 916481
uguaauaguggucagcaau

SEQ ID NO: 1160047 - RNA, 19 nt, Artificial Sequence
  Description of Artificial Sequence: Synthetic oligonucleotide
  Antisense strand to SEQ ID NO: 1160046
auugcugaccacuauuaca

SEQ ID NO: 1160048 - RNA, 19 nt, Artificial Sequence
  Description of Artificial Sequence: Synthetic oligonucleotide
  Sense strand starting at position 261 of SEQ ID NO: 916481
guggucagcaauuagacuu

SEQ ID NO: 1160049 - RNA, 19 nt, Artificial Sequence
  Description of Artificial Sequence: Synthetic oligonucleotide
  Antisense strand to SEQ ID NO: 1160048
aagucuaauugcugaccac

SEQ ID NO: 1160050 - RNA, 19 nt, Artificial Sequence
  Description of Artificial Sequence: Synthetic oligonucleotide
  Sense strand starting at position 312 of SEQ ID NO: 916481
ugcugaaggccuuaggaaa

SEQ ID NO: 1160051 - RNA, 19 nt, Artificial Sequence
  Description of Artificial Sequence: Synthetic oligonucleotide
  Antisense strand to SEQ ID NO: 1160050
uuuccuaaggccuucagca

SEQ ID NO: 1160052 - RNA, 19 nt, Artificial Sequence
  Description of Artificial Sequence: Synthetic oligonucleotide
  Sense strand starting at position 381 of SEQ ID NO: 916481
ucacgaugggcuggguaaa

SEQ ID NO: 1160053 - RNA, 19 nt, Artificial Sequence
  Description of Artificial Sequence: Synthetic oligonucleotide
  Antisense strand to SEQ ID NO: 1160052
uuuacccagcccaucguga

SEQ ID NO: 1160054 - RNA, 19 nt, Artificial Sequence
  Description of Artificial Sequence: Synthetic oligonucleotide
  Sense strand starting at position 476 of SEQ ID NO: 916481
cugcucuggaagugauuau

SEQ ID NO: 1160055 - RNA, 19 nt, Artificial Sequence
  Description of Artificial Sequence: Synthetic oligonucleotide
  Antisense strand to SEQ ID NO: 1160054
auaaucacuuccagagcag

SEQ ID NO: 1160056 - RNA, 19 nt, Artificial Sequence
  Description of Artificial Sequence: Synthetic oligonucleotide
  Sense strand starting at position 477 of SEQ ID NO: 916481
ugcucuggaagugauuaua

SEQ ID NO: 1160057 - RNA, 19 nt, Artificial Sequence
  Description of Artificial Sequence: Synthetic oligonucleotide
  Antisense strand to SEQ ID NO: 1160056
uauaaucacuuccagagca

SEQ ID NO: 1160058 - RNA, 19 nt, Artificial Sequence
  Description of Artificial Sequence: Synthetic oligonucleotide
  Sense strand starting at position 502 of SEQ ID NO: 916481
cuauaagagcaauauguua

SEQ ID NO: 1160059 - RNA, 19 nt, Artificial Sequence
  Description of Artificial Sequence: Synthetic oligonucleotide
  Antisense strand to SEQ ID NO: 1160058
uaacauauugcucuuauag

SEQ ID NO: 1160060 - RNA, 19 nt, Artificial Sequence
  Description of Artificial Sequence: Synthetic oligonucleotide
  Sense strand starting at position 556 of SEQ ID NO: 916481
ugacauucuggcuacugga

SEQ ID NO: 1160061 - RNA, 19 nt, Artificial Sequence
  Description of Artificial Sequence: Synthetic oligonucleotide
  Antisense strand to SEQ ID NO: 1160060
uccaguagccagaauguca

SEQ ID NO: 1160062 - RNA, 19 nt, Artificial Sequence
  Description of Artificial Sequence: Synthetic oligonucleotide
  Sense strand starting at position 614 of SEQ ID NO: 916481
uaggaucagucagcuuaac

SEQ ID NO: 1160063 - RNA, 19 nt, Artificial Sequence
  Description of Artificial Sequence: Synthetic oligonucleotide
  Antisense strand to SEQ ID NO: 1160062
guuaagcugacugauccua

SEQ ID NO: 1160064 - RNA, 19 nt, Artificial Sequence
  Description of Artificial Sequence: Synthetic oligonucleotide
  Sense strand starting at position 642 of SEQ ID NO: 916481
gacaaacagcaguguuuga

SEQ ID NO: 1160065 - RNA, 19 nt, Artificial Sequence
  Description of Artificial Sequence: Synthetic oligonucleotide
  Antisense strand to SEQ ID NO: 1160064
ucaaacacugcuguuuguc

SEQ ID NO: 1160066 - RNA, 19 nt, Artificial Sequence
  Description of Artificial Sequence: Synthetic oligonucleotide
  Sense strand starting at position 1109 of SEQ ID NO: 916481
ugggauuaggcaggugaaa

SEQ ID NO: 1160067 - RNA, 19 nt, Artificial Sequence
  Description of Artificial Sequence: Synthetic oligonucleotide
  Antisense strand to SEQ ID NO: 1160066
uuucaccugccuaauccca

SEQ ID NO: 1160068 - RNA, 19 nt, Artificial Sequence
  Description of Artificial Sequence: Synthetic oligonucleotide
  Sense strand starting at position 1128 of SEQ ID NO: 916481
auucguuaucaccaccaca

SEQ ID NO: 1160069 - RNA, 19 nt, Artificial Sequence
  Description of Artificial Sequence: Synthetic oligonucleotide
  Antisense strand to SEQ ID NO: 1160068
ugugguggugauaacgaau

SEQ ID NO: 1160070 - RNA, 19 nt, Artificial Sequence
  Description of Artificial Sequence: Synthetic oligonucleotide
  Sense strand starting at position 1250 of SEQ ID NO: 916481
aggugugcucuccauuaca

SEQ ID NO: 1160071 - RNA, 19 nt, Artificial Sequence
  Description of Artificial Sequence: Synthetic oligonucleotide
  Antisense strand to SEQ ID NO: 1160070
uguaauggagagcacaccu

SEQ ID NO: 1160072 - RNA, 19 nt, Artificial Sequence
  Description of Artificial Sequence: Synthetic oligonucleotide
  Sense strand starting at position 1590 of SEQ ID NO: 916481
cccugucaggcccaagaau

SEQ ID NO: 1160073 - RNA, 19 nt, Artificial Sequence
  Description of Artificial Sequence: Synthetic oligonucleotide
  Antisense strand to SEQ ID NO: 1160072
auucuugggccugacaggg

SEQ ID NO: 1160074 - RNA, 19 nt, Artificial Sequence
  Description of Artificial Sequence: Synthetic oligonucleotide
  Sense strand starting at position 2159 of SEQ ID NO: 916481
gaaguugagcucuagaguc

SEQ ID NO: 1160075 - RNA, 19 nt, Artificial Sequence
  Description of Artificial Sequence: Synthetic oligonucleotide
  Antisense strand to SEQ ID NO: 1160074
gacucuagagcucaacuuc

SEQ ID NO: 1160076 - RNA, 19 nt, Artificial Sequence
  Description of Artificial Sequence: Synthetic oligonucleotide
  Sense strand starting at position 2169 of SEQ ID NO: 916481
ucuagagucagccggagau

SEQ ID NO: 1160077 - RNA, 19 nt, Artificial Sequence
  Description of Artificial Sequence: Synthetic oligonucleotide
  Antisense strand to SEQ ID NO: 1160076
aucuccggcugacucuaga

SEQ ID NO: 1160078 - RNA, 19 nt, Artificial Sequence
  Description of Artificial Sequence: Synthetic oligonucleotide
  Sense strand starting at position 2181 of SEQ ID NO: 916481
cggagauaccuguggagac

SEQ ID NO: 1160079 - RNA, 19 nt, Artificial Sequence
  Description of Artificial Sequence: Synthetic oligonucleotide
  Antisense strand to SEQ ID NO: 1160078
gucuccacagguaucuccg

SEQ ID NO: 1160080 - RNA, 19 nt, Artificial Sequence
  Description of Artificial Sequence: Synthetic oligonucleotide
  Sense strand starting at position 2227 of SEQ ID NO: 916481
ucugcuggaacggaaauau

SEQ ID NO: 1160081 - RNA, 19 nt, Artificial Sequence
  Description of Artificial Sequence: Synthetic oligonucleotide
  Antisense strand to SEQ ID NO: 1160080
auauuuccguuccagcaga

SEQ ID NO: 1160082 - RNA, 19 nt, Artificial Sequence
  Description of Artificial Sequence: Synthetic oligonucleotide
  Sense strand starting at position 2324 of SEQ ID NO: 916481
uugucaugacuccacauau

SEQ ID NO: 1160083 - RNA, 19 nt, Artificial Sequence
  Description of Artificial Sequence: Synthetic oligonucleotide
  Antisense strand to SEQ ID NO: 1160082
auauguggagucaugacaa

SEQ ID NO: 1160084 - RNA, 19 nt, Artificial Sequence
  Description of Artificial Sequence: Synthetic oligonucleotide
  Sense strand starting at position 2363 of SEQ ID NO: 916481
aaucaaaucugcguugaca

SEQ ID NO: 1160085 - RNA, 19 nt, Artificial Sequence
  Description of Artificial Sequence: Synthetic oligonucleotide
  Antisense strand to SEQ ID NO: 1160084
ugucaacgcagauuugauu

SEQ ID NO: 1160086 - RNA, 19 nt, Artificial Sequence
  Description of Artificial Sequence: Synthetic oligonucleotide
  Sense strand starting at position 2438 of SEQ ID NO: 916481
uggaguuccguguuaguuu

SEQ ID NO: 1160087 - RNA, 19 nt, Artificial Sequence
  Description of Artificial Sequence: Synthetic oligonucleotide
  Antisense strand to SEQ ID NO: 1160086
aaacuaacacggaacucca

SEQ ID NO: 1160088 - RNA, 19 nt, Artificial Sequence
  Description of Artificial Sequence: Synthetic oligonucleotide
  Sense strand starting at position 2706 of SEQ ID NO: 916481
guuugagauuuaguuugug

SEQ ID NO: 1160089 - RNA, 19 nt, Artificial Sequence
  Description of Artificial Sequence: Synthetic oligonucleotide
  Antisense strand to SEQ ID NO: 1160088
cacaaacuaaaucucaaac

SEQ ID NO: 1160090 - RNA, 19 nt, Artificial Sequence
  Description of Artificial Sequence: Synthetic oligonucleotide
  Sense strand starting at position 2723 of SEQ ID NO: 916481
uggcguaaguggauuguga

SEQ ID NO: 1160091 - RNA, 19 nt, Artificial Sequence
  Description of Artificial Sequence: Synthetic oligonucleotide
  Antisense strand to SEQ ID NO: 1160090
ucacaauccacuuacgcca

SEQ ID NO: 1160092 - RNA, 19 nt, Artificial Sequence
  Description of Artificial Sequence: Synthetic oligonucleotide
  Sense strand starting at position 2881 of SEQ ID NO: 916481
gugaguuuacaguaaaccu

SEQ ID NO: 1160093 - RNA, 19 nt, Artificial Sequence
  Description of Artificial Sequence: Synthetic oligonucleotide
  Antisense strand to SEQ ID NO: 1160092
agguuuacuguaaacucac

SEQ ID NO: 1160094 - RNA, 19 nt, Artificial Sequence
  Description of Artificial Sequence: Synthetic oligonucleotide
  Sense strand starting at position 2991 of SEQ ID NO: 916481
cuuauucuuguacagaucu

SEQ ID NO: 1160095 - RNA, 19 nt, Artificial Sequence
  Description of Artificial Sequence: Synthetic oligonucleotide
  Antisense strand to SEQ ID NO: 1160094
agaucuguacaagaauaag

SEQ ID NO: 1160096 - RNA, 19 nt, Artificial Sequence
  Description of Artificial Sequence: Synthetic oligonucleotide
  Sense strand starting at position 2999 of SEQ ID NO: 916481
uguacagaucuuuaucucu

SEQ ID NO: 1160097 - RNA, 19 nt, Artificial Sequence
  Description of Artificial Sequence: Synthetic oligonucleotide
  Antisense strand to SEQ ID NO: 1160096
agagauaaagaucuguaca

SEQ ID NO: 1160098 - RNA, 19 nt, Artificial Sequence
  Description of Artificial Sequence: Synthetic oligonucleotide
  Sense strand starting at position 3602 of SEQ ID NO: 916481
cuuugcuuggcugacauau

SEQ ID NO: 1160099 - RNA, 19 nt, Artificial Sequence
  Description of Artificial Sequence: Synthetic oligonucleotide
  Antisense strand to SEQ ID NO: 1160098
auaugucagccaagcaaag

SEQ ID NO: 1160100 - RNA, 19 nt, Artificial Sequence
  Description of Artificial Sequence: Synthetic oligonucleotide
  Sense strand starting at position 3674 of SEQ ID NO: 916481
uggcaauauuuagagagca

SEQ ID NO: 1160101 - RNA, 19 nt, Artificial Sequence
  Description of Artificial Sequence: Synthetic oligonucleotide
  Antisense strand to SEQ ID NO: 1160100
ugcucucuaaauauugcca

SEQ ID NO: 1160102 - RNA, 19 nt, Artificial Sequence
  Description of Artificial Sequence: Synthetic oligonucleotide
  Sense strand starting at position 3697 of SEQ ID NO: 916481
cagagaugauccuugucau

SEQ ID NO: 1160103 - RNA, 19 nt, Artificial Sequence
  Description of Artificial Sequence: Synthetic oligonucleotide
  Antisense strand to SEQ ID NO: 1160102
augacaaggaucaucucug

SEQ ID NO: 1160104 - RNA, 19 nt, Artificial Sequence
  Description of Artificial Sequence: Synthetic oligonucleotide
  Sense strand starting at position 3698 of SEQ ID NO: 916481
agagaugauccuugucauc

SEQ ID NO: 1160105 - RNA, 19 nt, Artificial Sequence
  Description of Artificial Sequence: Synthetic oligonucleotide
  Antisense strand to SEQ ID NO: 1160104
gaugacaaggaucaucucu

SEQ ID NO: 1160106 - RNA, 19 nt, Artificial Sequence
  Description of Artificial Sequence: Synthetic oligonucleotide
  Sense strand starting at position 3700 of SEQ ID NO: 916481
agaugauccuugucaucau

SEQ ID NO: 1160107 - RNA, 19 nt, Artificial Sequence
  Description of Artificial Sequence: Synthetic oligonucleotide
  Antisense strand to SEQ ID NO: 1160106
augaugacaaggaucaucu

SEQ ID NO: 1160108 - RNA, 19 nt, Artificial Sequence
  Description of Artificial Sequence: Synthetic oligonucleotide
  Sense strand starting at position 3780 of SEQ ID NO: 916481
cugcuaugagagcauauua

SEQ ID NO: 1160109 - RNA, 19 nt, Artificial Sequence
  Description of Artificial Sequence: Synthetic oligonucleotide
  Antisense strand to SEQ ID NO: 1160108
uaauaugcucucauagcag

SEQ ID NO: 1160110 - RNA, 19 nt, Artificial Sequence
  Description of Artificial Sequence: Synthetic oligonucleotide
  Sense strand starting at position 3803 of SEQ ID NO: 916481
gggacuugccuagguagga

SEQ ID NO: 1160111 - RNA, 19 nt, Artificial Sequence
  Description of Artificial Sequence: Synthetic oligonucleotide
  Antisense strand to SEQ ID NO: 1160110
uccuaccuaggcaaguccc

SEQ ID NO: 1160112 - RNA, 19 nt, Artificial Sequence
  Description of Artificial Sequence: Synthetic oligonucleotide
  Sense strand starting at position 3804 of SEQ ID NO: 916481
ggacuugccuagguaggau

SEQ ID NO: 1160113 - RNA, 19 nt, Artificial Sequence
  Description of Artificial Sequence: Synthetic oligonucleotide
  Antisense strand to SEQ ID NO: 1160112
auccuaccuaggcaagucc

SEQ ID NO: 1160114 - RNA, 19 nt, Artificial Sequence
  Description of Artificial Sequence: Synthetic oligonucleotide
  Sense strand starting at position 3815 of SEQ ID NO: 916481
gguaggauggccugguaga

SEQ ID NO: 1160115 - RNA, 19 nt, Artificial Sequence
  Description of Artificial Sequence: Synthetic oligonucleotide
  Antisense strand to SEQ ID NO: 1160114
ucuaccaggccauccuacc

SEQ ID NO: 1160116 - RNA, 19 nt, Artificial Sequence
  Description of Artificial Sequence: Synthetic oligonucleotide
  Sense strand starting at position 3848 of SEQ ID NO: 916481
uagcaauuaggcugagauc

SEQ ID NO: 1160117 - RNA, 19 nt, Artificial Sequence
  Description of Artificial Sequence: Synthetic oligonucleotide
  Antisense strand to SEQ ID NO: 1160116
gaucucagccuaauugcua

SEQ ID NO: 1160118 - RNA, 19 nt, Artificial Sequence
  Description of Artificial Sequence: Synthetic oligonucleotide
  Sense strand starting at position 3849 of SEQ ID NO: 916481
agcaauuaggcugagaucu

SEQ ID NO: 1160119 - RNA, 19 nt, Artificial Sequence
  Description of Artificial Sequence: Synthetic oligonucleotide
  Antisense strand to SEQ ID NO: 1160118
agaucucagccuaauugcu

SEQ ID NO: 1160120 - RNA, 19 nt, Artificial Sequence
  Description of Artificial Sequence: Synthetic oligonucleotide
  Sense strand starting at position 3855 of SEQ ID NO: 916481
uaggcugagaucugaagga

SEQ ID NO: 1160121 - RNA, 19 nt, Artificial Sequence
  Description of Artificial Sequence: Synthetic oligonucleotide
  Antisense strand to SEQ ID NO: 1160120
uccuucagaucucagccua

SEQ ID NO: 1160122 - RNA, 19 nt, Artificial Sequence
  Description of Artificial Sequence: Synthetic oligonucleotide
  Sense strand starting at position 44 of SEQ ID NO: 916482
uugccauugcuuuagaguu

SEQ ID NO: 1160123 - RNA, 19 nt, Artificial Sequence
  Description of Artificial Sequence: Synthetic oligonucleotide
  Antisense strand to SEQ ID NO: 1160122
aacucuaaagcaauggcaa

SEQ ID NO: 1160124 - RNA, 19 nt, Artificial Sequence
  Description of Artificial Sequence: Synthetic oligonucleotide
  Sense strand starting at position 98 of SEQ ID NO: 916482
cuuauaacacucuguggua

SEQ ID NO: 1160125 - RNA, 19 nt, Artificial Sequence
  Description of Artificial Sequence: Synthetic oligonucleotide
  Antisense strand to SEQ ID NO: 1160124
uaccacagaguguuauaag

SEQ ID NO: 1160126 - RNA, 19 nt, Artificial Sequence
  Description of Artificial Sequence: Synthetic oligonucleotide
  Sense strand starting at position 99 of SEQ ID NO: 916482
uuauaacacucugugguaa

SEQ ID NO: 1160127 - RNA, 19 nt, Artificial Sequence
  Description of Artificial Sequence: Synthetic oligonucleotide
  Antisense strand to SEQ ID NO: 1160126
uuaccacagaguguuauaa

SEQ ID NO: 1160128 - RNA, 19 nt, Artificial Sequence
  Description of Artificial Sequence: Synthetic oligonucleotide
  Sense strand starting at position 138 of SEQ ID NO: 916482
gagggucagauaugccgaa

SEQ ID NO: 1160129 - RNA, 19 nt, Artificial Sequence
  Description of Artificial Sequence: Synthetic oligonucleotide
  Antisense strand to SEQ ID NO: 1160128
uucggcauaucugacccuc

SEQ ID NO: 1160130 - RNA, 19 nt, Artificial Sequence
  Description of Artificial Sequence: Synthetic oligonucleotide
  Sense strand starting at position 142 of SEQ ID NO: 916482
gucagauaugccgaagauc

SEQ ID NO: 1160131 - RNA, 19 nt, Artificial Sequence
  Description of Artificial Sequence: Synthetic oligonucleotide
  Antisense strand to SEQ ID NO: 1160130
gaucuucggcauaucugac

SEQ ID NO: 1160132 - RNA, 19 nt, Artificial Sequence
  Description of Artificial Sequence: Synthetic oligonucleotide
  Sense strand starting at position 305 of SEQ ID NO: 916482
cugaguagcuggucuugaa

SEQ ID NO: 1160133 - RNA, 19 nt, Artificial Sequence
  Description of Artificial Sequence: Synthetic oligonucleotide
  Antisense strand to SEQ ID NO: 1160132
uucaagaccagcuacucag

SEQ ID NO: 1160134 - RNA, 19 nt, Artificial Sequence
  Description of Artificial Sequence: Synthetic oligonucleotide
  Sense strand starting at position 452 of SEQ ID NO: 916482
ucucuaucaggcuguuauc

SEQ ID NO: 1160135 - RNA, 19 nt, Artificial Sequence
  Description of Artificial Sequence: Synthetic oligonucleotide
  Antisense strand to SEQ ID NO: 1160134
gauaacagccugauagaga

SEQ ID NO: 1160136 - RNA, 19 nt, Artificial Sequence
  Description of Artificial Sequence: Synthetic oligonucleotide
  Sense strand starting at position 462 of SEQ ID NO: 916482
gcuguuaucuguuugggaa

SEQ ID NO: 1160137 - RNA, 19 nt, Artificial Sequence
  Description of Artificial Sequence: Synthetic oligonucleotide
  Antisense strand to SEQ ID NO: 1160136
uucccaaacagauaacagc

SEQ ID NO: 1160138 - RNA, 19 nt, Artificial Sequence
  Description of Artificial Sequence: Synthetic oligonucleotide
  Sense strand starting at position 705 of SEQ ID NO: 916482
ggcagaugaaauggcucau

SEQ ID NO: 1160139 - RNA, 19 nt, Artificial Sequence
  Description of Artificial Sequence: Synthetic oligonucleotide
  Antisense strand to SEQ ID NO: 1160138
augagccauuucaucugcc

SEQ ID NO: 1160140 - RNA, 19 nt, Artificial Sequence
  Description of Artificial Sequence: Synthetic oligonucleotide
  Sense strand starting at position 950 of SEQ ID NO: 916482
gccugaguguuaccuaaca

SEQ ID NO: 1160141 - RNA, 19 nt, Artificial Sequence
  Description of Artificial Sequence: Synthetic oligonucleotide
  Antisense strand to SEQ ID NO: 1160140
uguuagguaacacucaggc

SEQ ID NO: 1160142 - RNA, 19 nt, Artificial Sequence
  Description of Artificial Sequence: Synthetic oligonucleotide
  Sense strand starting at position 1180 of SEQ ID NO: 916482
agugguacugugagagugu

SEQ ID NO: 1160143 - RNA, 19 nt, Artificial Sequence
  Description of Artificial Sequence: Synthetic oligonucleotide
  Antisense strand to SEQ ID NO: 1160142
acacucucacaguaccacu

SEQ ID NO: 1160144 - RNA, 19 nt, Artificial Sequence
  Description of Artificial Sequence: Synthetic oligonucleotide
  Sense strand starting at position 1297 of SEQ ID NO: 916482
cuuaacucccagugugaau

SEQ ID NO: 1160145 - RNA, 19 nt, Artificial Sequence
  Description of Artificial Sequence: Synthetic oligonucleotide
  Antisense strand to SEQ ID NO: 1160144
auucacacugggaguuaag

SEQ ID NO: 1160146 - RNA, 19 nt, Artificial Sequence
  Description of Artificial Sequence: Synthetic oligonucleotide
  Sense strand starting at position 1308 of SEQ ID NO: 916482
gugugaaucauaggaccau

SEQ ID NO: 1160147 - RNA, 19 nt, Artificial Sequence
  Description of Artificial Sequence: Synthetic oligonucleotide
  Antisense strand to SEQ ID NO: 1160146
augguccuaugauucacac

SEQ ID NO: 1160148 - RNA, 19 nt, Artificial Sequence
  Description of Artificial Sequence: Synthetic oligonucleotide
  Sense strand starting at position 1449 of SEQ ID NO: 916482
cugggauccuacuuugugu

SEQ ID NO: 1160149 - RNA, 19 nt, Artificial Sequence
  Description of Artificial Sequence: Synthetic oligonucleotide
  Antisense strand to SEQ ID NO: 1160148
acacaaaguaggaucccag

SEQ ID NO: 1160150 - RNA, 19 nt, Artificial Sequence
  Description of Artificial Sequence: Synthetic oligonucleotide
  Sense strand starting at position 1451 of SEQ ID NO: 916482
gggauccuacuuuguguuu

SEQ ID NO: 1160151 - RNA, 19 nt, Artificial Sequence
  Description of Artificial Sequence: Synthetic oligonucleotide
  Antisense strand to SEQ ID NO: 1160150
aaacacaaaguaggauccc

SEQ ID NO: 1160152 - RNA, 19 nt, Artificial Sequence
  Description of Artificial Sequence: Synthetic oligonucleotide
  Sense strand starting at position 1507 of SEQ ID NO: 916482
caggauuguguauauguuu

SEQ ID NO: 1160153 - RNA, 19 nt, Artificial Sequence
  Description of Artificial Sequence: Synthetic oligonucleotide
  Antisense strand to SEQ ID NO: 1160152
aaacauauacacaauccug

SEQ ID NO: 1160154 - RNA, 19 nt, Artificial Sequence
  Description of Artificial Sequence: Synthetic oligonucleotide
  Sense strand starting at position 1679 of SEQ ID NO: 916482
acuccucucucggucgaau

SEQ ID NO: 1160155 - RNA, 19 nt, Artificial Sequence
  Description of Artificial Sequence: Synthetic oligonucleotide
  Antisense strand to SEQ ID NO: 1160154
auucgaccgagagaggagu

SEQ ID NO: 1160156 - RNA, 19 nt, Artificial Sequence
  Description of Artificial Sequence: Synthetic oligonucleotide
  Sense strand starting at position 3046 of SEQ ID NO: 916482
gagaaauggucacuucgug

SEQ ID NO: 1160157 - RNA, 19 nt, Artificial Sequence
  Description of Artificial Sequence: Synthetic oligonucleotide
  Antisense strand to SEQ ID NO: 1160156
cacgaagugaccauuucuc

SEQ ID NO: 1160158 - RNA, 19 nt, Artificial Sequence
  Description of Artificial Sequence: Synthetic oligonucleotide
  Sense strand starting at position 3052 of SEQ ID NO: 916482
uggucacuucguggaucuu

SEQ ID NO: 1160159 - RNA, 19 nt, Artificial Sequence
  Description of Artificial Sequence: Synthetic oligonucleotide
  Antisense strand to SEQ ID NO: 1160158
aagauccacgaagugacca

SEQ ID NO: 1160160 - RNA, 19 nt, Artificial Sequence
  Description of Artificial Sequence: Synthetic oligonucleotide
  Sense strand starting at position 3053 of SEQ ID NO: 916482
ggucacuucguggaucuuu

SEQ ID NO: 1160161 - RNA, 19 nt, Artificial Sequence
  Description of Artificial Sequence: Synthetic oligonucleotide
  Antisense strand to SEQ ID NO: 1160160
aaagauccacgaagugacc

SEQ ID NO: 1160162 - RNA, 19 nt, Artificial Sequence
  Description of Artificial Sequence: Synthetic oligonucleotide
  Sense strand starting at position 3085 of SEQ ID NO: 916482
gaacuuugggcccagucua

SEQ ID NO: 1160163 - RNA, 19 nt, Artificial Sequence
  Description of Artificial Sequence: Synthetic oligonucleotide
  Antisense strand to SEQ ID NO: 1160162
uagacugggcccaaaguuc

SEQ ID NO: 1160164 - RNA, 19 nt, Artificial Sequence
  Description of Artificial Sequence: Synthetic oligonucleotide
  Sense strand starting at position 3183 of SEQ ID NO: 916482
gcgaauugccugucaaagc

SEQ ID NO: 1160165 - RNA, 19 nt, Artificial Sequence
  Description of Artificial Sequence: Synthetic oligonucleotide
  Antisense strand to SEQ ID NO: 1160164
gcuuugacaggcaauucgc

SEQ ID NO: 1160166 - RNA, 19 nt, Artificial Sequence
  Description of Artificial Sequence: Synthetic oligonucleotide
  Sense strand starting at position 3252 of SEQ ID NO: 916482
auaagaaggaguuguuucu

SEQ ID NO: 1160167 - RNA, 19 nt, Artificial Sequence
  Description of Artificial Sequence: Synthetic oligonucleotide
  Antisense strand to SEQ ID NO: 1160166
agaaacaacuccuucuuau

SEQ ID NO: 1160168 - RNA, 19 nt, Artificial Sequence
  Description of Artificial Sequence: Synthetic oligonucleotide
  Sense strand starting at position 3259 of SEQ ID NO: 916482
ggaguuguuucuaucgugu

SEQ ID NO: 1160169 - RNA, 19 nt, Artificial Sequence
  Description of Artificial Sequence: Synthetic oligonucleotide
  Antisense strand to SEQ ID NO: 1160168
acacgauagaaacaacucc

SEQ ID NO: 1160170 - RNA, 19 nt, Artificial Sequence
  Description of Artificial Sequence: Synthetic oligonucleotide
  Sense strand starting at position 3265 of SEQ ID NO: 916482
guuucuaucguguugcuuu

SEQ ID NO: 1160171 - RNA, 19 nt, Artificial Sequence
  Description of Artificial Sequence: Synthetic oligonucleotide
  Antisense strand to SEQ ID NO: 1160170
aaagcaacacgauagaaac

SEQ ID NO: 1160172 - RNA, 19 nt, Artificial Sequence
  Description of Artificial Sequence: Synthetic oligonucleotide
  Sense strand starting at position 3436 of SEQ ID NO: 916482
acaggcuugcgcuaccaua

SEQ ID NO: 1160173 - RNA, 19 nt, Artificial Sequence
  Description of Artificial Sequence: Synthetic oligonucleotide
  Antisense strand to SEQ ID NO: 1160172
uaugguagcgcaagccugu

SEQ ID NO: 1160174 - RNA, 19 nt, Artificial Sequence
  Description of Artificial Sequence: Synthetic oligonucleotide
  Sense strand starting at position 3579 of SEQ ID NO: 916482
gacacccagccuuguguua

SEQ ID NO: 1160175 - RNA, 19 nt, Artificial Sequence
  Description of Artificial Sequence: Synthetic oligonucleotide
  Antisense strand to SEQ ID NO: 1160174
uaacacaaggcuggguguc

SEQ ID NO: 1160176 - RNA, 19 nt, Artificial Sequence
  Description of Artificial Sequence: Synthetic oligonucleotide
  Sense strand starting at position 3590 of SEQ ID NO: 916482
uuguguuacucuuugugau

SEQ ID NO: 1160177 - RNA, 19 nt, Artificial Sequence
  Description of Artificial Sequence: Synthetic oligonucleotide
  Antisense strand to SEQ ID NO: 1160176
aucacaaagaguaacacaa

SEQ ID NO: 1160178 - RNA, 19 nt, Artificial Sequence
  Description of Artificial Sequence: Synthetic oligonucleotide
  Sense strand starting at position 3591 of SEQ ID NO: 916482
uguguuacucuuugugauu

SEQ ID NO: 1160179 - RNA, 19 nt, Artificial Sequence
  Description of Artificial Sequence: Synthetic oligonucleotide
  Antisense strand to SEQ ID NO: 1160178
aaucacaaagaguaacaca

SEQ ID NO: 1160180 - RNA, 19 nt, Artificial Sequence
  Description of Artificial Sequence: Synthetic oligonucleotide
  Sense strand starting at position 3592 of SEQ ID NO: 916482
guguuacucuuugugauuu

SEQ ID NO: 1160181 - RNA, 19 nt, Artificial Sequence
  Description of Artificial Sequence: Synthetic oligonucleotide
  Antisense strand to SEQ ID NO: 1160180
aaaucacaaagaguaacac

SEQ ID NO: 1160182 - RNA, 19 nt, Artificial Sequence
  Description of Artificial Sequence: Synthetic oligonucleotide
  Sense strand starting at position 3614 of SEQ ID NO: 916482
ggagaauacugucacuuaa

SEQ ID NO: 1160183 - RNA, 19 nt, Artificial Sequence
  Description of Artificial Sequence: Synthetic oligonucleotide
  Antisense strand to SEQ ID NO: 1160182
uuaagugacaguauucucc

SEQ ID NO: 1160184 - RNA, 19 nt, Artificial Sequence
  Description of Artificial Sequence: Synthetic oligonucleotide
  Sense strand starting at position 3647 of SEQ ID NO: 916482
uggacauggucuucuguca

SEQ ID NO: 1160185 - RNA, 19 nt, Artificial Sequence
  Description of Artificial Sequence: Synthetic oligonucleotide
  Antisense strand to SEQ ID NO: 1160184
ugacagaagaccaugucca

SEQ ID NO: 1160186 - RNA, 19 nt, Artificial Sequence
  Description of Artificial Sequence: Synthetic oligonucleotide
  Sense strand starting at position 3682 of SEQ ID NO: 916482
guacucuguagggagacuu

SEQ ID NO: 1160187 - RNA, 19 nt, Artificial Sequence
  Description of Artificial Sequence: Synthetic oligonucleotide
  Antisense strand to SEQ ID NO: 1160186
aagucucccuacagaguac

SEQ ID NO: 1160188 - RNA, 19 nt, Artificial Sequence
  Description of Artificial Sequence: Synthetic oligonucleotide
  Sense strand starting at position 3690 of SEQ ID NO: 916482
uagggagacuugcagacau

SEQ ID NO: 1160189 - RNA, 19 nt, Artificial Sequence
  Description of Artificial Sequence: Synthetic oligonucleotide
  Antisense strand to SEQ ID NO: 1160188
augucugcaagucucccua

SEQ ID NO: 1160190 - RNA, 19 nt, Artificial Sequence
  Description of Artificial Sequence: Synthetic oligonucleotide
  Sense strand starting at position 3704 of SEQ ID NO: 916482
gacauuaaacuucgugagu

SEQ ID NO: 1160191 - RNA, 19 nt, Artificial Sequence
  Description of Artificial Sequence: Synthetic oligonucleotide
  Antisense strand to SEQ ID NO: 1160190
acucacgaaguuuaauguc

SEQ ID NO: 1160192 - RNA, 19 nt, Artificial Sequence
  Description of Artificial Sequence: Synthetic oligonucleotide
  Sense strand starting at position 3705 of SEQ ID NO: 916482
acauuaaacuucgugagug

SEQ ID NO: 1160193 - RNA, 19 nt, Artificial Sequence
  Description of Artificial Sequence: Synthetic oligonucleotide
  Antisense strand to SEQ ID NO: 1160192
cacucacgaaguuuaaugu

SEQ ID NO: 1160194 - RNA, 19 nt, Artificial Sequence
  Description of Artificial Sequence: Synthetic oligonucleotide
  Sense strand starting at position 3710 of SEQ ID NO: 916482
aaacuucgugagugcuuua

SEQ ID NO: 1160195 - RNA, 19 nt, Artificial Sequence
  Description of Artificial Sequence: Synthetic oligonucleotide
  Antisense strand to SEQ ID NO: 1160194
uaaagcacucacgaaguuu

SEQ ID NO: 1160196 - RNA, 19 nt, Artificial Sequence
  Description of Artificial Sequence: Synthetic oligonucleotide
  Sense strand starting at position 3713 of SEQ ID NO: 916482
cuucgugagugcuuuauaa

SEQ ID NO: 1160197 - RNA, 19 nt, Artificial Sequence
  Description of Artificial Sequence: Synthetic oligonucleotide
  Antisense strand to SEQ ID NO: 1160196
uuauaaagcacucacgaag

SEQ ID NO: 1160198 - RNA, 19 nt, Artificial Sequence
  Description of Artificial Sequence: Synthetic oligonucleotide
  Sense strand starting at position 3715 of SEQ ID NO: 916482
ucgugagugcuuuauaacu

SEQ ID NO: 1160199 - RNA, 19 nt, Artificial Sequence
  Description of Artificial Sequence: Synthetic oligonucleotide
  Antisense strand to SEQ ID NO: 1160198
aguuauaaagcacucacga

SEQ ID NO: 1160200 - RNA, 19 nt, Artificial Sequence
  Description of Artificial Sequence: Synthetic oligonucleotide
  Sense strand starting at position 3790 of SEQ ID NO: 916482
augaguuuccaaggguuag

SEQ ID NO: 1160201 - RNA, 19 nt, Artificial Sequence
  Description of Artificial Sequence: Synthetic oligonucleotide
  Antisense strand to SEQ ID NO: 1160200
cuaacccuuggaaacucau

SEQ ID NO: 1160202 - RNA, 19 nt, Artificial Sequence
  Description of Artificial Sequence: Synthetic oligonucleotide
  Sense strand starting at position 215 of SEQ ID NO: 916483
uguauauuacuguaucuga

SEQ ID NO: 1160203 - RNA, 19 nt, Artificial Sequence
  Description of Artificial Sequence: Synthetic oligonucleotide
  Antisense strand to SEQ ID NO: 1160202
ucagauacaguaauauaca

SEQ ID NO: 1160204 - RNA, 19 nt, Artificial Sequence
  Description of Artificial Sequence: Synthetic oligonucleotide
  Sense strand starting at position 218 of SEQ ID NO: 916483
auauuacuguaucugauga

SEQ ID NO: 1160205 - RNA, 19 nt, Artificial Sequence
  Description of Artificial Sequence: Synthetic oligonucleotide
  Antisense strand to SEQ ID NO: 1160204
ucaucagauacaguaauau

SEQ ID NO: 1160206 - RNA, 19 nt, Artificial Sequence
  Description of Artificial Sequence: Synthetic oligonucleotide
  Sense strand starting at position 264 of SEQ ID NO: 916483
aaagcuuuggugcaucaau

SEQ ID NO: 1160207 - RNA, 19 nt, Artificial Sequence
  Description of Artificial Sequence: Synthetic oligonucleotide
  Antisense strand to SEQ ID NO: 1160206
auugaugcaccaaagcuuu

SEQ ID NO: 1160208 - RNA, 19 nt, Artificial Sequence
  Description of Artificial Sequence: Synthetic oligonucleotide
  Sense strand starting at position 271 of SEQ ID NO: 916483
uggugcaucaauugggaaa

SEQ ID NO: 1160209 - RNA, 19 nt, Artificial Sequence
  Description of Artificial Sequence: Synthetic oligonucleotide
  Antisense strand to SEQ ID NO: 1160208
uuucccaauugaugcacca

SEQ ID NO: 1160210 - RNA, 19 nt, Artificial Sequence
  Description of Artificial Sequence: Synthetic oligonucleotide
  Sense strand starting at position 390 of SEQ ID NO: 916483
ugccucuuacaggaaauca

SEQ ID NO: 1160211 - RNA, 19 nt, Artificial Sequence
  Description of Artificial Sequence: Synthetic oligonucleotide
  Antisense strand to SEQ ID NO: 1160210
ugauuuccuguaagaggca

SEQ ID NO: 1160212 - RNA, 19 nt, Artificial Sequence
  Description of Artificial Sequence: Synthetic oligonucleotide
  Sense strand starting at position 401 of SEQ ID NO: 916483
ggaaaucagccauacaguc

SEQ ID NO: 1160213 - RNA, 19 nt, Artificial Sequence
  Description of Artificial Sequence: Synthetic oligonucleotide
  Antisense strand to SEQ ID NO: 1160212
gacuguauggcugauuucc

SEQ ID NO: 1160214 - RNA, 19 nt, Artificial Sequence
  Description of Artificial Sequence: Synthetic oligonucleotide
  Sense strand starting at position 521 of SEQ ID NO: 916483
guauauaaacuaggcauau

SEQ ID NO: 1160215 - RNA, 19 nt, Artificial Sequence
  Description of Artificial Sequence: Synthetic oligonucleotide
  Antisense strand to SEQ ID NO: 1160214
auaugccuaguuuauauac

SEQ ID NO: 1160216 - RNA, 19 nt, Artificial Sequence
  Description of Artificial Sequence: Synthetic oligonucleotide
  Sense strand starting at position 542 of SEQ ID NO: 916483
ugugguauacuuuacuuua

SEQ ID NO: 1160217 - RNA, 19 nt, Artificial Sequence
  Description of Artificial Sequence: Synthetic oligonucleotide
  Antisense strand to SEQ ID NO: 1160216
uaaaguaaaguauaccaca

SEQ ID NO: 1160218 - RNA, 19 nt, Artificial Sequence
  Description of Artificial Sequence: Synthetic oligonucleotide
  Sense strand starting at position 595 of SEQ ID NO: 916483
acguaaaugcuauauaagu

SEQ ID NO: 1160219 - RNA, 19 nt, Artificial Sequence
  Description of Artificial Sequence: Synthetic oligonucleotide
  Antisense strand to SEQ ID NO: 1160218
acuuauauagcauuuacgu

SEQ ID NO: 1160220 - RNA, 19 nt, Artificial Sequence
  Description of Artificial Sequence: Synthetic oligonucleotide
  Sense strand starting at position 681 of SEQ ID NO: 916483
ggccaacuguaccuuuaaa

SEQ ID NO: 1160221 - RNA, 19 nt, Artificial Sequence
  Description of Artificial Sequence: Synthetic oligonucleotide
  Antisense strand to SEQ ID NO: 1160220
uuuaaagguacaguuggcc

SEQ ID NO: 1160222 - RNA, 19 nt, Artificial Sequence
  Description of Artificial Sequence: Synthetic oligonucleotide
  Sense strand starting at position 779 of SEQ ID NO: 916483
uuauauucuagugguggga

SEQ ID NO: 1160223 - RNA, 19 nt, Artificial Sequence
  Description of Artificial Sequence: Synthetic oligonucleotide
  Antisense strand to SEQ ID NO: 1160222
ucccaccacuagaauauaa

SEQ ID NO: 1160224 - RNA, 19 nt, Artificial Sequence
  Description of Artificial Sequence: Synthetic oligonucleotide
  Sense strand starting at position 782 of SEQ ID NO: 916483
uauucuaguggugggauaa

SEQ ID NO: 1160225 - RNA, 19 nt, Artificial Sequence
  Description of Artificial Sequence: Synthetic oligonucleotide
  Antisense strand to SEQ ID NO: 1160224
uuaucccaccacuagaaua

SEQ ID NO: 1160226 - RNA, 19 nt, Artificial Sequence
  Description of Artificial Sequence: Synthetic oligonucleotide
  Sense strand starting at position 783 of SEQ ID NO: 916483
auucuaguggugggauaaa

SEQ ID NO: 1160227 - RNA, 19 nt, Artificial Sequence
  Description of Artificial Sequence: Synthetic oligonucleotide
  Antisense strand to SEQ ID NO: 1160226
uuuaucccaccacuagaau

SEQ ID NO: 1160228 - RNA, 19 nt, Artificial Sequence
  Description of Artificial Sequence: Synthetic oligonucleotide
  Sense strand starting at position 831 of SEQ ID NO: 916483
cuuuaugaagucuagccaa

SEQ ID NO: 1160229 - RNA, 19 nt, Artificial Sequence
  Description of Artificial Sequence: Synthetic oligonucleotide
  Antisense strand to SEQ ID NO: 1160228
uuggcuagacuucauaaag

SEQ ID NO: 1160230 - RNA, 19 nt, Artificial Sequence
  Description of Artificial Sequence: Synthetic oligonucleotide
  Sense strand starting at position 875 of SEQ ID NO: 916483
aauugucugugggcagaga

SEQ ID NO: 1160231 - RNA, 19 nt, Artificial Sequence
  Description of Artificial Sequence: Synthetic oligonucleotide
  Antisense strand to SEQ ID NO: 1160230
ucucugcccacagacaauu

SEQ ID NO: 1160232 - RNA, 19 nt, Artificial Sequence
  Description of Artificial Sequence: Synthetic oligonucleotide
  Sense strand starting at position 876 of SEQ ID NO: 916483
auugucugugggcagagau

SEQ ID NO: 1160233 - RNA, 19 nt, Artificial Sequence
  Description of Artificial Sequence: Synthetic oligonucleotide
  Antisense strand to SEQ ID NO: 1160232
aucucugcccacagacaau

SEQ ID NO: 1160234 - RNA, 19 nt, Artificial Sequence
  Description of Artificial Sequence: Synthetic oligonucleotide
  Sense strand starting at position 1045 of SEQ ID NO: 916483
aaaguaucugaugguucga

SEQ ID NO: 1160235 - RNA, 19 nt, Artificial Sequence
  Description of Artificial Sequence: Synthetic oligonucleotide
  Antisense strand to SEQ ID NO: 1160234
ucgaaccaucagauacuuu

SEQ ID NO: 1160236 - RNA, 19 nt, Artificial Sequence
  Description of Artificial Sequence: Synthetic oligonucleotide
  Sense strand starting at position 1111 of SEQ ID NO: 916483
ugugcaauugaucacuaag

SEQ ID NO: 1160237 - RNA, 19 nt, Artificial Sequence
  Description of Artificial Sequence: Synthetic oligonucleotide
  Antisense strand to SEQ ID NO: 1160236
cuuagugaucaauugcaca

SEQ ID NO: 1160238 - RNA, 19 nt, Artificial Sequence
  Description of Artificial Sequence: Synthetic oligonucleotide
  Sense strand starting at position 1113 of SEQ ID NO: 916483
ugcaauugaucacuaagau

SEQ ID NO: 1160239 - RNA, 19 nt, Artificial Sequence
  Description of Artificial Sequence: Synthetic oligonucleotide
  Antisense strand to SEQ ID NO: 1160238
aucuuagugaucaauugca

SEQ ID NO: 1160240 - RNA, 19 nt, Artificial Sequence
  Description of Artificial Sequence: Synthetic oligonucleotide
  Sense strand starting at position 1117 of SEQ ID NO: 916483
auugaucacuaagauuugu

SEQ ID NO: 1160241 - RNA, 19 nt, Artificial Sequence
  Description of Artificial Sequence: Synthetic oligonucleotide
  Antisense strand to SEQ ID NO: 1160240
acaaaucuuagugaucaau

SEQ ID NO: 1160242 - RNA, 19 nt, Artificial Sequence
  Description of Artificial Sequence: Synthetic oligonucleotide
  Sense strand starting at position 1234 of SEQ ID NO: 916483
ggaucucuucugcauaaau

SEQ ID NO: 1160243 - RNA, 19 nt, Artificial Sequence
  Description of Artificial Sequence: Synthetic oligonucleotide
  Antisense strand to SEQ ID NO: 1160242
auuuaugcagaagagaucc

SEQ ID NO: 1160244 - RNA, 19 nt, Artificial Sequence
  Description of Artificial Sequence: Synthetic oligonucleotide
  Sense strand starting at position 1323 of SEQ ID NO: 916483
aucauaaaugagugaugca

SEQ ID NO: 1160245 - RNA, 19 nt, Artificial Sequence
  Description of Artificial Sequence: Synthetic oligonucleotide
  Antisense strand to SEQ ID NO: 1160244
ugcaucacucauuuaugau

SEQ ID NO: 1160246 - RNA, 19 nt, Artificial Sequence
  Description of Artificial Sequence: Synthetic oligonucleotide
  Sense strand starting at position 1807 of SEQ ID NO: 916483
gccagcuucggcuuguaaa

SEQ ID NO: 1160247 - RNA, 19 nt, Artificial Sequence
  Description of Artificial Sequence: Synthetic oligonucleotide
  Antisense strand to SEQ ID NO: 1160246
uuuacaagccgaagcuggc

SEQ ID NO: 1160248 - RNA, 19 nt, Artificial Sequence
  Description of Artificial Sequence: Synthetic oligonucleotide
  Sense strand starting at position 1883 of SEQ ID NO: 916483
auacauagccugugaacuc

SEQ ID NO: 1160249 - RNA, 19 nt, Artificial Sequence
  Description of Artificial Sequence: Synthetic oligonucleotide
  Antisense strand to SEQ ID NO: 1160248
gaguucacaggcuauguau

SEQ ID NO: 1160250 - RNA, 19 nt, Artificial Sequence
  Description of Artificial Sequence: Synthetic oligonucleotide
  Sense strand starting at position 2138 of SEQ ID NO: 916483
uggguuaugaaguauguga

SEQ ID NO: 1160251 - RNA, 19 nt, Artificial Sequence
  Description of Artificial Sequence: Synthetic oligonucleotide
  Antisense strand to SEQ ID NO: 1160250
ucacauacuucauaaccca

SEQ ID NO: 1160252 - RNA, 19 nt, Artificial Sequence
  Description of Artificial Sequence: Synthetic oligonucleotide
  Sense strand starting at position 2868 of SEQ ID NO: 916483
cgagucuggaucuacauau

SEQ ID NO: 1160253 - RNA, 19 nt, Artificial Sequence
  Description of Artificial Sequence: Synthetic oligonucleotide
  Antisense strand to SEQ ID NO: 1160252
auauguagauccagacucg

SEQ ID NO: 1160254 - RNA, 19 nt, Artificial Sequence
  Description of Artificial Sequence: Synthetic oligonucleotide
  Sense strand starting at position 3091 of SEQ ID NO: 916483
uagaauuugucgcuugggu

SEQ ID NO: 1160255 - RNA, 19 nt, Artificial Sequence
  Description of Artificial Sequence: Synthetic oligonucleotide
  Antisense strand to SEQ ID NO: 1160254
acccaagcgacaaauucua

SEQ ID NO: 1160256 - RNA, 19 nt, Artificial Sequence
  Description of Artificial Sequence: Synthetic oligonucleotide
  Sense strand starting at position 3093 of SEQ ID NO: 916483
gaauuugucgcuuggguuc

SEQ ID NO: 1160257 - RNA, 19 nt, Artificial Sequence
  Description of Artificial Sequence: Synthetic oligonucleotide
  Antisense strand to SEQ ID NO: 1160256
gaacccaagcgacaaauuc

SEQ ID NO: 1160258 - RNA, 19 nt, Artificial Sequence
  Description of Artificial Sequence: Synthetic oligonucleotide
  Sense strand starting at position 3234 of SEQ ID NO: 916483
uuucuuucuuaguugaaug

SEQ ID NO: 1160259 - RNA, 19 nt, Artificial Sequence
  Description of Artificial Sequence: Synthetic oligonucleotide
  Antisense strand to SEQ ID NO: 1160258
cauucaacuaagaaagaaa

SEQ ID NO: 1160260 - RNA, 19 nt, Artificial Sequence
  Description of Artificial Sequence: Synthetic oligonucleotide
  Sense strand starting at position 3249 of SEQ ID NO: 916483
aaugguguauuugcuacau

SEQ ID NO: 1160261 - RNA, 19 nt, Artificial Sequence
  Description of Artificial Sequence: Synthetic oligonucleotide
  Antisense strand to SEQ ID NO: 1160260
auguagcaaauacaccauu

SEQ ID NO: 1160262 - RNA, 19 nt, Artificial Sequence
  Description of Artificial Sequence: Synthetic oligonucleotide
  Sense strand starting at position 3253 of SEQ ID NO: 916483
guguauuugcuacauucuu

SEQ ID NO: 1160263 - RNA, 19 nt, Artificial Sequence
  Description of Artificial Sequence: Synthetic oligonucleotide
  Antisense strand to SEQ ID NO: 1160262
aagaauguagcaaauacac

SEQ ID NO: 1160264 - RNA, 19 nt, Artificial Sequence
  Description of Artificial Sequence: Synthetic oligonucleotide
  Sense strand starting at position 3272 of SEQ ID NO: 916483
guugauaagcuauacaccu

SEQ ID NO: 1160265 - RNA, 19 nt, Artificial Sequence
  Description of Artificial Sequence: Synthetic oligonucleotide
  Antisense strand to SEQ ID NO: 1160264
agguguauagcuuaucaac

SEQ ID NO: 1160266 - RNA, 19 nt, Artificial Sequence
  Description of Artificial Sequence: Synthetic oligonucleotide
  Sense strand starting at position 3309 of SEQ ID NO: 916483
gccuuagauuuccugugua

SEQ ID NO: 1160267 - RNA, 19 nt, Artificial Sequence
  Description of Artificial Sequence: Synthetic oligonucleotide
  Antisense strand to SEQ ID NO: 1160266
uacacaggaaaucuaaggc

SEQ ID NO: 1160268 - RNA, 19 nt, Artificial Sequence
  Description of Artificial Sequence: Synthetic oligonucleotide
  Sense strand starting at position 3332 of SEQ ID NO: 916483
cugauauaauguguuuaug

SEQ ID NO: 1160269 - RNA, 19 nt, Artificial Sequence
  Description of Artificial Sequence: Synthetic oligonucleotide
  Antisense strand to SEQ ID NO: 1160268
cauaaacacauuauaucag

SEQ ID NO: 1160270 - RNA, 19 nt, Artificial Sequence
  Description of Artificial Sequence: Synthetic oligonucleotide
  Sense strand starting at position 3386 of SEQ ID NO: 916483
uaauuaguugcugauguaa

SEQ ID NO: 1160271 - RNA, 19 nt, Artificial Sequence
  Description of Artificial Sequence: Synthetic oligonucleotide
  Antisense strand to SEQ ID NO: 1160270
uuacaucagcaacuaauua

SEQ ID NO: 1160272 - RNA, 19 nt, Artificial Sequence
  Description of Artificial Sequence: Synthetic oligonucleotide
  Sense strand starting at position 3559 of SEQ ID NO: 916483
ccagucacugcccaagaaa

SEQ ID NO: 1160273 - RNA, 19 nt, Artificial Sequence
  Description of Artificial Sequence: Synthetic oligonucleotide
  Antisense strand to SEQ ID NO: 1160272
uuucuugggcagugacugg

SEQ ID NO: 1160274 - RNA, 19 nt, Artificial Sequence
  Description of Artificial Sequence: Synthetic oligonucleotide
  Sense strand starting at position 3614 of SEQ ID NO: 916483
gaggguugguuccuggaaa

SEQ ID NO: 1160275 - RNA, 19 nt, Artificial Sequence
  Description of Artificial Sequence: Synthetic oligonucleotide
  Antisense strand to SEQ ID NO: 1160274
uuuccaggaaccaacccuc

SEQ ID NO: 1160276 - RNA, 19 nt, Artificial Sequence
  Description of Artificial Sequence: Synthetic oligonucleotide
  Sense strand starting at position 3637 of SEQ ID NO: 916483
cuugguagucaucacugaa

SEQ ID NO: 1160277 - RNA, 19 nt, Artificial Sequence
  Description of Artificial Sequence: Synthetic oligonucleotide
  Antisense strand to SEQ ID NO: 1160276
uucagugaugacuaccaag

SEQ ID NO: 1160278 - RNA, 19 nt, Artificial Sequence
  Description of Artificial Sequence: Synthetic oligonucleotide
  Sense strand starting at position 3640 of SEQ ID NO: 916483
gguagucaucacugaagau

SEQ ID NO: 1160279 - RNA, 19 nt, Artificial Sequence
  Description of Artificial Sequence: Synthetic oligonucleotide
  Antisense strand to SEQ ID NO: 1160278
aucuucagugaugacuacc

SEQ ID NO: 1160280 - RNA, 19 nt, Artificial Sequence
  Description of Artificial Sequence: Synthetic oligonucleotide
  Sense strand starting at position 3725 of SEQ ID NO: 916483
uuuccugucccauaaugga

SEQ ID NO: 1160281 - RNA, 19 nt, Artificial Sequence
  Description of Artificial Sequence: Synthetic oligonucleotide
  Antisense strand to SEQ ID NO: 1160280
uccauuaugggacaggaaa

SEQ ID NO: 1160282 - RNA, 19 nt, Artificial Sequence
  Description of Artificial Sequence: Synthetic oligonucleotide
  Sense strand starting at position 943 of SEQ ID NO: 916484
gaaggacaauuguacuaca

SEQ ID NO: 1160283 - RNA, 19 nt, Artificial Sequence
  Description of Artificial Sequence: Synthetic oligonucleotide
  Antisense strand to SEQ ID NO: 1160282
uguaguacaauuguccuuc

SEQ ID NO: 1160284 - RNA, 19 nt, Artificial Sequence
  Description of Artificial Sequence: Synthetic oligonucleotide
  Sense strand starting at position 1006 of SEQ ID NO: 916484
acuauauuguguuucucca

SEQ ID NO: 1160285 - RNA, 19 nt, Artificial Sequence
  Description of Artificial Sequence: Synthetic oligonucleotide
  Antisense strand to SEQ ID NO: 1160284
uggagaaacacaauauagu

SEQ ID NO: 1160286 - RNA, 19 nt, Artificial Sequence
  Description of Artificial Sequence: Synthetic oligonucleotide
  Sense strand starting at position 1099 of SEQ ID NO: 916484
acacauuuauguggagaca

SEQ ID NO: 1160287 - RNA, 19 nt, Artificial Sequence
  Description of Artificial Sequence: Synthetic oligonucleotide
  Antisense strand to SEQ ID NO: 1160286
ugucuccacauaaaugugu

SEQ ID NO: 1160288 - RNA, 19 nt, Artificial Sequence
  Description of Artificial Sequence: Synthetic oligonucleotide
  Sense strand starting at position 1151 of SEQ ID NO: 916484
aauggaagugcugggugau

SEQ ID NO: 1160289 - RNA, 19 nt, Artificial Sequence
  Description of Artificial Sequence: Synthetic oligonucleotide
  Antisense strand to SEQ ID NO: 1160288
aucacccagcacuuccauu

SEQ ID NO: 1160290 - RNA, 19 nt, Artificial Sequence
  Description of Artificial Sequence: Synthetic oligonucleotide
  Sense strand starting at position 1152 of SEQ ID NO: 916484
auggaagugcugggugaua

SEQ ID NO: 1160291 - RNA, 19 nt, Artificial Sequence
  Description of Artificial Sequence: Synthetic oligonucleotide
  Antisense strand to SEQ ID NO: 1160290
uaucacccagcacuuccau

SEQ ID NO: 1160292 - RNA, 19 nt, Artificial Sequence
  Description of Artificial Sequence: Synthetic oligonucleotide
  Sense strand starting at position 1154 of SEQ ID NO: 916484
ggaagugcugggugauaua

SEQ ID NO: 1160293 - RNA, 19 nt, Artificial Sequence
  Description of Artificial Sequence: Synthetic oligonucleotide
  Antisense strand to SEQ ID NO: 1160292
uauaucacccagcacuucc

SEQ ID NO: 1160294 - RNA, 19 nt, Artificial Sequence
  Description of Artificial Sequence: Synthetic oligonucleotide
  Sense strand starting at position 1165 of SEQ ID NO: 916484
gugauauaguaacucuaug

SEQ ID NO: 1160295 - RNA, 19 nt, Artificial Sequence
  Description of Artificial Sequence: Synthetic oligonucleotide
  Antisense strand to SEQ ID NO: 1160294
cauagaguuacuauaucac

SEQ ID NO: 1160296 - RNA, 19 nt, Artificial Sequence
  Description of Artificial Sequence: Synthetic oligonucleotide
  Sense strand starting at position 1246 of SEQ ID NO: 916484
ccagcaauuuaugaagguu

SEQ ID NO: 1160297 - RNA, 19 nt, Artificial Sequence
  Description of Artificial Sequence: Synthetic oligonucleotide
  Antisense strand to SEQ ID NO: 1160296
aaccuucauaaauugcugg

SEQ ID NO: 1160298 - RNA, 19 nt, Artificial Sequence
  Description of Artificial Sequence: Synthetic oligonucleotide
  Sense strand starting at position 1720 of SEQ ID NO: 916484
ucauaaauagcuggcagua

SEQ ID NO: 1160299 - RNA, 19 nt, Artificial Sequence
  Description of Artificial Sequence: Synthetic oligonucleotide
  Antisense strand to SEQ ID NO: 1160298
uacugccagcuauuuauga

SEQ ID NO: 1160300 - RNA, 19 nt, Artificial Sequence
  Description of Artificial Sequence: Synthetic oligonucleotide
  Sense strand starting at position 1732 of SEQ ID NO: 916484
ggcaguagaguugggauga

SEQ ID NO: 1160301 - RNA, 19 nt, Artificial Sequence
  Description of Artificial Sequence: Synthetic oligonucleotide
  Antisense strand to SEQ ID NO: 1160300
ucaucccaacucuacugcc

SEQ ID NO: 1160302 - RNA, 19 nt, Artificial Sequence
  Description of Artificial Sequence: Synthetic oligonucleotide
  Sense strand starting at position 1766 of SEQ ID NO: 916484
guuccagagcugcacuuaa

SEQ ID NO: 1160303 - RNA, 19 nt, Artificial Sequence
  Description of Artificial Sequence: Synthetic oligonucleotide
  Antisense strand to SEQ ID NO: 1160302
uuaagugcagcucuggaac

SEQ ID NO: 1160304 - RNA, 19 nt, Artificial Sequence
  Description of Artificial Sequence: Synthetic oligonucleotide
  Sense strand starting at position 1790 of SEQ ID NO: 916484
ggacguagacucgguaaug

SEQ ID NO: 1160305 - RNA, 19 nt, Artificial Sequence
  Description of Artificial Sequence: Synthetic oligonucleotide
  Antisense strand to SEQ ID NO: 1160304
cauuaccgagucuacgucc

SEQ ID NO: 1160306 - RNA, 19 nt, Artificial Sequence
  Description of Artificial Sequence: Synthetic oligonucleotide
  Sense strand starting at position 1791 of SEQ ID NO: 916484
gacguagacucgguaauga

SEQ ID NO: 1160307 - RNA, 19 nt, Artificial Sequence
  Description of Artificial Sequence: Synthetic oligonucleotide
  Antisense strand to SEQ ID NO: 1160306
ucauuaccgagucuacguc

SEQ ID NO: 1160308 - RNA, 19 nt, Artificial Sequence
  Description of Artificial Sequence: Synthetic oligonucleotide
  Sense strand starting at position 1987 of SEQ ID NO: 916484
ggauuccauuaagaauauu

SEQ ID NO: 1160309 - RNA, 19 nt, Artificial Sequence
  Description of Artificial Sequence: Synthetic oligonucleotide
  Antisense strand to SEQ ID NO: 1160308
aauauucuuaauggaaucc

SEQ ID NO: 1160310 - RNA, 19 nt, Artificial Sequence
  Description of Artificial Sequence: Synthetic oligonucleotide
  Sense strand starting at position 2000 of SEQ ID NO: 916484
aauauuaauugggagucau

SEQ ID NO: 1160311 - RNA, 19 nt, Artificial Sequence
  Description of Artificial Sequence: Synthetic oligonucleotide
  Antisense strand to SEQ ID NO: 1160310
augacucccaauuaauauu

SEQ ID NO: 1160312 - RNA, 19 nt, Artificial Sequence
  Description of Artificial Sequence: Synthetic oligonucleotide
  Sense strand starting at position 2004 of SEQ ID NO: 916484
uuaauugggagucaugguu

SEQ ID NO: 1160313 - RNA, 19 nt, Artificial Sequence
  Description of Artificial Sequence: Synthetic oligonucleotide
  Antisense strand to SEQ ID NO: 1160312
aaccaugacucccaauuaa

SEQ ID NO: 1160314 - RNA, 19 nt, Artificial Sequence
  Description of Artificial Sequence: Synthetic oligonucleotide
  Sense strand starting at position 2028 of SEQ ID NO: 916484
guguguggucaagggaaca

SEQ ID NO: 1160315 - RNA, 19 nt, Artificial Sequence
  Description of Artificial Sequence: Synthetic oligonucleotide
  Antisense strand to SEQ ID NO: 1160314
uguucccuugaccacacac

SEQ ID NO: 1160316 - RNA, 19 nt, Artificial Sequence
  Description of Artificial Sequence: Synthetic oligonucleotide
  Sense strand starting at position 2068 of SEQ ID NO: 916484
aguggcugucgacauguua

SEQ ID NO: 1160317 - RNA, 19 nt, Artificial Sequence
  Description of Artificial Sequence: Synthetic oligonucleotide
  Antisense strand to SEQ ID NO: 1160316
uaacaugucgacagccacu

SEQ ID NO: 1160318 - RNA, 19 nt, Artificial Sequence
  Description of Artificial Sequence: Synthetic oligonucleotide
  Sense strand starting at position 2079 of SEQ ID NO: 916484
acauguuaauggccuuuga

SEQ ID NO: 1160319 - RNA, 19 nt, Artificial Sequence
  Description of Artificial Sequence: Synthetic oligonucleotide
  Antisense strand to SEQ ID NO: 1160318
ucaaaggccauuaacaugu

SEQ ID NO: 1160320 - RNA, 19 nt, Artificial Sequence
  Description of Artificial Sequence: Synthetic oligonucleotide
  Sense strand starting at position 2211 of SEQ ID NO: 916484
ccuguaaucucagcacaag

SEQ ID NO: 1160321 - RNA, 19 nt, Artificial Sequence
  Description of Artificial Sequence: Synthetic oligonucleotide
  Antisense strand to SEQ ID NO: 1160320
cuugugcugagauuacagg

SEQ ID NO: 1160322 - RNA, 19 nt, Artificial Sequence
  Description of Artificial Sequence: Synthetic oligonucleotide
  Sense strand starting at position 2212 of SEQ ID NO: 916484
cuguaaucucagcacaaga

SEQ ID NO: 1160323 - RNA, 19 nt, Artificial Sequence
  Description of Artificial Sequence: Synthetic oligonucleotide
  Antisense strand to SEQ ID NO: 1160322
ucuugugcugagauuacag

SEQ ID NO: 1160324 - RNA, 19 nt, Artificial Sequence
  Description of Artificial Sequence: Synthetic oligonucleotide
  Sense strand starting at position 2214 of SEQ ID NO: 916484
guaaucucagcacaagauc

SEQ ID NO: 1160325 - RNA, 19 nt, Artificial Sequence
  Description of Artificial Sequence: Synthetic oligonucleotide
  Antisense strand to SEQ ID NO: 1160324
gaucuugugcugagauuac

SEQ ID NO: 1160326 - RNA, 19 nt, Artificial Sequence
  Description of Artificial Sequence: Synthetic oligonucleotide
  Sense strand starting at position 2222 of SEQ ID NO: 916484
agcacaagauccuuaggga

SEQ ID NO: 1160327 - RNA, 19 nt, Artificial Sequence
  Description of Artificial Sequence: Synthetic oligonucleotide
  Antisense strand to SEQ ID NO: 1160326
ucccuaaggaucuugugcu

SEQ ID NO: 1160328 - RNA, 19 nt, Artificial Sequence
  Description of Artificial Sequence: Synthetic oligonucleotide
  Sense strand starting at position 2296 of SEQ ID NO: 916484
uagcgaggcuuugugacaa

SEQ ID NO: 1160329 - RNA, 19 nt, Artificial Sequence
  Description of Artificial Sequence: Synthetic oligonucleotide
  Antisense strand to SEQ ID NO: 1160328
uugucacaaagccucgcua

SEQ ID NO: 1160330 - RNA, 19 nt, Artificial Sequence
  Description of Artificial Sequence: Synthetic oligonucleotide
  Sense strand starting at position 2371 of SEQ ID NO: 916484
guaagaacuagcugagcau

SEQ ID NO: 1160331 - RNA, 19 nt, Artificial Sequence
  Description of Artificial Sequence: Synthetic oligonucleotide
  Antisense strand to SEQ ID NO: 1160330
augcucagcuaguucuuac

SEQ ID NO: 1160332 - RNA, 19 nt, Artificial Sequence
  Description of Artificial Sequence: Synthetic oligonucleotide
  Sense strand starting at position 2488 of SEQ ID NO: 916484
ugcacuuuagcuugaagga

SEQ ID NO: 1160333 - RNA, 19 nt, Artificial Sequence
  Description of Artificial Sequence: Synthetic oligonucleotide
  Antisense strand to SEQ ID NO: 1160332
uccuucaagcuaaagugca

SEQ ID NO: 1160334 - RNA, 19 nt, Artificial Sequence
  Description of Artificial Sequence: Synthetic oligonucleotide
  Sense strand starting at position 2514 of SEQ ID NO: 916484
agaugcugucucuaagaaa

SEQ ID NO: 1160335 - RNA, 19 nt, Artificial Sequence
  Description of Artificial Sequence: Synthetic oligonucleotide
  Antisense strand to SEQ ID NO: 1160334
uuucuuagagacagcaucu

SEQ ID NO: 1160336 - RNA, 19 nt, Artificial Sequence
  Description of Artificial Sequence: Synthetic oligonucleotide
  Sense strand starting at position 2878 of SEQ ID NO: 916484
guaaguuauccuuaccaaa

SEQ ID NO: 1160337 - RNA, 19 nt, Artificial Sequence
  Description of Artificial Sequence: Synthetic oligonucleotide
  Antisense strand to SEQ ID NO: 1160336
uuugguaaggauaacuuac

SEQ ID NO: 1160338 - RNA, 19 nt, Artificial Sequence
  Description of Artificial Sequence: Synthetic oligonucleotide
  Sense strand starting at position 2943 of SEQ ID NO: 916484
agccauugucaaugguaau

SEQ ID NO: 1160339 - RNA, 19 nt, Artificial Sequence
  Description of Artificial Sequence: Synthetic oligonucleotide
  Antisense strand to SEQ ID NO: 1160338
auuaccauugacaauggcu

SEQ ID NO: 1160340 - RNA, 19 nt, Artificial Sequence
  Description of Artificial Sequence: Synthetic oligonucleotide
  Sense strand starting at position 2944 of SEQ ID NO: 916484
gccauugucaaugguaaug

SEQ ID NO: 1160341 - RNA, 19 nt, Artificial Sequence
  Description of Artificial Sequence: Synthetic oligonucleotide
  Antisense strand to SEQ ID NO: 1160340
cauuaccauugacaauggc

SEQ ID NO: 1160342 - RNA, 19 nt, Artificial Sequence
  Description of Artificial Sequence: Synthetic oligonucleotide
  Sense strand starting at position 2990 of SEQ ID NO: 916484
gugcaaugugcuguguaca

SEQ ID NO: 1160343 - RNA, 19 nt, Artificial Sequence
  Description of Artificial Sequence: Synthetic oligonucleotide
  Antisense strand to SEQ ID NO: 1160342
uguacacagcacauugcac

SEQ ID NO: 1160344 - RNA, 19 nt, Artificial Sequence
  Description of Artificial Sequence: Synthetic oligonucleotide
  Sense strand starting at position 3165 of SEQ ID NO: 916484
ucugaaggccucuaggauu

SEQ ID NO: 1160345 - RNA, 19 nt, Artificial Sequence
  Description of Artificial Sequence: Synthetic oligonucleotide
  Antisense strand to SEQ ID NO: 1160344
aauccuagaggccuucaga

SEQ ID NO: 1160346 - RNA, 19 nt, Artificial Sequence
  Description of Artificial Sequence: Synthetic oligonucleotide
  Sense strand starting at position 3324 of SEQ ID NO: 916484
cugagugcugcuuagaguu

SEQ ID NO: 1160347 - RNA, 19 nt, Artificial Sequence
  Description of Artificial Sequence: Synthetic oligonucleotide
  Antisense strand to SEQ ID NO: 1160346
aacucuaagcagcacucag

SEQ ID NO: 1160348 - RNA, 19 nt, Artificial Sequence
  Description of Artificial Sequence: Synthetic oligonucleotide
  Sense strand starting at position 3384 of SEQ ID NO: 916484
gaaagauuaguuugucuuc

SEQ ID NO: 1160349 - RNA, 19 nt, Artificial Sequence
  Description of Artificial Sequence: Synthetic oligonucleotide
  Antisense strand to SEQ ID NO: 1160348
gaagacaaacuaaucuuuc

SEQ ID NO: 1160350 - RNA, 19 nt, Artificial Sequence
  Description of Artificial Sequence: Synthetic oligonucleotide
  Sense strand starting at position 3487 of SEQ ID NO: 916484
aguguuuauugagugcaac

SEQ ID NO: 1160351 - RNA, 19 nt, Artificial Sequence
  Description of Artificial Sequence: Synthetic oligonucleotide
  Antisense strand to SEQ ID NO: 1160350
guugcacucaauaaacacu

SEQ ID NO: 1160352 - RNA, 19 nt, Artificial Sequence
  Description of Artificial Sequence: Synthetic oligonucleotide
  Sense strand starting at position 3609 of SEQ ID NO: 916484
ggccaaacagcuuaaguaa

SEQ ID NO: 1160353 - RNA, 19 nt, Artificial Sequence
  Description of Artificial Sequence: Synthetic oligonucleotide
  Antisense strand to SEQ ID NO: 1160352
uuacuuaagcuguuuggcc

SEQ ID NO: 1160354 - RNA, 19 nt, Artificial Sequence
  Description of Artificial Sequence: Synthetic oligonucleotide
  Sense strand starting at position 3618 of SEQ ID NO: 916484
gcuuaaguaacuggcugaa

SEQ ID NO: 1160355 - RNA, 19 nt, Artificial Sequence
  Description of Artificial Sequence: Synthetic oligonucleotide
  Antisense strand to SEQ ID NO: 1160354
uucagccaguuacuuaagc

SEQ ID NO: 1160356 - RNA, 19 nt, Artificial Sequence
  Description of Artificial Sequence: Synthetic oligonucleotide
  Sense strand starting at position 3739 of SEQ ID NO: 916484
agcagucucuaguuaccaa

SEQ ID NO: 1160357 - RNA, 19 nt, Artificial Sequence
  Description of Artificial Sequence: Synthetic oligonucleotide
  Antisense strand to SEQ ID NO: 1160356
uugguaacuagagacugcu

SEQ ID NO: 1160358 - RNA, 19 nt, Artificial Sequence
  Description of Artificial Sequence: Synthetic oligonucleotide
  Sense strand starting at position 3895 of SEQ ID NO: 916484
gggugacccuaucucuauu

SEQ ID NO: 1160359 - RNA, 19 nt, Artificial Sequence
  Description of Artificial Sequence: Synthetic oligonucleotide
  Antisense strand to SEQ ID NO: 1160358
aauagagauagggucaccc

SEQ ID NO: 1160360 - RNA, 19 nt, Artificial Sequence
  Description of Artificial Sequence: Synthetic oligonucleotide
  Sense strand starting at position 3981 of SEQ ID NO: 916484
gugaaagaaucaccugauu

SEQ ID NO: 1160361 - RNA, 19 nt, Artificial Sequence
  Description of Artificial Sequence: Synthetic oligonucleotide
  Antisense strand to SEQ ID NO: 1160360
aaucaggugauucuuucac

SEQ ID NO: 1160362 - RNA, 19 nt, Artificial Sequence
  Description of Artificial Sequence: Synthetic oligonucleotide
  Sense strand starting at position 33 of SEQ ID NO: 916485
guauauaaacuaggcauau

SEQ ID NO: 1160363 - RNA, 19 nt, Artificial Sequence
  Description of Artificial Sequence: Synthetic oligonucleotide
  Antisense strand to SEQ ID NO: 1160362
auaugccuaguuuauauac

SEQ ID NO: 1160364 - RNA, 19 nt, Artificial Sequence
  Description of Artificial Sequence: Synthetic oligonucleotide
  Sense strand starting at position 54 of SEQ ID NO: 916485
ugugguauacuuuacuuua

SEQ ID NO: 1160365 - RNA, 19 nt, Artificial Sequence
  Description of Artificial Sequence: Synthetic oligonucleotide
  Antisense strand to SEQ ID NO: 1160364
uaaaguaaaguauaccaca

SEQ ID NO: 1160366 - RNA, 19 nt, Artificial Sequence
  Description of Artificial Sequence: Synthetic oligonucleotide
  Sense strand starting at position 107 of SEQ ID NO: 916485
acguaaaugcuauauaagu

SEQ ID NO: 1160367 - RNA, 19 nt, Artificial Sequence
  Description of Artificial Sequence: Synthetic oligonucleotide
  Antisense strand to SEQ ID NO: 1160366
acuuauauagcauuuacgu

SEQ ID NO: 1160368 - RNA, 19 nt, Artificial Sequence
  Description of Artificial Sequence: Synthetic oligonucleotide
  Sense strand starting at position 193 of SEQ ID NO: 916485
ggccaacuguaccuuuaaa

SEQ ID NO: 1160369 - RNA, 19 nt, Artificial Sequence
  Description of Artificial Sequence: Synthetic oligonucleotide
  Antisense strand to SEQ ID NO: 1160368
uuuaaagguacaguuggcc

SEQ ID NO: 1160370 - RNA, 19 nt, Artificial Sequence
  Description of Artificial Sequence: Synthetic oligonucleotide
  Sense strand starting at position 291 of SEQ ID NO: 916485
uuauauucuagugguggga

SEQ ID NO: 1160371 - RNA, 19 nt, Artificial Sequence
  Description of Artificial Sequence: Synthetic oligonucleotide
  Antisense strand to SEQ ID NO: 1160370
ucccaccacuagaauauaa

SEQ ID NO: 1160372 - RNA, 19 nt, Artificial Sequence
  Description of Artificial Sequence: Synthetic oligonucleotide
  Sense strand starting at position 294 of SEQ ID NO: 916485
uauucuaguggugggauaa

SEQ ID NO: 1160373 - RNA, 19 nt, Artificial Sequence
  Description of Artificial Sequence: Synthetic oligonucleotide
  Antisense strand to SEQ ID NO: 1160372
uuaucccaccacuagaaua

SEQ ID NO: 1160374 - RNA, 19 nt, Artificial Sequence
  Description of Artificial Sequence: Synthetic oligonucleotide
  Sense strand starting at position 295 of SEQ ID NO: 916485
auucuaguggugggauaaa

SEQ ID NO: 1160375 - RNA, 19 nt, Artificial Sequence
  Description of Artificial Sequence: Synthetic oligonucleotide
  Antisense strand to SEQ ID NO: 1160374
uuuaucccaccacuagaau

SEQ ID NO: 1160376 - RNA, 19 nt, Artificial Sequence
  Description of Artificial Sequence: Synthetic oligonucleotide
  Sense strand starting at position 343 of SEQ ID NO: 916485
cuuuaugaagucuagccaa

SEQ ID NO: 1160377 - RNA, 19 nt, Artificial Sequence
  Description of Artificial Sequence: Synthetic oligonucleotide
  Antisense strand to SEQ ID NO: 1160376
uuggcuagacuucauaaag

SEQ ID NO: 1160378 - RNA, 19 nt, Artificial Sequence
  Description of Artificial Sequence: Synthetic oligonucleotide
  Sense strand starting at position 387 of SEQ ID NO: 916485
aauugucugugggcagaga

SEQ ID NO: 1160379 - RNA, 19 nt, Artificial Sequence
  Description of Artificial Sequence: Synthetic oligonucleotide
  Antisense strand to SEQ ID NO: 1160378
ucucugcccacagacaauu

SEQ ID NO: 1160380 - RNA, 19 nt, Artificial Sequence
  Description of Artificial Sequence: Synthetic oligonucleotide
  Sense strand starting at position 388 of SEQ ID NO: 916485
auugucugugggcagagau

SEQ ID NO: 1160381 - RNA, 19 nt, Artificial Sequence
  Description of Artificial Sequence: Synthetic oligonucleotide
  Antisense strand to SEQ ID NO: 1160380
aucucugcccacagacaau

SEQ ID NO: 1160382 - RNA, 19 nt, Artificial Sequence
  Description of Artificial Sequence: Synthetic oligonucleotide
  Sense strand starting at position 557 of SEQ ID NO: 916485
aaaguaucugaugguucga

SEQ ID NO: 1160383 - RNA, 19 nt, Artificial Sequence
  Description of Artificial Sequence: Synthetic oligonucleotide
  Antisense strand to SEQ ID NO: 1160382
ucgaaccaucagauacuuu

SEQ ID NO: 1160384 - RNA, 19 nt, Artificial Sequence
  Description of Artificial Sequence: Synthetic oligonucleotide
  Sense strand starting at position 623 of SEQ ID NO: 916485
ugugcaauugaucacuaag

SEQ ID NO: 1160385 - RNA, 19 nt, Artificial Sequence
  Description of Artificial Sequence: Synthetic oligonucleotide
  Antisense strand to SEQ ID NO: 1160384
cuuagugaucaauugcaca

SEQ ID NO: 1160386 - RNA, 19 nt, Artificial Sequence
  Description of Artificial Sequence: Synthetic oligonucleotide
  Sense strand starting at position 625 of SEQ ID NO: 916485
ugcaauugaucacuaagau

SEQ ID NO: 1160387 - RNA, 19 nt, Artificial Sequence
  Description of Artificial Sequence: Synthetic oligonucleotide
  Antisense strand to SEQ ID NO: 1160386
aucuuagugaucaauugca

SEQ ID NO: 1160388 - RNA, 19 nt, Artificial Sequence
  Description of Artificial Sequence: Synthetic oligonucleotide
  Sense strand starting at position 629 of SEQ ID NO: 916485
auugaucacuaagauuugu

SEQ ID NO: 1160389 - RNA, 19 nt, Artificial Sequence
  Description of Artificial Sequence: Synthetic oligonucleotide
  Antisense strand to SEQ ID NO: 1160388
acaaaucuuagugaucaau

SEQ ID NO: 1160390 - RNA, 19 nt, Artificial Sequence
  Description of Artificial Sequence: Synthetic oligonucleotide
  Sense strand starting at position 746 of SEQ ID NO: 916485
ggaucucuucugcauaaau

SEQ ID NO: 1160391 - RNA, 19 nt, Artificial Sequence
  Description of Artificial Sequence: Synthetic oligonucleotide
  Antisense strand to SEQ ID NO: 1160390
auuuaugcagaagagaucc

SEQ ID NO: 1160392 - RNA, 19 nt, Artificial Sequence
  Description of Artificial Sequence: Synthetic oligonucleotide
  Sense strand starting at position 835 of SEQ ID NO: 916485
aucauaaaugagugaugca

SEQ ID NO: 1160393 - RNA, 19 nt, Artificial Sequence
  Description of Artificial Sequence: Synthetic oligonucleotide
  Antisense strand to SEQ ID NO: 1160392
ugcaucacucauuuaugau

SEQ ID NO: 1160394 - RNA, 19 nt, Artificial Sequence
  Description of Artificial Sequence: Synthetic oligonucleotide
  Sense strand starting at position 1319 of SEQ ID NO: 916485
gccagcuucggcuuguaaa

SEQ ID NO: 1160395 - RNA, 19 nt, Artificial Sequence
  Description of Artificial Sequence: Synthetic oligonucleotide
  Antisense strand to SEQ ID NO: 1160394
uuuacaagccgaagcuggc

SEQ ID NO: 1160396 - RNA, 19 nt, Artificial Sequence
  Description of Artificial Sequence: Synthetic oligonucleotide
  Sense strand starting at position 1395 of SEQ ID NO: 916485
auacauagccugugaacuc

SEQ ID NO: 1160397 - RNA, 19 nt, Artificial Sequence
  Description of Artificial Sequence: Synthetic oligonucleotide
  Antisense strand to SEQ ID NO: 1160396
gaguucacaggcuauguau

SEQ ID NO: 1160398 - RNA, 19 nt, Artificial Sequence
  Description of Artificial Sequence: Synthetic oligonucleotide
  Sense strand starting at position 1638 of SEQ ID NO: 916485
accgaugaggcauggguua

SEQ ID NO: 1160399 - RNA, 19 nt, Artificial Sequence
  Description of Artificial Sequence: Synthetic oligonucleotide
  Antisense strand to SEQ ID NO: 1160398
uaacccaugccucaucggu

SEQ ID NO: 1160400 - RNA, 19 nt, Artificial Sequence
  Description of Artificial Sequence: Synthetic oligonucleotide
  Sense strand starting at position 1640 of SEQ ID NO: 916485
cgaugaggcauggguuaug

SEQ ID NO: 1160401 - RNA, 19 nt, Artificial Sequence
  Description of Artificial Sequence: Synthetic oligonucleotide
  Antisense strand to SEQ ID NO: 1160400
cauaacccaugccucaucg

SEQ ID NO: 1160402 - RNA, 19 nt, Artificial Sequence
  Description of Artificial Sequence: Synthetic oligonucleotide
  Sense strand starting at position 1650 of SEQ ID NO: 916485
uggguuaugaaguauguga

SEQ ID NO: 1160403 - RNA, 19 nt, Artificial Sequence
  Description of Artificial Sequence: Synthetic oligonucleotide
  Antisense strand to SEQ ID NO: 1160402
ucacauacuucauaaccca

SEQ ID NO: 1160404 - RNA, 19 nt, Artificial Sequence
  Description of Artificial Sequence: Synthetic oligonucleotide
  Sense strand starting at position 1652 of SEQ ID NO: 916485
gguuaugaaguaugugacu

SEQ ID NO: 1160405 - RNA, 19 nt, Artificial Sequence
  Description of Artificial Sequence: Synthetic oligonucleotide
  Antisense strand to SEQ ID NO: 1160404
agucacauacuucauaacc

SEQ ID NO: 1160406 - RNA, 19 nt, Artificial Sequence
  Description of Artificial Sequence: Synthetic oligonucleotide
  Sense strand starting at position 2354 of SEQ ID NO: 916485
gcaauuuauuugcagccua

SEQ ID NO: 1160407 - RNA, 19 nt, Artificial Sequence
  Description of Artificial Sequence: Synthetic oligonucleotide
  Antisense strand to SEQ ID NO: 1160406
uaggcugcaaauaaauugc

SEQ ID NO: 1160408 - RNA, 19 nt, Artificial Sequence
  Description of Artificial Sequence: Synthetic oligonucleotide
  Sense strand starting at position 2380 of SEQ ID NO: 916485
cgagucuggaucuacauau

SEQ ID NO: 1160409 - RNA, 19 nt, Artificial Sequence
  Description of Artificial Sequence: Synthetic oligonucleotide
  Antisense strand to SEQ ID NO: 1160408
auauguagauccagacucg

SEQ ID NO: 1160410 - RNA, 19 nt, Artificial Sequence
  Description of Artificial Sequence: Synthetic oligonucleotide
  Sense strand starting at position 2558 of SEQ ID NO: 916485
uaguuugcaguuugagaaa

SEQ ID NO: 1160411 - RNA, 19 nt, Artificial Sequence
  Description of Artificial Sequence: Synthetic oligonucleotide
  Antisense strand to SEQ ID NO: 1160410
uuucucaaacugcaaacua

SEQ ID NO: 1160412 - RNA, 19 nt, Artificial Sequence
  Description of Artificial Sequence: Synthetic oligonucleotide
  Sense strand starting at position 2603 of SEQ ID NO: 916485
uagaauuugucgcuugggu

SEQ ID NO: 1160413 - RNA, 19 nt, Artificial Sequence
  Description of Artificial Sequence: Synthetic oligonucleotide
  Antisense strand to SEQ ID NO: 1160412
acccaagcgacaaauucua

SEQ ID NO: 1160414 - RNA, 19 nt, Artificial Sequence
  Description of Artificial Sequence: Synthetic oligonucleotide
  Sense strand starting at position 2605 of SEQ ID NO: 916485
gaauuugucgcuuggguuc

SEQ ID NO: 1160415 - RNA, 19 nt, Artificial Sequence
  Description of Artificial Sequence: Synthetic oligonucleotide
  Antisense strand to SEQ ID NO: 1160414
gaacccaagcgacaaauuc

SEQ ID NO: 1160416 - RNA, 19 nt, Artificial Sequence
  Description of Artificial Sequence: Synthetic oligonucleotide
  Sense strand starting at position 2746 of SEQ ID NO: 916485
uuucuuucuuaguugaaug

SEQ ID NO: 1160417 - RNA, 19 nt, Artificial Sequence
  Description of Artificial Sequence: Synthetic oligonucleotide
  Antisense strand to SEQ ID NO: 1160416
cauucaacuaagaaagaaa

SEQ ID NO: 1160418 - RNA, 19 nt, Artificial Sequence
  Description of Artificial Sequence: Synthetic oligonucleotide
  Sense strand starting at position 2761 of SEQ ID NO: 916485
aaugguguauuugcuacau

SEQ ID NO: 1160419 - RNA, 19 nt, Artificial Sequence
  Description of Artificial Sequence: Synthetic oligonucleotide
  Antisense strand to SEQ ID NO: 1160418
auguagcaaauacaccauu

SEQ ID NO: 1160420 - RNA, 19 nt, Artificial Sequence
  Description of Artificial Sequence: Synthetic oligonucleotide
  Sense strand starting at position 2765 of SEQ ID NO: 916485
guguauuugcuacauucuu

SEQ ID NO: 1160421 - RNA, 19 nt, Artificial Sequence
  Description of Artificial Sequence: Synthetic oligonucleotide
  Antisense strand to SEQ ID NO: 1160420
aagaauguagcaaauacac

SEQ ID NO: 1160422 - RNA, 19 nt, Artificial Sequence
  Description of Artificial Sequence: Synthetic oligonucleotide
  Sense strand starting at position 2784 of SEQ ID NO: 916485
guugauaagcuauacaccu

SEQ ID NO: 1160423 - RNA, 19 nt, Artificial Sequence
  Description of Artificial Sequence: Synthetic oligonucleotide
  Antisense strand to SEQ ID NO: 1160422
agguguauagcuuaucaac

SEQ ID NO: 1160424 - RNA, 19 nt, Artificial Sequence
  Description of Artificial Sequence: Synthetic oligonucleotide
  Sense strand starting at position 2821 of SEQ ID NO: 916485
gccuuagauuuccugugua

SEQ ID NO: 1160425 - RNA, 19 nt, Artificial Sequence
  Description of Artificial Sequence: Synthetic oligonucleotide
  Antisense strand to SEQ ID NO: 1160424
uacacaggaaaucuaaggc

SEQ ID NO: 1160426 - RNA, 19 nt, Artificial Sequence
  Description of Artificial Sequence: Synthetic oligonucleotide
  Sense strand starting at position 2844 of SEQ ID NO: 916485
cugauauaauguguuuaug

SEQ ID NO: 1160427 - RNA, 19 nt, Artificial Sequence
  Description of Artificial Sequence: Synthetic oligonucleotide
  Antisense strand to SEQ ID NO: 1160426
cauaaacacauuauaucag

SEQ ID NO: 1160428 - RNA, 19 nt, Artificial Sequence
  Description of Artificial Sequence: Synthetic oligonucleotide
  Sense strand starting at position 2898 of SEQ ID NO: 916485
uaauuaguugcugauguaa

SEQ ID NO: 1160429 - RNA, 19 nt, Artificial Sequence
  Description of Artificial Sequence: Synthetic oligonucleotide
  Antisense strand to SEQ ID NO: 1160428
uuacaucagcaacuaauua

SEQ ID NO: 1160430 - RNA, 19 nt, Artificial Sequence
  Description of Artificial Sequence: Synthetic oligonucleotide
  Sense strand starting at position 3071 of SEQ ID NO: 916485
ccagucacugcccaagaaa

SEQ ID NO: 1160431 - RNA, 19 nt, Artificial Sequence
  Description of Artificial Sequence: Synthetic oligonucleotide
  Antisense strand to SEQ ID NO: 1160430
uuucuugggcagugacugg

SEQ ID NO: 1160432 - RNA, 19 nt, Artificial Sequence
  Description of Artificial Sequence: Synthetic oligonucleotide
  Sense strand starting at position 3126 of SEQ ID NO: 916485
gaggguugguuccuggaaa

SEQ ID NO: 1160433 - RNA, 19 nt, Artificial Sequence
  Description of Artificial Sequence: Synthetic oligonucleotide
  Antisense strand to SEQ ID NO: 1160432
uuuccaggaaccaacccuc

SEQ ID NO: 1160434 - RNA, 19 nt, Artificial Sequence
  Description of Artificial Sequence: Synthetic oligonucleotide
  Sense strand starting at position 3149 of SEQ ID NO: 916485
cuugguagucaucacugaa

SEQ ID NO: 1160435 - RNA, 19 nt, Artificial Sequence
  Description of Artificial Sequence: Synthetic oligonucleotide
  Antisense strand to SEQ ID NO: 1160434
uucagugaugacuaccaag

SEQ ID NO: 1160436 - RNA, 19 nt, Artificial Sequence
  Description of Artificial Sequence: Synthetic oligonucleotide
  Sense strand starting at position 3152 of SEQ ID NO: 916485
gguagucaucacugaagau

SEQ ID NO: 1160437 - RNA, 19 nt, Artificial Sequence
  Description of Artificial Sequence: Synthetic oligonucleotide
  Antisense strand to SEQ ID NO: 1160436
aucuucagugaugacuacc

SEQ ID NO: 1160438 - RNA, 19 nt, Artificial Sequence
  Description of Artificial Sequence: Synthetic oligonucleotide
  Sense strand starting at position 3237 of SEQ ID NO: 916485
uuuccugucccauaaugga

SEQ ID NO: 1160439 - RNA, 19 nt, Artificial Sequence
  Description of Artificial Sequence: Synthetic oligonucleotide
  Antisense strand to SEQ ID NO: 1160438
uccauuaugggacaggaaa

SEQ ID NO: 1160440 - RNA, 19 nt, Artificial Sequence
  Description of Artificial Sequence: Synthetic oligonucleotide
  Sense strand starting at position 3673 of SEQ ID NO: 916485
ggccaagauuauucuuuau

SEQ ID NO: 1160441 - RNA, 19 nt, Artificial Sequence
  Description of Artificial Sequence: Synthetic oligonucleotide
  Antisense strand to SEQ ID NO: 1160440
auaaagaauaaucuuggcc

SEQ ID NO: 1160442 - RNA, 19 nt, Artificial Sequence
  Description of Artificial Sequence: Synthetic oligonucleotide
  Sense strand starting at position 22 of SEQ ID NO: 916486
gcaugauucuugguacaua

SEQ ID NO: 1160443 - RNA, 19 nt, Artificial Sequence
  Description of Artificial Sequence: Synthetic oligonucleotide
  Antisense strand to SEQ ID NO: 1160442
uauguaccaagaaucaugc

SEQ ID NO: 1160444 - RNA, 19 nt, Artificial Sequence
  Description of Artificial Sequence: Synthetic oligonucleotide
  Sense strand starting at position 398 of SEQ ID NO: 916486
cggcuaggcuucccuuaau

SEQ ID NO: 1160445 - RNA, 19 nt, Artificial Sequence
  Description of Artificial Sequence: Synthetic oligonucleotide
  Antisense strand to SEQ ID NO: 1160444
auuaagggaagccuagccg

SEQ ID NO: 1160446 - RNA, 19 nt, Artificial Sequence
  Description of Artificial Sequence: Synthetic oligonucleotide
  Sense strand starting at position 401 of SEQ ID NO: 916486
cuaggcuucccuuaauaug

SEQ ID NO: 1160447 - RNA, 19 nt, Artificial Sequence
  Description of Artificial Sequence: Synthetic oligonucleotide
  Antisense strand to SEQ ID NO: 1160446
cauauuaagggaagccuag

SEQ ID NO: 1160448 - RNA, 19 nt, Artificial Sequence
  Description of Artificial Sequence: Synthetic oligonucleotide
  Sense strand starting at position 418 of SEQ ID NO: 916486
ugaccuaguucugucccua

SEQ ID NO: 1160449 - RNA, 19 nt, Artificial Sequence
  Description of Artificial Sequence: Synthetic oligonucleotide
  Antisense strand to SEQ ID NO: 1160448
uagggacagaacuagguca

SEQ ID NO: 1160450 - RNA, 19 nt, Artificial Sequence
  Description of Artificial Sequence: Synthetic oligonucleotide
  Sense strand starting at position 422 of SEQ ID NO: 916486
cuaguucugucccuaugaa

SEQ ID NO: 1160451 - RNA, 19 nt, Artificial Sequence
  Description of Artificial Sequence: Synthetic oligonucleotide
  Antisense strand to SEQ ID NO: 1160450
uucauagggacagaacuag

SEQ ID NO: 1160452 - RNA, 19 nt, Artificial Sequence
  Description of Artificial Sequence: Synthetic oligonucleotide
  Sense strand starting at position 455 of SEQ ID NO: 916486
uuuacauuccuagggagau

SEQ ID NO: 1160453 - RNA, 19 nt, Artificial Sequence
  Description of Artificial Sequence: Synthetic oligonucleotide
  Antisense strand to SEQ ID NO: 1160452
aucucccuaggaauguaaa

SEQ ID NO: 1160454 - RNA, 19 nt, Artificial Sequence
  Description of Artificial Sequence: Synthetic oligonucleotide
  Sense strand starting at position 540 of SEQ ID NO: 916486
uugugaaacuguuuccucu

SEQ ID NO: 1160455 - RNA, 19 nt, Artificial Sequence
  Description of Artificial Sequence: Synthetic oligonucleotide
  Antisense strand to SEQ ID NO: 1160454
agaggaaacaguuucacaa

SEQ ID NO: 1160456 - RNA, 19 nt, Artificial Sequence
  Description of Artificial Sequence: Synthetic oligonucleotide
  Sense strand starting at position 543 of SEQ ID NO: 916486
ugaaacuguuuccucugua

SEQ ID NO: 1160457 - RNA, 19 nt, Artificial Sequence
  Description of Artificial Sequence: Synthetic oligonucleotide
  Antisense strand to SEQ ID NO: 1160456
uacagaggaaacaguuuca

SEQ ID NO: 1160458 - RNA, 19 nt, Artificial Sequence
  Description of Artificial Sequence: Synthetic oligonucleotide
  Sense strand starting at position 547 of SEQ ID NO: 916486
acuguuuccucuguaguuu

SEQ ID NO: 1160459 - RNA, 19 nt, Artificial Sequence
  Description of Artificial Sequence: Synthetic oligonucleotide
  Antisense strand to SEQ ID NO: 1160458
aaacuacagaggaaacagu

SEQ ID NO: 1160460 - RNA, 19 nt, Artificial Sequence
  Description of Artificial Sequence: Synthetic oligonucleotide
  Sense strand starting at position 614 of SEQ ID NO: 916486
ccaagucugcagugucuaa

SEQ ID NO: 1160461 - RNA, 19 nt, Artificial Sequence
  Description of Artificial Sequence: Synthetic oligonucleotide
  Antisense strand to SEQ ID NO: 1160460
uuagacacugcagacuugg

SEQ ID NO: 1160462 - RNA, 19 nt, Artificial Sequence
  Description of Artificial Sequence: Synthetic oligonucleotide
  Sense strand starting at position 742 of SEQ ID NO: 916486
uaaagcacucacgaaguuu

SEQ ID NO: 1160463 - RNA, 19 nt, Artificial Sequence
  Description of Artificial Sequence: Synthetic oligonucleotide
  Antisense strand to SEQ ID NO: 1160462
aaacuucgugagugcuuua

SEQ ID NO: 1160464 - RNA, 19 nt, Artificial Sequence
  Description of Artificial Sequence: Synthetic oligonucleotide
  Sense strand starting at position 754 of SEQ ID NO: 916486
gaaguuuaaugucugcaag

SEQ ID NO: 1160465 - RNA, 19 nt, Artificial Sequence
  Description of Artificial Sequence: Synthetic oligonucleotide
  Antisense strand to SEQ ID NO: 1160464
cuugcagacauuaaacuuc

SEQ ID NO: 1160466 - RNA, 19 nt, Artificial Sequence
  Description of Artificial Sequence: Synthetic oligonucleotide
  Sense strand starting at position 755 of SEQ ID NO: 916486
aaguuuaaugucugcaagu

SEQ ID NO: 1160467 - RNA, 19 nt, Artificial Sequence
  Description of Artificial Sequence: Synthetic oligonucleotide
  Antisense strand to SEQ ID NO: 1160466
acuugcagacauuaaacuu

SEQ ID NO: 1160468 - RNA, 19 nt, Artificial Sequence
  Description of Artificial Sequence: Synthetic oligonucleotide
  Sense strand starting at position 756 of SEQ ID NO: 916486
aguuuaaugucugcaaguc

SEQ ID NO: 1160469 - RNA, 19 nt, Artificial Sequence
  Description of Artificial Sequence: Synthetic oligonucleotide
  Antisense strand to SEQ ID NO: 1160468
gacuugcagacauuaaacu

SEQ ID NO: 1160470 - RNA, 19 nt, Artificial Sequence
  Description of Artificial Sequence: Synthetic oligonucleotide
  Sense strand starting at position 757 of SEQ ID NO: 916486
guuuaaugucugcaagucu

SEQ ID NO: 1160471 - RNA, 19 nt, Artificial Sequence
  Description of Artificial Sequence: Synthetic oligonucleotide
  Antisense strand to SEQ ID NO: 1160470
agacuugcagacauuaaac

SEQ ID NO: 1160472 - RNA, 19 nt, Artificial Sequence
  Description of Artificial Sequence: Synthetic oligonucleotide
  Sense strand starting at position 766 of SEQ ID NO: 916486
cugcaagucucccuacaga

SEQ ID NO: 1160473 - RNA, 19 nt, Artificial Sequence
  Description of Artificial Sequence: Synthetic oligonucleotide
  Antisense strand to SEQ ID NO: 1160472
ucuguagggagacuugcag

SEQ ID NO: 1160474 - RNA, 19 nt, Artificial Sequence
  Description of Artificial Sequence: Synthetic oligonucleotide
  Sense strand starting at position 842 of SEQ ID NO: 916486
gugacaguauucuccauaa

SEQ ID NO: 1160475 - RNA, 19 nt, Artificial Sequence
  Description of Artificial Sequence: Synthetic oligonucleotide
  Antisense strand to SEQ ID NO: 1160474
uuauggagaauacugucac

SEQ ID NO: 1160476 - RNA, 19 nt, Artificial Sequence
  Description of Artificial Sequence: Synthetic oligonucleotide
  Sense strand starting at position 976 of SEQ ID NO: 916486
ggugaaacgucuucuacua

SEQ ID NO: 1160477 - RNA, 19 nt, Artificial Sequence
  Description of Artificial Sequence: Synthetic oligonucleotide
  Antisense strand to SEQ ID NO: 1160476
uaguagaagacguuucacc

SEQ ID NO: 1160478 - RNA, 19 nt, Artificial Sequence
  Description of Artificial Sequence: Synthetic oligonucleotide
  Sense strand starting at position 1266 of SEQ ID NO: 916486
ggugcuuugacaggcaauu

SEQ ID NO: 1160479 - RNA, 19 nt, Artificial Sequence
  Description of Artificial Sequence: Synthetic oligonucleotide
  Antisense strand to SEQ ID NO: 1160478
aauugccugucaaagcacc

SEQ ID NO: 1160480 - RNA, 19 nt, Artificial Sequence
  Description of Artificial Sequence: Synthetic oligonucleotide
  Sense strand starting at position 1615 of SEQ ID NO: 916486
ucgugaggauggcuccaua

SEQ ID NO: 1160481 - RNA, 19 nt, Artificial Sequence
  Description of Artificial Sequence: Synthetic oligonucleotide
  Antisense strand to SEQ ID NO: 1160480
uauggagccauccucacga

SEQ ID NO: 1160482 - RNA, 19 nt, Artificial Sequence
  Description of Artificial Sequence: Synthetic oligonucleotide
  Sense strand starting at position 1622 of SEQ ID NO: 916486
gauggcuccauaugggaga

SEQ ID NO: 1160483 - RNA, 19 nt, Artificial Sequence
  Description of Artificial Sequence: Synthetic oligonucleotide
  Antisense strand to SEQ ID NO: 1160482
ucucccauauggagccauc

SEQ ID NO: 1160484 - RNA, 19 nt, Artificial Sequence
  Description of Artificial Sequence: Synthetic oligonucleotide
  Sense strand starting at position 2020 of SEQ ID NO: 916486
guucgauuuccuggaggug

SEQ ID NO: 1160485 - RNA, 19 nt, Artificial Sequence
  Description of Artificial Sequence: Synthetic oligonucleotide
  Antisense strand to SEQ ID NO: 1160484
caccuccaggaaaucgaac

SEQ ID NO: 1160486 - RNA, 19 nt, Artificial Sequence
  Description of Artificial Sequence: Synthetic oligonucleotide
  Sense strand starting at position 2022 of SEQ ID NO: 916486
ucgauuuccuggaggugga

SEQ ID NO: 1160487 - RNA, 19 nt, Artificial Sequence
  Description of Artificial Sequence: Synthetic oligonucleotide
  Antisense strand to SEQ ID NO: 1160486
uccaccuccaggaaaucga

SEQ ID NO: 1160488 - RNA, 19 nt, Artificial Sequence
  Description of Artificial Sequence: Synthetic oligonucleotide
  Sense strand starting at position 2160 of SEQ ID NO: 916486
gacugaugccacuguagaa

SEQ ID NO: 1160489 - RNA, 19 nt, Artificial Sequence
  Description of Artificial Sequence: Synthetic oligonucleotide
  Antisense strand to SEQ ID NO: 1160488
uucuacaguggcaucaguc

SEQ ID NO: 1160490 - RNA, 19 nt, Artificial Sequence
  Description of Artificial Sequence: Synthetic oligonucleotide
  Sense strand starting at position 2443 of SEQ ID NO: 916486
auggcugcgucauuaacuu

SEQ ID NO: 1160491 - RNA, 19 nt, Artificial Sequence
  Description of Artificial Sequence: Synthetic oligonucleotide
  Antisense strand to SEQ ID NO: 1160490
aaguuaaugacgcagccau

SEQ ID NO: 1160492 - RNA, 19 nt, Artificial Sequence
  Description of Artificial Sequence: Synthetic oligonucleotide
  Sense strand starting at position 2681 of SEQ ID NO: 916486
gagagcaguugugcugcaa

SEQ ID NO: 1160493 - RNA, 19 nt, Artificial Sequence
  Description of Artificial Sequence: Synthetic oligonucleotide
  Antisense strand to SEQ ID NO: 1160492
uugcagcacaacugcucuc

SEQ ID NO: 1160494 - RNA, 19 nt, Artificial Sequence
  Description of Artificial Sequence: Synthetic oligonucleotide
  Sense strand starting at position 2768 of SEQ ID NO: 916486
gggagauucgaccgagaga

SEQ ID NO: 1160495 - RNA, 19 nt, Artificial Sequence
  Description of Artificial Sequence: Synthetic oligonucleotide
  Antisense strand to SEQ ID NO: 1160494
ucucucggucgaaucuccc

SEQ ID NO: 1160496 - RNA, 19 nt, Artificial Sequence
  Description of Artificial Sequence: Synthetic oligonucleotide
  Sense strand starting at position 2864 of SEQ ID NO: 916486
aauuguuacugagacugaa

SEQ ID NO: 1160497 - RNA, 19 nt, Artificial Sequence
  Description of Artificial Sequence: Synthetic oligonucleotide
  Antisense strand to SEQ ID NO: 1160496
uucagucucaguaacaauu

SEQ ID NO: 1160498 - RNA, 19 nt, Artificial Sequence
  Description of Artificial Sequence: Synthetic oligonucleotide
  Sense strand starting at position 2891 of SEQ ID NO: 916486
ggcagaaugucguuuccau

SEQ ID NO: 1160499 - RNA, 19 nt, Artificial Sequence
  Description of Artificial Sequence: Synthetic oligonucleotide
  Antisense strand to SEQ ID NO: 1160498
auggaaacgacauucugcc

SEQ ID NO: 1160500 - RNA, 19 nt, Artificial Sequence
  Description of Artificial Sequence: Synthetic oligonucleotide
  Sense strand starting at position 3010 of SEQ ID NO: 916486
guaggaucccagugcauua

SEQ ID NO: 1160501 - RNA, 19 nt, Artificial Sequence
  Description of Artificial Sequence: Synthetic oligonucleotide
  Antisense strand to SEQ ID NO: 1160500
uaaugcacugggauccuac

SEQ ID NO: 1160502 - RNA, 19 nt, Artificial Sequence
  Description of Artificial Sequence: Synthetic oligonucleotide
  Sense strand starting at position 3128 of SEQ ID NO: 916486
guuuaugggccucaugaug

SEQ ID NO: 1160503 - RNA, 19 nt, Artificial Sequence
  Description of Artificial Sequence: Synthetic oligonucleotide
  Antisense strand to SEQ ID NO: 1160502
caucaugaggcccauaaac

SEQ ID NO: 1160504 - RNA, 19 nt, Artificial Sequence
  Description of Artificial Sequence: Synthetic oligonucleotide
  Sense strand starting at position 3167 of SEQ ID NO: 916486
aguuaagggugguuuccau

SEQ ID NO: 1160505 - RNA, 19 nt, Artificial Sequence
  Description of Artificial Sequence: Synthetic oligonucleotide
  Antisense strand to SEQ ID NO: 1160504
auggaaaccacccuuaacu

SEQ ID NO: 1160506 - RNA, 19 nt, Artificial Sequence
  Description of Artificial Sequence: Synthetic oligonucleotide
  Sense strand starting at position 3291 of SEQ ID NO: 916486
ucugcaauggugugaccaa

SEQ ID NO: 1160507 - RNA, 19 nt, Artificial Sequence
  Description of Artificial Sequence: Synthetic oligonucleotide
  Antisense strand to SEQ ID NO: 1160506
uuggucacaccauugcaga

SEQ ID NO: 1160508 - RNA, 19 nt, Artificial Sequence
  Description of Artificial Sequence: Synthetic oligonucleotide
  Sense strand starting at position 3335 of SEQ ID NO: 916486
uuccaauagcccugugaag

SEQ ID NO: 1160509 - RNA, 19 nt, Artificial Sequence
  Description of Artificial Sequence: Synthetic oligonucleotide
  Antisense strand to SEQ ID NO: 1160508
cuucacagggcuauuggaa

SEQ ID NO: 1160510 - RNA, 19 nt, Artificial Sequence
  Description of Artificial Sequence: Synthetic oligonucleotide
  Sense strand starting at position 3362 of SEQ ID NO: 916486
gauggacuggucugagcua

SEQ ID NO: 1160511 - RNA, 19 nt, Artificial Sequence
  Description of Artificial Sequence: Synthetic oligonucleotide
  Antisense strand to SEQ ID NO: 1160510
uagcucagaccaguccauc

SEQ ID NO: 1160512 - RNA, 19 nt, Artificial Sequence
  Description of Artificial Sequence: Synthetic oligonucleotide
  Sense strand starting at position 3666 of SEQ ID NO: 916486
gaccuuugcccuggagagu

SEQ ID NO: 1160513 - RNA, 19 nt, Artificial Sequence
  Description of Artificial Sequence: Synthetic oligonucleotide
  Antisense strand to SEQ ID NO: 1160512
acucuccagggcaaagguc

SEQ ID NO: 1160514 - RNA, 19 nt, Artificial Sequence
  Description of Artificial Sequence: Synthetic oligonucleotide
  Sense strand starting at position 3732 of SEQ ID NO: 916486
ggcgucaaucccuacauga

SEQ ID NO: 1160515 - RNA, 19 nt, Artificial Sequence
  Description of Artificial Sequence: Synthetic oligonucleotide
  Antisense strand to SEQ ID NO: 1160514
ucauguagggauugacgcc

SEQ ID NO: 1160516 - RNA, 19 nt, Artificial Sequence
  Description of Artificial Sequence: Synthetic oligonucleotide
  Sense strand starting at position 3810 of SEQ ID NO: 916486
gccguuguggccagugauc

SEQ ID NO: 1160517 - RNA, 19 nt, Artificial Sequence
  Description of Artificial Sequence: Synthetic oligonucleotide
  Antisense strand to SEQ ID NO: 1160516
gaucacuggccacaacggc

SEQ ID NO: 1160518 - RNA, 19 nt, Artificial Sequence
  Description of Artificial Sequence: Synthetic oligonucleotide
  Sense strand starting at position 3819 of SEQ ID NO: 916486
gccagugauccugaacugu

SEQ ID NO: 1160519 - RNA, 19 nt, Artificial Sequence
  Description of Artificial Sequence: Synthetic oligonucleotide
  Antisense strand to SEQ ID NO: 1160518
acaguucaggaucacuggc

SEQ ID NO: 1160520 - RNA, 19 nt, Artificial Sequence
  Description of Artificial Sequence: Synthetic oligonucleotide
  Sense strand starting at position 3929 of SEQ ID NO: 916486
ccucuuguauugucuguau

SEQ ID NO: 1160521 - RNA, 19 nt, Artificial Sequence
  Description of Artificial Sequence: Synthetic oligonucleotide
  Antisense strand to SEQ ID NO: 1160520
auacagacaauacaagagg

SEQ ID NO: 1160522 - RNA, 19 nt, Artificial Sequence
  Description of Artificial Sequence: Synthetic oligonucleotide
  Sense strand starting at position 52 of SEQ ID NO: 916487
ucagaugacccagguuuga

SEQ ID NO: 1160523 - RNA, 19 nt, Artificial Sequence
  Description of Artificial Sequence: Synthetic oligonucleotide
  Antisense strand to SEQ ID NO: 1160522
ucaaaccugggucaucuga

SEQ ID NO: 1160524 - RNA, 19 nt, Artificial Sequence
  Description of Artificial Sequence: Synthetic oligonucleotide
  Sense strand starting at position 56 of SEQ ID NO: 916487
augacccagguuugagaau

SEQ ID NO: 1160525 - RNA, 19 nt, Artificial Sequence
  Description of Artificial Sequence: Synthetic oligonucleotide
  Antisense strand to SEQ ID NO: 1160524
auucucaaaccugggucau

SEQ ID NO: 1160526 - RNA, 19 nt, Artificial Sequence
  Description of Artificial Sequence: Synthetic oligonucleotide
  Sense strand starting at position 65 of SEQ ID NO: 916487
guuugagaaucuuccauua

SEQ ID NO: 1160527 - RNA, 19 nt, Artificial Sequence
  Description of Artificial Sequence: Synthetic oligonucleotide
  Antisense strand to SEQ ID NO: 1160526
uaauggaagauucucaaac

SEQ ID NO: 1160528 - RNA, 19 nt, Artificial Sequence
  Description of Artificial Sequence: Synthetic oligonucleotide
  Sense strand starting at position 116 of SEQ ID NO: 916487
guuauaauuccacaaaucg

SEQ ID NO: 1160529 - RNA, 19 nt, Artificial Sequence
  Description of Artificial Sequence: Synthetic oligonucleotide
  Antisense strand to SEQ ID NO: 1160528
cgauuuguggaauuauaac

SEQ ID NO: 1160530 - RNA, 19 nt, Artificial Sequence
  Description of Artificial Sequence: Synthetic oligonucleotide
  Sense strand starting at position 430 of SEQ ID NO: 916487
uuaccaagugcugggaaua

SEQ ID NO: 1160531 - RNA, 19 nt, Artificial Sequence
  Description of Artificial Sequence: Synthetic oligonucleotide
  Antisense strand to SEQ ID NO: 1160530
uauucccagcacuugguaa

SEQ ID NO: 1160532 - RNA, 19 nt, Artificial Sequence
  Description of Artificial Sequence: Synthetic oligonucleotide
  Sense strand starting at position 543 of SEQ ID NO: 916487
ugaagaagugccuaacuuu

SEQ ID NO: 1160533 - RNA, 19 nt, Artificial Sequence
  Description of Artificial Sequence: Synthetic oligonucleotide
  Antisense strand to SEQ ID NO: 1160532
aaaguuaggcacuucuuca

SEQ ID NO: 1160534 - RNA, 19 nt, Artificial Sequence
  Description of Artificial Sequence: Synthetic oligonucleotide
  Sense strand starting at position 649 of SEQ ID NO: 916487
augcucaaugaauaaaguu

SEQ ID NO: 1160535 - RNA, 19 nt, Artificial Sequence
  Description of Artificial Sequence: Synthetic oligonucleotide
  Antisense strand to SEQ ID NO: 1160534
aacuuuauucauugagcau

SEQ ID NO: 1160536 - RNA, 19 nt, Artificial Sequence
  Description of Artificial Sequence: Synthetic oligonucleotide
  Sense strand starting at position 751 of SEQ ID NO: 916487
auaugcuugccugagaaga

SEQ ID NO: 1160537 - RNA, 19 nt, Artificial Sequence
  Description of Artificial Sequence: Synthetic oligonucleotide
  Antisense strand to SEQ ID NO: 1160536
ucuucucaggcaagcauau

SEQ ID NO: 1160538 - RNA, 19 nt, Artificial Sequence
  Description of Artificial Sequence: Synthetic oligonucleotide
  Sense strand starting at position 855 of SEQ ID NO: 916487
aauagugacuauccgaaua

SEQ ID NO: 1160539 - RNA, 19 nt, Artificial Sequence
  Description of Artificial Sequence: Synthetic oligonucleotide
  Antisense strand to SEQ ID NO: 1160538
uauucggauagucacuauu

SEQ ID NO: 1160540 - RNA, 19 nt, Artificial Sequence
  Description of Artificial Sequence: Synthetic oligonucleotide
  Sense strand starting at position 993 of SEQ ID NO: 916487
ugugaauuaggucacuaug

SEQ ID NO: 1160541 - RNA, 19 nt, Artificial Sequence
  Description of Artificial Sequence: Synthetic oligonucleotide
  Antisense strand to SEQ ID NO: 1160540
cauagugaccuaauucaca

SEQ ID NO: 1160542 - RNA, 19 nt, Artificial Sequence
  Description of Artificial Sequence: Synthetic oligonucleotide
  Sense strand starting at position 995 of SEQ ID NO: 916487
ugaauuaggucacuauguu

SEQ ID NO: 1160543 - RNA, 19 nt, Artificial Sequence
  Description of Artificial Sequence: Synthetic oligonucleotide
  Antisense strand to SEQ ID NO: 1160542
aacauagugaccuaauuca

SEQ ID NO: 1160544 - RNA, 19 nt, Artificial Sequence
  Description of Artificial Sequence: Synthetic oligonucleotide
  Sense strand starting at position 996 of SEQ ID NO: 916487
gaauuaggucacuauguug

SEQ ID NO: 1160545 - RNA, 19 nt, Artificial Sequence
  Description of Artificial Sequence: Synthetic oligonucleotide
  Antisense strand to SEQ ID NO: 1160544
caacauagugaccuaauuc

SEQ ID NO: 1160546 - RNA, 19 nt, Artificial Sequence
  Description of Artificial Sequence: Synthetic oligonucleotide
  Sense strand starting at position 1192 of SEQ ID NO: 916487
gcagcuagugccuucucau

SEQ ID NO: 1160547 - RNA, 19 nt, Artificial Sequence
  Description of Artificial Sequence: Synthetic oligonucleotide
  Antisense strand to SEQ ID NO: 1160546
augagaaggcacuagcugc

SEQ ID NO: 1160548 - RNA, 19 nt, Artificial Sequence
  Description of Artificial Sequence: Synthetic oligonucleotide
  Sense strand starting at position 1311 of SEQ ID NO: 916487
auuaacuguugaguaaucu

SEQ ID NO: 1160549 - RNA, 19 nt, Artificial Sequence
  Description of Artificial Sequence: Synthetic oligonucleotide
  Antisense strand to SEQ ID NO: 1160548
agauuacucaacaguuaau

SEQ ID NO: 1160550 - RNA, 19 nt, Artificial Sequence
  Description of Artificial Sequence: Synthetic oligonucleotide
  Sense strand starting at position 1312 of SEQ ID NO: 916487
uuaacuguugaguaaucuu

SEQ ID NO: 1160551 - RNA, 19 nt, Artificial Sequence
  Description of Artificial Sequence: Synthetic oligonucleotide
  Antisense strand to SEQ ID NO: 1160550
aagauuacucaacaguuaa

SEQ ID NO: 1160552 - RNA, 19 nt, Artificial Sequence
  Description of Artificial Sequence: Synthetic oligonucleotide
  Sense strand starting at position 1482 of SEQ ID NO: 916487
gagugauccugauuccaaa

SEQ ID NO: 1160553 - RNA, 19 nt, Artificial Sequence
  Description of Artificial Sequence: Synthetic oligonucleotide
  Antisense strand to SEQ ID NO: 1160552
uuuggaaucaggaucacuc

SEQ ID NO: 1160554 - RNA, 19 nt, Artificial Sequence
  Description of Artificial Sequence: Synthetic oligonucleotide
  Sense strand starting at position 2033 of SEQ ID NO: 916487
uuccuucugagcgauugau

SEQ ID NO: 1160555 - RNA, 19 nt, Artificial Sequence
  Description of Artificial Sequence: Synthetic oligonucleotide
  Antisense strand to SEQ ID NO: 1160554
aucaaucgcucagaaggaa

SEQ ID NO: 1160556 - RNA, 19 nt, Artificial Sequence
  Description of Artificial Sequence: Synthetic oligonucleotide
  Sense strand starting at position 2085 of SEQ ID NO: 916487
cgucguggucuucugauga

SEQ ID NO: 1160557 - RNA, 19 nt, Artificial Sequence
  Description of Artificial Sequence: Synthetic oligonucleotide
  Antisense strand to SEQ ID NO: 1160556
ucaucagaagaccacgacg

SEQ ID NO: 1160558 - RNA, 19 nt, Artificial Sequence
  Description of Artificial Sequence: Synthetic oligonucleotide
  Sense strand starting at position 2105 of SEQ ID NO: 916487
gcaguuagucggcugcaau

SEQ ID NO: 1160559 - RNA, 19 nt, Artificial Sequence
  Description of Artificial Sequence: Synthetic oligonucleotide
  Antisense strand to SEQ ID NO: 1160558
auugcagccgacuaacugc

SEQ ID NO: 1160560 - RNA, 19 nt, Artificial Sequence
  Description of Artificial Sequence: Synthetic oligonucleotide
  Sense strand starting at position 2325 of SEQ ID NO: 916487
ggauauaagauucgcugaa

SEQ ID NO: 1160561 - RNA, 19 nt, Artificial Sequence
  Description of Artificial Sequence: Synthetic oligonucleotide
  Antisense strand to SEQ ID NO: 1160560
uucagcgaaucuuauaucc

SEQ ID NO: 1160562 - RNA, 19 nt, Artificial Sequence
  Description of Artificial Sequence: Synthetic oligonucleotide
  Sense strand starting at position 2326 of SEQ ID NO: 916487
gauauaagauucgcugaag

SEQ ID NO: 1160563 - RNA, 19 nt, Artificial Sequence
  Description of Artificial Sequence: Synthetic oligonucleotide
  Antisense strand to SEQ ID NO: 1160562
cuucagcgaaucuuauauc

SEQ ID NO: 1160564 - RNA, 19 nt, Artificial Sequence
  Description of Artificial Sequence: Synthetic oligonucleotide
  Sense strand starting at position 2329 of SEQ ID NO: 916487
auaagauucgcugaagcuu

SEQ ID NO: 1160565 - RNA, 19 nt, Artificial Sequence
  Description of Artificial Sequence: Synthetic oligonucleotide
  Antisense strand to SEQ ID NO: 1160564
aagcuucagcgaaucuuau

SEQ ID NO: 1160566 - RNA, 19 nt, Artificial Sequence
  Description of Artificial Sequence: Synthetic oligonucleotide
  Sense strand starting at position 2428 of SEQ ID NO: 916487
cgcagagcucuagauagga

SEQ ID NO: 1160567 - RNA, 19 nt, Artificial Sequence
  Description of Artificial Sequence: Synthetic oligonucleotide
  Antisense strand to SEQ ID NO: 1160566
uccuaucuagagcucugcg

SEQ ID NO: 1160568 - RNA, 19 nt, Artificial Sequence
  Description of Artificial Sequence: Synthetic oligonucleotide
  Sense strand starting at position 2549 of SEQ ID NO: 916487
agucuaugacccugugaac

SEQ ID NO: 1160569 - RNA, 19 nt, Artificial Sequence
  Description of Artificial Sequence: Synthetic oligonucleotide
  Antisense strand to SEQ ID NO: 1160568
guucacagggucauagacu

SEQ ID NO: 1160570 - RNA, 19 nt, Artificial Sequence
  Description of Artificial Sequence: Synthetic oligonucleotide
  Sense strand starting at position 2572 of SEQ ID NO: 916487
gcgcaugugguaagguaaa

SEQ ID NO: 1160571 - RNA, 19 nt, Artificial Sequence
  Description of Artificial Sequence: Synthetic oligonucleotide
  Antisense strand to SEQ ID NO: 1160570
uuuaccuuaccacaugcgc

SEQ ID NO: 1160572 - RNA, 19 nt, Artificial Sequence
  Description of Artificial Sequence: Synthetic oligonucleotide
  Sense strand starting at position 2840 of SEQ ID NO: 916487
agauacuagauguggcauu

SEQ ID NO: 1160573 - RNA, 19 nt, Artificial Sequence
  Description of Artificial Sequence: Synthetic oligonucleotide
  Antisense strand to SEQ ID NO: 1160572
aaugccacaucuaguaucu

SEQ ID NO: 1160574 - RNA, 19 nt, Artificial Sequence
  Description of Artificial Sequence: Synthetic oligonucleotide
  Sense strand starting at position 2886 of SEQ ID NO: 916487
gaaggcucagauuaagugu

SEQ ID NO: 1160575 - RNA, 19 nt, Artificial Sequence
  Description of Artificial Sequence: Synthetic oligonucleotide
  Antisense strand to SEQ ID NO: 1160574
acacuuaaucugagccuuc

SEQ ID NO: 1160576 - RNA, 19 nt, Artificial Sequence
  Description of Artificial Sequence: Synthetic oligonucleotide
  Sense strand starting at position 2991 of SEQ ID NO: 916487
uugagauucuuacuuggau

SEQ ID NO: 1160577 - RNA, 19 nt, Artificial Sequence
  Description of Artificial Sequence: Synthetic oligonucleotide
  Antisense strand to SEQ ID NO: 1160576
auccaaguaagaaucucaa

SEQ ID NO: 1160578 - RNA, 19 nt, Artificial Sequence
  Description of Artificial Sequence: Synthetic oligonucleotide
  Sense strand starting at position 2992 of SEQ ID NO: 916487
ugagauucuuacuuggauu

SEQ ID NO: 1160579 - RNA, 19 nt, Artificial Sequence
  Description of Artificial Sequence: Synthetic oligonucleotide
  Antisense strand to SEQ ID NO: 1160578
aauccaaguaagaaucuca

SEQ ID NO: 1160580 - RNA, 19 nt, Artificial Sequence
  Description of Artificial Sequence: Synthetic oligonucleotide
  Sense strand starting at position 3005 of SEQ ID NO: 916487
uggauuuccgcaugacugu

SEQ ID NO: 1160581 - RNA, 19 nt, Artificial Sequence
  Description of Artificial Sequence: Synthetic oligonucleotide
  Antisense strand to SEQ ID NO: 1160580
acagucaugcggaaaucca

SEQ ID NO: 1160582 - RNA, 19 nt, Artificial Sequence
  Description of Artificial Sequence: Synthetic oligonucleotide
  Sense strand starting at position 3116 of SEQ ID NO: 916487
cuagaaucugaaugugaug

SEQ ID NO: 1160583 - RNA, 19 nt, Artificial Sequence
  Description of Artificial Sequence: Synthetic oligonucleotide
  Antisense strand to SEQ ID NO: 1160582
caucacauucagauucuag

SEQ ID NO: 1160584 - RNA, 19 nt, Artificial Sequence
  Description of Artificial Sequence: Synthetic oligonucleotide
  Sense strand starting at position 3122 of SEQ ID NO: 916487
ucugaaugugaugacguaa

SEQ ID NO: 1160585 - RNA, 19 nt, Artificial Sequence
  Description of Artificial Sequence: Synthetic oligonucleotide
  Antisense strand to SEQ ID NO: 1160584
uuacgucaucacauucaga

SEQ ID NO: 1160586 - RNA, 19 nt, Artificial Sequence
  Description of Artificial Sequence: Synthetic oligonucleotide
  Sense strand starting at position 3205 of SEQ ID NO: 916487
uuuggaugauauuccucaa

SEQ ID NO: 1160587 - RNA, 19 nt, Artificial Sequence
  Description of Artificial Sequence: Synthetic oligonucleotide
  Antisense strand to SEQ ID NO: 1160586
uugaggaauaucauccaaa

SEQ ID NO: 1160588 - RNA, 19 nt, Artificial Sequence
  Description of Artificial Sequence: Synthetic oligonucleotide
  Sense strand starting at position 3208 of SEQ ID NO: 916487
ggaugauauuccucaaugu

SEQ ID NO: 1160589 - RNA, 19 nt, Artificial Sequence
  Description of Artificial Sequence: Synthetic oligonucleotide
  Antisense strand to SEQ ID NO: 1160588
acauugaggaauaucaucc

SEQ ID NO: 1160590 - RNA, 19 nt, Artificial Sequence
  Description of Artificial Sequence: Synthetic oligonucleotide
  Sense strand starting at position 3212 of SEQ ID NO: 916487
gauauuccucaauguagga

SEQ ID NO: 1160591 - RNA, 19 nt, Artificial Sequence
  Description of Artificial Sequence: Synthetic oligonucleotide
  Antisense strand to SEQ ID NO: 1160590
uccuacauugaggaauauc

SEQ ID NO: 1160592 - RNA, 19 nt, Artificial Sequence
  Description of Artificial Sequence: Synthetic oligonucleotide
  Sense strand starting at position 3555 of SEQ ID NO: 916487
uuugaaauccuuuaagugu

SEQ ID NO: 1160593 - RNA, 19 nt, Artificial Sequence
  Description of Artificial Sequence: Synthetic oligonucleotide
  Antisense strand to SEQ ID NO: 1160592
acacuuaaaggauuucaaa

SEQ ID NO: 1160594 - RNA, 19 nt, Artificial Sequence
  Description of Artificial Sequence: Synthetic oligonucleotide
  Sense strand starting at position 3717 of SEQ ID NO: 916487
gguuuagccuaauugacaa

SEQ ID NO: 1160595 - RNA, 19 nt, Artificial Sequence
  Description of Artificial Sequence: Synthetic oligonucleotide
  Antisense strand to SEQ ID NO: 1160594
uugucaauuaggcuaaacc

SEQ ID NO: 1160596 - RNA, 19 nt, Artificial Sequence
  Description of Artificial Sequence: Synthetic oligonucleotide
  Sense strand starting at position 3736 of SEQ ID NO: 916487
aguaacguaaugggaauua

SEQ ID NO: 1160597 - RNA, 19 nt, Artificial Sequence
  Description of Artificial Sequence: Synthetic oligonucleotide
  Antisense strand to SEQ ID NO: 1160596
uaauucccauuacguuacu

SEQ ID NO: 1160598 - RNA, 19 nt, Artificial Sequence
  Description of Artificial Sequence: Synthetic oligonucleotide
  Sense strand starting at position 3795 of SEQ ID NO: 916487
gguaacuugauuggaccau

SEQ ID NO: 1160599 - RNA, 19 nt, Artificial Sequence
  Description of Artificial Sequence: Synthetic oligonucleotide
  Antisense strand to SEQ ID NO: 1160598
augguccaaucaaguuacc

SEQ ID NO: 1160600 - RNA, 19 nt, Artificial Sequence
  Description of Artificial Sequence: Synthetic oligonucleotide
  Sense strand starting at position 3882 of SEQ ID NO: 916487
guucuagagccagacucaa

SEQ ID NO: 1160601 - RNA, 19 nt, Artificial Sequence
  Description of Artificial Sequence: Synthetic oligonucleotide
  Antisense strand to SEQ ID NO: 1160600
uugagucuggcucuagaac

SEQ ID NO: 1160602 - RNA, 19 nt, Artificial Sequence
  Description of Artificial Sequence: Synthetic oligonucleotide
  Sense strand starting at position 62 of SEQ ID NO: 916488
aacauucuguggcuugauu

SEQ ID NO: 1160603 - RNA, 19 nt, Artificial Sequence
  Description of Artificial Sequence: Synthetic oligonucleotide
  Antisense strand to SEQ ID NO: 1160602
aaucaagccacagaauguu

SEQ ID NO: 1160604 - RNA, 19 nt, Artificial Sequence
  Description of Artificial Sequence: Synthetic oligonucleotide
  Sense strand starting at position 160 of SEQ ID NO: 916488
gcugcacaguguuccuuua

SEQ ID NO: 1160605 - RNA, 19 nt, Artificial Sequence
  Description of Artificial Sequence: Synthetic oligonucleotide
  Antisense strand to SEQ ID NO: 1160604
uaaaggaacacugugcagc

SEQ ID NO: 1160606 - RNA, 19 nt, Artificial Sequence
  Description of Artificial Sequence: Synthetic oligonucleotide
  Sense strand starting at position 162 of SEQ ID NO: 916488
ugcacaguguuccuuuaua

SEQ ID NO: 1160607 - RNA, 19 nt, Artificial Sequence
  Description of Artificial Sequence: Synthetic oligonucleotide
  Antisense strand to SEQ ID NO: 1160606
uauaaaggaacacugugca

SEQ ID NO: 1160608 - RNA, 19 nt, Artificial Sequence
  Description of Artificial Sequence: Synthetic oligonucleotide
  Sense strand starting at position 228 of SEQ ID NO: 916488
uuauuuccaguuugugcaa

SEQ ID NO: 1160609 - RNA, 19 nt, Artificial Sequence
  Description of Artificial Sequence: Synthetic oligonucleotide
  Antisense strand to SEQ ID NO: 1160608
uugcacaaacuggaaauaa

SEQ ID NO: 1160610 - RNA, 19 nt, Artificial Sequence
  Description of Artificial Sequence: Synthetic oligonucleotide
  Sense strand starting at position 231 of SEQ ID NO: 916488
uuuccaguuugugcaauua

SEQ ID NO: 1160611 - RNA, 19 nt, Artificial Sequence
  Description of Artificial Sequence: Synthetic oligonucleotide
  Antisense strand to SEQ ID NO: 1160610
uaauugcacaaacuggaaa

SEQ ID NO: 1160612 - RNA, 19 nt, Artificial Sequence
  Description of Artificial Sequence: Synthetic oligonucleotide
  Sense strand starting at position 264 of SEQ ID NO: 916488
uauucuuguguauggacaa

SEQ ID NO: 1160613 - RNA, 19 nt, Artificial Sequence
  Description of Artificial Sequence: Synthetic oligonucleotide
  Antisense strand to SEQ ID NO: 1160612
uuguccauacacaagaaua

SEQ ID NO: 1160614 - RNA, 19 nt, Artificial Sequence
  Description of Artificial Sequence: Synthetic oligonucleotide
  Sense strand starting at position 303 of SEQ ID NO: 916488
gaguaugugugguuuaaau

SEQ ID NO: 1160615 - RNA, 19 nt, Artificial Sequence
  Description of Artificial Sequence: Synthetic oligonucleotide
  Antisense strand to SEQ ID NO: 1160614
auuuaaaccacacauacuc

SEQ ID NO: 1160616 - RNA, 19 nt, Artificial Sequence
  Description of Artificial Sequence: Synthetic oligonucleotide
  Sense strand starting at position 348 of SEQ ID NO: 916488
gaggguaccucuucuaaug

SEQ ID NO: 1160617 - RNA, 19 nt, Artificial Sequence
  Description of Artificial Sequence: Synthetic oligonucleotide
  Antisense strand to SEQ ID NO: 1160616
cauuagaagagguacccuc

SEQ ID NO: 1160618 - RNA, 19 nt, Artificial Sequence
  Description of Artificial Sequence: Synthetic oligonucleotide
  Sense strand starting at position 421 of SEQ ID NO: 916488
agaagucccuaacaguaua

SEQ ID NO: 1160619 - RNA, 19 nt, Artificial Sequence
  Description of Artificial Sequence: Synthetic oligonucleotide
  Antisense strand to SEQ ID NO: 1160618
uauacuguuagggacuucu

SEQ ID NO: 1160620 - RNA, 19 nt, Artificial Sequence
  Description of Artificial Sequence: Synthetic oligonucleotide
  Sense strand starting at position 429 of SEQ ID NO: 916488
cuaacaguauaauagguaa

SEQ ID NO: 1160621 - RNA, 19 nt, Artificial Sequence
  Description of Artificial Sequence: Synthetic oligonucleotide
  Antisense strand to SEQ ID NO: 1160620
uuaccuauuauacuguuag

SEQ ID NO: 1160622 - RNA, 19 nt, Artificial Sequence
  Description of Artificial Sequence: Synthetic oligonucleotide
  Sense strand starting at position 472 of SEQ ID NO: 916488
cuuuaaguuugagcacuuu

SEQ ID NO: 1160623 - RNA, 19 nt, Artificial Sequence
  Description of Artificial Sequence: Synthetic oligonucleotide
  Antisense strand to SEQ ID NO: 1160622
aaagugcucaaacuuaaag

SEQ ID NO: 1160624 - RNA, 19 nt, Artificial Sequence
  Description of Artificial Sequence: Synthetic oligonucleotide
  Sense strand starting at position 492 of SEQ ID NO: 916488
guccuauaauugguuuaca

SEQ ID NO: 1160625 - RNA, 19 nt, Artificial Sequence
  Description of Artificial Sequence: Synthetic oligonucleotide
  Antisense strand to SEQ ID NO: 1160624
uguaaaccaauuauaggac

SEQ ID NO: 1160626 - RNA, 19 nt, Artificial Sequence
  Description of Artificial Sequence: Synthetic oligonucleotide
  Sense strand starting at position 508 of SEQ ID NO: 916488
acauuucuguuccuguuau

SEQ ID NO: 1160627 - RNA, 19 nt, Artificial Sequence
  Description of Artificial Sequence: Synthetic oligonucleotide
  Antisense strand to SEQ ID NO: 1160626
auaacaggaacagaaaugu

SEQ ID NO: 1160628 - RNA, 19 nt, Artificial Sequence
  Description of Artificial Sequence: Synthetic oligonucleotide
  Sense strand starting at position 566 of SEQ ID NO: 916488
ugaucuuauugacauguaa

SEQ ID NO: 1160629 - RNA, 19 nt, Artificial Sequence
  Description of Artificial Sequence: Synthetic oligonucleotide
  Antisense strand to SEQ ID NO: 1160628
uuacaugucaauaagauca

SEQ ID NO: 1160630 - RNA, 19 nt, Artificial Sequence
  Description of Artificial Sequence: Synthetic oligonucleotide
  Sense strand starting at position 615 of SEQ ID NO: 916488
ugucuaucaucccuggcaa

SEQ ID NO: 1160631 - RNA, 19 nt, Artificial Sequence
  Description of Artificial Sequence: Synthetic oligonucleotide
  Antisense strand to SEQ ID NO: 1160630
uugccagggaugauagaca

SEQ ID NO: 1160632 - RNA, 19 nt, Artificial Sequence
  Description of Artificial Sequence: Synthetic oligonucleotide
  Sense strand starting at position 616 of SEQ ID NO: 916488
gucuaucaucccuggcaaa

SEQ ID NO: 1160633 - RNA, 19 nt, Artificial Sequence
  Description of Artificial Sequence: Synthetic oligonucleotide
  Antisense strand to SEQ ID NO: 1160632
uuugccagggaugauagac

SEQ ID NO: 1160634 - RNA, 19 nt, Artificial Sequence
  Description of Artificial Sequence: Synthetic oligonucleotide
  Sense strand starting at position 1062 of SEQ ID NO: 916488
gcuucucucccacgcuaaa

SEQ ID NO: 1160635 - RNA, 19 nt, Artificial Sequence
  Description of Artificial Sequence: Synthetic oligonucleotide
  Antisense strand to SEQ ID NO: 1160634
uuuagcgugggagagaagc

SEQ ID NO: 1160636 - RNA, 19 nt, Artificial Sequence
  Description of Artificial Sequence: Synthetic oligonucleotide
  Sense strand starting at position 1155 of SEQ ID NO: 916488
aggccugcccucuaugaua

SEQ ID NO: 1160637 - RNA, 19 nt, Artificial Sequence
  Description of Artificial Sequence: Synthetic oligonucleotide
  Antisense strand to SEQ ID NO: 1160636
uaucauagagggcaggccu

SEQ ID NO: 1160638 - RNA, 19 nt, Artificial Sequence
  Description of Artificial Sequence: Synthetic oligonucleotide
  Sense strand starting at position 1157 of SEQ ID NO: 916488
gccugcccucuaugauaau

SEQ ID NO: 1160639 - RNA, 19 nt, Artificial Sequence
  Description of Artificial Sequence: Synthetic oligonucleotide
  Antisense strand to SEQ ID NO: 1160638
auuaucauagagggcaggc

SEQ ID NO: 1160640 - RNA, 19 nt, Artificial Sequence
  Description of Artificial Sequence: Synthetic oligonucleotide
  Sense strand starting at position 2020 of SEQ ID NO: 916488
gcuagcuuccugcuagagu

SEQ ID NO: 1160641 - RNA, 19 nt, Artificial Sequence
  Description of Artificial Sequence: Synthetic oligonucleotide
  Antisense strand to SEQ ID NO: 1160640
acucuagcaggaagcuagc

SEQ ID NO: 1160642 - RNA, 19 nt, Artificial Sequence
  Description of Artificial Sequence: Synthetic oligonucleotide
  Sense strand starting at position 2040 of SEQ ID NO: 916488
uuauaagcgcaguguacuu

SEQ ID NO: 1160643 - RNA, 19 nt, Artificial Sequence
  Description of Artificial Sequence: Synthetic oligonucleotide
  Antisense strand to SEQ ID NO: 1160642
aaguacacugcgcuuauaa

SEQ ID NO: 1160644 - RNA, 19 nt, Artificial Sequence
  Description of Artificial Sequence: Synthetic oligonucleotide
  Sense strand starting at position 2095 of SEQ ID NO: 916488
aacagaauucgugggugga

SEQ ID NO: 1160645 - RNA, 19 nt, Artificial Sequence
  Description of Artificial Sequence: Synthetic oligonucleotide
  Antisense strand to SEQ ID NO: 1160644
uccacccacgaauucuguu

SEQ ID NO: 1160646 - RNA, 19 nt, Artificial Sequence
  Description of Artificial Sequence: Synthetic oligonucleotide
  Sense strand starting at position 2096 of SEQ ID NO: 916488
acagaauucguggguggag

SEQ ID NO: 1160647 - RNA, 19 nt, Artificial Sequence
  Description of Artificial Sequence: Synthetic oligonucleotide
  Antisense strand to SEQ ID NO: 1160646
cuccacccacgaauucugu

SEQ ID NO: 1160648 - RNA, 19 nt, Artificial Sequence
  Description of Artificial Sequence: Synthetic oligonucleotide
  Sense strand starting at position 2260 of SEQ ID NO: 916488
ggccacagucagcaagaau

SEQ ID NO: 1160649 - RNA, 19 nt, Artificial Sequence
  Description of Artificial Sequence: Synthetic oligonucleotide
  Antisense strand to SEQ ID NO: 1160648
auucuugcugacuguggcc

SEQ ID NO: 1160650 - RNA, 19 nt, Artificial Sequence
  Description of Artificial Sequence: Synthetic oligonucleotide
  Sense strand starting at position 3036 of SEQ ID NO: 916488
gugccuaacuacucgauua

SEQ ID NO: 1160651 - RNA, 19 nt, Artificial Sequence
  Description of Artificial Sequence: Synthetic oligonucleotide
  Antisense strand to SEQ ID NO: 1160650
uaaucgaguaguuaggcac

SEQ ID NO: 1160652 - RNA, 19 nt, Artificial Sequence
  Description of Artificial Sequence: Synthetic oligonucleotide
  Sense strand starting at position 3038 of SEQ ID NO: 916488
gccuaacuacucgauuacu

SEQ ID NO: 1160653 - RNA, 19 nt, Artificial Sequence
  Description of Artificial Sequence: Synthetic oligonucleotide
  Antisense strand to SEQ ID NO: 1160652
aguaaucgaguaguuaggc

SEQ ID NO: 1160654 - RNA, 19 nt, Artificial Sequence
  Description of Artificial Sequence: Synthetic oligonucleotide
  Sense strand starting at position 3044 of SEQ ID NO: 916488
cuacucgauuacucagcua

SEQ ID NO: 1160655 - RNA, 19 nt, Artificial Sequence
  Description of Artificial Sequence: Synthetic oligonucleotide
  Antisense strand to SEQ ID NO: 1160654
uagcugaguaaucgaguag

SEQ ID NO: 1160656 - RNA, 19 nt, Artificial Sequence
  Description of Artificial Sequence: Synthetic oligonucleotide
  Sense strand starting at position 3047 of SEQ ID NO: 916488
cucgauuacucagcuaauu

SEQ ID NO: 1160657 - RNA, 19 nt, Artificial Sequence
  Description of Artificial Sequence: Synthetic oligonucleotide
  Antisense strand to SEQ ID NO: 1160656
aauuagcugaguaaucgag

SEQ ID NO: 1160658 - RNA, 19 nt, Artificial Sequence
  Description of Artificial Sequence: Synthetic oligonucleotide
  Sense strand starting at position 3055 of SEQ ID NO: 916488
cucagcuaauuuggauaaa

SEQ ID NO: 1160659 - RNA, 19 nt, Artificial Sequence
  Description of Artificial Sequence: Synthetic oligonucleotide
  Antisense strand to SEQ ID NO: 1160658
uuuauccaaauuagcugag

SEQ ID NO: 1160660 - RNA, 19 nt, Artificial Sequence
  Description of Artificial Sequence: Synthetic oligonucleotide
  Sense strand starting at position 3239 of SEQ ID NO: 916488
ucaaauccugucugggcaa

SEQ ID NO: 1160661 - RNA, 19 nt, Artificial Sequence
  Description of Artificial Sequence: Synthetic oligonucleotide
  Antisense strand to SEQ ID NO: 1160660
uugcccagacaggauuuga

SEQ ID NO: 1160662 - RNA, 19 nt, Artificial Sequence
  Description of Artificial Sequence: Synthetic oligonucleotide
  Sense strand starting at position 3242 of SEQ ID NO: 916488
aauccugucugggcaacau

SEQ ID NO: 1160663 - RNA, 19 nt, Artificial Sequence
  Description of Artificial Sequence: Synthetic oligonucleotide
  Antisense strand to SEQ ID NO: 1160662
auguugcccagacaggauu

SEQ ID NO: 1160664 - RNA, 19 nt, Artificial Sequence
  Description of Artificial Sequence: Synthetic oligonucleotide
  Sense strand starting at position 3414 of SEQ ID NO: 916488
aguguucuguuguuucaug

SEQ ID NO: 1160665 - RNA, 19 nt, Artificial Sequence
  Description of Artificial Sequence: Synthetic oligonucleotide
  Antisense strand to SEQ ID NO: 1160664
caugaaacaacagaacacu

SEQ ID NO: 1160666 - RNA, 19 nt, Artificial Sequence
  Description of Artificial Sequence: Synthetic oligonucleotide
  Sense strand starting at position 3415 of SEQ ID NO: 916488
guguucuguuguuucauga

SEQ ID NO: 1160667 - RNA, 19 nt, Artificial Sequence
  Description of Artificial Sequence: Synthetic oligonucleotide
  Antisense strand to SEQ ID NO: 1160666
ucaugaaacaacagaacac

SEQ ID NO: 1160668 - RNA, 19 nt, Artificial Sequence
  Description of Artificial Sequence: Synthetic oligonucleotide
  Sense strand starting at position 3436 of SEQ ID NO: 916488
uguuauaaccugcauguau

SEQ ID NO: 1160669 - RNA, 19 nt, Artificial Sequence
  Description of Artificial Sequence: Synthetic oligonucleotide
  Antisense strand to SEQ ID NO: 1160668
auacaugcagguuauaaca

SEQ ID NO: 1160670 - RNA, 19 nt, Artificial Sequence
  Description of Artificial Sequence: Synthetic oligonucleotide
  Sense strand starting at position 3533 of SEQ ID NO: 916488
auguguacaguuugauaag

SEQ ID NO: 1160671 - RNA, 19 nt, Artificial Sequence
  Description of Artificial Sequence: Synthetic oligonucleotide
  Antisense strand to SEQ ID NO: 1160670
cuuaucaaacuguacacau

SEQ ID NO: 1160672 - RNA, 19 nt, Artificial Sequence
  Description of Artificial Sequence: Synthetic oligonucleotide
  Sense strand starting at position 3660 of SEQ ID NO: 916488
auuccuaauccugaggcaa

SEQ ID NO: 1160673 - RNA, 19 nt, Artificial Sequence
  Description of Artificial Sequence: Synthetic oligonucleotide
  Antisense strand to SEQ ID NO: 1160672
uugccucaggauuaggaau

SEQ ID NO: 1160674 - RNA, 19 nt, Artificial Sequence
  Description of Artificial Sequence: Synthetic oligonucleotide
  Sense strand starting at position 3949 of SEQ ID NO: 916488
ggccuauggccacaaaguu

SEQ ID NO: 1160675 - RNA, 19 nt, Artificial Sequence
  Description of Artificial Sequence: Synthetic oligonucleotide
  Antisense strand to SEQ ID NO: 1160674
aacuuuguggccauaggcc

SEQ ID NO: 1160676 - RNA, 19 nt, Artificial Sequence
  Description of Artificial Sequence: Synthetic oligonucleotide
  Sense strand starting at position 3957 of SEQ ID NO: 916488
gccacaaaguuugcuugua

SEQ ID NO: 1160677 - RNA, 19 nt, Artificial Sequence
  Description of Artificial Sequence: Synthetic oligonucleotide
  Antisense strand to SEQ ID NO: 1160676
uacaagcaaacuuuguggc

SEQ ID NO: 1160678 - RNA, 19 nt, Artificial Sequence
  Description of Artificial Sequence: Synthetic oligonucleotide
  Sense strand starting at position 3958 of SEQ ID NO: 916488
ccacaaaguuugcuuguaa

SEQ ID NO: 1160679 - RNA, 19 nt, Artificial Sequence
  Description of Artificial Sequence: Synthetic oligonucleotide
  Antisense strand to SEQ ID NO: 1160678
uuacaagcaaacuuugugg

SEQ ID NO: 1160680 - RNA, 19 nt, Artificial Sequence
  Description of Artificial Sequence: Synthetic oligonucleotide
  Sense strand starting at position 3959 of SEQ ID NO: 916488
cacaaaguuugcuuguaag

SEQ ID NO: 1160681 - RNA, 19 nt, Artificial Sequence
  Description of Artificial Sequence: Synthetic oligonucleotide
  Antisense strand to SEQ ID NO: 1160680
cuuacaagcaaacuuugug

SEQ ID NO: 1160682 - RNA, 19 nt, Artificial Sequence
  Description of Artificial Sequence: Synthetic oligonucleotide
  Sense strand starting at position 335 of SEQ ID NO: 916489
ggcuuauuguauucugaga

SEQ ID NO: 1160683 - RNA, 19 nt, Artificial Sequence
  Description of Artificial Sequence: Synthetic oligonucleotide
  Antisense strand to SEQ ID NO: 1160682
ucucagaauacaauaagcc

SEQ ID NO: 1160684 - RNA, 19 nt, Artificial Sequence
  Description of Artificial Sequence: Synthetic oligonucleotide
  Sense strand starting at position 403 of SEQ ID NO: 916489
ccuggacaucgcugugaac

SEQ ID NO: 1160685 - RNA, 19 nt, Artificial Sequence
  Description of Artificial Sequence: Synthetic oligonucleotide
  Antisense strand to SEQ ID NO: 1160684
guucacagcgauguccagg

SEQ ID NO: 1160686 - RNA, 19 nt, Artificial Sequence
  Description of Artificial Sequence: Synthetic oligonucleotide
  Sense strand starting at position 405 of SEQ ID NO: 916489
uggacaucgcugugaacau

SEQ ID NO: 1160687 - RNA, 19 nt, Artificial Sequence
  Description of Artificial Sequence: Synthetic oligonucleotide
  Antisense strand to SEQ ID NO: 1160686
auguucacagcgaugucca

SEQ ID NO: 1160688 - RNA, 19 nt, Artificial Sequence
  Description of Artificial Sequence: Synthetic oligonucleotide
  Sense strand starting at position 414 of SEQ ID NO: 916489
cugugaacaucccagggaa

SEQ ID NO: 1160689 - RNA, 19 nt, Artificial Sequence
  Description of Artificial Sequence: Synthetic oligonucleotide
  Antisense strand to SEQ ID NO: 1160688
uucccugggauguucacag

SEQ ID NO: 1160690 - RNA, 19 nt, Artificial Sequence
  Description of Artificial Sequence: Synthetic oligonucleotide
  Sense strand starting at position 486 of SEQ ID NO: 916489
cuauacucucccuagguga

SEQ ID NO: 1160691 - RNA, 19 nt, Artificial Sequence
  Description of Artificial Sequence: Synthetic oligonucleotide
  Antisense strand to SEQ ID NO: 1160690
ucaccuagggagaguauag

SEQ ID NO: 1160692 - RNA, 19 nt, Artificial Sequence
  Description of Artificial Sequence: Synthetic oligonucleotide
  Sense strand starting at position 493 of SEQ ID NO: 916489
cucccuaggugaucucaaa

SEQ ID NO: 1160693 - RNA, 19 nt, Artificial Sequence
  Description of Artificial Sequence: Synthetic oligonucleotide
  Antisense strand to SEQ ID NO: 1160692
uuugagaucaccuagggag

SEQ ID NO: 1160694 - RNA, 19 nt, Artificial Sequence
  Description of Artificial Sequence: Synthetic oligonucleotide
  Sense strand starting at position 693 of SEQ ID NO: 916489
cguccacacucugcuuaau

SEQ ID NO: 1160695 - RNA, 19 nt, Artificial Sequence
  Description of Artificial Sequence: Synthetic oligonucleotide
  Antisense strand to SEQ ID NO: 1160694
auuaagcagaguguggacg

SEQ ID NO: 1160696 - RNA, 19 nt, Artificial Sequence
  Description of Artificial Sequence: Synthetic oligonucleotide
  Sense strand starting at position 1181 of SEQ ID NO: 916489
gggugucuaaugugcuacu

SEQ ID NO: 1160697 - RNA, 19 nt, Artificial Sequence
  Description of Artificial Sequence: Synthetic oligonucleotide
  Antisense strand to SEQ ID NO: 1160696
aguagcacauuagacaccc

SEQ ID NO: 1160698 - RNA, 19 nt, Artificial Sequence
  Description of Artificial Sequence: Synthetic oligonucleotide
  Sense strand starting at position 2023 of SEQ ID NO: 916489
guacccauguuccugaguu

SEQ ID NO: 1160699 - RNA, 19 nt, Artificial Sequence
  Description of Artificial Sequence: Synthetic oligonucleotide
  Antisense strand to SEQ ID NO: 1160698
aacucaggaacauggguac

SEQ ID NO: 1160700 - RNA, 19 nt, Artificial Sequence
  Description of Artificial Sequence: Synthetic oligonucleotide
  Sense strand starting at position 2025 of SEQ ID NO: 916489
acccauguuccugaguucu

SEQ ID NO: 1160701 - RNA, 19 nt, Artificial Sequence
  Description of Artificial Sequence: Synthetic oligonucleotide
  Antisense strand to SEQ ID NO: 1160700
agaacucaggaacaugggu

SEQ ID NO: 1160702 - RNA, 19 nt, Artificial Sequence
  Description of Artificial Sequence: Synthetic oligonucleotide
  Sense strand starting at position 2076 of SEQ ID NO: 916489
gcugcugagucaucucaga

SEQ ID NO: 1160703 - RNA, 19 nt, Artificial Sequence
  Description of Artificial Sequence: Synthetic oligonucleotide
  Antisense strand to SEQ ID NO: 1160702
ucugagaugacucagcagc

SEQ ID NO: 1160704 - RNA, 19 nt, Artificial Sequence
  Description of Artificial Sequence: Synthetic oligonucleotide
  Sense strand starting at position 2081 of SEQ ID NO: 916489
ugagucaucucagagggag

SEQ ID NO: 1160705 - RNA, 19 nt, Artificial Sequence
  Description of Artificial Sequence: Synthetic oligonucleotide
  Antisense strand to SEQ ID NO: 1160704
cucccucugagaugacuca

SEQ ID NO: 1160706 - RNA, 19 nt, Artificial Sequence
  Description of Artificial Sequence: Synthetic oligonucleotide
  Sense strand starting at position 2208 of SEQ ID NO: 916489
aguugacucaugggacaua

SEQ ID NO: 1160707 - RNA, 19 nt, Artificial Sequence
  Description of Artificial Sequence: Synthetic oligonucleotide
  Antisense strand to SEQ ID NO: 1160706
uaugucccaugagucaacu

SEQ ID NO: 1160708 - RNA, 19 nt, Artificial Sequence
  Description of Artificial Sequence: Synthetic oligonucleotide
  Sense strand starting at position 2219 of SEQ ID NO: 916489
gggacauauccuggccuca

SEQ ID NO: 1160709 - RNA, 19 nt, Artificial Sequence
  Description of Artificial Sequence: Synthetic oligonucleotide
  Antisense strand to SEQ ID NO: 1160708
ugaggccaggauauguccc

SEQ ID NO: 1160710 - RNA, 19 nt, Artificial Sequence
  Description of Artificial Sequence: Synthetic oligonucleotide
  Sense strand starting at position 2347 of SEQ ID NO: 916489
gggugagaaguuuaguucu

SEQ ID NO: 1160711 - RNA, 19 nt, Artificial Sequence
  Description of Artificial Sequence: Synthetic oligonucleotide
  Antisense strand to SEQ ID NO: 1160710
agaacuaaacuucucaccc

SEQ ID NO: 1160712 - RNA, 19 nt, Artificial Sequence
  Description of Artificial Sequence: Synthetic oligonucleotide
  Sense strand starting at position 2349 of SEQ ID NO: 916489
gugagaaguuuaguucugu

SEQ ID NO: 1160713 - RNA, 19 nt, Artificial Sequence
  Description of Artificial Sequence: Synthetic oligonucleotide
  Antisense strand to SEQ ID NO: 1160712
acagaacuaaacuucucac

SEQ ID NO: 1160714 - RNA, 19 nt, Artificial Sequence
  Description of Artificial Sequence: Synthetic oligonucleotide
  Sense strand starting at position 2350 of SEQ ID NO: 916489
ugagaaguuuaguucugug

SEQ ID NO: 1160715 - RNA, 19 nt, Artificial Sequence
  Description of Artificial Sequence: Synthetic oligonucleotide
  Antisense strand to SEQ ID NO: 1160714
cacagaacuaaacuucuca

SEQ ID NO: 1160716 - RNA, 19 nt, Artificial Sequence
  Description of Artificial Sequence: Synthetic oligonucleotide
  Sense strand starting at position 2638 of SEQ ID NO: 916489
uucuguaauuuguagagac

SEQ ID NO: 1160717 - RNA, 19 nt, Artificial Sequence
  Description of Artificial Sequence: Synthetic oligonucleotide
  Antisense strand to SEQ ID NO: 1160716
gucucuacaaauuacagaa

SEQ ID NO: 1160718 - RNA, 19 nt, Artificial Sequence
  Description of Artificial Sequence: Synthetic oligonucleotide
  Sense strand starting at position 2947 of SEQ ID NO: 916489
ucuugugaauccuuccaga

SEQ ID NO: 1160719 - RNA, 19 nt, Artificial Sequence
  Description of Artificial Sequence: Synthetic oligonucleotide
  Antisense strand to SEQ ID NO: 1160718
ucuggaaggauucacaaga

SEQ ID NO: 1160720 - RNA, 19 nt, Artificial Sequence
  Description of Artificial Sequence: Synthetic oligonucleotide
  Sense strand starting at position 2963 of SEQ ID NO: 916489
agagaugaccugugaacga

SEQ ID NO: 1160721 - RNA, 19 nt, Artificial Sequence
  Description of Artificial Sequence: Synthetic oligonucleotide
  Antisense strand to SEQ ID NO: 1160720
ucguucacaggucaucucu

SEQ ID NO: 1160722 - RNA, 19 nt, Artificial Sequence
  Description of Artificial Sequence: Synthetic oligonucleotide
  Sense strand starting at position 3001 of SEQ ID NO: 916489
cguguuuagauccauguac

SEQ ID NO: 1160723 - RNA, 19 nt, Artificial Sequence
  Description of Artificial Sequence: Synthetic oligonucleotide
  Antisense strand to SEQ ID NO: 1160722
guacauggaucuaaacacg

SEQ ID NO: 1160724 - RNA, 19 nt, Artificial Sequence
  Description of Artificial Sequence: Synthetic oligonucleotide
  Sense strand starting at position 3003 of SEQ ID NO: 916489
uguuuagauccauguacau

SEQ ID NO: 1160725 - RNA, 19 nt, Artificial Sequence
  Description of Artificial Sequence: Synthetic oligonucleotide
  Antisense strand to SEQ ID NO: 1160724
auguacauggaucuaaaca

SEQ ID NO: 1160726 - RNA, 19 nt, Artificial Sequence
  Description of Artificial Sequence: Synthetic oligonucleotide
  Sense strand starting at position 3133 of SEQ ID NO: 916489
gcaaauggguuuccaaagu

SEQ ID NO: 1160727 - RNA, 19 nt, Artificial Sequence
  Description of Artificial Sequence: Synthetic oligonucleotide
  Antisense strand to SEQ ID NO: 1160726
acuuuggaaacccauuugc

SEQ ID NO: 1160728 - RNA, 19 nt, Artificial Sequence
  Description of Artificial Sequence: Synthetic oligonucleotide
  Sense strand starting at position 3139 of SEQ ID NO: 916489
ggguuuccaaagugauugu

SEQ ID NO: 1160729 - RNA, 19 nt, Artificial Sequence
  Description of Artificial Sequence: Synthetic oligonucleotide
  Antisense strand to SEQ ID NO: 1160728
acaaucacuuuggaaaccc

SEQ ID NO: 1160730 - RNA, 19 nt, Artificial Sequence
  Description of Artificial Sequence: Synthetic oligonucleotide
  Sense strand starting at position 3217 of SEQ ID NO: 916489
auuauugaugcauagauuc

SEQ ID NO: 1160731 - RNA, 19 nt, Artificial Sequence
  Description of Artificial Sequence: Synthetic oligonucleotide
  Antisense strand to SEQ ID NO: 1160730
gaaucuaugcaucaauaau

SEQ ID NO: 1160732 - RNA, 19 nt, Artificial Sequence
  Description of Artificial Sequence: Synthetic oligonucleotide
  Sense strand starting at position 3279 of SEQ ID NO: 916489
uuuacaguuucuuugaggu

SEQ ID NO: 1160733 - RNA, 19 nt, Artificial Sequence
  Description of Artificial Sequence: Synthetic oligonucleotide
  Antisense strand to SEQ ID NO: 1160732
accucaaagaaacuguaaa

SEQ ID NO: 1160734 - RNA, 19 nt, Artificial Sequence
  Description of Artificial Sequence: Synthetic oligonucleotide
  Sense strand starting at position 3349 of SEQ ID NO: 916489
cacaguauauaccugggaa

SEQ ID NO: 1160735 - RNA, 19 nt, Artificial Sequence
  Description of Artificial Sequence: Synthetic oligonucleotide
  Antisense strand to SEQ ID NO: 1160734
uucccagguauauacugug

SEQ ID NO: 1160736 - RNA, 19 nt, Artificial Sequence
  Description of Artificial Sequence: Synthetic oligonucleotide
  Sense strand starting at position 3351 of SEQ ID NO: 916489
caguauauaccugggaaac

SEQ ID NO: 1160737 - RNA, 19 nt, Artificial Sequence
  Description of Artificial Sequence: Synthetic oligonucleotide
  Antisense strand to SEQ ID NO: 1160736
guuucccagguauauacug

SEQ ID NO: 1160738 - RNA, 19 nt, Artificial Sequence
  Description of Artificial Sequence: Synthetic oligonucleotide
  Sense strand starting at position 3353 of SEQ ID NO: 916489
guauauaccugggaaacca

SEQ ID NO: 1160739 - RNA, 19 nt, Artificial Sequence
  Description of Artificial Sequence: Synthetic oligonucleotide
  Antisense strand to SEQ ID NO: 1160738
ugguuucccagguauauac

SEQ ID NO: 1160740 - RNA, 19 nt, Artificial Sequence
  Description of Artificial Sequence: Synthetic oligonucleotide
  Sense strand starting at position 3390 of SEQ ID NO: 916489
ugaacaugucuauguguua

SEQ ID NO: 1160741 - RNA, 19 nt, Artificial Sequence
  Description of Artificial Sequence: Synthetic oligonucleotide
  Antisense strand to SEQ ID NO: 1160740
uaacacauagacauguuca

SEQ ID NO: 1160742 - RNA, 19 nt, Artificial Sequence
  Description of Artificial Sequence: Synthetic oligonucleotide
  Sense strand starting at position 3391 of SEQ ID NO: 916489
gaacaugucuauguguuag

SEQ ID NO: 1160743 - RNA, 19 nt, Artificial Sequence
  Description of Artificial Sequence: Synthetic oligonucleotide
  Antisense strand to SEQ ID NO: 1160742
cuaacacauagacauguuc

SEQ ID NO: 1160744 - RNA, 19 nt, Artificial Sequence
  Description of Artificial Sequence: Synthetic oligonucleotide
  Sense strand starting at position 3478 of SEQ ID NO: 916489
cauaguucugcagacugca

SEQ ID NO: 1160745 - RNA, 19 nt, Artificial Sequence
  Description of Artificial Sequence: Synthetic oligonucleotide
  Antisense strand to SEQ ID NO: 1160744
ugcagucugcagaacuaug

SEQ ID NO: 1160746 - RNA, 19 nt, Artificial Sequence
  Description of Artificial Sequence: Synthetic oligonucleotide
  Sense strand starting at position 3534 of SEQ ID NO: 916489
gagggucucagggagcuua

SEQ ID NO: 1160747 - RNA, 19 nt, Artificial Sequence
  Description of Artificial Sequence: Synthetic oligonucleotide
  Antisense strand to SEQ ID NO: 1160746
uaagcucccugagacccuc

SEQ ID NO: 1160748 - RNA, 19 nt, Artificial Sequence
  Description of Artificial Sequence: Synthetic oligonucleotide
  Sense strand starting at position 3609 of SEQ ID NO: 916489
gagagaccuugcgugaacu

SEQ ID NO: 1160749 - RNA, 19 nt, Artificial Sequence
  Description of Artificial Sequence: Synthetic oligonucleotide
  Antisense strand to SEQ ID NO: 1160748
aguucacgcaaggucucuc

SEQ ID NO: 1160750 - RNA, 19 nt, Artificial Sequence
  Description of Artificial Sequence: Synthetic oligonucleotide
  Sense strand starting at position 3783 of SEQ ID NO: 916489
auaucaguuuccuuguguu

SEQ ID NO: 1160751 - RNA, 19 nt, Artificial Sequence
  Description of Artificial Sequence: Synthetic oligonucleotide
  Antisense strand to SEQ ID NO: 1160750
aacacaaggaaacugauau

SEQ ID NO: 1160752 - RNA, 19 nt, Artificial Sequence
  Description of Artificial Sequence: Synthetic oligonucleotide
  Sense strand starting at position 3793 of SEQ ID NO: 916489
ccuuguguuucuuuguaau

SEQ ID NO: 1160753 - RNA, 19 nt, Artificial Sequence
  Description of Artificial Sequence: Synthetic oligonucleotide
  Antisense strand to SEQ ID NO: 1160752
auuacaaagaaacacaagg

SEQ ID NO: 1160754 - RNA, 19 nt, Artificial Sequence
  Description of Artificial Sequence: Synthetic oligonucleotide
  Sense strand starting at position 3799 of SEQ ID NO: 916489
guuucuuuguaauccauuc

SEQ ID NO: 1160755 - RNA, 19 nt, Artificial Sequence
  Description of Artificial Sequence: Synthetic oligonucleotide
  Antisense strand to SEQ ID NO: 1160754
gaauggauuacaaagaaac

SEQ ID NO: 1160756 - RNA, 19 nt, Artificial Sequence
  Description of Artificial Sequence: Synthetic oligonucleotide
  Sense strand starting at position 3856 of SEQ ID NO: 916489
ugcucucugucaguauaga

SEQ ID NO: 1160757 - RNA, 19 nt, Artificial Sequence
  Description of Artificial Sequence: Synthetic oligonucleotide
  Antisense strand to SEQ ID NO: 1160756
ucuauacugacagagagca

SEQ ID NO: 1160758 - RNA, 19 nt, Artificial Sequence
  Description of Artificial Sequence: Synthetic oligonucleotide
  Sense strand starting at position 3857 of SEQ ID NO: 916489
gcucucugucaguauagau

SEQ ID NO: 1160759 - RNA, 19 nt, Artificial Sequence
  Description of Artificial Sequence: Synthetic oligonucleotide
  Antisense strand to SEQ ID NO: 1160758
aucuauacugacagagagc

SEQ ID NO: 1160760 - RNA, 19 nt, Artificial Sequence
  Description of Artificial Sequence: Synthetic oligonucleotide
  Sense strand starting at position 3938 of SEQ ID NO: 916489
uuguuugaucuuggcucau

SEQ ID NO: 1160761 - RNA, 19 nt, Artificial Sequence
  Description of Artificial Sequence: Synthetic oligonucleotide
  Antisense strand to SEQ ID NO: 1160760
augagccaagaucaaacaa

SEQ ID NO: 1160762 - RNA, 19 nt, Artificial Sequence
  Description of Artificial Sequence: Synthetic oligonucleotide
  Sense strand starting at position 2 of SEQ ID NO: 916490
guauccagucuauagcaaa

SEQ ID NO: 1160763 - RNA, 19 nt, Artificial Sequence
  Description of Artificial Sequence: Synthetic oligonucleotide
  Antisense strand to SEQ ID NO: 1160762
uuugcuauagacuggauac

SEQ ID NO: 1160764 - RNA, 19 nt, Artificial Sequence
  Description of Artificial Sequence: Synthetic oligonucleotide
  Sense strand starting at position 107 of SEQ ID NO: 916490
auacuuuaucuuugugacu

SEQ ID NO: 1160765 - RNA, 19 nt, Artificial Sequence
  Description of Artificial Sequence: Synthetic oligonucleotide
  Antisense strand to SEQ ID NO: 1160764
agucacaaagauaaaguau

SEQ ID NO: 1160766 - RNA, 19 nt, Artificial Sequence
  Description of Artificial Sequence: Synthetic oligonucleotide
  Sense strand starting at position 119 of SEQ ID NO: 916490
ugugacuuauuccuauaua

SEQ ID NO: 1160767 - RNA, 19 nt, Artificial Sequence
  Description of Artificial Sequence: Synthetic oligonucleotide
  Antisense strand to SEQ ID NO: 1160766
uauauaggaauaagucaca

SEQ ID NO: 1160768 - RNA, 19 nt, Artificial Sequence
  Description of Artificial Sequence: Synthetic oligonucleotide
  Sense strand starting at position 154 of SEQ ID NO: 916490
cugagaccauuagugcuau

SEQ ID NO: 1160769 - RNA, 19 nt, Artificial Sequence
  Description of Artificial Sequence: Synthetic oligonucleotide
  Antisense strand to SEQ ID NO: 1160768
auagcacuaauggucucag

SEQ ID NO: 1160770 - RNA, 19 nt, Artificial Sequence
  Description of Artificial Sequence: Synthetic oligonucleotide
  Sense strand starting at position 160 of SEQ ID NO: 916490
ccauuagugcuaugaacaa

SEQ ID NO: 1160771 - RNA, 19 nt, Artificial Sequence
  Description of Artificial Sequence: Synthetic oligonucleotide
  Antisense strand to SEQ ID NO: 1160770
uuguucauagcacuaaugg

SEQ ID NO: 1160772 - RNA, 19 nt, Artificial Sequence
  Description of Artificial Sequence: Synthetic oligonucleotide
  Sense strand starting at position 225 of SEQ ID NO: 916490
cugugcauuuguuugguaa

SEQ ID NO: 1160773 - RNA, 19 nt, Artificial Sequence
  Description of Artificial Sequence: Synthetic oligonucleotide
  Antisense strand to SEQ ID NO: 1160772
uuaccaaacaaaugcacag

SEQ ID NO: 1160774 - RNA, 19 nt, Artificial Sequence
  Description of Artificial Sequence: Synthetic oligonucleotide
  Sense strand starting at position 226 of SEQ ID NO: 916490
ugugcauuuguuugguaaa

SEQ ID NO: 1160775 - RNA, 19 nt, Artificial Sequence
  Description of Artificial Sequence: Synthetic oligonucleotide
  Antisense strand to SEQ ID NO: 1160774
uuuaccaaacaaaugcaca

SEQ ID NO: 1160776 - RNA, 19 nt, Artificial Sequence
  Description of Artificial Sequence: Synthetic oligonucleotide
  Sense strand starting at position 294 of SEQ ID NO: 916490
ccucauuccuggccaggaa

SEQ ID NO: 1160777 - RNA, 19 nt, Artificial Sequence
  Description of Artificial Sequence: Synthetic oligonucleotide
  Antisense strand to SEQ ID NO: 1160776
uuccuggccaggaaugagg

SEQ ID NO: 1160778 - RNA, 19 nt, Artificial Sequence
  Description of Artificial Sequence: Synthetic oligonucleotide
  Sense strand starting at position 295 of SEQ ID NO: 916490
cucauuccuggccaggaau

SEQ ID NO: 1160779 - RNA, 19 nt, Artificial Sequence
  Description of Artificial Sequence: Synthetic oligonucleotide
  Antisense strand to SEQ ID NO: 1160778
auuccuggccaggaaugag

SEQ ID NO: 1160780 - RNA, 19 nt, Artificial Sequence
  Description of Artificial Sequence: Synthetic oligonucleotide
  Sense strand starting at position 404 of SEQ ID NO: 916490
uuucucaaucuguaucgga

SEQ ID NO: 1160781 - RNA, 19 nt, Artificial Sequence
  Description of Artificial Sequence: Synthetic oligonucleotide
  Antisense strand to SEQ ID NO: 1160780
uccgauacagauugagaaa

SEQ ID NO: 1160782 - RNA, 19 nt, Artificial Sequence
  Description of Artificial Sequence: Synthetic oligonucleotide
  Sense strand starting at position 408 of SEQ ID NO: 916490
ucaaucuguaucggaagaa

SEQ ID NO: 1160783 - RNA, 19 nt, Artificial Sequence
  Description of Artificial Sequence: Synthetic oligonucleotide
  Antisense strand to SEQ ID NO: 1160782
uucuuccgauacagauuga

SEQ ID NO: 1160784 - RNA, 19 nt, Artificial Sequence
  Description of Artificial Sequence: Synthetic oligonucleotide
  Sense strand starting at position 567 of SEQ ID NO: 916490
ugaguauaccugcaugcau

SEQ ID NO: 1160785 - RNA, 19 nt, Artificial Sequence
  Description of Artificial Sequence: Synthetic oligonucleotide
  Antisense strand to SEQ ID NO: 1160784
augcaugcagguauacuca

SEQ ID NO: 1160786 - RNA, 19 nt, Artificial Sequence
  Description of Artificial Sequence: Synthetic oligonucleotide
  Sense strand starting at position 587 of SEQ ID NO: 916490
augguaauaguguauguau

SEQ ID NO: 1160787 - RNA, 19 nt, Artificial Sequence
  Description of Artificial Sequence: Synthetic oligonucleotide
  Antisense strand to SEQ ID NO: 1160786
auacauacacuauuaccau

SEQ ID NO: 1160788 - RNA, 19 nt, Artificial Sequence
  Description of Artificial Sequence: Synthetic oligonucleotide
  Sense strand starting at position 821 of SEQ ID NO: 916490
uauguuuguguaugcauuu

SEQ ID NO: 1160789 - RNA, 19 nt, Artificial Sequence
  Description of Artificial Sequence: Synthetic oligonucleotide
  Antisense strand to SEQ ID NO: 1160788
aaaugcauacacaaacaua

SEQ ID NO: 1160790 - RNA, 19 nt, Artificial Sequence
  Description of Artificial Sequence: Synthetic oligonucleotide
  Sense strand starting at position 897 of SEQ ID NO: 916490
gugguuaauaugcauuugu

SEQ ID NO: 1160791 - RNA, 19 nt, Artificial Sequence
  Description of Artificial Sequence: Synthetic oligonucleotide
  Antisense strand to SEQ ID NO: 1160790
acaaaugcauauuaaccac

SEQ ID NO: 1160792 - RNA, 19 nt, Artificial Sequence
  Description of Artificial Sequence: Synthetic oligonucleotide
  Sense strand starting at position 901 of SEQ ID NO: 916490
uuaauaugcauuugugugu

SEQ ID NO: 1160793 - RNA, 19 nt, Artificial Sequence
  Description of Artificial Sequence: Synthetic oligonucleotide
  Antisense strand to SEQ ID NO: 1160792
acacacaaaugcauauuaa

SEQ ID NO: 1160794 - RNA, 19 nt, Artificial Sequence
  Description of Artificial Sequence: Synthetic oligonucleotide
  Sense strand starting at position 902 of SEQ ID NO: 916490
uaauaugcauuugugugua

SEQ ID NO: 1160795 - RNA, 19 nt, Artificial Sequence
  Description of Artificial Sequence: Synthetic oligonucleotide
  Antisense strand to SEQ ID NO: 1160794
uacacacaaaugcauauua

SEQ ID NO: 1160796 - RNA, 19 nt, Artificial Sequence
  Description of Artificial Sequence: Synthetic oligonucleotide
  Sense strand starting at position 906 of SEQ ID NO: 916490
augcauuuguguguaucuu

SEQ ID NO: 1160797 - RNA, 19 nt, Artificial Sequence
  Description of Artificial Sequence: Synthetic oligonucleotide
  Antisense strand to SEQ ID NO: 1160796
aagauacacacaaaugcau

SEQ ID NO: 1160798 - RNA, 19 nt, Artificial Sequence
  Description of Artificial Sequence: Synthetic oligonucleotide
  Sense strand starting at position 907 of SEQ ID NO: 916490
ugcauuuguguguaucuua

SEQ ID NO: 1160799 - RNA, 19 nt, Artificial Sequence
  Description of Artificial Sequence: Synthetic oligonucleotide
  Antisense strand to SEQ ID NO: 1160798
uaagauacacacaaaugca

SEQ ID NO: 1160800 - RNA, 19 nt, Artificial Sequence
  Description of Artificial Sequence: Synthetic oligonucleotide
  Sense strand starting at position 969 of SEQ ID NO: 916490
ucugaagucuagucacauu

SEQ ID NO: 1160801 - RNA, 19 nt, Artificial Sequence
  Description of Artificial Sequence: Synthetic oligonucleotide
  Antisense strand to SEQ ID NO: 1160800
aaugugacuagacuucaga

SEQ ID NO: 1160802 - RNA, 19 nt, Artificial Sequence
  Description of Artificial Sequence: Synthetic oligonucleotide
  Sense strand starting at position 1412 of SEQ ID NO: 916490
cuuggucacuuaccauuau

SEQ ID NO: 1160803 - RNA, 19 nt, Artificial Sequence
  Description of Artificial Sequence: Synthetic oligonucleotide
  Antisense strand to SEQ ID NO: 1160802
auaaugguaagugaccaag

SEQ ID NO: 1160804 - RNA, 19 nt, Artificial Sequence
  Description of Artificial Sequence: Synthetic oligonucleotide
  Sense strand starting at position 1528 of SEQ ID NO: 916490
guggaaucuuccuuucuca

SEQ ID NO: 1160805 - RNA, 19 nt, Artificial Sequence
  Description of Artificial Sequence: Synthetic oligonucleotide
  Antisense strand to SEQ ID NO: 1160804
ugagaaaggaagauuccac

SEQ ID NO: 1160806 - RNA, 19 nt, Artificial Sequence
  Description of Artificial Sequence: Synthetic oligonucleotide
  Sense strand starting at position 1593 of SEQ ID NO: 916490
aucagaauuccacgguuau

SEQ ID NO: 1160807 - RNA, 19 nt, Artificial Sequence
  Description of Artificial Sequence: Synthetic oligonucleotide
  Antisense strand to SEQ ID NO: 1160806
auaaccguggaauucugau

SEQ ID NO: 1160808 - RNA, 19 nt, Artificial Sequence
  Description of Artificial Sequence: Synthetic oligonucleotide
  Sense strand starting at position 1594 of SEQ ID NO: 916490
ucagaauuccacgguuauu

SEQ ID NO: 1160809 - RNA, 19 nt, Artificial Sequence
  Description of Artificial Sequence: Synthetic oligonucleotide
  Antisense strand to SEQ ID NO: 1160808
aauaaccguggaauucuga

SEQ ID NO: 1160810 - RNA, 19 nt, Artificial Sequence
  Description of Artificial Sequence: Synthetic oligonucleotide
  Sense strand starting at position 1863 of SEQ ID NO: 916490
agauuuggccuccgcugaa

SEQ ID NO: 1160811 - RNA, 19 nt, Artificial Sequence
  Description of Artificial Sequence: Synthetic oligonucleotide
  Antisense strand to SEQ ID NO: 1160810
uucagcggaggccaaaucu

SEQ ID NO: 1160812 - RNA, 19 nt, Artificial Sequence
  Description of Artificial Sequence: Synthetic oligonucleotide
  Sense strand starting at position 2514 of SEQ ID NO: 916490
uggaauauccuauguauuc

SEQ ID NO: 1160813 - RNA, 19 nt, Artificial Sequence
  Description of Artificial Sequence: Synthetic oligonucleotide
  Antisense strand to SEQ ID NO: 1160812
gaauacauaggauauucca

SEQ ID NO: 1160814 - RNA, 19 nt, Artificial Sequence
  Description of Artificial Sequence: Synthetic oligonucleotide
  Sense strand starting at position 2515 of SEQ ID NO: 916490
ggaauauccuauguauucu

SEQ ID NO: 1160815 - RNA, 19 nt, Artificial Sequence
  Description of Artificial Sequence: Synthetic oligonucleotide
  Antisense strand to SEQ ID NO: 1160814
agaauacauaggauauucc

SEQ ID NO: 1160816 - RNA, 19 nt, Artificial Sequence
  Description of Artificial Sequence: Synthetic oligonucleotide
  Sense strand starting at position 2695 of SEQ ID NO: 916490
uuuguuugagcuuaacuaa

SEQ ID NO: 1160817 - RNA, 19 nt, Artificial Sequence
  Description of Artificial Sequence: Synthetic oligonucleotide
  Antisense strand to SEQ ID NO: 1160816
uuaguuaagcucaaacaaa

SEQ ID NO: 1160818 - RNA, 19 nt, Artificial Sequence
  Description of Artificial Sequence: Synthetic oligonucleotide
  Sense strand starting at position 2698 of SEQ ID NO: 916490
guuugagcuuaacuaagaa

SEQ ID NO: 1160819 - RNA, 19 nt, Artificial Sequence
  Description of Artificial Sequence: Synthetic oligonucleotide
  Antisense strand to SEQ ID NO: 1160818
uucuuaguuaagcucaaac

SEQ ID NO: 1160820 - RNA, 19 nt, Artificial Sequence
  Description of Artificial Sequence: Synthetic oligonucleotide
  Sense strand starting at position 2710 of SEQ ID NO: 916490
cuaagaaucuggguuucug

SEQ ID NO: 1160821 - RNA, 19 nt, Artificial Sequence
  Description of Artificial Sequence: Synthetic oligonucleotide
  Antisense strand to SEQ ID NO: 1160820
cagaaacccagauucuuag

SEQ ID NO: 1160822 - RNA, 19 nt, Artificial Sequence
  Description of Artificial Sequence: Synthetic oligonucleotide
  Sense strand starting at position 2768 of SEQ ID NO: 916490
auugaaaggcaagguuauu

SEQ ID NO: 1160823 - RNA, 19 nt, Artificial Sequence
  Description of Artificial Sequence: Synthetic oligonucleotide
  Antisense strand to SEQ ID NO: 1160822
aauaaccuugccuuucaau

SEQ ID NO: 1160824 - RNA, 19 nt, Artificial Sequence
  Description of Artificial Sequence: Synthetic oligonucleotide
  Sense strand starting at position 3091 of SEQ ID NO: 916490
ggcuuuguauuucuucuua

SEQ ID NO: 1160825 - RNA, 19 nt, Artificial Sequence
  Description of Artificial Sequence: Synthetic oligonucleotide
  Antisense strand to SEQ ID NO: 1160824
uaagaagaaauacaaagcc

SEQ ID NO: 1160826 - RNA, 19 nt, Artificial Sequence
  Description of Artificial Sequence: Synthetic oligonucleotide
  Sense strand starting at position 3207 of SEQ ID NO: 916490
ccuuguaugccauagaaau

SEQ ID NO: 1160827 - RNA, 19 nt, Artificial Sequence
  Description of Artificial Sequence: Synthetic oligonucleotide
  Antisense strand to SEQ ID NO: 1160826
auuucuauggcauacaagg

SEQ ID NO: 1160828 - RNA, 19 nt, Artificial Sequence
  Description of Artificial Sequence: Synthetic oligonucleotide
  Sense strand starting at position 3401 of SEQ ID NO: 916490
gaaggagucuaguugagag

SEQ ID NO: 1160829 - RNA, 19 nt, Artificial Sequence
  Description of Artificial Sequence: Synthetic oligonucleotide
  Antisense strand to SEQ ID NO: 1160828
cucucaacuagacuccuuc

SEQ ID NO: 1160830 - RNA, 19 nt, Artificial Sequence
  Description of Artificial Sequence: Synthetic oligonucleotide
  Sense strand starting at position 3404 of SEQ ID NO: 916490
ggagucuaguugagaggaa

SEQ ID NO: 1160831 - RNA, 19 nt, Artificial Sequence
  Description of Artificial Sequence: Synthetic oligonucleotide
  Antisense strand to SEQ ID NO: 1160830
uuccucucaacuagacucc

SEQ ID NO: 1160832 - RNA, 19 nt, Artificial Sequence
  Description of Artificial Sequence: Synthetic oligonucleotide
  Sense strand starting at position 3495 of SEQ ID NO: 916490
agugcuacaucucuaagau

SEQ ID NO: 1160833 - RNA, 19 nt, Artificial Sequence
  Description of Artificial Sequence: Synthetic oligonucleotide
  Antisense strand to SEQ ID NO: 1160832
aucuuagagauguagcacu

SEQ ID NO: 1160834 - RNA, 19 nt, Artificial Sequence
  Description of Artificial Sequence: Synthetic oligonucleotide
  Sense strand starting at position 3496 of SEQ ID NO: 916490
gugcuacaucucuaagaua

SEQ ID NO: 1160835 - RNA, 19 nt, Artificial Sequence
  Description of Artificial Sequence: Synthetic oligonucleotide
  Antisense strand to SEQ ID NO: 1160834
uaucuuagagauguagcac

SEQ ID NO: 1160836 - RNA, 19 nt, Artificial Sequence
  Description of Artificial Sequence: Synthetic oligonucleotide
  Sense strand starting at position 3639 of SEQ ID NO: 916490
augugauucuagucugagg

SEQ ID NO: 1160837 - RNA, 19 nt, Artificial Sequence
  Description of Artificial Sequence: Synthetic oligonucleotide
  Antisense strand to SEQ ID NO: 1160836
ccucagacuagaaucacau

SEQ ID NO: 1160838 - RNA, 19 nt, Artificial Sequence
  Description of Artificial Sequence: Synthetic oligonucleotide
  Sense strand starting at position 3641 of SEQ ID NO: 916490
gugauucuagucugaggag

SEQ ID NO: 1160839 - RNA, 19 nt, Artificial Sequence
  Description of Artificial Sequence: Synthetic oligonucleotide
  Antisense strand to SEQ ID NO: 1160838
cuccucagacuagaaucac

SEQ ID NO: 1160840 - RNA, 19 nt, Artificial Sequence
  Description of Artificial Sequence: Synthetic oligonucleotide
  Sense strand starting at position 3825 of SEQ ID NO: 916490
gagcaaugaccucaaugug

SEQ ID NO: 1160841 - RNA, 19 nt, Artificial Sequence
  Description of Artificial Sequence: Synthetic oligonucleotide
  Antisense strand to SEQ ID NO: 1160840
cacauugaggucauugcuc

SEQ ID NO: 1160842 - RNA, 19 nt, Artificial Sequence
  Description of Artificial Sequence: Synthetic oligonucleotide
  Sense strand starting at position 786 of SEQ ID NO: 916491
gagucagagccauauccau

SEQ ID NO: 1160843 - RNA, 19 nt, Artificial Sequence
  Description of Artificial Sequence: Synthetic oligonucleotide
  Antisense strand to SEQ ID NO: 1160842
auggauauggcucugacuc

SEQ ID NO: 1160844 - RNA, 19 nt, Artificial Sequence
  Description of Artificial Sequence: Synthetic oligonucleotide
  Sense strand starting at position 934 of SEQ ID NO: 916491
aaagcugucuccuaggaca

SEQ ID NO: 1160845 - RNA, 19 nt, Artificial Sequence
  Description of Artificial Sequence: Synthetic oligonucleotide
  Antisense strand to SEQ ID NO: 1160844
uguccuaggagacagcuuu

SEQ ID NO: 1160846 - RNA, 19 nt, Artificial Sequence
  Description of Artificial Sequence: Synthetic oligonucleotide
  Sense strand starting at position 1005 of SEQ ID NO: 916491
cauccuugccugugaagag

SEQ ID NO: 1160847 - RNA, 19 nt, Artificial Sequence
  Description of Artificial Sequence: Synthetic oligonucleotide
  Antisense strand to SEQ ID NO: 1160846
cucuucacaggcaaggaug

SEQ ID NO: 1160848 - RNA, 19 nt, Artificial Sequence
  Description of Artificial Sequence: Synthetic oligonucleotide
  Sense strand starting at position 1083 of SEQ ID NO: 916491
ccguacacuuccuucuauu

SEQ ID NO: 1160849 - RNA, 19 nt, Artificial Sequence
  Description of Artificial Sequence: Synthetic oligonucleotide
  Antisense strand to SEQ ID NO: 1160848
aauagaaggaaguguacgg

SEQ ID NO: 1160850 - RNA, 19 nt, Artificial Sequence
  Description of Artificial Sequence: Synthetic oligonucleotide
  Sense strand starting at position 1188 of SEQ ID NO: 916491
cgaguugcuucagggucau

SEQ ID NO: 1160851 - RNA, 19 nt, Artificial Sequence
  Description of Artificial Sequence: Synthetic oligonucleotide
  Antisense strand to SEQ ID NO: 1160850
augacccugaagcaacucg

SEQ ID NO: 1160852 - RNA, 19 nt, Artificial Sequence
  Description of Artificial Sequence: Synthetic oligonucleotide
  Sense strand starting at position 1200 of SEQ ID NO: 916491
gggucaugcgugugcaucu

SEQ ID NO: 1160853 - RNA, 19 nt, Artificial Sequence
  Description of Artificial Sequence: Synthetic oligonucleotide
  Antisense strand to SEQ ID NO: 1160852
agaugcacacgcaugaccc

SEQ ID NO: 1160854 - RNA, 19 nt, Artificial Sequence
  Description of Artificial Sequence: Synthetic oligonucleotide
  Sense strand starting at position 2002 of SEQ ID NO: 916491
gucccaguuucuuugaagu

SEQ ID NO: 1160855 - RNA, 19 nt, Artificial Sequence
  Description of Artificial Sequence: Synthetic oligonucleotide
  Antisense strand to SEQ ID NO: 1160854
acuucaaagaaacugggac

SEQ ID NO: 1160856 - RNA, 19 nt, Artificial Sequence
  Description of Artificial Sequence: Synthetic oligonucleotide
  Sense strand starting at position 2004 of SEQ ID NO: 916491
cccaguuucuuugaaguca

SEQ ID NO: 1160857 - RNA, 19 nt, Artificial Sequence
  Description of Artificial Sequence: Synthetic oligonucleotide
  Antisense strand to SEQ ID NO: 1160856
ugacuucaaagaaacuggg

SEQ ID NO: 1160858 - RNA, 19 nt, Artificial Sequence
  Description of Artificial Sequence: Synthetic oligonucleotide
  Sense strand starting at position 2166 of SEQ ID NO: 916491
uccguaucaucuccucaag

SEQ ID NO: 1160859 - RNA, 19 nt, Artificial Sequence
  Description of Artificial Sequence: Synthetic oligonucleotide
  Antisense strand to SEQ ID NO: 1160858
cuugaggagaugauacgga

SEQ ID NO: 1160860 - RNA, 19 nt, Artificial Sequence
  Description of Artificial Sequence: Synthetic oligonucleotide
  Sense strand starting at position 2168 of SEQ ID NO: 916491
cguaucaucuccucaagag

SEQ ID NO: 1160861 - RNA, 19 nt, Artificial Sequence
  Description of Artificial Sequence: Synthetic oligonucleotide
  Antisense strand to SEQ ID NO: 1160860
cucuugaggagaugauacg

SEQ ID NO: 1160862 - RNA, 19 nt, Artificial Sequence
  Description of Artificial Sequence: Synthetic oligonucleotide
  Sense strand starting at position 2169 of SEQ ID NO: 916491
guaucaucuccucaagagc

SEQ ID NO: 1160863 - RNA, 19 nt, Artificial Sequence
  Description of Artificial Sequence: Synthetic oligonucleotide
  Antisense strand to SEQ ID NO: 1160862
gcucuugaggagaugauac

SEQ ID NO: 1160864 - RNA, 19 nt, Artificial Sequence
  Description of Artificial Sequence: Synthetic oligonucleotide
  Sense strand starting at position 2201 of SEQ ID NO: 916491
ccaucucacuaaggguaaa

SEQ ID NO: 1160865 - RNA, 19 nt, Artificial Sequence
  Description of Artificial Sequence: Synthetic oligonucleotide
  Antisense strand to SEQ ID NO: 1160864
uuuacccuuagugagaugg

SEQ ID NO: 1160866 - RNA, 19 nt, Artificial Sequence
  Description of Artificial Sequence: Synthetic oligonucleotide
  Sense strand starting at position 2337 of SEQ ID NO: 916491
gcacacuguucccuguaca

SEQ ID NO: 1160867 - RNA, 19 nt, Artificial Sequence
  Description of Artificial Sequence: Synthetic oligonucleotide
  Antisense strand to SEQ ID NO: 1160866
uguacagggaacagugugc

SEQ ID NO: 1160868 - RNA, 19 nt, Artificial Sequence
  Description of Artificial Sequence: Synthetic oligonucleotide
  Sense strand starting at position 2340 of SEQ ID NO: 916491
cacuguucccuguacaguu

SEQ ID NO: 1160869 - RNA, 19 nt, Artificial Sequence
  Description of Artificial Sequence: Synthetic oligonucleotide
  Antisense strand to SEQ ID NO: 1160868
aacuguacagggaacagug

SEQ ID NO: 1160870 - RNA, 19 nt, Artificial Sequence
  Description of Artificial Sequence: Synthetic oligonucleotide
  Sense strand starting at position 2349 of SEQ ID NO: 916491
cuguacaguucuucuccaa

SEQ ID NO: 1160871 - RNA, 19 nt, Artificial Sequence
  Description of Artificial Sequence: Synthetic oligonucleotide
  Antisense strand to SEQ ID NO: 1160870
uuggagaagaacuguacag

SEQ ID NO: 1160872 - RNA, 19 nt, Artificial Sequence
  Description of Artificial Sequence: Synthetic oligonucleotide
  Sense strand starting at position 2364 of SEQ ID NO: 916491
ccaagauauccacgugguu

SEQ ID NO: 1160873 - RNA, 19 nt, Artificial Sequence
  Description of Artificial Sequence: Synthetic oligonucleotide
  Antisense strand to SEQ ID NO: 1160872
aaccacguggauaucuugg

SEQ ID NO: 1160874 - RNA, 19 nt, Artificial Sequence
  Description of Artificial Sequence: Synthetic oligonucleotide
  Sense strand starting at position 2871 of SEQ ID NO: 916491
ugcaguacacuauguauuu

SEQ ID NO: 1160875 - RNA, 19 nt, Artificial Sequence
  Description of Artificial Sequence: Synthetic oligonucleotide
  Antisense strand to SEQ ID NO: 1160874
aaauacauaguguacugca

SEQ ID NO: 1160876 - RNA, 19 nt, Artificial Sequence
  Description of Artificial Sequence: Synthetic oligonucleotide
  Sense strand starting at position 3488 of SEQ ID NO: 916491
aagacuucgucucuaagua

SEQ ID NO: 1160877 - RNA, 19 nt, Artificial Sequence
  Description of Artificial Sequence: Synthetic oligonucleotide
  Antisense strand to SEQ ID NO: 1160876
uacuuagagacgaagucuu

SEQ ID NO: 1160878 - RNA, 19 nt, Artificial Sequence
  Description of Artificial Sequence: Synthetic oligonucleotide
  Sense strand starting at position 3489 of SEQ ID NO: 916491
agacuucgucucuaaguaa

SEQ ID NO: 1160879 - RNA, 19 nt, Artificial Sequence
  Description of Artificial Sequence: Synthetic oligonucleotide
  Antisense strand to SEQ ID NO: 1160878
uuacuuagagacgaagucu

SEQ ID NO: 1160880 - RNA, 19 nt, Artificial Sequence
  Description of Artificial Sequence: Synthetic oligonucleotide
  Sense strand starting at position 3492 of SEQ ID NO: 916491
cuucgucucuaaguaaaua

SEQ ID NO: 1160881 - RNA, 19 nt, Artificial Sequence
  Description of Artificial Sequence: Synthetic oligonucleotide
  Antisense strand to SEQ ID NO: 1160880
uauuuacuuagagacgaag

SEQ ID NO: 1160882 - RNA, 19 nt, Artificial Sequence
  Description of Artificial Sequence: Synthetic oligonucleotide
  Sense strand starting at position 3578 of SEQ ID NO: 916491
uaaagcagucauugauaag

SEQ ID NO: 1160883 - RNA, 19 nt, Artificial Sequence
  Description of Artificial Sequence: Synthetic oligonucleotide
  Antisense strand to SEQ ID NO: 1160882
cuuaucaaugacugcuuua

SEQ ID NO: 1160884 - RNA, 19 nt, Artificial Sequence
  Description of Artificial Sequence: Synthetic oligonucleotide
  Sense strand starting at position 3581 of SEQ ID NO: 916491
agcagucauugauaaguau

SEQ ID NO: 1160885 - RNA, 19 nt, Artificial Sequence
  Description of Artificial Sequence: Synthetic oligonucleotide
  Antisense strand to SEQ ID NO: 1160884
auacuuaucaaugacugcu

SEQ ID NO: 1160886 - RNA, 19 nt, Artificial Sequence
  Description of Artificial Sequence: Synthetic oligonucleotide
  Sense strand starting at position 3664 of SEQ ID NO: 916491
aguacuggcccauauuaac

SEQ ID NO: 1160887 - RNA, 19 nt, Artificial Sequence
  Description of Artificial Sequence: Synthetic oligonucleotide
  Antisense strand to SEQ ID NO: 1160886
guuaauaugggccaguacu

SEQ ID NO: 1160888 - RNA, 19 nt, Artificial Sequence
  Description of Artificial Sequence: Synthetic oligonucleotide
  Sense strand starting at position 3695 of SEQ ID NO: 916491
aucaguuauuauguaccua

SEQ ID NO: 1160889 - RNA, 19 nt, Artificial Sequence
  Description of Artificial Sequence: Synthetic oligonucleotide
  Antisense strand to SEQ ID NO: 1160888
uagguacauaauaacugau

SEQ ID NO: 1160890 - RNA, 19 nt, Artificial Sequence
  Description of Artificial Sequence: Synthetic oligonucleotide
  Sense strand starting at position 3699 of SEQ ID NO: 916491
guuauuauguaccuaagga

SEQ ID NO: 1160891 - RNA, 19 nt, Artificial Sequence
  Description of Artificial Sequence: Synthetic oligonucleotide
  Antisense strand to SEQ ID NO: 1160890
uccuuagguacauaauaac

SEQ ID NO: 1160892 - RNA, 19 nt, Artificial Sequence
  Description of Artificial Sequence: Synthetic oligonucleotide
  Sense strand starting at position 3703 of SEQ ID NO: 916491
uuauguaccuaaggaguuu

SEQ ID NO: 1160893 - RNA, 19 nt, Artificial Sequence
  Description of Artificial Sequence: Synthetic oligonucleotide
  Antisense strand to SEQ ID NO: 1160892
aaacuccuuagguacauaa

SEQ ID NO: 1160894 - RNA, 19 nt, Artificial Sequence
  Description of Artificial Sequence: Synthetic oligonucleotide
  Sense strand starting at position 3736 of SEQ ID NO: 916491
ccaacugcuguaggugaau

SEQ ID NO: 1160895 - RNA, 19 nt, Artificial Sequence
  Description of Artificial Sequence: Synthetic oligonucleotide
  Antisense strand to SEQ ID NO: 1160894
auucaccuacagcaguugg

SEQ ID NO: 1160896 - RNA, 19 nt, Artificial Sequence
  Description of Artificial Sequence: Synthetic oligonucleotide
  Sense strand starting at position 3739 of SEQ ID NO: 916491
acugcuguaggugaauuau

SEQ ID NO: 1160897 - RNA, 19 nt, Artificial Sequence
  Description of Artificial Sequence: Synthetic oligonucleotide
  Antisense strand to SEQ ID NO: 1160896
auaauucaccuacagcagu

SEQ ID NO: 1160898 - RNA, 19 nt, Artificial Sequence
  Description of Artificial Sequence: Synthetic oligonucleotide
  Sense strand starting at position 3745 of SEQ ID NO: 916491
guaggugaauuaucucauc

SEQ ID NO: 1160899 - RNA, 19 nt, Artificial Sequence
  Description of Artificial Sequence: Synthetic oligonucleotide
  Antisense strand to SEQ ID NO: 1160898
gaugagauaauucaccuac

SEQ ID NO: 1160900 - RNA, 19 nt, Artificial Sequence
  Description of Artificial Sequence: Synthetic oligonucleotide
  Sense strand starting at position 3748 of SEQ ID NO: 916491
ggugaauuaucucaucuga

SEQ ID NO: 1160901 - RNA, 19 nt, Artificial Sequence
  Description of Artificial Sequence: Synthetic oligonucleotide
  Antisense strand to SEQ ID NO: 1160900
ucagaugagauaauucacc

SEQ ID NO: 1160902 - RNA, 19 nt, Artificial Sequence
  Description of Artificial Sequence: Synthetic oligonucleotide
  Sense strand starting at position 3785 of SEQ ID NO: 916491
guagguacuaaccagaguu

SEQ ID NO: 1160903 - RNA, 19 nt, Artificial Sequence
  Description of Artificial Sequence: Synthetic oligonucleotide
  Antisense strand to SEQ ID NO: 1160902
aacucugguuaguaccuac

SEQ ID NO: 1160904 - RNA, 19 nt, Artificial Sequence
  Description of Artificial Sequence: Synthetic oligonucleotide
  Sense strand starting at position 3802 of SEQ ID NO: 916491
uuggaaagguuagguaaca

SEQ ID NO: 1160905 - RNA, 19 nt, Artificial Sequence
  Description of Artificial Sequence: Synthetic oligonucleotide
  Antisense strand to SEQ ID NO: 1160904
uguuaccuaaccuuuccaa

SEQ ID NO: 1160906 - RNA, 19 nt, Artificial Sequence
  Description of Artificial Sequence: Synthetic oligonucleotide
  Sense strand starting at position 3803 of SEQ ID NO: 916491
uggaaagguuagguaacau

SEQ ID NO: 1160907 - RNA, 19 nt, Artificial Sequence
  Description of Artificial Sequence: Synthetic oligonucleotide
  Antisense strand to SEQ ID NO: 1160906
auguuaccuaaccuuucca

SEQ ID NO: 1160908 - RNA, 19 nt, Artificial Sequence
  Description of Artificial Sequence: Synthetic oligonucleotide
  Sense strand starting at position 3812 of SEQ ID NO: 916491
uagguaacauguuuagagu

SEQ ID NO: 1160909 - RNA, 19 nt, Artificial Sequence
  Description of Artificial Sequence: Synthetic oligonucleotide
  Antisense strand to SEQ ID NO: 1160908
acucuaaacauguuaccua

SEQ ID NO: 1160910 - RNA, 19 nt, Artificial Sequence
  Description of Artificial Sequence: Synthetic oligonucleotide
  Sense strand starting at position 3813 of SEQ ID NO: 916491
agguaacauguuuagaguu

SEQ ID NO: 1160911 - RNA, 19 nt, Artificial Sequence
  Description of Artificial Sequence: Synthetic oligonucleotide
  Antisense strand to SEQ ID NO: 1160910
aacucuaaacauguuaccu

SEQ ID NO: 1160912 - RNA, 19 nt, Artificial Sequence
  Description of Artificial Sequence: Synthetic oligonucleotide
  Sense strand starting at position 3815 of SEQ ID NO: 916491
guaacauguuuagaguuac

SEQ ID NO: 1160913 - RNA, 19 nt, Artificial Sequence
  Description of Artificial Sequence: Synthetic oligonucleotide
  Antisense strand to SEQ ID NO: 1160912
guaacucuaaacauguuac

SEQ ID NO: 1160914 - RNA, 19 nt, Artificial Sequence
  Description of Artificial Sequence: Synthetic oligonucleotide
  Sense strand starting at position 3821 of SEQ ID NO: 916491
uguuuagaguuacauagua

SEQ ID NO: 1160915 - RNA, 19 nt, Artificial Sequence
  Description of Artificial Sequence: Synthetic oligonucleotide
  Antisense strand to SEQ ID NO: 1160914
uacuauguaacucuaaaca

SEQ ID NO: 1160916 - RNA, 19 nt, Artificial Sequence
  Description of Artificial Sequence: Synthetic oligonucleotide
  Sense strand starting at position 3873 of SEQ ID NO: 916491
guuccaagcucacauaguu

SEQ ID NO: 1160917 - RNA, 19 nt, Artificial Sequence
  Description of Artificial Sequence: Synthetic oligonucleotide
  Antisense strand to SEQ ID NO: 1160916
aacuaugugagcuuggaac

SEQ ID NO: 1160918 - RNA, 19 nt, Artificial Sequence
  Description of Artificial Sequence: Synthetic oligonucleotide
  Sense strand starting at position 1292 of SEQ ID NO: 916492
gagucagagccauauccau

SEQ ID NO: 1160919 - RNA, 19 nt, Artificial Sequence
  Description of Artificial Sequence: Synthetic oligonucleotide
  Antisense strand to SEQ ID NO: 1160918
auggauauggcucugacuc

SEQ ID NO: 1160920 - RNA, 19 nt, Artificial Sequence
  Description of Artificial Sequence: Synthetic oligonucleotide
  Sense strand starting at position 1440 of SEQ ID NO: 916492
aaagcugucuccuaggaca

SEQ ID NO: 1160921 - RNA, 19 nt, Artificial Sequence
  Description of Artificial Sequence: Synthetic oligonucleotide
  Antisense strand to SEQ ID NO: 1160920
uguccuaggagacagcuuu

SEQ ID NO: 1160922 - RNA, 19 nt, Artificial Sequence
  Description of Artificial Sequence: Synthetic oligonucleotide
  Sense strand starting at position 1511 of SEQ ID NO: 916492
cauccuugccugugaagag

SEQ ID NO: 1160923 - RNA, 19 nt, Artificial Sequence
  Description of Artificial Sequence: Synthetic oligonucleotide
  Antisense strand to SEQ ID NO: 1160922
cucuucacaggcaaggaug

SEQ ID NO: 1160924 - RNA, 19 nt, Artificial Sequence
  Description of Artificial Sequence: Synthetic oligonucleotide
  Sense strand starting at position 1589 of SEQ ID NO: 916492
ccguacacuuccuucuauu

SEQ ID NO: 1160925 - RNA, 19 nt, Artificial Sequence
  Description of Artificial Sequence: Synthetic oligonucleotide
  Antisense strand to SEQ ID NO: 1160924
aauagaaggaaguguacgg

SEQ ID NO: 1160926 - RNA, 19 nt, Artificial Sequence
  Description of Artificial Sequence: Synthetic oligonucleotide
  Sense strand starting at position 1694 of SEQ ID NO: 916492
cgaguugcuucagggucau

SEQ ID NO: 1160927 - RNA, 19 nt, Artificial Sequence
  Description of Artificial Sequence: Synthetic oligonucleotide
  Antisense strand to SEQ ID NO: 1160926
augacccugaagcaacucg

SEQ ID NO: 1160928 - RNA, 19 nt, Artificial Sequence
  Description of Artificial Sequence: Synthetic oligonucleotide
  Sense strand starting at position 1706 of SEQ ID NO: 916492
gggucaugcgugugcaucu

SEQ ID NO: 1160929 - RNA, 19 nt, Artificial Sequence
  Description of Artificial Sequence: Synthetic oligonucleotide
  Antisense strand to SEQ ID NO: 1160928
agaugcacacgcaugaccc

SEQ ID NO: 1160930 - RNA, 19 nt, Artificial Sequence
  Description of Artificial Sequence: Synthetic oligonucleotide
  Sense strand starting at position 2508 of SEQ ID NO: 916492
gucccaguuucuuugaagu

SEQ ID NO: 1160931 - RNA, 19 nt, Artificial Sequence
  Description of Artificial Sequence: Synthetic oligonucleotide
  Antisense strand to SEQ ID NO: 1160930
acuucaaagaaacugggac

SEQ ID NO: 1160932 - RNA, 19 nt, Artificial Sequence
  Description of Artificial Sequence: Synthetic oligonucleotide
  Sense strand starting at position 2510 of SEQ ID NO: 916492
cccaguuucuuugaaguca

SEQ ID NO: 1160933 - RNA, 19 nt, Artificial Sequence
  Description of Artificial Sequence: Synthetic oligonucleotide
  Antisense strand to SEQ ID NO: 1160932
ugacuucaaagaaacuggg

SEQ ID NO: 1160934 - RNA, 19 nt, Artificial Sequence
  Description of Artificial Sequence: Synthetic oligonucleotide
  Sense strand starting at position 2672 of SEQ ID NO: 916492
uccguaucaucuccucaag

SEQ ID NO: 1160935 - RNA, 19 nt, Artificial Sequence
  Description of Artificial Sequence: Synthetic oligonucleotide
  Antisense strand to SEQ ID NO: 1160934
cuugaggagaugauacgga

SEQ ID NO: 1160936 - RNA, 19 nt, Artificial Sequence
  Description of Artificial Sequence: Synthetic oligonucleotide
  Sense strand starting at position 2674 of SEQ ID NO: 916492
cguaucaucuccucaagag

SEQ ID NO: 1160937 - RNA, 19 nt, Artificial Sequence
  Description of Artificial Sequence: Synthetic oligonucleotide
  Antisense strand to SEQ ID NO: 1160936
cucuugaggagaugauacg

SEQ ID NO: 1160938 - RNA, 19 nt, Artificial Sequence
  Description of Artificial Sequence: Synthetic oligonucleotide
  Sense strand starting at position 2675 of SEQ ID NO: 916492
guaucaucuccucaagagc

SEQ ID NO: 1160939 - RNA, 19 nt, Artificial Sequence
  Description of Artificial Sequence: Synthetic oligonucleotide
  Antisense strand to SEQ ID NO: 1160938
gcucuugaggagaugauac

SEQ ID NO: 1160940 - RNA, 19 nt, Artificial Sequence
  Description of Artificial Sequence: Synthetic oligonucleotide
  Sense strand starting at position 2707 of SEQ ID NO: 916492
ccaucucacuaaggguaaa

SEQ ID NO: 1160941 - RNA, 19 nt, Artificial Sequence
  Description of Artificial Sequence: Synthetic oligonucleotide
  Antisense strand to SEQ ID NO: 1160940
uuuacccuuagugagaugg

SEQ ID NO: 1160942 - RNA, 19 nt, Artificial Sequence
  Description of Artificial Sequence: Synthetic oligonucleotide
  Sense strand starting at position 2843 of SEQ ID NO: 916492
gcacacuguucccuguaca

SEQ ID NO: 1160943 - RNA, 19 nt, Artificial Sequence
  Description of Artificial Sequence: Synthetic oligonucleotide
  Antisense strand to SEQ ID NO: 1160942
uguacagggaacagugugc

SEQ ID NO: 1160944 - RNA, 19 nt, Artificial Sequence
  Description of Artificial Sequence: Synthetic oligonucleotide
  Sense strand starting at position 2846 of SEQ ID NO: 916492
cacuguucccuguacaguu

SEQ ID NO: 1160945 - RNA, 19 nt, Artificial Sequence
  Description of Artificial Sequence: Synthetic oligonucleotide
  Antisense strand to SEQ ID NO: 1160944
aacuguacagggaacagug

SEQ ID NO: 1160946 - RNA, 19 nt, Artificial Sequence
  Description of Artificial Sequence: Synthetic oligonucleotide
  Sense strand starting at position 2855 of SEQ ID NO: 916492
cuguacaguucuucuccaa

SEQ ID NO: 1160947 - RNA, 19 nt, Artificial Sequence
  Description of Artificial Sequence: Synthetic oligonucleotide
  Antisense strand to SEQ ID NO: 1160946
uuggagaagaacuguacag

SEQ ID NO: 1160948 - RNA, 19 nt, Artificial Sequence
  Description of Artificial Sequence: Synthetic oligonucleotide
  Sense strand starting at position 2870 of SEQ ID NO: 916492
ccaagauauccacgugguu

SEQ ID NO: 1160949 - RNA, 19 nt, Artificial Sequence
  Description of Artificial Sequence: Synthetic oligonucleotide
  Antisense strand to SEQ ID NO: 1160948
aaccacguggauaucuugg

SEQ ID NO: 1160950 - RNA, 19 nt, Artificial Sequence
  Description of Artificial Sequence: Synthetic oligonucleotide
  Sense strand starting at position 3377 of SEQ ID NO: 916492
ugcaguacacuauguauuu

SEQ ID NO: 1160951 - RNA, 19 nt, Artificial Sequence
  Description of Artificial Sequence: Synthetic oligonucleotide
  Antisense strand to SEQ ID NO: 1160950
aaauacauaguguacugca

SEQ ID NO: 1160952 - RNA, 19 nt, Artificial Sequence
  Description of Artificial Sequence: Synthetic oligonucleotide
  Sense strand starting at position 29 of SEQ ID NO: 916493
ggaagagucaguuguaauu

SEQ ID NO: 1160953 - RNA, 19 nt, Artificial Sequence
  Description of Artificial Sequence: Synthetic oligonucleotide
  Antisense strand to SEQ ID NO: 1160952
aauuacaacugacucuucc

SEQ ID NO: 1160954 - RNA, 19 nt, Artificial Sequence
  Description of Artificial Sequence: Synthetic oligonucleotide
  Sense strand starting at position 77 of SEQ ID NO: 916493
guuaaaucacuguauccuc

SEQ ID NO: 1160955 - RNA, 19 nt, Artificial Sequence
  Description of Artificial Sequence: Synthetic oligonucleotide
  Antisense strand to SEQ ID NO: 1160954
gaggauacagugauuuaac

SEQ ID NO: 1160956 - RNA, 19 nt, Artificial Sequence
  Description of Artificial Sequence: Synthetic oligonucleotide
  Sense strand starting at position 171 of SEQ ID NO: 916493
guagguuuaaauuagagcu

SEQ ID NO: 1160957 - RNA, 19 nt, Artificial Sequence
  Description of Artificial Sequence: Synthetic oligonucleotide
  Antisense strand to SEQ ID NO: 1160956
agcucuaauuuaaaccuac

SEQ ID NO: 1160958 - RNA, 19 nt, Artificial Sequence
  Description of Artificial Sequence: Synthetic oligonucleotide
  Sense strand starting at position 277 of SEQ ID NO: 916493
agagaaagcuugccaaaug

SEQ ID NO: 1160959 - RNA, 19 nt, Artificial Sequence
  Description of Artificial Sequence: Synthetic oligonucleotide
  Antisense strand to SEQ ID NO: 1160958
cauuuggcaagcuuucucu

SEQ ID NO: 1160960 - RNA, 19 nt, Artificial Sequence
  Description of Artificial Sequence: Synthetic oligonucleotide
  Sense strand starting at position 296 of SEQ ID NO: 916493
gaggaauccguagggaaau

SEQ ID NO: 1160961 - RNA, 19 nt, Artificial Sequence
  Description of Artificial Sequence: Synthetic oligonucleotide
  Antisense strand to SEQ ID NO: 1160960
auuucccuacggauuccuc

SEQ ID NO: 1160962 - RNA, 19 nt, Artificial Sequence
  Description of Artificial Sequence: Synthetic oligonucleotide
  Sense strand starting at position 334 of SEQ ID NO: 916493
ccucaauuccuguaaaguu

SEQ ID NO: 1160963 - RNA, 19 nt, Artificial Sequence
  Description of Artificial Sequence: Synthetic oligonucleotide
  Antisense strand to SEQ ID NO: 1160962
aacuuuacaggaauugagg

SEQ ID NO: 1160964 - RNA, 19 nt, Artificial Sequence
  Description of Artificial Sequence: Synthetic oligonucleotide
  Sense strand starting at position 375 of SEQ ID NO: 916493
agucucuuugaggacuuua

SEQ ID NO: 1160965 - RNA, 19 nt, Artificial Sequence
  Description of Artificial Sequence: Synthetic oligonucleotide
  Antisense strand to SEQ ID NO: 1160964
uaaaguccucaaagagacu

SEQ ID NO: 1160966 - RNA, 19 nt, Artificial Sequence
  Description of Artificial Sequence: Synthetic oligonucleotide
  Sense strand starting at position 425 of SEQ ID NO: 916493
uuacaaucccugugaggaa

SEQ ID NO: 1160967 - RNA, 19 nt, Artificial Sequence
  Description of Artificial Sequence: Synthetic oligonucleotide
  Antisense strand to SEQ ID NO: 1160966
uuccucacagggauuguaa

SEQ ID NO: 1160968 - RNA, 19 nt, Artificial Sequence
  Description of Artificial Sequence: Synthetic oligonucleotide
  Sense strand starting at position 745 of SEQ ID NO: 916493
gcaacaauaugauagauuu

SEQ ID NO: 1160969 - RNA, 19 nt, Artificial Sequence
  Description of Artificial Sequence: Synthetic oligonucleotide
  Antisense strand to SEQ ID NO: 1160968
aaaucuaucauauuguugc

SEQ ID NO: 1160970 - RNA, 19 nt, Artificial Sequence
  Description of Artificial Sequence: Synthetic oligonucleotide
  Sense strand starting at position 803 of SEQ ID NO: 916493
gcucaagagcccuaauacu

SEQ ID NO: 1160971 - RNA, 19 nt, Artificial Sequence
  Description of Artificial Sequence: Synthetic oligonucleotide
  Antisense strand to SEQ ID NO: 1160970
aguauuagggcucuugagc

SEQ ID NO: 1160972 - RNA, 19 nt, Artificial Sequence
  Description of Artificial Sequence: Synthetic oligonucleotide
  Sense strand starting at position 827 of SEQ ID NO: 916493
uuuauaagaucacugugau

SEQ ID NO: 1160973 - RNA, 19 nt, Artificial Sequence
  Description of Artificial Sequence: Synthetic oligonucleotide
  Antisense strand to SEQ ID NO: 1160972
aucacagugaucuuauaaa

SEQ ID NO: 1160974 - RNA, 19 nt, Artificial Sequence
  Description of Artificial Sequence: Synthetic oligonucleotide
  Sense strand starting at position 828 of SEQ ID NO: 916493
uuauaagaucacugugauu

SEQ ID NO: 1160975 - RNA, 19 nt, Artificial Sequence
  Description of Artificial Sequence: Synthetic oligonucleotide
  Antisense strand to SEQ ID NO: 1160974
aaucacagugaucuuauaa

SEQ ID NO: 1160976 - RNA, 19 nt, Artificial Sequence
  Description of Artificial Sequence: Synthetic oligonucleotide
  Sense strand starting at position 830 of SEQ ID NO: 916493
auaagaucacugugauuac

SEQ ID NO: 1160977 - RNA, 19 nt, Artificial Sequence
  Description of Artificial Sequence: Synthetic oligonucleotide
  Antisense strand to SEQ ID NO: 1160976
guaaucacagugaucuuau

SEQ ID NO: 1160978 - RNA, 19 nt, Artificial Sequence
  Description of Artificial Sequence: Synthetic oligonucleotide
  Sense strand starting at position 833 of SEQ ID NO: 916493
agaucacugugauuacuau

SEQ ID NO: 1160979 - RNA, 19 nt, Artificial Sequence
  Description of Artificial Sequence: Synthetic oligonucleotide
  Antisense strand to SEQ ID NO: 1160978
auaguaaucacagugaucu

SEQ ID NO: 1160980 - RNA, 19 nt, Artificial Sequence
  Description of Artificial Sequence: Synthetic oligonucleotide
  Sense strand starting at position 839 of SEQ ID NO: 916493
cugugauuacuauaugcuu

SEQ ID NO: 1160981 - RNA, 19 nt, Artificial Sequence
  Description of Artificial Sequence: Synthetic oligonucleotide
  Antisense strand to SEQ ID NO: 1160980
aagcauauaguaaucacag

SEQ ID NO: 1160982 - RNA, 19 nt, Artificial Sequence
  Description of Artificial Sequence: Synthetic oligonucleotide
  Sense strand starting at position 1078 of SEQ ID NO: 916493
cuuguacuucuaugaaagg

SEQ ID NO: 1160983 - RNA, 19 nt, Artificial Sequence
  Description of Artificial Sequence: Synthetic oligonucleotide
  Antisense strand to SEQ ID NO: 1160982
ccuuucauagaaguacaag

SEQ ID NO: 1160984 - RNA, 19 nt, Artificial Sequence
  Description of Artificial Sequence: Synthetic oligonucleotide
  Sense strand starting at position 1088 of SEQ ID NO: 916493
uaugaaaggcauugagguu

SEQ ID NO: 1160985 - RNA, 19 nt, Artificial Sequence
  Description of Artificial Sequence: Synthetic oligonucleotide
  Antisense strand to SEQ ID NO: 1160984
aaccucaaugccuuucaua

SEQ ID NO: 1160986 - RNA, 19 nt, Artificial Sequence
  Description of Artificial Sequence: Synthetic oligonucleotide
  Sense strand starting at position 1332 of SEQ ID NO: 916493
auacaagcauuugagacaa

SEQ ID NO: 1160987 - RNA, 19 nt, Artificial Sequence
  Description of Artificial Sequence: Synthetic oligonucleotide
  Antisense strand to SEQ ID NO: 1160986
uugucucaaaugcuuguau

SEQ ID NO: 1160988 - RNA, 19 nt, Artificial Sequence
  Description of Artificial Sequence: Synthetic oligonucleotide
  Sense strand starting at position 1691 of SEQ ID NO: 916493
ggaucccuagcucauuaga

SEQ ID NO: 1160989 - RNA, 19 nt, Artificial Sequence
  Description of Artificial Sequence: Synthetic oligonucleotide
  Antisense strand to SEQ ID NO: 1160988
ucuaaugagcuagggaucc

SEQ ID NO: 1160990 - RNA, 19 nt, Artificial Sequence
  Description of Artificial Sequence: Synthetic oligonucleotide
  Sense strand starting at position 1777 of SEQ ID NO: 916493
gcccgauaacaauaaucca

SEQ ID NO: 1160991 - RNA, 19 nt, Artificial Sequence
  Description of Artificial Sequence: Synthetic oligonucleotide
  Antisense strand to SEQ ID NO: 1160990
uggauuauuguuaucgggc

SEQ ID NO: 1160992 - RNA, 19 nt, Artificial Sequence
  Description of Artificial Sequence: Synthetic oligonucleotide
  Sense strand starting at position 1806 of SEQ ID NO: 916493
ggcaauauccucugaucua

SEQ ID NO: 1160993 - RNA, 19 nt, Artificial Sequence
  Description of Artificial Sequence: Synthetic oligonucleotide
  Antisense strand to SEQ ID NO: 1160992
uagaucagaggauauugcc

SEQ ID NO: 1160994 - RNA, 19 nt, Artificial Sequence
  Description of Artificial Sequence: Synthetic oligonucleotide
  Sense strand starting at position 1837 of SEQ ID NO: 916493
ccaugacuugauggagagu

SEQ ID NO: 1160995 - RNA, 19 nt, Artificial Sequence
  Description of Artificial Sequence: Synthetic oligonucleotide
  Antisense strand to SEQ ID NO: 1160994
acucuccaucaagucaugg

SEQ ID NO: 1160996 - RNA, 19 nt, Artificial Sequence
  Description of Artificial Sequence: Synthetic oligonucleotide
  Sense strand starting at position 1901 of SEQ ID NO: 916493
aaauauuucuuggaaugug

SEQ ID NO: 1160997 - RNA, 19 nt, Artificial Sequence
  Description of Artificial Sequence: Synthetic oligonucleotide
  Antisense strand to SEQ ID NO: 1160996
cacauuccaagaaauauuu

SEQ ID NO: 1160998 - RNA, 19 nt, Artificial Sequence
  Description of Artificial Sequence: Synthetic oligonucleotide
  Sense strand starting at position 2453 of SEQ ID NO: 916493
gcaguaccucaauaugaau

SEQ ID NO: 1160999 - RNA, 19 nt, Artificial Sequence
  Description of Artificial Sequence: Synthetic oligonucleotide
  Antisense strand to SEQ ID NO: 1160998
auucauauugagguacugc

SEQ ID NO: 1161000 - RNA, 19 nt, Artificial Sequence
  Description of Artificial Sequence: Synthetic oligonucleotide
  Sense strand starting at position 3125 of SEQ ID NO: 916493
uauucuggauuugagauau

SEQ ID NO: 1161001 - RNA, 19 nt, Artificial Sequence
  Description of Artificial Sequence: Synthetic oligonucleotide
  Antisense strand to SEQ ID NO: 1161000
auaucucaaauccagaaua

SEQ ID NO: 1161002 - RNA, 19 nt, Artificial Sequence
  Description of Artificial Sequence: Synthetic oligonucleotide
  Sense strand starting at position 3165 of SEQ ID NO: 916493
auguauuggcaauacacaa

SEQ ID NO: 1161003 - RNA, 19 nt, Artificial Sequence
  Description of Artificial Sequence: Synthetic oligonucleotide
  Antisense strand to SEQ ID NO: 1161002
uuguguauugccaauacau

SEQ ID NO: 1161004 - RNA, 19 nt, Artificial Sequence
  Description of Artificial Sequence: Synthetic oligonucleotide
  Sense strand starting at position 3276 of SEQ ID NO: 916493
agcaucauaguccaugaga

SEQ ID NO: 1161005 - RNA, 19 nt, Artificial Sequence
  Description of Artificial Sequence: Synthetic oligonucleotide
  Antisense strand to SEQ ID NO: 1161004
ucucauggacuaugaugcu

SEQ ID NO: 1161006 - RNA, 19 nt, Artificial Sequence
  Description of Artificial Sequence: Synthetic oligonucleotide
  Sense strand starting at position 3287 of SEQ ID NO: 916493
ccaugagaauauguacauu

SEQ ID NO: 1161007 - RNA, 19 nt, Artificial Sequence
  Description of Artificial Sequence: Synthetic oligonucleotide
  Antisense strand to SEQ ID NO: 1161006
aauguacauauucucaugg

SEQ ID NO: 1161008 - RNA, 19 nt, Artificial Sequence
  Description of Artificial Sequence: Synthetic oligonucleotide
  Sense strand starting at position 3354 of SEQ ID NO: 916493
ucaacaugaugaucuguaa

SEQ ID NO: 1161009 - RNA, 19 nt, Artificial Sequence
  Description of Artificial Sequence: Synthetic oligonucleotide
  Antisense strand to SEQ ID NO: 1161008
uuacagaucaucauguuga

SEQ ID NO: 1161010 - RNA, 19 nt, Artificial Sequence
  Description of Artificial Sequence: Synthetic oligonucleotide
  Sense strand starting at position 3358 of SEQ ID NO: 916493
caugaugaucuguaaugcu

SEQ ID NO: 1161011 - RNA, 19 nt, Artificial Sequence
  Description of Artificial Sequence: Synthetic oligonucleotide
  Antisense strand to SEQ ID NO: 1161010
agcauuacagaucaucaug

SEQ ID NO: 1161012 - RNA, 19 nt, Artificial Sequence
  Description of Artificial Sequence: Synthetic oligonucleotide
  Sense strand starting at position 3377 of SEQ ID NO: 916493
cuaugucuauuugacauuu

SEQ ID NO: 1161013 - RNA, 19 nt, Artificial Sequence
  Description of Artificial Sequence: Synthetic oligonucleotide
  Antisense strand to SEQ ID NO: 1161012
aaaugucaaauagacauag

SEQ ID NO: 1161014 - RNA, 19 nt, Artificial Sequence
  Description of Artificial Sequence: Synthetic oligonucleotide
  Sense strand starting at position 3426 of SEQ ID NO: 916493
ggguuuccacacugugaga

SEQ ID NO: 1161015 - RNA, 19 nt, Artificial Sequence
  Description of Artificial Sequence: Synthetic oligonucleotide
  Antisense strand to SEQ ID NO: 1161014
ucucacaguguggaaaccc

SEQ ID NO: 1161016 - RNA, 19 nt, Artificial Sequence
  Description of Artificial Sequence: Synthetic oligonucleotide
  Sense strand starting at position 3428 of SEQ ID NO: 916493
guuuccacacugugagaga

SEQ ID NO: 1161017 - RNA, 19 nt, Artificial Sequence
  Description of Artificial Sequence: Synthetic oligonucleotide
  Antisense strand to SEQ ID NO: 1161016
ucucucacaguguggaaac

SEQ ID NO: 1161018 - RNA, 19 nt, Artificial Sequence
  Description of Artificial Sequence: Synthetic oligonucleotide
  Sense strand starting at position 3595 of SEQ ID NO: 916493
gcaagaugccuccaauccu

SEQ ID NO: 1161019 - RNA, 19 nt, Artificial Sequence
  Description of Artificial Sequence: Synthetic oligonucleotide
  Antisense strand to SEQ ID NO: 1161018
aggauuggaggcaucuugc

SEQ ID NO: 1161020 - RNA, 19 nt, Artificial Sequence
  Description of Artificial Sequence: Synthetic oligonucleotide
  Sense strand starting at position 3612 of SEQ ID NO: 916493
cuucuaccucuugagaagu

SEQ ID NO: 1161021 - RNA, 19 nt, Artificial Sequence
  Description of Artificial Sequence: Synthetic oligonucleotide
  Antisense strand to SEQ ID NO: 1161020
acuucucaagagguagaag

SEQ ID NO: 1161022 - RNA, 19 nt, Artificial Sequence
  Description of Artificial Sequence: Synthetic oligonucleotide
  Sense strand starting at position 3804 of SEQ ID NO: 916493
ugguguucagcgccuauga

SEQ ID NO: 1161023 - RNA, 19 nt, Artificial Sequence
  Description of Artificial Sequence: Synthetic oligonucleotide
  Antisense strand to SEQ ID NO: 1161022
ucauaggcgcugaacacca

SEQ ID NO: 1161024 - RNA, 19 nt, Artificial Sequence
  Description of Artificial Sequence: Synthetic oligonucleotide
  Sense strand starting at position 3805 of SEQ ID NO: 916493
gguguucagcgccuaugau

SEQ ID NO: 1161025 - RNA, 19 nt, Artificial Sequence
  Description of Artificial Sequence: Synthetic oligonucleotide
  Antisense strand to SEQ ID NO: 1161024
aucauaggcgcugaacacc

SEQ ID NO: 1161026 - RNA, 19 nt, Artificial Sequence
  Description of Artificial Sequence: Synthetic oligonucleotide
  Sense strand starting at position 3865 of SEQ ID NO: 916493
auugacaguugacugaaua

SEQ ID NO: 1161027 - RNA, 19 nt, Artificial Sequence
  Description of Artificial Sequence: Synthetic oligonucleotide
  Antisense strand to SEQ ID NO: 1161026
uauucagucaacugucaau

SEQ ID NO: 1161028 - RNA, 19 nt, Artificial Sequence
  Description of Artificial Sequence: Synthetic oligonucleotide
  Sense strand starting at position 3866 of SEQ ID NO: 916493
uugacaguugacugaauau

SEQ ID NO: 1161029 - RNA, 19 nt, Artificial Sequence
  Description of Artificial Sequence: Synthetic oligonucleotide
  Antisense strand to SEQ ID NO: 1161028
auauucagucaacugucaa

SEQ ID NO: 1161030 - RNA, 19 nt, Artificial Sequence
  Description of Artificial Sequence: Synthetic oligonucleotide
  Sense strand starting at position 3979 of SEQ ID NO: 916493
agaugucuaucuccaccua

SEQ ID NO: 1161031 - RNA, 19 nt, Artificial Sequence
  Description of Artificial Sequence: Synthetic oligonucleotide
  Antisense strand to SEQ ID NO: 1161030
uagguggagauagacaucu

SEQ ID NO: 1161032 - RNA, 19 nt, Artificial Sequence
  Description of Artificial Sequence: Synthetic oligonucleotide
  Sense strand starting at position 239 of SEQ ID NO: 916494
agaagagguucuuuaaugc

SEQ ID NO: 1161033 - RNA, 19 nt, Artificial Sequence
  Description of Artificial Sequence: Synthetic oligonucleotide
  Antisense strand to SEQ ID NO: 1161032
gcauuaaagaaccucuucu

SEQ ID NO: 1161034 - RNA, 19 nt, Artificial Sequence
  Description of Artificial Sequence: Synthetic oligonucleotide
  Sense strand starting at position 245 of SEQ ID NO: 916494
gguucuuuaaugcaaggga

SEQ ID NO: 1161035 - RNA, 19 nt, Artificial Sequence
  Description of Artificial Sequence: Synthetic oligonucleotide
  Antisense strand to SEQ ID NO: 1161034
ucccuugcauuaaagaacc

SEQ ID NO: 1161036 - RNA, 19 nt, Artificial Sequence
  Description of Artificial Sequence: Synthetic oligonucleotide
  Sense strand starting at position 462 of SEQ ID NO: 916494
uauauuuagcagugugguu

SEQ ID NO: 1161037 - RNA, 19 nt, Artificial Sequence
  Description of Artificial Sequence: Synthetic oligonucleotide
  Antisense strand to SEQ ID NO: 1161036
aaccacacugcuaaauaua

SEQ ID NO: 1161038 - RNA, 19 nt, Artificial Sequence
  Description of Artificial Sequence: Synthetic oligonucleotide
  Sense strand starting at position 464 of SEQ ID NO: 916494
uauuuagcagugugguuau

SEQ ID NO: 1161039 - RNA, 19 nt, Artificial Sequence
  Description of Artificial Sequence: Synthetic oligonucleotide
  Antisense strand to SEQ ID NO: 1161038
auaaccacacugcuaaaua

SEQ ID NO: 1161040 - RNA, 19 nt, Artificial Sequence
  Description of Artificial Sequence: Synthetic oligonucleotide
  Sense strand starting at position 645 of SEQ ID NO: 916494
cuuuaagugcuguacagaa

SEQ ID NO: 1161041 - RNA, 19 nt, Artificial Sequence
  Description of Artificial Sequence: Synthetic oligonucleotide
  Antisense strand to SEQ ID NO: 1161040
uucuguacagcacuuaaag

SEQ ID NO: 1161042 - RNA, 19 nt, Artificial Sequence
  Description of Artificial Sequence: Synthetic oligonucleotide
  Sense strand starting at position 670 of SEQ ID NO: 916494
agagaaccuucuucucuga

SEQ ID NO: 1161043 - RNA, 19 nt, Artificial Sequence
  Description of Artificial Sequence: Synthetic oligonucleotide
  Antisense strand to SEQ ID NO: 1161042
ucagagaagaagguucucu

SEQ ID NO: 1161044 - RNA, 19 nt, Artificial Sequence
  Description of Artificial Sequence: Synthetic oligonucleotide
  Sense strand starting at position 703 of SEQ ID NO: 916494
guuugagaacagggucaaa

SEQ ID NO: 1161045 - RNA, 19 nt, Artificial Sequence
  Description of Artificial Sequence: Synthetic oligonucleotide
  Antisense strand to SEQ ID NO: 1161044
uuugacccuguucucaaac

SEQ ID NO: 1161046 - RNA, 19 nt, Artificial Sequence
  Description of Artificial Sequence: Synthetic oligonucleotide
  Sense strand starting at position 752 of SEQ ID NO: 916494
gguuucuccaggcaagaga

SEQ ID NO: 1161047 - RNA, 19 nt, Artificial Sequence
  Description of Artificial Sequence: Synthetic oligonucleotide
  Antisense strand to SEQ ID NO: 1161046
ucucuugccuggagaaacc

SEQ ID NO: 1161048 - RNA, 19 nt, Artificial Sequence
  Description of Artificial Sequence: Synthetic oligonucleotide
  Sense strand starting at position 931 of SEQ ID NO: 916494
gauaucaaagccgaaguuu

SEQ ID NO: 1161049 - RNA, 19 nt, Artificial Sequence
  Description of Artificial Sequence: Synthetic oligonucleotide
  Antisense strand to SEQ ID NO: 1161048
aaacuucggcuuugauauc

SEQ ID NO: 1161050 - RNA, 19 nt, Artificial Sequence
  Description of Artificial Sequence: Synthetic oligonucleotide
  Sense strand starting at position 969 of SEQ ID NO: 916494
cugagcacagcagauaaau

SEQ ID NO: 1161051 - RNA, 19 nt, Artificial Sequence
  Description of Artificial Sequence: Synthetic oligonucleotide
  Antisense strand to SEQ ID NO: 1161050
auuuaucugcugugcucag

SEQ ID NO: 1161052 - RNA, 19 nt, Artificial Sequence
  Description of Artificial Sequence: Synthetic oligonucleotide
  Sense strand starting at position 1101 of SEQ ID NO: 916494
ugagaagcauaaucuuuau

SEQ ID NO: 1161053 - RNA, 19 nt, Artificial Sequence
  Description of Artificial Sequence: Synthetic oligonucleotide
  Antisense strand to SEQ ID NO: 1161052
auaaagauuaugcuucuca

SEQ ID NO: 1161054 - RNA, 19 nt, Artificial Sequence
  Description of Artificial Sequence: Synthetic oligonucleotide
  Sense strand starting at position 1104 of SEQ ID NO: 916494
gaagcauaaucuuuauggu

SEQ ID NO: 1161055 - RNA, 19 nt, Artificial Sequence
  Description of Artificial Sequence: Synthetic oligonucleotide
  Antisense strand to SEQ ID NO: 1161054
accauaaagauuaugcuuc

SEQ ID NO: 1161056 - RNA, 19 nt, Artificial Sequence
  Description of Artificial Sequence: Synthetic oligonucleotide
  Sense strand starting at position 1227 of SEQ ID NO: 916494
ugaacaaaugcagguauau

SEQ ID NO: 1161057 - RNA, 19 nt, Artificial Sequence
  Description of Artificial Sequence: Synthetic oligonucleotide
  Antisense strand to SEQ ID NO: 1161056
auauaccugcauuuguuca

SEQ ID NO: 1161058 - RNA, 19 nt, Artificial Sequence
  Description of Artificial Sequence: Synthetic oligonucleotide
  Sense strand starting at position 1382 of SEQ ID NO: 916494
auuguccagucccuagaaa

SEQ ID NO: 1161059 - RNA, 19 nt, Artificial Sequence
  Description of Artificial Sequence: Synthetic oligonucleotide
  Antisense strand to SEQ ID NO: 1161058
uuucuagggacuggacaau

SEQ ID NO: 1161060 - RNA, 19 nt, Artificial Sequence
  Description of Artificial Sequence: Synthetic oligonucleotide
  Sense strand starting at position 1533 of SEQ ID NO: 916494
gguaucuucuuucugaaau

SEQ ID NO: 1161061 - RNA, 19 nt, Artificial Sequence
  Description of Artificial Sequence: Synthetic oligonucleotide
  Antisense strand to SEQ ID NO: 1161060
auuucagaaagaagauacc

SEQ ID NO: 1161062 - RNA, 19 nt, Artificial Sequence
  Description of Artificial Sequence: Synthetic oligonucleotide
  Sense strand starting at position 1544 of SEQ ID NO: 916494
ucugaaauaugaguuucua

SEQ ID NO: 1161063 - RNA, 19 nt, Artificial Sequence
  Description of Artificial Sequence: Synthetic oligonucleotide
  Antisense strand to SEQ ID NO: 1161062
uagaaacucauauuucaga

SEQ ID NO: 1161064 - RNA, 19 nt, Artificial Sequence
  Description of Artificial Sequence: Synthetic oligonucleotide
  Sense strand starting at position 1587 of SEQ ID NO: 916494
cggguuugccuguuaaguu

SEQ ID NO: 1161065 - RNA, 19 nt, Artificial Sequence
  Description of Artificial Sequence: Synthetic oligonucleotide
  Antisense strand to SEQ ID NO: 1161064
aacuuaacaggcaaacccg

SEQ ID NO: 1161066 - RNA, 19 nt, Artificial Sequence
  Description of Artificial Sequence: Synthetic oligonucleotide
  Sense strand starting at position 1597 of SEQ ID NO: 916494
uguuaaguugcauaagacu

SEQ ID NO: 1161067 - RNA, 19 nt, Artificial Sequence
  Description of Artificial Sequence: Synthetic oligonucleotide
  Antisense strand to SEQ ID NO: 1161066
agucuuaugcaacuuaaca

SEQ ID NO: 1161068 - RNA, 19 nt, Artificial Sequence
  Description of Artificial Sequence: Synthetic oligonucleotide
  Sense strand starting at position 1605 of SEQ ID NO: 916494
ugcauaagacucuggauau

SEQ ID NO: 1161069 - RNA, 19 nt, Artificial Sequence
  Description of Artificial Sequence: Synthetic oligonucleotide
  Antisense strand to SEQ ID NO: 1161068
auauccagagucuuaugca

SEQ ID NO: 1161070 - RNA, 19 nt, Artificial Sequence
  Description of Artificial Sequence: Synthetic oligonucleotide
  Sense strand starting at position 1615 of SEQ ID NO: 916494
ucuggauauuuaggauaua

SEQ ID NO: 1161071 - RNA, 19 nt, Artificial Sequence
  Description of Artificial Sequence: Synthetic oligonucleotide
  Antisense strand to SEQ ID NO: 1161070
uauauccuaaauauccaga

SEQ ID NO: 1161072 - RNA, 19 nt, Artificial Sequence
  Description of Artificial Sequence: Synthetic oligonucleotide
  Sense strand starting at position 1616 of SEQ ID NO: 916494
cuggauauuuaggauauaa

SEQ ID NO: 1161073 - RNA, 19 nt, Artificial Sequence
  Description of Artificial Sequence: Synthetic oligonucleotide
  Antisense strand to SEQ ID NO: 1161072
uuauauccuaaauauccag

SEQ ID NO: 1161074 - RNA, 19 nt, Artificial Sequence
  Description of Artificial Sequence: Synthetic oligonucleotide
  Sense strand starting at position 1684 of SEQ ID NO: 916494
aaguaaugguacuuuaaga

SEQ ID NO: 1161075 - RNA, 19 nt, Artificial Sequence
  Description of Artificial Sequence: Synthetic oligonucleotide
  Antisense strand to SEQ ID NO: 1161074
ucuuaaaguaccauuacuu

SEQ ID NO: 1161076 - RNA, 19 nt, Artificial Sequence
  Description of Artificial Sequence: Synthetic oligonucleotide
  Sense strand starting at position 2126 of SEQ ID NO: 916494
gacuguguuacacaggaug

SEQ ID NO: 1161077 - RNA, 19 nt, Artificial Sequence
  Description of Artificial Sequence: Synthetic oligonucleotide
  Antisense strand to SEQ ID NO: 1161076
cauccuguguaacacaguc

SEQ ID NO: 1161078 - RNA, 19 nt, Artificial Sequence
  Description of Artificial Sequence: Synthetic oligonucleotide
  Sense strand starting at position 2264 of SEQ ID NO: 916494
ggguuugguccacagacag

SEQ ID NO: 1161079 - RNA, 19 nt, Artificial Sequence
  Description of Artificial Sequence: Synthetic oligonucleotide
  Antisense strand to SEQ ID NO: 1161078
cugucuguggaccaaaccc

SEQ ID NO: 1161080 - RNA, 19 nt, Artificial Sequence
  Description of Artificial Sequence: Synthetic oligonucleotide
  Sense strand starting at position 2276 of SEQ ID NO: 916494
cagacagagcccuaguguu

SEQ ID NO: 1161081 - RNA, 19 nt, Artificial Sequence
  Description of Artificial Sequence: Synthetic oligonucleotide
  Antisense strand to SEQ ID NO: 1161080
aacacuagggcucugucug

SEQ ID NO: 1161082 - RNA, 19 nt, Artificial Sequence
  Description of Artificial Sequence: Synthetic oligonucleotide
  Sense strand starting at position 2297 of SEQ ID NO: 916494
guuuguuacccugauugau

SEQ ID NO: 1161083 - RNA, 19 nt, Artificial Sequence
  Description of Artificial Sequence: Synthetic oligonucleotide
  Antisense strand to SEQ ID NO: 1161082
aucaaucaggguaacaaac

SEQ ID NO: 1161084 - RNA, 19 nt, Artificial Sequence
  Description of Artificial Sequence: Synthetic oligonucleotide
  Sense strand starting at position 2299 of SEQ ID NO: 916494
uuguuacccugauugauug

SEQ ID NO: 1161085 - RNA, 19 nt, Artificial Sequence
  Description of Artificial Sequence: Synthetic oligonucleotide
  Antisense strand to SEQ ID NO: 1161084
caaucaaucaggguaacaa

SEQ ID NO: 1161086 - RNA, 19 nt, Artificial Sequence
  Description of Artificial Sequence: Synthetic oligonucleotide
  Sense strand starting at position 2303 of SEQ ID NO: 916494
uacccugauugauugauga

SEQ ID NO: 1161087 - RNA, 19 nt, Artificial Sequence
  Description of Artificial Sequence: Synthetic oligonucleotide
  Antisense strand to SEQ ID NO: 1161086
ucaucaaucaaucagggua

SEQ ID NO: 1161088 - RNA, 19 nt, Artificial Sequence
  Description of Artificial Sequence: Synthetic oligonucleotide
  Sense strand starting at position 2379 of SEQ ID NO: 916494
ccucuucuucuaggagaac

SEQ ID NO: 1161089 - RNA, 19 nt, Artificial Sequence
  Description of Artificial Sequence: Synthetic oligonucleotide
  Antisense strand to SEQ ID NO: 1161088
guucuccuagaagaagagg

SEQ ID NO: 1161090 - RNA, 19 nt, Artificial Sequence
  Description of Artificial Sequence: Synthetic oligonucleotide
  Sense strand starting at position 2522 of SEQ ID NO: 916494
gguucaucaggauggagau

SEQ ID NO: 1161091 - RNA, 19 nt, Artificial Sequence
  Description of Artificial Sequence: Synthetic oligonucleotide
  Antisense strand to SEQ ID NO: 1161090
aucuccauccugaugaacc

SEQ ID NO: 1161092 - RNA, 19 nt, Artificial Sequence
  Description of Artificial Sequence: Synthetic oligonucleotide
  Sense strand starting at position 2648 of SEQ ID NO: 916494
guaucagugcuggaaagug

SEQ ID NO: 1161093 - RNA, 19 nt, Artificial Sequence
  Description of Artificial Sequence: Synthetic oligonucleotide
  Antisense strand to SEQ ID NO: 1161092
cacuuuccagcacugauac

SEQ ID NO: 1161094 - RNA, 19 nt, Artificial Sequence
  Description of Artificial Sequence: Synthetic oligonucleotide
  Sense strand starting at position 2681 of SEQ ID NO: 916494
ggguacuguucucucauuu

SEQ ID NO: 1161095 - RNA, 19 nt, Artificial Sequence
  Description of Artificial Sequence: Synthetic oligonucleotide
  Antisense strand to SEQ ID NO: 1161094
aaaugagagaacaguaccc

SEQ ID NO: 1161096 - RNA, 19 nt, Artificial Sequence
  Description of Artificial Sequence: Synthetic oligonucleotide
  Sense strand starting at position 2862 of SEQ ID NO: 916494
acuguaauguauccucaag

SEQ ID NO: 1161097 - RNA, 19 nt, Artificial Sequence
  Description of Artificial Sequence: Synthetic oligonucleotide
  Antisense strand to SEQ ID NO: 1161096
cuugaggauacauuacagu

SEQ ID NO: 1161098 - RNA, 19 nt, Artificial Sequence
  Description of Artificial Sequence: Synthetic oligonucleotide
  Sense strand starting at position 2957 of SEQ ID NO: 916494
gguuaucuuguauagagag

SEQ ID NO: 1161099 - RNA, 19 nt, Artificial Sequence
  Description of Artificial Sequence: Synthetic oligonucleotide
  Antisense strand to SEQ ID NO: 1161098
cucucuauacaagauaacc

SEQ ID NO: 1161100 - RNA, 19 nt, Artificial Sequence
  Description of Artificial Sequence: Synthetic oligonucleotide
  Sense strand starting at position 3137 of SEQ ID NO: 916494
ugacucuugagcuggaaca

SEQ ID NO: 1161101 - RNA, 19 nt, Artificial Sequence
  Description of Artificial Sequence: Synthetic oligonucleotide
  Antisense strand to SEQ ID NO: 1161100
uguuccagcucaagaguca

SEQ ID NO: 1161102 - RNA, 19 nt, Artificial Sequence
  Description of Artificial Sequence: Synthetic oligonucleotide
  Sense strand starting at position 3337 of SEQ ID NO: 916494
agaaauagcuccuuugaaa

SEQ ID NO: 1161103 - RNA, 19 nt, Artificial Sequence
  Description of Artificial Sequence: Synthetic oligonucleotide
  Antisense strand to SEQ ID NO: 1161102
uuucaaaggagcuauuucu

SEQ ID NO: 1161104 - RNA, 19 nt, Artificial Sequence
  Description of Artificial Sequence: Synthetic oligonucleotide
  Sense strand starting at position 3365 of SEQ ID NO: 916494
uugaguucugagggaucaa

SEQ ID NO: 1161105 - RNA, 19 nt, Artificial Sequence
  Description of Artificial Sequence: Synthetic oligonucleotide
  Antisense strand to SEQ ID NO: 1161104
uugaucccucagaacucaa

SEQ ID NO: 1161106 - RNA, 19 nt, Artificial Sequence
  Description of Artificial Sequence: Synthetic oligonucleotide
  Sense strand starting at position 3519 of SEQ ID NO: 916494
gcgguuguuccacucuuua

SEQ ID NO: 1161107 - RNA, 19 nt, Artificial Sequence
  Description of Artificial Sequence: Synthetic oligonucleotide
  Antisense strand to SEQ ID NO: 1161106
uaaagaguggaacaaccgc

SEQ ID NO: 1161108 - RNA, 19 nt, Artificial Sequence
  Description of Artificial Sequence: Synthetic oligonucleotide
  Sense strand starting at position 3663 of SEQ ID NO: 916494
gggacaagcuagccauaga

SEQ ID NO: 1161109 - RNA, 19 nt, Artificial Sequence
  Description of Artificial Sequence: Synthetic oligonucleotide
  Antisense strand to SEQ ID NO: 1161108
ucuauggcuagcuuguccc

SEQ ID NO: 1161110 - RNA, 19 nt, Artificial Sequence
  Description of Artificial Sequence: Synthetic oligonucleotide
  Sense strand starting at position 3664 of SEQ ID NO: 916494
ggacaagcuagccauagau

SEQ ID NO: 1161111 - RNA, 19 nt, Artificial Sequence
  Description of Artificial Sequence: Synthetic oligonucleotide
  Antisense strand to SEQ ID NO: 1161110
aucuauggcuagcuugucc

SEQ ID NO: 1161112 - RNA, 19 nt, Artificial Sequence
  Description of Artificial Sequence: Synthetic oligonucleotide
  Sense strand starting at position 64 of SEQ ID NO: 916495
uaccuuuaguauguaagga

SEQ ID NO: 1161113 - RNA, 19 nt, Artificial Sequence
  Description of Artificial Sequence: Synthetic oligonucleotide
  Antisense strand to SEQ ID NO: 1161112
uccuuacauacuaaaggua

SEQ ID NO: 1161114 - RNA, 19 nt, Artificial Sequence
  Description of Artificial Sequence: Synthetic oligonucleotide
  Sense strand starting at position 419 of SEQ ID NO: 916495
gaauaaucugggcacgcau

SEQ ID NO: 1161115 - RNA, 19 nt, Artificial Sequence
  Description of Artificial Sequence: Synthetic oligonucleotide
  Antisense strand to SEQ ID NO: 1161114
augcgugcccagauuauuc

SEQ ID NO: 1161116 - RNA, 19 nt, Artificial Sequence
  Description of Artificial Sequence: Synthetic oligonucleotide
  Sense strand starting at position 444 of SEQ ID NO: 916495
ggccaugacucugcaauuu

SEQ ID NO: 1161117 - RNA, 19 nt, Artificial Sequence
  Description of Artificial Sequence: Synthetic oligonucleotide
  Antisense strand to SEQ ID NO: 1161116
aaauugcagagucauggcc

SEQ ID NO: 1161118 - RNA, 19 nt, Artificial Sequence
  Description of Artificial Sequence: Synthetic oligonucleotide
  Sense strand starting at position 1055 of SEQ ID NO: 916495
cagcacucacuggguaaga

SEQ ID NO: 1161119 - RNA, 19 nt, Artificial Sequence
  Description of Artificial Sequence: Synthetic oligonucleotide
  Antisense strand to SEQ ID NO: 1161118
ucuuacccagugagugcug

SEQ ID NO: 1161120 - RNA, 19 nt, Artificial Sequence
  Description of Artificial Sequence: Synthetic oligonucleotide
  Sense strand starting at position 1056 of SEQ ID NO: 916495
agcacucacuggguaagaa

SEQ ID NO: 1161121 - RNA, 19 nt, Artificial Sequence
  Description of Artificial Sequence: Synthetic oligonucleotide
  Antisense strand to SEQ ID NO: 1161120
uucuuacccagugagugcu

SEQ ID NO: 1161122 - RNA, 19 nt, Artificial Sequence
  Description of Artificial Sequence: Synthetic oligonucleotide
  Sense strand starting at position 1094 of SEQ ID NO: 916495
ggaauauaaacguggagcu

SEQ ID NO: 1161123 - RNA, 19 nt, Artificial Sequence
  Description of Artificial Sequence: Synthetic oligonucleotide
  Antisense strand to SEQ ID NO: 1161122
agcuccacguuuauauucc

SEQ ID NO: 1161124 - RNA, 19 nt, Artificial Sequence
  Description of Artificial Sequence: Synthetic oligonucleotide
  Sense strand starting at position 1326 of SEQ ID NO: 916495
cuugucacuggcuauaaua

SEQ ID NO: 1161125 - RNA, 19 nt, Artificial Sequence
  Description of Artificial Sequence: Synthetic oligonucleotide
  Antisense strand to SEQ ID NO: 1161124
uauuauagccagugacaag

SEQ ID NO: 1161126 - RNA, 19 nt, Artificial Sequence
  Description of Artificial Sequence: Synthetic oligonucleotide
  Sense strand starting at position 1404 of SEQ ID NO: 916495
gcaguaguauuauuuagua

SEQ ID NO: 1161127 - RNA, 19 nt, Artificial Sequence
  Description of Artificial Sequence: Synthetic oligonucleotide
  Antisense strand to SEQ ID NO: 1161126
uacuaaauaauacuacugc

SEQ ID NO: 1161128 - RNA, 19 nt, Artificial Sequence
  Description of Artificial Sequence: Synthetic oligonucleotide
  Sense strand starting at position 1481 of SEQ ID NO: 916495
gccuuacaauaggcauaaa

SEQ ID NO: 1161129 - RNA, 19 nt, Artificial Sequence
  Description of Artificial Sequence: Synthetic oligonucleotide
  Antisense strand to SEQ ID NO: 1161128
uuuaugccuauuguaaggc

SEQ ID NO: 1161130 - RNA, 19 nt, Artificial Sequence
  Description of Artificial Sequence: Synthetic oligonucleotide
  Sense strand starting at position 1500 of SEQ ID NO: 916495
ggccacuaugcccaugaaa

SEQ ID NO: 1161131 - RNA, 19 nt, Artificial Sequence
  Description of Artificial Sequence: Synthetic oligonucleotide
  Antisense strand to SEQ ID NO: 1161130
uuucaugggcauaguggcc

SEQ ID NO: 1161132 - RNA, 19 nt, Artificial Sequence
  Description of Artificial Sequence: Synthetic oligonucleotide
  Sense strand starting at position 1640 of SEQ ID NO: 916495
acaggagguuacuuugacu

SEQ ID NO: 1161133 - RNA, 19 nt, Artificial Sequence
  Description of Artificial Sequence: Synthetic oligonucleotide
  Antisense strand to SEQ ID NO: 1161132
agucaaaguaaccuccugu

SEQ ID NO: 1161134 - RNA, 19 nt, Artificial Sequence
  Description of Artificial Sequence: Synthetic oligonucleotide
  Sense strand starting at position 1645 of SEQ ID NO: 916495
agguuacuuugacuugaaa

SEQ ID NO: 1161135 - RNA, 19 nt, Artificial Sequence
  Description of Artificial Sequence: Synthetic oligonucleotide
  Antisense strand to SEQ ID NO: 1161134
uuucaagucaaaguaaccu

SEQ ID NO: 1161136 - RNA, 19 nt, Artificial Sequence
  Description of Artificial Sequence: Synthetic oligonucleotide
  Sense strand starting at position 1662 of SEQ ID NO: 916495
aaaggcuaaguuuggaaau

SEQ ID NO: 1161137 - RNA, 19 nt, Artificial Sequence
  Description of Artificial Sequence: Synthetic oligonucleotide
  Antisense strand to SEQ ID NO: 1161136
auuuccaaacuuagccuuu

SEQ ID NO: 1161138 - RNA, 19 nt, Artificial Sequence
  Description of Artificial Sequence: Synthetic oligonucleotide
  Sense strand starting at position 1714 of SEQ ID NO: 916495
auuccuggaguuugagaaa

SEQ ID NO: 1161139 - RNA, 19 nt, Artificial Sequence
  Description of Artificial Sequence: Synthetic oligonucleotide
  Antisense strand to SEQ ID NO: 1161138
uuucucaaacuccaggaau

SEQ ID NO: 1161140 - RNA, 19 nt, Artificial Sequence
  Description of Artificial Sequence: Synthetic oligonucleotide
  Sense strand starting at position 2180 of SEQ ID NO: 916495
uagaaacucugguuccuga

SEQ ID NO: 1161141 - RNA, 19 nt, Artificial Sequence
  Description of Artificial Sequence: Synthetic oligonucleotide
  Antisense strand to SEQ ID NO: 1161140
ucaggaaccagaguuucua

SEQ ID NO: 1161142 - RNA, 19 nt, Artificial Sequence
  Description of Artificial Sequence: Synthetic oligonucleotide
  Sense strand starting at position 2252 of SEQ ID NO: 916495
cucugaauucucgaacauu

SEQ ID NO: 1161143 - RNA, 19 nt, Artificial Sequence
  Description of Artificial Sequence: Synthetic oligonucleotide
  Antisense strand to SEQ ID NO: 1161142
aauguucgagaauucagag

SEQ ID NO: 1161144 - RNA, 19 nt, Artificial Sequence
  Description of Artificial Sequence: Synthetic oligonucleotide
  Sense strand starting at position 2343 of SEQ ID NO: 916495
auuagcaggcauugacaau

SEQ ID NO: 1161145 - RNA, 19 nt, Artificial Sequence
  Description of Artificial Sequence: Synthetic oligonucleotide
  Antisense strand to SEQ ID NO: 1161144
auugucaaugccugcuaau

SEQ ID NO: 1161146 - RNA, 19 nt, Artificial Sequence
  Description of Artificial Sequence: Synthetic oligonucleotide
  Sense strand starting at position 2433 of SEQ ID NO: 916495
auguaacccucaguaaaga

SEQ ID NO: 1161147 - RNA, 19 nt, Artificial Sequence
  Description of Artificial Sequence: Synthetic oligonucleotide
  Antisense strand to SEQ ID NO: 1161146
ucuuuacugaggguuacau

SEQ ID NO: 1161148 - RNA, 19 nt, Artificial Sequence
  Description of Artificial Sequence: Synthetic oligonucleotide
  Sense strand starting at position 2434 of SEQ ID NO: 916495
uguaacccucaguaaagau

SEQ ID NO: 1161149 - RNA, 19 nt, Artificial Sequence
  Description of Artificial Sequence: Synthetic oligonucleotide
  Antisense strand to SEQ ID NO: 1161148
aucuuuacugaggguuaca

SEQ ID NO: 1161150 - RNA, 19 nt, Artificial Sequence
  Description of Artificial Sequence: Synthetic oligonucleotide
  Sense strand starting at position 2485 of SEQ ID NO: 916495
caauuugcuuugucacgau

SEQ ID NO: 1161151 - RNA, 19 nt, Artificial Sequence
  Description of Artificial Sequence: Synthetic oligonucleotide
  Antisense strand to SEQ ID NO: 1161150
aucgugacaaagcaaauug

SEQ ID NO: 1161152 - RNA, 19 nt, Artificial Sequence
  Description of Artificial Sequence: Synthetic oligonucleotide
  Sense strand starting at position 2548 of SEQ ID NO: 916495
acuggaucagcucauuaca

SEQ ID NO: 1161153 - RNA, 19 nt, Artificial Sequence
  Description of Artificial Sequence: Synthetic oligonucleotide
  Antisense strand to SEQ ID NO: 1161152
uguaaugagcugauccagu

SEQ ID NO: 1161154 - RNA, 19 nt, Artificial Sequence
  Description of Artificial Sequence: Synthetic oligonucleotide
  Sense strand starting at position 2593 of SEQ ID NO: 916495
ggagguuuagaggaacguu

SEQ ID NO: 1161155 - RNA, 19 nt, Artificial Sequence
  Description of Artificial Sequence: Synthetic oligonucleotide
  Antisense strand to SEQ ID NO: 1161154
aacguuccucuaaaccucc

SEQ ID NO: 1161156 - RNA, 19 nt, Artificial Sequence
  Description of Artificial Sequence: Synthetic oligonucleotide
  Sense strand starting at position 2619 of SEQ ID NO: 916495
gccguagauauuuagccua

SEQ ID NO: 1161157 - RNA, 19 nt, Artificial Sequence
  Description of Artificial Sequence: Synthetic oligonucleotide
  Antisense strand to SEQ ID NO: 1161156
uaggcuaaauaucuacggc

SEQ ID NO: 1161158 - RNA, 19 nt, Artificial Sequence
  Description of Artificial Sequence: Synthetic oligonucleotide
  Sense strand starting at position 2842 of SEQ ID NO: 916495
uccuuuaggcuuuaaagga

SEQ ID NO: 1161159 - RNA, 19 nt, Artificial Sequence
  Description of Artificial Sequence: Synthetic oligonucleotide
  Antisense strand to SEQ ID NO: 1161158
uccuuuaaagccuaaagga

SEQ ID NO: 1161160 - RNA, 19 nt, Artificial Sequence
  Description of Artificial Sequence: Synthetic oligonucleotide
  Sense strand starting at position 2876 of SEQ ID NO: 916495
cuuucuaggaugugaugga

SEQ ID NO: 1161161 - RNA, 19 nt, Artificial Sequence
  Description of Artificial Sequence: Synthetic oligonucleotide
  Antisense strand to SEQ ID NO: 1161160
uccaucacauccuagaaag

SEQ ID NO: 1161162 - RNA, 19 nt, Artificial Sequence
  Description of Artificial Sequence: Synthetic oligonucleotide
  Sense strand starting at position 2928 of SEQ ID NO: 916495
accaguuugcucuaggaac

SEQ ID NO: 1161163 - RNA, 19 nt, Artificial Sequence
  Description of Artificial Sequence: Synthetic oligonucleotide
  Antisense strand to SEQ ID NO: 1161162
guuccuagagcaaacuggu

SEQ ID NO: 1161164 - RNA, 19 nt, Artificial Sequence
  Description of Artificial Sequence: Synthetic oligonucleotide
  Sense strand starting at position 3085 of SEQ ID NO: 916495
cuuuguaaaguauacuaga

SEQ ID NO: 1161165 - RNA, 19 nt, Artificial Sequence
  Description of Artificial Sequence: Synthetic oligonucleotide
  Antisense strand to SEQ ID NO: 1161164
ucuaguauacuuuacaaag

SEQ ID NO: 1161166 - RNA, 19 nt, Artificial Sequence
  Description of Artificial Sequence: Synthetic oligonucleotide
  Sense strand starting at position 3096 of SEQ ID NO: 916495
auacuagaaucugucugua

SEQ ID NO: 1161167 - RNA, 19 nt, Artificial Sequence
  Description of Artificial Sequence: Synthetic oligonucleotide
  Antisense strand to SEQ ID NO: 1161166
uacagacagauucuaguau

SEQ ID NO: 1161168 - RNA, 19 nt, Artificial Sequence
  Description of Artificial Sequence: Synthetic oligonucleotide
  Sense strand starting at position 3098 of SEQ ID NO: 916495
acuagaaucugucuguaac

SEQ ID NO: 1161169 - RNA, 19 nt, Artificial Sequence
  Description of Artificial Sequence: Synthetic oligonucleotide
  Antisense strand to SEQ ID NO: 1161168
guuacagacagauucuagu

SEQ ID NO: 1161170 - RNA, 19 nt, Artificial Sequence
  Description of Artificial Sequence: Synthetic oligonucleotide
  Sense strand starting at position 3110 of SEQ ID NO: 916495
cuguaacauuaacuggaau

SEQ ID NO: 1161171 - RNA, 19 nt, Artificial Sequence
  Description of Artificial Sequence: Synthetic oligonucleotide
  Antisense strand to SEQ ID NO: 1161170
auuccaguuaauguuacag

SEQ ID NO: 1161172 - RNA, 19 nt, Artificial Sequence
  Description of Artificial Sequence: Synthetic oligonucleotide
  Sense strand starting at position 3159 of SEQ ID NO: 916495
ucugaauucucuccaaagg

SEQ ID NO: 1161173 - RNA, 19 nt, Artificial Sequence
  Description of Artificial Sequence: Synthetic oligonucleotide
  Antisense strand to SEQ ID NO: 1161172
ccuuuggagagaauucaga

SEQ ID NO: 1161174 - RNA, 19 nt, Artificial Sequence
  Description of Artificial Sequence: Synthetic oligonucleotide
  Sense strand starting at position 3170 of SEQ ID NO: 916495
uccaaaggaguuugguauu

SEQ ID NO: 1161175 - RNA, 19 nt, Artificial Sequence
  Description of Artificial Sequence: Synthetic oligonucleotide
  Antisense strand to SEQ ID NO: 1161174
aauaccaaacuccuuugga

SEQ ID NO: 1161176 - RNA, 19 nt, Artificial Sequence
  Description of Artificial Sequence: Synthetic oligonucleotide
  Sense strand starting at position 3222 of SEQ ID NO: 916495
ggugauacaggccaaaucu

SEQ ID NO: 1161177 - RNA, 19 nt, Artificial Sequence
  Description of Artificial Sequence: Synthetic oligonucleotide
  Antisense strand to SEQ ID NO: 1161176
agauuuggccuguaucacc

SEQ ID NO: 1161178 - RNA, 19 nt, Artificial Sequence
  Description of Artificial Sequence: Synthetic oligonucleotide
  Sense strand starting at position 3270 of SEQ ID NO: 916495
gagagcuacuguuuagaua

SEQ ID NO: 1161179 - RNA, 19 nt, Artificial Sequence
  Description of Artificial Sequence: Synthetic oligonucleotide
  Antisense strand to SEQ ID NO: 1161178
uaucuaaacaguagcucuc

SEQ ID NO: 1161180 - RNA, 19 nt, Artificial Sequence
  Description of Artificial Sequence: Synthetic oligonucleotide
  Sense strand starting at position 3271 of SEQ ID NO: 916495
agagcuacuguuuagauaa

SEQ ID NO: 1161181 - RNA, 19 nt, Artificial Sequence
  Description of Artificial Sequence: Synthetic oligonucleotide
  Antisense strand to SEQ ID NO: 1161180
uuaucuaaacaguagcucu

SEQ ID NO: 1161182 - RNA, 19 nt, Artificial Sequence
  Description of Artificial Sequence: Synthetic oligonucleotide
  Sense strand starting at position 3298 of SEQ ID NO: 916495
acagaaugcuaguugaaug

SEQ ID NO: 1161183 - RNA, 19 nt, Artificial Sequence
  Description of Artificial Sequence: Synthetic oligonucleotide
  Antisense strand to SEQ ID NO: 1161182
cauucaacuagcauucugu

SEQ ID NO: 1161184 - RNA, 19 nt, Artificial Sequence
  Description of Artificial Sequence: Synthetic oligonucleotide
  Sense strand starting at position 3430 of SEQ ID NO: 916495
cguuauccugccucagcau

SEQ ID NO: 1161185 - RNA, 19 nt, Artificial Sequence
  Description of Artificial Sequence: Synthetic oligonucleotide
  Antisense strand to SEQ ID NO: 1161184
augcugaggcaggauaacg

SEQ ID NO: 1161186 - RNA, 19 nt, Artificial Sequence
  Description of Artificial Sequence: Synthetic oligonucleotide
  Sense strand starting at position 3656 of SEQ ID NO: 916495
gcacuugacucaucuaaug

SEQ ID NO: 1161187 - RNA, 19 nt, Artificial Sequence
  Description of Artificial Sequence: Synthetic oligonucleotide
  Antisense strand to SEQ ID NO: 1161186
cauuagaugagucaagugc

SEQ ID NO: 1161188 - RNA, 19 nt, Artificial Sequence
  Description of Artificial Sequence: Synthetic oligonucleotide
  Sense strand starting at position 3801 of SEQ ID NO: 916495
uguaucaggcaauauuaua

SEQ ID NO: 1161189 - RNA, 19 nt, Artificial Sequence
  Description of Artificial Sequence: Synthetic oligonucleotide
  Antisense strand to SEQ ID NO: 1161188
uauaauauugccugauaca

SEQ ID NO: 1161190 - RNA, 19 nt, Artificial Sequence
  Description of Artificial Sequence: Synthetic oligonucleotide
  Sense strand starting at position 3957 of SEQ ID NO: 916495
agagcuguccuccaggauu

SEQ ID NO: 1161191 - RNA, 19 nt, Artificial Sequence
  Description of Artificial Sequence: Synthetic oligonucleotide
  Antisense strand to SEQ ID NO: 1161190
aauccuggaggacagcucu

SEQ ID NO: 1161192 - RNA, 19 nt, Artificial Sequence
  Description of Artificial Sequence: Synthetic oligonucleotide
  Sense strand starting at position 494 of SEQ ID NO: 916496
ucuuauaaugcuggguaga

SEQ ID NO: 1161193 - RNA, 19 nt, Artificial Sequence
  Description of Artificial Sequence: Synthetic oligonucleotide
  Antisense strand to SEQ ID NO: 1161192
ucuacccagcauuauaaga

SEQ ID NO: 1161194 - RNA, 19 nt, Artificial Sequence
  Description of Artificial Sequence: Synthetic oligonucleotide
  Sense strand starting at position 495 of SEQ ID NO: 916496
cuuauaaugcuggguagaa

SEQ ID NO: 1161195 - RNA, 19 nt, Artificial Sequence
  Description of Artificial Sequence: Synthetic oligonucleotide
  Antisense strand to SEQ ID NO: 1161194
uucuacccagcauuauaag

SEQ ID NO: 1161196 - RNA, 19 nt, Artificial Sequence
  Description of Artificial Sequence: Synthetic oligonucleotide
  Sense strand starting at position 496 of SEQ ID NO: 916496
uuauaaugcuggguagaaa

SEQ ID NO: 1161197 - RNA, 19 nt, Artificial Sequence
  Description of Artificial Sequence: Synthetic oligonucleotide
  Antisense strand to SEQ ID NO: 1161196
uuucuacccagcauuauaa

SEQ ID NO: 1161198 - RNA, 19 nt, Artificial Sequence
  Description of Artificial Sequence: Synthetic oligonucleotide
  Sense strand starting at position 563 of SEQ ID NO: 916496
auaugaggcucacuuugaa

SEQ ID NO: 1161199 - RNA, 19 nt, Artificial Sequence
  Description of Artificial Sequence: Synthetic oligonucleotide
  Antisense strand to SEQ ID NO: 1161198
uucaaagugagccucauau

SEQ ID NO: 1161200 - RNA, 19 nt, Artificial Sequence
  Description of Artificial Sequence: Synthetic oligonucleotide
  Sense strand starting at position 566 of SEQ ID NO: 916496
ugaggcucacuuugaaagu

SEQ ID NO: 1161201 - RNA, 19 nt, Artificial Sequence
  Description of Artificial Sequence: Synthetic oligonucleotide
  Antisense strand to SEQ ID NO: 1161200
acuuucaaagugagccuca

SEQ ID NO: 1161202 - RNA, 19 nt, Artificial Sequence
  Description of Artificial Sequence: Synthetic oligonucleotide
  Sense strand starting at position 688 of SEQ ID NO: 916496
ccaguuaacugucuagaaa

SEQ ID NO: 1161203 - RNA, 19 nt, Artificial Sequence
  Description of Artificial Sequence: Synthetic oligonucleotide
  Antisense strand to SEQ ID NO: 1161202
uuucuagacaguuaacugg

SEQ ID NO: 1161204 - RNA, 19 nt, Artificial Sequence
  Description of Artificial Sequence: Synthetic oligonucleotide
  Sense strand starting at position 751 of SEQ ID NO: 916496
gaaagaaaguuuccgugaa

SEQ ID NO: 1161205 - RNA, 19 nt, Artificial Sequence
  Description of Artificial Sequence: Synthetic oligonucleotide
  Antisense strand to SEQ ID NO: 1161204
uucacggaaacuuucuuuc

SEQ ID NO: 1161206 - RNA, 19 nt, Artificial Sequence
  Description of Artificial Sequence: Synthetic oligonucleotide
  Sense strand starting at position 789 of SEQ ID NO: 916496
aucucaucugcuuagcaga

SEQ ID NO: 1161207 - RNA, 19 nt, Artificial Sequence
  Description of Artificial Sequence: Synthetic oligonucleotide
  Antisense strand to SEQ ID NO: 1161206
ucugcuaagcagaugagau

SEQ ID NO: 1161208 - RNA, 19 nt, Artificial Sequence
  Description of Artificial Sequence: Synthetic oligonucleotide
  Sense strand starting at position 794 of SEQ ID NO: 916496
aucugcuuagcagaaugau

SEQ ID NO: 1161209 - RNA, 19 nt, Artificial Sequence
  Description of Artificial Sequence: Synthetic oligonucleotide
  Antisense strand to SEQ ID NO: 1161208
aucauucugcuaagcagau

SEQ ID NO: 1161210 - RNA, 19 nt, Artificial Sequence
  Description of Artificial Sequence: Synthetic oligonucleotide
  Sense strand starting at position 797 of SEQ ID NO: 916496
ugcuuagcagaaugauaaa

SEQ ID NO: 1161211 - RNA, 19 nt, Artificial Sequence
  Description of Artificial Sequence: Synthetic oligonucleotide
  Antisense strand to SEQ ID NO: 1161210
uuuaucauucugcuaagca

SEQ ID NO: 1161212 - RNA, 19 nt, Artificial Sequence
  Description of Artificial Sequence: Synthetic oligonucleotide
  Sense strand starting at position 857 of SEQ ID NO: 916496
ggagaaagcaacuguucca

SEQ ID NO: 1161213 - RNA, 19 nt, Artificial Sequence
  Description of Artificial Sequence: Synthetic oligonucleotide
  Antisense strand to SEQ ID NO: 1161212
uggaacaguugcuuucucc

SEQ ID NO: 1161214 - RNA, 19 nt, Artificial Sequence
  Description of Artificial Sequence: Synthetic oligonucleotide
  Sense strand starting at position 939 of SEQ ID NO: 916496
gcuauugggcuuuaccaaa

SEQ ID NO: 1161215 - RNA, 19 nt, Artificial Sequence
  Description of Artificial Sequence: Synthetic oligonucleotide
  Antisense strand to SEQ ID NO: 1161214
uuugguaaagcccaauagc

SEQ ID NO: 1161216 - RNA, 19 nt, Artificial Sequence
  Description of Artificial Sequence: Synthetic oligonucleotide
  Sense strand starting at position 1243 of SEQ ID NO: 916496
ggaagaucauuugauguuc

SEQ ID NO: 1161217 - RNA, 19 nt, Artificial Sequence
  Description of Artificial Sequence: Synthetic oligonucleotide
  Antisense strand to SEQ ID NO: 1161216
gaacaucaaaugaucuucc

SEQ ID NO: 1161218 - RNA, 19 nt, Artificial Sequence
  Description of Artificial Sequence: Synthetic oligonucleotide
  Sense strand starting at position 1301 of SEQ ID NO: 916496
uuggacuauuugcagaaga

SEQ ID NO: 1161219 - RNA, 19 nt, Artificial Sequence
  Description of Artificial Sequence: Synthetic oligonucleotide
  Antisense strand to SEQ ID NO: 1161218
ucuucugcaaauaguccaa

SEQ ID NO: 1161220 - RNA, 19 nt, Artificial Sequence
  Description of Artificial Sequence: Synthetic oligonucleotide
  Sense strand starting at position 1700 of SEQ ID NO: 916496
gcuugaagacaucaagcaa

SEQ ID NO: 1161221 - RNA, 19 nt, Artificial Sequence
  Description of Artificial Sequence: Synthetic oligonucleotide
  Antisense strand to SEQ ID NO: 1161220
uugcuugaugucuucaagc

SEQ ID NO: 1161222 - RNA, 19 nt, Artificial Sequence
  Description of Artificial Sequence: Synthetic oligonucleotide
  Sense strand starting at position 1793 of SEQ ID NO: 916496
acauacuagcacugagauu

SEQ ID NO: 1161223 - RNA, 19 nt, Artificial Sequence
  Description of Artificial Sequence: Synthetic oligonucleotide
  Antisense strand to SEQ ID NO: 1161222
aaucucagugcuaguaugu

SEQ ID NO: 1161224 - RNA, 19 nt, Artificial Sequence
  Description of Artificial Sequence: Synthetic oligonucleotide
  Sense strand starting at position 1811 of SEQ ID NO: 916496
uaacuauaaguagguugaa

SEQ ID NO: 1161225 - RNA, 19 nt, Artificial Sequence
  Description of Artificial Sequence: Synthetic oligonucleotide
  Antisense strand to SEQ ID NO: 1161224
uucaaccuacuuauaguua

SEQ ID NO: 1161226 - RNA, 19 nt, Artificial Sequence
  Description of Artificial Sequence: Synthetic oligonucleotide
  Sense strand starting at position 1845 of SEQ ID NO: 916496
gucauagacugaucucuuu

SEQ ID NO: 1161227 - RNA, 19 nt, Artificial Sequence
  Description of Artificial Sequence: Synthetic oligonucleotide
  Antisense strand to SEQ ID NO: 1161226
aaagagaucagucuaugac

SEQ ID NO: 1161228 - RNA, 19 nt, Artificial Sequence
  Description of Artificial Sequence: Synthetic oligonucleotide
  Sense strand starting at position 1848 of SEQ ID NO: 916496
auagacugaucucuuugga

SEQ ID NO: 1161229 - RNA, 19 nt, Artificial Sequence
  Description of Artificial Sequence: Synthetic oligonucleotide
  Antisense strand to SEQ ID NO: 1161228
uccaaagagaucagucuau

SEQ ID NO: 1161230 - RNA, 19 nt, Artificial Sequence
  Description of Artificial Sequence: Synthetic oligonucleotide
  Sense strand starting at position 2035 of SEQ ID NO: 916496
gggauucagucucugagac

SEQ ID NO: 1161231 - RNA, 19 nt, Artificial Sequence
  Description of Artificial Sequence: Synthetic oligonucleotide
  Antisense strand to SEQ ID NO: 1161230
gucucagagacugaauccc

SEQ ID NO: 1161232 - RNA, 19 nt, Artificial Sequence
  Description of Artificial Sequence: Synthetic oligonucleotide
  Sense strand starting at position 2407 of SEQ ID NO: 916496
cuuaauggguuauugucua

SEQ ID NO: 1161233 - RNA, 19 nt, Artificial Sequence
  Description of Artificial Sequence: Synthetic oligonucleotide
  Antisense strand to SEQ ID NO: 1161232
uagacaauaacccauuaag

SEQ ID NO: 1161234 - RNA, 19 nt, Artificial Sequence
  Description of Artificial Sequence: Synthetic oligonucleotide
  Sense strand starting at position 2412 of SEQ ID NO: 916496
uggguuauugucuaaugua

SEQ ID NO: 1161235 - RNA, 19 nt, Artificial Sequence
  Description of Artificial Sequence: Synthetic oligonucleotide
  Antisense strand to SEQ ID NO: 1161234
uacauuagacaauaaccca

SEQ ID NO: 1161236 - RNA, 19 nt, Artificial Sequence
  Description of Artificial Sequence: Synthetic oligonucleotide
  Sense strand starting at position 2421 of SEQ ID NO: 916496
gucuaauguaauggagaua

SEQ ID NO: 1161237 - RNA, 19 nt, Artificial Sequence
  Description of Artificial Sequence: Synthetic oligonucleotide
  Antisense strand to SEQ ID NO: 1161236
uaucuccauuacauuagac

SEQ ID NO: 1161238 - RNA, 19 nt, Artificial Sequence
  Description of Artificial Sequence: Synthetic oligonucleotide
  Sense strand starting at position 2496 of SEQ ID NO: 916496
uugucaucaugaucaccau

SEQ ID NO: 1161239 - RNA, 19 nt, Artificial Sequence
  Description of Artificial Sequence: Synthetic oligonucleotide
  Antisense strand to SEQ ID NO: 1161238
auggugaucaugaugacaa

SEQ ID NO: 1161240 - RNA, 19 nt, Artificial Sequence
  Description of Artificial Sequence: Synthetic oligonucleotide
  Sense strand starting at position 2645 of SEQ ID NO: 916496
agcuuuacaugauccuuga

SEQ ID NO: 1161241 - RNA, 19 nt, Artificial Sequence
  Description of Artificial Sequence: Synthetic oligonucleotide
  Antisense strand to SEQ ID NO: 1161240
ucaaggaucauguaaagcu

SEQ ID NO: 1161242 - RNA, 19 nt, Artificial Sequence
  Description of Artificial Sequence: Synthetic oligonucleotide
  Sense strand starting at position 2649 of SEQ ID NO: 916496
uuacaugauccuugaguca

SEQ ID NO: 1161243 - RNA, 19 nt, Artificial Sequence
  Description of Artificial Sequence: Synthetic oligonucleotide
  Antisense strand to SEQ ID NO: 1161242
ugacucaaggaucauguaa

SEQ ID NO: 1161244 - RNA, 19 nt, Artificial Sequence
  Description of Artificial Sequence: Synthetic oligonucleotide
  Sense strand starting at position 2698 of SEQ ID NO: 916496
agccguugaguagaggaau

SEQ ID NO: 1161245 - RNA, 19 nt, Artificial Sequence
  Description of Artificial Sequence: Synthetic oligonucleotide
  Antisense strand to SEQ ID NO: 1161244
auuccucuacucaacggcu

SEQ ID NO: 1161246 - RNA, 19 nt, Artificial Sequence
  Description of Artificial Sequence: Synthetic oligonucleotide
  Sense strand starting at position 2701 of SEQ ID NO: 916496
cguugaguagaggaaugua

SEQ ID NO: 1161247 - RNA, 19 nt, Artificial Sequence
  Description of Artificial Sequence: Synthetic oligonucleotide
  Antisense strand to SEQ ID NO: 1161246
uacauuccucuacucaacg

SEQ ID NO: 1161248 - RNA, 19 nt, Artificial Sequence
  Description of Artificial Sequence: Synthetic oligonucleotide
  Sense strand starting at position 2704 of SEQ ID NO: 916496
ugaguagaggaauguaguu

SEQ ID NO: 1161249 - RNA, 19 nt, Artificial Sequence
  Description of Artificial Sequence: Synthetic oligonucleotide
  Antisense strand to SEQ ID NO: 1161248
aacuacauuccucuacuca

SEQ ID NO: 1161250 - RNA, 19 nt, Artificial Sequence
  Description of Artificial Sequence: Synthetic oligonucleotide
  Sense strand starting at position 2709 of SEQ ID NO: 916496
agaggaauguaguuaucug

SEQ ID NO: 1161251 - RNA, 19 nt, Artificial Sequence
  Description of Artificial Sequence: Synthetic oligonucleotide
  Antisense strand to SEQ ID NO: 1161250
cagauaacuacauuccucu

SEQ ID NO: 1161252 - RNA, 19 nt, Artificial Sequence
  Description of Artificial Sequence: Synthetic oligonucleotide
  Sense strand starting at position 2710 of SEQ ID NO: 916496
gaggaauguaguuaucugu

SEQ ID NO: 1161253 - RNA, 19 nt, Artificial Sequence
  Description of Artificial Sequence: Synthetic oligonucleotide
  Antisense strand to SEQ ID NO: 1161252
acagauaacuacauuccuc

SEQ ID NO: 1161254 - RNA, 19 nt, Artificial Sequence
  Description of Artificial Sequence: Synthetic oligonucleotide
  Sense strand starting at position 2719 of SEQ ID NO: 916496
aguuaucugugucuggaau

SEQ ID NO: 1161255 - RNA, 19 nt, Artificial Sequence
  Description of Artificial Sequence: Synthetic oligonucleotide
  Antisense strand to SEQ ID NO: 1161254
auuccagacacagauaacu

SEQ ID NO: 1161256 - RNA, 19 nt, Artificial Sequence
  Description of Artificial Sequence: Synthetic oligonucleotide
  Sense strand starting at position 2727 of SEQ ID NO: 916496
gugucuggaauuggaagua

SEQ ID NO: 1161257 - RNA, 19 nt, Artificial Sequence
  Description of Artificial Sequence: Synthetic oligonucleotide
  Antisense strand to SEQ ID NO: 1161256
uacuuccaauuccagacac

SEQ ID NO: 1161258 - RNA, 19 nt, Artificial Sequence
  Description of Artificial Sequence: Synthetic oligonucleotide
  Sense strand starting at position 2979 of SEQ ID NO: 916496
aguacugucucuucuagau

SEQ ID NO: 1161259 - RNA, 19 nt, Artificial Sequence
  Description of Artificial Sequence: Synthetic oligonucleotide
  Antisense strand to SEQ ID NO: 1161258
aucuagaagagacaguacu

SEQ ID NO: 1161260 - RNA, 19 nt, Artificial Sequence
  Description of Artificial Sequence: Synthetic oligonucleotide
  Sense strand starting at position 3109 of SEQ ID NO: 916496
guaucuuuauuggucauau

SEQ ID NO: 1161261 - RNA, 19 nt, Artificial Sequence
  Description of Artificial Sequence: Synthetic oligonucleotide
  Antisense strand to SEQ ID NO: 1161260
auaugaccaauaaagauac

SEQ ID NO: 1161262 - RNA, 19 nt, Artificial Sequence
  Description of Artificial Sequence: Synthetic oligonucleotide
  Sense strand starting at position 3111 of SEQ ID NO: 916496
aucuuuauuggucauauag

SEQ ID NO: 1161263 - RNA, 19 nt, Artificial Sequence
  Description of Artificial Sequence: Synthetic oligonucleotide
  Antisense strand to SEQ ID NO: 1161262
cuauaugaccaauaaagau

SEQ ID NO: 1161264 - RNA, 19 nt, Artificial Sequence
  Description of Artificial Sequence: Synthetic oligonucleotide
  Sense strand starting at position 3303 of SEQ ID NO: 916496
gggaauuagaguuguuaag

SEQ ID NO: 1161265 - RNA, 19 nt, Artificial Sequence
  Description of Artificial Sequence: Synthetic oligonucleotide
  Antisense strand to SEQ ID NO: 1161264
cuuaacaacucuaauuccc

SEQ ID NO: 1161266 - RNA, 19 nt, Artificial Sequence
  Description of Artificial Sequence: Synthetic oligonucleotide
  Sense strand starting at position 3305 of SEQ ID NO: 916496
gaauuagaguuguuaagcu

SEQ ID NO: 1161267 - RNA, 19 nt, Artificial Sequence
  Description of Artificial Sequence: Synthetic oligonucleotide
  Antisense strand to SEQ ID NO: 1161266
agcuuaacaacucuaauuc

SEQ ID NO: 1161268 - RNA, 19 nt, Artificial Sequence
  Description of Artificial Sequence: Synthetic oligonucleotide
  Sense strand starting at position 3510 of SEQ ID NO: 916496
caguuauguggugagguau

SEQ ID NO: 1161269 - RNA, 19 nt, Artificial Sequence
  Description of Artificial Sequence: Synthetic oligonucleotide
  Antisense strand to SEQ ID NO: 1161268
auaccucaccacauaacug

SEQ ID NO: 1161270 - RNA, 19 nt, Artificial Sequence
  Description of Artificial Sequence: Synthetic oligonucleotide
  Sense strand starting at position 3793 of SEQ ID NO: 916496
auuugucaggcuggucuua

SEQ ID NO: 1161271 - RNA, 19 nt, Artificial Sequence
  Description of Artificial Sequence: Synthetic oligonucleotide
  Antisense strand to SEQ ID NO: 1161270
uaagaccagccugacaaau

SEQ ID NO: 1161272 - RNA, 19 nt, Artificial Sequence
  Description of Artificial Sequence: Synthetic oligonucleotide
  Sense strand starting at position 49 of SEQ ID NO: 916497
cuguuaaaugcuguguguu

SEQ ID NO: 1161273 - RNA, 19 nt, Artificial Sequence
  Description of Artificial Sequence: Synthetic oligonucleotide
  Antisense strand to SEQ ID NO: 1161272
aacacacagcauuuaacag

SEQ ID NO: 1161274 - RNA, 19 nt, Artificial Sequence
  Description of Artificial Sequence: Synthetic oligonucleotide
  Sense strand starting at position 199 of SEQ ID NO: 916497
uaccuuuaguauguaagga

SEQ ID NO: 1161275 - RNA, 19 nt, Artificial Sequence
  Description of Artificial Sequence: Synthetic oligonucleotide
  Antisense strand to SEQ ID NO: 1161274
uccuuacauacuaaaggua

SEQ ID NO: 1161276 - RNA, 19 nt, Artificial Sequence
  Description of Artificial Sequence: Synthetic oligonucleotide
  Sense strand starting at position 554 of SEQ ID NO: 916497
gaauaaucugggcacgcau

SEQ ID NO: 1161277 - RNA, 19 nt, Artificial Sequence
  Description of Artificial Sequence: Synthetic oligonucleotide
  Antisense strand to SEQ ID NO: 1161276
augcgugcccagauuauuc

SEQ ID NO: 1161278 - RNA, 19 nt, Artificial Sequence
  Description of Artificial Sequence: Synthetic oligonucleotide
  Sense strand starting at position 579 of SEQ ID NO: 916497
ggccaugacucugcaauuu

SEQ ID NO: 1161279 - RNA, 19 nt, Artificial Sequence
  Description of Artificial Sequence: Synthetic oligonucleotide
  Antisense strand to SEQ ID NO: 1161278
aaauugcagagucauggcc

SEQ ID NO: 1161280 - RNA, 19 nt, Artificial Sequence
  Description of Artificial Sequence: Synthetic oligonucleotide
  Sense strand starting at position 1190 of SEQ ID NO: 916497
cagcacucacuggguaaga

SEQ ID NO: 1161281 - RNA, 19 nt, Artificial Sequence
  Description of Artificial Sequence: Synthetic oligonucleotide
  Antisense strand to SEQ ID NO: 1161280
ucuuacccagugagugcug

SEQ ID NO: 1161282 - RNA, 19 nt, Artificial Sequence
  Description of Artificial Sequence: Synthetic oligonucleotide
  Sense strand starting at position 1191 of SEQ ID NO: 916497
agcacucacuggguaagaa

SEQ ID NO: 1161283 - RNA, 19 nt, Artificial Sequence
  Description of Artificial Sequence: Synthetic oligonucleotide
  Antisense strand to SEQ ID NO: 1161282
uucuuacccagugagugcu

SEQ ID NO: 1161284 - RNA, 19 nt, Artificial Sequence
  Description of Artificial Sequence: Synthetic oligonucleotide
  Sense strand starting at position 1229 of SEQ ID NO: 916497
ggaauauaaacguggagcu

SEQ ID NO: 1161285 - RNA, 19 nt, Artificial Sequence
  Description of Artificial Sequence: Synthetic oligonucleotide
  Antisense strand to SEQ ID NO: 1161284
agcuccacguuuauauucc

SEQ ID NO: 1161286 - RNA, 19 nt, Artificial Sequence
  Description of Artificial Sequence: Synthetic oligonucleotide
  Sense strand starting at position 1461 of SEQ ID NO: 916497
cuugucacuggcuauaaua

SEQ ID NO: 1161287 - RNA, 19 nt, Artificial Sequence
  Description of Artificial Sequence: Synthetic oligonucleotide
  Antisense strand to SEQ ID NO: 1161286
uauuauagccagugacaag

SEQ ID NO: 1161288 - RNA, 19 nt, Artificial Sequence
  Description of Artificial Sequence: Synthetic oligonucleotide
  Sense strand starting at position 1539 of SEQ ID NO: 916497
gcaguaguauuauuuagua

SEQ ID NO: 1161289 - RNA, 19 nt, Artificial Sequence
  Description of Artificial Sequence: Synthetic oligonucleotide
  Antisense strand to SEQ ID NO: 1161288
uacuaaauaauacuacugc

SEQ ID NO: 1161290 - RNA, 19 nt, Artificial Sequence
  Description of Artificial Sequence: Synthetic oligonucleotide
  Sense strand starting at position 1616 of SEQ ID NO: 916497
gccuuacaauaggcauaaa

SEQ ID NO: 1161291 - RNA, 19 nt, Artificial Sequence
  Description of Artificial Sequence: Synthetic oligonucleotide
  Antisense strand to SEQ ID NO: 1161290
uuuaugccuauuguaaggc

SEQ ID NO: 1161292 - RNA, 19 nt, Artificial Sequence
  Description of Artificial Sequence: Synthetic oligonucleotide
  Sense strand starting at position 1635 of SEQ ID NO: 916497
ggccacuaugcccaugaaa

SEQ ID NO: 1161293 - RNA, 19 nt, Artificial Sequence
  Description of Artificial Sequence: Synthetic oligonucleotide
  Antisense strand to SEQ ID NO: 1161292
uuucaugggcauaguggcc

SEQ ID NO: 1161294 - RNA, 19 nt, Artificial Sequence
  Description of Artificial Sequence: Synthetic oligonucleotide
  Sense strand starting at position 1775 of SEQ ID NO: 916497
acaggagguuacuuugacu

SEQ ID NO: 1161295 - RNA, 19 nt, Artificial Sequence
  Description of Artificial Sequence: Synthetic oligonucleotide
  Antisense strand to SEQ ID NO: 1161294
agucaaaguaaccuccugu

SEQ ID NO: 1161296 - RNA, 19 nt, Artificial Sequence
  Description of Artificial Sequence: Synthetic oligonucleotide
  Sense strand starting at position 1780 of SEQ ID NO: 916497
agguuacuuugacuugaaa

SEQ ID NO: 1161297 - RNA, 19 nt, Artificial Sequence
  Description of Artificial Sequence: Synthetic oligonucleotide
  Antisense strand to SEQ ID NO: 1161296
uuucaagucaaaguaaccu

SEQ ID NO: 1161298 - RNA, 19 nt, Artificial Sequence
  Description of Artificial Sequence: Synthetic oligonucleotide
  Sense strand starting at position 1797 of SEQ ID NO: 916497
aaaggcuaaguuuggaaau

SEQ ID NO: 1161299 - RNA, 19 nt, Artificial Sequence
  Description of Artificial Sequence: Synthetic oligonucleotide
  Antisense strand to SEQ ID NO: 1161298
auuuccaaacuuagccuuu

SEQ ID NO: 1161300 - RNA, 19 nt, Artificial Sequence
  Description of Artificial Sequence: Synthetic oligonucleotide
  Sense strand starting at position 1849 of SEQ ID NO: 916497
auuccuggaguuugagaaa

SEQ ID NO: 1161301 - RNA, 19 nt, Artificial Sequence
  Description of Artificial Sequence: Synthetic oligonucleotide
  Antisense strand to SEQ ID NO: 1161300
uuucucaaacuccaggaau

SEQ ID NO: 1161302 - RNA, 19 nt, Artificial Sequence
  Description of Artificial Sequence: Synthetic oligonucleotide
  Sense strand starting at position 2315 of SEQ ID NO: 916497
uagaaacucugguuccuga

SEQ ID NO: 1161303 - RNA, 19 nt, Artificial Sequence
  Description of Artificial Sequence: Synthetic oligonucleotide
  Antisense strand to SEQ ID NO: 1161302
ucaggaaccagaguuucua

SEQ ID NO: 1161304 - RNA, 19 nt, Artificial Sequence
  Description of Artificial Sequence: Synthetic oligonucleotide
  Sense strand starting at position 2387 of SEQ ID NO: 916497
cucugaauucucgaacauu

SEQ ID NO: 1161305 - RNA, 19 nt, Artificial Sequence
  Description of Artificial Sequence: Synthetic oligonucleotide
  Antisense strand to SEQ ID NO: 1161304
aauguucgagaauucagag

SEQ ID NO: 1161306 - RNA, 19 nt, Artificial Sequence
  Description of Artificial Sequence: Synthetic oligonucleotide
  Sense strand starting at position 2478 of SEQ ID NO: 916497
auuagcaggcauugacaau

SEQ ID NO: 1161307 - RNA, 19 nt, Artificial Sequence
  Description of Artificial Sequence: Synthetic oligonucleotide
  Antisense strand to SEQ ID NO: 1161306
auugucaaugccugcuaau

SEQ ID NO: 1161308 - RNA, 19 nt, Artificial Sequence
  Description of Artificial Sequence: Synthetic oligonucleotide
  Sense strand starting at position 2568 of SEQ ID NO: 916497
auguaacccucaguaaaga

SEQ ID NO: 1161309 - RNA, 19 nt, Artificial Sequence
  Description of Artificial Sequence: Synthetic oligonucleotide
  Antisense strand to SEQ ID NO: 1161308
ucuuuacugaggguuacau

SEQ ID NO: 1161310 - RNA, 19 nt, Artificial Sequence
  Description of Artificial Sequence: Synthetic oligonucleotide
  Sense strand starting at position 2569 of SEQ ID NO: 916497
uguaacccucaguaaagau

SEQ ID NO: 1161311 - RNA, 19 nt, Artificial Sequence
  Description of Artificial Sequence: Synthetic oligonucleotide
  Antisense strand to SEQ ID NO: 1161310
aucuuuacugaggguuaca

SEQ ID NO: 1161312 - RNA, 19 nt, Artificial Sequence
  Description of Artificial Sequence: Synthetic oligonucleotide
  Sense strand starting at position 2620 of SEQ ID NO: 916497
caauuugcuuugucacgau

SEQ ID NO: 1161313 - RNA, 19 nt, Artificial Sequence
  Description of Artificial Sequence: Synthetic oligonucleotide
  Antisense strand to SEQ ID NO: 1161312
aucgugacaaagcaaauug

SEQ ID NO: 1161314 - RNA, 19 nt, Artificial Sequence
  Description of Artificial Sequence: Synthetic oligonucleotide
  Sense strand starting at position 2683 of SEQ ID NO: 916497
acuggaucagcucauuaca

SEQ ID NO: 1161315 - RNA, 19 nt, Artificial Sequence
  Description of Artificial Sequence: Synthetic oligonucleotide
  Antisense strand to SEQ ID NO: 1161314
uguaaugagcugauccagu

SEQ ID NO: 1161316 - RNA, 19 nt, Artificial Sequence
  Description of Artificial Sequence: Synthetic oligonucleotide
  Sense strand starting at position 2728 of SEQ ID NO: 916497
ggagguuuagaggaacguu

SEQ ID NO: 1161317 - RNA, 19 nt, Artificial Sequence
  Description of Artificial Sequence: Synthetic oligonucleotide
  Antisense strand to SEQ ID NO: 1161316
aacguuccucuaaaccucc

SEQ ID NO: 1161318 - RNA, 19 nt, Artificial Sequence
  Description of Artificial Sequence: Synthetic oligonucleotide
  Sense strand starting at position 2754 of SEQ ID NO: 916497
gccguagauauuuagccua

SEQ ID NO: 1161319 - RNA, 19 nt, Artificial Sequence
  Description of Artificial Sequence: Synthetic oligonucleotide
  Antisense strand to SEQ ID NO: 1161318
uaggcuaaauaucuacggc

SEQ ID NO: 1161320 - RNA, 19 nt, Artificial Sequence
  Description of Artificial Sequence: Synthetic oligonucleotide
  Sense strand starting at position 2977 of SEQ ID NO: 916497
uccuuuaggcuuuaaagga

SEQ ID NO: 1161321 - RNA, 19 nt, Artificial Sequence
  Description of Artificial Sequence: Synthetic oligonucleotide
  Antisense strand to SEQ ID NO: 1161320
uccuuuaaagccuaaagga

SEQ ID NO: 1161322 - RNA, 19 nt, Artificial Sequence
  Description of Artificial Sequence: Synthetic oligonucleotide
  Sense strand starting at position 3011 of SEQ ID NO: 916497
cuuucuaggaugugaugga

SEQ ID NO: 1161323 - RNA, 19 nt, Artificial Sequence
  Description of Artificial Sequence: Synthetic oligonucleotide
  Antisense strand to SEQ ID NO: 1161322
uccaucacauccuagaaag

SEQ ID NO: 1161324 - RNA, 19 nt, Artificial Sequence
  Description of Artificial Sequence: Synthetic oligonucleotide
  Sense strand starting at position 3063 of SEQ ID NO: 916497
accaguuugcucuaggaac

SEQ ID NO: 1161325 - RNA, 19 nt, Artificial Sequence
  Description of Artificial Sequence: Synthetic oligonucleotide
  Antisense strand to SEQ ID NO: 1161324
guuccuagagcaaacuggu

SEQ ID NO: 1161326 - RNA, 19 nt, Artificial Sequence
  Description of Artificial Sequence: Synthetic oligonucleotide
  Sense strand starting at position 3220 of SEQ ID NO: 916497
cuuuguaaaguauacuaga

SEQ ID NO: 1161327 - RNA, 19 nt, Artificial Sequence
  Description of Artificial Sequence: Synthetic oligonucleotide
  Antisense strand to SEQ ID NO: 1161326
ucuaguauacuuuacaaag

SEQ ID NO: 1161328 - RNA, 19 nt, Artificial Sequence
  Description of Artificial Sequence: Synthetic oligonucleotide
  Sense strand starting at position 3231 of SEQ ID NO: 916497
auacuagaaucugucugua

SEQ ID NO: 1161329 - RNA, 19 nt, Artificial Sequence
  Description of Artificial Sequence: Synthetic oligonucleotide
  Antisense strand to SEQ ID NO: 1161328
uacagacagauucuaguau

SEQ ID NO: 1161330 - RNA, 19 nt, Artificial Sequence
  Description of Artificial Sequence: Synthetic oligonucleotide
  Sense strand starting at position 3233 of SEQ ID NO: 916497
acuagaaucugucuguaac

SEQ ID NO: 1161331 - RNA, 19 nt, Artificial Sequence
  Description of Artificial Sequence: Synthetic oligonucleotide
  Antisense strand to SEQ ID NO: 1161330
guuacagacagauucuagu

SEQ ID NO: 1161332 - RNA, 19 nt, Artificial Sequence
  Description of Artificial Sequence: Synthetic oligonucleotide
  Sense strand starting at position 3245 of SEQ ID NO: 916497
cuguaacauuaacuggaau

SEQ ID NO: 1161333 - RNA, 19 nt, Artificial Sequence
  Description of Artificial Sequence: Synthetic oligonucleotide
  Antisense strand to SEQ ID NO: 1161332
auuccaguuaauguuacag

SEQ ID NO: 1161334 - RNA, 19 nt, Artificial Sequence
  Description of Artificial Sequence: Synthetic oligonucleotide
  Sense strand starting at position 3294 of SEQ ID NO: 916497
ucugaauucucuccaaagg

SEQ ID NO: 1161335 - RNA, 19 nt, Artificial Sequence
  Description of Artificial Sequence: Synthetic oligonucleotide
  Antisense strand to SEQ ID NO: 1161334
ccuuuggagagaauucaga

SEQ ID NO: 1161336 - RNA, 19 nt, Artificial Sequence
  Description of Artificial Sequence: Synthetic oligonucleotide
  Sense strand starting at position 3305 of SEQ ID NO: 916497
uccaaaggaguuugguauu

SEQ ID NO: 1161337 - RNA, 19 nt, Artificial Sequence
  Description of Artificial Sequence: Synthetic oligonucleotide
  Antisense strand to SEQ ID NO: 1161336
aauaccaaacuccuuugga

SEQ ID NO: 1161338 - RNA, 19 nt, Artificial Sequence
  Description of Artificial Sequence: Synthetic oligonucleotide
  Sense strand starting at position 3357 of SEQ ID NO: 916497
ggugauacaggccaaaucu

SEQ ID NO: 1161339 - RNA, 19 nt, Artificial Sequence
  Description of Artificial Sequence: Synthetic oligonucleotide
  Antisense strand to SEQ ID NO: 1161338
agauuuggccuguaucacc

SEQ ID NO: 1161340 - RNA, 19 nt, Artificial Sequence
  Description of Artificial Sequence: Synthetic oligonucleotide
  Sense strand starting at position 3405 of SEQ ID NO: 916497
gagagcuacuguuuagaua

SEQ ID NO: 1161341 - RNA, 19 nt, Artificial Sequence
  Description of Artificial Sequence: Synthetic oligonucleotide
  Antisense strand to SEQ ID NO: 1161340
uaucuaaacaguagcucuc

SEQ ID NO: 1161342 - RNA, 19 nt, Artificial Sequence
  Description of Artificial Sequence: Synthetic oligonucleotide
  Sense strand starting at position 3406 of SEQ ID NO: 916497
agagcuacuguuuagauaa

SEQ ID NO: 1161343 - RNA, 19 nt, Artificial Sequence
  Description of Artificial Sequence: Synthetic oligonucleotide
  Antisense strand to SEQ ID NO: 1161342
uuaucuaaacaguagcucu

SEQ ID NO: 1161344 - RNA, 19 nt, Artificial Sequence
  Description of Artificial Sequence: Synthetic oligonucleotide
  Sense strand starting at position 3433 of SEQ ID NO: 916497
acagaaugcuaguugaaug

SEQ ID NO: 1161345 - RNA, 19 nt, Artificial Sequence
  Description of Artificial Sequence: Synthetic oligonucleotide
  Antisense strand to SEQ ID NO: 1161344
cauucaacuagcauucugu

SEQ ID NO: 1161346 - RNA, 19 nt, Artificial Sequence
  Description of Artificial Sequence: Synthetic oligonucleotide
  Sense strand starting at position 3565 of SEQ ID NO: 916497
cguuauccugccucagcau

SEQ ID NO: 1161347 - RNA, 19 nt, Artificial Sequence
  Description of Artificial Sequence: Synthetic oligonucleotide
  Antisense strand to SEQ ID NO: 1161346
augcugaggcaggauaacg

SEQ ID NO: 1161348 - RNA, 19 nt, Artificial Sequence
  Description of Artificial Sequence: Synthetic oligonucleotide
  Sense strand starting at position 3791 of SEQ ID NO: 916497
gcacuugacucaucuaaug

SEQ ID NO: 1161349 - RNA, 19 nt, Artificial Sequence
  Description of Artificial Sequence: Synthetic oligonucleotide
  Antisense strand to SEQ ID NO: 1161348
cauuagaugagucaagugc

SEQ ID NO: 1161350 - RNA, 19 nt, Artificial Sequence
  Description of Artificial Sequence: Synthetic oligonucleotide
  Sense strand starting at position 3936 of SEQ ID NO: 916497
uguaucaggcaauauuaua

SEQ ID NO: 1161351 - RNA, 19 nt, Artificial Sequence
  Description of Artificial Sequence: Synthetic oligonucleotide
  Antisense strand to SEQ ID NO: 1161350
uauaauauugccugauaca

SEQ ID NO: 1161352 - RNA, 19 nt, Artificial Sequence
  Description of Artificial Sequence: Synthetic oligonucleotide
  Sense strand starting at position 554 of SEQ ID NO: 916498
cagcacucacuggguaaga

SEQ ID NO: 1161353 - RNA, 19 nt, Artificial Sequence
  Description of Artificial Sequence: Synthetic oligonucleotide
  Antisense strand to SEQ ID NO: 1161352
ucuuacccagugagugcug

SEQ ID NO: 1161354 - RNA, 19 nt, Artificial Sequence
  Description of Artificial Sequence: Synthetic oligonucleotide
  Sense strand starting at position 555 of SEQ ID NO: 916498
agcacucacuggguaagaa

SEQ ID NO: 1161355 - RNA, 19 nt, Artificial Sequence
  Description of Artificial Sequence: Synthetic oligonucleotide
  Antisense strand to SEQ ID NO: 1161354
uucuuacccagugagugcu

SEQ ID NO: 1161356 - RNA, 19 nt, Artificial Sequence
  Description of Artificial Sequence: Synthetic oligonucleotide
  Sense strand starting at position 593 of SEQ ID NO: 916498
ggaauauaaacguggagcu

SEQ ID NO: 1161357 - RNA, 19 nt, Artificial Sequence
  Description of Artificial Sequence: Synthetic oligonucleotide
  Antisense strand to SEQ ID NO: 1161356
agcuccacguuuauauucc

SEQ ID NO: 1161358 - RNA, 19 nt, Artificial Sequence
  Description of Artificial Sequence: Synthetic oligonucleotide
  Sense strand starting at position 825 of SEQ ID NO: 916498
cuugucacuggcuauaaua

SEQ ID NO: 1161359 - RNA, 19 nt, Artificial Sequence
  Description of Artificial Sequence: Synthetic oligonucleotide
  Antisense strand to SEQ ID NO: 1161358
uauuauagccagugacaag

SEQ ID NO: 1161360 - RNA, 19 nt, Artificial Sequence
  Description of Artificial Sequence: Synthetic oligonucleotide
  Sense strand starting at position 903 of SEQ ID NO: 916498
gcaguaguauuauuuagua

SEQ ID NO: 1161361 - RNA, 19 nt, Artificial Sequence
  Description of Artificial Sequence: Synthetic oligonucleotide
  Antisense strand to SEQ ID NO: 1161360
uacuaaauaauacuacugc

SEQ ID NO: 1161362 - RNA, 19 nt, Artificial Sequence
  Description of Artificial Sequence: Synthetic oligonucleotide
  Sense strand starting at position 980 of SEQ ID NO: 916498
gccuuacaauaggcauaaa

SEQ ID NO: 1161363 - RNA, 19 nt, Artificial Sequence
  Description of Artificial Sequence: Synthetic oligonucleotide
  Antisense strand to SEQ ID NO: 1161362
uuuaugccuauuguaaggc

SEQ ID NO: 1161364 - RNA, 19 nt, Artificial Sequence
  Description of Artificial Sequence: Synthetic oligonucleotide
  Sense strand starting at position 999 of SEQ ID NO: 916498
ggccacuaugcccaugaaa

SEQ ID NO: 1161365 - RNA, 19 nt, Artificial Sequence
  Description of Artificial Sequence: Synthetic oligonucleotide
  Antisense strand to SEQ ID NO: 1161364
uuucaugggcauaguggcc

SEQ ID NO: 1161366 - RNA, 19 nt, Artificial Sequence
  Description of Artificial Sequence: Synthetic oligonucleotide
  Sense strand starting at position 1139 of SEQ ID NO: 916498
acaggagguuacuuugacu

SEQ ID NO: 1161367 - RNA, 19 nt, Artificial Sequence
  Description of Artificial Sequence: Synthetic oligonucleotide
  Antisense strand to SEQ ID NO: 1161366
agucaaaguaaccuccugu

SEQ ID NO: 1161368 - RNA, 19 nt, Artificial Sequence
  Description of Artificial Sequence: Synthetic oligonucleotide
  Sense strand starting at position 1144 of SEQ ID NO: 916498
agguuacuuugacuugaaa

SEQ ID NO: 1161369 - RNA, 19 nt, Artificial Sequence
  Description of Artificial Sequence: Synthetic oligonucleotide
  Antisense strand to SEQ ID NO: 1161368
uuucaagucaaaguaaccu

SEQ ID NO: 1161370 - RNA, 19 nt, Artificial Sequence
  Description of Artificial Sequence: Synthetic oligonucleotide
  Sense strand starting at position 1161 of SEQ ID NO: 916498
aaaggcuaaguuuggaaau

SEQ ID NO: 1161371 - RNA, 19 nt, Artificial Sequence
  Description of Artificial Sequence: Synthetic oligonucleotide
  Antisense strand to SEQ ID NO: 1161370
auuuccaaacuuagccuuu

SEQ ID NO: 1161372 - RNA, 19 nt, Artificial Sequence
  Description of Artificial Sequence: Synthetic oligonucleotide
  Sense strand starting at position 1213 of SEQ ID NO: 916498
auuccuggaguuugagaaa

SEQ ID NO: 1161373 - RNA, 19 nt, Artificial Sequence
  Description of Artificial Sequence: Synthetic oligonucleotide
  Antisense strand to SEQ ID NO: 1161372
uuucucaaacuccaggaau

SEQ ID NO: 1161374 - RNA, 19 nt, Artificial Sequence
  Description of Artificial Sequence: Synthetic oligonucleotide
  Sense strand starting at position 1679 of SEQ ID NO: 916498
uagaaacucugguuccuga

SEQ ID NO: 1161375 - RNA, 19 nt, Artificial Sequence
  Description of Artificial Sequence: Synthetic oligonucleotide
  Antisense strand to SEQ ID NO: 1161374
ucaggaaccagaguuucua

SEQ ID NO: 1161376 - RNA, 19 nt, Artificial Sequence
  Description of Artificial Sequence: Synthetic oligonucleotide
  Sense strand starting at position 1751 of SEQ ID NO: 916498
cucugaauucucgaacauu

SEQ ID NO: 1161377 - RNA, 19 nt, Artificial Sequence
  Description of Artificial Sequence: Synthetic oligonucleotide
  Antisense strand to SEQ ID NO: 1161376
aauguucgagaauucagag

SEQ ID NO: 1161378 - RNA, 19 nt, Artificial Sequence
  Description of Artificial Sequence: Synthetic oligonucleotide
  Sense strand starting at position 1842 of SEQ ID NO: 916498
auuagcaggcauugacaau

SEQ ID NO: 1161379 - RNA, 19 nt, Artificial Sequence
  Description of Artificial Sequence: Synthetic oligonucleotide
  Antisense strand to SEQ ID NO: 1161378
auugucaaugccugcuaau

SEQ ID NO: 1161380 - RNA, 19 nt, Artificial Sequence
  Description of Artificial Sequence: Synthetic oligonucleotide
  Sense strand starting at position 1932 of SEQ ID NO: 916498
auguaacccucaguaaaga

SEQ ID NO: 1161381 - RNA, 19 nt, Artificial Sequence
  Description of Artificial Sequence: Synthetic oligonucleotide
  Antisense strand to SEQ ID NO: 1161380
ucuuuacugaggguuacau

SEQ ID NO: 1161382 - RNA, 19 nt, Artificial Sequence
  Description of Artificial Sequence: Synthetic oligonucleotide
  Sense strand starting at position 1933 of SEQ ID NO: 916498
uguaacccucaguaaagau

SEQ ID NO: 1161383 - RNA, 19 nt, Artificial Sequence
  Description of Artificial Sequence: Synthetic oligonucleotide
  Antisense strand to SEQ ID NO: 1161382
aucuuuacugaggguuaca

SEQ ID NO: 1161384 - RNA, 19 nt, Artificial Sequence
  Description of Artificial Sequence: Synthetic oligonucleotide
  Sense strand starting at position 1984 of SEQ ID NO: 916498
caauuugcuuugucacgau

SEQ ID NO: 1161385 - RNA, 19 nt, Artificial Sequence
  Description of Artificial Sequence: Synthetic oligonucleotide
  Antisense strand to SEQ ID NO: 1161384
aucgugacaaagcaaauug

SEQ ID NO: 1161386 - RNA, 19 nt, Artificial Sequence
  Description of Artificial Sequence: Synthetic oligonucleotide
  Sense strand starting at position 2047 of SEQ ID NO: 916498
acuggaucagcucauuaca

SEQ ID NO: 1161387 - RNA, 19 nt, Artificial Sequence
  Description of Artificial Sequence: Synthetic oligonucleotide
  Antisense strand to SEQ ID NO: 1161386
uguaaugagcugauccagu

SEQ ID NO: 1161388 - RNA, 19 nt, Artificial Sequence
  Description of Artificial Sequence: Synthetic oligonucleotide
  Sense strand starting at position 2092 of SEQ ID NO: 916498
ggagguuuagaggaacguu

SEQ ID NO: 1161389 - RNA, 19 nt, Artificial Sequence
  Description of Artificial Sequence: Synthetic oligonucleotide
  Antisense strand to SEQ ID NO: 1161388
aacguuccucuaaaccucc

SEQ ID NO: 1161390 - RNA, 19 nt, Artificial Sequence
  Description of Artificial Sequence: Synthetic oligonucleotide
  Sense strand starting at position 2118 of SEQ ID NO: 916498
gccguagauauuuagccua

SEQ ID NO: 1161391 - RNA, 19 nt, Artificial Sequence
  Description of Artificial Sequence: Synthetic oligonucleotide
  Antisense strand to SEQ ID NO: 1161390
uaggcuaaauaucuacggc

SEQ ID NO: 1161392 - RNA, 19 nt, Artificial Sequence
  Description of Artificial Sequence: Synthetic oligonucleotide
  Sense strand starting at position 2341 of SEQ ID NO: 916498
uccuuuaggcuuuaaagga

SEQ ID NO: 1161393 - RNA, 19 nt, Artificial Sequence
  Description of Artificial Sequence: Synthetic oligonucleotide
  Antisense strand to SEQ ID NO: 1161392
uccuuuaaagccuaaagga

SEQ ID NO: 1161394 - RNA, 19 nt, Artificial Sequence
  Description of Artificial Sequence: Synthetic oligonucleotide
  Sense strand starting at position 2375 of SEQ ID NO: 916498
cuuucuaggaugugaugga

SEQ ID NO: 1161395 - RNA, 19 nt, Artificial Sequence
  Description of Artificial Sequence: Synthetic oligonucleotide
  Antisense strand to SEQ ID NO: 1161394
uccaucacauccuagaaag

SEQ ID NO: 1161396 - RNA, 19 nt, Artificial Sequence
  Description of Artificial Sequence: Synthetic oligonucleotide
  Sense strand starting at position 2427 of SEQ ID NO: 916498
accaguuugcucuaggaac

SEQ ID NO: 1161397 - RNA, 19 nt, Artificial Sequence
  Description of Artificial Sequence: Synthetic oligonucleotide
  Antisense strand to SEQ ID NO: 1161396
guuccuagagcaaacuggu

SEQ ID NO: 1161398 - RNA, 19 nt, Artificial Sequence
  Description of Artificial Sequence: Synthetic oligonucleotide
  Sense strand starting at position 2584 of SEQ ID NO: 916498
cuuuguaaaguauacuaga

SEQ ID NO: 1161399 - RNA, 19 nt, Artificial Sequence
  Description of Artificial Sequence: Synthetic oligonucleotide
  Antisense strand to SEQ ID NO: 1161398
ucuaguauacuuuacaaag

SEQ ID NO: 1161400 - RNA, 19 nt, Artificial Sequence
  Description of Artificial Sequence: Synthetic oligonucleotide
  Sense strand starting at position 2595 of SEQ ID NO: 916498
auacuagaaucugucugua

SEQ ID NO: 1161401 - RNA, 19 nt, Artificial Sequence
  Description of Artificial Sequence: Synthetic oligonucleotide
  Antisense strand to SEQ ID NO: 1161400
uacagacagauucuaguau

SEQ ID NO: 1161402 - RNA, 19 nt, Artificial Sequence
  Description of Artificial Sequence: Synthetic oligonucleotide
  Sense strand starting at position 2597 of SEQ ID NO: 916498
acuagaaucugucuguaac

SEQ ID NO: 1161403 - RNA, 19 nt, Artificial Sequence
  Description of Artificial Sequence: Synthetic oligonucleotide
  Antisense strand to SEQ ID NO: 1161402
guuacagacagauucuagu

SEQ ID NO: 1161404 - RNA, 19 nt, Artificial Sequence
  Description of Artificial Sequence: Synthetic oligonucleotide
  Sense strand starting at position 2609 of SEQ ID NO: 916498
cuguaacauuaacuggaau

SEQ ID NO: 1161405 - RNA, 19 nt, Artificial Sequence
  Description of Artificial Sequence: Synthetic oligonucleotide
  Antisense strand to SEQ ID NO: 1161404
auuccaguuaauguuacag

SEQ ID NO: 1161406 - RNA, 19 nt, Artificial Sequence
  Description of Artificial Sequence: Synthetic oligonucleotide
  Sense strand starting at position 2658 of SEQ ID NO: 916498
ucugaauucucuccaaagg

SEQ ID NO: 1161407 - RNA, 19 nt, Artificial Sequence
  Description of Artificial Sequence: Synthetic oligonucleotide
  Antisense strand to SEQ ID NO: 1161406
ccuuuggagagaauucaga

SEQ ID NO: 1161408 - RNA, 19 nt, Artificial Sequence
  Description of Artificial Sequence: Synthetic oligonucleotide
  Sense strand starting at position 2669 of SEQ ID NO: 916498
uccaaaggaguuugguauu

SEQ ID NO: 1161409 - RNA, 19 nt, Artificial Sequence
  Description of Artificial Sequence: Synthetic oligonucleotide
  Antisense strand to SEQ ID NO: 1161408
aauaccaaacuccuuugga

SEQ ID NO: 1161410 - RNA, 19 nt, Artificial Sequence
  Description of Artificial Sequence: Synthetic oligonucleotide
  Sense strand starting at position 2721 of SEQ ID NO: 916498
ggugauacaggccaaaucu

SEQ ID NO: 1161411 - RNA, 19 nt, Artificial Sequence
  Description of Artificial Sequence: Synthetic oligonucleotide
  Antisense strand to SEQ ID NO: 1161410
agauuuggccuguaucacc

SEQ ID NO: 1161412 - RNA, 19 nt, Artificial Sequence
  Description of Artificial Sequence: Synthetic oligonucleotide
  Sense strand starting at position 2769 of SEQ ID NO: 916498
gagagcuacuguuuagaua

SEQ ID NO: 1161413 - RNA, 19 nt, Artificial Sequence
  Description of Artificial Sequence: Synthetic oligonucleotide
  Antisense strand to SEQ ID NO: 1161412
uaucuaaacaguagcucuc

SEQ ID NO: 1161414 - RNA, 19 nt, Artificial Sequence
  Description of Artificial Sequence: Synthetic oligonucleotide
  Sense strand starting at position 2770 of SEQ ID NO: 916498
agagcuacuguuuagauaa

SEQ ID NO: 1161415 - RNA, 19 nt, Artificial Sequence
  Description of Artificial Sequence: Synthetic oligonucleotide
  Antisense strand to SEQ ID NO: 1161414
uuaucuaaacaguagcucu

SEQ ID NO: 1161416 - RNA, 19 nt, Artificial Sequence
  Description of Artificial Sequence: Synthetic oligonucleotide
  Sense strand starting at position 2797 of SEQ ID NO: 916498
acagaaugcuaguugaaug

SEQ ID NO: 1161417 - RNA, 19 nt, Artificial Sequence
  Description of Artificial Sequence: Synthetic oligonucleotide
  Antisense strand to SEQ ID NO: 1161416
cauucaacuagcauucugu

SEQ ID NO: 1161418 - RNA, 19 nt, Artificial Sequence
  Description of Artificial Sequence: Synthetic oligonucleotide
  Sense strand starting at position 2929 of SEQ ID NO: 916498
cguuauccugccucagcau

SEQ ID NO: 1161419 - RNA, 19 nt, Artificial Sequence
  Description of Artificial Sequence: Synthetic oligonucleotide
  Antisense strand to SEQ ID NO: 1161418
augcugaggcaggauaacg

SEQ ID NO: 1161420 - RNA, 19 nt, Artificial Sequence
  Description of Artificial Sequence: Synthetic oligonucleotide
  Sense strand starting at position 3155 of SEQ ID NO: 916498
gcacuugacucaucuaaug

SEQ ID NO: 1161421 - RNA, 19 nt, Artificial Sequence
  Description of Artificial Sequence: Synthetic oligonucleotide
  Antisense strand to SEQ ID NO: 1161420
cauuagaugagucaagugc

SEQ ID NO: 1161422 - RNA, 19 nt, Artificial Sequence
  Description of Artificial Sequence: Synthetic oligonucleotide
  Sense strand starting at position 3300 of SEQ ID NO: 916498
uguaucaggcaauauuaua

SEQ ID NO: 1161423 - RNA, 19 nt, Artificial Sequence
  Description of Artificial Sequence: Synthetic oligonucleotide
  Antisense strand to SEQ ID NO: 1161422
uauaauauugccugauaca

SEQ ID NO: 1161424 - RNA, 19 nt, Artificial Sequence
  Description of Artificial Sequence: Synthetic oligonucleotide
  Sense strand starting at position 3456 of SEQ ID NO: 916498
agagcuguccuccaggauu

SEQ ID NO: 1161425 - RNA, 19 nt, Artificial Sequence
  Description of Artificial Sequence: Synthetic oligonucleotide
  Antisense strand to SEQ ID NO: 1161424
aauccuggaggacagcucu

SEQ ID NO: 1161426 - RNA, 19 nt, Artificial Sequence
  Description of Artificial Sequence: Synthetic oligonucleotide
  Sense strand starting at position 3532 of SEQ ID NO: 916498
aaggaaaguuuccauuuag

SEQ ID NO: 1161427 - RNA, 19 nt, Artificial Sequence
  Description of Artificial Sequence: Synthetic oligonucleotide
  Antisense strand to SEQ ID NO: 1161426
cuaaauggaaacuuuccuu

SEQ ID NO: 1161428 - RNA, 19 nt, Artificial Sequence
  Description of Artificial Sequence: Synthetic oligonucleotide
  Sense strand starting at position 3640 of SEQ ID NO: 916498
gcucuuaaaugauugagaa

SEQ ID NO: 1161429 - RNA, 19 nt, Artificial Sequence
  Description of Artificial Sequence: Synthetic oligonucleotide
  Antisense strand to SEQ ID NO: 1161428
uucucaaucauuuaagagc

SEQ ID NO: 1161430 - RNA, 19 nt, Artificial Sequence
  Description of Artificial Sequence: Synthetic oligonucleotide
  Sense strand starting at position 3938 of SEQ ID NO: 916498
agagcaaagcauuggaagu

SEQ ID NO: 1161431 - RNA, 19 nt, Artificial Sequence
  Description of Artificial Sequence: Synthetic oligonucleotide
  Antisense strand to SEQ ID NO: 1161430
acuuccaaugcuuugcucu

SEQ ID NO: 1161432 - RNA, 19 nt, Artificial Sequence
  Description of Artificial Sequence: Synthetic oligonucleotide
  Sense strand starting at position 7 of SEQ ID NO: 916499
ugaagcacagagugauuau

SEQ ID NO: 1161433 - RNA, 19 nt, Artificial Sequence
  Description of Artificial Sequence: Synthetic oligonucleotide
  Antisense strand to SEQ ID NO: 1161432
auaaucacucugugcuuca

SEQ ID NO: 1161434 - RNA, 19 nt, Artificial Sequence
  Description of Artificial Sequence: Synthetic oligonucleotide
  Sense strand starting at position 18 of SEQ ID NO: 916499
gugauuauuugcccauggu

SEQ ID NO: 1161435 - RNA, 19 nt, Artificial Sequence
  Description of Artificial Sequence: Synthetic oligonucleotide
  Antisense strand to SEQ ID NO: 1161434
accaugggcaaauaaucac

SEQ ID NO: 1161436 - RNA, 19 nt, Artificial Sequence
  Description of Artificial Sequence: Synthetic oligonucleotide
  Sense strand starting at position 22 of SEQ ID NO: 916499
uuauuugcccauggucaca

SEQ ID NO: 1161437 - RNA, 19 nt, Artificial Sequence
  Description of Artificial Sequence: Synthetic oligonucleotide
  Antisense strand to SEQ ID NO: 1161436
ugugaccaugggcaaauaa

SEQ ID NO: 1161438 - RNA, 19 nt, Artificial Sequence
  Description of Artificial Sequence: Synthetic oligonucleotide
  Sense strand starting at position 54 of SEQ ID NO: 916499
acguauuagaacuggaaug

SEQ ID NO: 1161439 - RNA, 19 nt, Artificial Sequence
  Description of Artificial Sequence: Synthetic oligonucleotide
  Antisense strand to SEQ ID NO: 1161438
cauuccaguucuaauacgu

SEQ ID NO: 1161440 - RNA, 19 nt, Artificial Sequence
  Description of Artificial Sequence: Synthetic oligonucleotide
  Sense strand starting at position 100 of SEQ ID NO: 916499
acaucuugaucucugagag

SEQ ID NO: 1161441 - RNA, 19 nt, Artificial Sequence
  Description of Artificial Sequence: Synthetic oligonucleotide
  Antisense strand to SEQ ID NO: 1161440
cucucagagaucaagaugu

SEQ ID NO: 1161442 - RNA, 19 nt, Artificial Sequence
  Description of Artificial Sequence: Synthetic oligonucleotide
  Sense strand starting at position 177 of SEQ ID NO: 916499
agugaauacucagugcaua

SEQ ID NO: 1161443 - RNA, 19 nt, Artificial Sequence
  Description of Artificial Sequence: Synthetic oligonucleotide
  Antisense strand to SEQ ID NO: 1161442
uaugcacugaguauucacu

SEQ ID NO: 1161444 - RNA, 19 nt, Artificial Sequence
  Description of Artificial Sequence: Synthetic oligonucleotide
  Sense strand starting at position 178 of SEQ ID NO: 916499
gugaauacucagugcauac

SEQ ID NO: 1161445 - RNA, 19 nt, Artificial Sequence
  Description of Artificial Sequence: Synthetic oligonucleotide
  Antisense strand to SEQ ID NO: 1161444
guaugcacugaguauucac

SEQ ID NO: 1161446 - RNA, 19 nt, Artificial Sequence
  Description of Artificial Sequence: Synthetic oligonucleotide
  Sense strand starting at position 188 of SEQ ID NO: 916499
agugcauacucccugacua

SEQ ID NO: 1161447 - RNA, 19 nt, Artificial Sequence
  Description of Artificial Sequence: Synthetic oligonucleotide
  Antisense strand to SEQ ID NO: 1161446
uagucagggaguaugcacu

SEQ ID NO: 1161448 - RNA, 19 nt, Artificial Sequence
  Description of Artificial Sequence: Synthetic oligonucleotide
  Sense strand starting at position 189 of SEQ ID NO: 916499
gugcauacucccugacuaa

SEQ ID NO: 1161449 - RNA, 19 nt, Artificial Sequence
  Description of Artificial Sequence: Synthetic oligonucleotide
  Antisense strand to SEQ ID NO: 1161448
uuagucagggaguaugcac

SEQ ID NO: 1161450 - RNA, 19 nt, Artificial Sequence
  Description of Artificial Sequence: Synthetic oligonucleotide
  Sense strand starting at position 432 of SEQ ID NO: 916499
ugaaguucccagugagaau

SEQ ID NO: 1161451 - RNA, 19 nt, Artificial Sequence
  Description of Artificial Sequence: Synthetic oligonucleotide
  Antisense strand to SEQ ID NO: 1161450
auucucacugggaacuuca

SEQ ID NO: 1161452 - RNA, 19 nt, Artificial Sequence
  Description of Artificial Sequence: Synthetic oligonucleotide
  Sense strand starting at position 715 of SEQ ID NO: 916499
augucuagccaugauacgu

SEQ ID NO: 1161453 - RNA, 19 nt, Artificial Sequence
  Description of Artificial Sequence: Synthetic oligonucleotide
  Antisense strand to SEQ ID NO: 1161452
acguaucauggcuagacau

SEQ ID NO: 1161454 - RNA, 19 nt, Artificial Sequence
  Description of Artificial Sequence: Synthetic oligonucleotide
  Sense strand starting at position 839 of SEQ ID NO: 916499
cauguuugacagugaagua

SEQ ID NO: 1161455 - RNA, 19 nt, Artificial Sequence
  Description of Artificial Sequence: Synthetic oligonucleotide
  Antisense strand to SEQ ID NO: 1161454
uacuucacugucaaacaug

SEQ ID NO: 1161456 - RNA, 19 nt, Artificial Sequence
  Description of Artificial Sequence: Synthetic oligonucleotide
  Sense strand starting at position 840 of SEQ ID NO: 916499
auguuugacagugaaguag

SEQ ID NO: 1161457 - RNA, 19 nt, Artificial Sequence
  Description of Artificial Sequence: Synthetic oligonucleotide
  Antisense strand to SEQ ID NO: 1161456
cuacuucacugucaaacau

SEQ ID NO: 1161458 - RNA, 19 nt, Artificial Sequence
  Description of Artificial Sequence: Synthetic oligonucleotide
  Sense strand starting at position 912 of SEQ ID NO: 916499
augagaaguugcucuccuu

SEQ ID NO: 1161459 - RNA, 19 nt, Artificial Sequence
  Description of Artificial Sequence: Synthetic oligonucleotide
  Antisense strand to SEQ ID NO: 1161458
aaggagagcaacuucucau

SEQ ID NO: 1161460 - RNA, 19 nt, Artificial Sequence
  Description of Artificial Sequence: Synthetic oligonucleotide
  Sense strand starting at position 1053 of SEQ ID NO: 916499
ucaggaagaucuccacugu

SEQ ID NO: 1161461 - RNA, 19 nt, Artificial Sequence
  Description of Artificial Sequence: Synthetic oligonucleotide
  Antisense strand to SEQ ID NO: 1161460
acaguggagaucuuccuga

SEQ ID NO: 1161462 - RNA, 19 nt, Artificial Sequence
  Description of Artificial Sequence: Synthetic oligonucleotide
  Sense strand starting at position 1150 of SEQ ID NO: 916499
aguguuaccuccucaagac

SEQ ID NO: 1161463 - RNA, 19 nt, Artificial Sequence
  Description of Artificial Sequence: Synthetic oligonucleotide
  Antisense strand to SEQ ID NO: 1161462
gucuugaggagguaacacu

SEQ ID NO: 1161464 - RNA, 19 nt, Artificial Sequence
  Description of Artificial Sequence: Synthetic oligonucleotide
  Sense strand starting at position 1151 of SEQ ID NO: 916499
guguuaccuccucaagacu

SEQ ID NO: 1161465 - RNA, 19 nt, Artificial Sequence
  Description of Artificial Sequence: Synthetic oligonucleotide
  Antisense strand to SEQ ID NO: 1161464
agucuugaggagguaacac

SEQ ID NO: 1161466 - RNA, 19 nt, Artificial Sequence
  Description of Artificial Sequence: Synthetic oligonucleotide
  Sense strand starting at position 1177 of SEQ ID NO: 916499
caaggaucucguuacggca

SEQ ID NO: 1161467 - RNA, 19 nt, Artificial Sequence
  Description of Artificial Sequence: Synthetic oligonucleotide
  Antisense strand to SEQ ID NO: 1161466
ugccguaacgagauccuug

SEQ ID NO: 1161468 - RNA, 19 nt, Artificial Sequence
  Description of Artificial Sequence: Synthetic oligonucleotide
  Sense strand starting at position 1300 of SEQ ID NO: 916499
cacuuacauguaugaggaa

SEQ ID NO: 1161469 - RNA, 19 nt, Artificial Sequence
  Description of Artificial Sequence: Synthetic oligonucleotide
  Antisense strand to SEQ ID NO: 1161468
uuccucauacauguaagug

SEQ ID NO: 1161470 - RNA, 19 nt, Artificial Sequence
  Description of Artificial Sequence: Synthetic oligonucleotide
  Sense strand starting at position 1593 of SEQ ID NO: 916499
caaccauuaccguguugag

SEQ ID NO: 1161471 - RNA, 19 nt, Artificial Sequence
  Description of Artificial Sequence: Synthetic oligonucleotide
  Antisense strand to SEQ ID NO: 1161470
cucaacacgguaaugguug

SEQ ID NO: 1161472 - RNA, 19 nt, Artificial Sequence
  Description of Artificial Sequence: Synthetic oligonucleotide
  Sense strand starting at position 1602 of SEQ ID NO: 916499
ccguguugagugcuagguu

SEQ ID NO: 1161473 - RNA, 19 nt, Artificial Sequence
  Description of Artificial Sequence: Synthetic oligonucleotide
  Antisense strand to SEQ ID NO: 1161472
aaccuagcacucaacacgg

SEQ ID NO: 1161474 - RNA, 19 nt, Artificial Sequence
  Description of Artificial Sequence: Synthetic oligonucleotide
  Sense strand starting at position 2007 of SEQ ID NO: 916499
ggccuugucuggguggaca

SEQ ID NO: 1161475 - RNA, 19 nt, Artificial Sequence
  Description of Artificial Sequence: Synthetic oligonucleotide
  Antisense strand to SEQ ID NO: 1161474
uguccacccagacaaggcc

SEQ ID NO: 1161476 - RNA, 19 nt, Artificial Sequence
  Description of Artificial Sequence: Synthetic oligonucleotide
  Sense strand starting at position 2156 of SEQ ID NO: 916499
gccuuucucaacugggaga

SEQ ID NO: 1161477 - RNA, 19 nt, Artificial Sequence
  Description of Artificial Sequence: Synthetic oligonucleotide
  Antisense strand to SEQ ID NO: 1161476
ucucccaguugagaaaggc

SEQ ID NO: 1161478 - RNA, 19 nt, Artificial Sequence
  Description of Artificial Sequence: Synthetic oligonucleotide
  Sense strand starting at position 2493 of SEQ ID NO: 916499
auucuuuaguucccaggga

SEQ ID NO: 1161479 - RNA, 19 nt, Artificial Sequence
  Description of Artificial Sequence: Synthetic oligonucleotide
  Antisense strand to SEQ ID NO: 1161478
ucccugggaacuaaagaau

SEQ ID NO: 1161480 - RNA, 19 nt, Artificial Sequence
  Description of Artificial Sequence: Synthetic oligonucleotide
  Sense strand starting at position 2497 of SEQ ID NO: 916499
uuuaguucccagggauuag

SEQ ID NO: 1161481 - RNA, 19 nt, Artificial Sequence
  Description of Artificial Sequence: Synthetic oligonucleotide
  Antisense strand to SEQ ID NO: 1161480
cuaaucccugggaacuaaa

SEQ ID NO: 1161482 - RNA, 19 nt, Artificial Sequence
  Description of Artificial Sequence: Synthetic oligonucleotide
  Sense strand starting at position 2747 of SEQ ID NO: 916499
aagaaagggacucguaguu

SEQ ID NO: 1161483 - RNA, 19 nt, Artificial Sequence
  Description of Artificial Sequence: Synthetic oligonucleotide
  Antisense strand to SEQ ID NO: 1161482
aacuacgagucccuuucuu

SEQ ID NO: 1161484 - RNA, 19 nt, Artificial Sequence
  Description of Artificial Sequence: Synthetic oligonucleotide
  Sense strand starting at position 2760 of SEQ ID NO: 916499
guaguuaaaccuuagaauc

SEQ ID NO: 1161485 - RNA, 19 nt, Artificial Sequence
  Description of Artificial Sequence: Synthetic oligonucleotide
  Antisense strand to SEQ ID NO: 1161484
gauucuaagguuuaacuac

SEQ ID NO: 1161486 - RNA, 19 nt, Artificial Sequence
  Description of Artificial Sequence: Synthetic oligonucleotide
  Sense strand starting at position 2768 of SEQ ID NO: 916499
accuuagaaucagcuugua

SEQ ID NO: 1161487 - RNA, 19 nt, Artificial Sequence
  Description of Artificial Sequence: Synthetic oligonucleotide
  Antisense strand to SEQ ID NO: 1161486
uacaagcugauucuaaggu

SEQ ID NO: 1161488 - RNA, 19 nt, Artificial Sequence
  Description of Artificial Sequence: Synthetic oligonucleotide
  Sense strand starting at position 2841 of SEQ ID NO: 916499
cagucauggcuaugaagca

SEQ ID NO: 1161489 - RNA, 19 nt, Artificial Sequence
  Description of Artificial Sequence: Synthetic oligonucleotide
  Antisense strand to SEQ ID NO: 1161488
ugcuucauagccaugacug

SEQ ID NO: 1161490 - RNA, 19 nt, Artificial Sequence
  Description of Artificial Sequence: Synthetic oligonucleotide
  Sense strand starting at position 2867 of SEQ ID NO: 916499
ggucuaauguccuuuaaua

SEQ ID NO: 1161491 - RNA, 19 nt, Artificial Sequence
  Description of Artificial Sequence: Synthetic oligonucleotide
  Antisense strand to SEQ ID NO: 1161490
uauuaaaggacauuagacc

SEQ ID NO: 1161492 - RNA, 19 nt, Artificial Sequence
  Description of Artificial Sequence: Synthetic oligonucleotide
  Sense strand starting at position 3070 of SEQ ID NO: 916499
uguggugauggagaaggua

SEQ ID NO: 1161493 - RNA, 19 nt, Artificial Sequence
  Description of Artificial Sequence: Synthetic oligonucleotide
  Antisense strand to SEQ ID NO: 1161492
uaccuucuccaucaccaca

SEQ ID NO: 1161494 - RNA, 19 nt, Artificial Sequence
  Description of Artificial Sequence: Synthetic oligonucleotide
  Sense strand starting at position 3173 of SEQ ID NO: 916499
agcagaaauucgaggugag

SEQ ID NO: 1161495 - RNA, 19 nt, Artificial Sequence
  Description of Artificial Sequence: Synthetic oligonucleotide
  Antisense strand to SEQ ID NO: 1161494
cucaccucgaauuucugcu

SEQ ID NO: 1161496 - RNA, 19 nt, Artificial Sequence
  Description of Artificial Sequence: Synthetic oligonucleotide
  Sense strand starting at position 3183 of SEQ ID NO: 916499
cgaggugaggccugcaaga

SEQ ID NO: 1161497 - RNA, 19 nt, Artificial Sequence
  Description of Artificial Sequence: Synthetic oligonucleotide
  Antisense strand to SEQ ID NO: 1161496
ucuugcaggccucaccucg

SEQ ID NO: 1161498 - RNA, 19 nt, Artificial Sequence
  Description of Artificial Sequence: Synthetic oligonucleotide
  Sense strand starting at position 3185 of SEQ ID NO: 916499
aggugaggccugcaagaau

SEQ ID NO: 1161499 - RNA, 19 nt, Artificial Sequence
  Description of Artificial Sequence: Synthetic oligonucleotide
  Antisense strand to SEQ ID NO: 1161498
auucuugcaggccucaccu

SEQ ID NO: 1161500 - RNA, 19 nt, Artificial Sequence
  Description of Artificial Sequence: Synthetic oligonucleotide
  Sense strand starting at position 3197 of SEQ ID NO: 916499
caagaauggugcccagcau

SEQ ID NO: 1161501 - RNA, 19 nt, Artificial Sequence
  Description of Artificial Sequence: Synthetic oligonucleotide
  Antisense strand to SEQ ID NO: 1161500
augcugggcaccauucuug

SEQ ID NO: 1161502 - RNA, 19 nt, Artificial Sequence
  Description of Artificial Sequence: Synthetic oligonucleotide
  Sense strand starting at position 3307 of SEQ ID NO: 916499
gaaagagaguuauagugaa

SEQ ID NO: 1161503 - RNA, 19 nt, Artificial Sequence
  Description of Artificial Sequence: Synthetic oligonucleotide
  Antisense strand to SEQ ID NO: 1161502
uucacuauaacucucuuuc

SEQ ID NO: 1161504 - RNA, 19 nt, Artificial Sequence
  Description of Artificial Sequence: Synthetic oligonucleotide
  Sense strand starting at position 3356 of SEQ ID NO: 916499
caggaagaguugcugagaa

SEQ ID NO: 1161505 - RNA, 19 nt, Artificial Sequence
  Description of Artificial Sequence: Synthetic oligonucleotide
  Antisense strand to SEQ ID NO: 1161504
uucucagcaacucuuccug

SEQ ID NO: 1161506 - RNA, 19 nt, Artificial Sequence
  Description of Artificial Sequence: Synthetic oligonucleotide
  Sense strand starting at position 3434 of SEQ ID NO: 916499
acuagaagucauuggaauc

SEQ ID NO: 1161507 - RNA, 19 nt, Artificial Sequence
  Description of Artificial Sequence: Synthetic oligonucleotide
  Antisense strand to SEQ ID NO: 1161506
gauuccaaugacuucuagu

SEQ ID NO: 1161508 - RNA, 19 nt, Artificial Sequence
  Description of Artificial Sequence: Synthetic oligonucleotide
  Sense strand starting at position 3632 of SEQ ID NO: 916499
ugguguuaagagcagagau

SEQ ID NO: 1161509 - RNA, 19 nt, Artificial Sequence
  Description of Artificial Sequence: Synthetic oligonucleotide
  Antisense strand to SEQ ID NO: 1161508
aucucugcucuuaacacca

SEQ ID NO: 1161510 - RNA, 19 nt, Artificial Sequence
  Description of Artificial Sequence: Synthetic oligonucleotide
  Sense strand starting at position 3669 of SEQ ID NO: 916499
gguccaauuaggugaggau

SEQ ID NO: 1161511 - RNA, 19 nt, Artificial Sequence
  Description of Artificial Sequence: Synthetic oligonucleotide
  Antisense strand to SEQ ID NO: 1161510
auccucaccuaauuggacc

SEQ ID NO: 1161512 - RNA, 19 nt, Artificial Sequence
  Description of Artificial Sequence: Synthetic oligonucleotide
  Sense strand starting at position 41 of SEQ ID NO: 916500
gacugaauaggacgaugua

SEQ ID NO: 1161513 - RNA, 19 nt, Artificial Sequence
  Description of Artificial Sequence: Synthetic oligonucleotide
  Antisense strand to SEQ ID NO: 1161512
uacaucguccuauucaguc

SEQ ID NO: 1161514 - RNA, 19 nt, Artificial Sequence
  Description of Artificial Sequence: Synthetic oligonucleotide
  Sense strand starting at position 50 of SEQ ID NO: 916500
ggacgauguaaccaaugua

SEQ ID NO: 1161515 - RNA, 19 nt, Artificial Sequence
  Description of Artificial Sequence: Synthetic oligonucleotide
  Antisense strand to SEQ ID NO: 1161514
uacauugguuacaucgucc

SEQ ID NO: 1161516 - RNA, 19 nt, Artificial Sequence
  Description of Artificial Sequence: Synthetic oligonucleotide
  Sense strand starting at position 63 of SEQ ID NO: 916500
aauguaaggccugguaucu

SEQ ID NO: 1161517 - RNA, 19 nt, Artificial Sequence
  Description of Artificial Sequence: Synthetic oligonucleotide
  Antisense strand to SEQ ID NO: 1161516
agauaccaggccuuacauu

SEQ ID NO: 1161518 - RNA, 19 nt, Artificial Sequence
  Description of Artificial Sequence: Synthetic oligonucleotide
  Sense strand starting at position 75 of SEQ ID NO: 916500
gguaucugcuaagugaaag

SEQ ID NO: 1161519 - RNA, 19 nt, Artificial Sequence
  Description of Artificial Sequence: Synthetic oligonucleotide
  Antisense strand to SEQ ID NO: 1161518
cuuucacuuagcagauacc

SEQ ID NO: 1161520 - RNA, 19 nt, Artificial Sequence
  Description of Artificial Sequence: Synthetic oligonucleotide
  Sense strand starting at position 76 of SEQ ID NO: 916500
guaucugcuaagugaaaga

SEQ ID NO: 1161521 - RNA, 19 nt, Artificial Sequence
  Description of Artificial Sequence: Synthetic oligonucleotide
  Antisense strand to SEQ ID NO: 1161520
ucuuucacuuagcagauac

SEQ ID NO: 1161522 - RNA, 19 nt, Artificial Sequence
  Description of Artificial Sequence: Synthetic oligonucleotide
  Sense strand starting at position 120 of SEQ ID NO: 916500
ccgcuaucucaagaggcaa

SEQ ID NO: 1161523 - RNA, 19 nt, Artificial Sequence
  Description of Artificial Sequence: Synthetic oligonucleotide
  Antisense strand to SEQ ID NO: 1161522
uugccucuugagauagcgg

SEQ ID NO: 1161524 - RNA, 19 nt, Artificial Sequence
  Description of Artificial Sequence: Synthetic oligonucleotide
  Sense strand starting at position 141 of SEQ ID NO: 916500
uccacaaacugucuaguuu

SEQ ID NO: 1161525 - RNA, 19 nt, Artificial Sequence
  Description of Artificial Sequence: Synthetic oligonucleotide
  Antisense strand to SEQ ID NO: 1161524
aaacuagacaguuugugga

SEQ ID NO: 1161526 - RNA, 19 nt, Artificial Sequence
  Description of Artificial Sequence: Synthetic oligonucleotide
  Sense strand starting at position 182 of SEQ ID NO: 916500
gcccacacucgugaagaaa

SEQ ID NO: 1161527 - RNA, 19 nt, Artificial Sequence
  Description of Artificial Sequence: Synthetic oligonucleotide
  Antisense strand to SEQ ID NO: 1161526
uuucuucacgagugugggc

SEQ ID NO: 1161528 - RNA, 19 nt, Artificial Sequence
  Description of Artificial Sequence: Synthetic oligonucleotide
  Sense strand starting at position 260 of SEQ ID NO: 916500
gcuguuaccgcugcuaaag

SEQ ID NO: 1161529 - RNA, 19 nt, Artificial Sequence
  Description of Artificial Sequence: Synthetic oligonucleotide
  Antisense strand to SEQ ID NO: 1161528
cuuuagcagcgguaacagc

SEQ ID NO: 1161530 - RNA, 19 nt, Artificial Sequence
  Description of Artificial Sequence: Synthetic oligonucleotide
  Sense strand starting at position 305 of SEQ ID NO: 916500
aggcuacugugaucuacau

SEQ ID NO: 1161531 - RNA, 19 nt, Artificial Sequence
  Description of Artificial Sequence: Synthetic oligonucleotide
  Antisense strand to SEQ ID NO: 1161530
auguagaucacaguagccu

SEQ ID NO: 1161532 - RNA, 19 nt, Artificial Sequence
  Description of Artificial Sequence: Synthetic oligonucleotide
  Sense strand starting at position 392 of SEQ ID NO: 916500
acaugugugaaaggcaaua

SEQ ID NO: 1161533 - RNA, 19 nt, Artificial Sequence
  Description of Artificial Sequence: Synthetic oligonucleotide
  Antisense strand to SEQ ID NO: 1161532
uauugccuuucacacaugu

SEQ ID NO: 1161534 - RNA, 19 nt, Artificial Sequence
  Description of Artificial Sequence: Synthetic oligonucleotide
  Sense strand starting at position 440 of SEQ ID NO: 916500
cugcaaucgacuugggaag

SEQ ID NO: 1161535 - RNA, 19 nt, Artificial Sequence
  Description of Artificial Sequence: Synthetic oligonucleotide
  Antisense strand to SEQ ID NO: 1161534
cuucccaagucgauugcag

SEQ ID NO: 1161536 - RNA, 19 nt, Artificial Sequence
  Description of Artificial Sequence: Synthetic oligonucleotide
  Sense strand starting at position 441 of SEQ ID NO: 916500
ugcaaucgacuugggaaga

SEQ ID NO: 1161537 - RNA, 19 nt, Artificial Sequence
  Description of Artificial Sequence: Synthetic oligonucleotide
  Antisense strand to SEQ ID NO: 1161536
ucuucccaagucgauugca

SEQ ID NO: 1161538 - RNA, 19 nt, Artificial Sequence
  Description of Artificial Sequence: Synthetic oligonucleotide
  Sense strand starting at position 871 of SEQ ID NO: 916500
acuguugcccagcaaguua

SEQ ID NO: 1161539 - RNA, 19 nt, Artificial Sequence
  Description of Artificial Sequence: Synthetic oligonucleotide
  Antisense strand to SEQ ID NO: 1161538
uaacuugcugggcaacagu

SEQ ID NO: 1161540 - RNA, 19 nt, Artificial Sequence
  Description of Artificial Sequence: Synthetic oligonucleotide
  Sense strand starting at position 949 of SEQ ID NO: 916500
uuguaagcauucucugaua

SEQ ID NO: 1161541 - RNA, 19 nt, Artificial Sequence
  Description of Artificial Sequence: Synthetic oligonucleotide
  Antisense strand to SEQ ID NO: 1161540
uaucagagaaugcuuacaa

SEQ ID NO: 1161542 - RNA, 19 nt, Artificial Sequence
  Description of Artificial Sequence: Synthetic oligonucleotide
  Sense strand starting at position 951 of SEQ ID NO: 916500
guaagcauucucugauaga

SEQ ID NO: 1161543 - RNA, 19 nt, Artificial Sequence
  Description of Artificial Sequence: Synthetic oligonucleotide
  Antisense strand to SEQ ID NO: 1161542
ucuaucagagaaugcuuac

SEQ ID NO: 1161544 - RNA, 19 nt, Artificial Sequence
  Description of Artificial Sequence: Synthetic oligonucleotide
  Sense strand starting at position 976 of SEQ ID NO: 916500
ggauucuuacacugguuga

SEQ ID NO: 1161545 - RNA, 19 nt, Artificial Sequence
  Description of Artificial Sequence: Synthetic oligonucleotide
  Antisense strand to SEQ ID NO: 1161544
ucaaccaguguaagaaucc

SEQ ID NO: 1161546 - RNA, 19 nt, Artificial Sequence
  Description of Artificial Sequence: Synthetic oligonucleotide
  Sense strand starting at position 1026 of SEQ ID NO: 916500
gcaggauggcuucgauaga

SEQ ID NO: 1161547 - RNA, 19 nt, Artificial Sequence
  Description of Artificial Sequence: Synthetic oligonucleotide
  Antisense strand to SEQ ID NO: 1161546
ucuaucgaagccauccugc

SEQ ID NO: 1161548 - RNA, 19 nt, Artificial Sequence
  Description of Artificial Sequence: Synthetic oligonucleotide
  Sense strand starting at position 1087 of SEQ ID NO: 916500
acauauucuucgcucgaaa

SEQ ID NO: 1161549 - RNA, 19 nt, Artificial Sequence
  Description of Artificial Sequence: Synthetic oligonucleotide
  Antisense strand to SEQ ID NO: 1161548
uuucgagcgaagaauaugu

SEQ ID NO: 1161550 - RNA, 19 nt, Artificial Sequence
  Description of Artificial Sequence: Synthetic oligonucleotide
  Sense strand starting at position 1142 of SEQ ID NO: 916500
ggcccauucucuucgaaga

SEQ ID NO: 1161551 - RNA, 19 nt, Artificial Sequence
  Description of Artificial Sequence: Synthetic oligonucleotide
  Antisense strand to SEQ ID NO: 1161550
ucuucgaagagaaugggcc

SEQ ID NO: 1161552 - RNA, 19 nt, Artificial Sequence
  Description of Artificial Sequence: Synthetic oligonucleotide
  Sense strand starting at position 1143 of SEQ ID NO: 916500
gcccauucucuucgaagau

SEQ ID NO: 1161553 - RNA, 19 nt, Artificial Sequence
  Description of Artificial Sequence: Synthetic oligonucleotide
  Antisense strand to SEQ ID NO: 1161552
aucuucgaagagaaugggc

SEQ ID NO: 1161554 - RNA, 19 nt, Artificial Sequence
  Description of Artificial Sequence: Synthetic oligonucleotide
  Sense strand starting at position 1152 of SEQ ID NO: 916500
cuucgaagauuccuuccua

SEQ ID NO: 1161555 - RNA, 19 nt, Artificial Sequence
  Description of Artificial Sequence: Synthetic oligonucleotide
  Antisense strand to SEQ ID NO: 1161554
uaggaaggaaucuucgaag

SEQ ID NO: 1161556 - RNA, 19 nt, Artificial Sequence
  Description of Artificial Sequence: Synthetic oligonucleotide
  Sense strand starting at position 1153 of SEQ ID NO: 916500
uucgaagauuccuuccuau

SEQ ID NO: 1161557 - RNA, 19 nt, Artificial Sequence
  Description of Artificial Sequence: Synthetic oligonucleotide
  Antisense strand to SEQ ID NO: 1161556
auaggaaggaaucuucgaa

SEQ ID NO: 1161558 - RNA, 19 nt, Artificial Sequence
  Description of Artificial Sequence: Synthetic oligonucleotide
  Sense strand starting at position 1165 of SEQ ID NO: 916500
uuccuauucuggcuaagaa

SEQ ID NO: 1161559 - RNA, 19 nt, Artificial Sequence
  Description of Artificial Sequence: Synthetic oligonucleotide
  Antisense strand to SEQ ID NO: 1161558
uucuuagccagaauaggaa

SEQ ID NO: 1161560 - RNA, 19 nt, Artificial Sequence
  Description of Artificial Sequence: Synthetic oligonucleotide
  Sense strand starting at position 1166 of SEQ ID NO: 916500
uccuauucuggcuaagaau

SEQ ID NO: 1161561 - RNA, 19 nt, Artificial Sequence
  Description of Artificial Sequence: Synthetic oligonucleotide
  Antisense strand to SEQ ID NO: 1161560
auucuuagccagaauagga

SEQ ID NO: 1161562 - RNA, 19 nt, Artificial Sequence
  Description of Artificial Sequence: Synthetic oligonucleotide
  Sense strand starting at position 1234 of SEQ ID NO: 916500
cgacgagaaucucccaaga

SEQ ID NO: 1161563 - RNA, 19 nt, Artificial Sequence
  Description of Artificial Sequence: Synthetic oligonucleotide
  Antisense strand to SEQ ID NO: 1161562
ucuugggagauucucgucg

SEQ ID NO: 1161564 - RNA, 19 nt, Artificial Sequence
  Description of Artificial Sequence: Synthetic oligonucleotide
  Sense strand starting at position 1423 of SEQ ID NO: 916500
guaugacucuagguaccuu

SEQ ID NO: 1161565 - RNA, 19 nt, Artificial Sequence
  Description of Artificial Sequence: Synthetic oligonucleotide
  Antisense strand to SEQ ID NO: 1161564
aagguaccuagagucauac

SEQ ID NO: 1161566 - RNA, 19 nt, Artificial Sequence
  Description of Artificial Sequence: Synthetic oligonucleotide
  Sense strand starting at position 1493 of SEQ ID NO: 916500
agagaaacuucgcuccaga

SEQ ID NO: 1161567 - RNA, 19 nt, Artificial Sequence
  Description of Artificial Sequence: Synthetic oligonucleotide
  Antisense strand to SEQ ID NO: 1161566
ucuggagcgaaguuucucu

SEQ ID NO: 1161568 - RNA, 19 nt, Artificial Sequence
  Description of Artificial Sequence: Synthetic oligonucleotide
  Sense strand starting at position 1496 of SEQ ID NO: 916500
gaaacuucgcuccagagac

SEQ ID NO: 1161569 - RNA, 19 nt, Artificial Sequence
  Description of Artificial Sequence: Synthetic oligonucleotide
  Antisense strand to SEQ ID NO: 1161568
gucucuggagcgaaguuuc

SEQ ID NO: 1161570 - RNA, 19 nt, Artificial Sequence
  Description of Artificial Sequence: Synthetic oligonucleotide
  Sense strand starting at position 2204 of SEQ ID NO: 916500
ggagugaguucgguugaag

SEQ ID NO: 1161571 - RNA, 19 nt, Artificial Sequence
  Description of Artificial Sequence: Synthetic oligonucleotide
  Antisense strand to SEQ ID NO: 1161570
cuucaaccgaacucacucc

SEQ ID NO: 1161572 - RNA, 19 nt, Artificial Sequence
  Description of Artificial Sequence: Synthetic oligonucleotide
  Sense strand starting at position 2430 of SEQ ID NO: 916500
gcagcaugagcauaaauuc

SEQ ID NO: 1161573 - RNA, 19 nt, Artificial Sequence
  Description of Artificial Sequence: Synthetic oligonucleotide
  Antisense strand to SEQ ID NO: 1161572
gaauuuaugcucaugcugc

SEQ ID NO: 1161574 - RNA, 19 nt, Artificial Sequence
  Description of Artificial Sequence: Synthetic oligonucleotide
  Sense strand starting at position 2518 of SEQ ID NO: 916500
acccaugcuuucccagaga

SEQ ID NO: 1161575 - RNA, 19 nt, Artificial Sequence
  Description of Artificial Sequence: Synthetic oligonucleotide
  Antisense strand to SEQ ID NO: 1161574
ucucugggaaagcaugggu

SEQ ID NO: 1161576 - RNA, 19 nt, Artificial Sequence
  Description of Artificial Sequence: Synthetic oligonucleotide
  Sense strand starting at position 3104 of SEQ ID NO: 916500
cuaccaggguugucagauu

SEQ ID NO: 1161577 - RNA, 19 nt, Artificial Sequence
  Description of Artificial Sequence: Synthetic oligonucleotide
  Antisense strand to SEQ ID NO: 1161576
aaucugacaacccugguag

SEQ ID NO: 1161578 - RNA, 19 nt, Artificial Sequence
  Description of Artificial Sequence: Synthetic oligonucleotide
  Sense strand starting at position 3366 of SEQ ID NO: 916500
uaguuagaacagugguaag

SEQ ID NO: 1161579 - RNA, 19 nt, Artificial Sequence
  Description of Artificial Sequence: Synthetic oligonucleotide
  Antisense strand to SEQ ID NO: 1161578
cuuaccacuguucuaacua

SEQ ID NO: 1161580 - RNA, 19 nt, Artificial Sequence
  Description of Artificial Sequence: Synthetic oligonucleotide
  Sense strand starting at position 3383 of SEQ ID NO: 916500
agugcuauacgggaacaaa

SEQ ID NO: 1161581 - RNA, 19 nt, Artificial Sequence
  Description of Artificial Sequence: Synthetic oligonucleotide
  Antisense strand to SEQ ID NO: 1161580
uuuguucccguauagcacu

SEQ ID NO: 1161582 - RNA, 19 nt, Artificial Sequence
  Description of Artificial Sequence: Synthetic oligonucleotide
  Sense strand starting at position 3417 of SEQ ID NO: 916500
agagacuaucaguggugga

SEQ ID NO: 1161583 - RNA, 19 nt, Artificial Sequence
  Description of Artificial Sequence: Synthetic oligonucleotide
  Antisense strand to SEQ ID NO: 1161582
uccaccacugauagucucu

SEQ ID NO: 1161584 - RNA, 19 nt, Artificial Sequence
  Description of Artificial Sequence: Synthetic oligonucleotide
  Sense strand starting at position 3418 of SEQ ID NO: 916500
gagacuaucagugguggau

SEQ ID NO: 1161585 - RNA, 19 nt, Artificial Sequence
  Description of Artificial Sequence: Synthetic oligonucleotide
  Antisense strand to SEQ ID NO: 1161584
auccaccacugauagucuc

SEQ ID NO: 1161586 - RNA, 19 nt, Artificial Sequence
  Description of Artificial Sequence: Synthetic oligonucleotide
  Sense strand starting at position 3421 of SEQ ID NO: 916500
acuaucagugguggaucua

SEQ ID NO: 1161587 - RNA, 19 nt, Artificial Sequence
  Description of Artificial Sequence: Synthetic oligonucleotide
  Antisense strand to SEQ ID NO: 1161586
uagauccaccacugauagu

SEQ ID NO: 1161588 - RNA, 19 nt, Artificial Sequence
  Description of Artificial Sequence: Synthetic oligonucleotide
  Sense strand starting at position 3422 of SEQ ID NO: 916500
cuaucagugguggaucuaa

SEQ ID NO: 1161589 - RNA, 19 nt, Artificial Sequence
  Description of Artificial Sequence: Synthetic oligonucleotide
  Antisense strand to SEQ ID NO: 1161588
uuagauccaccacugauag

SEQ ID NO: 1161590 - RNA, 19 nt, Artificial Sequence
  Description of Artificial Sequence: Synthetic oligonucleotide
  Sense strand starting at position 3776 of SEQ ID NO: 916500
uuuauuagagaccgaguuu

SEQ ID NO: 1161591 - RNA, 19 nt, Artificial Sequence
  Description of Artificial Sequence: Synthetic oligonucleotide
  Antisense strand to SEQ ID NO: 1161590
aaacucggucucuaauaaa

SEQ ID NO: 1161592 - RNA, 19 nt, Artificial Sequence
  Description of Artificial Sequence: Synthetic oligonucleotide
  Sense strand starting at position 55 of SEQ ID NO: 916501
cugugacugcugugaucca

SEQ ID NO: 1161593 - RNA, 19 nt, Artificial Sequence
  Description of Artificial Sequence: Synthetic oligonucleotide
  Antisense strand to SEQ ID NO: 1161592
uggaucacagcagucacag

SEQ ID NO: 1161594 - RNA, 19 nt, Artificial Sequence
  Description of Artificial Sequence: Synthetic oligonucleotide
  Sense strand starting at position 254 of SEQ ID NO: 916501
cuuccuaaugcguaugaac

SEQ ID NO: 1161595 - RNA, 19 nt, Artificial Sequence
  Description of Artificial Sequence: Synthetic oligonucleotide
  Antisense strand to SEQ ID NO: 1161594
guucauacgcauuaggaag

SEQ ID NO: 1161596 - RNA, 19 nt, Artificial Sequence
  Description of Artificial Sequence: Synthetic oligonucleotide
  Sense strand starting at position 256 of SEQ ID NO: 916501
uccuaaugcguaugaacuu

SEQ ID NO: 1161597 - RNA, 19 nt, Artificial Sequence
  Description of Artificial Sequence: Synthetic oligonucleotide
  Antisense strand to SEQ ID NO: 1161596
aaguucauacgcauuagga

SEQ ID NO: 1161598 - RNA, 19 nt, Artificial Sequence
  Description of Artificial Sequence: Synthetic oligonucleotide
  Sense strand starting at position 496 of SEQ ID NO: 916501
cgaacuucugacugcaagu

SEQ ID NO: 1161599 - RNA, 19 nt, Artificial Sequence
  Description of Artificial Sequence: Synthetic oligonucleotide
  Antisense strand to SEQ ID NO: 1161598
acuugcagucagaaguucg

SEQ ID NO: 1161600 - RNA, 19 nt, Artificial Sequence
  Description of Artificial Sequence: Synthetic oligonucleotide
  Sense strand starting at position 583 of SEQ ID NO: 916501
ggcucagagcuuugugaau

SEQ ID NO: 1161601 - RNA, 19 nt, Artificial Sequence
  Description of Artificial Sequence: Synthetic oligonucleotide
  Antisense strand to SEQ ID NO: 1161600
auucacaaagcucugagcc

SEQ ID NO: 1161602 - RNA, 19 nt, Artificial Sequence
  Description of Artificial Sequence: Synthetic oligonucleotide
  Sense strand starting at position 589 of SEQ ID NO: 916501
gagcuuugugaaugccaua

SEQ ID NO: 1161603 - RNA, 19 nt, Artificial Sequence
  Description of Artificial Sequence: Synthetic oligonucleotide
  Antisense strand to SEQ ID NO: 1161602
uauggcauucacaaagcuc

SEQ ID NO: 1161604 - RNA, 19 nt, Artificial Sequence
  Description of Artificial Sequence: Synthetic oligonucleotide
  Sense strand starting at position 649 of SEQ ID NO: 916501
gaggcacauuugggaauaa

SEQ ID NO: 1161605 - RNA, 19 nt, Artificial Sequence
  Description of Artificial Sequence: Synthetic oligonucleotide
  Antisense strand to SEQ ID NO: 1161604
uuauucccaaaugugccuc

SEQ ID NO: 1161606 - RNA, 19 nt, Artificial Sequence
  Description of Artificial Sequence: Synthetic oligonucleotide
  Sense strand starting at position 650 of SEQ ID NO: 916501
aggcacauuugggaauaau

SEQ ID NO: 1161607 - RNA, 19 nt, Artificial Sequence
  Description of Artificial Sequence: Synthetic oligonucleotide
  Antisense strand to SEQ ID NO: 1161606
auuauucccaaaugugccu

SEQ ID NO: 1161608 - RNA, 19 nt, Artificial Sequence
  Description of Artificial Sequence: Synthetic oligonucleotide
  Sense strand starting at position 678 of SEQ ID NO: 916501
uagagagugugucugagau

SEQ ID NO: 1161609 - RNA, 19 nt, Artificial Sequence
  Description of Artificial Sequence: Synthetic oligonucleotide
  Antisense strand to SEQ ID NO: 1161608
aucucagacacacucucua

SEQ ID NO: 1161610 - RNA, 19 nt, Artificial Sequence
  Description of Artificial Sequence: Synthetic oligonucleotide
  Sense strand starting at position 924 of SEQ ID NO: 916501
uuggcuguagugcaagaaa

SEQ ID NO: 1161611 - RNA, 19 nt, Artificial Sequence
  Description of Artificial Sequence: Synthetic oligonucleotide
  Antisense strand to SEQ ID NO: 1161610
uuucuugcacuacagccaa

SEQ ID NO: 1161612 - RNA, 19 nt, Artificial Sequence
  Description of Artificial Sequence: Synthetic oligonucleotide
  Sense strand starting at position 987 of SEQ ID NO: 916501
aggugugucucagcaucau

SEQ ID NO: 1161613 - RNA, 19 nt, Artificial Sequence
  Description of Artificial Sequence: Synthetic oligonucleotide
  Antisense strand to SEQ ID NO: 1161612
augaugcugagacacaccu

SEQ ID NO: 1161614 - RNA, 19 nt, Artificial Sequence
  Description of Artificial Sequence: Synthetic oligonucleotide
  Sense strand starting at position 1107 of SEQ ID NO: 916501
ucauaugcugacggugaau

SEQ ID NO: 1161615 - RNA, 19 nt, Artificial Sequence
  Description of Artificial Sequence: Synthetic oligonucleotide
  Antisense strand to SEQ ID NO: 1161614
auucaccgucagcauauga

SEQ ID NO: 1161616 - RNA, 19 nt, Artificial Sequence
  Description of Artificial Sequence: Synthetic oligonucleotide
  Sense strand starting at position 1153 of SEQ ID NO: 916501
cauaguauggauggcagaa

SEQ ID NO: 1161617 - RNA, 19 nt, Artificial Sequence
  Description of Artificial Sequence: Synthetic oligonucleotide
  Antisense strand to SEQ ID NO: 1161616
uucugccauccauacuaug

SEQ ID NO: 1161618 - RNA, 19 nt, Artificial Sequence
  Description of Artificial Sequence: Synthetic oligonucleotide
  Sense strand starting at position 1303 of SEQ ID NO: 916501
cccgaugucugccugaacu

SEQ ID NO: 1161619 - RNA, 19 nt, Artificial Sequence
  Description of Artificial Sequence: Synthetic oligonucleotide
  Antisense strand to SEQ ID NO: 1161618
aguucaggcagacaucggg

SEQ ID NO: 1161620 - RNA, 19 nt, Artificial Sequence
  Description of Artificial Sequence: Synthetic oligonucleotide
  Sense strand starting at position 1410 of SEQ ID NO: 916501
gcggaacauccugaucuca

SEQ ID NO: 1161621 - RNA, 19 nt, Artificial Sequence
  Description of Artificial Sequence: Synthetic oligonucleotide
  Antisense strand to SEQ ID NO: 1161620
ugagaucaggauguuccgc

SEQ ID NO: 1161622 - RNA, 19 nt, Artificial Sequence
  Description of Artificial Sequence: Synthetic oligonucleotide
  Sense strand starting at position 1520 of SEQ ID NO: 916501
agagcacuguccuuuccaa

SEQ ID NO: 1161623 - RNA, 19 nt, Artificial Sequence
  Description of Artificial Sequence: Synthetic oligonucleotide
  Antisense strand to SEQ ID NO: 1161622
uuggaaaggacagugcucu

SEQ ID NO: 1161624 - RNA, 19 nt, Artificial Sequence
  Description of Artificial Sequence: Synthetic oligonucleotide
  Sense strand starting at position 2108 of SEQ ID NO: 916501
gggauugguccgggcuuga

SEQ ID NO: 1161625 - RNA, 19 nt, Artificial Sequence
  Description of Artificial Sequence: Synthetic oligonucleotide
  Antisense strand to SEQ ID NO: 1161624
ucaagcccggaccaauccc

SEQ ID NO: 1161626 - RNA, 19 nt, Artificial Sequence
  Description of Artificial Sequence: Synthetic oligonucleotide
  Sense strand starting at position 2219 of SEQ ID NO: 916501
cggaagugacgucacgaua

SEQ ID NO: 1161627 - RNA, 19 nt, Artificial Sequence
  Description of Artificial Sequence: Synthetic oligonucleotide
  Antisense strand to SEQ ID NO: 1161626
uaucgugacgucacuuccg

SEQ ID NO: 1161628 - RNA, 19 nt, Artificial Sequence
  Description of Artificial Sequence: Synthetic oligonucleotide
  Sense strand starting at position 2394 of SEQ ID NO: 916501
gcucauuaguaaccucgau

SEQ ID NO: 1161629 - RNA, 19 nt, Artificial Sequence
  Description of Artificial Sequence: Synthetic oligonucleotide
  Antisense strand to SEQ ID NO: 1161628
aucgagguuacuaaugagc

SEQ ID NO: 1161630 - RNA, 19 nt, Artificial Sequence
  Description of Artificial Sequence: Synthetic oligonucleotide
  Sense strand starting at position 2416 of SEQ ID NO: 916501
gguucuguggacuggaaga

SEQ ID NO: 1161631 - RNA, 19 nt, Artificial Sequence
  Description of Artificial Sequence: Synthetic oligonucleotide
  Antisense strand to SEQ ID NO: 1161630
ucuuccaguccacagaacc

SEQ ID NO: 1161632 - RNA, 19 nt, Artificial Sequence
  Description of Artificial Sequence: Synthetic oligonucleotide
  Sense strand starting at position 2633 of SEQ ID NO: 916501
gagcuuuaagccgacucua

SEQ ID NO: 1161633 - RNA, 19 nt, Artificial Sequence
  Description of Artificial Sequence: Synthetic oligonucleotide
  Antisense strand to SEQ ID NO: 1161632
uagagucggcuuaaagcuc

SEQ ID NO: 1161634 - RNA, 19 nt, Artificial Sequence
  Description of Artificial Sequence: Synthetic oligonucleotide
  Sense strand starting at position 2654 of SEQ ID NO: 916501
ggagaagcagucuacccua

SEQ ID NO: 1161635 - RNA, 19 nt, Artificial Sequence
  Description of Artificial Sequence: Synthetic oligonucleotide
  Antisense strand to SEQ ID NO: 1161634
uaggguagacugcuucucc

SEQ ID NO: 1161636 - RNA, 19 nt, Artificial Sequence
  Description of Artificial Sequence: Synthetic oligonucleotide
  Sense strand starting at position 2891 of SEQ ID NO: 916501
gcccuugagaacucgcguu

SEQ ID NO: 1161637 - RNA, 19 nt, Artificial Sequence
  Description of Artificial Sequence: Synthetic oligonucleotide
  Antisense strand to SEQ ID NO: 1161636
aacgcgaguucucaagggc

SEQ ID NO: 1161638 - RNA, 19 nt, Artificial Sequence
  Description of Artificial Sequence: Synthetic oligonucleotide
  Sense strand starting at position 2932 of SEQ ID NO: 916501
ccguuacccaucugugaag

SEQ ID NO: 1161639 - RNA, 19 nt, Artificial Sequence
  Description of Artificial Sequence: Synthetic oligonucleotide
  Antisense strand to SEQ ID NO: 1161638
cuucacagauggguaacgg

SEQ ID NO: 1161640 - RNA, 19 nt, Artificial Sequence
  Description of Artificial Sequence: Synthetic oligonucleotide
  Sense strand starting at position 3022 of SEQ ID NO: 916501
auucuuguguccucaagag

SEQ ID NO: 1161641 - RNA, 19 nt, Artificial Sequence
  Description of Artificial Sequence: Synthetic oligonucleotide
  Antisense strand to SEQ ID NO: 1161640
cucuugaggacacaagaau

SEQ ID NO: 1161642 - RNA, 19 nt, Artificial Sequence
  Description of Artificial Sequence: Synthetic oligonucleotide
  Sense strand starting at position 3071 of SEQ ID NO: 916501
gcuuucuuaggucaaaggu

SEQ ID NO: 1161643 - RNA, 19 nt, Artificial Sequence
  Description of Artificial Sequence: Synthetic oligonucleotide
  Antisense strand to SEQ ID NO: 1161642
accuuugaccuaagaaagc

SEQ ID NO: 1161644 - RNA, 19 nt, Artificial Sequence
  Description of Artificial Sequence: Synthetic oligonucleotide
  Sense strand starting at position 3079 of SEQ ID NO: 916501
aggucaaaggucuaaaguu

SEQ ID NO: 1161645 - RNA, 19 nt, Artificial Sequence
  Description of Artificial Sequence: Synthetic oligonucleotide
  Antisense strand to SEQ ID NO: 1161644
aacuuuagaccuuugaccu

SEQ ID NO: 1161646 - RNA, 19 nt, Artificial Sequence
  Description of Artificial Sequence: Synthetic oligonucleotide
  Sense strand starting at position 3318 of SEQ ID NO: 916501
agcuuucccugguucuuua

SEQ ID NO: 1161647 - RNA, 19 nt, Artificial Sequence
  Description of Artificial Sequence: Synthetic oligonucleotide
  Antisense strand to SEQ ID NO: 1161646
uaaagaaccagggaaagcu

SEQ ID NO: 1161648 - RNA, 19 nt, Artificial Sequence
  Description of Artificial Sequence: Synthetic oligonucleotide
  Sense strand starting at position 3352 of SEQ ID NO: 916501
auauuagugcuguguggag

SEQ ID NO: 1161649 - RNA, 19 nt, Artificial Sequence
  Description of Artificial Sequence: Synthetic oligonucleotide
  Antisense strand to SEQ ID NO: 1161648
cuccacacagcacuaauau

SEQ ID NO: 1161650 - RNA, 19 nt, Artificial Sequence
  Description of Artificial Sequence: Synthetic oligonucleotide
  Sense strand starting at position 3473 of SEQ ID NO: 916501
uucuuuggacuugaucauu

SEQ ID NO: 1161651 - RNA, 19 nt, Artificial Sequence
  Description of Artificial Sequence: Synthetic oligonucleotide
  Antisense strand to SEQ ID NO: 1161650
aaugaucaaguccaaagaa

SEQ ID NO: 1161652 - RNA, 19 nt, Artificial Sequence
  Description of Artificial Sequence: Synthetic oligonucleotide
  Sense strand starting at position 3482 of SEQ ID NO: 916501
cuugaucauuauuaaagag

SEQ ID NO: 1161653 - RNA, 19 nt, Artificial Sequence
  Description of Artificial Sequence: Synthetic oligonucleotide
  Antisense strand to SEQ ID NO: 1161652
cucuuuaauaaugaucaag

SEQ ID NO: 1161654 - RNA, 19 nt, Artificial Sequence
  Description of Artificial Sequence: Synthetic oligonucleotide
  Sense strand starting at position 3643 of SEQ ID NO: 916501
uucugucuuccagaucucu

SEQ ID NO: 1161655 - RNA, 19 nt, Artificial Sequence
  Description of Artificial Sequence: Synthetic oligonucleotide
  Antisense strand to SEQ ID NO: 1161654
agagaucuggaagacagaa

SEQ ID NO: 1161656 - RNA, 19 nt, Artificial Sequence
  Description of Artificial Sequence: Synthetic oligonucleotide
  Sense strand starting at position 3704 of SEQ ID NO: 916501
augaaagcaguuugacaug

SEQ ID NO: 1161657 - RNA, 19 nt, Artificial Sequence
  Description of Artificial Sequence: Synthetic oligonucleotide
  Antisense strand to SEQ ID NO: 1161656
caugucaaacugcuuucau

SEQ ID NO: 1161658 - RNA, 19 nt, Artificial Sequence
  Description of Artificial Sequence: Synthetic oligonucleotide
  Sense strand starting at position 3709 of SEQ ID NO: 916501
agcaguuugacaugugauc

SEQ ID NO: 1161659 - RNA, 19 nt, Artificial Sequence
  Description of Artificial Sequence: Synthetic oligonucleotide
  Antisense strand to SEQ ID NO: 1161658
gaucacaugucaaacugcu

SEQ ID NO: 1161660 - RNA, 19 nt, Artificial Sequence
  Description of Artificial Sequence: Synthetic oligonucleotide
  Sense strand starting at position 3714 of SEQ ID NO: 916501
uuugacaugugaucaagag

SEQ ID NO: 1161661 - RNA, 19 nt, Artificial Sequence
  Description of Artificial Sequence: Synthetic oligonucleotide
  Antisense strand to SEQ ID NO: 1161660
cucuugaucacaugucaaa

SEQ ID NO: 1161662 - RNA, 19 nt, Artificial Sequence
  Description of Artificial Sequence: Synthetic oligonucleotide
  Sense strand starting at position 3718 of SEQ ID NO: 916501
acaugugaucaagaguugu

SEQ ID NO: 1161663 - RNA, 19 nt, Artificial Sequence
  Description of Artificial Sequence: Synthetic oligonucleotide
  Antisense strand to SEQ ID NO: 1161662
acaacucuugaucacaugu

SEQ ID NO: 1161664 - RNA, 19 nt, Artificial Sequence
  Description of Artificial Sequence: Synthetic oligonucleotide
  Sense strand starting at position 3722 of SEQ ID NO: 916501
gugaucaagaguuguccca

SEQ ID NO: 1161665 - RNA, 19 nt, Artificial Sequence
  Description of Artificial Sequence: Synthetic oligonucleotide
  Antisense strand to SEQ ID NO: 1161664
ugggacaacucuugaucac

SEQ ID NO: 1161666 - RNA, 19 nt, Artificial Sequence
  Description of Artificial Sequence: Synthetic oligonucleotide
  Sense strand starting at position 3724 of SEQ ID NO: 916501
gaucaagaguugucccagu

SEQ ID NO: 1161667 - RNA, 19 nt, Artificial Sequence
  Description of Artificial Sequence: Synthetic oligonucleotide
  Antisense strand to SEQ ID NO: 1161666
acugggacaacucuugauc

SEQ ID NO: 1161668 - RNA, 19 nt, Artificial Sequence
  Description of Artificial Sequence: Synthetic oligonucleotide
  Sense strand starting at position 3745 of SEQ ID NO: 916501
agguucuguggcugaaacu

SEQ ID NO: 1161669 - RNA, 19 nt, Artificial Sequence
  Description of Artificial Sequence: Synthetic oligonucleotide
  Antisense strand to SEQ ID NO: 1161668
aguuucagccacagaaccu

SEQ ID NO: 1161670 - RNA, 19 nt, Artificial Sequence
  Description of Artificial Sequence: Synthetic oligonucleotide
  Sense strand starting at position 3746 of SEQ ID NO: 916501
gguucuguggcugaaacuu

SEQ ID NO: 1161671 - RNA, 19 nt, Artificial Sequence
  Description of Artificial Sequence: Synthetic oligonucleotide
  Antisense strand to SEQ ID NO: 1161670
aaguuucagccacagaacc

SEQ ID NO: 1161672 - RNA, 19 nt, Artificial Sequence
  Description of Artificial Sequence: Synthetic oligonucleotide
  Sense strand starting at position 181 of SEQ ID NO: 916502
gaacaaguugacuaaucgu

SEQ ID NO: 1161673 - RNA, 19 nt, Artificial Sequence
  Description of Artificial Sequence: Synthetic oligonucleotide
  Antisense strand to SEQ ID NO: 1161672
acgauuagucaacuuguuc

SEQ ID NO: 1161674 - RNA, 19 nt, Artificial Sequence
  Description of Artificial Sequence: Synthetic oligonucleotide
  Sense strand starting at position 184 of SEQ ID NO: 916502
caaguugacuaaucguuua

SEQ ID NO: 1161675 - RNA, 19 nt, Artificial Sequence
  Description of Artificial Sequence: Synthetic oligonucleotide
  Antisense strand to SEQ ID NO: 1161674
uaaacgauuagucaacuug

SEQ ID NO: 1161676 - RNA, 19 nt, Artificial Sequence
  Description of Artificial Sequence: Synthetic oligonucleotide
  Sense strand starting at position 187 of SEQ ID NO: 916502
guugacuaaucguuuauuc

SEQ ID NO: 1161677 - RNA, 19 nt, Artificial Sequence
  Description of Artificial Sequence: Synthetic oligonucleotide
  Antisense strand to SEQ ID NO: 1161676
gaauaaacgauuagucaac

SEQ ID NO: 1161678 - RNA, 19 nt, Artificial Sequence
  Description of Artificial Sequence: Synthetic oligonucleotide
  Sense strand starting at position 189 of SEQ ID NO: 916502
ugacuaaucguuuauucca

SEQ ID NO: 1161679 - RNA, 19 nt, Artificial Sequence
  Description of Artificial Sequence: Synthetic oligonucleotide
  Antisense strand to SEQ ID NO: 1161678
uggaauaaacgauuaguca

SEQ ID NO: 1161680 - RNA, 19 nt, Artificial Sequence
  Description of Artificial Sequence: Synthetic oligonucleotide
  Sense strand starting at position 238 of SEQ ID NO: 916502
agggcuaaguaucuaauau

SEQ ID NO: 1161681 - RNA, 19 nt, Artificial Sequence
  Description of Artificial Sequence: Synthetic oligonucleotide
  Antisense strand to SEQ ID NO: 1161680
auauuagauacuuagcccu

SEQ ID NO: 1161682 - RNA, 19 nt, Artificial Sequence
  Description of Artificial Sequence: Synthetic oligonucleotide
  Sense strand starting at position 372 of SEQ ID NO: 916502
uauggagucuccuaggaaa

SEQ ID NO: 1161683 - RNA, 19 nt, Artificial Sequence
  Description of Artificial Sequence: Synthetic oligonucleotide
  Antisense strand to SEQ ID NO: 1161682
uuuccuaggagacuccaua

SEQ ID NO: 1161684 - RNA, 19 nt, Artificial Sequence
  Description of Artificial Sequence: Synthetic oligonucleotide
  Sense strand starting at position 374 of SEQ ID NO: 916502
uggagucuccuaggaaacu

SEQ ID NO: 1161685 - RNA, 19 nt, Artificial Sequence
  Description of Artificial Sequence: Synthetic oligonucleotide
  Antisense strand to SEQ ID NO: 1161684
aguuuccuaggagacucca

SEQ ID NO: 1161686 - RNA, 19 nt, Artificial Sequence
  Description of Artificial Sequence: Synthetic oligonucleotide
  Sense strand starting at position 375 of SEQ ID NO: 916502
ggagucuccuaggaaacuu

SEQ ID NO: 1161687 - RNA, 19 nt, Artificial Sequence
  Description of Artificial Sequence: Synthetic oligonucleotide
  Antisense strand to SEQ ID NO: 1161686
aaguuuccuaggagacucc

SEQ ID NO: 1161688 - RNA, 19 nt, Artificial Sequence
  Description of Artificial Sequence: Synthetic oligonucleotide
  Sense strand starting at position 457 of SEQ ID NO: 916502
agcuuaacucagcagagau

SEQ ID NO: 1161689 - RNA, 19 nt, Artificial Sequence
  Description of Artificial Sequence: Synthetic oligonucleotide
  Antisense strand to SEQ ID NO: 1161688
aucucugcugaguuaagcu

SEQ ID NO: 1161690 - RNA, 19 nt, Artificial Sequence
  Description of Artificial Sequence: Synthetic oligonucleotide
  Sense strand starting at position 484 of SEQ ID NO: 916502
gagcuuucugcagggccaa

SEQ ID NO: 1161691 - RNA, 19 nt, Artificial Sequence
  Description of Artificial Sequence: Synthetic oligonucleotide
  Antisense strand to SEQ ID NO: 1161690
uuggcccugcagaaagcuc

SEQ ID NO: 1161692 - RNA, 19 nt, Artificial Sequence
  Description of Artificial Sequence: Synthetic oligonucleotide
  Sense strand starting at position 535 of SEQ ID NO: 916502
aguucuguugcgcagacaa

SEQ ID NO: 1161693 - RNA, 19 nt, Artificial Sequence
  Description of Artificial Sequence: Synthetic oligonucleotide
  Antisense strand to SEQ ID NO: 1161692
uugucugcgcaacagaacu

SEQ ID NO: 1161694 - RNA, 19 nt, Artificial Sequence
  Description of Artificial Sequence: Synthetic oligonucleotide
  Sense strand starting at position 658 of SEQ ID NO: 916502
agaggaaucucugcccaga

SEQ ID NO: 1161695 - RNA, 19 nt, Artificial Sequence
  Description of Artificial Sequence: Synthetic oligonucleotide
  Antisense strand to SEQ ID NO: 1161694
ucugggcagagauuccucu

SEQ ID NO: 1161696 - RNA, 19 nt, Artificial Sequence
  Description of Artificial Sequence: Synthetic oligonucleotide
  Sense strand starting at position 677 of SEQ ID NO: 916502
gccgaauccacaugucaga

SEQ ID NO: 1161697 - RNA, 19 nt, Artificial Sequence
  Description of Artificial Sequence: Synthetic oligonucleotide
  Antisense strand to SEQ ID NO: 1161696
ucugacauguggauucggc

SEQ ID NO: 1161698 - RNA, 19 nt, Artificial Sequence
  Description of Artificial Sequence: Synthetic oligonucleotide
  Sense strand starting at position 704 of SEQ ID NO: 916502
ugggaugucugcccucaac

SEQ ID NO: 1161699 - RNA, 19 nt, Artificial Sequence
  Description of Artificial Sequence: Synthetic oligonucleotide
  Antisense strand to SEQ ID NO: 1161698
guugagggcagacauccca

SEQ ID NO: 1161700 - RNA, 19 nt, Artificial Sequence
  Description of Artificial Sequence: Synthetic oligonucleotide
  Sense strand starting at position 1027 of SEQ ID NO: 916502
cgagguguuacacaaccau

SEQ ID NO: 1161701 - RNA, 19 nt, Artificial Sequence
  Description of Artificial Sequence: Synthetic oligonucleotide
  Antisense strand to SEQ ID NO: 1161700
augguuguguaacaccucg

SEQ ID NO: 1161702 - RNA, 19 nt, Artificial Sequence
  Description of Artificial Sequence: Synthetic oligonucleotide
  Sense strand starting at position 1137 of SEQ ID NO: 916502
agucgauagagucggguaa

SEQ ID NO: 1161703 - RNA, 19 nt, Artificial Sequence
  Description of Artificial Sequence: Synthetic oligonucleotide
  Antisense strand to SEQ ID NO: 1161702
uuacccgacucuaucgacu

SEQ ID NO: 1161704 - RNA, 19 nt, Artificial Sequence
  Description of Artificial Sequence: Synthetic oligonucleotide
  Sense strand starting at position 1141 of SEQ ID NO: 916502
gauagagucggguaacaca

SEQ ID NO: 1161705 - RNA, 19 nt, Artificial Sequence
  Description of Artificial Sequence: Synthetic oligonucleotide
  Antisense strand to SEQ ID NO: 1161704
uguguuacccgacucuauc

SEQ ID NO: 1161706 - RNA, 19 nt, Artificial Sequence
  Description of Artificial Sequence: Synthetic oligonucleotide
  Sense strand starting at position 1160 of SEQ ID NO: 916502
agaugcagccaguguuuau

SEQ ID NO: 1161707 - RNA, 19 nt, Artificial Sequence
  Description of Artificial Sequence: Synthetic oligonucleotide
  Antisense strand to SEQ ID NO: 1161706
auaaacacuggcugcaucu

SEQ ID NO: 1161708 - RNA, 19 nt, Artificial Sequence
  Description of Artificial Sequence: Synthetic oligonucleotide
  Sense strand starting at position 2082 of SEQ ID NO: 916502
gggaaccuuuccuuagcua

SEQ ID NO: 1161709 - RNA, 19 nt, Artificial Sequence
  Description of Artificial Sequence: Synthetic oligonucleotide
  Antisense strand to SEQ ID NO: 1161708
uagcuaaggaaagguuccc

SEQ ID NO: 1161710 - RNA, 19 nt, Artificial Sequence
  Description of Artificial Sequence: Synthetic oligonucleotide
  Sense strand starting at position 2443 of SEQ ID NO: 916502
gguggcuauuguccucauu

SEQ ID NO: 1161711 - RNA, 19 nt, Artificial Sequence
  Description of Artificial Sequence: Synthetic oligonucleotide
  Antisense strand to SEQ ID NO: 1161710
aaugaggacaauagccacc

SEQ ID NO: 1161712 - RNA, 19 nt, Artificial Sequence
  Description of Artificial Sequence: Synthetic oligonucleotide
  Sense strand starting at position 2445 of SEQ ID NO: 916502
uggcuauuguccucauuau

SEQ ID NO: 1161713 - RNA, 19 nt, Artificial Sequence
  Description of Artificial Sequence: Synthetic oligonucleotide
  Antisense strand to SEQ ID NO: 1161712
auaaugaggacaauagcca

SEQ ID NO: 1161714 - RNA, 19 nt, Artificial Sequence
  Description of Artificial Sequence: Synthetic oligonucleotide
  Sense strand starting at position 2446 of SEQ ID NO: 916502
ggcuauuguccucauuauu

SEQ ID NO: 1161715 - RNA, 19 nt, Artificial Sequence
  Description of Artificial Sequence: Synthetic oligonucleotide
  Antisense strand to SEQ ID NO: 1161714
aauaaugaggacaauagcc

SEQ ID NO: 1161716 - RNA, 19 nt, Artificial Sequence
  Description of Artificial Sequence: Synthetic oligonucleotide
  Sense strand starting at position 2457 of SEQ ID NO: 916502
ucauuauucucaucguauu

SEQ ID NO: 1161717 - RNA, 19 nt, Artificial Sequence
  Description of Artificial Sequence: Synthetic oligonucleotide
  Antisense strand to SEQ ID NO: 1161716
aauacgaugagaauaauga

SEQ ID NO: 1161718 - RNA, 19 nt, Artificial Sequence
  Description of Artificial Sequence: Synthetic oligonucleotide
  Sense strand starting at position 2467 of SEQ ID NO: 916502
caucguauugaugggaaca

SEQ ID NO: 1161719 - RNA, 19 nt, Artificial Sequence
  Description of Artificial Sequence: Synthetic oligonucleotide
  Antisense strand to SEQ ID NO: 1161718
uguucccaucaauacgaug

SEQ ID NO: 1161720 - RNA, 19 nt, Artificial Sequence
  Description of Artificial Sequence: Synthetic oligonucleotide
  Sense strand starting at position 2468 of SEQ ID NO: 916502
aucguauugaugggaacac

SEQ ID NO: 1161721 - RNA, 19 nt, Artificial Sequence
  Description of Artificial Sequence: Synthetic oligonucleotide
  Antisense strand to SEQ ID NO: 1161720
guguucccaucaauacgau

SEQ ID NO: 1161722 - RNA, 19 nt, Artificial Sequence
  Description of Artificial Sequence: Synthetic oligonucleotide
  Sense strand starting at position 2493 of SEQ ID NO: 916502
gcugaauaccgacaggauu

SEQ ID NO: 1161723 - RNA, 19 nt, Artificial Sequence
  Description of Artificial Sequence: Synthetic oligonucleotide
  Antisense strand to SEQ ID NO: 1161722
aauccugucgguauucagc

SEQ ID NO: 1161724 - RNA, 19 nt, Artificial Sequence
  Description of Artificial Sequence: Synthetic oligonucleotide
  Sense strand starting at position 2706 of SEQ ID NO: 916502
gggaguaucugagccagag

SEQ ID NO: 1161725 - RNA, 19 nt, Artificial Sequence
  Description of Artificial Sequence: Synthetic oligonucleotide
  Antisense strand to SEQ ID NO: 1161724
cucuggcucagauacuccc

SEQ ID NO: 1161726 - RNA, 19 nt, Artificial Sequence
  Description of Artificial Sequence: Synthetic oligonucleotide
  Sense strand starting at position 2708 of SEQ ID NO: 916502
gaguaucugagccagaguu

SEQ ID NO: 1161727 - RNA, 19 nt, Artificial Sequence
  Description of Artificial Sequence: Synthetic oligonucleotide
  Antisense strand to SEQ ID NO: 1161726
aacucuggcucagauacuc

SEQ ID NO: 1161728 - RNA, 19 nt, Artificial Sequence
  Description of Artificial Sequence: Synthetic oligonucleotide
  Sense strand starting at position 2748 of SEQ ID NO: 916502
acaauuccguuuccucaga

SEQ ID NO: 1161729 - RNA, 19 nt, Artificial Sequence
  Description of Artificial Sequence: Synthetic oligonucleotide
  Antisense strand to SEQ ID NO: 1161728
ucugaggaaacggaauugu

SEQ ID NO: 1161730 - RNA, 19 nt, Artificial Sequence
  Description of Artificial Sequence: Synthetic oligonucleotide
  Sense strand starting at position 2762 of SEQ ID NO: 916502
ucagaaacuugggacaguu

SEQ ID NO: 1161731 - RNA, 19 nt, Artificial Sequence
  Description of Artificial Sequence: Synthetic oligonucleotide
  Antisense strand to SEQ ID NO: 1161730
aacugucccaaguuucuga

SEQ ID NO: 1161732 - RNA, 19 nt, Artificial Sequence
  Description of Artificial Sequence: Synthetic oligonucleotide
  Sense strand starting at position 3105 of SEQ ID NO: 916502
ggcuauaaguugcuuagca

SEQ ID NO: 1161733 - RNA, 19 nt, Artificial Sequence
  Description of Artificial Sequence: Synthetic oligonucleotide
  Antisense strand to SEQ ID NO: 1161732
ugcuaagcaacuuauagcc

SEQ ID NO: 1161734 - RNA, 19 nt, Artificial Sequence
  Description of Artificial Sequence: Synthetic oligonucleotide
  Sense strand starting at position 3166 of SEQ ID NO: 916502
guuggaggauuuggaucaa

SEQ ID NO: 1161735 - RNA, 19 nt, Artificial Sequence
  Description of Artificial Sequence: Synthetic oligonucleotide
  Antisense strand to SEQ ID NO: 1161734
uugauccaaauccuccaac

SEQ ID NO: 1161736 - RNA, 19 nt, Artificial Sequence
  Description of Artificial Sequence: Synthetic oligonucleotide
  Sense strand starting at position 3202 of SEQ ID NO: 916502
agaaauugccaauagucca

SEQ ID NO: 1161737 - RNA, 19 nt, Artificial Sequence
  Description of Artificial Sequence: Synthetic oligonucleotide
  Antisense strand to SEQ ID NO: 1161736
uggacuauuggcaauuucu

SEQ ID NO: 1161738 - RNA, 19 nt, Artificial Sequence
  Description of Artificial Sequence: Synthetic oligonucleotide
  Sense strand starting at position 3738 of SEQ ID NO: 916502
uuccaaaugucuguaugga

SEQ ID NO: 1161739 - RNA, 19 nt, Artificial Sequence
  Description of Artificial Sequence: Synthetic oligonucleotide
  Antisense strand to SEQ ID NO: 1161738
uccauacagacauuuggaa

SEQ ID NO: 1161740 - RNA, 19 nt, Artificial Sequence
  Description of Artificial Sequence: Synthetic oligonucleotide
  Sense strand starting at position 3739 of SEQ ID NO: 916502
uccaaaugucuguauggaa

SEQ ID NO: 1161741 - RNA, 19 nt, Artificial Sequence
  Description of Artificial Sequence: Synthetic oligonucleotide
  Antisense strand to SEQ ID NO: 1161740
uuccauacagacauuugga

SEQ ID NO: 1161742 - RNA, 19 nt, Artificial Sequence
  Description of Artificial Sequence: Synthetic oligonucleotide
  Sense strand starting at position 3785 of SEQ ID NO: 916502
aggcaugaguucuagauuu

SEQ ID NO: 1161743 - RNA, 19 nt, Artificial Sequence
  Description of Artificial Sequence: Synthetic oligonucleotide
  Antisense strand to SEQ ID NO: 1161742
aaaucuagaacucaugccu

SEQ ID NO: 1161744 - RNA, 19 nt, Artificial Sequence
  Description of Artificial Sequence: Synthetic oligonucleotide
  Sense strand starting at position 3825 of SEQ ID NO: 916502
ucccaaugcugguuacaag

SEQ ID NO: 1161745 - RNA, 19 nt, Artificial Sequence
  Description of Artificial Sequence: Synthetic oligonucleotide
  Antisense strand to SEQ ID NO: 1161744
cuuguaaccagcauuggga

SEQ ID NO: 1161746 - RNA, 19 nt, Artificial Sequence
  Description of Artificial Sequence: Synthetic oligonucleotide
  Sense strand starting at position 3832 of SEQ ID NO: 916502
gcugguuacaaguguuuaa

SEQ ID NO: 1161747 - RNA, 19 nt, Artificial Sequence
  Description of Artificial Sequence: Synthetic oligonucleotide
  Antisense strand to SEQ ID NO: 1161746
uuaaacacuuguaaccagc

SEQ ID NO: 1161748 - RNA, 19 nt, Artificial Sequence
  Description of Artificial Sequence: Synthetic oligonucleotide
  Sense strand starting at position 3892 of SEQ ID NO: 916502
ucuccuugguccuugguaa

SEQ ID NO: 1161749 - RNA, 19 nt, Artificial Sequence
  Description of Artificial Sequence: Synthetic oligonucleotide
  Antisense strand to SEQ ID NO: 1161748
uuaccaaggaccaaggaga

SEQ ID NO: 1161750 - RNA, 19 nt, Artificial Sequence
  Description of Artificial Sequence: Synthetic oligonucleotide
  Sense strand starting at position 3899 of SEQ ID NO: 916502
gguccuugguaaguuuaca

SEQ ID NO: 1161751 - RNA, 19 nt, Artificial Sequence
  Description of Artificial Sequence: Synthetic oligonucleotide
  Antisense strand to SEQ ID NO: 1161750
uguaaacuuaccaaggacc

SEQ ID NO: 1161752 - RNA, 19 nt, Artificial Sequence
  Description of Artificial Sequence: Synthetic oligonucleotide
  Sense strand starting at position 18 of SEQ ID NO: 916503
ugcaaagaauuuggaagaa

SEQ ID NO: 1161753 - RNA, 19 nt, Artificial Sequence
  Description of Artificial Sequence: Synthetic oligonucleotide
  Antisense strand to SEQ ID NO: 1161752
uucuuccaaauucuuugca

SEQ ID NO: 1161754 - RNA, 19 nt, Artificial Sequence
  Description of Artificial Sequence: Synthetic oligonucleotide
  Sense strand starting at position 54 of SEQ ID NO: 916503
ccaugaguauuucuuugca

SEQ ID NO: 1161755 - RNA, 19 nt, Artificial Sequence
  Description of Artificial Sequence: Synthetic oligonucleotide
  Antisense strand to SEQ ID NO: 1161754
ugcaaagaaauacucaugg

SEQ ID NO: 1161756 - RNA, 19 nt, Artificial Sequence
  Description of Artificial Sequence: Synthetic oligonucleotide
  Sense strand starting at position 56 of SEQ ID NO: 916503
augaguauuucuuugcauu

SEQ ID NO: 1161757 - RNA, 19 nt, Artificial Sequence
  Description of Artificial Sequence: Synthetic oligonucleotide
  Antisense strand to SEQ ID NO: 1161756
aaugcaaagaaauacucau

SEQ ID NO: 1161758 - RNA, 19 nt, Artificial Sequence
  Description of Artificial Sequence: Synthetic oligonucleotide
  Sense strand starting at position 230 of SEQ ID NO: 916503
cccagcuugcugcuuguaa

SEQ ID NO: 1161759 - RNA, 19 nt, Artificial Sequence
  Description of Artificial Sequence: Synthetic oligonucleotide
  Antisense strand to SEQ ID NO: 1161758
uuacaagcagcaagcuggg

SEQ ID NO: 1161760 - RNA, 19 nt, Artificial Sequence
  Description of Artificial Sequence: Synthetic oligonucleotide
  Sense strand starting at position 284 of SEQ ID NO: 916503
ggucaucucuuguugauuu

SEQ ID NO: 1161761 - RNA, 19 nt, Artificial Sequence
  Description of Artificial Sequence: Synthetic oligonucleotide
  Antisense strand to SEQ ID NO: 1161760
aaaucaacaagagaugacc

SEQ ID NO: 1161762 - RNA, 19 nt, Artificial Sequence
  Description of Artificial Sequence: Synthetic oligonucleotide
  Sense strand starting at position 369 of SEQ ID NO: 916503
uguagaguagcugauguaa

SEQ ID NO: 1161763 - RNA, 19 nt, Artificial Sequence
  Description of Artificial Sequence: Synthetic oligonucleotide
  Antisense strand to SEQ ID NO: 1161762
uuacaucagcuacucuaca

SEQ ID NO: 1161764 - RNA, 19 nt, Artificial Sequence
  Description of Artificial Sequence: Synthetic oligonucleotide
  Sense strand starting at position 388 of SEQ ID NO: 916503
ugccuugcucaacaaagau

SEQ ID NO: 1161765 - RNA, 19 nt, Artificial Sequence
  Description of Artificial Sequence: Synthetic oligonucleotide
  Antisense strand to SEQ ID NO: 1161764
aucuuuguugagcaaggca

SEQ ID NO: 1161766 - RNA, 19 nt, Artificial Sequence
  Description of Artificial Sequence: Synthetic oligonucleotide
  Sense strand starting at position 421 of SEQ ID NO: 916503
ugcugaaggacuugauuga

SEQ ID NO: 1161767 - RNA, 19 nt, Artificial Sequence
  Description of Artificial Sequence: Synthetic oligonucleotide
  Antisense strand to SEQ ID NO: 1161766
ucaaucaaguccuucagca

SEQ ID NO: 1161768 - RNA, 19 nt, Artificial Sequence
  Description of Artificial Sequence: Synthetic oligonucleotide
  Sense strand starting at position 428 of SEQ ID NO: 916503
ggacuugauugauccuuug

SEQ ID NO: 1161769 - RNA, 19 nt, Artificial Sequence
  Description of Artificial Sequence: Synthetic oligonucleotide
  Antisense strand to SEQ ID NO: 1161768
caaaggaucaaucaagucc

SEQ ID NO: 1161770 - RNA, 19 nt, Artificial Sequence
  Description of Artificial Sequence: Synthetic oligonucleotide
  Sense strand starting at position 492 of SEQ ID NO: 916503
uggaauuauccuggaaucu

SEQ ID NO: 1161771 - RNA, 19 nt, Artificial Sequence
  Description of Artificial Sequence: Synthetic oligonucleotide
  Antisense strand to SEQ ID NO: 1161770
agauuccaggauaauucca

SEQ ID NO: 1161772 - RNA, 19 nt, Artificial Sequence
  Description of Artificial Sequence: Synthetic oligonucleotide
  Sense strand starting at position 561 of SEQ ID NO: 916503
aggaaacuauggcucagau

SEQ ID NO: 1161773 - RNA, 19 nt, Artificial Sequence
  Description of Artificial Sequence: Synthetic oligonucleotide
  Antisense strand to SEQ ID NO: 1161772
aucugagccauaguuuccu

SEQ ID NO: 1161774 - RNA, 19 nt, Artificial Sequence
  Description of Artificial Sequence: Synthetic oligonucleotide
  Sense strand starting at position 1213 of SEQ ID NO: 916503
gagccacuuccauaguaug

SEQ ID NO: 1161775 - RNA, 19 nt, Artificial Sequence
  Description of Artificial Sequence: Synthetic oligonucleotide
  Antisense strand to SEQ ID NO: 1161774
cauacuauggaaguggcuc

SEQ ID NO: 1161776 - RNA, 19 nt, Artificial Sequence
  Description of Artificial Sequence: Synthetic oligonucleotide
  Sense strand starting at position 1397 of SEQ ID NO: 916503
auuauuaauccacgguacu

SEQ ID NO: 1161777 - RNA, 19 nt, Artificial Sequence
  Description of Artificial Sequence: Synthetic oligonucleotide
  Antisense strand to SEQ ID NO: 1161776
aguaccguggauuaauaau

SEQ ID NO: 1161778 - RNA, 19 nt, Artificial Sequence
  Description of Artificial Sequence: Synthetic oligonucleotide
  Sense strand starting at position 1506 of SEQ ID NO: 916503
ggaauaaacugcuuuggag

SEQ ID NO: 1161779 - RNA, 19 nt, Artificial Sequence
  Description of Artificial Sequence: Synthetic oligonucleotide
  Antisense strand to SEQ ID NO: 1161778
cuccaaagcaguuuauucc

SEQ ID NO: 1161780 - RNA, 19 nt, Artificial Sequence
  Description of Artificial Sequence: Synthetic oligonucleotide
  Sense strand starting at position 1518 of SEQ ID NO: 916503
uuuggagauuggucacaau

SEQ ID NO: 1161781 - RNA, 19 nt, Artificial Sequence
  Description of Artificial Sequence: Synthetic oligonucleotide
  Antisense strand to SEQ ID NO: 1161780
auugugaccaaucuccaaa

SEQ ID NO: 1161782 - RNA, 19 nt, Artificial Sequence
  Description of Artificial Sequence: Synthetic oligonucleotide
  Sense strand starting at position 1529 of SEQ ID NO: 916503
gucacaaucugagucgaga

SEQ ID NO: 1161783 - RNA, 19 nt, Artificial Sequence
  Description of Artificial Sequence: Synthetic oligonucleotide
  Antisense strand to SEQ ID NO: 1161782
ucucgacucagauugugac

SEQ ID NO: 1161784 - RNA, 19 nt, Artificial Sequence
  Description of Artificial Sequence: Synthetic oligonucleotide
  Sense strand starting at position 1585 of SEQ ID NO: 916503
cgaugauagcgggacuuca

SEQ ID NO: 1161785 - RNA, 19 nt, Artificial Sequence
  Description of Artificial Sequence: Synthetic oligonucleotide
  Antisense strand to SEQ ID NO: 1161784
ugaagucccgcuaucaucg

SEQ ID NO: 1161786 - RNA, 19 nt, Artificial Sequence
  Description of Artificial Sequence: Synthetic oligonucleotide
  Sense strand starting at position 2560 of SEQ ID NO: 916503
ugaaucuuagcguaaggua

SEQ ID NO: 1161787 - RNA, 19 nt, Artificial Sequence
  Description of Artificial Sequence: Synthetic oligonucleotide
  Antisense strand to SEQ ID NO: 1161786
uaccuuacgcuaagauuca

SEQ ID NO: 1161788 - RNA, 19 nt, Artificial Sequence
  Description of Artificial Sequence: Synthetic oligonucleotide
  Sense strand starting at position 2572 of SEQ ID NO: 916503
uaagguaaucuacguaaag

SEQ ID NO: 1161789 - RNA, 19 nt, Artificial Sequence
  Description of Artificial Sequence: Synthetic oligonucleotide
  Antisense strand to SEQ ID NO: 1161788
cuuuacguagauuaccuua

SEQ ID NO: 1161790 - RNA, 19 nt, Artificial Sequence
  Description of Artificial Sequence: Synthetic oligonucleotide
  Sense strand starting at position 2588 of SEQ ID NO: 916503
aagccuuaagcggaggaua

SEQ ID NO: 1161791 - RNA, 19 nt, Artificial Sequence
  Description of Artificial Sequence: Synthetic oligonucleotide
  Antisense strand to SEQ ID NO: 1161790
uauccuccgcuuaaggcuu

SEQ ID NO: 1161792 - RNA, 19 nt, Artificial Sequence
  Description of Artificial Sequence: Synthetic oligonucleotide
  Sense strand starting at position 2591 of SEQ ID NO: 916503
ccuuaagcggaggauaauu

SEQ ID NO: 1161793 - RNA, 19 nt, Artificial Sequence
  Description of Artificial Sequence: Synthetic oligonucleotide
  Antisense strand to SEQ ID NO: 1161792
aauuauccuccgcuuaagg

SEQ ID NO: 1161794 - RNA, 19 nt, Artificial Sequence
  Description of Artificial Sequence: Synthetic oligonucleotide
  Sense strand starting at position 2671 of SEQ ID NO: 916503
gacucuguccugcagaaau

SEQ ID NO: 1161795 - RNA, 19 nt, Artificial Sequence
  Description of Artificial Sequence: Synthetic oligonucleotide
  Antisense strand to SEQ ID NO: 1161794
auuucugcaggacagaguc

SEQ ID NO: 1161796 - RNA, 19 nt, Artificial Sequence
  Description of Artificial Sequence: Synthetic oligonucleotide
  Sense strand starting at position 2673 of SEQ ID NO: 916503
cucuguccugcagaaauac

SEQ ID NO: 1161797 - RNA, 19 nt, Artificial Sequence
  Description of Artificial Sequence: Synthetic oligonucleotide
  Antisense strand to SEQ ID NO: 1161796
guauuucugcaggacagag

SEQ ID NO: 1161798 - RNA, 19 nt, Artificial Sequence
  Description of Artificial Sequence: Synthetic oligonucleotide
  Sense strand starting at position 2766 of SEQ ID NO: 916503
agccuaaauguccagcaaa

SEQ ID NO: 1161799 - RNA, 19 nt, Artificial Sequence
  Description of Artificial Sequence: Synthetic oligonucleotide
  Antisense strand to SEQ ID NO: 1161798
uuugcuggacauuuaggcu

SEQ ID NO: 1161800 - RNA, 19 nt, Artificial Sequence
  Description of Artificial Sequence: Synthetic oligonucleotide
  Sense strand starting at position 2873 of SEQ ID NO: 916503
aguagcucucaguaauuga

SEQ ID NO: 1161801 - RNA, 19 nt, Artificial Sequence
  Description of Artificial Sequence: Synthetic oligonucleotide
  Antisense strand to SEQ ID NO: 1161800
ucaauuacugagagcuacu

SEQ ID NO: 1161802 - RNA, 19 nt, Artificial Sequence
  Description of Artificial Sequence: Synthetic oligonucleotide
  Sense strand starting at position 2890 of SEQ ID NO: 916503
gaaugauuaguaggugcca

SEQ ID NO: 1161803 - RNA, 19 nt, Artificial Sequence
  Description of Artificial Sequence: Synthetic oligonucleotide
  Antisense strand to SEQ ID NO: 1161802
uggcaccuacuaaucauuc

SEQ ID NO: 1161804 - RNA, 19 nt, Artificial Sequence
  Description of Artificial Sequence: Synthetic oligonucleotide
  Sense strand starting at position 2892 of SEQ ID NO: 916503
augauuaguaggugccaga

SEQ ID NO: 1161805 - RNA, 19 nt, Artificial Sequence
  Description of Artificial Sequence: Synthetic oligonucleotide
  Antisense strand to SEQ ID NO: 1161804
ucuggcaccuacuaaucau

SEQ ID NO: 1161806 - RNA, 19 nt, Artificial Sequence
  Description of Artificial Sequence: Synthetic oligonucleotide
  Sense strand starting at position 2919 of SEQ ID NO: 916503
aguguuucccuugcguuaa

SEQ ID NO: 1161807 - RNA, 19 nt, Artificial Sequence
  Description of Artificial Sequence: Synthetic oligonucleotide
  Antisense strand to SEQ ID NO: 1161806
uuaacgcaagggaaacacu

SEQ ID NO: 1161808 - RNA, 19 nt, Artificial Sequence
  Description of Artificial Sequence: Synthetic oligonucleotide
  Sense strand starting at position 2923 of SEQ ID NO: 916503
uuucccuugcguuaauuua

SEQ ID NO: 1161809 - RNA, 19 nt, Artificial Sequence
  Description of Artificial Sequence: Synthetic oligonucleotide
  Antisense strand to SEQ ID NO: 1161808
uaaauuaacgcaagggaaa

SEQ ID NO: 1161810 - RNA, 19 nt, Artificial Sequence
  Description of Artificial Sequence: Synthetic oligonucleotide
  Sense strand starting at position 3005 of SEQ ID NO: 916503
cgagguucuuagccauuua

SEQ ID NO: 1161811 - RNA, 19 nt, Artificial Sequence
  Description of Artificial Sequence: Synthetic oligonucleotide
  Antisense strand to SEQ ID NO: 1161810
uaaauggcuaagaaccucg

SEQ ID NO: 1161812 - RNA, 19 nt, Artificial Sequence
  Description of Artificial Sequence: Synthetic oligonucleotide
  Sense strand starting at position 3073 of SEQ ID NO: 916503
gaacccagaucuguuggau

SEQ ID NO: 1161813 - RNA, 19 nt, Artificial Sequence
  Description of Artificial Sequence: Synthetic oligonucleotide
  Antisense strand to SEQ ID NO: 1161812
auccaacagaucuggguuc

SEQ ID NO: 1161814 - RNA, 19 nt, Artificial Sequence
  Description of Artificial Sequence: Synthetic oligonucleotide
  Sense strand starting at position 3160 of SEQ ID NO: 916503
uuauuaugaugggcuugaa

SEQ ID NO: 1161815 - RNA, 19 nt, Artificial Sequence
  Description of Artificial Sequence: Synthetic oligonucleotide
  Antisense strand to SEQ ID NO: 1161814
uucaagcccaucauaauaa

SEQ ID NO: 1161816 - RNA, 19 nt, Artificial Sequence
  Description of Artificial Sequence: Synthetic oligonucleotide
  Sense strand starting at position 3163 of SEQ ID NO: 916503
uuaugaugggcuugaacua

SEQ ID NO: 1161817 - RNA, 19 nt, Artificial Sequence
  Description of Artificial Sequence: Synthetic oligonucleotide
  Antisense strand to SEQ ID NO: 1161816
uaguucaagcccaucauaa

SEQ ID NO: 1161818 - RNA, 19 nt, Artificial Sequence
  Description of Artificial Sequence: Synthetic oligonucleotide
  Sense strand starting at position 3175 of SEQ ID NO: 916503
ugaacuagguguucuaaga

SEQ ID NO: 1161819 - RNA, 19 nt, Artificial Sequence
  Description of Artificial Sequence: Synthetic oligonucleotide
  Antisense strand to SEQ ID NO: 1161818
ucuuagaacaccuaguuca

SEQ ID NO: 1161820 - RNA, 19 nt, Artificial Sequence
  Description of Artificial Sequence: Synthetic oligonucleotide
  Sense strand starting at position 3252 of SEQ ID NO: 916503
uuaggauucccaggagcca

SEQ ID NO: 1161821 - RNA, 19 nt, Artificial Sequence
  Description of Artificial Sequence: Synthetic oligonucleotide
  Antisense strand to SEQ ID NO: 1161820
uggcuccugggaauccuaa

SEQ ID NO: 1161822 - RNA, 19 nt, Artificial Sequence
  Description of Artificial Sequence: Synthetic oligonucleotide
  Sense strand starting at position 3564 of SEQ ID NO: 916503
cugugaguggaaugagauc

SEQ ID NO: 1161823 - RNA, 19 nt, Artificial Sequence
  Description of Artificial Sequence: Synthetic oligonucleotide
  Antisense strand to SEQ ID NO: 1161822
gaucucauuccacucacag

SEQ ID NO: 1161824 - RNA, 19 nt, Artificial Sequence
  Description of Artificial Sequence: Synthetic oligonucleotide
  Sense strand starting at position 3802 of SEQ ID NO: 916503
uccuauauaccuugguaga

SEQ ID NO: 1161825 - RNA, 19 nt, Artificial Sequence
  Description of Artificial Sequence: Synthetic oligonucleotide
  Antisense strand to SEQ ID NO: 1161824
ucuaccaagguauauagga

SEQ ID NO: 1161826 - RNA, 19 nt, Artificial Sequence
  Description of Artificial Sequence: Synthetic oligonucleotide
  Sense strand starting at position 3803 of SEQ ID NO: 916503
ccuauauaccuugguagag

SEQ ID NO: 1161827 - RNA, 19 nt, Artificial Sequence
  Description of Artificial Sequence: Synthetic oligonucleotide
  Antisense strand to SEQ ID NO: 1161826
cucuaccaagguauauagg

SEQ ID NO: 1161828 - RNA, 19 nt, Artificial Sequence
  Description of Artificial Sequence: Synthetic oligonucleotide
  Sense strand starting at position 3830 of SEQ ID NO: 916503
gaaccuaagucugucugaa

SEQ ID NO: 1161829 - RNA, 19 nt, Artificial Sequence
  Description of Artificial Sequence: Synthetic oligonucleotide
  Antisense strand to SEQ ID NO: 1161828
uucagacagacuuagguuc

SEQ ID NO: 1161830 - RNA, 19 nt, Artificial Sequence
  Description of Artificial Sequence: Synthetic oligonucleotide
  Sense strand starting at position 3832 of SEQ ID NO: 916503
accuaagucugucugaaac

SEQ ID NO: 1161831 - RNA, 19 nt, Artificial Sequence
  Description of Artificial Sequence: Synthetic oligonucleotide
  Antisense strand to SEQ ID NO: 1161830
guuucagacagacuuaggu

SEQ ID NO: 1161832 - RNA, 19 nt, Artificial Sequence
  Description of Artificial Sequence: Synthetic oligonucleotide
  Sense strand starting at position 243 of SEQ ID NO: 916504
gguccauccuccugagugu

SEQ ID NO: 1161833 - RNA, 19 nt, Artificial Sequence
  Description of Artificial Sequence: Synthetic oligonucleotide
  Antisense strand to SEQ ID NO: 1161832
acacucaggaggauggacc

SEQ ID NO: 1161834 - RNA, 19 nt, Artificial Sequence
  Description of Artificial Sequence: Synthetic oligonucleotide
  Sense strand starting at position 275 of SEQ ID NO: 916504
ugaguccuucccuggcauu

SEQ ID NO: 1161835 - RNA, 19 nt, Artificial Sequence
  Description of Artificial Sequence: Synthetic oligonucleotide
  Antisense strand to SEQ ID NO: 1161834
aaugccagggaaggacuca

SEQ ID NO: 1161836 - RNA, 19 nt, Artificial Sequence
  Description of Artificial Sequence: Synthetic oligonucleotide
  Sense strand starting at position 662 of SEQ ID NO: 916504
ugccucgacugccugaaau

SEQ ID NO: 1161837 - RNA, 19 nt, Artificial Sequence
  Description of Artificial Sequence: Synthetic oligonucleotide
  Antisense strand to SEQ ID NO: 1161836
auuucaggcagucgaggca

SEQ ID NO: 1161838 - RNA, 19 nt, Artificial Sequence
  Description of Artificial Sequence: Synthetic oligonucleotide
  Sense strand starting at position 664 of SEQ ID NO: 916504
ccucgacugccugaaauac

SEQ ID NO: 1161839 - RNA, 19 nt, Artificial Sequence
  Description of Artificial Sequence: Synthetic oligonucleotide
  Antisense strand to SEQ ID NO: 1161838
guauuucaggcagucgagg

SEQ ID NO: 1161840 - RNA, 19 nt, Artificial Sequence
  Description of Artificial Sequence: Synthetic oligonucleotide
  Sense strand starting at position 950 of SEQ ID NO: 916504
cacgacgugugcucuaaau

SEQ ID NO: 1161841 - RNA, 19 nt, Artificial Sequence
  Description of Artificial Sequence: Synthetic oligonucleotide
  Antisense strand to SEQ ID NO: 1161840
auuuagagcacacgucgug

SEQ ID NO: 1161842 - RNA, 19 nt, Artificial Sequence
  Description of Artificial Sequence: Synthetic oligonucleotide
  Sense strand starting at position 952 of SEQ ID NO: 916504
cgacgugugcucuaaaucu

SEQ ID NO: 1161843 - RNA, 19 nt, Artificial Sequence
  Description of Artificial Sequence: Synthetic oligonucleotide
  Antisense strand to SEQ ID NO: 1161842
agauuuagagcacacgucg

SEQ ID NO: 1161844 - RNA, 19 nt, Artificial Sequence
  Description of Artificial Sequence: Synthetic oligonucleotide
  Sense strand starting at position 2045 of SEQ ID NO: 916504
gcaaauguaugcuaacgag

SEQ ID NO: 1161845 - RNA, 19 nt, Artificial Sequence
  Description of Artificial Sequence: Synthetic oligonucleotide
  Antisense strand to SEQ ID NO: 1161844
cucguuagcauacauuugc

SEQ ID NO: 1161846 - RNA, 19 nt, Artificial Sequence
  Description of Artificial Sequence: Synthetic oligonucleotide
  Sense strand starting at position 2498 of SEQ ID NO: 916504
gagcgagaauguuaacuug

SEQ ID NO: 1161847 - RNA, 19 nt, Artificial Sequence
  Description of Artificial Sequence: Synthetic oligonucleotide
  Antisense strand to SEQ ID NO: 1161846
caaguuaacauucucgcuc

SEQ ID NO: 1161848 - RNA, 19 nt, Artificial Sequence
  Description of Artificial Sequence: Synthetic oligonucleotide
  Sense strand starting at position 2501 of SEQ ID NO: 916504
cgagaauguuaacuuguaa

SEQ ID NO: 1161849 - RNA, 19 nt, Artificial Sequence
  Description of Artificial Sequence: Synthetic oligonucleotide
  Antisense strand to SEQ ID NO: 1161848
uuacaaguuaacauucucg

SEQ ID NO: 1161850 - RNA, 19 nt, Artificial Sequence
  Description of Artificial Sequence: Synthetic oligonucleotide
  Sense strand starting at position 2512 of SEQ ID NO: 916504
acuuguaauguuuguugga

SEQ ID NO: 1161851 - RNA, 19 nt, Artificial Sequence
  Description of Artificial Sequence: Synthetic oligonucleotide
  Antisense strand to SEQ ID NO: 1161850
uccaacaaacauuacaagu

SEQ ID NO: 1161852 - RNA, 19 nt, Artificial Sequence
  Description of Artificial Sequence: Synthetic oligonucleotide
  Sense strand starting at position 2546 of SEQ ID NO: 916504
ggcacaugcccaggaguua

SEQ ID NO: 1161853 - RNA, 19 nt, Artificial Sequence
  Description of Artificial Sequence: Synthetic oligonucleotide
  Antisense strand to SEQ ID NO: 1161852
uaacuccugggcaugugcc

SEQ ID NO: 1161854 - RNA, 19 nt, Artificial Sequence
  Description of Artificial Sequence: Synthetic oligonucleotide
  Sense strand starting at position 2584 of SEQ ID NO: 916504
uuacaacauuuaugagaug

SEQ ID NO: 1161855 - RNA, 19 nt, Artificial Sequence
  Description of Artificial Sequence: Synthetic oligonucleotide
  Antisense strand to SEQ ID NO: 1161854
caucucauaaauguuguaa

SEQ ID NO: 1161856 - RNA, 19 nt, Artificial Sequence
  Description of Artificial Sequence: Synthetic oligonucleotide
  Sense strand starting at position 2612 of SEQ ID NO: 916504
auuuccauuucgcagacaa

SEQ ID NO: 1161857 - RNA, 19 nt, Artificial Sequence
  Description of Artificial Sequence: Synthetic oligonucleotide
  Antisense strand to SEQ ID NO: 1161856
uugucugcgaaauggaaau

SEQ ID NO: 1161858 - RNA, 19 nt, Artificial Sequence
  Description of Artificial Sequence: Synthetic oligonucleotide
  Sense strand starting at position 2640 of SEQ ID NO: 916504
ggcccaaagaaaugaagua

SEQ ID NO: 1161859 - RNA, 19 nt, Artificial Sequence
  Description of Artificial Sequence: Synthetic oligonucleotide
  Antisense strand to SEQ ID NO: 1161858
uacuucauuucuuugggcc

SEQ ID NO: 1161860 - RNA, 19 nt, Artificial Sequence
  Description of Artificial Sequence: Synthetic oligonucleotide
  Sense strand starting at position 2653 of SEQ ID NO: 916504
gaaguaacuuaugggaggu

SEQ ID NO: 1161861 - RNA, 19 nt, Artificial Sequence
  Description of Artificial Sequence: Synthetic oligonucleotide
  Antisense strand to SEQ ID NO: 1161860
accucccauaaguuacuuc

SEQ ID NO: 1161862 - RNA, 19 nt, Artificial Sequence
  Description of Artificial Sequence: Synthetic oligonucleotide
  Sense strand starting at position 2715 of SEQ ID NO: 916504
ggcgcuuguguggauugaa

SEQ ID NO: 1161863 - RNA, 19 nt, Artificial Sequence
  Description of Artificial Sequence: Synthetic oligonucleotide
  Antisense strand to SEQ ID NO: 1161862
uucaauccacacaagcgcc

SEQ ID NO: 1161864 - RNA, 19 nt, Artificial Sequence
  Description of Artificial Sequence: Synthetic oligonucleotide
  Sense strand starting at position 2716 of SEQ ID NO: 916504
gcgcuuguguggauugaac

SEQ ID NO: 1161865 - RNA, 19 nt, Artificial Sequence
  Description of Artificial Sequence: Synthetic oligonucleotide
  Antisense strand to SEQ ID NO: 1161864
guucaauccacacaagcgc

SEQ ID NO: 1161866 - RNA, 19 nt, Artificial Sequence
  Description of Artificial Sequence: Synthetic oligonucleotide
  Sense strand starting at position 2724 of SEQ ID NO: 916504
guggauugaacucgugcaa

SEQ ID NO: 1161867 - RNA, 19 nt, Artificial Sequence
  Description of Artificial Sequence: Synthetic oligonucleotide
  Antisense strand to SEQ ID NO: 1161866
uugcacgaguucaauccac

SEQ ID NO: 1161868 - RNA, 19 nt, Artificial Sequence
  Description of Artificial Sequence: Synthetic oligonucleotide
  Sense strand starting at position 2804 of SEQ ID NO: 916504
ggguaacccuugccuuuau

SEQ ID NO: 1161869 - RNA, 19 nt, Artificial Sequence
  Description of Artificial Sequence: Synthetic oligonucleotide
  Antisense strand to SEQ ID NO: 1161868
auaaaggcaaggguuaccc

SEQ ID NO: 1161870 - RNA, 19 nt, Artificial Sequence
  Description of Artificial Sequence: Synthetic oligonucleotide
  Sense strand starting at position 2963 of SEQ ID NO: 916504
cagaacuggucucagggaa

SEQ ID NO: 1161871 - RNA, 19 nt, Artificial Sequence
  Description of Artificial Sequence: Synthetic oligonucleotide
  Antisense strand to SEQ ID NO: 1161870
uucccugagaccaguucug

SEQ ID NO: 1161872 - RNA, 19 nt, Artificial Sequence
  Description of Artificial Sequence: Synthetic oligonucleotide
  Sense strand starting at position 3101 of SEQ ID NO: 916504
cggucugaacagggugauu

SEQ ID NO: 1161873 - RNA, 19 nt, Artificial Sequence
  Description of Artificial Sequence: Synthetic oligonucleotide
  Antisense strand to SEQ ID NO: 1161872
aaucacccuguucagaccg

SEQ ID NO: 1161874 - RNA, 19 nt, Artificial Sequence
  Description of Artificial Sequence: Synthetic oligonucleotide
  Sense strand starting at position 3137 of SEQ ID NO: 916504
gaccuugguucggacugau

SEQ ID NO: 1161875 - RNA, 19 nt, Artificial Sequence
  Description of Artificial Sequence: Synthetic oligonucleotide
  Antisense strand to SEQ ID NO: 1161874
aucaguccgaaccaagguc

SEQ ID NO: 1161876 - RNA, 19 nt, Artificial Sequence
  Description of Artificial Sequence: Synthetic oligonucleotide
  Sense strand starting at position 3186 of SEQ ID NO: 916504
caggacaucccggauuguu

SEQ ID NO: 1161877 - RNA, 19 nt, Artificial Sequence
  Description of Artificial Sequence: Synthetic oligonucleotide
  Antisense strand to SEQ ID NO: 1161876
aacaauccgggauguccug

SEQ ID NO: 1161878 - RNA, 19 nt, Artificial Sequence
  Description of Artificial Sequence: Synthetic oligonucleotide
  Sense strand starting at position 3568 of SEQ ID NO: 916504
gcuguagucaaggaaagga

SEQ ID NO: 1161879 - RNA, 19 nt, Artificial Sequence
  Description of Artificial Sequence: Synthetic oligonucleotide
  Antisense strand to SEQ ID NO: 1161878
uccuuuccuugacuacagc

SEQ ID NO: 1161880 - RNA, 19 nt, Artificial Sequence
  Description of Artificial Sequence: Synthetic oligonucleotide
  Sense strand starting at position 3581 of SEQ ID NO: 916504
aaaggaagcguauggguau

SEQ ID NO: 1161881 - RNA, 19 nt, Artificial Sequence
  Description of Artificial Sequence: Synthetic oligonucleotide
  Antisense strand to SEQ ID NO: 1161880
auacccauacgcuuccuuu

SEQ ID NO: 1161882 - RNA, 19 nt, Artificial Sequence
  Description of Artificial Sequence: Synthetic oligonucleotide
  Sense strand starting at position 3618 of SEQ ID NO: 916504
cguccuagcgugugccaaa

SEQ ID NO: 1161883 - RNA, 19 nt, Artificial Sequence
  Description of Artificial Sequence: Synthetic oligonucleotide
  Antisense strand to SEQ ID NO: 1161882
uuuggcacacgcuaggacg

SEQ ID NO: 1161884 - RNA, 19 nt, Artificial Sequence
  Description of Artificial Sequence: Synthetic oligonucleotide
  Sense strand starting at position 3673 of SEQ ID NO: 916504
gucagaacgcgguuucucu

SEQ ID NO: 1161885 - RNA, 19 nt, Artificial Sequence
  Description of Artificial Sequence: Synthetic oligonucleotide
  Antisense strand to SEQ ID NO: 1161884
agagaaaccgcguucugac

SEQ ID NO: 1161886 - RNA, 19 nt, Artificial Sequence
  Description of Artificial Sequence: Synthetic oligonucleotide
  Sense strand starting at position 3893 of SEQ ID NO: 916504
ggaaaucagaggugcugaa

SEQ ID NO: 1161887 - RNA, 19 nt, Artificial Sequence
  Description of Artificial Sequence: Synthetic oligonucleotide
  Antisense strand to SEQ ID NO: 1161886
uucagcaccucugauuucc

SEQ ID NO: 1161888 - RNA, 19 nt, Artificial Sequence
  Description of Artificial Sequence: Synthetic oligonucleotide
  Sense strand starting at position 2 of SEQ ID NO: 916505
agguaaucaccaggugauu

SEQ ID NO: 1161889 - RNA, 19 nt, Artificial Sequence
  Description of Artificial Sequence: Synthetic oligonucleotide
  Antisense strand to SEQ ID NO: 1161888
aaucaccuggugauuaccu

SEQ ID NO: 1161890 - RNA, 19 nt, Artificial Sequence
  Description of Artificial Sequence: Synthetic oligonucleotide
  Sense strand starting at position 8 of SEQ ID NO: 916505
ucaccaggugauuaucuau

SEQ ID NO: 1161891 - RNA, 19 nt, Artificial Sequence
  Description of Artificial Sequence: Synthetic oligonucleotide
  Antisense strand to SEQ ID NO: 1161890
auagauaaucaccugguga

SEQ ID NO: 1161892 - RNA, 19 nt, Artificial Sequence
  Description of Artificial Sequence: Synthetic oligonucleotide
  Sense strand starting at position 142 of SEQ ID NO: 916505
ggucuucugguugaaggga

SEQ ID NO: 1161893 - RNA, 19 nt, Artificial Sequence
  Description of Artificial Sequence: Synthetic oligonucleotide
  Antisense strand to SEQ ID NO: 1161892
ucccuucaaccagaagacc

SEQ ID NO: 1161894 - RNA, 19 nt, Artificial Sequence
  Description of Artificial Sequence: Synthetic oligonucleotide
  Sense strand starting at position 215 of SEQ ID NO: 916505
ugaccugagacuggaaguu

SEQ ID NO: 1161895 - RNA, 19 nt, Artificial Sequence
  Description of Artificial Sequence: Synthetic oligonucleotide
  Antisense strand to SEQ ID NO: 1161894
aacuuccagucucagguca

SEQ ID NO: 1161896 - RNA, 19 nt, Artificial Sequence
  Description of Artificial Sequence: Synthetic oligonucleotide
  Sense strand starting at position 304 of SEQ ID NO: 916505
cugggagaugauugcucuu

SEQ ID NO: 1161897 - RNA, 19 nt, Artificial Sequence
  Description of Artificial Sequence: Synthetic oligonucleotide
  Antisense strand to SEQ ID NO: 1161896
aagagcaaucaucucccag

SEQ ID NO: 1161898 - RNA, 19 nt, Artificial Sequence
  Description of Artificial Sequence: Synthetic oligonucleotide
  Sense strand starting at position 306 of SEQ ID NO: 916505
gggagaugauugcucuuug

SEQ ID NO: 1161899 - RNA, 19 nt, Artificial Sequence
  Description of Artificial Sequence: Synthetic oligonucleotide
  Antisense strand to SEQ ID NO: 1161898
caaagagcaaucaucuccc

SEQ ID NO: 1161900 - RNA, 19 nt, Artificial Sequence
  Description of Artificial Sequence: Synthetic oligonucleotide
  Sense strand starting at position 307 of SEQ ID NO: 916505
ggagaugauugcucuuuga

SEQ ID NO: 1161901 - RNA, 19 nt, Artificial Sequence
  Description of Artificial Sequence: Synthetic oligonucleotide
  Antisense strand to SEQ ID NO: 1161900
ucaaagagcaaucaucucc

SEQ ID NO: 1161902 - RNA, 19 nt, Artificial Sequence
  Description of Artificial Sequence: Synthetic oligonucleotide
  Sense strand starting at position 310 of SEQ ID NO: 916505
gaugauugcucuuugacuu

SEQ ID NO: 1161903 - RNA, 19 nt, Artificial Sequence
  Description of Artificial Sequence: Synthetic oligonucleotide
  Antisense strand to SEQ ID NO: 1161902
aagucaaagagcaaucauc

SEQ ID NO: 1161904 - RNA, 19 nt, Artificial Sequence
  Description of Artificial Sequence: Synthetic oligonucleotide
  Sense strand starting at position 400 of SEQ ID NO: 916505
uccucauaacugggacuuu

SEQ ID NO: 1161905 - RNA, 19 nt, Artificial Sequence
  Description of Artificial Sequence: Synthetic oligonucleotide
  Antisense strand to SEQ ID NO: 1161904
aaagucccaguuaugagga

SEQ ID NO: 1161906 - RNA, 19 nt, Artificial Sequence
  Description of Artificial Sequence: Synthetic oligonucleotide
  Sense strand starting at position 420 of SEQ ID NO: 916505
ucuucuguucugcagaaau

SEQ ID NO: 1161907 - RNA, 19 nt, Artificial Sequence
  Description of Artificial Sequence: Synthetic oligonucleotide
  Antisense strand to SEQ ID NO: 1161906
auuucugcagaacagaaga

SEQ ID NO: 1161908 - RNA, 19 nt, Artificial Sequence
  Description of Artificial Sequence: Synthetic oligonucleotide
  Sense strand starting at position 902 of SEQ ID NO: 916505
ccaucuauggacugucaua

SEQ ID NO: 1161909 - RNA, 19 nt, Artificial Sequence
  Description of Artificial Sequence: Synthetic oligonucleotide
  Antisense strand to SEQ ID NO: 1161908
uaugacaguccauagaugg

SEQ ID NO: 1161910 - RNA, 19 nt, Artificial Sequence
  Description of Artificial Sequence: Synthetic oligonucleotide
  Sense strand starting at position 1042 of SEQ ID NO: 916505
aagguaauagcaugucaac

SEQ ID NO: 1161911 - RNA, 19 nt, Artificial Sequence
  Description of Artificial Sequence: Synthetic oligonucleotide
  Antisense strand to SEQ ID NO: 1161910
guugacaugcuauuaccuu

SEQ ID NO: 1161912 - RNA, 19 nt, Artificial Sequence
  Description of Artificial Sequence: Synthetic oligonucleotide
  Sense strand starting at position 1090 of SEQ ID NO: 916505
cuuuauguggacuauaacu

SEQ ID NO: 1161913 - RNA, 19 nt, Artificial Sequence
  Description of Artificial Sequence: Synthetic oligonucleotide
  Antisense strand to SEQ ID NO: 1161912
aguuauaguccacauaaag

SEQ ID NO: 1161914 - RNA, 19 nt, Artificial Sequence
  Description of Artificial Sequence: Synthetic oligonucleotide
  Sense strand starting at position 1122 of SEQ ID NO: 916505
ugagauaugauguggguag

SEQ ID NO: 1161915 - RNA, 19 nt, Artificial Sequence
  Description of Artificial Sequence: Synthetic oligonucleotide
  Antisense strand to SEQ ID NO: 1161914
cuacccacaucauaucuca

SEQ ID NO: 1161916 - RNA, 19 nt, Artificial Sequence
  Description of Artificial Sequence: Synthetic oligonucleotide
  Sense strand starting at position 1152 of SEQ ID NO: 916505
gaaugcuuauggccuagga

SEQ ID NO: 1161917 - RNA, 19 nt, Artificial Sequence
  Description of Artificial Sequence: Synthetic oligonucleotide
  Antisense strand to SEQ ID NO: 1161916
uccuaggccauaagcauuc

SEQ ID NO: 1161918 - RNA, 19 nt, Artificial Sequence
  Description of Artificial Sequence: Synthetic oligonucleotide
  Sense strand starting at position 1156 of SEQ ID NO: 916505
gcuuauggccuaggaagau

SEQ ID NO: 1161919 - RNA, 19 nt, Artificial Sequence
  Description of Artificial Sequence: Synthetic oligonucleotide
  Antisense strand to SEQ ID NO: 1161918
aucuuccuaggccauaagc

SEQ ID NO: 1161920 - RNA, 19 nt, Artificial Sequence
  Description of Artificial Sequence: Synthetic oligonucleotide
  Sense strand starting at position 1327 of SEQ ID NO: 916505
uugagaccuuagcccuaaa

SEQ ID NO: 1161921 - RNA, 19 nt, Artificial Sequence
  Description of Artificial Sequence: Synthetic oligonucleotide
  Antisense strand to SEQ ID NO: 1161920
uuuagggcuaaggucucaa

SEQ ID NO: 1161922 - RNA, 19 nt, Artificial Sequence
  Description of Artificial Sequence: Synthetic oligonucleotide
  Sense strand starting at position 1384 of SEQ ID NO: 916505
gauaucuucuggcuugaag

SEQ ID NO: 1161923 - RNA, 19 nt, Artificial Sequence
  Description of Artificial Sequence: Synthetic oligonucleotide
  Antisense strand to SEQ ID NO: 1161922
cuucaagccagaagauauc

SEQ ID NO: 1161924 - RNA, 19 nt, Artificial Sequence
  Description of Artificial Sequence: Synthetic oligonucleotide
  Sense strand starting at position 1387 of SEQ ID NO: 916505
aucuucuggcuugaaguua

SEQ ID NO: 1161925 - RNA, 19 nt, Artificial Sequence
  Description of Artificial Sequence: Synthetic oligonucleotide
  Antisense strand to SEQ ID NO: 1161924
uaacuucaagccagaagau

SEQ ID NO: 1161926 - RNA, 19 nt, Artificial Sequence
  Description of Artificial Sequence: Synthetic oligonucleotide
  Sense strand starting at position 1392 of SEQ ID NO: 916505
cuggcuugaaguuauuaga

SEQ ID NO: 1161927 - RNA, 19 nt, Artificial Sequence
  Description of Artificial Sequence: Synthetic oligonucleotide
  Antisense strand to SEQ ID NO: 1161926
ucuaauaacuucaagccag

SEQ ID NO: 1161928 - RNA, 19 nt, Artificial Sequence
  Description of Artificial Sequence: Synthetic oligonucleotide
  Sense strand starting at position 1402 of SEQ ID NO: 916505
guuauuagauccuucuaga

SEQ ID NO: 1161929 - RNA, 19 nt, Artificial Sequence
  Description of Artificial Sequence: Synthetic oligonucleotide
  Antisense strand to SEQ ID NO: 1161928
ucuagaaggaucuaauaac

SEQ ID NO: 1161930 - RNA, 19 nt, Artificial Sequence
  Description of Artificial Sequence: Synthetic oligonucleotide
  Sense strand starting at position 1493 of SEQ ID NO: 916505
uuagucucagaguaaagcu

SEQ ID NO: 1161931 - RNA, 19 nt, Artificial Sequence
  Description of Artificial Sequence: Synthetic oligonucleotide
  Antisense strand to SEQ ID NO: 1161930
agcuuuacucugagacuaa

SEQ ID NO: 1161932 - RNA, 19 nt, Artificial Sequence
  Description of Artificial Sequence: Synthetic oligonucleotide
  Sense strand starting at position 1509 of SEQ ID NO: 916505
gcuucuaagugaccuaaca

SEQ ID NO: 1161933 - RNA, 19 nt, Artificial Sequence
  Description of Artificial Sequence: Synthetic oligonucleotide
  Antisense strand to SEQ ID NO: 1161932
uguuaggucacuuagaagc

SEQ ID NO: 1161934 - RNA, 19 nt, Artificial Sequence
  Description of Artificial Sequence: Synthetic oligonucleotide
  Sense strand starting at position 1893 of SEQ ID NO: 916505
ugagauuucugggagccuu

SEQ ID NO: 1161935 - RNA, 19 nt, Artificial Sequence
  Description of Artificial Sequence: Synthetic oligonucleotide
  Antisense strand to SEQ ID NO: 1161934
aaggcucccagaaaucuca

SEQ ID NO: 1161936 - RNA, 19 nt, Artificial Sequence
  Description of Artificial Sequence: Synthetic oligonucleotide
  Sense strand starting at position 2017 of SEQ ID NO: 916505
ggaggugacucagccaaga

SEQ ID NO: 1161937 - RNA, 19 nt, Artificial Sequence
  Description of Artificial Sequence: Synthetic oligonucleotide
  Antisense strand to SEQ ID NO: 1161936
ucuuggcugagucaccucc

SEQ ID NO: 1161938 - RNA, 19 nt, Artificial Sequence
  Description of Artificial Sequence: Synthetic oligonucleotide
  Sense strand starting at position 2281 of SEQ ID NO: 916505
accuuugagucucccuaga

SEQ ID NO: 1161939 - RNA, 19 nt, Artificial Sequence
  Description of Artificial Sequence: Synthetic oligonucleotide
  Antisense strand to SEQ ID NO: 1161938
ucuagggagacucaaaggu

SEQ ID NO: 1161940 - RNA, 19 nt, Artificial Sequence
  Description of Artificial Sequence: Synthetic oligonucleotide
  Sense strand starting at position 2283 of SEQ ID NO: 916505
cuuugagucucccuagaau

SEQ ID NO: 1161941 - RNA, 19 nt, Artificial Sequence
  Description of Artificial Sequence: Synthetic oligonucleotide
  Antisense strand to SEQ ID NO: 1161940
auucuagggagacucaaag

SEQ ID NO: 1161942 - RNA, 19 nt, Artificial Sequence
  Description of Artificial Sequence: Synthetic oligonucleotide
  Sense strand starting at position 2312 of SEQ ID NO: 916505
guaggaaacagcugaggua

SEQ ID NO: 1161943 - RNA, 19 nt, Artificial Sequence
  Description of Artificial Sequence: Synthetic oligonucleotide
  Antisense strand to SEQ ID NO: 1161942
uaccucagcuguuuccuac

SEQ ID NO: 1161944 - RNA, 19 nt, Artificial Sequence
  Description of Artificial Sequence: Synthetic oligonucleotide
  Sense strand starting at position 2346 of SEQ ID NO: 916505
gaaggagucaagcgugaag

SEQ ID NO: 1161945 - RNA, 19 nt, Artificial Sequence
  Description of Artificial Sequence: Synthetic oligonucleotide
  Antisense strand to SEQ ID NO: 1161944
cuucacgcuugacuccuuc

SEQ ID NO: 1161946 - RNA, 19 nt, Artificial Sequence
  Description of Artificial Sequence: Synthetic oligonucleotide
  Sense strand starting at position 2458 of SEQ ID NO: 916505
aucuaaugagccuggaaua

SEQ ID NO: 1161947 - RNA, 19 nt, Artificial Sequence
  Description of Artificial Sequence: Synthetic oligonucleotide
  Antisense strand to SEQ ID NO: 1161946
uauuccaggcucauuagau

SEQ ID NO: 1161948 - RNA, 19 nt, Artificial Sequence
  Description of Artificial Sequence: Synthetic oligonucleotide
  Sense strand starting at position 2459 of SEQ ID NO: 916505
ucuaaugagccuggaauau

SEQ ID NO: 1161949 - RNA, 19 nt, Artificial Sequence
  Description of Artificial Sequence: Synthetic oligonucleotide
  Antisense strand to SEQ ID NO: 1161948
auauuccaggcucauuaga

SEQ ID NO: 1161950 - RNA, 19 nt, Artificial Sequence
  Description of Artificial Sequence: Synthetic oligonucleotide
  Sense strand starting at position 2471 of SEQ ID NO: 916505
ggaauauguggguguaggu

SEQ ID NO: 1161951 - RNA, 19 nt, Artificial Sequence
  Description of Artificial Sequence: Synthetic oligonucleotide
  Antisense strand to SEQ ID NO: 1161950
accuacacccacauauucc

SEQ ID NO: 1161952 - RNA, 19 nt, Artificial Sequence
  Description of Artificial Sequence: Synthetic oligonucleotide
  Sense strand starting at position 2639 of SEQ ID NO: 916505
gggagguuugcugagaagu

SEQ ID NO: 1161953 - RNA, 19 nt, Artificial Sequence
  Description of Artificial Sequence: Synthetic oligonucleotide
  Antisense strand to SEQ ID NO: 1161952
acuucucagcaaaccuccc

SEQ ID NO: 1161954 - RNA, 19 nt, Artificial Sequence
  Description of Artificial Sequence: Synthetic oligonucleotide
  Sense strand starting at position 2653 of SEQ ID NO: 916505
gaagucaggcuuugagaug

SEQ ID NO: 1161955 - RNA, 19 nt, Artificial Sequence
  Description of Artificial Sequence: Synthetic oligonucleotide
  Antisense strand to SEQ ID NO: 1161954
caucucaaagccugacuuc

SEQ ID NO: 1161956 - RNA, 19 nt, Artificial Sequence
  Description of Artificial Sequence: Synthetic oligonucleotide
  Sense strand starting at position 3035 of SEQ ID NO: 916505
agugcaggucuugaguaaa

SEQ ID NO: 1161957 - RNA, 19 nt, Artificial Sequence
  Description of Artificial Sequence: Synthetic oligonucleotide
  Antisense strand to SEQ ID NO: 1161956
uuuacucaagaccugcacu

SEQ ID NO: 1161958 - RNA, 19 nt, Artificial Sequence
  Description of Artificial Sequence: Synthetic oligonucleotide
  Sense strand starting at position 3075 of SEQ ID NO: 916505
uguacucaguaagucagaa

SEQ ID NO: 1161959 - RNA, 19 nt, Artificial Sequence
  Description of Artificial Sequence: Synthetic oligonucleotide
  Antisense strand to SEQ ID NO: 1161958
uucugacuuacugaguaca

SEQ ID NO: 1161960 - RNA, 19 nt, Artificial Sequence
  Description of Artificial Sequence: Synthetic oligonucleotide
  Sense strand starting at position 3158 of SEQ ID NO: 916505
cgaggcugugcuuaauaaa

SEQ ID NO: 1161961 - RNA, 19 nt, Artificial Sequence
  Description of Artificial Sequence: Synthetic oligonucleotide
  Antisense strand to SEQ ID NO: 1161960
uuuauuaagcacagccucg

SEQ ID NO: 1161962 - RNA, 19 nt, Artificial Sequence
  Description of Artificial Sequence: Synthetic oligonucleotide
  Sense strand starting at position 3200 of SEQ ID NO: 916505
ugggaaagugguugggaga

SEQ ID NO: 1161963 - RNA, 19 nt, Artificial Sequence
  Description of Artificial Sequence: Synthetic oligonucleotide
  Antisense strand to SEQ ID NO: 1161962
ucucccaaccacuuuccca

SEQ ID NO: 1161964 - RNA, 19 nt, Artificial Sequence
  Description of Artificial Sequence: Synthetic oligonucleotide
  Sense strand starting at position 3236 of SEQ ID NO: 916505
cuuaaaugcuaugcaagga

SEQ ID NO: 1161965 - RNA, 19 nt, Artificial Sequence
  Description of Artificial Sequence: Synthetic oligonucleotide
  Antisense strand to SEQ ID NO: 1161964
uccuugcauagcauuuaag

SEQ ID NO: 1161966 - RNA, 19 nt, Artificial Sequence
  Description of Artificial Sequence: Synthetic oligonucleotide
  Sense strand starting at position 3603 of SEQ ID NO: 916505
cuauuauugggugaugggu

SEQ ID NO: 1161967 - RNA, 19 nt, Artificial Sequence
  Description of Artificial Sequence: Synthetic oligonucleotide
  Antisense strand to SEQ ID NO: 1161966
acccaucacccaauaauag

SEQ ID NO: 1161968 - RNA, 19 nt, Artificial Sequence
  Description of Artificial Sequence: Synthetic oligonucleotide
  Sense strand starting at position 147 of SEQ ID NO: 916506
gacuauugacuaugugaaa

SEQ ID NO: 1161969 - RNA, 19 nt, Artificial Sequence
  Description of Artificial Sequence: Synthetic oligonucleotide
  Antisense strand to SEQ ID NO: 1161968
uuucacauagucaauaguc

SEQ ID NO: 1161970 - RNA, 19 nt, Artificial Sequence
  Description of Artificial Sequence: Synthetic oligonucleotide
  Sense strand starting at position 148 of SEQ ID NO: 916506
acuauugacuaugugaaau

SEQ ID NO: 1161971 - RNA, 19 nt, Artificial Sequence
  Description of Artificial Sequence: Synthetic oligonucleotide
  Antisense strand to SEQ ID NO: 1161970
auuucacauagucaauagu

SEQ ID NO: 1161972 - RNA, 19 nt, Artificial Sequence
  Description of Artificial Sequence: Synthetic oligonucleotide
  Sense strand starting at position 209 of SEQ ID NO: 916506
gguuuccaucacuggguaa

SEQ ID NO: 1161973 - RNA, 19 nt, Artificial Sequence
  Description of Artificial Sequence: Synthetic oligonucleotide
  Antisense strand to SEQ ID NO: 1161972
uuacccagugauggaaacc

SEQ ID NO: 1161974 - RNA, 19 nt, Artificial Sequence
  Description of Artificial Sequence: Synthetic oligonucleotide
  Sense strand starting at position 213 of SEQ ID NO: 916506
uccaucacuggguaauacu

SEQ ID NO: 1161975 - RNA, 19 nt, Artificial Sequence
  Description of Artificial Sequence: Synthetic oligonucleotide
  Antisense strand to SEQ ID NO: 1161974
aguauuacccagugaugga

SEQ ID NO: 1161976 - RNA, 19 nt, Artificial Sequence
  Description of Artificial Sequence: Synthetic oligonucleotide
  Sense strand starting at position 246 of SEQ ID NO: 916506
caagauggaguuuguugaa

SEQ ID NO: 1161977 - RNA, 19 nt, Artificial Sequence
  Description of Artificial Sequence: Synthetic oligonucleotide
  Antisense strand to SEQ ID NO: 1161976
uucaacaaacuccaucuug

SEQ ID NO: 1161978 - RNA, 19 nt, Artificial Sequence
  Description of Artificial Sequence: Synthetic oligonucleotide
  Sense strand starting at position 872 of SEQ ID NO: 916506
caaagagguuaagauuuau

SEQ ID NO: 1161979 - RNA, 19 nt, Artificial Sequence
  Description of Artificial Sequence: Synthetic oligonucleotide
  Antisense strand to SEQ ID NO: 1161978
auaaaucuuaaccucuuug

SEQ ID NO: 1161980 - RNA, 19 nt, Artificial Sequence
  Description of Artificial Sequence: Synthetic oligonucleotide
  Sense strand starting at position 952 of SEQ ID NO: 916506
ugcucauaacaagguuuaa

SEQ ID NO: 1161981 - RNA, 19 nt, Artificial Sequence
  Description of Artificial Sequence: Synthetic oligonucleotide
  Antisense strand to SEQ ID NO: 1161980
uuaaaccuuguuaugagca

SEQ ID NO: 1161982 - RNA, 19 nt, Artificial Sequence
  Description of Artificial Sequence: Synthetic oligonucleotide
  Sense strand starting at position 964 of SEQ ID NO: 916506
gguuuaacaugauuaugug

SEQ ID NO: 1161983 - RNA, 19 nt, Artificial Sequence
  Description of Artificial Sequence: Synthetic oligonucleotide
  Antisense strand to SEQ ID NO: 1161982
cacauaaucauguuaaacc

SEQ ID NO: 1161984 - RNA, 19 nt, Artificial Sequence
  Description of Artificial Sequence: Synthetic oligonucleotide
  Sense strand starting at position 1008 of SEQ ID NO: 916506
gguggcucuggauaguuua

SEQ ID NO: 1161985 - RNA, 19 nt, Artificial Sequence
  Description of Artificial Sequence: Synthetic oligonucleotide
  Antisense strand to SEQ ID NO: 1161984
uaaacuauccagagccacc

SEQ ID NO: 1161986 - RNA, 19 nt, Artificial Sequence
  Description of Artificial Sequence: Synthetic oligonucleotide
  Sense strand starting at position 1032 of SEQ ID NO: 916506
acgucaaaggauugauaca

SEQ ID NO: 1161987 - RNA, 19 nt, Artificial Sequence
  Description of Artificial Sequence: Synthetic oligonucleotide
  Antisense strand to SEQ ID NO: 1161986
uguaucaauccuuugacgu

SEQ ID NO: 1161988 - RNA, 19 nt, Artificial Sequence
  Description of Artificial Sequence: Synthetic oligonucleotide
  Sense strand starting at position 1052 of SEQ ID NO: 916506
aguuaagcugaaugauaua

SEQ ID NO: 1161989 - RNA, 19 nt, Artificial Sequence
  Description of Artificial Sequence: Synthetic oligonucleotide
  Antisense strand to SEQ ID NO: 1161988
uauaucauucagcuuaacu

SEQ ID NO: 1161990 - RNA, 19 nt, Artificial Sequence
  Description of Artificial Sequence: Synthetic oligonucleotide
  Sense strand starting at position 1098 of SEQ ID NO: 916506
agugauaugccauaaacgu

SEQ ID NO: 1161991 - RNA, 19 nt, Artificial Sequence
  Description of Artificial Sequence: Synthetic oligonucleotide
  Antisense strand to SEQ ID NO: 1161990
acguuuauggcauaucacu

SEQ ID NO: 1161992 - RNA, 19 nt, Artificial Sequence
  Description of Artificial Sequence: Synthetic oligonucleotide
  Sense strand starting at position 1105 of SEQ ID NO: 916506
ugccauaaacgugaggagu

SEQ ID NO: 1161993 - RNA, 19 nt, Artificial Sequence
  Description of Artificial Sequence: Synthetic oligonucleotide
  Antisense strand to SEQ ID NO: 1161992
acuccucacguuuauggca

SEQ ID NO: 1161994 - RNA, 19 nt, Artificial Sequence
  Description of Artificial Sequence: Synthetic oligonucleotide
  Sense strand starting at position 1391 of SEQ ID NO: 916506
aaaggugaggccugaauga

SEQ ID NO: 1161995 - RNA, 19 nt, Artificial Sequence
  Description of Artificial Sequence: Synthetic oligonucleotide
  Antisense strand to SEQ ID NO: 1161994
ucauucaggccucaccuuu

SEQ ID NO: 1161996 - RNA, 19 nt, Artificial Sequence
  Description of Artificial Sequence: Synthetic oligonucleotide
  Sense strand starting at position 1429 of SEQ ID NO: 916506
gggugaagcacugagucua

SEQ ID NO: 1161997 - RNA, 19 nt, Artificial Sequence
  Description of Artificial Sequence: Synthetic oligonucleotide
  Antisense strand to SEQ ID NO: 1161996
uagacucagugcuucaccc

SEQ ID NO: 1161998 - RNA, 19 nt, Artificial Sequence
  Description of Artificial Sequence: Synthetic oligonucleotide
  Sense strand starting at position 2165 of SEQ ID NO: 916506
cccggaaucaaguaggcua

SEQ ID NO: 1161999 - RNA, 19 nt, Artificial Sequence
  Description of Artificial Sequence: Synthetic oligonucleotide
  Antisense strand to SEQ ID NO: 1161998
uagccuacuugauuccggg

SEQ ID NO: 1162000 - RNA, 19 nt, Artificial Sequence
  Description of Artificial Sequence: Synthetic oligonucleotide
  Sense strand starting at position 2189 of SEQ ID NO: 916506
gguuuaaggcgucaagauu

SEQ ID NO: 1162001 - RNA, 19 nt, Artificial Sequence
  Description of Artificial Sequence: Synthetic oligonucleotide
  Antisense strand to SEQ ID NO: 1162000
aaucuugacgccuuaaacc

SEQ ID NO: 1162002 - RNA, 19 nt, Artificial Sequence
  Description of Artificial Sequence: Synthetic oligonucleotide
  Sense strand starting at position 2283 of SEQ ID NO: 916506
guuaaauuguauuucggug

SEQ ID NO: 1162003 - RNA, 19 nt, Artificial Sequence
  Description of Artificial Sequence: Synthetic oligonucleotide
  Antisense strand to SEQ ID NO: 1162002
caccgaaauacaauuuaac

SEQ ID NO: 1162004 - RNA, 19 nt, Artificial Sequence
  Description of Artificial Sequence: Synthetic oligonucleotide
  Sense strand starting at position 2287 of SEQ ID NO: 916506
aauuguauuucgguguaaa

SEQ ID NO: 1162005 - RNA, 19 nt, Artificial Sequence
  Description of Artificial Sequence: Synthetic oligonucleotide
  Antisense strand to SEQ ID NO: 1162004
uuuacaccgaaauacaauu

SEQ ID NO: 1162006 - RNA, 19 nt, Artificial Sequence
  Description of Artificial Sequence: Synthetic oligonucleotide
  Sense strand starting at position 2288 of SEQ ID NO: 916506
auuguauuucgguguaaau

SEQ ID NO: 1162007 - RNA, 19 nt, Artificial Sequence
  Description of Artificial Sequence: Synthetic oligonucleotide
  Antisense strand to SEQ ID NO: 1162006
auuuacaccgaaauacaau

SEQ ID NO: 1162008 - RNA, 19 nt, Artificial Sequence
  Description of Artificial Sequence: Synthetic oligonucleotide
  Sense strand starting at position 2297 of SEQ ID NO: 916506
cgguguaaauaauuuguuu

SEQ ID NO: 1162009 - RNA, 19 nt, Artificial Sequence
  Description of Artificial Sequence: Synthetic oligonucleotide
  Antisense strand to SEQ ID NO: 1162008
aaacaaauuauuuacaccg

SEQ ID NO: 1162010 - RNA, 19 nt, Artificial Sequence
  Description of Artificial Sequence: Synthetic oligonucleotide
  Sense strand starting at position 2309 of SEQ ID NO: 916506
uuuguuucccuguagauua

SEQ ID NO: 1162011 - RNA, 19 nt, Artificial Sequence
  Description of Artificial Sequence: Synthetic oligonucleotide
  Antisense strand to SEQ ID NO: 1162010
uaaucuacagggaaacaaa

SEQ ID NO: 1162012 - RNA, 19 nt, Artificial Sequence
  Description of Artificial Sequence: Synthetic oligonucleotide
  Sense strand starting at position 2311 of SEQ ID NO: 916506
uguuucccuguagauuaau

SEQ ID NO: 1162013 - RNA, 19 nt, Artificial Sequence
  Description of Artificial Sequence: Synthetic oligonucleotide
  Antisense strand to SEQ ID NO: 1162012
auuaaucuacagggaaaca

SEQ ID NO: 1162014 - RNA, 19 nt, Artificial Sequence
  Description of Artificial Sequence: Synthetic oligonucleotide
  Sense strand starting at position 2355 of SEQ ID NO: 916506
uucgaaucucuggacuagu

SEQ ID NO: 1162015 - RNA, 19 nt, Artificial Sequence
  Description of Artificial Sequence: Synthetic oligonucleotide
  Antisense strand to SEQ ID NO: 1162014
acuaguccagagauucgaa

SEQ ID NO: 1162016 - RNA, 19 nt, Artificial Sequence
  Description of Artificial Sequence: Synthetic oligonucleotide
  Sense strand starting at position 2764 of SEQ ID NO: 916506
aguuucgaggcucaaauaa

SEQ ID NO: 1162017 - RNA, 19 nt, Artificial Sequence
  Description of Artificial Sequence: Synthetic oligonucleotide
  Antisense strand to SEQ ID NO: 1162016
uuauuugagccucgaaacu

SEQ ID NO: 1162018 - RNA, 19 nt, Artificial Sequence
  Description of Artificial Sequence: Synthetic oligonucleotide
  Sense strand starting at position 2989 of SEQ ID NO: 916506
gacagcugagcuuaugaca

SEQ ID NO: 1162019 - RNA, 19 nt, Artificial Sequence
  Description of Artificial Sequence: Synthetic oligonucleotide
  Antisense strand to SEQ ID NO: 1162018
ugucauaagcucagcuguc

SEQ ID NO: 1162020 - RNA, 19 nt, Artificial Sequence
  Description of Artificial Sequence: Synthetic oligonucleotide
  Sense strand starting at position 3016 of SEQ ID NO: 916506
gacagugagccaugagauu

SEQ ID NO: 1162021 - RNA, 19 nt, Artificial Sequence
  Description of Artificial Sequence: Synthetic oligonucleotide
  Antisense strand to SEQ ID NO: 1162020
aaucucauggcucacuguc

SEQ ID NO: 1162022 - RNA, 19 nt, Artificial Sequence
  Description of Artificial Sequence: Synthetic oligonucleotide
  Sense strand starting at position 3027 of SEQ ID NO: 916506
augagauugucaguggaua

SEQ ID NO: 1162023 - RNA, 19 nt, Artificial Sequence
  Description of Artificial Sequence: Synthetic oligonucleotide
  Antisense strand to SEQ ID NO: 1162022
uauccacugacaaucucau

SEQ ID NO: 1162024 - RNA, 19 nt, Artificial Sequence
  Description of Artificial Sequence: Synthetic oligonucleotide
  Sense strand starting at position 3028 of SEQ ID NO: 916506
ugagauugucaguggauag

SEQ ID NO: 1162025 - RNA, 19 nt, Artificial Sequence
  Description of Artificial Sequence: Synthetic oligonucleotide
  Antisense strand to SEQ ID NO: 1162024
cuauccacugacaaucuca

SEQ ID NO: 1162026 - RNA, 19 nt, Artificial Sequence
  Description of Artificial Sequence: Synthetic oligonucleotide
  Sense strand starting at position 3181 of SEQ ID NO: 916506
uugaucauuugugccuauu

SEQ ID NO: 1162027 - RNA, 19 nt, Artificial Sequence
  Description of Artificial Sequence: Synthetic oligonucleotide
  Antisense strand to SEQ ID NO: 1162026
aauaggcacaaaugaucaa

SEQ ID NO: 1162028 - RNA, 19 nt, Artificial Sequence
  Description of Artificial Sequence: Synthetic oligonucleotide
  Sense strand starting at position 3219 of SEQ ID NO: 916506
ugacaccuccuaugguaua

SEQ ID NO: 1162029 - RNA, 19 nt, Artificial Sequence
  Description of Artificial Sequence: Synthetic oligonucleotide
  Antisense strand to SEQ ID NO: 1162028
uauaccauaggagguguca

SEQ ID NO: 1162030 - RNA, 19 nt, Artificial Sequence
  Description of Artificial Sequence: Synthetic oligonucleotide
  Sense strand starting at position 3231 of SEQ ID NO: 916506
ugguauaagcuuuauguau

SEQ ID NO: 1162031 - RNA, 19 nt, Artificial Sequence
  Description of Artificial Sequence: Synthetic oligonucleotide
  Antisense strand to SEQ ID NO: 1162030
auacauaaagcuuauacca

SEQ ID NO: 1162032 - RNA, 19 nt, Artificial Sequence
  Description of Artificial Sequence: Synthetic oligonucleotide
  Sense strand starting at position 3292 of SEQ ID NO: 916506
ggcagacauuauucuugag

SEQ ID NO: 1162033 - RNA, 19 nt, Artificial Sequence
  Description of Artificial Sequence: Synthetic oligonucleotide
  Antisense strand to SEQ ID NO: 1162032
cucaagaauaaugucugcc

SEQ ID NO: 1162034 - RNA, 19 nt, Artificial Sequence
  Description of Artificial Sequence: Synthetic oligonucleotide
  Sense strand starting at position 3294 of SEQ ID NO: 916506
cagacauuauucuugaggu

SEQ ID NO: 1162035 - RNA, 19 nt, Artificial Sequence
  Description of Artificial Sequence: Synthetic oligonucleotide
  Antisense strand to SEQ ID NO: 1162034
accucaagaauaaugucug

SEQ ID NO: 1162036 - RNA, 19 nt, Artificial Sequence
  Description of Artificial Sequence: Synthetic oligonucleotide
  Sense strand starting at position 3296 of SEQ ID NO: 916506
gacauuauucuugaggucu

SEQ ID NO: 1162037 - RNA, 19 nt, Artificial Sequence
  Description of Artificial Sequence: Synthetic oligonucleotide
  Antisense strand to SEQ ID NO: 1162036
agaccucaagaauaauguc

SEQ ID NO: 1162038 - RNA, 19 nt, Artificial Sequence
  Description of Artificial Sequence: Synthetic oligonucleotide
  Sense strand starting at position 3804 of SEQ ID NO: 916506
uaguaauugggcuagugau

SEQ ID NO: 1162039 - RNA, 19 nt, Artificial Sequence
  Description of Artificial Sequence: Synthetic oligonucleotide
  Antisense strand to SEQ ID NO: 1162038
aucacuagcccaauuacua

SEQ ID NO: 1162040 - RNA, 19 nt, Artificial Sequence
  Description of Artificial Sequence: Synthetic oligonucleotide
  Sense strand starting at position 3812 of SEQ ID NO: 916506
gggcuagugauauaggauc

SEQ ID NO: 1162041 - RNA, 19 nt, Artificial Sequence
  Description of Artificial Sequence: Synthetic oligonucleotide
  Antisense strand to SEQ ID NO: 1162040
gauccuauaucacuagccc

SEQ ID NO: 1162042 - RNA, 19 nt, Artificial Sequence
  Description of Artificial Sequence: Synthetic oligonucleotide
  Sense strand starting at position 3814 of SEQ ID NO: 916506
gcuagugauauaggaucaa

SEQ ID NO: 1162043 - RNA, 19 nt, Artificial Sequence
  Description of Artificial Sequence: Synthetic oligonucleotide
  Antisense strand to SEQ ID NO: 1162042
uugauccuauaucacuagc

SEQ ID NO: 1162044 - RNA, 19 nt, Artificial Sequence
  Description of Artificial Sequence: Synthetic oligonucleotide
  Sense strand starting at position 3826 of SEQ ID NO: 916506
ggaucaaauucucugacuu

SEQ ID NO: 1162045 - RNA, 19 nt, Artificial Sequence
  Description of Artificial Sequence: Synthetic oligonucleotide
  Antisense strand to SEQ ID NO: 1162044
aagucagagaauuugaucc

SEQ ID NO: 1162046 - RNA, 19 nt, Artificial Sequence
  Description of Artificial Sequence: Synthetic oligonucleotide
  Sense strand starting at position 3886 of SEQ ID NO: 916506
guaacuuuggcaugauuaa

SEQ ID NO: 1162047 - RNA, 19 nt, Artificial Sequence
  Description of Artificial Sequence: Synthetic oligonucleotide
  Antisense strand to SEQ ID NO: 1162046
uuaaucaugccaaaguuac

SEQ ID NO: 1162048 - RNA, 19 nt, Artificial Sequence
  Description of Artificial Sequence: Synthetic oligonucleotide
  Sense strand starting at position 14 of SEQ ID NO: 916507
cuaugcuaguuccugcaaa

SEQ ID NO: 1162049 - RNA, 19 nt, Artificial Sequence
  Description of Artificial Sequence: Synthetic oligonucleotide
  Antisense strand to SEQ ID NO: 1162048
uuugcaggaacuagcauag

SEQ ID NO: 1162050 - RNA, 19 nt, Artificial Sequence
  Description of Artificial Sequence: Synthetic oligonucleotide
  Sense strand starting at position 618 of SEQ ID NO: 916507
uggcuaaacgccuguaauc

SEQ ID NO: 1162051 - RNA, 19 nt, Artificial Sequence
  Description of Artificial Sequence: Synthetic oligonucleotide
  Antisense strand to SEQ ID NO: 1162050
gauuacaggcguuuagcca

SEQ ID NO: 1162052 - RNA, 19 nt, Artificial Sequence
  Description of Artificial Sequence: Synthetic oligonucleotide
  Sense strand starting at position 1078 of SEQ ID NO: 916507
gaguacagagucuggaauu

SEQ ID NO: 1162053 - RNA, 19 nt, Artificial Sequence
  Description of Artificial Sequence: Synthetic oligonucleotide
  Antisense strand to SEQ ID NO: 1162052
aauuccagacucuguacuc

SEQ ID NO: 1162054 - RNA, 19 nt, Artificial Sequence
  Description of Artificial Sequence: Synthetic oligonucleotide
  Sense strand starting at position 1170 of SEQ ID NO: 916507
ggauuuaguuuguaucaac

SEQ ID NO: 1162055 - RNA, 19 nt, Artificial Sequence
  Description of Artificial Sequence: Synthetic oligonucleotide
  Antisense strand to SEQ ID NO: 1162054
guugauacaaacuaaaucc

SEQ ID NO: 1162056 - RNA, 19 nt, Artificial Sequence
  Description of Artificial Sequence: Synthetic oligonucleotide
  Sense strand starting at position 1233 of SEQ ID NO: 916507
cuccuugugggauggagua

SEQ ID NO: 1162057 - RNA, 19 nt, Artificial Sequence
  Description of Artificial Sequence: Synthetic oligonucleotide
  Antisense strand to SEQ ID NO: 1162056
uacuccaucccacaaggag

SEQ ID NO: 1162058 - RNA, 19 nt, Artificial Sequence
  Description of Artificial Sequence: Synthetic oligonucleotide
  Sense strand starting at position 1374 of SEQ ID NO: 916507
gugcuuaacccaggucuca

SEQ ID NO: 1162059 - RNA, 19 nt, Artificial Sequence
  Description of Artificial Sequence: Synthetic oligonucleotide
  Antisense strand to SEQ ID NO: 1162058
ugagaccuggguuaagcac

SEQ ID NO: 1162060 - RNA, 19 nt, Artificial Sequence
  Description of Artificial Sequence: Synthetic oligonucleotide
  Sense strand starting at position 1491 of SEQ ID NO: 916507
ugaagucagggcugaguuu

SEQ ID NO: 1162061 - RNA, 19 nt, Artificial Sequence
  Description of Artificial Sequence: Synthetic oligonucleotide
  Antisense strand to SEQ ID NO: 1162060
aaacucagcccugacuuca

SEQ ID NO: 1162062 - RNA, 19 nt, Artificial Sequence
  Description of Artificial Sequence: Synthetic oligonucleotide
  Sense strand starting at position 1498 of SEQ ID NO: 916507
agggcugaguuuguucaga

SEQ ID NO: 1162063 - RNA, 19 nt, Artificial Sequence
  Description of Artificial Sequence: Synthetic oligonucleotide
  Antisense strand to SEQ ID NO: 1162062
ucugaacaaacucagcccu

SEQ ID NO: 1162064 - RNA, 19 nt, Artificial Sequence
  Description of Artificial Sequence: Synthetic oligonucleotide
  Sense strand starting at position 1500 of SEQ ID NO: 916507
ggcugaguuuguucagaag

SEQ ID NO: 1162065 - RNA, 19 nt, Artificial Sequence
  Description of Artificial Sequence: Synthetic oligonucleotide
  Antisense strand to SEQ ID NO: 1162064
cuucugaacaaacucagcc

SEQ ID NO: 1162066 - RNA, 19 nt, Artificial Sequence
  Description of Artificial Sequence: Synthetic oligonucleotide
  Sense strand starting at position 1898 of SEQ ID NO: 916507
cguguaaugccgggauccu

SEQ ID NO: 1162067 - RNA, 19 nt, Artificial Sequence
  Description of Artificial Sequence: Synthetic oligonucleotide
  Antisense strand to SEQ ID NO: 1162066
aggaucccggcauuacacg

SEQ ID NO: 1162068 - RNA, 19 nt, Artificial Sequence
  Description of Artificial Sequence: Synthetic oligonucleotide
  Sense strand starting at position 1928 of SEQ ID NO: 916507
gggagagucauguguguuc

SEQ ID NO: 1162069 - RNA, 19 nt, Artificial Sequence
  Description of Artificial Sequence: Synthetic oligonucleotide
  Antisense strand to SEQ ID NO: 1162068
gaacacacaugacucuccc

SEQ ID NO: 1162070 - RNA, 19 nt, Artificial Sequence
  Description of Artificial Sequence: Synthetic oligonucleotide
  Sense strand starting at position 1930 of SEQ ID NO: 916507
gagagucauguguguucug

SEQ ID NO: 1162071 - RNA, 19 nt, Artificial Sequence
  Description of Artificial Sequence: Synthetic oligonucleotide
  Antisense strand to SEQ ID NO: 1162070
cagaacacacaugacucuc

SEQ ID NO: 1162072 - RNA, 19 nt, Artificial Sequence
  Description of Artificial Sequence: Synthetic oligonucleotide
  Sense strand starting at position 1933 of SEQ ID NO: 916507
agucauguguguucugagu

SEQ ID NO: 1162073 - RNA, 19 nt, Artificial Sequence
  Description of Artificial Sequence: Synthetic oligonucleotide
  Antisense strand to SEQ ID NO: 1162072
acucagaacacacaugacu

SEQ ID NO: 1162074 - RNA, 19 nt, Artificial Sequence
  Description of Artificial Sequence: Synthetic oligonucleotide
  Sense strand starting at position 1984 of SEQ ID NO: 916507
uccuuuagugcuggacuga

SEQ ID NO: 1162075 - RNA, 19 nt, Artificial Sequence
  Description of Artificial Sequence: Synthetic oligonucleotide
  Antisense strand to SEQ ID NO: 1162074
ucaguccagcacuaaagga

SEQ ID NO: 1162076 - RNA, 19 nt, Artificial Sequence
  Description of Artificial Sequence: Synthetic oligonucleotide
  Sense strand starting at position 2059 of SEQ ID NO: 916507
gcacaauuacuugggaauc

SEQ ID NO: 1162077 - RNA, 19 nt, Artificial Sequence
  Description of Artificial Sequence: Synthetic oligonucleotide
  Antisense strand to SEQ ID NO: 1162076
gauucccaaguaauugugc

SEQ ID NO: 1162078 - RNA, 19 nt, Artificial Sequence
  Description of Artificial Sequence: Synthetic oligonucleotide
  Sense strand starting at position 2061 of SEQ ID NO: 916507
acaauuacuugggaaucua

SEQ ID NO: 1162079 - RNA, 19 nt, Artificial Sequence
  Description of Artificial Sequence: Synthetic oligonucleotide
  Antisense strand to SEQ ID NO: 1162078
uagauucccaaguaauugu

SEQ ID NO: 1162080 - RNA, 19 nt, Artificial Sequence
  Description of Artificial Sequence: Synthetic oligonucleotide
  Sense strand starting at position 2098 of SEQ ID NO: 916507
gaggguuugugauggcauc

SEQ ID NO: 1162081 - RNA, 19 nt, Artificial Sequence
  Description of Artificial Sequence: Synthetic oligonucleotide
  Antisense strand to SEQ ID NO: 1162080
gaugccaucacaaacccuc

SEQ ID NO: 1162082 - RNA, 19 nt, Artificial Sequence
  Description of Artificial Sequence: Synthetic oligonucleotide
  Sense strand starting at position 2099 of SEQ ID NO: 916507
aggguuugugauggcauca

SEQ ID NO: 1162083 - RNA, 19 nt, Artificial Sequence
  Description of Artificial Sequence: Synthetic oligonucleotide
  Antisense strand to SEQ ID NO: 1162082
ugaugccaucacaaacccu

SEQ ID NO: 1162084 - RNA, 19 nt, Artificial Sequence
  Description of Artificial Sequence: Synthetic oligonucleotide
  Sense strand starting at position 2145 of SEQ ID NO: 916507
ggcggucauauauacauau

SEQ ID NO: 1162085 - RNA, 19 nt, Artificial Sequence
  Description of Artificial Sequence: Synthetic oligonucleotide
  Antisense strand to SEQ ID NO: 1162084
auauguauauaugaccgcc

SEQ ID NO: 1162086 - RNA, 19 nt, Artificial Sequence
  Description of Artificial Sequence: Synthetic oligonucleotide
  Sense strand starting at position 2428 of SEQ ID NO: 916507
gcagguuggucucaauuuc

SEQ ID NO: 1162087 - RNA, 19 nt, Artificial Sequence
  Description of Artificial Sequence: Synthetic oligonucleotide
  Antisense strand to SEQ ID NO: 1162086
gaaauugagaccaaccugc

SEQ ID NO: 1162088 - RNA, 19 nt, Artificial Sequence
  Description of Artificial Sequence: Synthetic oligonucleotide
  Sense strand starting at position 2649 of SEQ ID NO: 916507
uccuaaauucuaugccguu

SEQ ID NO: 1162089 - RNA, 19 nt, Artificial Sequence
  Description of Artificial Sequence: Synthetic oligonucleotide
  Antisense strand to SEQ ID NO: 1162088
aacggcauagaauuuagga

SEQ ID NO: 1162090 - RNA, 19 nt, Artificial Sequence
  Description of Artificial Sequence: Synthetic oligonucleotide
  Sense strand starting at position 2655 of SEQ ID NO: 916507
auucuaugccguugggauu

SEQ ID NO: 1162091 - RNA, 19 nt, Artificial Sequence
  Description of Artificial Sequence: Synthetic oligonucleotide
  Antisense strand to SEQ ID NO: 1162090
aaucccaacggcauagaau

SEQ ID NO: 1162092 - RNA, 19 nt, Artificial Sequence
  Description of Artificial Sequence: Synthetic oligonucleotide
  Sense strand starting at position 3776 of SEQ ID NO: 916507
uggagacuuuacguaucau

SEQ ID NO: 1162093 - RNA, 19 nt, Artificial Sequence
  Description of Artificial Sequence: Synthetic oligonucleotide
  Antisense strand to SEQ ID NO: 1162092
augauacguaaagucucca

SEQ ID NO: 1162094 - RNA, 19 nt, Artificial Sequence
  Description of Artificial Sequence: Synthetic oligonucleotide
  Sense strand starting at position 3777 of SEQ ID NO: 916507
ggagacuuuacguaucauu

SEQ ID NO: 1162095 - RNA, 19 nt, Artificial Sequence
  Description of Artificial Sequence: Synthetic oligonucleotide
  Antisense strand to SEQ ID NO: 1162094
aaugauacguaaagucucc

SEQ ID NO: 1162096 - RNA, 19 nt, Artificial Sequence
  Description of Artificial Sequence: Synthetic oligonucleotide
  Sense strand starting at position 3874 of SEQ ID NO: 916507
aagucuuagcuagaugcua

SEQ ID NO: 1162097 - RNA, 19 nt, Artificial Sequence
  Description of Artificial Sequence: Synthetic oligonucleotide
  Antisense strand to SEQ ID NO: 1162096
uagcaucuagcuaagacuu

SEQ ID NO: 1162098 - RNA, 19 nt, Artificial Sequence
  Description of Artificial Sequence: Synthetic oligonucleotide
  Sense strand starting at position 3876 of SEQ ID NO: 916507
gucuuagcuagaugcuaug

SEQ ID NO: 1162099 - RNA, 19 nt, Artificial Sequence
  Description of Artificial Sequence: Synthetic oligonucleotide
  Antisense strand to SEQ ID NO: 1162098
cauagcaucuagcuaagac

SEQ ID NO: 1162100 - RNA, 19 nt, Artificial Sequence
  Description of Artificial Sequence: Synthetic oligonucleotide
  Sense strand starting at position 3886 of SEQ ID NO: 916507
gaugcuauggcuuagaguu

SEQ ID NO: 1162101 - RNA, 19 nt, Artificial Sequence
  Description of Artificial Sequence: Synthetic oligonucleotide
  Antisense strand to SEQ ID NO: 1162100
aacucuaagccauagcauc

SEQ ID NO: 1162102 - RNA, 19 nt, Artificial Sequence
  Description of Artificial Sequence: Synthetic oligonucleotide
  Sense strand starting at position 3888 of SEQ ID NO: 916507
ugcuauggcuuagaguuga

SEQ ID NO: 1162103 - RNA, 19 nt, Artificial Sequence
  Description of Artificial Sequence: Synthetic oligonucleotide
  Antisense strand to SEQ ID NO: 1162102
ucaacucuaagccauagca

SEQ ID NO: 1162104 - RNA, 19 nt, Artificial Sequence
  Description of Artificial Sequence: Synthetic oligonucleotide
  Sense strand starting at position 3892 of SEQ ID NO: 916507
auggcuuagaguugacuga

SEQ ID NO: 1162105 - RNA, 19 nt, Artificial Sequence
  Description of Artificial Sequence: Synthetic oligonucleotide
  Antisense strand to SEQ ID NO: 1162104
ucagucaacucuaagccau

SEQ ID NO: 1162106 - RNA, 19 nt, Artificial Sequence
  Description of Artificial Sequence: Synthetic oligonucleotide
  Sense strand starting at position 3899 of SEQ ID NO: 916507
agaguugacugagcuccaa

SEQ ID NO: 1162107 - RNA, 19 nt, Artificial Sequence
  Description of Artificial Sequence: Synthetic oligonucleotide
  Antisense strand to SEQ ID NO: 1162106
uuggagcucagucaacucu

SEQ ID NO: 1162108 - RNA, 19 nt, Artificial Sequence
  Description of Artificial Sequence: Synthetic oligonucleotide
  Sense strand starting at position 3911 of SEQ ID NO: 916507
gcuccaaggucucuguuaa

SEQ ID NO: 1162109 - RNA, 19 nt, Artificial Sequence
  Description of Artificial Sequence: Synthetic oligonucleotide
  Antisense strand to SEQ ID NO: 1162108
uuaacagagaccuuggagc

SEQ ID NO: 1162110 - RNA, 19 nt, Artificial Sequence
  Description of Artificial Sequence: Synthetic oligonucleotide
  Sense strand starting at position 3912 of SEQ ID NO: 916507
cuccaaggucucuguuaaa

SEQ ID NO: 1162111 - RNA, 19 nt, Artificial Sequence
  Description of Artificial Sequence: Synthetic oligonucleotide
  Antisense strand to SEQ ID NO: 1162110
uuuaacagagaccuuggag

SEQ ID NO: 1162112 - RNA, 19 nt, Artificial Sequence
  Description of Artificial Sequence: Synthetic oligonucleotide
  Sense strand starting at position 2 of SEQ ID NO: 916508
gggauuauagcgcaaacca

SEQ ID NO: 1162113 - RNA, 19 nt, Artificial Sequence
  Description of Artificial Sequence: Synthetic oligonucleotide
  Antisense strand to SEQ ID NO: 1162112
ugguuugcgcuauaauccc

SEQ ID NO: 1162114 - RNA, 19 nt, Artificial Sequence
  Description of Artificial Sequence: Synthetic oligonucleotide
  Sense strand starting at position 27 of SEQ ID NO: 916508
caggcuuuacaaugaaagu

SEQ ID NO: 1162115 - RNA, 19 nt, Artificial Sequence
  Description of Artificial Sequence: Synthetic oligonucleotide
  Antisense strand to SEQ ID NO: 1162114
acuuucauuguaaagccug

SEQ ID NO: 1162116 - RNA, 19 nt, Artificial Sequence
  Description of Artificial Sequence: Synthetic oligonucleotide
  Sense strand starting at position 119 of SEQ ID NO: 916508
aguauauauguuuguugac

SEQ ID NO: 1162117 - RNA, 19 nt, Artificial Sequence
  Description of Artificial Sequence: Synthetic oligonucleotide
  Antisense strand to SEQ ID NO: 1162116
gucaacaaacauauauacu

SEQ ID NO: 1162118 - RNA, 19 nt, Artificial Sequence
  Description of Artificial Sequence: Synthetic oligonucleotide
  Sense strand starting at position 120 of SEQ ID NO: 916508
guauauauguuuguugacu

SEQ ID NO: 1162119 - RNA, 19 nt, Artificial Sequence
  Description of Artificial Sequence: Synthetic oligonucleotide
  Antisense strand to SEQ ID NO: 1162118
agucaacaaacauauauac

SEQ ID NO: 1162120 - RNA, 19 nt, Artificial Sequence
  Description of Artificial Sequence: Synthetic oligonucleotide
  Sense strand starting at position 271 of SEQ ID NO: 916508
cugugcagcuauucuuaga

SEQ ID NO: 1162121 - RNA, 19 nt, Artificial Sequence
  Description of Artificial Sequence: Synthetic oligonucleotide
  Antisense strand to SEQ ID NO: 1162120
ucuaagaauagcugcacag

SEQ ID NO: 1162122 - RNA, 19 nt, Artificial Sequence
  Description of Artificial Sequence: Synthetic oligonucleotide
  Sense strand starting at position 522 of SEQ ID NO: 916508
ggauauauaccauggcaaa

SEQ ID NO: 1162123 - RNA, 19 nt, Artificial Sequence
  Description of Artificial Sequence: Synthetic oligonucleotide
  Antisense strand to SEQ ID NO: 1162122
uuugccaugguauauaucc

SEQ ID NO: 1162124 - RNA, 19 nt, Artificial Sequence
  Description of Artificial Sequence: Synthetic oligonucleotide
  Sense strand starting at position 534 of SEQ ID NO: 916508
uggcaaauuggcuguaaca

SEQ ID NO: 1162125 - RNA, 19 nt, Artificial Sequence
  Description of Artificial Sequence: Synthetic oligonucleotide
  Antisense strand to SEQ ID NO: 1162124
uguuacagccaauuugcca

SEQ ID NO: 1162126 - RNA, 19 nt, Artificial Sequence
  Description of Artificial Sequence: Synthetic oligonucleotide
  Sense strand starting at position 541 of SEQ ID NO: 916508
uuggcuguaacaggucaaa

SEQ ID NO: 1162127 - RNA, 19 nt, Artificial Sequence
  Description of Artificial Sequence: Synthetic oligonucleotide
  Antisense strand to SEQ ID NO: 1162126
uuugaccuguuacagccaa

SEQ ID NO: 1162128 - RNA, 19 nt, Artificial Sequence
  Description of Artificial Sequence: Synthetic oligonucleotide
  Sense strand starting at position 544 of SEQ ID NO: 916508
gcuguaacaggucaaacaa

SEQ ID NO: 1162129 - RNA, 19 nt, Artificial Sequence
  Description of Artificial Sequence: Synthetic oligonucleotide
  Antisense strand to SEQ ID NO: 1162128
uuguuugaccuguuacagc

SEQ ID NO: 1162130 - RNA, 19 nt, Artificial Sequence
  Description of Artificial Sequence: Synthetic oligonucleotide
  Sense strand starting at position 690 of SEQ ID NO: 916508
cuaguauuccgcuucugcu

SEQ ID NO: 1162131 - RNA, 19 nt, Artificial Sequence
  Description of Artificial Sequence: Synthetic oligonucleotide
  Antisense strand to SEQ ID NO: 1162130
agcagaagcggaauacuag

SEQ ID NO: 1162132 - RNA, 19 nt, Artificial Sequence
  Description of Artificial Sequence: Synthetic oligonucleotide
  Sense strand starting at position 691 of SEQ ID NO: 916508
uaguauuccgcuucugcua

SEQ ID NO: 1162133 - RNA, 19 nt, Artificial Sequence
  Description of Artificial Sequence: Synthetic oligonucleotide
  Antisense strand to SEQ ID NO: 1162132
uagcagaagcggaauacua

SEQ ID NO: 1162134 - RNA, 19 nt, Artificial Sequence
  Description of Artificial Sequence: Synthetic oligonucleotide
  Sense strand starting at position 945 of SEQ ID NO: 916508
acaagcucuccagggagau

SEQ ID NO: 1162135 - RNA, 19 nt, Artificial Sequence
  Description of Artificial Sequence: Synthetic oligonucleotide
  Antisense strand to SEQ ID NO: 1162134
aucucccuggagagcuugu

SEQ ID NO: 1162136 - RNA, 19 nt, Artificial Sequence
  Description of Artificial Sequence: Synthetic oligonucleotide
  Sense strand starting at position 1164 of SEQ ID NO: 916508
gaaugaauauaagagcaga

SEQ ID NO: 1162137 - RNA, 19 nt, Artificial Sequence
  Description of Artificial Sequence: Synthetic oligonucleotide
  Antisense strand to SEQ ID NO: 1162136
ucugcucuuauauucauuc

SEQ ID NO: 1162138 - RNA, 19 nt, Artificial Sequence
  Description of Artificial Sequence: Synthetic oligonucleotide
  Sense strand starting at position 1263 of SEQ ID NO: 916508
aacgauugaugguuaugaa

SEQ ID NO: 1162139 - RNA, 19 nt, Artificial Sequence
  Description of Artificial Sequence: Synthetic oligonucleotide
  Antisense strand to SEQ ID NO: 1162138
uucauaaccaucaaucguu

SEQ ID NO: 1162140 - RNA, 19 nt, Artificial Sequence
  Description of Artificial Sequence: Synthetic oligonucleotide
  Sense strand starting at position 1267 of SEQ ID NO: 916508
auugaugguuaugaaacau

SEQ ID NO: 1162141 - RNA, 19 nt, Artificial Sequence
  Description of Artificial Sequence: Synthetic oligonucleotide
  Antisense strand to SEQ ID NO: 1162140
auguuucauaaccaucaau

SEQ ID NO: 1162142 - RNA, 19 nt, Artificial Sequence
  Description of Artificial Sequence: Synthetic oligonucleotide
  Sense strand starting at position 1273 of SEQ ID NO: 916508
gguuaugaaacaugaaagu

SEQ ID NO: 1162143 - RNA, 19 nt, Artificial Sequence
  Description of Artificial Sequence: Synthetic oligonucleotide
  Antisense strand to SEQ ID NO: 1162142
acuuucauguuucauaacc

SEQ ID NO: 1162144 - RNA, 19 nt, Artificial Sequence
  Description of Artificial Sequence: Synthetic oligonucleotide
  Sense strand starting at position 1364 of SEQ ID NO: 916508
ccgacauucugagcucaca

SEQ ID NO: 1162145 - RNA, 19 nt, Artificial Sequence
  Description of Artificial Sequence: Synthetic oligonucleotide
  Antisense strand to SEQ ID NO: 1162144
ugugagcucagaaugucgg

SEQ ID NO: 1162146 - RNA, 19 nt, Artificial Sequence
  Description of Artificial Sequence: Synthetic oligonucleotide
  Sense strand starting at position 1404 of SEQ ID NO: 916508
gcggcuaucgggucaaagu

SEQ ID NO: 1162147 - RNA, 19 nt, Artificial Sequence
  Description of Artificial Sequence: Synthetic oligonucleotide
  Antisense strand to SEQ ID NO: 1162146
acuuugacccgauagccgc

SEQ ID NO: 1162148 - RNA, 19 nt, Artificial Sequence
  Description of Artificial Sequence: Synthetic oligonucleotide
  Sense strand starting at position 1442 of SEQ ID NO: 916508
uaugcagucgccuaagcua

SEQ ID NO: 1162149 - RNA, 19 nt, Artificial Sequence
  Description of Artificial Sequence: Synthetic oligonucleotide
  Antisense strand to SEQ ID NO: 1162148
uagcuuaggcgacugcaua

SEQ ID NO: 1162150 - RNA, 19 nt, Artificial Sequence
  Description of Artificial Sequence: Synthetic oligonucleotide
  Sense strand starting at position 1592 of SEQ ID NO: 916508
ggaagagcgaucugcgauu

SEQ ID NO: 1162151 - RNA, 19 nt, Artificial Sequence
  Description of Artificial Sequence: Synthetic oligonucleotide
  Antisense strand to SEQ ID NO: 1162150
aaucgcagaucgcucuucc

SEQ ID NO: 1162152 - RNA, 19 nt, Artificial Sequence
  Description of Artificial Sequence: Synthetic oligonucleotide
  Sense strand starting at position 1762 of SEQ ID NO: 916508
cuaagacagugucuccuaa

SEQ ID NO: 1162153 - RNA, 19 nt, Artificial Sequence
  Description of Artificial Sequence: Synthetic oligonucleotide
  Antisense strand to SEQ ID NO: 1162152
uuaggagacacugucuuag

SEQ ID NO: 1162154 - RNA, 19 nt, Artificial Sequence
  Description of Artificial Sequence: Synthetic oligonucleotide
  Sense strand starting at position 1764 of SEQ ID NO: 916508
aagacagugucuccuaagu

SEQ ID NO: 1162155 - RNA, 19 nt, Artificial Sequence
  Description of Artificial Sequence: Synthetic oligonucleotide
  Antisense strand to SEQ ID NO: 1162154
acuuaggagacacugucuu

SEQ ID NO: 1162156 - RNA, 19 nt, Artificial Sequence
  Description of Artificial Sequence: Synthetic oligonucleotide
  Sense strand starting at position 1857 of SEQ ID NO: 916508
cgaugucagggucaugcaa

SEQ ID NO: 1162157 - RNA, 19 nt, Artificial Sequence
  Description of Artificial Sequence: Synthetic oligonucleotide
  Antisense strand to SEQ ID NO: 1162156
uugcaugacccugacaucg

SEQ ID NO: 1162158 - RNA, 19 nt, Artificial Sequence
  Description of Artificial Sequence: Synthetic oligonucleotide
  Sense strand starting at position 2053 of SEQ ID NO: 916508
gcgggauugcugugaaacu

SEQ ID NO: 1162159 - RNA, 19 nt, Artificial Sequence
  Description of Artificial Sequence: Synthetic oligonucleotide
  Antisense strand to SEQ ID NO: 1162158
aguuucacagcaaucccgc

SEQ ID NO: 1162160 - RNA, 19 nt, Artificial Sequence
  Description of Artificial Sequence: Synthetic oligonucleotide
  Sense strand starting at position 3058 of SEQ ID NO: 916508
uggaucugcccuuggaaua

SEQ ID NO: 1162161 - RNA, 19 nt, Artificial Sequence
  Description of Artificial Sequence: Synthetic oligonucleotide
  Antisense strand to SEQ ID NO: 1162160
uauuccaagggcagaucca

SEQ ID NO: 1162162 - RNA, 19 nt, Artificial Sequence
  Description of Artificial Sequence: Synthetic oligonucleotide
  Sense strand starting at position 3059 of SEQ ID NO: 916508
ggaucugcccuuggaauaa

SEQ ID NO: 1162163 - RNA, 19 nt, Artificial Sequence
  Description of Artificial Sequence: Synthetic oligonucleotide
  Antisense strand to SEQ ID NO: 1162162
uuauuccaagggcagaucc

SEQ ID NO: 1162164 - RNA, 19 nt, Artificial Sequence
  Description of Artificial Sequence: Synthetic oligonucleotide
  Sense strand starting at position 3095 of SEQ ID NO: 916508
guuacaucucauuggagcu

SEQ ID NO: 1162165 - RNA, 19 nt, Artificial Sequence
  Description of Artificial Sequence: Synthetic oligonucleotide
  Antisense strand to SEQ ID NO: 1162164
agcuccaaugagauguaac

SEQ ID NO: 1162166 - RNA, 19 nt, Artificial Sequence
  Description of Artificial Sequence: Synthetic oligonucleotide
  Sense strand starting at position 3466 of SEQ ID NO: 916508
aaggguaaauuugauguua

SEQ ID NO: 1162167 - RNA, 19 nt, Artificial Sequence
  Description of Artificial Sequence: Synthetic oligonucleotide
  Antisense strand to SEQ ID NO: 1162166
uaacaucaaauuuacccuu

SEQ ID NO: 1162168 - RNA, 19 nt, Artificial Sequence
  Description of Artificial Sequence: Synthetic oligonucleotide
  Sense strand starting at position 3468 of SEQ ID NO: 916508
ggguaaauuugauguuauc

SEQ ID NO: 1162169 - RNA, 19 nt, Artificial Sequence
  Description of Artificial Sequence: Synthetic oligonucleotide
  Antisense strand to SEQ ID NO: 1162168
gauaacaucaaauuuaccc

SEQ ID NO: 1162170 - RNA, 19 nt, Artificial Sequence
  Description of Artificial Sequence: Synthetic oligonucleotide
  Sense strand starting at position 3538 of SEQ ID NO: 916508
auguuuaaaccaggacuua

SEQ ID NO: 1162171 - RNA, 19 nt, Artificial Sequence
  Description of Artificial Sequence: Synthetic oligonucleotide
  Antisense strand to SEQ ID NO: 1162170
uaaguccugguuuaaacau

SEQ ID NO: 1162172 - RNA, 19 nt, Artificial Sequence
  Description of Artificial Sequence: Synthetic oligonucleotide
  Sense strand starting at position 3619 of SEQ ID NO: 916508
gcaucacagugaucuccuu

SEQ ID NO: 1162173 - RNA, 19 nt, Artificial Sequence
  Description of Artificial Sequence: Synthetic oligonucleotide
  Antisense strand to SEQ ID NO: 1162172
aaggagaucacugugaugc

SEQ ID NO: 1162174 - RNA, 19 nt, Artificial Sequence
  Description of Artificial Sequence: Synthetic oligonucleotide
  Sense strand starting at position 3689 of SEQ ID NO: 916508
caguaaugucauggcuuau

SEQ ID NO: 1162175 - RNA, 19 nt, Artificial Sequence
  Description of Artificial Sequence: Synthetic oligonucleotide
  Antisense strand to SEQ ID NO: 1162174
auaagccaugacauuacug

SEQ ID NO: 1162176 - RNA, 19 nt, Artificial Sequence
  Description of Artificial Sequence: Synthetic oligonucleotide
  Sense strand starting at position 3693 of SEQ ID NO: 916508
aaugucauggcuuaucaag

SEQ ID NO: 1162177 - RNA, 19 nt, Artificial Sequence
  Description of Artificial Sequence: Synthetic oligonucleotide
  Antisense strand to SEQ ID NO: 1162176
cuugauaagccaugacauu

SEQ ID NO: 1162178 - RNA, 19 nt, Artificial Sequence
  Description of Artificial Sequence: Synthetic oligonucleotide
  Sense strand starting at position 3695 of SEQ ID NO: 916508
ugucauggcuuaucaagua

SEQ ID NO: 1162179 - RNA, 19 nt, Artificial Sequence
  Description of Artificial Sequence: Synthetic oligonucleotide
  Antisense strand to SEQ ID NO: 1162178
uacuugauaagccaugaca

SEQ ID NO: 1162180 - RNA, 19 nt, Artificial Sequence
  Description of Artificial Sequence: Synthetic oligonucleotide
  Sense strand starting at position 3790 of SEQ ID NO: 916508
aacaaaggccgaugaaaua

SEQ ID NO: 1162181 - RNA, 19 nt, Artificial Sequence
  Description of Artificial Sequence: Synthetic oligonucleotide
  Antisense strand to SEQ ID NO: 1162180
uauuucaucggccuuuguu

SEQ ID NO: 1162182 - RNA, 19 nt, Artificial Sequence
  Description of Artificial Sequence: Synthetic oligonucleotide
  Sense strand starting at position 3832 of SEQ ID NO: 916508
gucauaagacaacagugua

SEQ ID NO: 1162183 - RNA, 19 nt, Artificial Sequence
  Description of Artificial Sequence: Synthetic oligonucleotide
  Antisense strand to SEQ ID NO: 1162182
uacacuguugucuuaugac

SEQ ID NO: 1162184 - RNA, 19 nt, Artificial Sequence
  Description of Artificial Sequence: Synthetic oligonucleotide
  Sense strand starting at position 3845 of SEQ ID NO: 916508
aguguauguggugugucau

SEQ ID NO: 1162185 - RNA, 19 nt, Artificial Sequence
  Description of Artificial Sequence: Synthetic oligonucleotide
  Antisense strand to SEQ ID NO: 1162184
augacacaccacauacacu

SEQ ID NO: 1162186 - RNA, 19 nt, Artificial Sequence
  Description of Artificial Sequence: Synthetic oligonucleotide
  Sense strand starting at position 3876 of SEQ ID NO: 916508
cagccuuguaguugagaga

SEQ ID NO: 1162187 - RNA, 19 nt, Artificial Sequence
  Description of Artificial Sequence: Synthetic oligonucleotide
  Antisense strand to SEQ ID NO: 1162186
ucucucaacuacaaggcug

SEQ ID NO: 1162188 - RNA, 19 nt, Artificial Sequence
  Description of Artificial Sequence: Synthetic oligonucleotide
  Sense strand starting at position 3877 of SEQ ID NO: 916508
agccuuguaguugagagau

SEQ ID NO: 1162189 - RNA, 19 nt, Artificial Sequence
  Description of Artificial Sequence: Synthetic oligonucleotide
  Antisense strand to SEQ ID NO: 1162188
aucucucaacuacaaggcu

SEQ ID NO: 1162190 - RNA, 19 nt, Artificial Sequence
  Description of Artificial Sequence: Synthetic oligonucleotide
  Sense strand starting at position 3971 of SEQ ID NO: 916508
guaguaguaucuccauucu

SEQ ID NO: 1162191 - RNA, 19 nt, Artificial Sequence
  Description of Artificial Sequence: Synthetic oligonucleotide
  Antisense strand to SEQ ID NO: 1162190
agaauggagauacuacuac

SEQ ID NO: 1162192 - RNA, 19 nt, Artificial Sequence
  Description of Artificial Sequence: Synthetic oligonucleotide
  Sense strand starting at position 131 of SEQ ID NO: 916509
cuuacuuuggacuggaaau

SEQ ID NO: 1162193 - RNA, 19 nt, Artificial Sequence
  Description of Artificial Sequence: Synthetic oligonucleotide
  Antisense strand to SEQ ID NO: 1162192
auuuccaguccaaaguaag

SEQ ID NO: 1162194 - RNA, 19 nt, Artificial Sequence
  Description of Artificial Sequence: Synthetic oligonucleotide
  Sense strand starting at position 293 of SEQ ID NO: 916509
ucuacuccugcugaagaga

SEQ ID NO: 1162195 - RNA, 19 nt, Artificial Sequence
  Description of Artificial Sequence: Synthetic oligonucleotide
  Antisense strand to SEQ ID NO: 1162194
ucucuucagcaggaguaga

SEQ ID NO: 1162196 - RNA, 19 nt, Artificial Sequence
  Description of Artificial Sequence: Synthetic oligonucleotide
  Sense strand starting at position 371 of SEQ ID NO: 916509
agguaagaaucacugccua

SEQ ID NO: 1162197 - RNA, 19 nt, Artificial Sequence
  Description of Artificial Sequence: Synthetic oligonucleotide
  Antisense strand to SEQ ID NO: 1162196
uaggcagugauucuuaccu

SEQ ID NO: 1162198 - RNA, 19 nt, Artificial Sequence
  Description of Artificial Sequence: Synthetic oligonucleotide
  Sense strand starting at position 376 of SEQ ID NO: 916509
agaaucacugccuagaagu

SEQ ID NO: 1162199 - RNA, 19 nt, Artificial Sequence
  Description of Artificial Sequence: Synthetic oligonucleotide
  Antisense strand to SEQ ID NO: 1162198
acuucuaggcagugauucu

SEQ ID NO: 1162200 - RNA, 19 nt, Artificial Sequence
  Description of Artificial Sequence: Synthetic oligonucleotide
  Sense strand starting at position 421 of SEQ ID NO: 916509
uuggcaauuccacaugauu

SEQ ID NO: 1162201 - RNA, 19 nt, Artificial Sequence
  Description of Artificial Sequence: Synthetic oligonucleotide
  Antisense strand to SEQ ID NO: 1162200
aaucauguggaauugccaa

SEQ ID NO: 1162202 - RNA, 19 nt, Artificial Sequence
  Description of Artificial Sequence: Synthetic oligonucleotide
  Sense strand starting at position 489 of SEQ ID NO: 916509
uggaacuauguccauuacu

SEQ ID NO: 1162203 - RNA, 19 nt, Artificial Sequence
  Description of Artificial Sequence: Synthetic oligonucleotide
  Antisense strand to SEQ ID NO: 1162202
aguaauggacauaguucca

SEQ ID NO: 1162204 - RNA, 19 nt, Artificial Sequence
  Description of Artificial Sequence: Synthetic oligonucleotide
  Sense strand starting at position 577 of SEQ ID NO: 916509
auguguaauuacucuugaa

SEQ ID NO: 1162205 - RNA, 19 nt, Artificial Sequence
  Description of Artificial Sequence: Synthetic oligonucleotide
  Antisense strand to SEQ ID NO: 1162204
uucaagaguaauuacacau

SEQ ID NO: 1162206 - RNA, 19 nt, Artificial Sequence
  Description of Artificial Sequence: Synthetic oligonucleotide
  Sense strand starting at position 704 of SEQ ID NO: 916509
uccuguuucugauuaaaug

SEQ ID NO: 1162207 - RNA, 19 nt, Artificial Sequence
  Description of Artificial Sequence: Synthetic oligonucleotide
  Antisense strand to SEQ ID NO: 1162206
cauuuaaucagaaacagga

SEQ ID NO: 1162208 - RNA, 19 nt, Artificial Sequence
  Description of Artificial Sequence: Synthetic oligonucleotide
  Sense strand starting at position 705 of SEQ ID NO: 916509
ccuguuucugauuaaauga

SEQ ID NO: 1162209 - RNA, 19 nt, Artificial Sequence
  Description of Artificial Sequence: Synthetic oligonucleotide
  Antisense strand to SEQ ID NO: 1162208
ucauuuaaucagaaacagg

SEQ ID NO: 1162210 - RNA, 19 nt, Artificial Sequence
  Description of Artificial Sequence: Synthetic oligonucleotide
  Sense strand starting at position 854 of SEQ ID NO: 916509
aucuuauauguguacaaag

SEQ ID NO: 1162211 - RNA, 19 nt, Artificial Sequence
  Description of Artificial Sequence: Synthetic oligonucleotide
  Antisense strand to SEQ ID NO: 1162210
cuuuguacacauauaagau

SEQ ID NO: 1162212 - RNA, 19 nt, Artificial Sequence
  Description of Artificial Sequence: Synthetic oligonucleotide
  Sense strand starting at position 865 of SEQ ID NO: 916509
guacaaagucuuuaacuuu

SEQ ID NO: 1162213 - RNA, 19 nt, Artificial Sequence
  Description of Artificial Sequence: Synthetic oligonucleotide
  Antisense strand to SEQ ID NO: 1162212
aaaguuaaagacuuuguac

SEQ ID NO: 1162214 - RNA, 19 nt, Artificial Sequence
  Description of Artificial Sequence: Synthetic oligonucleotide
  Sense strand starting at position 932 of SEQ ID NO: 916509
gagguaucuuuauucugau

SEQ ID NO: 1162215 - RNA, 19 nt, Artificial Sequence
  Description of Artificial Sequence: Synthetic oligonucleotide
  Antisense strand to SEQ ID NO: 1162214
aucagaauaaagauaccuc

SEQ ID NO: 1162216 - RNA, 19 nt, Artificial Sequence
  Description of Artificial Sequence: Synthetic oligonucleotide
  Sense strand starting at position 933 of SEQ ID NO: 916509
agguaucuuuauucugauu

SEQ ID NO: 1162217 - RNA, 19 nt, Artificial Sequence
  Description of Artificial Sequence: Synthetic oligonucleotide
  Antisense strand to SEQ ID NO: 1162216
aaucagaauaaagauaccu

SEQ ID NO: 1162218 - RNA, 19 nt, Artificial Sequence
  Description of Artificial Sequence: Synthetic oligonucleotide
  Sense strand starting at position 1102 of SEQ ID NO: 916509
gccuguugugaauaaauga

SEQ ID NO: 1162219 - RNA, 19 nt, Artificial Sequence
  Description of Artificial Sequence: Synthetic oligonucleotide
  Antisense strand to SEQ ID NO: 1162218
ucauuuauucacaacaggc

SEQ ID NO: 1162220 - RNA, 19 nt, Artificial Sequence
  Description of Artificial Sequence: Synthetic oligonucleotide
  Sense strand starting at position 1451 of SEQ ID NO: 916509
gacguaaacccaugacuuc

SEQ ID NO: 1162221 - RNA, 19 nt, Artificial Sequence
  Description of Artificial Sequence: Synthetic oligonucleotide
  Antisense strand to SEQ ID NO: 1162220
gaagucauggguuuacguc

SEQ ID NO: 1162222 - RNA, 19 nt, Artificial Sequence
  Description of Artificial Sequence: Synthetic oligonucleotide
  Sense strand starting at position 1537 of SEQ ID NO: 916509
ccugcugggagucagauua

SEQ ID NO: 1162223 - RNA, 19 nt, Artificial Sequence
  Description of Artificial Sequence: Synthetic oligonucleotide
  Antisense strand to SEQ ID NO: 1162222
uaaucugacucccagcagg

SEQ ID NO: 1162224 - RNA, 19 nt, Artificial Sequence
  Description of Artificial Sequence: Synthetic oligonucleotide
  Sense strand starting at position 1637 of SEQ ID NO: 916509
gggucagagguuugaggaa

SEQ ID NO: 1162225 - RNA, 19 nt, Artificial Sequence
  Description of Artificial Sequence: Synthetic oligonucleotide
  Antisense strand to SEQ ID NO: 1162224
uuccucaaaccucugaccc

SEQ ID NO: 1162226 - RNA, 19 nt, Artificial Sequence
  Description of Artificial Sequence: Synthetic oligonucleotide
  Sense strand starting at position 1671 of SEQ ID NO: 916509
accagaacucuucgaccua

SEQ ID NO: 1162227 - RNA, 19 nt, Artificial Sequence
  Description of Artificial Sequence: Synthetic oligonucleotide
  Antisense strand to SEQ ID NO: 1162226
uaggucgaagaguucuggu

SEQ ID NO: 1162228 - RNA, 19 nt, Artificial Sequence
  Description of Artificial Sequence: Synthetic oligonucleotide
  Sense strand starting at position 1847 of SEQ ID NO: 916509
gcgggagaccucuacaacu

SEQ ID NO: 1162229 - RNA, 19 nt, Artificial Sequence
  Description of Artificial Sequence: Synthetic oligonucleotide
  Antisense strand to SEQ ID NO: 1162228
aguuguagaggucucccgc

SEQ ID NO: 1162230 - RNA, 19 nt, Artificial Sequence
  Description of Artificial Sequence: Synthetic oligonucleotide
  Sense strand starting at position 2075 of SEQ ID NO: 916509
aagggaggauuguugcuau

SEQ ID NO: 1162231 - RNA, 19 nt, Artificial Sequence
  Description of Artificial Sequence: Synthetic oligonucleotide
  Antisense strand to SEQ ID NO: 1162230
auagcaacaauccucccuu

SEQ ID NO: 1162232 - RNA, 19 nt, Artificial Sequence
  Description of Artificial Sequence: Synthetic oligonucleotide
  Sense strand starting at position 2078 of SEQ ID NO: 916509
ggaggauuguugcuaugga

SEQ ID NO: 1162233 - RNA, 19 nt, Artificial Sequence
  Description of Artificial Sequence: Synthetic oligonucleotide
  Antisense strand to SEQ ID NO: 1162232
uccauagcaacaauccucc

SEQ ID NO: 1162234 - RNA, 19 nt, Artificial Sequence
  Description of Artificial Sequence: Synthetic oligonucleotide
  Sense strand starting at position 2519 of SEQ ID NO: 916509
agagaaaucguagauugcu

SEQ ID NO: 1162235 - RNA, 19 nt, Artificial Sequence
  Description of Artificial Sequence: Synthetic oligonucleotide
  Antisense strand to SEQ ID NO: 1162234
agcaaucuacgauuucucu

SEQ ID NO: 1162236 - RNA, 19 nt, Artificial Sequence
  Description of Artificial Sequence: Synthetic oligonucleotide
  Sense strand starting at position 2529 of SEQ ID NO: 916509
uagauugcucuuuaguaga

SEQ ID NO: 1162237 - RNA, 19 nt, Artificial Sequence
  Description of Artificial Sequence: Synthetic oligonucleotide
  Antisense strand to SEQ ID NO: 1162236
ucuacuaaagagcaaucua

SEQ ID NO: 1162238 - RNA, 19 nt, Artificial Sequence
  Description of Artificial Sequence: Synthetic oligonucleotide
  Sense strand starting at position 2537 of SEQ ID NO: 916509
ucuuuaguagaugaguuaa

SEQ ID NO: 1162239 - RNA, 19 nt, Artificial Sequence
  Description of Artificial Sequence: Synthetic oligonucleotide
  Antisense strand to SEQ ID NO: 1162238
uuaacucaucuacuaaaga

SEQ ID NO: 1162240 - RNA, 19 nt, Artificial Sequence
  Description of Artificial Sequence: Synthetic oligonucleotide
  Sense strand starting at position 2539 of SEQ ID NO: 916509
uuuaguagaugaguuaaag

SEQ ID NO: 1162241 - RNA, 19 nt, Artificial Sequence
  Description of Artificial Sequence: Synthetic oligonucleotide
  Antisense strand to SEQ ID NO: 1162240
cuuuaacucaucuacuaaa

SEQ ID NO: 1162242 - RNA, 19 nt, Artificial Sequence
  Description of Artificial Sequence: Synthetic oligonucleotide
  Sense strand starting at position 2588 of SEQ ID NO: 916509
cccugaaauguggaggcua

SEQ ID NO: 1162243 - RNA, 19 nt, Artificial Sequence
  Description of Artificial Sequence: Synthetic oligonucleotide
  Antisense strand to SEQ ID NO: 1162242
uagccuccacauuucaggg

SEQ ID NO: 1162244 - RNA, 19 nt, Artificial Sequence
  Description of Artificial Sequence: Synthetic oligonucleotide
  Sense strand starting at position 2702 of SEQ ID NO: 916509
ggaaguaaauaugcagaau

SEQ ID NO: 1162245 - RNA, 19 nt, Artificial Sequence
  Description of Artificial Sequence: Synthetic oligonucleotide
  Antisense strand to SEQ ID NO: 1162244
auucugcauauuuacuucc

SEQ ID NO: 1162246 - RNA, 19 nt, Artificial Sequence
  Description of Artificial Sequence: Synthetic oligonucleotide
  Sense strand starting at position 3288 of SEQ ID NO: 916509
ucucuuaugcuggauaaug

SEQ ID NO: 1162247 - RNA, 19 nt, Artificial Sequence
  Description of Artificial Sequence: Synthetic oligonucleotide
  Antisense strand to SEQ ID NO: 1162246
cauuauccagcauaagaga

SEQ ID NO: 1162248 - RNA, 19 nt, Artificial Sequence
  Description of Artificial Sequence: Synthetic oligonucleotide
  Sense strand starting at position 3290 of SEQ ID NO: 916509
ucuuaugcuggauaaugua

SEQ ID NO: 1162249 - RNA, 19 nt, Artificial Sequence
  Description of Artificial Sequence: Synthetic oligonucleotide
  Antisense strand to SEQ ID NO: 1162248
uacauuauccagcauaaga

SEQ ID NO: 1162250 - RNA, 19 nt, Artificial Sequence
  Description of Artificial Sequence: Synthetic oligonucleotide
  Sense strand starting at position 3323 of SEQ ID NO: 916509
agagacauaugucuaucuu

SEQ ID NO: 1162251 - RNA, 19 nt, Artificial Sequence
  Description of Artificial Sequence: Synthetic oligonucleotide
  Antisense strand to SEQ ID NO: 1162250
aagauagacauaugucucu

SEQ ID NO: 1162252 - RNA, 19 nt, Artificial Sequence
  Description of Artificial Sequence: Synthetic oligonucleotide
  Sense strand starting at position 3388 of SEQ ID NO: 916509
cauuauaggucuccaggaa

SEQ ID NO: 1162253 - RNA, 19 nt, Artificial Sequence
  Description of Artificial Sequence: Synthetic oligonucleotide
  Antisense strand to SEQ ID NO: 1162252
uuccuggagaccuauaaug

SEQ ID NO: 1162254 - RNA, 19 nt, Artificial Sequence
  Description of Artificial Sequence: Synthetic oligonucleotide
  Sense strand starting at position 3392 of SEQ ID NO: 916509
auaggucuccaggaagugu

SEQ ID NO: 1162255 - RNA, 19 nt, Artificial Sequence
  Description of Artificial Sequence: Synthetic oligonucleotide
  Antisense strand to SEQ ID NO: 1162254
acacuuccuggagaccuau

SEQ ID NO: 1162256 - RNA, 19 nt, Artificial Sequence
  Description of Artificial Sequence: Synthetic oligonucleotide
  Sense strand starting at position 3443 of SEQ ID NO: 916509
gcaaguauccaagacagua

SEQ ID NO: 1162257 - RNA, 19 nt, Artificial Sequence
  Description of Artificial Sequence: Synthetic oligonucleotide
  Antisense strand to SEQ ID NO: 1162256
uacugucuuggauacuugc

SEQ ID NO: 1162258 - RNA, 19 nt, Artificial Sequence
  Description of Artificial Sequence: Synthetic oligonucleotide
  Sense strand starting at position 3461 of SEQ ID NO: 916509
agaugauuggcugguaaag

SEQ ID NO: 1162259 - RNA, 19 nt, Artificial Sequence
  Description of Artificial Sequence: Synthetic oligonucleotide
  Antisense strand to SEQ ID NO: 1162258
cuuuaccagccaaucaucu

SEQ ID NO: 1162260 - RNA, 19 nt, Artificial Sequence
  Description of Artificial Sequence: Synthetic oligonucleotide
  Sense strand starting at position 3569 of SEQ ID NO: 916509
uuauguauuccagggaauu

SEQ ID NO: 1162261 - RNA, 19 nt, Artificial Sequence
  Description of Artificial Sequence: Synthetic oligonucleotide
  Antisense strand to SEQ ID NO: 1162260
aauucccuggaauacauaa

SEQ ID NO: 1162262 - RNA, 19 nt, Artificial Sequence
  Description of Artificial Sequence: Synthetic oligonucleotide
  Sense strand starting at position 3570 of SEQ ID NO: 916509
uauguauuccagggaauug

SEQ ID NO: 1162263 - RNA, 19 nt, Artificial Sequence
  Description of Artificial Sequence: Synthetic oligonucleotide
  Antisense strand to SEQ ID NO: 1162262
caauucccuggaauacaua

SEQ ID NO: 1162264 - RNA, 19 nt, Artificial Sequence
  Description of Artificial Sequence: Synthetic oligonucleotide
  Sense strand starting at position 3609 of SEQ ID NO: 916509
agaaccauauuccugaagu

SEQ ID NO: 1162265 - RNA, 19 nt, Artificial Sequence
  Description of Artificial Sequence: Synthetic oligonucleotide
  Antisense strand to SEQ ID NO: 1162264
acuucaggaauaugguucu

SEQ ID NO: 1162266 - RNA, 19 nt, Artificial Sequence
  Description of Artificial Sequence: Synthetic oligonucleotide
  Sense strand starting at position 3619 of SEQ ID NO: 916509
uccugaagugacuaguauu

SEQ ID NO: 1162267 - RNA, 19 nt, Artificial Sequence
  Description of Artificial Sequence: Synthetic oligonucleotide
  Antisense strand to SEQ ID NO: 1162266
aauacuagucacuucagga

SEQ ID NO: 1162268 - RNA, 19 nt, Artificial Sequence
  Description of Artificial Sequence: Synthetic oligonucleotide
  Sense strand starting at position 3626 of SEQ ID NO: 916509
gugacuaguauugaaagua

SEQ ID NO: 1162269 - RNA, 19 nt, Artificial Sequence
  Description of Artificial Sequence: Synthetic oligonucleotide
  Antisense strand to SEQ ID NO: 1162268
uacuuucaauacuagucac

SEQ ID NO: 1162270 - RNA, 19 nt, Artificial Sequence
  Description of Artificial Sequence: Synthetic oligonucleotide
  Sense strand starting at position 3804 of SEQ ID NO: 916509
caugaugucuuucuggacu

SEQ ID NO: 1162271 - RNA, 19 nt, Artificial Sequence
  Description of Artificial Sequence: Synthetic oligonucleotide
  Antisense strand to SEQ ID NO: 1162270
aguccagaaagacaucaug

SEQ ID NO: 1162272 - RNA, 19 nt, Artificial Sequence
  Description of Artificial Sequence: Synthetic oligonucleotide
  Sense strand starting at position 54 of SEQ ID NO: 916510
uagagacagggcuguguua

SEQ ID NO: 1162273 - RNA, 19 nt, Artificial Sequence
  Description of Artificial Sequence: Synthetic oligonucleotide
  Antisense strand to SEQ ID NO: 1162272
uaacacagcccugucucua

SEQ ID NO: 1162274 - RNA, 19 nt, Artificial Sequence
  Description of Artificial Sequence: Synthetic oligonucleotide
  Sense strand starting at position 535 of SEQ ID NO: 916510
cucagagaauaugccuaau

SEQ ID NO: 1162275 - RNA, 19 nt, Artificial Sequence
  Description of Artificial Sequence: Synthetic oligonucleotide
  Antisense strand to SEQ ID NO: 1162274
auuaggcauauucucugag

SEQ ID NO: 1162276 - RNA, 19 nt, Artificial Sequence
  Description of Artificial Sequence: Synthetic oligonucleotide
  Sense strand starting at position 569 of SEQ ID NO: 916510
guaguacagaaguaugacu

SEQ ID NO: 1162277 - RNA, 19 nt, Artificial Sequence
  Description of Artificial Sequence: Synthetic oligonucleotide
  Antisense strand to SEQ ID NO: 1162276
agucauacuucuguacuac

SEQ ID NO: 1162278 - RNA, 19 nt, Artificial Sequence
  Description of Artificial Sequence: Synthetic oligonucleotide
  Sense strand starting at position 574 of SEQ ID NO: 916510
acagaaguaugacuccauu

SEQ ID NO: 1162279 - RNA, 19 nt, Artificial Sequence
  Description of Artificial Sequence: Synthetic oligonucleotide
  Antisense strand to SEQ ID NO: 1162278
aauggagucauacuucugu

SEQ ID NO: 1162280 - RNA, 19 nt, Artificial Sequence
  Description of Artificial Sequence: Synthetic oligonucleotide
  Sense strand starting at position 616 of SEQ ID NO: 916510
guggaaggcucuuuagaaa

SEQ ID NO: 1162281 - RNA, 19 nt, Artificial Sequence
  Description of Artificial Sequence: Synthetic oligonucleotide
  Antisense strand to SEQ ID NO: 1162280
uuucuaaagagccuuccac

SEQ ID NO: 1162282 - RNA, 19 nt, Artificial Sequence
  Description of Artificial Sequence: Synthetic oligonucleotide
  Sense strand starting at position 707 of SEQ ID NO: 916510
uagguauagcuagacugua

SEQ ID NO: 1162283 - RNA, 19 nt, Artificial Sequence
  Description of Artificial Sequence: Synthetic oligonucleotide
  Antisense strand to SEQ ID NO: 1162282
uacagucuagcuauaccua

SEQ ID NO: 1162284 - RNA, 19 nt, Artificial Sequence
  Description of Artificial Sequence: Synthetic oligonucleotide
  Sense strand starting at position 826 of SEQ ID NO: 916510
aaaguauguggcuaucaaa

SEQ ID NO: 1162285 - RNA, 19 nt, Artificial Sequence
  Description of Artificial Sequence: Synthetic oligonucleotide
  Antisense strand to SEQ ID NO: 1162284
uuugauagccacauacuuu

SEQ ID NO: 1162286 - RNA, 19 nt, Artificial Sequence
  Description of Artificial Sequence: Synthetic oligonucleotide
  Sense strand starting at position 1035 of SEQ ID NO: 916510
gucaucagcgaacauucua

SEQ ID NO: 1162287 - RNA, 19 nt, Artificial Sequence
  Description of Artificial Sequence: Synthetic oligonucleotide
  Antisense strand to SEQ ID NO: 1162286
uagaauguucgcugaugac

SEQ ID NO: 1162288 - RNA, 19 nt, Artificial Sequence
  Description of Artificial Sequence: Synthetic oligonucleotide
  Sense strand starting at position 1161 of SEQ ID NO: 916510
uccuguguaaugugagaga

SEQ ID NO: 1162289 - RNA, 19 nt, Artificial Sequence
  Description of Artificial Sequence: Synthetic oligonucleotide
  Antisense strand to SEQ ID NO: 1162288
ucucucacauuacacagga

SEQ ID NO: 1162290 - RNA, 19 nt, Artificial Sequence
  Description of Artificial Sequence: Synthetic oligonucleotide
  Sense strand starting at position 1402 of SEQ ID NO: 916510
gacucagaacagugccaaa

SEQ ID NO: 1162291 - RNA, 19 nt, Artificial Sequence
  Description of Artificial Sequence: Synthetic oligonucleotide
  Antisense strand to SEQ ID NO: 1162290
uuuggcacuguucugaguc

SEQ ID NO: 1162292 - RNA, 19 nt, Artificial Sequence
  Description of Artificial Sequence: Synthetic oligonucleotide
  Sense strand starting at position 1452 of SEQ ID NO: 916510
cuuacuauugagcacagua

SEQ ID NO: 1162293 - RNA, 19 nt, Artificial Sequence
  Description of Artificial Sequence: Synthetic oligonucleotide
  Antisense strand to SEQ ID NO: 1162292
uacugugcucaauaguaag

SEQ ID NO: 1162294 - RNA, 19 nt, Artificial Sequence
  Description of Artificial Sequence: Synthetic oligonucleotide
  Sense strand starting at position 1544 of SEQ ID NO: 916510
ggucaagucuuacccagga

SEQ ID NO: 1162295 - RNA, 19 nt, Artificial Sequence
  Description of Artificial Sequence: Synthetic oligonucleotide
  Antisense strand to SEQ ID NO: 1162294
uccuggguaagacuugacc

SEQ ID NO: 1162296 - RNA, 19 nt, Artificial Sequence
  Description of Artificial Sequence: Synthetic oligonucleotide
  Sense strand starting at position 1572 of SEQ ID NO: 916510
ugucauacacuccgaacau

SEQ ID NO: 1162297 - RNA, 19 nt, Artificial Sequence
  Description of Artificial Sequence: Synthetic oligonucleotide
  Antisense strand to SEQ ID NO: 1162296
auguucggaguguaugaca

SEQ ID NO: 1162298 - RNA, 19 nt, Artificial Sequence
  Description of Artificial Sequence: Synthetic oligonucleotide
  Sense strand starting at position 1704 of SEQ ID NO: 916510
ccuauuauacuacgaagca

SEQ ID NO: 1162299 - RNA, 19 nt, Artificial Sequence
  Description of Artificial Sequence: Synthetic oligonucleotide
  Antisense strand to SEQ ID NO: 1162298
ugcuucguaguauaauagg

SEQ ID NO: 1162300 - RNA, 19 nt, Artificial Sequence
  Description of Artificial Sequence: Synthetic oligonucleotide
  Sense strand starting at position 1813 of SEQ ID NO: 916510
auaagagguucccugccau

SEQ ID NO: 1162301 - RNA, 19 nt, Artificial Sequence
  Description of Artificial Sequence: Synthetic oligonucleotide
  Antisense strand to SEQ ID NO: 1162300
auggcagggaaccucuuau

SEQ ID NO: 1162302 - RNA, 19 nt, Artificial Sequence
  Description of Artificial Sequence: Synthetic oligonucleotide
  Sense strand starting at position 2103 of SEQ ID NO: 916510
ccgcgacucgucgcuaaga

SEQ ID NO: 1162303 - RNA, 19 nt, Artificial Sequence
  Description of Artificial Sequence: Synthetic oligonucleotide
  Antisense strand to SEQ ID NO: 1162302
ucuuagcgacgagucgcgg

SEQ ID NO: 1162304 - RNA, 19 nt, Artificial Sequence
  Description of Artificial Sequence: Synthetic oligonucleotide
  Sense strand starting at position 2173 of SEQ ID NO: 916510
guccuucaaccgugaagga

SEQ ID NO: 1162305 - RNA, 19 nt, Artificial Sequence
  Description of Artificial Sequence: Synthetic oligonucleotide
  Antisense strand to SEQ ID NO: 1162304
uccuucacgguugaaggac

SEQ ID NO: 1162306 - RNA, 19 nt, Artificial Sequence
  Description of Artificial Sequence: Synthetic oligonucleotide
  Sense strand starting at position 2358 of SEQ ID NO: 916510
gauggcgaaaccuggauua

SEQ ID NO: 1162307 - RNA, 19 nt, Artificial Sequence
  Description of Artificial Sequence: Synthetic oligonucleotide
  Antisense strand to SEQ ID NO: 1162306
uaauccagguuucgccauc

SEQ ID NO: 1162308 - RNA, 19 nt, Artificial Sequence
  Description of Artificial Sequence: Synthetic oligonucleotide
  Sense strand starting at position 2455 of SEQ ID NO: 916510
gucucuggccagcagaaau

SEQ ID NO: 1162309 - RNA, 19 nt, Artificial Sequence
  Description of Artificial Sequence: Synthetic oligonucleotide
  Antisense strand to SEQ ID NO: 1162308
auuucugcuggccagagac

SEQ ID NO: 1162310 - RNA, 19 nt, Artificial Sequence
  Description of Artificial Sequence: Synthetic oligonucleotide
  Sense strand starting at position 2636 of SEQ ID NO: 916510
ccugcagccguugagauuu

SEQ ID NO: 1162311 - RNA, 19 nt, Artificial Sequence
  Description of Artificial Sequence: Synthetic oligonucleotide
  Antisense strand to SEQ ID NO: 1162310
aaaucucaacggcugcagg

SEQ ID NO: 1162312 - RNA, 19 nt, Artificial Sequence
  Description of Artificial Sequence: Synthetic oligonucleotide
  Sense strand starting at position 2642 of SEQ ID NO: 916510
gccguugagauuugaacuc

SEQ ID NO: 1162313 - RNA, 19 nt, Artificial Sequence
  Description of Artificial Sequence: Synthetic oligonucleotide
  Antisense strand to SEQ ID NO: 1162312
gaguucaaaucucaacggc

SEQ ID NO: 1162314 - RNA, 19 nt, Artificial Sequence
  Description of Artificial Sequence: Synthetic oligonucleotide
  Sense strand starting at position 2734 of SEQ ID NO: 916510
ggauucuccgccgacuuga

SEQ ID NO: 1162315 - RNA, 19 nt, Artificial Sequence
  Description of Artificial Sequence: Synthetic oligonucleotide
  Antisense strand to SEQ ID NO: 1162314
ucaagucggcggagaaucc

SEQ ID NO: 1162316 - RNA, 19 nt, Artificial Sequence
  Description of Artificial Sequence: Synthetic oligonucleotide
  Sense strand starting at position 2857 of SEQ ID NO: 916510
gugguguugcaggucguaa

SEQ ID NO: 1162317 - RNA, 19 nt, Artificial Sequence
  Description of Artificial Sequence: Synthetic oligonucleotide
  Antisense strand to SEQ ID NO: 1162316
uuacgaccugcaacaccac

SEQ ID NO: 1162318 - RNA, 19 nt, Artificial Sequence
  Description of Artificial Sequence: Synthetic oligonucleotide
  Sense strand starting at position 2858 of SEQ ID NO: 916510
ugguguugcaggucguaaa

SEQ ID NO: 1162319 - RNA, 19 nt, Artificial Sequence
  Description of Artificial Sequence: Synthetic oligonucleotide
  Antisense strand to SEQ ID NO: 1162318
uuuacgaccugcaacacca

SEQ ID NO: 1162320 - RNA, 19 nt, Artificial Sequence
  Description of Artificial Sequence: Synthetic oligonucleotide
  Sense strand starting at position 2956 of SEQ ID NO: 916510
gcgcgaugugugagaaacu

SEQ ID NO: 1162321 - RNA, 19 nt, Artificial Sequence
  Description of Artificial Sequence: Synthetic oligonucleotide
  Antisense strand to SEQ ID NO: 1162320
aguuucucacacaucgcgc

SEQ ID NO: 1162322 - RNA, 19 nt, Artificial Sequence
  Description of Artificial Sequence: Synthetic oligonucleotide
  Sense strand starting at position 2997 of SEQ ID NO: 916510
ggaaguuguuaagcaaauc

SEQ ID NO: 1162323 - RNA, 19 nt, Artificial Sequence
  Description of Artificial Sequence: Synthetic oligonucleotide
  Antisense strand to SEQ ID NO: 1162322
gauuugcuuaacaacuucc

SEQ ID NO: 1162324 - RNA, 19 nt, Artificial Sequence
  Description of Artificial Sequence: Synthetic oligonucleotide
  Sense strand starting at position 3034 of SEQ ID NO: 916510
ggaagauguuaagcaaauc

SEQ ID NO: 1162325 - RNA, 19 nt, Artificial Sequence
  Description of Artificial Sequence: Synthetic oligonucleotide
  Antisense strand to SEQ ID NO: 1162324
gauuugcuuaacaucuucc

SEQ ID NO: 1162326 - RNA, 19 nt, Artificial Sequence
  Description of Artificial Sequence: Synthetic oligonucleotide
  Sense strand starting at position 3144 of SEQ ID NO: 916510
accucaugggauugagguu

SEQ ID NO: 1162327 - RNA, 19 nt, Artificial Sequence
  Description of Artificial Sequence: Synthetic oligonucleotide
  Antisense strand to SEQ ID NO: 1162326
aaccucaaucccaugaggu

SEQ ID NO: 1162328 - RNA, 19 nt, Artificial Sequence
  Description of Artificial Sequence: Synthetic oligonucleotide
  Sense strand starting at position 3158 of SEQ ID NO: 916510
agguuaggauacuuagauc

SEQ ID NO: 1162329 - RNA, 19 nt, Artificial Sequence
  Description of Artificial Sequence: Synthetic oligonucleotide
  Antisense strand to SEQ ID NO: 1162328
gaucuaaguauccuaaccu

SEQ ID NO: 1162330 - RNA, 19 nt, Artificial Sequence
  Description of Artificial Sequence: Synthetic oligonucleotide
  Sense strand starting at position 3413 of SEQ ID NO: 916510
cugcuugauuuguuugauc

SEQ ID NO: 1162331 - RNA, 19 nt, Artificial Sequence
  Description of Artificial Sequence: Synthetic oligonucleotide
  Antisense strand to SEQ ID NO: 1162330
gaucaaacaaaucaagcag

SEQ ID NO: 1162332 - RNA, 19 nt, Artificial Sequence
  Description of Artificial Sequence: Synthetic oligonucleotide
  Sense strand starting at position 3415 of SEQ ID NO: 916510
gcuugauuuguuugaucau

SEQ ID NO: 1162333 - RNA, 19 nt, Artificial Sequence
  Description of Artificial Sequence: Synthetic oligonucleotide
  Antisense strand to SEQ ID NO: 1162332
augaucaaacaaaucaagc

SEQ ID NO: 1162334 - RNA, 19 nt, Artificial Sequence
  Description of Artificial Sequence: Synthetic oligonucleotide
  Sense strand starting at position 3422 of SEQ ID NO: 916510
uuguuugaucaucagagca

SEQ ID NO: 1162335 - RNA, 19 nt, Artificial Sequence
  Description of Artificial Sequence: Synthetic oligonucleotide
  Antisense strand to SEQ ID NO: 1162334
ugcucugaugaucaaacaa

SEQ ID NO: 1162336 - RNA, 19 nt, Artificial Sequence
  Description of Artificial Sequence: Synthetic oligonucleotide
  Sense strand starting at position 3427 of SEQ ID NO: 916510
ugaucaucagagcaacuuu

SEQ ID NO: 1162337 - RNA, 19 nt, Artificial Sequence
  Description of Artificial Sequence: Synthetic oligonucleotide
  Antisense strand to SEQ ID NO: 1162336
aaaguugcucugaugauca

SEQ ID NO: 1162338 - RNA, 19 nt, Artificial Sequence
  Description of Artificial Sequence: Synthetic oligonucleotide
  Sense strand starting at position 3444 of SEQ ID NO: 916510
uugugaaguaaucagaguu

SEQ ID NO: 1162339 - RNA, 19 nt, Artificial Sequence
  Description of Artificial Sequence: Synthetic oligonucleotide
  Antisense strand to SEQ ID NO: 1162338
aacucugauuacuucacaa

SEQ ID NO: 1162340 - RNA, 19 nt, Artificial Sequence
  Description of Artificial Sequence: Synthetic oligonucleotide
  Sense strand starting at position 3451 of SEQ ID NO: 916510
guaaucagaguuuaguaac

SEQ ID NO: 1162341 - RNA, 19 nt, Artificial Sequence
  Description of Artificial Sequence: Synthetic oligonucleotide
  Antisense strand to SEQ ID NO: 1162340
guuacuaaacucugauuac

SEQ ID NO: 1162342 - RNA, 19 nt, Artificial Sequence
  Description of Artificial Sequence: Synthetic oligonucleotide
  Sense strand starting at position 3516 of SEQ ID NO: 916510
ugccaaagucacuacuaga

SEQ ID NO: 1162343 - RNA, 19 nt, Artificial Sequence
  Description of Artificial Sequence: Synthetic oligonucleotide
  Antisense strand to SEQ ID NO: 1162342
ucuaguagugacuuuggca

SEQ ID NO: 1162344 - RNA, 19 nt, Artificial Sequence
  Description of Artificial Sequence: Synthetic oligonucleotide
  Sense strand starting at position 3540 of SEQ ID NO: 916510
uuucuaguccagggucaau

SEQ ID NO: 1162345 - RNA, 19 nt, Artificial Sequence
  Description of Artificial Sequence: Synthetic oligonucleotide
  Antisense strand to SEQ ID NO: 1162344
auugacccuggacuagaaa

SEQ ID NO: 1162346 - RNA, 19 nt, Artificial Sequence
  Description of Artificial Sequence: Synthetic oligonucleotide
  Sense strand starting at position 3910 of SEQ ID NO: 916510
acagcuuagagguaagagu

SEQ ID NO: 1162347 - RNA, 19 nt, Artificial Sequence
  Description of Artificial Sequence: Synthetic oligonucleotide
  Antisense strand to SEQ ID NO: 1162346
acucuuaccucuaagcugu

SEQ ID NO: 1162348 - RNA, 19 nt, Artificial Sequence
  Description of Artificial Sequence: Synthetic oligonucleotide
  Sense strand starting at position 3918 of SEQ ID NO: 916510
gagguaagaguccauagcu

SEQ ID NO: 1162349 - RNA, 19 nt, Artificial Sequence
  Description of Artificial Sequence: Synthetic oligonucleotide
  Antisense strand to SEQ ID NO: 1162348
agcuauggacucuuaccuc

SEQ ID NO: 1162350 - RNA, 19 nt, Artificial Sequence
  Description of Artificial Sequence: Synthetic oligonucleotide
  Sense strand starting at position 3981 of SEQ ID NO: 916510
gcuacauugucauuucugu

SEQ ID NO: 1162351 - RNA, 19 nt, Artificial Sequence
  Description of Artificial Sequence: Synthetic oligonucleotide
  Antisense strand to SEQ ID NO: 1162350
acagaaaugacaauguagc

SEQ ID NO: 1162352 - RNA, 19 nt, Artificial Sequence
  Description of Artificial Sequence: Synthetic oligonucleotide
  Sense strand starting at position 77 of SEQ ID NO: 916511
ccaauucguguacauggaa

SEQ ID NO: 1162353 - RNA, 19 nt, Artificial Sequence
  Description of Artificial Sequence: Synthetic oligonucleotide
  Antisense strand to SEQ ID NO: 1162352
uuccauguacacgaauugg

SEQ ID NO: 1162354 - RNA, 19 nt, Artificial Sequence
  Description of Artificial Sequence: Synthetic oligonucleotide
  Sense strand starting at position 833 of SEQ ID NO: 916511
ucuagaacacugcauggua

SEQ ID NO: 1162355 - RNA, 19 nt, Artificial Sequence
  Description of Artificial Sequence: Synthetic oligonucleotide
  Antisense strand to SEQ ID NO: 1162354
uaccaugcaguguucuaga

SEQ ID NO: 1162356 - RNA, 19 nt, Artificial Sequence
  Description of Artificial Sequence: Synthetic oligonucleotide
  Sense strand starting at position 835 of SEQ ID NO: 916511
uagaacacugcaugguaua

SEQ ID NO: 1162357 - RNA, 19 nt, Artificial Sequence
  Description of Artificial Sequence: Synthetic oligonucleotide
  Antisense strand to SEQ ID NO: 1162356
uauaccaugcaguguucua

SEQ ID NO: 1162358 - RNA, 19 nt, Artificial Sequence
  Description of Artificial Sequence: Synthetic oligonucleotide
  Sense strand starting at position 847 of SEQ ID NO: 916511
ugguauacaauaggaguua

SEQ ID NO: 1162359 - RNA, 19 nt, Artificial Sequence
  Description of Artificial Sequence: Synthetic oligonucleotide
  Antisense strand to SEQ ID NO: 1162358
uaacuccuauuguauacca

SEQ ID NO: 1162360 - RNA, 19 nt, Artificial Sequence
  Description of Artificial Sequence: Synthetic oligonucleotide
  Sense strand starting at position 859 of SEQ ID NO: 916511
ggaguuaaguauuccaaga

SEQ ID NO: 1162361 - RNA, 19 nt, Artificial Sequence
  Description of Artificial Sequence: Synthetic oligonucleotide
  Antisense strand to SEQ ID NO: 1162360
ucuuggaauacuuaacucc

SEQ ID NO: 1162362 - RNA, 19 nt, Artificial Sequence
  Description of Artificial Sequence: Synthetic oligonucleotide
  Sense strand starting at position 1101 of SEQ ID NO: 916511
guagaaaugagauggucac

SEQ ID NO: 1162363 - RNA, 19 nt, Artificial Sequence
  Description of Artificial Sequence: Synthetic oligonucleotide
  Antisense strand to SEQ ID NO: 1162362
gugaccaucucauuucuac

SEQ ID NO: 1162364 - RNA, 19 nt, Artificial Sequence
  Description of Artificial Sequence: Synthetic oligonucleotide
  Sense strand starting at position 1107 of SEQ ID NO: 916511
augagauggucaccugaac

SEQ ID NO: 1162365 - RNA, 19 nt, Artificial Sequence
  Description of Artificial Sequence: Synthetic oligonucleotide
  Antisense strand to SEQ ID NO: 1162364
guucaggugaccaucucau

SEQ ID NO: 1162366 - RNA, 19 nt, Artificial Sequence
  Description of Artificial Sequence: Synthetic oligonucleotide
  Sense strand starting at position 1122 of SEQ ID NO: 916511
gaacuagauaguugguagu

SEQ ID NO: 1162367 - RNA, 19 nt, Artificial Sequence
  Description of Artificial Sequence: Synthetic oligonucleotide
  Antisense strand to SEQ ID NO: 1162366
acuaccaacuaucuaguuc

SEQ ID NO: 1162368 - RNA, 19 nt, Artificial Sequence
  Description of Artificial Sequence: Synthetic oligonucleotide
  Sense strand starting at position 1124 of SEQ ID NO: 916511
acuagauaguugguaguau

SEQ ID NO: 1162369 - RNA, 19 nt, Artificial Sequence
  Description of Artificial Sequence: Synthetic oligonucleotide
  Antisense strand to SEQ ID NO: 1162368
auacuaccaacuaucuagu

SEQ ID NO: 1162370 - RNA, 19 nt, Artificial Sequence
  Description of Artificial Sequence: Synthetic oligonucleotide
  Sense strand starting at position 1182 of SEQ ID NO: 916511
guaggauccgccuauugau

SEQ ID NO: 1162371 - RNA, 19 nt, Artificial Sequence
  Description of Artificial Sequence: Synthetic oligonucleotide
  Antisense strand to SEQ ID NO: 1162370
aucaauaggcggauccuac

SEQ ID NO: 1162372 - RNA, 19 nt, Artificial Sequence
  Description of Artificial Sequence: Synthetic oligonucleotide
  Sense strand starting at position 1278 of SEQ ID NO: 916511
gcacuucuccgcuaauaaa

SEQ ID NO: 1162373 - RNA, 19 nt, Artificial Sequence
  Description of Artificial Sequence: Synthetic oligonucleotide
  Antisense strand to SEQ ID NO: 1162372
uuuauuagcggagaagugc

SEQ ID NO: 1162374 - RNA, 19 nt, Artificial Sequence
  Description of Artificial Sequence: Synthetic oligonucleotide
  Sense strand starting at position 1323 of SEQ ID NO: 916511
ggguaagcacgcuaucaag

SEQ ID NO: 1162375 - RNA, 19 nt, Artificial Sequence
  Description of Artificial Sequence: Synthetic oligonucleotide
  Antisense strand to SEQ ID NO: 1162374
cuugauagcgugcuuaccc

SEQ ID NO: 1162376 - RNA, 19 nt, Artificial Sequence
  Description of Artificial Sequence: Synthetic oligonucleotide
  Sense strand starting at position 1356 of SEQ ID NO: 916511
cuguuaaauggaggucauc

SEQ ID NO: 1162377 - RNA, 19 nt, Artificial Sequence
  Description of Artificial Sequence: Synthetic oligonucleotide
  Antisense strand to SEQ ID NO: 1162376
gaugaccuccauuuaacag

SEQ ID NO: 1162378 - RNA, 19 nt, Artificial Sequence
  Description of Artificial Sequence: Synthetic oligonucleotide
  Sense strand starting at position 1422 of SEQ ID NO: 916511
gcagcaauuuguccuagca

SEQ ID NO: 1162379 - RNA, 19 nt, Artificial Sequence
  Description of Artificial Sequence: Synthetic oligonucleotide
  Antisense strand to SEQ ID NO: 1162378
ugcuaggacaaauugcugc

SEQ ID NO: 1162380 - RNA, 19 nt, Artificial Sequence
  Description of Artificial Sequence: Synthetic oligonucleotide
  Sense strand starting at position 1444 of SEQ ID NO: 916511
ccguaugacucucuuaaug

SEQ ID NO: 1162381 - RNA, 19 nt, Artificial Sequence
  Description of Artificial Sequence: Synthetic oligonucleotide
  Antisense strand to SEQ ID NO: 1162380
cauuaagagagucauacgg

SEQ ID NO: 1162382 - RNA, 19 nt, Artificial Sequence
  Description of Artificial Sequence: Synthetic oligonucleotide
  Sense strand starting at position 1489 of SEQ ID NO: 916511
gccgaugcccgauaaacaa

SEQ ID NO: 1162383 - RNA, 19 nt, Artificial Sequence
  Description of Artificial Sequence: Synthetic oligonucleotide
  Antisense strand to SEQ ID NO: 1162382
uuguuuaucgggcaucggc

SEQ ID NO: 1162384 - RNA, 19 nt, Artificial Sequence
  Description of Artificial Sequence: Synthetic oligonucleotide
  Sense strand starting at position 1761 of SEQ ID NO: 916511
ccgguauuccgcucuugca

SEQ ID NO: 1162385 - RNA, 19 nt, Artificial Sequence
  Description of Artificial Sequence: Synthetic oligonucleotide
  Antisense strand to SEQ ID NO: 1162384
ugcaagagcggaauaccgg

SEQ ID NO: 1162386 - RNA, 19 nt, Artificial Sequence
  Description of Artificial Sequence: Synthetic oligonucleotide
  Sense strand starting at position 2075 of SEQ ID NO: 916511
gucaaaugugcaggaagau

SEQ ID NO: 1162387 - RNA, 19 nt, Artificial Sequence
  Description of Artificial Sequence: Synthetic oligonucleotide
  Antisense strand to SEQ ID NO: 1162386
aucuuccugcacauuugac

SEQ ID NO: 1162388 - RNA, 19 nt, Artificial Sequence
  Description of Artificial Sequence: Synthetic oligonucleotide
  Sense strand starting at position 2150 of SEQ ID NO: 916511
gugaaucaguucguagaga

SEQ ID NO: 1162389 - RNA, 19 nt, Artificial Sequence
  Description of Artificial Sequence: Synthetic oligonucleotide
  Antisense strand to SEQ ID NO: 1162388
ucucuacgaacugauucac

SEQ ID NO: 1162390 - RNA, 19 nt, Artificial Sequence
  Description of Artificial Sequence: Synthetic oligonucleotide
  Sense strand starting at position 2159 of SEQ ID NO: 916511
uucguagagaauugcagau

SEQ ID NO: 1162391 - RNA, 19 nt, Artificial Sequence
  Description of Artificial Sequence: Synthetic oligonucleotide
  Antisense strand to SEQ ID NO: 1162390
aucugcaauucucuacgaa

SEQ ID NO: 1162392 - RNA, 19 nt, Artificial Sequence
  Description of Artificial Sequence: Synthetic oligonucleotide
  Sense strand starting at position 2228 of SEQ ID NO: 916511
gguggaaccucaguugauc

SEQ ID NO: 1162393 - RNA, 19 nt, Artificial Sequence
  Description of Artificial Sequence: Synthetic oligonucleotide
  Antisense strand to SEQ ID NO: 1162392
gaucaacugagguuccacc

SEQ ID NO: 1162394 - RNA, 19 nt, Artificial Sequence
  Description of Artificial Sequence: Synthetic oligonucleotide
  Sense strand starting at position 2269 of SEQ ID NO: 916511
agggacucuuguuauuuau

SEQ ID NO: 1162395 - RNA, 19 nt, Artificial Sequence
  Description of Artificial Sequence: Synthetic oligonucleotide
  Antisense strand to SEQ ID NO: 1162394
auaaauaacaagagucccu

SEQ ID NO: 1162396 - RNA, 19 nt, Artificial Sequence
  Description of Artificial Sequence: Synthetic oligonucleotide
  Sense strand starting at position 2406 of SEQ ID NO: 916511
ucaccacuucugggaugua

SEQ ID NO: 1162397 - RNA, 19 nt, Artificial Sequence
  Description of Artificial Sequence: Synthetic oligonucleotide
  Antisense strand to SEQ ID NO: 1162396
uacaucccagaagugguga

SEQ ID NO: 1162398 - RNA, 19 nt, Artificial Sequence
  Description of Artificial Sequence: Synthetic oligonucleotide
  Sense strand starting at position 2409 of SEQ ID NO: 916511
ccacuucugggauguauga

SEQ ID NO: 1162399 - RNA, 19 nt, Artificial Sequence
  Description of Artificial Sequence: Synthetic oligonucleotide
  Antisense strand to SEQ ID NO: 1162398
ucauacaucccagaagugg

SEQ ID NO: 1162400 - RNA, 19 nt, Artificial Sequence
  Description of Artificial Sequence: Synthetic oligonucleotide
  Sense strand starting at position 2416 of SEQ ID NO: 916511
ugggauguaugaucucaga

SEQ ID NO: 1162401 - RNA, 19 nt, Artificial Sequence
  Description of Artificial Sequence: Synthetic oligonucleotide
  Antisense strand to SEQ ID NO: 1162400
ucugagaucauacauccca

SEQ ID NO: 1162402 - RNA, 19 nt, Artificial Sequence
  Description of Artificial Sequence: Synthetic oligonucleotide
  Sense strand starting at position 2533 of SEQ ID NO: 916511
guuagaucagcuuagaauu

SEQ ID NO: 1162403 - RNA, 19 nt, Artificial Sequence
  Description of Artificial Sequence: Synthetic oligonucleotide
  Antisense strand to SEQ ID NO: 1162402
aauucuaagcugaucuaac

SEQ ID NO: 1162404 - RNA, 19 nt, Artificial Sequence
  Description of Artificial Sequence: Synthetic oligonucleotide
  Sense strand starting at position 3508 of SEQ ID NO: 916511
aaccgauucuugguaagca

SEQ ID NO: 1162405 - RNA, 19 nt, Artificial Sequence
  Description of Artificial Sequence: Synthetic oligonucleotide
  Antisense strand to SEQ ID NO: 1162404
ugcuuaccaagaaucgguu

SEQ ID NO: 1162406 - RNA, 19 nt, Artificial Sequence
  Description of Artificial Sequence: Synthetic oligonucleotide
  Sense strand starting at position 3512 of SEQ ID NO: 916511
gauucuugguaagcauaca

SEQ ID NO: 1162407 - RNA, 19 nt, Artificial Sequence
  Description of Artificial Sequence: Synthetic oligonucleotide
  Antisense strand to SEQ ID NO: 1162406
uguaugcuuaccaagaauc

SEQ ID NO: 1162408 - RNA, 19 nt, Artificial Sequence
  Description of Artificial Sequence: Synthetic oligonucleotide
  Sense strand starting at position 3547 of SEQ ID NO: 916511
uaugcagguguccaagaau

SEQ ID NO: 1162409 - RNA, 19 nt, Artificial Sequence
  Description of Artificial Sequence: Synthetic oligonucleotide
  Antisense strand to SEQ ID NO: 1162408
auucuuggacaccugcaua

SEQ ID NO: 1162410 - RNA, 19 nt, Artificial Sequence
  Description of Artificial Sequence: Synthetic oligonucleotide
  Sense strand starting at position 3550 of SEQ ID NO: 916511
gcagguguccaagaauauu

SEQ ID NO: 1162411 - RNA, 19 nt, Artificial Sequence
  Description of Artificial Sequence: Synthetic oligonucleotide
  Antisense strand to SEQ ID NO: 1162410
aauauucuuggacaccugc

SEQ ID NO: 1162412 - RNA, 19 nt, Artificial Sequence
  Description of Artificial Sequence: Synthetic oligonucleotide
  Sense strand starting at position 3553 of SEQ ID NO: 916511
gguguccaagaauauucua

SEQ ID NO: 1162413 - RNA, 19 nt, Artificial Sequence
  Description of Artificial Sequence: Synthetic oligonucleotide
  Antisense strand to SEQ ID NO: 1162412
uagaauauucuuggacacc

SEQ ID NO: 1162414 - RNA, 19 nt, Artificial Sequence
  Description of Artificial Sequence: Synthetic oligonucleotide
  Sense strand starting at position 3561 of SEQ ID NO: 916511
agaauauucuagcugugaa

SEQ ID NO: 1162415 - RNA, 19 nt, Artificial Sequence
  Description of Artificial Sequence: Synthetic oligonucleotide
  Antisense strand to SEQ ID NO: 1162414
uucacagcuagaauauucu

SEQ ID NO: 1162416 - RNA, 19 nt, Artificial Sequence
  Description of Artificial Sequence: Synthetic oligonucleotide
  Sense strand starting at position 3564 of SEQ ID NO: 916511
auauucuagcugugaacau

SEQ ID NO: 1162417 - RNA, 19 nt, Artificial Sequence
  Description of Artificial Sequence: Synthetic oligonucleotide
  Antisense strand to SEQ ID NO: 1162416
auguucacagcuagaauau

SEQ ID NO: 1162418 - RNA, 19 nt, Artificial Sequence
  Description of Artificial Sequence: Synthetic oligonucleotide
  Sense strand starting at position 3595 of SEQ ID NO: 916511
ggacaucaaucaguaaggu

SEQ ID NO: 1162419 - RNA, 19 nt, Artificial Sequence
  Description of Artificial Sequence: Synthetic oligonucleotide
  Antisense strand to SEQ ID NO: 1162418
accuuacugauugaugucc

SEQ ID NO: 1162420 - RNA, 19 nt, Artificial Sequence
  Description of Artificial Sequence: Synthetic oligonucleotide
  Sense strand starting at position 3712 of SEQ ID NO: 916511
agaagcaugauguaugagu

SEQ ID NO: 1162421 - RNA, 19 nt, Artificial Sequence
  Description of Artificial Sequence: Synthetic oligonucleotide
  Antisense strand to SEQ ID NO: 1162420
acucauacaucaugcuucu

SEQ ID NO: 1162422 - RNA, 19 nt, Artificial Sequence
  Description of Artificial Sequence: Synthetic oligonucleotide
  Sense strand starting at position 3714 of SEQ ID NO: 916511
aagcaugauguaugaguuu

SEQ ID NO: 1162423 - RNA, 19 nt, Artificial Sequence
  Description of Artificial Sequence: Synthetic oligonucleotide
  Antisense strand to SEQ ID NO: 1162422
aaacucauacaucaugcuu

SEQ ID NO: 1162424 - RNA, 19 nt, Artificial Sequence
  Description of Artificial Sequence: Synthetic oligonucleotide
  Sense strand starting at position 3754 of SEQ ID NO: 916511
accguaaacugggugacuu

SEQ ID NO: 1162425 - RNA, 19 nt, Artificial Sequence
  Description of Artificial Sequence: Synthetic oligonucleotide
  Antisense strand to SEQ ID NO: 1162424
aagucacccaguuuacggu

SEQ ID NO: 1162426 - RNA, 19 nt, Artificial Sequence
  Description of Artificial Sequence: Synthetic oligonucleotide
  Sense strand starting at position 3755 of SEQ ID NO: 916511
ccguaaacugggugacuua

SEQ ID NO: 1162427 - RNA, 19 nt, Artificial Sequence
  Description of Artificial Sequence: Synthetic oligonucleotide
  Antisense strand to SEQ ID NO: 1162426
uaagucacccaguuuacgg

SEQ ID NO: 1162428 - RNA, 19 nt, Artificial Sequence
  Description of Artificial Sequence: Synthetic oligonucleotide
  Sense strand starting at position 3756 of SEQ ID NO: 916511
cguaaacugggugacuuaa

SEQ ID NO: 1162429 - RNA, 19 nt, Artificial Sequence
  Description of Artificial Sequence: Synthetic oligonucleotide
  Antisense strand to SEQ ID NO: 1162428
uuaagucacccaguuuacg

SEQ ID NO: 1162430 - RNA, 19 nt, Artificial Sequence
  Description of Artificial Sequence: Synthetic oligonucleotide
  Sense strand starting at position 3956 of SEQ ID NO: 916511
cccauauuccaauggaguu

SEQ ID NO: 1162431 - RNA, 19 nt, Artificial Sequence
  Description of Artificial Sequence: Synthetic oligonucleotide
  Antisense strand to SEQ ID NO: 1162430
aacuccauuggaauauggg

SEQ ID NO: 1162432 - RNA, 19 nt, Artificial Sequence
  Description of Artificial Sequence: Synthetic oligonucleotide
  Sense strand starting at position 220 of SEQ ID NO: 916512
agcagcuucuccuaagauc

SEQ ID NO: 1162433 - RNA, 19 nt, Artificial Sequence
  Description of Artificial Sequence: Synthetic oligonucleotide
  Antisense strand to SEQ ID NO: 1162432
gaucuuaggagaagcugcu

SEQ ID NO: 1162434 - RNA, 19 nt, Artificial Sequence
  Description of Artificial Sequence: Synthetic oligonucleotide
  Sense strand starting at position 233 of SEQ ID NO: 916512
aagaucuagucuuccgaag

SEQ ID NO: 1162435 - RNA, 19 nt, Artificial Sequence
  Description of Artificial Sequence: Synthetic oligonucleotide
  Antisense strand to SEQ ID NO: 1162434
cuucggaagacuagaucuu

SEQ ID NO: 1162436 - RNA, 19 nt, Artificial Sequence
  Description of Artificial Sequence: Synthetic oligonucleotide
  Sense strand starting at position 252 of SEQ ID NO: 916512
ggucguuuccaggcaagcu

SEQ ID NO: 1162437 - RNA, 19 nt, Artificial Sequence
  Description of Artificial Sequence: Synthetic oligonucleotide
  Antisense strand to SEQ ID NO: 1162436
agcuugccuggaaacgacc

SEQ ID NO: 1162438 - RNA, 19 nt, Artificial Sequence
  Description of Artificial Sequence: Synthetic oligonucleotide
  Sense strand starting at position 253 of SEQ ID NO: 916512
gucguuuccaggcaagcua

SEQ ID NO: 1162439 - RNA, 19 nt, Artificial Sequence
  Description of Artificial Sequence: Synthetic oligonucleotide
  Antisense strand to SEQ ID NO: 1162438
uagcuugccuggaaacgac

SEQ ID NO: 1162440 - RNA, 19 nt, Artificial Sequence
  Description of Artificial Sequence: Synthetic oligonucleotide
  Sense strand starting at position 268 of SEQ ID NO: 916512
gcuagagccuuucucauaa

SEQ ID NO: 1162441 - RNA, 19 nt, Artificial Sequence
  Description of Artificial Sequence: Synthetic oligonucleotide
  Antisense strand to SEQ ID NO: 1162440
uuaugagaaaggcucuagc

SEQ ID NO: 1162442 - RNA, 19 nt, Artificial Sequence
  Description of Artificial Sequence: Synthetic oligonucleotide
  Sense strand starting at position 309 of SEQ ID NO: 916512
gucccugucuuccacacaa

SEQ ID NO: 1162443 - RNA, 19 nt, Artificial Sequence
  Description of Artificial Sequence: Synthetic oligonucleotide
  Antisense strand to SEQ ID NO: 1162442
uuguguggaagacagggac

SEQ ID NO: 1162444 - RNA, 19 nt, Artificial Sequence
  Description of Artificial Sequence: Synthetic oligonucleotide
  Sense strand starting at position 399 of SEQ ID NO: 916512
ugccauuggucuggaugaa

SEQ ID NO: 1162445 - RNA, 19 nt, Artificial Sequence
  Description of Artificial Sequence: Synthetic oligonucleotide
  Antisense strand to SEQ ID NO: 1162444
uucauccagaccaauggca

SEQ ID NO: 1162446 - RNA, 19 nt, Artificial Sequence
  Description of Artificial Sequence: Synthetic oligonucleotide
  Sense strand starting at position 400 of SEQ ID NO: 916512
gccauuggucuggaugaag

SEQ ID NO: 1162447 - RNA, 19 nt, Artificial Sequence
  Description of Artificial Sequence: Synthetic oligonucleotide
  Antisense strand to SEQ ID NO: 1162446
cuucauccagaccaauggc

SEQ ID NO: 1162448 - RNA, 19 nt, Artificial Sequence
  Description of Artificial Sequence: Synthetic oligonucleotide
  Sense strand starting at position 434 of SEQ ID NO: 916512
gccaaauacuaguuagagu

SEQ ID NO: 1162449 - RNA, 19 nt, Artificial Sequence
  Description of Artificial Sequence: Synthetic oligonucleotide
  Antisense strand to SEQ ID NO: 1162448
acucuaacuaguauuuggc

SEQ ID NO: 1162450 - RNA, 19 nt, Artificial Sequence
  Description of Artificial Sequence: Synthetic oligonucleotide
  Sense strand starting at position 542 of SEQ ID NO: 916512
gaggcaucaugauuaguac

SEQ ID NO: 1162451 - RNA, 19 nt, Artificial Sequence
  Description of Artificial Sequence: Synthetic oligonucleotide
  Antisense strand to SEQ ID NO: 1162450
guacuaaucaugaugccuc

SEQ ID NO: 1162452 - RNA, 19 nt, Artificial Sequence
  Description of Artificial Sequence: Synthetic oligonucleotide
  Sense strand starting at position 554 of SEQ ID NO: 916512
uuaguacuucuagggagag

SEQ ID NO: 1162453 - RNA, 19 nt, Artificial Sequence
  Description of Artificial Sequence: Synthetic oligonucleotide
  Antisense strand to SEQ ID NO: 1162452
cucucccuagaaguacuaa

SEQ ID NO: 1162454 - RNA, 19 nt, Artificial Sequence
  Description of Artificial Sequence: Synthetic oligonucleotide
  Sense strand starting at position 878 of SEQ ID NO: 916512
ccgccugguccaugaaagu

SEQ ID NO: 1162455 - RNA, 19 nt, Artificial Sequence
  Description of Artificial Sequence: Synthetic oligonucleotide
  Antisense strand to SEQ ID NO: 1162454
acuuucauggaccaggcgg

SEQ ID NO: 1162456 - RNA, 19 nt, Artificial Sequence
  Description of Artificial Sequence: Synthetic oligonucleotide
  Sense strand starting at position 1074 of SEQ ID NO: 916512
gaaguauucgcgcagcccu

SEQ ID NO: 1162457 - RNA, 19 nt, Artificial Sequence
  Description of Artificial Sequence: Synthetic oligonucleotide
  Antisense strand to SEQ ID NO: 1162456
agggcugcgcgaauacuuc

SEQ ID NO: 1162458 - RNA, 19 nt, Artificial Sequence
  Description of Artificial Sequence: Synthetic oligonucleotide
  Sense strand starting at position 2390 of SEQ ID NO: 916512
ggucccugcuguccagaau

SEQ ID NO: 1162459 - RNA, 19 nt, Artificial Sequence
  Description of Artificial Sequence: Synthetic oligonucleotide
  Antisense strand to SEQ ID NO: 1162458
auucuggacagcagggacc

SEQ ID NO: 1162460 - RNA, 19 nt, Artificial Sequence
  Description of Artificial Sequence: Synthetic oligonucleotide
  Sense strand starting at position 2391 of SEQ ID NO: 916512
gucccugcuguccagaauu

SEQ ID NO: 1162461 - RNA, 19 nt, Artificial Sequence
  Description of Artificial Sequence: Synthetic oligonucleotide
  Antisense strand to SEQ ID NO: 1162460
aauucuggacagcagggac

SEQ ID NO: 1162462 - RNA, 19 nt, Artificial Sequence
  Description of Artificial Sequence: Synthetic oligonucleotide
  Sense strand starting at position 2393 of SEQ ID NO: 916512
cccugcuguccagaauuga

SEQ ID NO: 1162463 - RNA, 19 nt, Artificial Sequence
  Description of Artificial Sequence: Synthetic oligonucleotide
  Antisense strand to SEQ ID NO: 1162462
ucaauucuggacagcaggg

SEQ ID NO: 1162464 - RNA, 19 nt, Artificial Sequence
  Description of Artificial Sequence: Synthetic oligonucleotide
  Sense strand starting at position 2440 of SEQ ID NO: 916512
gggagauagcccuagugcu

SEQ ID NO: 1162465 - RNA, 19 nt, Artificial Sequence
  Description of Artificial Sequence: Synthetic oligonucleotide
  Antisense strand to SEQ ID NO: 1162464
agcacuagggcuaucuccc

SEQ ID NO: 1162466 - RNA, 19 nt, Artificial Sequence
  Description of Artificial Sequence: Synthetic oligonucleotide
  Sense strand starting at position 2768 of SEQ ID NO: 916512
acccuauggucuguugaga

SEQ ID NO: 1162467 - RNA, 19 nt, Artificial Sequence
  Description of Artificial Sequence: Synthetic oligonucleotide
  Antisense strand to SEQ ID NO: 1162466
ucucaacagaccauagggu

SEQ ID NO: 1162468 - RNA, 19 nt, Artificial Sequence
  Description of Artificial Sequence: Synthetic oligonucleotide
  Sense strand starting at position 2896 of SEQ ID NO: 916512
ucagacuccuguccugauu

SEQ ID NO: 1162469 - RNA, 19 nt, Artificial Sequence
  Description of Artificial Sequence: Synthetic oligonucleotide
  Antisense strand to SEQ ID NO: 1162468
aaucaggacaggagucuga

SEQ ID NO: 1162470 - RNA, 19 nt, Artificial Sequence
  Description of Artificial Sequence: Synthetic oligonucleotide
  Sense strand starting at position 2903 of SEQ ID NO: 916512
ccuguccugauucgggaaa

SEQ ID NO: 1162471 - RNA, 19 nt, Artificial Sequence
  Description of Artificial Sequence: Synthetic oligonucleotide
  Antisense strand to SEQ ID NO: 1162470
uuucccgaaucaggacagg

SEQ ID NO: 1162472 - RNA, 19 nt, Artificial Sequence
  Description of Artificial Sequence: Synthetic oligonucleotide
  Sense strand starting at position 3120 of SEQ ID NO: 916512
uggaaugacuucccucagu

SEQ ID NO: 1162473 - RNA, 19 nt, Artificial Sequence
  Description of Artificial Sequence: Synthetic oligonucleotide
  Antisense strand to SEQ ID NO: 1162472
acugagggaagucauucca

SEQ ID NO: 1162474 - RNA, 19 nt, Artificial Sequence
  Description of Artificial Sequence: Synthetic oligonucleotide
  Sense strand starting at position 3294 of SEQ ID NO: 916512
cugagaaaguauucugguu

SEQ ID NO: 1162475 - RNA, 19 nt, Artificial Sequence
  Description of Artificial Sequence: Synthetic oligonucleotide
  Antisense strand to SEQ ID NO: 1162474
aaccagaauacuuucucag

SEQ ID NO: 1162476 - RNA, 19 nt, Artificial Sequence
  Description of Artificial Sequence: Synthetic oligonucleotide
  Sense strand starting at position 3574 of SEQ ID NO: 916512
cuuaauccauccgguguaa

SEQ ID NO: 1162477 - RNA, 19 nt, Artificial Sequence
  Description of Artificial Sequence: Synthetic oligonucleotide
  Antisense strand to SEQ ID NO: 1162476
uuacaccggauggauuaag

SEQ ID NO: 1162478 - RNA, 19 nt, Artificial Sequence
  Description of Artificial Sequence: Synthetic oligonucleotide
  Sense strand starting at position 3576 of SEQ ID NO: 916512
uaauccauccgguguaauc

SEQ ID NO: 1162479 - RNA, 19 nt, Artificial Sequence
  Description of Artificial Sequence: Synthetic oligonucleotide
  Antisense strand to SEQ ID NO: 1162478
gauuacaccggauggauua

SEQ ID NO: 1162480 - RNA, 19 nt, Artificial Sequence
  Description of Artificial Sequence: Synthetic oligonucleotide
  Sense strand starting at position 3586 of SEQ ID NO: 916512
gguguaauccagugacaac

SEQ ID NO: 1162481 - RNA, 19 nt, Artificial Sequence
  Description of Artificial Sequence: Synthetic oligonucleotide
  Antisense strand to SEQ ID NO: 1162480
guugucacuggauuacacc

SEQ ID NO: 1162482 - RNA, 19 nt, Artificial Sequence
  Description of Artificial Sequence: Synthetic oligonucleotide
  Sense strand starting at position 3662 of SEQ ID NO: 916512
uuuauuccugggcaucaua

SEQ ID NO: 1162483 - RNA, 19 nt, Artificial Sequence
  Description of Artificial Sequence: Synthetic oligonucleotide
  Antisense strand to SEQ ID NO: 1162482
uaugaugcccaggaauaaa

SEQ ID NO: 1162484 - RNA, 19 nt, Artificial Sequence
  Description of Artificial Sequence: Synthetic oligonucleotide
  Sense strand starting at position 3765 of SEQ ID NO: 916512
gugagagacuuacaguaau

SEQ ID NO: 1162485 - RNA, 19 nt, Artificial Sequence
  Description of Artificial Sequence: Synthetic oligonucleotide
  Antisense strand to SEQ ID NO: 1162484
auuacuguaagucucucac

SEQ ID NO: 1162486 - RNA, 19 nt, Artificial Sequence
  Description of Artificial Sequence: Synthetic oligonucleotide
  Sense strand starting at position 3803 of SEQ ID NO: 916512
ugggaaugcucagcaggua

SEQ ID NO: 1162487 - RNA, 19 nt, Artificial Sequence
  Description of Artificial Sequence: Synthetic oligonucleotide
  Antisense strand to SEQ ID NO: 1162486
uaccugcugagcauuccca

SEQ ID NO: 1162488 - RNA, 19 nt, Artificial Sequence
  Description of Artificial Sequence: Synthetic oligonucleotide
  Sense strand starting at position 3804 of SEQ ID NO: 916512
gggaaugcucagcagguau

SEQ ID NO: 1162489 - RNA, 19 nt, Artificial Sequence
  Description of Artificial Sequence: Synthetic oligonucleotide
  Antisense strand to SEQ ID NO: 1162488
auaccugcugagcauuccc

SEQ ID NO: 1162490 - RNA, 19 nt, Artificial Sequence
  Description of Artificial Sequence: Synthetic oligonucleotide
  Sense strand starting at position 3806 of SEQ ID NO: 916512
gaaugcucagcagguauau

SEQ ID NO: 1162491 - RNA, 19 nt, Artificial Sequence
  Description of Artificial Sequence: Synthetic oligonucleotide
  Antisense strand to SEQ ID NO: 1162490
auauaccugcugagcauuc

SEQ ID NO: 1162492 - RNA, 19 nt, Artificial Sequence
  Description of Artificial Sequence: Synthetic oligonucleotide
  Sense strand starting at position 3973 of SEQ ID NO: 916512
cauuccaguuuguguugua

SEQ ID NO: 1162493 - RNA, 19 nt, Artificial Sequence
  Description of Artificial Sequence: Synthetic oligonucleotide
  Antisense strand to SEQ ID NO: 1162492
uacaacacaaacuggaaug

SEQ ID NO: 1162494 - RNA, 19 nt, Artificial Sequence
  Description of Artificial Sequence: Synthetic oligonucleotide
  Sense strand starting at position 3976 of SEQ ID NO: 916512
uccaguuuguguuguagca

SEQ ID NO: 1162495 - RNA, 19 nt, Artificial Sequence
  Description of Artificial Sequence: Synthetic oligonucleotide
  Antisense strand to SEQ ID NO: 1162494
ugcuacaacacaaacugga

SEQ ID NO: 1162496 - RNA, 19 nt, Artificial Sequence
  Description of Artificial Sequence: Synthetic oligonucleotide
  Sense strand starting at position 3978 of SEQ ID NO: 916512
caguuuguguuguagcaga

SEQ ID NO: 1162497 - RNA, 19 nt, Artificial Sequence
  Description of Artificial Sequence: Synthetic oligonucleotide
  Antisense strand to SEQ ID NO: 1162496
ucugcuacaacacaaacug

SEQ ID NO: 1162498 - RNA, 19 nt, Artificial Sequence
  Description of Artificial Sequence: Synthetic oligonucleotide
  Sense strand starting at position 77 of SEQ ID NO: 916513
auguuuaaaugguccaaau

SEQ ID NO: 1162499 - RNA, 19 nt, Artificial Sequence
  Description of Artificial Sequence: Synthetic oligonucleotide
  Antisense strand to SEQ ID NO: 1162498
auuuggaccauuuaaacau

SEQ ID NO: 1162500 - RNA, 19 nt, Artificial Sequence
  Description of Artificial Sequence: Synthetic oligonucleotide
  Sense strand starting at position 79 of SEQ ID NO: 916513
guuuaaaugguccaaauau

SEQ ID NO: 1162501 - RNA, 19 nt, Artificial Sequence
  Description of Artificial Sequence: Synthetic oligonucleotide
  Antisense strand to SEQ ID NO: 1162500
auauuuggaccauuuaaac

SEQ ID NO: 1162502 - RNA, 19 nt, Artificial Sequence
  Description of Artificial Sequence: Synthetic oligonucleotide
  Sense strand starting at position 171 of SEQ ID NO: 916513
aguauuagguaagucaaca

SEQ ID NO: 1162503 - RNA, 19 nt, Artificial Sequence
  Description of Artificial Sequence: Synthetic oligonucleotide
  Antisense strand to SEQ ID NO: 1162502
uguugacuuaccuaauacu

SEQ ID NO: 1162504 - RNA, 19 nt, Artificial Sequence
  Description of Artificial Sequence: Synthetic oligonucleotide
  Sense strand starting at position 406 of SEQ ID NO: 916513
ugauaucacugcucaaguu

SEQ ID NO: 1162505 - RNA, 19 nt, Artificial Sequence
  Description of Artificial Sequence: Synthetic oligonucleotide
  Antisense strand to SEQ ID NO: 1162504
aacuugagcagugauauca

SEQ ID NO: 1162506 - RNA, 19 nt, Artificial Sequence
  Description of Artificial Sequence: Synthetic oligonucleotide
  Sense strand starting at position 503 of SEQ ID NO: 916513
uuauaugaacccugaaguu

SEQ ID NO: 1162507 - RNA, 19 nt, Artificial Sequence
  Description of Artificial Sequence: Synthetic oligonucleotide
  Antisense strand to SEQ ID NO: 1162506
aacuucaggguucauauaa

SEQ ID NO: 1162508 - RNA, 19 nt, Artificial Sequence
  Description of Artificial Sequence: Synthetic oligonucleotide
  Sense strand starting at position 655 of SEQ ID NO: 916513
ccuaguuugccauaucuua

SEQ ID NO: 1162509 - RNA, 19 nt, Artificial Sequence
  Description of Artificial Sequence: Synthetic oligonucleotide
  Antisense strand to SEQ ID NO: 1162508
uaagauauggcaaacuagg

SEQ ID NO: 1162510 - RNA, 19 nt, Artificial Sequence
  Description of Artificial Sequence: Synthetic oligonucleotide
  Sense strand starting at position 682 of SEQ ID NO: 916513
uuuagucuauugguagaaa

SEQ ID NO: 1162511 - RNA, 19 nt, Artificial Sequence
  Description of Artificial Sequence: Synthetic oligonucleotide
  Antisense strand to SEQ ID NO: 1162510
uuucuaccaauagacuaaa

SEQ ID NO: 1162512 - RNA, 19 nt, Artificial Sequence
  Description of Artificial Sequence: Synthetic oligonucleotide
  Sense strand starting at position 793 of SEQ ID NO: 916513
agcuuugacgacuacucau

SEQ ID NO: 1162513 - RNA, 19 nt, Artificial Sequence
  Description of Artificial Sequence: Synthetic oligonucleotide
  Antisense strand to SEQ ID NO: 1162512
augaguagucgucaaagcu

SEQ ID NO: 1162514 - RNA, 19 nt, Artificial Sequence
  Description of Artificial Sequence: Synthetic oligonucleotide
  Sense strand starting at position 1037 of SEQ ID NO: 916513
cauauaguuugacucgaaa

SEQ ID NO: 1162515 - RNA, 19 nt, Artificial Sequence
  Description of Artificial Sequence: Synthetic oligonucleotide
  Antisense strand to SEQ ID NO: 1162514
uuucgagucaaacuauaug

SEQ ID NO: 1162516 - RNA, 19 nt, Artificial Sequence
  Description of Artificial Sequence: Synthetic oligonucleotide
  Sense strand starting at position 1049 of SEQ ID NO: 916513
cucgaaauagcccagugua

SEQ ID NO: 1162517 - RNA, 19 nt, Artificial Sequence
  Description of Artificial Sequence: Synthetic oligonucleotide
  Antisense strand to SEQ ID NO: 1162516
uacacugggcuauuucgag

SEQ ID NO: 1162518 - RNA, 19 nt, Artificial Sequence
  Description of Artificial Sequence: Synthetic oligonucleotide
  Sense strand starting at position 2480 of SEQ ID NO: 916513
acgagcacucacuguaaua

SEQ ID NO: 1162519 - RNA, 19 nt, Artificial Sequence
  Description of Artificial Sequence: Synthetic oligonucleotide
  Antisense strand to SEQ ID NO: 1162518
uauuacagugagugcucgu

SEQ ID NO: 1162520 - RNA, 19 nt, Artificial Sequence
  Description of Artificial Sequence: Synthetic oligonucleotide
  Sense strand starting at position 2487 of SEQ ID NO: 916513
cucacuguaauacggagaa

SEQ ID NO: 1162521 - RNA, 19 nt, Artificial Sequence
  Description of Artificial Sequence: Synthetic oligonucleotide
  Antisense strand to SEQ ID NO: 1162520
uucuccguauuacagugag

SEQ ID NO: 1162522 - RNA, 19 nt, Artificial Sequence
  Description of Artificial Sequence: Synthetic oligonucleotide
  Sense strand starting at position 2798 of SEQ ID NO: 916513
aggugccaccucugaugaa

SEQ ID NO: 1162523 - RNA, 19 nt, Artificial Sequence
  Description of Artificial Sequence: Synthetic oligonucleotide
  Antisense strand to SEQ ID NO: 1162522
uucaucagagguggcaccu

SEQ ID NO: 1162524 - RNA, 19 nt, Artificial Sequence
  Description of Artificial Sequence: Synthetic oligonucleotide
  Sense strand starting at position 2821 of SEQ ID NO: 916513
augucaguccuagauguuu

SEQ ID NO: 1162525 - RNA, 19 nt, Artificial Sequence
  Description of Artificial Sequence: Synthetic oligonucleotide
  Antisense strand to SEQ ID NO: 1162524
aaacaucuaggacugacau

SEQ ID NO: 1162526 - RNA, 19 nt, Artificial Sequence
  Description of Artificial Sequence: Synthetic oligonucleotide
  Sense strand starting at position 2826 of SEQ ID NO: 916513
aguccuagauguuuaauua

SEQ ID NO: 1162527 - RNA, 19 nt, Artificial Sequence
  Description of Artificial Sequence: Synthetic oligonucleotide
  Antisense strand to SEQ ID NO: 1162526
uaauuaaacaucuaggacu

SEQ ID NO: 1162528 - RNA, 19 nt, Artificial Sequence
  Description of Artificial Sequence: Synthetic oligonucleotide
  Sense strand starting at position 2827 of SEQ ID NO: 916513
guccuagauguuuaauuac

SEQ ID NO: 1162529 - RNA, 19 nt, Artificial Sequence
  Description of Artificial Sequence: Synthetic oligonucleotide
  Antisense strand to SEQ ID NO: 1162528
guaauuaaacaucuaggac

SEQ ID NO: 1162530 - RNA, 19 nt, Artificial Sequence
  Description of Artificial Sequence: Synthetic oligonucleotide
  Sense strand starting at position 2854 of SEQ ID NO: 916513
gccuguaguugccuaauuu

SEQ ID NO: 1162531 - RNA, 19 nt, Artificial Sequence
  Description of Artificial Sequence: Synthetic oligonucleotide
  Antisense strand to SEQ ID NO: 1162530
aaauuaggcaacuacaggc

SEQ ID NO: 1162532 - RNA, 19 nt, Artificial Sequence
  Description of Artificial Sequence: Synthetic oligonucleotide
  Sense strand starting at position 2871 of SEQ ID NO: 916513
uuuccuuggcacugauaac

SEQ ID NO: 1162533 - RNA, 19 nt, Artificial Sequence
  Description of Artificial Sequence: Synthetic oligonucleotide
  Antisense strand to SEQ ID NO: 1162532
guuaucagugccaaggaaa

SEQ ID NO: 1162534 - RNA, 19 nt, Artificial Sequence
  Description of Artificial Sequence: Synthetic oligonucleotide
  Sense strand starting at position 2881 of SEQ ID NO: 916513
acugauaacuccuugggua

SEQ ID NO: 1162535 - RNA, 19 nt, Artificial Sequence
  Description of Artificial Sequence: Synthetic oligonucleotide
  Antisense strand to SEQ ID NO: 1162534
uacccaaggaguuaucagu

SEQ ID NO: 1162536 - RNA, 19 nt, Artificial Sequence
  Description of Artificial Sequence: Synthetic oligonucleotide
  Sense strand starting at position 2883 of SEQ ID NO: 916513
ugauaacuccuuggguaau

SEQ ID NO: 1162537 - RNA, 19 nt, Artificial Sequence
  Description of Artificial Sequence: Synthetic oligonucleotide
  Antisense strand to SEQ ID NO: 1162536
auuacccaaggaguuauca

SEQ ID NO: 1162538 - RNA, 19 nt, Artificial Sequence
  Description of Artificial Sequence: Synthetic oligonucleotide
  Sense strand starting at position 2885 of SEQ ID NO: 916513
auaacuccuuggguaauca

SEQ ID NO: 1162539 - RNA, 19 nt, Artificial Sequence
  Description of Artificial Sequence: Synthetic oligonucleotide
  Antisense strand to SEQ ID NO: 1162538
ugauuacccaaggaguuau

SEQ ID NO: 1162540 - RNA, 19 nt, Artificial Sequence
  Description of Artificial Sequence: Synthetic oligonucleotide
  Sense strand starting at position 2992 of SEQ ID NO: 916513
ccuggauauguaggguauu

SEQ ID NO: 1162541 - RNA, 19 nt, Artificial Sequence
  Description of Artificial Sequence: Synthetic oligonucleotide
  Antisense strand to SEQ ID NO: 1162540
aauacccuacauauccagg

SEQ ID NO: 1162542 - RNA, 19 nt, Artificial Sequence
  Description of Artificial Sequence: Synthetic oligonucleotide
  Sense strand starting at position 3005 of SEQ ID NO: 916513
gguauuaaguaguuacuua

SEQ ID NO: 1162543 - RNA, 19 nt, Artificial Sequence
  Description of Artificial Sequence: Synthetic oligonucleotide
  Antisense strand to SEQ ID NO: 1162542
uaaguaacuacuuaauacc

SEQ ID NO: 1162544 - RNA, 19 nt, Artificial Sequence
  Description of Artificial Sequence: Synthetic oligonucleotide
  Sense strand starting at position 3009 of SEQ ID NO: 916513
uuaaguaguuacuuacgaa

SEQ ID NO: 1162545 - RNA, 19 nt, Artificial Sequence
  Description of Artificial Sequence: Synthetic oligonucleotide
  Antisense strand to SEQ ID NO: 1162544
uucguaaguaacuacuuaa

SEQ ID NO: 1162546 - RNA, 19 nt, Artificial Sequence
  Description of Artificial Sequence: Synthetic oligonucleotide
  Sense strand starting at position 3123 of SEQ ID NO: 916513
gugaacuaaagugauggua

SEQ ID NO: 1162547 - RNA, 19 nt, Artificial Sequence
  Description of Artificial Sequence: Synthetic oligonucleotide
  Antisense strand to SEQ ID NO: 1162546
uaccaucacuuuaguucac

SEQ ID NO: 1162548 - RNA, 19 nt, Artificial Sequence
  Description of Artificial Sequence: Synthetic oligonucleotide
  Sense strand starting at position 3126 of SEQ ID NO: 916513
aacuaaagugaugguaauu

SEQ ID NO: 1162549 - RNA, 19 nt, Artificial Sequence
  Description of Artificial Sequence: Synthetic oligonucleotide
  Antisense strand to SEQ ID NO: 1162548
aauuaccaucacuuuaguu

SEQ ID NO: 1162550 - RNA, 19 nt, Artificial Sequence
  Description of Artificial Sequence: Synthetic oligonucleotide
  Sense strand starting at position 3135 of SEQ ID NO: 916513
gaugguaauuuguacauca

SEQ ID NO: 1162551 - RNA, 19 nt, Artificial Sequence
  Description of Artificial Sequence: Synthetic oligonucleotide
  Antisense strand to SEQ ID NO: 1162550
ugauguacaaauuaccauc

SEQ ID NO: 1162552 - RNA, 19 nt, Artificial Sequence
  Description of Artificial Sequence: Synthetic oligonucleotide
  Sense strand starting at position 3327 of SEQ ID NO: 916513
gggcaaaugucacccuuaa

SEQ ID NO: 1162553 - RNA, 19 nt, Artificial Sequence
  Description of Artificial Sequence: Synthetic oligonucleotide
  Antisense strand to SEQ ID NO: 1162552
uuaagggugacauuugccc

SEQ ID NO: 1162554 - RNA, 19 nt, Artificial Sequence
  Description of Artificial Sequence: Synthetic oligonucleotide
  Sense strand starting at position 3341 of SEQ ID NO: 916513
cuuaaugcauuggcaauua

SEQ ID NO: 1162555 - RNA, 19 nt, Artificial Sequence
  Description of Artificial Sequence: Synthetic oligonucleotide
  Antisense strand to SEQ ID NO: 1162554
uaauugccaaugcauuaag

SEQ ID NO: 1162556 - RNA, 19 nt, Artificial Sequence
  Description of Artificial Sequence: Synthetic oligonucleotide
  Sense strand starting at position 3396 of SEQ ID NO: 916513
uggugaauaaauuguaaug

SEQ ID NO: 1162557 - RNA, 19 nt, Artificial Sequence
  Description of Artificial Sequence: Synthetic oligonucleotide
  Antisense strand to SEQ ID NO: 1162556
cauuacaauuuauucacca

SEQ ID NO: 1162558 - RNA, 19 nt, Artificial Sequence
  Description of Artificial Sequence: Synthetic oligonucleotide
  Sense strand starting at position 3469 of SEQ ID NO: 916513
gaaccuagguaguuggaaa

SEQ ID NO: 1162559 - RNA, 19 nt, Artificial Sequence
  Description of Artificial Sequence: Synthetic oligonucleotide
  Antisense strand to SEQ ID NO: 1162558
uuuccaacuaccuagguuc

SEQ ID NO: 1162560 - RNA, 19 nt, Artificial Sequence
  Description of Artificial Sequence: Synthetic oligonucleotide
  Sense strand starting at position 3602 of SEQ ID NO: 916513
aguccaaauguuuguuuaa

SEQ ID NO: 1162561 - RNA, 19 nt, Artificial Sequence
  Description of Artificial Sequence: Synthetic oligonucleotide
  Antisense strand to SEQ ID NO: 1162560
uuaaacaaacauuuggacu

SEQ ID NO: 1162562 - RNA, 19 nt, Artificial Sequence
  Description of Artificial Sequence: Synthetic oligonucleotide
  Sense strand starting at position 3603 of SEQ ID NO: 916513
guccaaauguuuguuuaaa

SEQ ID NO: 1162563 - RNA, 19 nt, Artificial Sequence
  Description of Artificial Sequence: Synthetic oligonucleotide
  Antisense strand to SEQ ID NO: 1162562
uuuaaacaaacauuuggac

SEQ ID NO: 1162564 - RNA, 19 nt, Artificial Sequence
  Description of Artificial Sequence: Synthetic oligonucleotide
  Sense strand starting at position 3662 of SEQ ID NO: 916513
uuagaagcucccuaagugu

SEQ ID NO: 1162565 - RNA, 19 nt, Artificial Sequence
  Description of Artificial Sequence: Synthetic oligonucleotide
  Antisense strand to SEQ ID NO: 1162564
acacuuagggagcuucuaa

SEQ ID NO: 1162566 - RNA, 19 nt, Artificial Sequence
  Description of Artificial Sequence: Synthetic oligonucleotide
  Sense strand starting at position 3665 of SEQ ID NO: 916513
gaagcucccuaaguguaaa

SEQ ID NO: 1162567 - RNA, 19 nt, Artificial Sequence
  Description of Artificial Sequence: Synthetic oligonucleotide
  Antisense strand to SEQ ID NO: 1162566
uuuacacuuagggagcuuc

SEQ ID NO: 1162568 - RNA, 19 nt, Artificial Sequence
  Description of Artificial Sequence: Synthetic oligonucleotide
  Sense strand starting at position 3865 of SEQ ID NO: 916513
auucuaaaggcuugaauaa

SEQ ID NO: 1162569 - RNA, 19 nt, Artificial Sequence
  Description of Artificial Sequence: Synthetic oligonucleotide
  Antisense strand to SEQ ID NO: 1162568
uuauucaagccuuuagaau

SEQ ID NO: 1162570 - RNA, 19 nt, Artificial Sequence
  Description of Artificial Sequence: Synthetic oligonucleotide
  Sense strand starting at position 3913 of SEQ ID NO: 916513
aguuacuaagugcaugaua

SEQ ID NO: 1162571 - RNA, 19 nt, Artificial Sequence
  Description of Artificial Sequence: Synthetic oligonucleotide
  Antisense strand to SEQ ID NO: 1162570
uaucaugcacuuaguaacu

SEQ ID NO: 1162572 - RNA, 19 nt, Artificial Sequence
  Description of Artificial Sequence: Synthetic oligonucleotide
  Sense strand starting at position 3915 of SEQ ID NO: 916513
uuacuaagugcaugauaag

SEQ ID NO: 1162573 - RNA, 19 nt, Artificial Sequence
  Description of Artificial Sequence: Synthetic oligonucleotide
  Antisense strand to SEQ ID NO: 1162572
cuuaucaugcacuuaguaa

SEQ ID NO: 1162574 - RNA, 19 nt, Artificial Sequence
  Description of Artificial Sequence: Synthetic oligonucleotide
  Sense strand starting at position 3916 of SEQ ID NO: 916513
uacuaagugcaugauaagu

SEQ ID NO: 1162575 - RNA, 19 nt, Artificial Sequence
  Description of Artificial Sequence: Synthetic oligonucleotide
  Antisense strand to SEQ ID NO: 1162574
acuuaucaugcacuuagua

SEQ ID NO: 1162576 - RNA, 19 nt, Artificial Sequence
  Description of Artificial Sequence: Synthetic oligonucleotide
  Sense strand starting at position 3939 of SEQ ID NO: 916513
gacacugugcuagauguuu

SEQ ID NO: 1162577 - RNA, 19 nt, Artificial Sequence
  Description of Artificial Sequence: Synthetic oligonucleotide
  Antisense strand to SEQ ID NO: 1162576
aaacaucuagcacaguguc

SEQ ID NO: 1162578 - RNA, 19 nt, Artificial Sequence
  Description of Artificial Sequence: Synthetic oligonucleotide
  Sense strand starting at position 104 of SEQ ID NO: 916514
uugggauagucuuuggaua

SEQ ID NO: 1162579 - RNA, 19 nt, Artificial Sequence
  Description of Artificial Sequence: Synthetic oligonucleotide
  Antisense strand to SEQ ID NO: 1162578
uauccaaagacuaucccaa

SEQ ID NO: 1162580 - RNA, 19 nt, Artificial Sequence
  Description of Artificial Sequence: Synthetic oligonucleotide
  Sense strand starting at position 105 of SEQ ID NO: 916514
ugggauagucuuuggauau

SEQ ID NO: 1162581 - RNA, 19 nt, Artificial Sequence
  Description of Artificial Sequence: Synthetic oligonucleotide
  Antisense strand to SEQ ID NO: 1162580
auauccaaagacuauccca

SEQ ID NO: 1162582 - RNA, 19 nt, Artificial Sequence
  Description of Artificial Sequence: Synthetic oligonucleotide
  Sense strand starting at position 109 of SEQ ID NO: 916514
auagucuuuggauauucuu

SEQ ID NO: 1162583 - RNA, 19 nt, Artificial Sequence
  Description of Artificial Sequence: Synthetic oligonucleotide
  Antisense strand to SEQ ID NO: 1162582
aagaauauccaaagacuau

SEQ ID NO: 1162584 - RNA, 19 nt, Artificial Sequence
  Description of Artificial Sequence: Synthetic oligonucleotide
  Sense strand starting at position 273 of SEQ ID NO: 916514
caguuuaagcacugugaca

SEQ ID NO: 1162585 - RNA, 19 nt, Artificial Sequence
  Description of Artificial Sequence: Synthetic oligonucleotide
  Antisense strand to SEQ ID NO: 1162584
ugucacagugcuuaaacug

SEQ ID NO: 1162586 - RNA, 19 nt, Artificial Sequence
  Description of Artificial Sequence: Synthetic oligonucleotide
  Sense strand starting at position 275 of SEQ ID NO: 916514
guuuaagcacugugacaaa

SEQ ID NO: 1162587 - RNA, 19 nt, Artificial Sequence
  Description of Artificial Sequence: Synthetic oligonucleotide
  Antisense strand to SEQ ID NO: 1162586
uuugucacagugcuuaaac

SEQ ID NO: 1162588 - RNA, 19 nt, Artificial Sequence
  Description of Artificial Sequence: Synthetic oligonucleotide
  Sense strand starting at position 421 of SEQ ID NO: 916514
auguuuaaaugguccaaau

SEQ ID NO: 1162589 - RNA, 19 nt, Artificial Sequence
  Description of Artificial Sequence: Synthetic oligonucleotide
  Antisense strand to SEQ ID NO: 1162588
auuuggaccauuuaaacau

SEQ ID NO: 1162590 - RNA, 19 nt, Artificial Sequence
  Description of Artificial Sequence: Synthetic oligonucleotide
  Sense strand starting at position 423 of SEQ ID NO: 916514
guuuaaaugguccaaauau

SEQ ID NO: 1162591 - RNA, 19 nt, Artificial Sequence
  Description of Artificial Sequence: Synthetic oligonucleotide
  Antisense strand to SEQ ID NO: 1162590
auauuuggaccauuuaaac

SEQ ID NO: 1162592 - RNA, 19 nt, Artificial Sequence
  Description of Artificial Sequence: Synthetic oligonucleotide
  Sense strand starting at position 515 of SEQ ID NO: 916514
aguauuagguaagucaaca

SEQ ID NO: 1162593 - RNA, 19 nt, Artificial Sequence
  Description of Artificial Sequence: Synthetic oligonucleotide
  Antisense strand to SEQ ID NO: 1162592
uguugacuuaccuaauacu

SEQ ID NO: 1162594 - RNA, 19 nt, Artificial Sequence
  Description of Artificial Sequence: Synthetic oligonucleotide
  Sense strand starting at position 750 of SEQ ID NO: 916514
ugauaucacugcucaaguu

SEQ ID NO: 1162595 - RNA, 19 nt, Artificial Sequence
  Description of Artificial Sequence: Synthetic oligonucleotide
  Antisense strand to SEQ ID NO: 1162594
aacuugagcagugauauca

SEQ ID NO: 1162596 - RNA, 19 nt, Artificial Sequence
  Description of Artificial Sequence: Synthetic oligonucleotide
  Sense strand starting at position 847 of SEQ ID NO: 916514
uuauaugaacccugaaguu

SEQ ID NO: 1162597 - RNA, 19 nt, Artificial Sequence
  Description of Artificial Sequence: Synthetic oligonucleotide
  Antisense strand to SEQ ID NO: 1162596
aacuucaggguucauauaa

SEQ ID NO: 1162598 - RNA, 19 nt, Artificial Sequence
  Description of Artificial Sequence: Synthetic oligonucleotide
  Sense strand starting at position 999 of SEQ ID NO: 916514
ccuaguuugccauaucuua

SEQ ID NO: 1162599 - RNA, 19 nt, Artificial Sequence
  Description of Artificial Sequence: Synthetic oligonucleotide
  Antisense strand to SEQ ID NO: 1162598
uaagauauggcaaacuagg

SEQ ID NO: 1162600 - RNA, 19 nt, Artificial Sequence
  Description of Artificial Sequence: Synthetic oligonucleotide
  Sense strand starting at position 1026 of SEQ ID NO: 916514
uuuagucuauugguagaaa

SEQ ID NO: 1162601 - RNA, 19 nt, Artificial Sequence
  Description of Artificial Sequence: Synthetic oligonucleotide
  Antisense strand to SEQ ID NO: 1162600
uuucuaccaauagacuaaa

SEQ ID NO: 1162602 - RNA, 19 nt, Artificial Sequence
  Description of Artificial Sequence: Synthetic oligonucleotide
  Sense strand starting at position 1137 of SEQ ID NO: 916514
agcuuugacgacuacucau

SEQ ID NO: 1162603 - RNA, 19 nt, Artificial Sequence
  Description of Artificial Sequence: Synthetic oligonucleotide
  Antisense strand to SEQ ID NO: 1162602
augaguagucgucaaagcu

SEQ ID NO: 1162604 - RNA, 19 nt, Artificial Sequence
  Description of Artificial Sequence: Synthetic oligonucleotide
  Sense strand starting at position 1381 of SEQ ID NO: 916514
cauauaguuugacucgaaa

SEQ ID NO: 1162605 - RNA, 19 nt, Artificial Sequence
  Description of Artificial Sequence: Synthetic oligonucleotide
  Antisense strand to SEQ ID NO: 1162604
uuucgagucaaacuauaug

SEQ ID NO: 1162606 - RNA, 19 nt, Artificial Sequence
  Description of Artificial Sequence: Synthetic oligonucleotide
  Sense strand starting at position 1393 of SEQ ID NO: 916514
cucgaaauagcccagugua

SEQ ID NO: 1162607 - RNA, 19 nt, Artificial Sequence
  Description of Artificial Sequence: Synthetic oligonucleotide
  Antisense strand to SEQ ID NO: 1162606
uacacugggcuauuucgag

SEQ ID NO: 1162608 - RNA, 19 nt, Artificial Sequence
  Description of Artificial Sequence: Synthetic oligonucleotide
  Sense strand starting at position 2824 of SEQ ID NO: 916514
acgagcacucacuguaaua

SEQ ID NO: 1162609 - RNA, 19 nt, Artificial Sequence
  Description of Artificial Sequence: Synthetic oligonucleotide
  Antisense strand to SEQ ID NO: 1162608
uauuacagugagugcucgu

SEQ ID NO: 1162610 - RNA, 19 nt, Artificial Sequence
  Description of Artificial Sequence: Synthetic oligonucleotide
  Sense strand starting at position 2831 of SEQ ID NO: 916514
cucacuguaauacggagaa

SEQ ID NO: 1162611 - RNA, 19 nt, Artificial Sequence
  Description of Artificial Sequence: Synthetic oligonucleotide
  Antisense strand to SEQ ID NO: 1162610
uucuccguauuacagugag

SEQ ID NO: 1162612 - RNA, 19 nt, Artificial Sequence
  Description of Artificial Sequence: Synthetic oligonucleotide
  Sense strand starting at position 3142 of SEQ ID NO: 916514
aggugccaccucugaugaa

SEQ ID NO: 1162613 - RNA, 19 nt, Artificial Sequence
  Description of Artificial Sequence: Synthetic oligonucleotide
  Antisense strand to SEQ ID NO: 1162612
uucaucagagguggcaccu

SEQ ID NO: 1162614 - RNA, 19 nt, Artificial Sequence
  Description of Artificial Sequence: Synthetic oligonucleotide
  Sense strand starting at position 3165 of SEQ ID NO: 916514
augucaguccuagauguuu

SEQ ID NO: 1162615 - RNA, 19 nt, Artificial Sequence
  Description of Artificial Sequence: Synthetic oligonucleotide
  Antisense strand to SEQ ID NO: 1162614
aaacaucuaggacugacau

SEQ ID NO: 1162616 - RNA, 19 nt, Artificial Sequence
  Description of Artificial Sequence: Synthetic oligonucleotide
  Sense strand starting at position 3167 of SEQ ID NO: 916514
gucaguccuagauguuuaa

SEQ ID NO: 1162617 - RNA, 19 nt, Artificial Sequence
  Description of Artificial Sequence: Synthetic oligonucleotide
  Antisense strand to SEQ ID NO: 1162616
uuaaacaucuaggacugac

SEQ ID NO: 1162618 - RNA, 19 nt, Artificial Sequence
  Description of Artificial Sequence: Synthetic oligonucleotide
  Sense strand starting at position 3170 of SEQ ID NO: 916514
aguccuagauguuuaauua

SEQ ID NO: 1162619 - RNA, 19 nt, Artificial Sequence
  Description of Artificial Sequence: Synthetic oligonucleotide
  Antisense strand to SEQ ID NO: 1162618
uaauuaaacaucuaggacu

SEQ ID NO: 1162620 - RNA, 19 nt, Artificial Sequence
  Description of Artificial Sequence: Synthetic oligonucleotide
  Sense strand starting at position 3171 of SEQ ID NO: 916514
guccuagauguuuaauuac

SEQ ID NO: 1162621 - RNA, 19 nt, Artificial Sequence
  Description of Artificial Sequence: Synthetic oligonucleotide
  Antisense strand to SEQ ID NO: 1162620
guaauuaaacaucuaggac

SEQ ID NO: 1162622 - RNA, 19 nt, Artificial Sequence
  Description of Artificial Sequence: Synthetic oligonucleotide
  Sense strand starting at position 3198 of SEQ ID NO: 916514
gccuguaguugccuaauuu

SEQ ID NO: 1162623 - RNA, 19 nt, Artificial Sequence
  Description of Artificial Sequence: Synthetic oligonucleotide
  Antisense strand to SEQ ID NO: 1162622
aaauuaggcaacuacaggc

SEQ ID NO: 1162624 - RNA, 19 nt, Artificial Sequence
  Description of Artificial Sequence: Synthetic oligonucleotide
  Sense strand starting at position 3215 of SEQ ID NO: 916514
uuuccuuggcacugauaac

SEQ ID NO: 1162625 - RNA, 19 nt, Artificial Sequence
  Description of Artificial Sequence: Synthetic oligonucleotide
  Antisense strand to SEQ ID NO: 1162624
guuaucagugccaaggaaa

SEQ ID NO: 1162626 - RNA, 19 nt, Artificial Sequence
  Description of Artificial Sequence: Synthetic oligonucleotide
  Sense strand starting at position 3225 of SEQ ID NO: 916514
acugauaacuccuugggua

SEQ ID NO: 1162627 - RNA, 19 nt, Artificial Sequence
  Description of Artificial Sequence: Synthetic oligonucleotide
  Antisense strand to SEQ ID NO: 1162626
uacccaaggaguuaucagu

SEQ ID NO: 1162628 - RNA, 19 nt, Artificial Sequence
  Description of Artificial Sequence: Synthetic oligonucleotide
  Sense strand starting at position 3227 of SEQ ID NO: 916514
ugauaacuccuuggguaau

SEQ ID NO: 1162629 - RNA, 19 nt, Artificial Sequence
  Description of Artificial Sequence: Synthetic oligonucleotide
  Antisense strand to SEQ ID NO: 1162628
auuacccaaggaguuauca

SEQ ID NO: 1162630 - RNA, 19 nt, Artificial Sequence
  Description of Artificial Sequence: Synthetic oligonucleotide
  Sense strand starting at position 3229 of SEQ ID NO: 916514
auaacuccuuggguaauca

SEQ ID NO: 1162631 - RNA, 19 nt, Artificial Sequence
  Description of Artificial Sequence: Synthetic oligonucleotide
  Antisense strand to SEQ ID NO: 1162630
ugauuacccaaggaguuau

SEQ ID NO: 1162632 - RNA, 19 nt, Artificial Sequence
  Description of Artificial Sequence: Synthetic oligonucleotide
  Sense strand starting at position 3336 of SEQ ID NO: 916514
ccuggauauguaggguauu

SEQ ID NO: 1162633 - RNA, 19 nt, Artificial Sequence
  Description of Artificial Sequence: Synthetic oligonucleotide
  Antisense strand to SEQ ID NO: 1162632
aauacccuacauauccagg

SEQ ID NO: 1162634 - RNA, 19 nt, Artificial Sequence
  Description of Artificial Sequence: Synthetic oligonucleotide
  Sense strand starting at position 3349 of SEQ ID NO: 916514
gguauuaaguaguuacuua

SEQ ID NO: 1162635 - RNA, 19 nt, Artificial Sequence
  Description of Artificial Sequence: Synthetic oligonucleotide
  Antisense strand to SEQ ID NO: 1162634
uaaguaacuacuuaauacc

SEQ ID NO: 1162636 - RNA, 19 nt, Artificial Sequence
  Description of Artificial Sequence: Synthetic oligonucleotide
  Sense strand starting at position 3353 of SEQ ID NO: 916514
uuaaguaguuacuuacgaa

SEQ ID NO: 1162637 - RNA, 19 nt, Artificial Sequence
  Description of Artificial Sequence: Synthetic oligonucleotide
  Antisense strand to SEQ ID NO: 1162636
uucguaaguaacuacuuaa

SEQ ID NO: 1162638 - RNA, 19 nt, Artificial Sequence
  Description of Artificial Sequence: Synthetic oligonucleotide
  Sense strand starting at position 3467 of SEQ ID NO: 916514
gugaacuaaagugauggua

SEQ ID NO: 1162639 - RNA, 19 nt, Artificial Sequence
  Description of Artificial Sequence: Synthetic oligonucleotide
  Antisense strand to SEQ ID NO: 1162638
uaccaucacuuuaguucac

SEQ ID NO: 1162640 - RNA, 19 nt, Artificial Sequence
  Description of Artificial Sequence: Synthetic oligonucleotide
  Sense strand starting at position 3470 of SEQ ID NO: 916514
aacuaaagugaugguaauu

SEQ ID NO: 1162641 - RNA, 19 nt, Artificial Sequence
  Description of Artificial Sequence: Synthetic oligonucleotide
  Antisense strand to SEQ ID NO: 1162640
aauuaccaucacuuuaguu

SEQ ID NO: 1162642 - RNA, 19 nt, Artificial Sequence
  Description of Artificial Sequence: Synthetic oligonucleotide
  Sense strand starting at position 3479 of SEQ ID NO: 916514
gaugguaauuuguacauca

SEQ ID NO: 1162643 - RNA, 19 nt, Artificial Sequence
  Description of Artificial Sequence: Synthetic oligonucleotide
  Antisense strand to SEQ ID NO: 1162642
ugauguacaaauuaccauc

SEQ ID NO: 1162644 - RNA, 19 nt, Artificial Sequence
  Description of Artificial Sequence: Synthetic oligonucleotide
  Sense strand starting at position 3671 of SEQ ID NO: 916514
gggcaaaugucacccuuaa

SEQ ID NO: 1162645 - RNA, 19 nt, Artificial Sequence
  Description of Artificial Sequence: Synthetic oligonucleotide
  Antisense strand to SEQ ID NO: 1162644
uuaagggugacauuugccc

SEQ ID NO: 1162646 - RNA, 19 nt, Artificial Sequence
  Description of Artificial Sequence: Synthetic oligonucleotide
  Sense strand starting at position 3685 of SEQ ID NO: 916514
cuuaaugcauuggcaauua

SEQ ID NO: 1162647 - RNA, 19 nt, Artificial Sequence
  Description of Artificial Sequence: Synthetic oligonucleotide
  Antisense strand to SEQ ID NO: 1162646
uaauugccaaugcauuaag

SEQ ID NO: 1162648 - RNA, 19 nt, Artificial Sequence
  Description of Artificial Sequence: Synthetic oligonucleotide
  Sense strand starting at position 3740 of SEQ ID NO: 916514
uggugaauaaauuguaaug

SEQ ID NO: 1162649 - RNA, 19 nt, Artificial Sequence
  Description of Artificial Sequence: Synthetic oligonucleotide
  Antisense strand to SEQ ID NO: 1162648
cauuacaauuuauucacca

SEQ ID NO: 1162650 - RNA, 19 nt, Artificial Sequence
  Description of Artificial Sequence: Synthetic oligonucleotide
  Sense strand starting at position 3813 of SEQ ID NO: 916514
gaaccuagguaguuggaaa

SEQ ID NO: 1162651 - RNA, 19 nt, Artificial Sequence
  Description of Artificial Sequence: Synthetic oligonucleotide
  Antisense strand to SEQ ID NO: 1162650
uuuccaacuaccuagguuc

SEQ ID NO: 1162652 - RNA, 19 nt, Artificial Sequence
  Description of Artificial Sequence: Synthetic oligonucleotide
  Sense strand starting at position 3880 of SEQ ID NO: 916514
ccuuguguuacauaagugu

SEQ ID NO: 1162653 - RNA, 19 nt, Artificial Sequence
  Description of Artificial Sequence: Synthetic oligonucleotide
  Antisense strand to SEQ ID NO: 1162652
acacuuauguaacacaagg

SEQ ID NO: 1162654 - RNA, 19 nt, Artificial Sequence
  Description of Artificial Sequence: Synthetic oligonucleotide
  Sense strand starting at position 3946 of SEQ ID NO: 916514
aguccaaauguuuguuuaa

SEQ ID NO: 1162655 - RNA, 19 nt, Artificial Sequence
  Description of Artificial Sequence: Synthetic oligonucleotide
  Antisense strand to SEQ ID NO: 1162654
uuaaacaaacauuuggacu

SEQ ID NO: 1162656 - RNA, 19 nt, Artificial Sequence
  Description of Artificial Sequence: Synthetic oligonucleotide
  Sense strand starting at position 3947 of SEQ ID NO: 916514
guccaaauguuuguuuaaa

SEQ ID NO: 1162657 - RNA, 19 nt, Artificial Sequence
  Description of Artificial Sequence: Synthetic oligonucleotide
  Antisense strand to SEQ ID NO: 1162656
uuuaaacaaacauuuggac

SEQ ID NO: 1162658 - RNA, 19 nt, Artificial Sequence
  Description of Artificial Sequence: Synthetic oligonucleotide
  Sense strand starting at position 3 of SEQ ID NO: 916515
uugggauucuuuccaacuu

SEQ ID NO: 1162659 - RNA, 19 nt, Artificial Sequence
  Description of Artificial Sequence: Synthetic oligonucleotide
  Antisense strand to SEQ ID NO: 1162658
aaguuggaaagaaucccaa

SEQ ID NO: 1162660 - RNA, 19 nt, Artificial Sequence
  Description of Artificial Sequence: Synthetic oligonucleotide
  Sense strand starting at position 41 of SEQ ID NO: 916515
gucaguucccugcaauaaa

SEQ ID NO: 1162661 - RNA, 19 nt, Artificial Sequence
  Description of Artificial Sequence: Synthetic oligonucleotide
  Antisense strand to SEQ ID NO: 1162660
uuuauugcagggaacugac

SEQ ID NO: 1162662 - RNA, 19 nt, Artificial Sequence
  Description of Artificial Sequence: Synthetic oligonucleotide
  Sense strand starting at position 228 of SEQ ID NO: 916515
ccauguggucuuugaagac

SEQ ID NO: 1162663 - RNA, 19 nt, Artificial Sequence
  Description of Artificial Sequence: Synthetic oligonucleotide
  Antisense strand to SEQ ID NO: 1162662
gucuucaaagaccacaugg

SEQ ID NO: 1162664 - RNA, 19 nt, Artificial Sequence
  Description of Artificial Sequence: Synthetic oligonucleotide
  Sense strand starting at position 292 of SEQ ID NO: 916515
agugucacuuucucaagga

SEQ ID NO: 1162665 - RNA, 19 nt, Artificial Sequence
  Description of Artificial Sequence: Synthetic oligonucleotide
  Antisense strand to SEQ ID NO: 1162664
uccuugagaaagugacacu

SEQ ID NO: 1162666 - RNA, 19 nt, Artificial Sequence
  Description of Artificial Sequence: Synthetic oligonucleotide
  Sense strand starting at position 720 of SEQ ID NO: 916515
cucuguuuggaucacagau

SEQ ID NO: 1162667 - RNA, 19 nt, Artificial Sequence
  Description of Artificial Sequence: Synthetic oligonucleotide
  Antisense strand to SEQ ID NO: 1162666
aucugugauccaaacagag

SEQ ID NO: 1162668 - RNA, 19 nt, Artificial Sequence
  Description of Artificial Sequence: Synthetic oligonucleotide
  Sense strand starting at position 987 of SEQ ID NO: 916515
guggaugcgguacauuaau

SEQ ID NO: 1162669 - RNA, 19 nt, Artificial Sequence
  Description of Artificial Sequence: Synthetic oligonucleotide
  Antisense strand to SEQ ID NO: 1162668
auuaauguaccgcauccac

SEQ ID NO: 1162670 - RNA, 19 nt, Artificial Sequence
  Description of Artificial Sequence: Synthetic oligonucleotide
  Sense strand starting at position 998 of SEQ ID NO: 916515
acauuaaugcaguggguaa

SEQ ID NO: 1162671 - RNA, 19 nt, Artificial Sequence
  Description of Artificial Sequence: Synthetic oligonucleotide
  Antisense strand to SEQ ID NO: 1162670
uuacccacugcauuaaugu

SEQ ID NO: 1162672 - RNA, 19 nt, Artificial Sequence
  Description of Artificial Sequence: Synthetic oligonucleotide
  Sense strand starting at position 1040 of SEQ ID NO: 916515
gccugauuccuggacaaca

SEQ ID NO: 1162673 - RNA, 19 nt, Artificial Sequence
  Description of Artificial Sequence: Synthetic oligonucleotide
  Antisense strand to SEQ ID NO: 1162672
uguuguccaggaaucaggc

SEQ ID NO: 1162674 - RNA, 19 nt, Artificial Sequence
  Description of Artificial Sequence: Synthetic oligonucleotide
  Sense strand starting at position 1061 of SEQ ID NO: 916515
uguguugugacuugaagaa

SEQ ID NO: 1162675 - RNA, 19 nt, Artificial Sequence
  Description of Artificial Sequence: Synthetic oligonucleotide
  Antisense strand to SEQ ID NO: 1162674
uucuucaagucacaacaca

SEQ ID NO: 1162676 - RNA, 19 nt, Artificial Sequence
  Description of Artificial Sequence: Synthetic oligonucleotide
  Sense strand starting at position 1101 of SEQ ID NO: 916515
ucaguuuggcaucaggaaa

SEQ ID NO: 1162677 - RNA, 19 nt, Artificial Sequence
  Description of Artificial Sequence: Synthetic oligonucleotide
  Antisense strand to SEQ ID NO: 1162676
uuuccugaugccaaacuga

SEQ ID NO: 1162678 - RNA, 19 nt, Artificial Sequence
  Description of Artificial Sequence: Synthetic oligonucleotide
  Sense strand starting at position 1127 of SEQ ID NO: 916515
uacuaucuccugggugacu

SEQ ID NO: 1162679 - RNA, 19 nt, Artificial Sequence
  Description of Artificial Sequence: Synthetic oligonucleotide
  Antisense strand to SEQ ID NO: 1162678
agucacccaggagauagua

SEQ ID NO: 1162680 - RNA, 19 nt, Artificial Sequence
  Description of Artificial Sequence: Synthetic oligonucleotide
  Sense strand starting at position 1441 of SEQ ID NO: 916515
uaggaugcuuguuucuuaa

SEQ ID NO: 1162681 - RNA, 19 nt, Artificial Sequence
  Description of Artificial Sequence: Synthetic oligonucleotide
  Antisense strand to SEQ ID NO: 1162680
uuaagaaacaagcauccua

SEQ ID NO: 1162682 - RNA, 19 nt, Artificial Sequence
  Description of Artificial Sequence: Synthetic oligonucleotide
  Sense strand starting at position 1488 of SEQ ID NO: 916515
guaauacacaguuaugguu

SEQ ID NO: 1162683 - RNA, 19 nt, Artificial Sequence
  Description of Artificial Sequence: Synthetic oligonucleotide
  Antisense strand to SEQ ID NO: 1162682
aaccauaacuguguauuac

SEQ ID NO: 1162684 - RNA, 19 nt, Artificial Sequence
  Description of Artificial Sequence: Synthetic oligonucleotide
  Sense strand starting at position 1494 of SEQ ID NO: 916515
cacaguuaugguuaguaug

SEQ ID NO: 1162685 - RNA, 19 nt, Artificial Sequence
  Description of Artificial Sequence: Synthetic oligonucleotide
  Antisense strand to SEQ ID NO: 1162684
cauacuaaccauaacugug

SEQ ID NO: 1162686 - RNA, 19 nt, Artificial Sequence
  Description of Artificial Sequence: Synthetic oligonucleotide
  Sense strand starting at position 1592 of SEQ ID NO: 916515
caacguuuauaagcaagga

SEQ ID NO: 1162687 - RNA, 19 nt, Artificial Sequence
  Description of Artificial Sequence: Synthetic oligonucleotide
  Antisense strand to SEQ ID NO: 1162686
uccuugcuuauaaacguug

SEQ ID NO: 1162688 - RNA, 19 nt, Artificial Sequence
  Description of Artificial Sequence: Synthetic oligonucleotide
  Sense strand starting at position 1935 of SEQ ID NO: 916515
caagaagcucccgacaguu

SEQ ID NO: 1162689 - RNA, 19 nt, Artificial Sequence
  Description of Artificial Sequence: Synthetic oligonucleotide
  Antisense strand to SEQ ID NO: 1162688
aacugucgggagcuucuug

SEQ ID NO: 1162690 - RNA, 19 nt, Artificial Sequence
  Description of Artificial Sequence: Synthetic oligonucleotide
  Sense strand starting at position 2268 of SEQ ID NO: 916515
accgcuauaucuuuaagau

SEQ ID NO: 1162691 - RNA, 19 nt, Artificial Sequence
  Description of Artificial Sequence: Synthetic oligonucleotide
  Antisense strand to SEQ ID NO: 1162690
aucuuaaagauauagcggu

SEQ ID NO: 1162692 - RNA, 19 nt, Artificial Sequence
  Description of Artificial Sequence: Synthetic oligonucleotide
  Sense strand starting at position 2269 of SEQ ID NO: 916515
ccgcuauaucuuuaagaua

SEQ ID NO: 1162693 - RNA, 19 nt, Artificial Sequence
  Description of Artificial Sequence: Synthetic oligonucleotide
  Antisense strand to SEQ ID NO: 1162692
uaucuuaaagauauagcgg

SEQ ID NO: 1162694 - RNA, 19 nt, Artificial Sequence
  Description of Artificial Sequence: Synthetic oligonucleotide
  Sense strand starting at position 2516 of SEQ ID NO: 916515
cuaauuauuaccggugaug

SEQ ID NO: 1162695 - RNA, 19 nt, Artificial Sequence
  Description of Artificial Sequence: Synthetic oligonucleotide
  Antisense strand to SEQ ID NO: 1162694
caucaccgguaauaauuag

SEQ ID NO: 1162696 - RNA, 19 nt, Artificial Sequence
  Description of Artificial Sequence: Synthetic oligonucleotide
  Sense strand starting at position 2754 of SEQ ID NO: 916515
cuaauaacgugacuaauca

SEQ ID NO: 1162697 - RNA, 19 nt, Artificial Sequence
  Description of Artificial Sequence: Synthetic oligonucleotide
  Antisense strand to SEQ ID NO: 1162696
ugauuagucacguuauuag

SEQ ID NO: 1162698 - RNA, 19 nt, Artificial Sequence
  Description of Artificial Sequence: Synthetic oligonucleotide
  Sense strand starting at position 2778 of SEQ ID NO: 916515
aguuaaguguuaucgagga

SEQ ID NO: 1162699 - RNA, 19 nt, Artificial Sequence
  Description of Artificial Sequence: Synthetic oligonucleotide
  Antisense strand to SEQ ID NO: 1162698
uccucgauaacacuuaacu

SEQ ID NO: 1162700 - RNA, 19 nt, Artificial Sequence
  Description of Artificial Sequence: Synthetic oligonucleotide
  Sense strand starting at position 2780 of SEQ ID NO: 916515
uuaaguguuaucgaggaca

SEQ ID NO: 1162701 - RNA, 19 nt, Artificial Sequence
  Description of Artificial Sequence: Synthetic oligonucleotide
  Antisense strand to SEQ ID NO: 1162700
uguccucgauaacacuuaa

SEQ ID NO: 1162702 - RNA, 19 nt, Artificial Sequence
  Description of Artificial Sequence: Synthetic oligonucleotide
  Sense strand starting at position 2782 of SEQ ID NO: 916515
aaguguuaucgaggacagg

SEQ ID NO: 1162703 - RNA, 19 nt, Artificial Sequence
  Description of Artificial Sequence: Synthetic oligonucleotide
  Antisense strand to SEQ ID NO: 1162702
ccuguccucgauaacacuu

SEQ ID NO: 1162704 - RNA, 19 nt, Artificial Sequence
  Description of Artificial Sequence: Synthetic oligonucleotide
  Sense strand starting at position 2959 of SEQ ID NO: 916515
gagugaauuccuugaggcu

SEQ ID NO: 1162705 - RNA, 19 nt, Artificial Sequence
  Description of Artificial Sequence: Synthetic oligonucleotide
  Antisense strand to SEQ ID NO: 1162704
agccucaaggaauucacuc

SEQ ID NO: 1162706 - RNA, 19 nt, Artificial Sequence
  Description of Artificial Sequence: Synthetic oligonucleotide
  Sense strand starting at position 2960 of SEQ ID NO: 916515
agugaauuccuugaggcua

SEQ ID NO: 1162707 - RNA, 19 nt, Artificial Sequence
  Description of Artificial Sequence: Synthetic oligonucleotide
  Antisense strand to SEQ ID NO: 1162706
uagccucaaggaauucacu

SEQ ID NO: 1162708 - RNA, 19 nt, Artificial Sequence
  Description of Artificial Sequence: Synthetic oligonucleotide
  Sense strand starting at position 3043 of SEQ ID NO: 916515
cuuugagucuagucucacu

SEQ ID NO: 1162709 - RNA, 19 nt, Artificial Sequence
  Description of Artificial Sequence: Synthetic oligonucleotide
  Antisense strand to SEQ ID NO: 1162708
agugagacuagacucaaag

SEQ ID NO: 1162710 - RNA, 19 nt, Artificial Sequence
  Description of Artificial Sequence: Synthetic oligonucleotide
  Sense strand starting at position 3082 of SEQ ID NO: 916515
gcuauauugagaggagcuc

SEQ ID NO: 1162711 - RNA, 19 nt, Artificial Sequence
  Description of Artificial Sequence: Synthetic oligonucleotide
  Antisense strand to SEQ ID NO: 1162710
gagcuccucucaauauagc

SEQ ID NO: 1162712 - RNA, 19 nt, Artificial Sequence
  Description of Artificial Sequence: Synthetic oligonucleotide
  Sense strand starting at position 3094 of SEQ ID NO: 916515
ggagcucacacgugcauuu

SEQ ID NO: 1162713 - RNA, 19 nt, Artificial Sequence
  Description of Artificial Sequence: Synthetic oligonucleotide
  Antisense strand to SEQ ID NO: 1162712
aaaugcacgugugagcucc

SEQ ID NO: 1162714 - RNA, 19 nt, Artificial Sequence
  Description of Artificial Sequence: Synthetic oligonucleotide
  Sense strand starting at position 3096 of SEQ ID NO: 916515
agcucacacgugcauuuaa

SEQ ID NO: 1162715 - RNA, 19 nt, Artificial Sequence
  Description of Artificial Sequence: Synthetic oligonucleotide
  Antisense strand to SEQ ID NO: 1162714
uuaaaugcacgugugagcu

SEQ ID NO: 1162716 - RNA, 19 nt, Artificial Sequence
  Description of Artificial Sequence: Synthetic oligonucleotide
  Sense strand starting at position 3161 of SEQ ID NO: 916515
cucugaucucuaggauauu

SEQ ID NO: 1162717 - RNA, 19 nt, Artificial Sequence
  Description of Artificial Sequence: Synthetic oligonucleotide
  Antisense strand to SEQ ID NO: 1162716
aauauccuagagaucagag

SEQ ID NO: 1162718 - RNA, 19 nt, Artificial Sequence
  Description of Artificial Sequence: Synthetic oligonucleotide
  Sense strand starting at position 3226 of SEQ ID NO: 916515
ccagcaacuccugaguuau

SEQ ID NO: 1162719 - RNA, 19 nt, Artificial Sequence
  Description of Artificial Sequence: Synthetic oligonucleotide
  Antisense strand to SEQ ID NO: 1162718
auaacucaggaguugcugg

SEQ ID NO: 1162720 - RNA, 19 nt, Artificial Sequence
  Description of Artificial Sequence: Synthetic oligonucleotide
  Sense strand starting at position 3232 of SEQ ID NO: 916515
acuccugaguuauccgaau

SEQ ID NO: 1162721 - RNA, 19 nt, Artificial Sequence
  Description of Artificial Sequence: Synthetic oligonucleotide
  Antisense strand to SEQ ID NO: 1162720
auucggauaacucaggagu

SEQ ID NO: 1162722 - RNA, 19 nt, Artificial Sequence
  Description of Artificial Sequence: Synthetic oligonucleotide
  Sense strand starting at position 3319 of SEQ ID NO: 916515
cuaaccaaagugugucauu

SEQ ID NO: 1162723 - RNA, 19 nt, Artificial Sequence
  Description of Artificial Sequence: Synthetic oligonucleotide
  Antisense strand to SEQ ID NO: 1162722
aaugacacacuuugguuag

SEQ ID NO: 1162724 - RNA, 19 nt, Artificial Sequence
  Description of Artificial Sequence: Synthetic oligonucleotide
  Sense strand starting at position 3324 of SEQ ID NO: 916515
caaagugugucauuugcac

SEQ ID NO: 1162725 - RNA, 19 nt, Artificial Sequence
  Description of Artificial Sequence: Synthetic oligonucleotide
  Antisense strand to SEQ ID NO: 1162724
gugcaaaugacacacuuug

SEQ ID NO: 1162726 - RNA, 19 nt, Artificial Sequence
  Description of Artificial Sequence: Synthetic oligonucleotide
  Sense strand starting at position 3470 of SEQ ID NO: 916515
guauuagggcuccacguaa

SEQ ID NO: 1162727 - RNA, 19 nt, Artificial Sequence
  Description of Artificial Sequence: Synthetic oligonucleotide
  Antisense strand to SEQ ID NO: 1162726
uuacguggagcccuaauac

SEQ ID NO: 1162728 - RNA, 19 nt, Artificial Sequence
  Description of Artificial Sequence: Synthetic oligonucleotide
  Sense strand starting at position 3482 of SEQ ID NO: 916515
cacguaauugugcaaggaa

SEQ ID NO: 1162729 - RNA, 19 nt, Artificial Sequence
  Description of Artificial Sequence: Synthetic oligonucleotide
  Antisense strand to SEQ ID NO: 1162728
uuccuugcacaauuacgug

SEQ ID NO: 1162730 - RNA, 19 nt, Artificial Sequence
  Description of Artificial Sequence: Synthetic oligonucleotide
  Sense strand starting at position 3485 of SEQ ID NO: 916515
guaauugugcaaggaauua

SEQ ID NO: 1162731 - RNA, 19 nt, Artificial Sequence
  Description of Artificial Sequence: Synthetic oligonucleotide
  Antisense strand to SEQ ID NO: 1162730
uaauuccuugcacaauuac

SEQ ID NO: 1162732 - RNA, 19 nt, Artificial Sequence
  Description of Artificial Sequence: Synthetic oligonucleotide
  Sense strand starting at position 3737 of SEQ ID NO: 916515
uccugaaauuucuaguaug

SEQ ID NO: 1162733 - RNA, 19 nt, Artificial Sequence
  Description of Artificial Sequence: Synthetic oligonucleotide
  Antisense strand to SEQ ID NO: 1162732
cauacuagaaauuucagga

SEQ ID NO: 1162734 - RNA, 19 nt, Artificial Sequence
  Description of Artificial Sequence: Synthetic oligonucleotide
  Sense strand starting at position 3751 of SEQ ID NO: 916515
guauguaagagaugcauua

SEQ ID NO: 1162735 - RNA, 19 nt, Artificial Sequence
  Description of Artificial Sequence: Synthetic oligonucleotide
  Antisense strand to SEQ ID NO: 1162734
uaaugcaucucuuacauac

SEQ ID NO: 1162736 - RNA, 19 nt, Artificial Sequence
  Description of Artificial Sequence: Synthetic oligonucleotide
  Sense strand starting at position 3885 of SEQ ID NO: 916515
ccaaguugucaguacaguu

SEQ ID NO: 1162737 - RNA, 19 nt, Artificial Sequence
  Description of Artificial Sequence: Synthetic oligonucleotide
  Antisense strand to SEQ ID NO: 1162736
aacuguacugacaacuugg

SEQ ID NO: 1162738 - RNA, 19 nt, Artificial Sequence
  Description of Artificial Sequence: Synthetic oligonucleotide
  Sense strand starting at position 4 of SEQ ID NO: 916516
aaguuugaauggccuggaa

SEQ ID NO: 1162739 - RNA, 19 nt, Artificial Sequence
  Description of Artificial Sequence: Synthetic oligonucleotide
  Antisense strand to SEQ ID NO: 1162738
uuccaggccauucaaacuu

SEQ ID NO: 1162740 - RNA, 19 nt, Artificial Sequence
  Description of Artificial Sequence: Synthetic oligonucleotide
  Sense strand starting at position 6 of SEQ ID NO: 916516
guuugaauggccuggaaag

SEQ ID NO: 1162741 - RNA, 19 nt, Artificial Sequence
  Description of Artificial Sequence: Synthetic oligonucleotide
  Antisense strand to SEQ ID NO: 1162740
cuuuccaggccauucaaac

SEQ ID NO: 1162742 - RNA, 19 nt, Artificial Sequence
  Description of Artificial Sequence: Synthetic oligonucleotide
  Sense strand starting at position 52 of SEQ ID NO: 916516
gccaaacuguaauccagaa

SEQ ID NO: 1162743 - RNA, 19 nt, Artificial Sequence
  Description of Artificial Sequence: Synthetic oligonucleotide
  Antisense strand to SEQ ID NO: 1162742
uucuggauuacaguuuggc

SEQ ID NO: 1162744 - RNA, 19 nt, Artificial Sequence
  Description of Artificial Sequence: Synthetic oligonucleotide
  Sense strand starting at position 92 of SEQ ID NO: 916516
uugucugaaggcugagaga

SEQ ID NO: 1162745 - RNA, 19 nt, Artificial Sequence
  Description of Artificial Sequence: Synthetic oligonucleotide
  Antisense strand to SEQ ID NO: 1162744
ucucucagccuucagacaa

SEQ ID NO: 1162746 - RNA, 19 nt, Artificial Sequence
  Description of Artificial Sequence: Synthetic oligonucleotide
  Sense strand starting at position 170 of SEQ ID NO: 916516
ggaaacaaguugucuccau

SEQ ID NO: 1162747 - RNA, 19 nt, Artificial Sequence
  Description of Artificial Sequence: Synthetic oligonucleotide
  Antisense strand to SEQ ID NO: 1162746
auggagacaacuuguuucc

SEQ ID NO: 1162748 - RNA, 19 nt, Artificial Sequence
  Description of Artificial Sequence: Synthetic oligonucleotide
  Sense strand starting at position 174 of SEQ ID NO: 916516
acaaguugucuccauacua

SEQ ID NO: 1162749 - RNA, 19 nt, Artificial Sequence
  Description of Artificial Sequence: Synthetic oligonucleotide
  Antisense strand to SEQ ID NO: 1162748
uaguauggagacaacuugu

SEQ ID NO: 1162750 - RNA, 19 nt, Artificial Sequence
  Description of Artificial Sequence: Synthetic oligonucleotide
  Sense strand starting at position 274 of SEQ ID NO: 916516
ugaagauggcugcauugaa

SEQ ID NO: 1162751 - RNA, 19 nt, Artificial Sequence
  Description of Artificial Sequence: Synthetic oligonucleotide
  Antisense strand to SEQ ID NO: 1162750
uucaaugcagccaucuuca

SEQ ID NO: 1162752 - RNA, 19 nt, Artificial Sequence
  Description of Artificial Sequence: Synthetic oligonucleotide
  Sense strand starting at position 281 of SEQ ID NO: 916516
ggcugcauugaacaauaga

SEQ ID NO: 1162753 - RNA, 19 nt, Artificial Sequence
  Description of Artificial Sequence: Synthetic oligonucleotide
  Antisense strand to SEQ ID NO: 1162752
ucuauuguucaaugcagcc

SEQ ID NO: 1162754 - RNA, 19 nt, Artificial Sequence
  Description of Artificial Sequence: Synthetic oligonucleotide
  Sense strand starting at position 433 of SEQ ID NO: 916516
agcuucugacuugagguua

SEQ ID NO: 1162755 - RNA, 19 nt, Artificial Sequence
  Description of Artificial Sequence: Synthetic oligonucleotide
  Antisense strand to SEQ ID NO: 1162754
uaaccucaagucagaagcu

SEQ ID NO: 1162756 - RNA, 19 nt, Artificial Sequence
  Description of Artificial Sequence: Synthetic oligonucleotide
  Sense strand starting at position 678 of SEQ ID NO: 916516
uggagauguaccuggagau

SEQ ID NO: 1162757 - RNA, 19 nt, Artificial Sequence
  Description of Artificial Sequence: Synthetic oligonucleotide
  Antisense strand to SEQ ID NO: 1162756
aucuccagguacaucucca

SEQ ID NO: 1162758 - RNA, 19 nt, Artificial Sequence
  Description of Artificial Sequence: Synthetic oligonucleotide
  Sense strand starting at position 679 of SEQ ID NO: 916516
ggagauguaccuggagauu

SEQ ID NO: 1162759 - RNA, 19 nt, Artificial Sequence
  Description of Artificial Sequence: Synthetic oligonucleotide
  Antisense strand to SEQ ID NO: 1162758
aaucuccagguacaucucc

SEQ ID NO: 1162760 - RNA, 19 nt, Artificial Sequence
  Description of Artificial Sequence: Synthetic oligonucleotide
  Sense strand starting at position 685 of SEQ ID NO: 916516
guaccuggagauuaauguu

SEQ ID NO: 1162761 - RNA, 19 nt, Artificial Sequence
  Description of Artificial Sequence: Synthetic oligonucleotide
  Antisense strand to SEQ ID NO: 1162760
aacauuaaucuccagguac

SEQ ID NO: 1162762 - RNA, 19 nt, Artificial Sequence
  Description of Artificial Sequence: Synthetic oligonucleotide
  Sense strand starting at position 835 of SEQ ID NO: 916516
ugaugaauauagucaaagu

SEQ ID NO: 1162763 - RNA, 19 nt, Artificial Sequence
  Description of Artificial Sequence: Synthetic oligonucleotide
  Antisense strand to SEQ ID NO: 1162762
acuuugacuauauucauca

SEQ ID NO: 1162764 - RNA, 19 nt, Artificial Sequence
  Description of Artificial Sequence: Synthetic oligonucleotide
  Sense strand starting at position 945 of SEQ ID NO: 916516
ggaagaagcugacuuguag

SEQ ID NO: 1162765 - RNA, 19 nt, Artificial Sequence
  Description of Artificial Sequence: Synthetic oligonucleotide
  Antisense strand to SEQ ID NO: 1162764
cuacaagucagcuucuucc

SEQ ID NO: 1162766 - RNA, 19 nt, Artificial Sequence
  Description of Artificial Sequence: Synthetic oligonucleotide
  Sense strand starting at position 981 of SEQ ID NO: 916516
agaagaaguaacugucgau

SEQ ID NO: 1162767 - RNA, 19 nt, Artificial Sequence
  Description of Artificial Sequence: Synthetic oligonucleotide
  Antisense strand to SEQ ID NO: 1162766
aucgacaguuacuucuucu

SEQ ID NO: 1162768 - RNA, 19 nt, Artificial Sequence
  Description of Artificial Sequence: Synthetic oligonucleotide
  Sense strand starting at position 1134 of SEQ ID NO: 916516
auugaaaucuacuucuggu

SEQ ID NO: 1162769 - RNA, 19 nt, Artificial Sequence
  Description of Artificial Sequence: Synthetic oligonucleotide
  Antisense strand to SEQ ID NO: 1162768
accagaaguagauuucaau

SEQ ID NO: 1162770 - RNA, 19 nt, Artificial Sequence
  Description of Artificial Sequence: Synthetic oligonucleotide
  Sense strand starting at position 1553 of SEQ ID NO: 916516
guauacuuagucuacagua

SEQ ID NO: 1162771 - RNA, 19 nt, Artificial Sequence
  Description of Artificial Sequence: Synthetic oligonucleotide
  Antisense strand to SEQ ID NO: 1162770
uacuguagacuaaguauac

SEQ ID NO: 1162772 - RNA, 19 nt, Artificial Sequence
  Description of Artificial Sequence: Synthetic oligonucleotide
  Sense strand starting at position 1555 of SEQ ID NO: 916516
auacuuagucuacaguaua

SEQ ID NO: 1162773 - RNA, 19 nt, Artificial Sequence
  Description of Artificial Sequence: Synthetic oligonucleotide
  Antisense strand to SEQ ID NO: 1162772
uauacuguagacuaaguau

SEQ ID NO: 1162774 - RNA, 19 nt, Artificial Sequence
  Description of Artificial Sequence: Synthetic oligonucleotide
  Sense strand starting at position 1645 of SEQ ID NO: 916516
ugugguaagcuagaagcaa

SEQ ID NO: 1162775 - RNA, 19 nt, Artificial Sequence
  Description of Artificial Sequence: Synthetic oligonucleotide
  Antisense strand to SEQ ID NO: 1162774
uugcuucuagcuuaccaca

SEQ ID NO: 1162776 - RNA, 19 nt, Artificial Sequence
  Description of Artificial Sequence: Synthetic oligonucleotide
  Sense strand starting at position 1666 of SEQ ID NO: 916516
ccgagauaucuccaaggua

SEQ ID NO: 1162777 - RNA, 19 nt, Artificial Sequence
  Description of Artificial Sequence: Synthetic oligonucleotide
  Antisense strand to SEQ ID NO: 1162776
uaccuuggagauaucucgg

SEQ ID NO: 1162778 - RNA, 19 nt, Artificial Sequence
  Description of Artificial Sequence: Synthetic oligonucleotide
  Sense strand starting at position 1699 of SEQ ID NO: 916516
cucuuaagacacgauuguu

SEQ ID NO: 1162779 - RNA, 19 nt, Artificial Sequence
  Description of Artificial Sequence: Synthetic oligonucleotide
  Antisense strand to SEQ ID NO: 1162778
aacaaucgugucuuaagag

SEQ ID NO: 1162780 - RNA, 19 nt, Artificial Sequence
  Description of Artificial Sequence: Synthetic oligonucleotide
  Sense strand starting at position 1702 of SEQ ID NO: 916516
uuaagacacgauuguuaaa

SEQ ID NO: 1162781 - RNA, 19 nt, Artificial Sequence
  Description of Artificial Sequence: Synthetic oligonucleotide
  Antisense strand to SEQ ID NO: 1162780
uuuaacaaucgugucuuaa

SEQ ID NO: 1162782 - RNA, 19 nt, Artificial Sequence
  Description of Artificial Sequence: Synthetic oligonucleotide
  Sense strand starting at position 1771 of SEQ ID NO: 916516
uaaaguguaguguaagaaa

SEQ ID NO: 1162783 - RNA, 19 nt, Artificial Sequence
  Description of Artificial Sequence: Synthetic oligonucleotide
  Antisense strand to SEQ ID NO: 1162782
uuucuuacacuacacuuua

SEQ ID NO: 1162784 - RNA, 19 nt, Artificial Sequence
  Description of Artificial Sequence: Synthetic oligonucleotide
  Sense strand starting at position 1887 of SEQ ID NO: 916516
guuucuuaccuuugaagaa

SEQ ID NO: 1162785 - RNA, 19 nt, Artificial Sequence
  Description of Artificial Sequence: Synthetic oligonucleotide
  Antisense strand to SEQ ID NO: 1162784
uucuucaaagguaagaaac

SEQ ID NO: 1162786 - RNA, 19 nt, Artificial Sequence
  Description of Artificial Sequence: Synthetic oligonucleotide
  Sense strand starting at position 2068 of SEQ ID NO: 916516
gugguaaacuuggugacaa

SEQ ID NO: 1162787 - RNA, 19 nt, Artificial Sequence
  Description of Artificial Sequence: Synthetic oligonucleotide
  Antisense strand to SEQ ID NO: 1162786
uugucaccaaguuuaccac

SEQ ID NO: 1162788 - RNA, 19 nt, Artificial Sequence
  Description of Artificial Sequence: Synthetic oligonucleotide
  Sense strand starting at position 2472 of SEQ ID NO: 916516
acagguuauaaguauaggu

SEQ ID NO: 1162789 - RNA, 19 nt, Artificial Sequence
  Description of Artificial Sequence: Synthetic oligonucleotide
  Antisense strand to SEQ ID NO: 1162788
accuauacuuauaaccugu

SEQ ID NO: 1162790 - RNA, 19 nt, Artificial Sequence
  Description of Artificial Sequence: Synthetic oligonucleotide
  Sense strand starting at position 2474 of SEQ ID NO: 916516
agguuauaaguauagguau

SEQ ID NO: 1162791 - RNA, 19 nt, Artificial Sequence
  Description of Artificial Sequence: Synthetic oligonucleotide
  Antisense strand to SEQ ID NO: 1162790
auaccuauacuuauaaccu

SEQ ID NO: 1162792 - RNA, 19 nt, Artificial Sequence
  Description of Artificial Sequence: Synthetic oligonucleotide
  Sense strand starting at position 2476 of SEQ ID NO: 916516
guuauaaguauagguauag

SEQ ID NO: 1162793 - RNA, 19 nt, Artificial Sequence
  Description of Artificial Sequence: Synthetic oligonucleotide
  Antisense strand to SEQ ID NO: 1162792
cuauaccuauacuuauaac

SEQ ID NO: 1162794 - RNA, 19 nt, Artificial Sequence
  Description of Artificial Sequence: Synthetic oligonucleotide
  Sense strand starting at position 2504 of SEQ ID NO: 916516
gauguauaacuguacagua

SEQ ID NO: 1162795 - RNA, 19 nt, Artificial Sequence
  Description of Artificial Sequence: Synthetic oligonucleotide
  Antisense strand to SEQ ID NO: 1162794
uacuguacaguuauacauc

SEQ ID NO: 1162796 - RNA, 19 nt, Artificial Sequence
  Description of Artificial Sequence: Synthetic oligonucleotide
  Sense strand starting at position 2691 of SEQ ID NO: 916516
ucuagauauccuggguaaa

SEQ ID NO: 1162797 - RNA, 19 nt, Artificial Sequence
  Description of Artificial Sequence: Synthetic oligonucleotide
  Antisense strand to SEQ ID NO: 1162796
uuuacccaggauaucuaga

SEQ ID NO: 1162798 - RNA, 19 nt, Artificial Sequence
  Description of Artificial Sequence: Synthetic oligonucleotide
  Sense strand starting at position 2692 of SEQ ID NO: 916516
cuagauauccuggguaaag

SEQ ID NO: 1162799 - RNA, 19 nt, Artificial Sequence
  Description of Artificial Sequence: Synthetic oligonucleotide
  Antisense strand to SEQ ID NO: 1162798
cuuuacccaggauaucuag

SEQ ID NO: 1162800 - RNA, 19 nt, Artificial Sequence
  Description of Artificial Sequence: Synthetic oligonucleotide
  Sense strand starting at position 2912 of SEQ ID NO: 916516
gaaagcaguccuuaguuua

SEQ ID NO: 1162801 - RNA, 19 nt, Artificial Sequence
  Description of Artificial Sequence: Synthetic oligonucleotide
  Antisense strand to SEQ ID NO: 1162800
uaaacuaaggacugcuuuc

SEQ ID NO: 1162802 - RNA, 19 nt, Artificial Sequence
  Description of Artificial Sequence: Synthetic oligonucleotide
  Sense strand starting at position 3058 of SEQ ID NO: 916516
gggccucaccaauacauau

SEQ ID NO: 1162803 - RNA, 19 nt, Artificial Sequence
  Description of Artificial Sequence: Synthetic oligonucleotide
  Antisense strand to SEQ ID NO: 1162802
auauguauuggugaggccc

SEQ ID NO: 1162804 - RNA, 19 nt, Artificial Sequence
  Description of Artificial Sequence: Synthetic oligonucleotide
  Sense strand starting at position 3114 of SEQ ID NO: 916516
uguuuagucuauuuguuga

SEQ ID NO: 1162805 - RNA, 19 nt, Artificial Sequence
  Description of Artificial Sequence: Synthetic oligonucleotide
  Antisense strand to SEQ ID NO: 1162804
ucaacaaauagacuaaaca

SEQ ID NO: 1162806 - RNA, 19 nt, Artificial Sequence
  Description of Artificial Sequence: Synthetic oligonucleotide
  Sense strand starting at position 3184 of SEQ ID NO: 916516
auugcauuugccugauuaa

SEQ ID NO: 1162807 - RNA, 19 nt, Artificial Sequence
  Description of Artificial Sequence: Synthetic oligonucleotide
  Antisense strand to SEQ ID NO: 1162806
uuaaucaggcaaaugcaau

SEQ ID NO: 1162808 - RNA, 19 nt, Artificial Sequence
  Description of Artificial Sequence: Synthetic oligonucleotide
  Sense strand starting at position 3187 of SEQ ID NO: 916516
gcauuugccugauuaaggu

SEQ ID NO: 1162809 - RNA, 19 nt, Artificial Sequence
  Description of Artificial Sequence: Synthetic oligonucleotide
  Antisense strand to SEQ ID NO: 1162808
accuuaaucaggcaaaugc

SEQ ID NO: 1162810 - RNA, 19 nt, Artificial Sequence
  Description of Artificial Sequence: Synthetic oligonucleotide
  Sense strand starting at position 3381 of SEQ ID NO: 916516
acucauagacuuugucauu

SEQ ID NO: 1162811 - RNA, 19 nt, Artificial Sequence
  Description of Artificial Sequence: Synthetic oligonucleotide
  Antisense strand to SEQ ID NO: 1162810
aaugacaaagucuaugagu

SEQ ID NO: 1162812 - RNA, 19 nt, Artificial Sequence
  Description of Artificial Sequence: Synthetic oligonucleotide
  Sense strand starting at position 3585 of SEQ ID NO: 916516
ugaagaagauuugaucuca

SEQ ID NO: 1162813 - RNA, 19 nt, Artificial Sequence
  Description of Artificial Sequence: Synthetic oligonucleotide
  Antisense strand to SEQ ID NO: 1162812
ugagaucaaaucuucuuca

SEQ ID NO: 1162814 - RNA, 19 nt, Artificial Sequence
  Description of Artificial Sequence: Synthetic oligonucleotide
  Sense strand starting at position 3832 of SEQ ID NO: 916516
auuacauuugcuuggcaca

SEQ ID NO: 1162815 - RNA, 19 nt, Artificial Sequence
  Description of Artificial Sequence: Synthetic oligonucleotide
  Antisense strand to SEQ ID NO: 1162814
ugugccaagcaaauguaau

SEQ ID NO: 1162816 - RNA, 19 nt, Artificial Sequence
  Description of Artificial Sequence: Synthetic oligonucleotide
  Sense strand starting at position 3833 of SEQ ID NO: 916516
uuacauuugcuuggcacaa

SEQ ID NO: 1162817 - RNA, 19 nt, Artificial Sequence
  Description of Artificial Sequence: Synthetic oligonucleotide
  Antisense strand to SEQ ID NO: 1162816
uugugccaagcaaauguaa

SEQ ID NO: 1162818 - RNA, 19 nt, Artificial Sequence
  Description of Artificial Sequence: Synthetic oligonucleotide
  Sense strand starting at position 102 of SEQ ID NO: 916517
gaagccgucccacagaaua

SEQ ID NO: 1162819 - RNA, 19 nt, Artificial Sequence
  Description of Artificial Sequence: Synthetic oligonucleotide
  Antisense strand to SEQ ID NO: 1162818
uauucugugggacggcuuc

SEQ ID NO: 1162820 - RNA, 19 nt, Artificial Sequence
  Description of Artificial Sequence: Synthetic oligonucleotide
  Sense strand starting at position 139 of SEQ ID NO: 916517
uccaauguagcaugaauga

SEQ ID NO: 1162821 - RNA, 19 nt, Artificial Sequence
  Description of Artificial Sequence: Synthetic oligonucleotide
  Antisense strand to SEQ ID NO: 1162820
ucauucaugcuacauugga

SEQ ID NO: 1162822 - RNA, 19 nt, Artificial Sequence
  Description of Artificial Sequence: Synthetic oligonucleotide
  Sense strand starting at position 240 of SEQ ID NO: 916517
cuuagagugcaguaagaua

SEQ ID NO: 1162823 - RNA, 19 nt, Artificial Sequence
  Description of Artificial Sequence: Synthetic oligonucleotide
  Antisense strand to SEQ ID NO: 1162822
uaucuuacugcacucuaag

SEQ ID NO: 1162824 - RNA, 19 nt, Artificial Sequence
  Description of Artificial Sequence: Synthetic oligonucleotide
  Sense strand starting at position 318 of SEQ ID NO: 916517
ggacucuguuuauuagaga

SEQ ID NO: 1162825 - RNA, 19 nt, Artificial Sequence
  Description of Artificial Sequence: Synthetic oligonucleotide
  Antisense strand to SEQ ID NO: 1162824
ucucuaauaaacagagucc

SEQ ID NO: 1162826 - RNA, 19 nt, Artificial Sequence
  Description of Artificial Sequence: Synthetic oligonucleotide
  Sense strand starting at position 325 of SEQ ID NO: 916517
guuuauuagagagguaauu

SEQ ID NO: 1162827 - RNA, 19 nt, Artificial Sequence
  Description of Artificial Sequence: Synthetic oligonucleotide
  Antisense strand to SEQ ID NO: 1162826
aauuaccucucuaauaaac

SEQ ID NO: 1162828 - RNA, 19 nt, Artificial Sequence
  Description of Artificial Sequence: Synthetic oligonucleotide
  Sense strand starting at position 331 of SEQ ID NO: 916517
uagagagguaauugugaga

SEQ ID NO: 1162829 - RNA, 19 nt, Artificial Sequence
  Description of Artificial Sequence: Synthetic oligonucleotide
  Antisense strand to SEQ ID NO: 1162828
ucucacaauuaccucucua

SEQ ID NO: 1162830 - RNA, 19 nt, Artificial Sequence
  Description of Artificial Sequence: Synthetic oligonucleotide
  Sense strand starting at position 342 of SEQ ID NO: 916517
uugugagagccacauuaga

SEQ ID NO: 1162831 - RNA, 19 nt, Artificial Sequence
  Description of Artificial Sequence: Synthetic oligonucleotide
  Antisense strand to SEQ ID NO: 1162830
ucuaauguggcucucacaa

SEQ ID NO: 1162832 - RNA, 19 nt, Artificial Sequence
  Description of Artificial Sequence: Synthetic oligonucleotide
  Sense strand starting at position 589 of SEQ ID NO: 916517
ggcuuuauuuaagagagaa

SEQ ID NO: 1162833 - RNA, 19 nt, Artificial Sequence
  Description of Artificial Sequence: Synthetic oligonucleotide
  Antisense strand to SEQ ID NO: 1162832
uucucucuuaaauaaagcc

SEQ ID NO: 1162834 - RNA, 19 nt, Artificial Sequence
  Description of Artificial Sequence: Synthetic oligonucleotide
  Sense strand starting at position 646 of SEQ ID NO: 916517
auaugugaggucugacuaa

SEQ ID NO: 1162835 - RNA, 19 nt, Artificial Sequence
  Description of Artificial Sequence: Synthetic oligonucleotide
  Antisense strand to SEQ ID NO: 1162834
uuagucagaccucacauau

SEQ ID NO: 1162836 - RNA, 19 nt, Artificial Sequence
  Description of Artificial Sequence: Synthetic oligonucleotide
  Sense strand starting at position 687 of SEQ ID NO: 916517
ggaugcaaauucccaagau

SEQ ID NO: 1162837 - RNA, 19 nt, Artificial Sequence
  Description of Artificial Sequence: Synthetic oligonucleotide
  Antisense strand to SEQ ID NO: 1162836
aucuugggaauuugcaucc

SEQ ID NO: 1162838 - RNA, 19 nt, Artificial Sequence
  Description of Artificial Sequence: Synthetic oligonucleotide
  Sense strand starting at position 691 of SEQ ID NO: 916517
gcaaauucccaagaugcga

SEQ ID NO: 1162839 - RNA, 19 nt, Artificial Sequence
  Description of Artificial Sequence: Synthetic oligonucleotide
  Antisense strand to SEQ ID NO: 1162838
ucgcaucuugggaauuugc

SEQ ID NO: 1162840 - RNA, 19 nt, Artificial Sequence
  Description of Artificial Sequence: Synthetic oligonucleotide
  Sense strand starting at position 699 of SEQ ID NO: 916517
ccaagaugcgaaggauaaa

SEQ ID NO: 1162841 - RNA, 19 nt, Artificial Sequence
  Description of Artificial Sequence: Synthetic oligonucleotide
  Antisense strand to SEQ ID NO: 1162840
uuuauccuucgcaucuugg

SEQ ID NO: 1162842 - RNA, 19 nt, Artificial Sequence
  Description of Artificial Sequence: Synthetic oligonucleotide
  Sense strand starting at position 1244 of SEQ ID NO: 916517
ugcuuaggauuccuuauaa

SEQ ID NO: 1162843 - RNA, 19 nt, Artificial Sequence
  Description of Artificial Sequence: Synthetic oligonucleotide
  Antisense strand to SEQ ID NO: 1162842
uuauaaggaauccuaagca

SEQ ID NO: 1162844 - RNA, 19 nt, Artificial Sequence
  Description of Artificial Sequence: Synthetic oligonucleotide
  Sense strand starting at position 1316 of SEQ ID NO: 916517
augguuauugcuggaaaga

SEQ ID NO: 1162845 - RNA, 19 nt, Artificial Sequence
  Description of Artificial Sequence: Synthetic oligonucleotide
  Antisense strand to SEQ ID NO: 1162844
ucuuuccagcaauaaccau

SEQ ID NO: 1162846 - RNA, 19 nt, Artificial Sequence
  Description of Artificial Sequence: Synthetic oligonucleotide
  Sense strand starting at position 1317 of SEQ ID NO: 916517
ugguuauugcuggaaagag

SEQ ID NO: 1162847 - RNA, 19 nt, Artificial Sequence
  Description of Artificial Sequence: Synthetic oligonucleotide
  Antisense strand to SEQ ID NO: 1162846
cucuuuccagcaauaacca

SEQ ID NO: 1162848 - RNA, 19 nt, Artificial Sequence
  Description of Artificial Sequence: Synthetic oligonucleotide
  Sense strand starting at position 1422 of SEQ ID NO: 916517
uuaagauguuagcugaaua

SEQ ID NO: 1162849 - RNA, 19 nt, Artificial Sequence
  Description of Artificial Sequence: Synthetic oligonucleotide
  Antisense strand to SEQ ID NO: 1162848
uauucagcuaacaucuuaa

SEQ ID NO: 1162850 - RNA, 19 nt, Artificial Sequence
  Description of Artificial Sequence: Synthetic oligonucleotide
  Sense strand starting at position 1662 of SEQ ID NO: 916517
uggguuccaagguauuauu

SEQ ID NO: 1162851 - RNA, 19 nt, Artificial Sequence
  Description of Artificial Sequence: Synthetic oligonucleotide
  Antisense strand to SEQ ID NO: 1162850
aauaauaccuuggaaccca

SEQ ID NO: 1162852 - RNA, 19 nt, Artificial Sequence
  Description of Artificial Sequence: Synthetic oligonucleotide
  Sense strand starting at position 1684 of SEQ ID NO: 916517
guaagaucugacugaauua

SEQ ID NO: 1162853 - RNA, 19 nt, Artificial Sequence
  Description of Artificial Sequence: Synthetic oligonucleotide
  Antisense strand to SEQ ID NO: 1162852
uaauucagucagaucuuac

SEQ ID NO: 1162854 - RNA, 19 nt, Artificial Sequence
  Description of Artificial Sequence: Synthetic oligonucleotide
  Sense strand starting at position 1856 of SEQ ID NO: 916517
agguaagaaucuuuacuua

SEQ ID NO: 1162855 - RNA, 19 nt, Artificial Sequence
  Description of Artificial Sequence: Synthetic oligonucleotide
  Antisense strand to SEQ ID NO: 1162854
uaaguaaagauucuuaccu

SEQ ID NO: 1162856 - RNA, 19 nt, Artificial Sequence
  Description of Artificial Sequence: Synthetic oligonucleotide
  Sense strand starting at position 2051 of SEQ ID NO: 916517
ggagcugucaaccagaauc

SEQ ID NO: 1162857 - RNA, 19 nt, Artificial Sequence
  Description of Artificial Sequence: Synthetic oligonucleotide
  Antisense strand to SEQ ID NO: 1162856
gauucugguugacagcucc

SEQ ID NO: 1162858 - RNA, 19 nt, Artificial Sequence
  Description of Artificial Sequence: Synthetic oligonucleotide
  Sense strand starting at position 2076 of SEQ ID NO: 916517
agguaaugccaggaaacgu

SEQ ID NO: 1162859 - RNA, 19 nt, Artificial Sequence
  Description of Artificial Sequence: Synthetic oligonucleotide
  Antisense strand to SEQ ID NO: 1162858
acguuuccuggcauuaccu

SEQ ID NO: 1162860 - RNA, 19 nt, Artificial Sequence
  Description of Artificial Sequence: Synthetic oligonucleotide
  Sense strand starting at position 2205 of SEQ ID NO: 916517
uuaaauaugcuccaggcaa

SEQ ID NO: 1162861 - RNA, 19 nt, Artificial Sequence
  Description of Artificial Sequence: Synthetic oligonucleotide
  Antisense strand to SEQ ID NO: 1162860
uugccuggagcauauuuaa

SEQ ID NO: 1162862 - RNA, 19 nt, Artificial Sequence
  Description of Artificial Sequence: Synthetic oligonucleotide
  Sense strand starting at position 2488 of SEQ ID NO: 916517
guaauuaggucaucugaca

SEQ ID NO: 1162863 - RNA, 19 nt, Artificial Sequence
  Description of Artificial Sequence: Synthetic oligonucleotide
  Antisense strand to SEQ ID NO: 1162862
ugucagaugaccuaauuac

SEQ ID NO: 1162864 - RNA, 19 nt, Artificial Sequence
  Description of Artificial Sequence: Synthetic oligonucleotide
  Sense strand starting at position 2698 of SEQ ID NO: 916517
gacacaaugcuagauguua

SEQ ID NO: 1162865 - RNA, 19 nt, Artificial Sequence
  Description of Artificial Sequence: Synthetic oligonucleotide
  Antisense strand to SEQ ID NO: 1162864
uaacaucuagcauuguguc

SEQ ID NO: 1162866 - RNA, 19 nt, Artificial Sequence
  Description of Artificial Sequence: Synthetic oligonucleotide
  Sense strand starting at position 2868 of SEQ ID NO: 916517
aggagaguuuagagaugga

SEQ ID NO: 1162867 - RNA, 19 nt, Artificial Sequence
  Description of Artificial Sequence: Synthetic oligonucleotide
  Antisense strand to SEQ ID NO: 1162866
uccaucucuaaacucuccu

SEQ ID NO: 1162868 - RNA, 19 nt, Artificial Sequence
  Description of Artificial Sequence: Synthetic oligonucleotide
  Sense strand starting at position 2926 of SEQ ID NO: 916517
auuacugaauaggugauau

SEQ ID NO: 1162869 - RNA, 19 nt, Artificial Sequence
  Description of Artificial Sequence: Synthetic oligonucleotide
  Antisense strand to SEQ ID NO: 1162868
auaucaccuauucaguaau

SEQ ID NO: 1162870 - RNA, 19 nt, Artificial Sequence
  Description of Artificial Sequence: Synthetic oligonucleotide
  Sense strand starting at position 2930 of SEQ ID NO: 916517
cugaauaggugauauuuga

SEQ ID NO: 1162871 - RNA, 19 nt, Artificial Sequence
  Description of Artificial Sequence: Synthetic oligonucleotide
  Antisense strand to SEQ ID NO: 1162870
ucaaauaucaccuauucag

SEQ ID NO: 1162872 - RNA, 19 nt, Artificial Sequence
  Description of Artificial Sequence: Synthetic oligonucleotide
  Sense strand starting at position 3008 of SEQ ID NO: 916517
aggaaauggucagucugaa

SEQ ID NO: 1162873 - RNA, 19 nt, Artificial Sequence
  Description of Artificial Sequence: Synthetic oligonucleotide
  Antisense strand to SEQ ID NO: 1162872
uucagacugaccauuuccu

SEQ ID NO: 1162874 - RNA, 19 nt, Artificial Sequence
  Description of Artificial Sequence: Synthetic oligonucleotide
  Sense strand starting at position 3047 of SEQ ID NO: 916517
uguagaauauggucaucca

SEQ ID NO: 1162875 - RNA, 19 nt, Artificial Sequence
  Description of Artificial Sequence: Synthetic oligonucleotide
  Antisense strand to SEQ ID NO: 1162874
uggaugaccauauucuaca

SEQ ID NO: 1162876 - RNA, 19 nt, Artificial Sequence
  Description of Artificial Sequence: Synthetic oligonucleotide
  Sense strand starting at position 3050 of SEQ ID NO: 916517
agaauauggucauccagac

SEQ ID NO: 1162877 - RNA, 19 nt, Artificial Sequence
  Description of Artificial Sequence: Synthetic oligonucleotide
  Antisense strand to SEQ ID NO: 1162876
gucuggaugaccauauucu

SEQ ID NO: 1162878 - RNA, 19 nt, Artificial Sequence
  Description of Artificial Sequence: Synthetic oligonucleotide
  Sense strand starting at position 3339 of SEQ ID NO: 916517
gucauacccucauuggaag

SEQ ID NO: 1162879 - RNA, 19 nt, Artificial Sequence
  Description of Artificial Sequence: Synthetic oligonucleotide
  Antisense strand to SEQ ID NO: 1162878
cuuccaaugaggguaugac

SEQ ID NO: 1162880 - RNA, 19 nt, Artificial Sequence
  Description of Artificial Sequence: Synthetic oligonucleotide
  Sense strand starting at position 3351 of SEQ ID NO: 916517
uuggaaggaucucuguaau

SEQ ID NO: 1162881 - RNA, 19 nt, Artificial Sequence
  Description of Artificial Sequence: Synthetic oligonucleotide
  Antisense strand to SEQ ID NO: 1162880
auuacagagauccuuccaa

SEQ ID NO: 1162882 - RNA, 19 nt, Artificial Sequence
  Description of Artificial Sequence: Synthetic oligonucleotide
  Sense strand starting at position 3357 of SEQ ID NO: 916517
ggaucucuguaaucuggaa

SEQ ID NO: 1162883 - RNA, 19 nt, Artificial Sequence
  Description of Artificial Sequence: Synthetic oligonucleotide
  Antisense strand to SEQ ID NO: 1162882
uuccagauuacagagaucc

SEQ ID NO: 1162884 - RNA, 19 nt, Artificial Sequence
  Description of Artificial Sequence: Synthetic oligonucleotide
  Sense strand starting at position 3370 of SEQ ID NO: 916517
cuggaagagcacugaacau

SEQ ID NO: 1162885 - RNA, 19 nt, Artificial Sequence
  Description of Artificial Sequence: Synthetic oligonucleotide
  Antisense strand to SEQ ID NO: 1162884
auguucagugcucuuccag

SEQ ID NO: 1162886 - RNA, 19 nt, Artificial Sequence
  Description of Artificial Sequence: Synthetic oligonucleotide
  Sense strand starting at position 3405 of SEQ ID NO: 916517
uggagagucugucugauaa

SEQ ID NO: 1162887 - RNA, 19 nt, Artificial Sequence
  Description of Artificial Sequence: Synthetic oligonucleotide
  Antisense strand to SEQ ID NO: 1162886
uuaucagacagacucucca

SEQ ID NO: 1162888 - RNA, 19 nt, Artificial Sequence
  Description of Artificial Sequence: Synthetic oligonucleotide
  Sense strand starting at position 3723 of SEQ ID NO: 916517
gggaauaagcccuacaguc

SEQ ID NO: 1162889 - RNA, 19 nt, Artificial Sequence
  Description of Artificial Sequence: Synthetic oligonucleotide
  Antisense strand to SEQ ID NO: 1162888
gacuguagggcuuauuccc

SEQ ID NO: 1162890 - RNA, 19 nt, Artificial Sequence
  Description of Artificial Sequence: Synthetic oligonucleotide
  Sense strand starting at position 3776 of SEQ ID NO: 916517
auugaagggucuucuagga

SEQ ID NO: 1162891 - RNA, 19 nt, Artificial Sequence
  Description of Artificial Sequence: Synthetic oligonucleotide
  Antisense strand to SEQ ID NO: 1162890
uccuagaagacccuucaau

SEQ ID NO: 1162892 - RNA, 19 nt, Artificial Sequence
  Description of Artificial Sequence: Synthetic oligonucleotide
  Sense strand starting at position 3789 of SEQ ID NO: 916517
cuaggagacgguuacuuau

SEQ ID NO: 1162893 - RNA, 19 nt, Artificial Sequence
  Description of Artificial Sequence: Synthetic oligonucleotide
  Antisense strand to SEQ ID NO: 1162892
auaaguaaccgucuccuag

SEQ ID NO: 1162894 - RNA, 19 nt, Artificial Sequence
  Description of Artificial Sequence: Synthetic oligonucleotide
  Sense strand starting at position 3792 of SEQ ID NO: 916517
ggagacgguuacuuauuga

SEQ ID NO: 1162895 - RNA, 19 nt, Artificial Sequence
  Description of Artificial Sequence: Synthetic oligonucleotide
  Antisense strand to SEQ ID NO: 1162894
ucaauaaguaaccgucucc

SEQ ID NO: 1162896 - RNA, 19 nt, Artificial Sequence
  Description of Artificial Sequence: Synthetic oligonucleotide
  Sense strand starting at position 3795 of SEQ ID NO: 916517
gacgguuacuuauugagag

SEQ ID NO: 1162897 - RNA, 19 nt, Artificial Sequence
  Description of Artificial Sequence: Synthetic oligonucleotide
  Antisense strand to SEQ ID NO: 1162896
cucucaauaaguaaccguc

SEQ ID NO: 1162898 - RNA, 19 nt, Artificial Sequence
  Description of Artificial Sequence: Synthetic oligonucleotide
  Sense strand starting at position 212 of SEQ ID NO: 916518
ccaugaucgcaagauugca

SEQ ID NO: 1162899 - RNA, 19 nt, Artificial Sequence
  Description of Artificial Sequence: Synthetic oligonucleotide
  Antisense strand to SEQ ID NO: 1162898
ugcaaucuugcgaucaugg

SEQ ID NO: 1162900 - RNA, 19 nt, Artificial Sequence
  Description of Artificial Sequence: Synthetic oligonucleotide
  Sense strand starting at position 332 of SEQ ID NO: 916518
guauauaggacuuggauca

SEQ ID NO: 1162901 - RNA, 19 nt, Artificial Sequence
  Description of Artificial Sequence: Synthetic oligonucleotide
  Antisense strand to SEQ ID NO: 1162900
ugauccaaguccuauauac

SEQ ID NO: 1162902 - RNA, 19 nt, Artificial Sequence
  Description of Artificial Sequence: Synthetic oligonucleotide
  Sense strand starting at position 551 of SEQ ID NO: 916518
acuccuaggugaucucauu

SEQ ID NO: 1162903 - RNA, 19 nt, Artificial Sequence
  Description of Artificial Sequence: Synthetic oligonucleotide
  Antisense strand to SEQ ID NO: 1162902
aaugagaucaccuaggagu

SEQ ID NO: 1162904 - RNA, 19 nt, Artificial Sequence
  Description of Artificial Sequence: Synthetic oligonucleotide
  Sense strand starting at position 573 of SEQ ID NO: 916518
cucacagggcuuuauauua

SEQ ID NO: 1162905 - RNA, 19 nt, Artificial Sequence
  Description of Artificial Sequence: Synthetic oligonucleotide
  Antisense strand to SEQ ID NO: 1162904
uaauauaaagcccugugag

SEQ ID NO: 1162906 - RNA, 19 nt, Artificial Sequence
  Description of Artificial Sequence: Synthetic oligonucleotide
  Sense strand starting at position 673 of SEQ ID NO: 916518
gggagaaccugaucucucu

SEQ ID NO: 1162907 - RNA, 19 nt, Artificial Sequence
  Description of Artificial Sequence: Synthetic oligonucleotide
  Antisense strand to SEQ ID NO: 1162906
agagagaucagguucuccc

SEQ ID NO: 1162908 - RNA, 19 nt, Artificial Sequence
  Description of Artificial Sequence: Synthetic oligonucleotide
  Sense strand starting at position 679 of SEQ ID NO: 916518
accugaucucucugaucug

SEQ ID NO: 1162909 - RNA, 19 nt, Artificial Sequence
  Description of Artificial Sequence: Synthetic oligonucleotide
  Antisense strand to SEQ ID NO: 1162908
cagaucagagagaucaggu

SEQ ID NO: 1162910 - RNA, 19 nt, Artificial Sequence
  Description of Artificial Sequence: Synthetic oligonucleotide
  Sense strand starting at position 911 of SEQ ID NO: 916518
gagcaaagaucucuagaug

SEQ ID NO: 1162911 - RNA, 19 nt, Artificial Sequence
  Description of Artificial Sequence: Synthetic oligonucleotide
  Antisense strand to SEQ ID NO: 1162910
caucuagagaucuuugcuc

SEQ ID NO: 1162912 - RNA, 19 nt, Artificial Sequence
  Description of Artificial Sequence: Synthetic oligonucleotide
  Sense strand starting at position 912 of SEQ ID NO: 916518
agcaaagaucucuagaugu

SEQ ID NO: 1162913 - RNA, 19 nt, Artificial Sequence
  Description of Artificial Sequence: Synthetic oligonucleotide
  Antisense strand to SEQ ID NO: 1162912
acaucuagagaucuuugcu

SEQ ID NO: 1162914 - RNA, 19 nt, Artificial Sequence
  Description of Artificial Sequence: Synthetic oligonucleotide
  Sense strand starting at position 1098 of SEQ ID NO: 916518
augucaucuuaguuaacuc

SEQ ID NO: 1162915 - RNA, 19 nt, Artificial Sequence
  Description of Artificial Sequence: Synthetic oligonucleotide
  Antisense strand to SEQ ID NO: 1162914
gaguuaacuaagaugacau

SEQ ID NO: 1162916 - RNA, 19 nt, Artificial Sequence
  Description of Artificial Sequence: Synthetic oligonucleotide
  Sense strand starting at position 1115 of SEQ ID NO: 916518
ucacuuaaauggcuaagaa

SEQ ID NO: 1162917 - RNA, 19 nt, Artificial Sequence
  Description of Artificial Sequence: Synthetic oligonucleotide
  Antisense strand to SEQ ID NO: 1162916
uucuuagccauuuaaguga

SEQ ID NO: 1162918 - RNA, 19 nt, Artificial Sequence
  Description of Artificial Sequence: Synthetic oligonucleotide
  Sense strand starting at position 1187 of SEQ ID NO: 916518
ggauguuaggaagguuaaa

SEQ ID NO: 1162919 - RNA, 19 nt, Artificial Sequence
  Description of Artificial Sequence: Synthetic oligonucleotide
  Antisense strand to SEQ ID NO: 1162918
uuuaaccuuccuaacaucc

SEQ ID NO: 1162920 - RNA, 19 nt, Artificial Sequence
  Description of Artificial Sequence: Synthetic oligonucleotide
  Sense strand starting at position 1200 of SEQ ID NO: 916518
guuaaauuaacgcaaggga

SEQ ID NO: 1162921 - RNA, 19 nt, Artificial Sequence
  Description of Artificial Sequence: Synthetic oligonucleotide
  Antisense strand to SEQ ID NO: 1162920
ucccuugcguuaauuuaac

SEQ ID NO: 1162922 - RNA, 19 nt, Artificial Sequence
  Description of Artificial Sequence: Synthetic oligonucleotide
  Sense strand starting at position 1349 of SEQ ID NO: 916518
gaaagaacucuuugcugga

SEQ ID NO: 1162923 - RNA, 19 nt, Artificial Sequence
  Description of Artificial Sequence: Synthetic oligonucleotide
  Antisense strand to SEQ ID NO: 1162922
uccagcaaagaguucuuuc

SEQ ID NO: 1162924 - RNA, 19 nt, Artificial Sequence
  Description of Artificial Sequence: Synthetic oligonucleotide
  Sense strand starting at position 1500 of SEQ ID NO: 916518
gugugugcaauuuacacuu

SEQ ID NO: 1162925 - RNA, 19 nt, Artificial Sequence
  Description of Artificial Sequence: Synthetic oligonucleotide
  Antisense strand to SEQ ID NO: 1162924
aaguguaaauugcacacac

SEQ ID NO: 1162926 - RNA, 19 nt, Artificial Sequence
  Description of Artificial Sequence: Synthetic oligonucleotide
  Sense strand starting at position 1543 of SEQ ID NO: 916518
ccgcuuaaggcuuuacgua

SEQ ID NO: 1162927 - RNA, 19 nt, Artificial Sequence
  Description of Artificial Sequence: Synthetic oligonucleotide
  Antisense strand to SEQ ID NO: 1162926
uacguaaagccuuaagcgg

SEQ ID NO: 1162928 - RNA, 19 nt, Artificial Sequence
  Description of Artificial Sequence: Synthetic oligonucleotide
  Sense strand starting at position 1561 of SEQ ID NO: 916518
agauuaccuuacgcuaaga

SEQ ID NO: 1162929 - RNA, 19 nt, Artificial Sequence
  Description of Artificial Sequence: Synthetic oligonucleotide
  Antisense strand to SEQ ID NO: 1162928
ucuuagcguaagguaaucu

SEQ ID NO: 1162930 - RNA, 19 nt, Artificial Sequence
  Description of Artificial Sequence: Synthetic oligonucleotide
  Sense strand starting at position 1563 of SEQ ID NO: 916518
auuaccuuacgcuaagauu

SEQ ID NO: 1162931 - RNA, 19 nt, Artificial Sequence
  Description of Artificial Sequence: Synthetic oligonucleotide
  Antisense strand to SEQ ID NO: 1162930
aaucuuagcguaagguaau

SEQ ID NO: 1162932 - RNA, 19 nt, Artificial Sequence
  Description of Artificial Sequence: Synthetic oligonucleotide
  Sense strand starting at position 1717 of SEQ ID NO: 916518
acucucagagcuggguaaa

SEQ ID NO: 1162933 - RNA, 19 nt, Artificial Sequence
  Description of Artificial Sequence: Synthetic oligonucleotide
  Antisense strand to SEQ ID NO: 1162932
uuuacccagcucugagagu

SEQ ID NO: 1162934 - RNA, 19 nt, Artificial Sequence
  Description of Artificial Sequence: Synthetic oligonucleotide
  Sense strand starting at position 1984 of SEQ ID NO: 916518
gcuugaacauuggucaaua

SEQ ID NO: 1162935 - RNA, 19 nt, Artificial Sequence
  Description of Artificial Sequence: Synthetic oligonucleotide
  Antisense strand to SEQ ID NO: 1162934
uauugaccaauguucaagc

SEQ ID NO: 1162936 - RNA, 19 nt, Artificial Sequence
  Description of Artificial Sequence: Synthetic oligonucleotide
  Sense strand starting at position 1985 of SEQ ID NO: 916518
cuugaacauuggucaauag

SEQ ID NO: 1162937 - RNA, 19 nt, Artificial Sequence
  Description of Artificial Sequence: Synthetic oligonucleotide
  Antisense strand to SEQ ID NO: 1162936
cuauugaccaauguucaag

SEQ ID NO: 1162938 - RNA, 19 nt, Artificial Sequence
  Description of Artificial Sequence: Synthetic oligonucleotide
  Sense strand starting at position 2047 of SEQ ID NO: 916518
ccguuaaaccaaugggaaa

SEQ ID NO: 1162939 - RNA, 19 nt, Artificial Sequence
  Description of Artificial Sequence: Synthetic oligonucleotide
  Antisense strand to SEQ ID NO: 1162938
uuucccauugguuuaacgg

SEQ ID NO: 1162940 - RNA, 19 nt, Artificial Sequence
  Description of Artificial Sequence: Synthetic oligonucleotide
  Sense strand starting at position 2062 of SEQ ID NO: 916518
gaaacaagucccugggagu

SEQ ID NO: 1162941 - RNA, 19 nt, Artificial Sequence
  Description of Artificial Sequence: Synthetic oligonucleotide
  Antisense strand to SEQ ID NO: 1162940
acucccagggacuuguuuc

SEQ ID NO: 1162942 - RNA, 19 nt, Artificial Sequence
  Description of Artificial Sequence: Synthetic oligonucleotide
  Sense strand starting at position 2386 of SEQ ID NO: 916518
ccgugaaucguggugucgu

SEQ ID NO: 1162943 - RNA, 19 nt, Artificial Sequence
  Description of Artificial Sequence: Synthetic oligonucleotide
  Antisense strand to SEQ ID NO: 1162942
acgacaccacgauucacgg

SEQ ID NO: 1162944 - RNA, 19 nt, Artificial Sequence
  Description of Artificial Sequence: Synthetic oligonucleotide
  Sense strand starting at position 2602 of SEQ ID NO: 916518
cucagauugugaccaaucu

SEQ ID NO: 1162945 - RNA, 19 nt, Artificial Sequence
  Description of Artificial Sequence: Synthetic oligonucleotide
  Antisense strand to SEQ ID NO: 1162944
agauuggucacaaucugag

SEQ ID NO: 1162946 - RNA, 19 nt, Artificial Sequence
  Description of Artificial Sequence: Synthetic oligonucleotide
  Sense strand starting at position 2610 of SEQ ID NO: 916518
gugaccaaucuccaaagca

SEQ ID NO: 1162947 - RNA, 19 nt, Artificial Sequence
  Description of Artificial Sequence: Synthetic oligonucleotide
  Antisense strand to SEQ ID NO: 1162946
ugcuuuggagauuggucac

SEQ ID NO: 1162948 - RNA, 19 nt, Artificial Sequence
  Description of Artificial Sequence: Synthetic oligonucleotide
  Sense strand starting at position 2723 of SEQ ID NO: 916518
ucuagaguaccguggauua

SEQ ID NO: 1162949 - RNA, 19 nt, Artificial Sequence
  Description of Artificial Sequence: Synthetic oligonucleotide
  Antisense strand to SEQ ID NO: 1162948
uaauccacgguacucuaga

SEQ ID NO: 1162950 - RNA, 19 nt, Artificial Sequence
  Description of Artificial Sequence: Synthetic oligonucleotide
  Sense strand starting at position 2725 of SEQ ID NO: 916518
uagaguaccguggauuaau

SEQ ID NO: 1162951 - RNA, 19 nt, Artificial Sequence
  Description of Artificial Sequence: Synthetic oligonucleotide
  Antisense strand to SEQ ID NO: 1162950
auuaauccacgguacucua

SEQ ID NO: 1162952 - RNA, 19 nt, Artificial Sequence
  Description of Artificial Sequence: Synthetic oligonucleotide
  Sense strand starting at position 2728 of SEQ ID NO: 916518
aguaccguggauuaauaau

SEQ ID NO: 1162953 - RNA, 19 nt, Artificial Sequence
  Description of Artificial Sequence: Synthetic oligonucleotide
  Antisense strand to SEQ ID NO: 1162952
auuauuaauccacgguacu

SEQ ID NO: 1162954 - RNA, 19 nt, Artificial Sequence
  Description of Artificial Sequence: Synthetic oligonucleotide
  Sense strand starting at position 2772 of SEQ ID NO: 916518
gaaauuaaccuucgaaugg

SEQ ID NO: 1162955 - RNA, 19 nt, Artificial Sequence
  Description of Artificial Sequence: Synthetic oligonucleotide
  Antisense strand to SEQ ID NO: 1162954
ccauucgaagguuaauuuc

SEQ ID NO: 1162956 - RNA, 19 nt, Artificial Sequence
  Description of Artificial Sequence: Synthetic oligonucleotide
  Sense strand starting at position 2825 of SEQ ID NO: 916518
ccuugaguuguuuacauug

SEQ ID NO: 1162957 - RNA, 19 nt, Artificial Sequence
  Description of Artificial Sequence: Synthetic oligonucleotide
  Antisense strand to SEQ ID NO: 1162956
caauguaaacaacucaagg

SEQ ID NO: 1162958 - RNA, 19 nt, Artificial Sequence
  Description of Artificial Sequence: Synthetic oligonucleotide
  Sense strand starting at position 2959 of SEQ ID NO: 916518
guugguggaguauaagaua

SEQ ID NO: 1162959 - RNA, 19 nt, Artificial Sequence
  Description of Artificial Sequence: Synthetic oligonucleotide
  Antisense strand to SEQ ID NO: 1162958
uaucuuauacuccaccaac

SEQ ID NO: 1162960 - RNA, 19 nt, Artificial Sequence
  Description of Artificial Sequence: Synthetic oligonucleotide
  Sense strand starting at position 3116 of SEQ ID NO: 916518
agacccugucugugaacaa

SEQ ID NO: 1162961 - RNA, 19 nt, Artificial Sequence
  Description of Artificial Sequence: Synthetic oligonucleotide
  Antisense strand to SEQ ID NO: 1162960
uuguucacagacagggucu

SEQ ID NO: 1162962 - RNA, 19 nt, Artificial Sequence
  Description of Artificial Sequence: Synthetic oligonucleotide
  Sense strand starting at position 3187 of SEQ ID NO: 916518
gaguuugaggcaggaguau

SEQ ID NO: 1162963 - RNA, 19 nt, Artificial Sequence
  Description of Artificial Sequence: Synthetic oligonucleotide
  Antisense strand to SEQ ID NO: 1162962
auacuccugccucaaacuc

SEQ ID NO: 1162964 - RNA, 19 nt, Artificial Sequence
  Description of Artificial Sequence: Synthetic oligonucleotide
  Sense strand starting at position 3465 of SEQ ID NO: 916518
uaauuucgguaggauagaa

SEQ ID NO: 1162965 - RNA, 19 nt, Artificial Sequence
  Description of Artificial Sequence: Synthetic oligonucleotide
  Antisense strand to SEQ ID NO: 1162964
uucuauccuaccgaaauua

SEQ ID NO: 1162966 - RNA, 19 nt, Artificial Sequence
  Description of Artificial Sequence: Synthetic oligonucleotide
  Sense strand starting at position 3469 of SEQ ID NO: 916518
uucgguaggauagaaguua

SEQ ID NO: 1162967 - RNA, 19 nt, Artificial Sequence
  Description of Artificial Sequence: Synthetic oligonucleotide
  Antisense strand to SEQ ID NO: 1162966
uaacuucuauccuaccgaa

SEQ ID NO: 1162968 - RNA, 19 nt, Artificial Sequence
  Description of Artificial Sequence: Synthetic oligonucleotide
  Sense strand starting at position 3549 of SEQ ID NO: 916518
cuaggaaggugucucaucu

SEQ ID NO: 1162969 - RNA, 19 nt, Artificial Sequence
  Description of Artificial Sequence: Synthetic oligonucleotide
  Antisense strand to SEQ ID NO: 1162968
agaugagacaccuuccuag

SEQ ID NO: 1162970 - RNA, 19 nt, Artificial Sequence
  Description of Artificial Sequence: Synthetic oligonucleotide
  Sense strand starting at position 3573 of SEQ ID NO: 916518
auaguuuccuccucaguaa

SEQ ID NO: 1162971 - RNA, 19 nt, Artificial Sequence
  Description of Artificial Sequence: Synthetic oligonucleotide
  Antisense strand to SEQ ID NO: 1162970
uuacugaggaggaaacuau

SEQ ID NO: 1162972 - RNA, 19 nt, Artificial Sequence
  Description of Artificial Sequence: Synthetic oligonucleotide
  Sense strand starting at position 3638 of SEQ ID NO: 916518
ccaggauaauuccagaaga

SEQ ID NO: 1162973 - RNA, 19 nt, Artificial Sequence
  Description of Artificial Sequence: Synthetic oligonucleotide
  Antisense strand to SEQ ID NO: 1162972
ucuucuggaauuauccugg

SEQ ID NO: 1162974 - RNA, 19 nt, Artificial Sequence
  Description of Artificial Sequence: Synthetic oligonucleotide
  Sense strand starting at position 3654 of SEQ ID NO: 916518
agauaaugccuguaaacua

SEQ ID NO: 1162975 - RNA, 19 nt, Artificial Sequence
  Description of Artificial Sequence: Synthetic oligonucleotide
  Antisense strand to SEQ ID NO: 1162974
uaguuuacaggcauuaucu

SEQ ID NO: 1162976 - RNA, 19 nt, Artificial Sequence
  Description of Artificial Sequence: Synthetic oligonucleotide
  Sense strand starting at position 3729 of SEQ ID NO: 916518
uauugagcaucuuuguuga

SEQ ID NO: 1162977 - RNA, 19 nt, Artificial Sequence
  Description of Artificial Sequence: Synthetic oligonucleotide
  Antisense strand to SEQ ID NO: 1162976
ucaacaaagaugcucaaua

SEQ ID NO: 1162978 - RNA, 19 nt, Artificial Sequence
  Description of Artificial Sequence: Synthetic oligonucleotide
  Sense strand starting at position 17 of SEQ ID NO: 916519
caaagaauuuauggguaua

SEQ ID NO: 1162979 - RNA, 19 nt, Artificial Sequence
  Description of Artificial Sequence: Synthetic oligonucleotide
  Antisense strand to SEQ ID NO: 1162978
uauacccauaaauucuuug

SEQ ID NO: 1162980 - RNA, 19 nt, Artificial Sequence
  Description of Artificial Sequence: Synthetic oligonucleotide
  Sense strand starting at position 228 of SEQ ID NO: 916519
agugaaucagacugaguug

SEQ ID NO: 1162981 - RNA, 19 nt, Artificial Sequence
  Description of Artificial Sequence: Synthetic oligonucleotide
  Antisense strand to SEQ ID NO: 1162980
caacucagucugauucacu

SEQ ID NO: 1162982 - RNA, 19 nt, Artificial Sequence
  Description of Artificial Sequence: Synthetic oligonucleotide
  Sense strand starting at position 229 of SEQ ID NO: 916519
gugaaucagacugaguugu

SEQ ID NO: 1162983 - RNA, 19 nt, Artificial Sequence
  Description of Artificial Sequence: Synthetic oligonucleotide
  Antisense strand to SEQ ID NO: 1162982
acaacucagucugauucac

SEQ ID NO: 1162984 - RNA, 19 nt, Artificial Sequence
  Description of Artificial Sequence: Synthetic oligonucleotide
  Sense strand starting at position 231 of SEQ ID NO: 916519
gaaucagacugaguuguca

SEQ ID NO: 1162985 - RNA, 19 nt, Artificial Sequence
  Description of Artificial Sequence: Synthetic oligonucleotide
  Antisense strand to SEQ ID NO: 1162984
ugacaacucagucugauuc

SEQ ID NO: 1162986 - RNA, 19 nt, Artificial Sequence
  Description of Artificial Sequence: Synthetic oligonucleotide
  Sense strand starting at position 235 of SEQ ID NO: 916519
cagacugaguugucaaaug

SEQ ID NO: 1162987 - RNA, 19 nt, Artificial Sequence
  Description of Artificial Sequence: Synthetic oligonucleotide
  Antisense strand to SEQ ID NO: 1162986
cauuugacaacucagucug

SEQ ID NO: 1162988 - RNA, 19 nt, Artificial Sequence
  Description of Artificial Sequence: Synthetic oligonucleotide
  Sense strand starting at position 269 of SEQ ID NO: 916519
cgccuuugcgaucagaaua

SEQ ID NO: 1162989 - RNA, 19 nt, Artificial Sequence
  Description of Artificial Sequence: Synthetic oligonucleotide
  Antisense strand to SEQ ID NO: 1162988
uauucugaucgcaaaggcg

SEQ ID NO: 1162990 - RNA, 19 nt, Artificial Sequence
  Description of Artificial Sequence: Synthetic oligonucleotide
  Sense strand starting at position 416 of SEQ ID NO: 916519
acaauauuguguuuccagu

SEQ ID NO: 1162991 - RNA, 19 nt, Artificial Sequence
  Description of Artificial Sequence: Synthetic oligonucleotide
  Antisense strand to SEQ ID NO: 1162990
acuggaaacacaauauugu

SEQ ID NO: 1162992 - RNA, 19 nt, Artificial Sequence
  Description of Artificial Sequence: Synthetic oligonucleotide
  Sense strand starting at position 435 of SEQ ID NO: 916519
uuggaaacaugguagaaug

SEQ ID NO: 1162993 - RNA, 19 nt, Artificial Sequence
  Description of Artificial Sequence: Synthetic oligonucleotide
  Antisense strand to SEQ ID NO: 1162992
cauucuaccauguuuccaa

SEQ ID NO: 1162994 - RNA, 19 nt, Artificial Sequence
  Description of Artificial Sequence: Synthetic oligonucleotide
  Sense strand starting at position 466 of SEQ ID NO: 916519
guacacuucggagagguua

SEQ ID NO: 1162995 - RNA, 19 nt, Artificial Sequence
  Description of Artificial Sequence: Synthetic oligonucleotide
  Antisense strand to SEQ ID NO: 1162994
uaaccucuccgaaguguac

SEQ ID NO: 1162996 - RNA, 19 nt, Artificial Sequence
  Description of Artificial Sequence: Synthetic oligonucleotide
  Sense strand starting at position 468 of SEQ ID NO: 916519
acacuucggagagguuaaa

SEQ ID NO: 1162997 - RNA, 19 nt, Artificial Sequence
  Description of Artificial Sequence: Synthetic oligonucleotide
  Antisense strand to SEQ ID NO: 1162996
uuuaaccucuccgaagugu

SEQ ID NO: 1162998 - RNA, 19 nt, Artificial Sequence
  Description of Artificial Sequence: Synthetic oligonucleotide
  Sense strand starting at position 474 of SEQ ID NO: 916519
cggagagguuaaagugaca

SEQ ID NO: 1162999 - RNA, 19 nt, Artificial Sequence
  Description of Artificial Sequence: Synthetic oligonucleotide
  Antisense strand to SEQ ID NO: 1162998
ugucacuuuaaccucuccg

SEQ ID NO: 1163000 - RNA, 19 nt, Artificial Sequence
  Description of Artificial Sequence: Synthetic oligonucleotide
  Sense strand starting at position 572 of SEQ ID NO: 916519
cugccugacagucaggauu

SEQ ID NO: 1163001 - RNA, 19 nt, Artificial Sequence
  Description of Artificial Sequence: Synthetic oligonucleotide
  Antisense strand to SEQ ID NO: 1163000
aauccugacugucaggcag

SEQ ID NO: 1163002 - RNA, 19 nt, Artificial Sequence
  Description of Artificial Sequence: Synthetic oligonucleotide
  Sense strand starting at position 585 of SEQ ID NO: 916519
aggauuaaguucccauauu

SEQ ID NO: 1163003 - RNA, 19 nt, Artificial Sequence
  Description of Artificial Sequence: Synthetic oligonucleotide
  Antisense strand to SEQ ID NO: 1163002
aauaugggaacuuaauccu

SEQ ID NO: 1163004 - RNA, 19 nt, Artificial Sequence
  Description of Artificial Sequence: Synthetic oligonucleotide
  Sense strand starting at position 609 of SEQ ID NO: 916519
augcauuuggugugguuau

SEQ ID NO: 1163005 - RNA, 19 nt, Artificial Sequence
  Description of Artificial Sequence: Synthetic oligonucleotide
  Antisense strand to SEQ ID NO: 1163004
auaaccacaccaaaugcau

SEQ ID NO: 1163006 - RNA, 19 nt, Artificial Sequence
  Description of Artificial Sequence: Synthetic oligonucleotide
  Sense strand starting at position 655 of SEQ ID NO: 916519
gcccucugccacuaaguaa

SEQ ID NO: 1163007 - RNA, 19 nt, Artificial Sequence
  Description of Artificial Sequence: Synthetic oligonucleotide
  Antisense strand to SEQ ID NO: 1163006
uuacuuaguggcagagggc

SEQ ID NO: 1163008 - RNA, 19 nt, Artificial Sequence
  Description of Artificial Sequence: Synthetic oligonucleotide
  Sense strand starting at position 703 of SEQ ID NO: 916519
ugucaacacugguuacuua

SEQ ID NO: 1163009 - RNA, 19 nt, Artificial Sequence
  Description of Artificial Sequence: Synthetic oligonucleotide
  Antisense strand to SEQ ID NO: 1163008
uaaguaaccaguguugaca

SEQ ID NO: 1163010 - RNA, 19 nt, Artificial Sequence
  Description of Artificial Sequence: Synthetic oligonucleotide
  Sense strand starting at position 704 of SEQ ID NO: 916519
gucaacacugguuacuuaa

SEQ ID NO: 1163011 - RNA, 19 nt, Artificial Sequence
  Description of Artificial Sequence: Synthetic oligonucleotide
  Antisense strand to SEQ ID NO: 1163010
uuaaguaaccaguguugac

SEQ ID NO: 1163012 - RNA, 19 nt, Artificial Sequence
  Description of Artificial Sequence: Synthetic oligonucleotide
  Sense strand starting at position 1055 of SEQ ID NO: 916519
accaauugguagcuuuaau

SEQ ID NO: 1163013 - RNA, 19 nt, Artificial Sequence
  Description of Artificial Sequence: Synthetic oligonucleotide
  Antisense strand to SEQ ID NO: 1163012
auuaaagcuaccaauuggu

SEQ ID NO: 1163014 - RNA, 19 nt, Artificial Sequence
  Description of Artificial Sequence: Synthetic oligonucleotide
  Sense strand starting at position 1096 of SEQ ID NO: 916519
gagaaacuuuguuagggaa

SEQ ID NO: 1163015 - RNA, 19 nt, Artificial Sequence
  Description of Artificial Sequence: Synthetic oligonucleotide
  Antisense strand to SEQ ID NO: 1163014
uucccuaacaaaguuucuc

SEQ ID NO: 1163016 - RNA, 19 nt, Artificial Sequence
  Description of Artificial Sequence: Synthetic oligonucleotide
  Sense strand starting at position 1276 of SEQ ID NO: 916519
gcaagaauuuaauaacgaa

SEQ ID NO: 1163017 - RNA, 19 nt, Artificial Sequence
  Description of Artificial Sequence: Synthetic oligonucleotide
  Antisense strand to SEQ ID NO: 1163016
uucguuauuaaauucuugc

SEQ ID NO: 1163018 - RNA, 19 nt, Artificial Sequence
  Description of Artificial Sequence: Synthetic oligonucleotide
  Sense strand starting at position 1325 of SEQ ID NO: 916519
acccuucgucuguauauuu

SEQ ID NO: 1163019 - RNA, 19 nt, Artificial Sequence
  Description of Artificial Sequence: Synthetic oligonucleotide
  Antisense strand to SEQ ID NO: 1163018
aaauauacagacgaagggu

SEQ ID NO: 1163020 - RNA, 19 nt, Artificial Sequence
  Description of Artificial Sequence: Synthetic oligonucleotide
  Sense strand starting at position 1521 of SEQ ID NO: 916519
acguaaucuguuuaccauc

SEQ ID NO: 1163021 - RNA, 19 nt, Artificial Sequence
  Description of Artificial Sequence: Synthetic oligonucleotide
  Antisense strand to SEQ ID NO: 1163020
gaugguaaacagauuacgu

SEQ ID NO: 1163022 - RNA, 19 nt, Artificial Sequence
  Description of Artificial Sequence: Synthetic oligonucleotide
  Sense strand starting at position 1628 of SEQ ID NO: 916519
uagaaacuaucguuaucag

SEQ ID NO: 1163023 - RNA, 19 nt, Artificial Sequence
  Description of Artificial Sequence: Synthetic oligonucleotide
  Antisense strand to SEQ ID NO: 1163022
cugauaacgauaguuucua

SEQ ID NO: 1163024 - RNA, 19 nt, Artificial Sequence
  Description of Artificial Sequence: Synthetic oligonucleotide
  Sense strand starting at position 1662 of SEQ ID NO: 916519
auauacucucgcuguauuu

SEQ ID NO: 1163025 - RNA, 19 nt, Artificial Sequence
  Description of Artificial Sequence: Synthetic oligonucleotide
  Antisense strand to SEQ ID NO: 1163024
aaauacagcgagaguauau

SEQ ID NO: 1163026 - RNA, 19 nt, Artificial Sequence
  Description of Artificial Sequence: Synthetic oligonucleotide
  Sense strand starting at position 1680 of SEQ ID NO: 916519
uuuccucuggucuguuuaa

SEQ ID NO: 1163027 - RNA, 19 nt, Artificial Sequence
  Description of Artificial Sequence: Synthetic oligonucleotide
  Antisense strand to SEQ ID NO: 1163026
uuaaacagaccagaggaaa

SEQ ID NO: 1163028 - RNA, 19 nt, Artificial Sequence
  Description of Artificial Sequence: Synthetic oligonucleotide
  Sense strand starting at position 1681 of SEQ ID NO: 916519
uuccucuggucuguuuaau

SEQ ID NO: 1163029 - RNA, 19 nt, Artificial Sequence
  Description of Artificial Sequence: Synthetic oligonucleotide
  Antisense strand to SEQ ID NO: 1163028
auuaaacagaccagaggaa

SEQ ID NO: 1163030 - RNA, 19 nt, Artificial Sequence
  Description of Artificial Sequence: Synthetic oligonucleotide
  Sense strand starting at position 2132 of SEQ ID NO: 916519
ucucauguggcugaugaga

SEQ ID NO: 1163031 - RNA, 19 nt, Artificial Sequence
  Description of Artificial Sequence: Synthetic oligonucleotide
  Antisense strand to SEQ ID NO: 1163030
ucucaucagccacaugaga

SEQ ID NO: 1163032 - RNA, 19 nt, Artificial Sequence
  Description of Artificial Sequence: Synthetic oligonucleotide
  Sense strand starting at position 2243 of SEQ ID NO: 916519
aaguuugcuggaugauuaa

SEQ ID NO: 1163033 - RNA, 19 nt, Artificial Sequence
  Description of Artificial Sequence: Synthetic oligonucleotide
  Antisense strand to SEQ ID NO: 1163032
uuaaucauccagcaaacuu

SEQ ID NO: 1163034 - RNA, 19 nt, Artificial Sequence
  Description of Artificial Sequence: Synthetic oligonucleotide
  Sense strand starting at position 2453 of SEQ ID NO: 916519
gccaaaucucuagguuaaa

SEQ ID NO: 1163035 - RNA, 19 nt, Artificial Sequence
  Description of Artificial Sequence: Synthetic oligonucleotide
  Antisense strand to SEQ ID NO: 1163034
uuuaaccuagagauuuggc

SEQ ID NO: 1163036 - RNA, 19 nt, Artificial Sequence
  Description of Artificial Sequence: Synthetic oligonucleotide
  Sense strand starting at position 2478 of SEQ ID NO: 916519
gucucauguucuucucuaa

SEQ ID NO: 1163037 - RNA, 19 nt, Artificial Sequence
  Description of Artificial Sequence: Synthetic oligonucleotide
  Antisense strand to SEQ ID NO: 1163036
uuagagaagaacaugagac

SEQ ID NO: 1163038 - RNA, 19 nt, Artificial Sequence
  Description of Artificial Sequence: Synthetic oligonucleotide
  Sense strand starting at position 2521 of SEQ ID NO: 916519
gauacucugcguuugcauu

SEQ ID NO: 1163039 - RNA, 19 nt, Artificial Sequence
  Description of Artificial Sequence: Synthetic oligonucleotide
  Antisense strand to SEQ ID NO: 1163038
aaugcaaacgcagaguauc

SEQ ID NO: 1163040 - RNA, 19 nt, Artificial Sequence
  Description of Artificial Sequence: Synthetic oligonucleotide
  Sense strand starting at position 2611 of SEQ ID NO: 916519
guggaugaagcuugagaac

SEQ ID NO: 1163041 - RNA, 19 nt, Artificial Sequence
  Description of Artificial Sequence: Synthetic oligonucleotide
  Antisense strand to SEQ ID NO: 1163040
guucucaagcuucauccac

SEQ ID NO: 1163042 - RNA, 19 nt, Artificial Sequence
  Description of Artificial Sequence: Synthetic oligonucleotide
  Sense strand starting at position 3041 of SEQ ID NO: 916519
ggcaaauccauauggugag

SEQ ID NO: 1163043 - RNA, 19 nt, Artificial Sequence
  Description of Artificial Sequence: Synthetic oligonucleotide
  Antisense strand to SEQ ID NO: 1163042
cucaccauauggauuugcc

SEQ ID NO: 1163044 - RNA, 19 nt, Artificial Sequence
  Description of Artificial Sequence: Synthetic oligonucleotide
  Sense strand starting at position 3084 of SEQ ID NO: 916519
gccuaagggagguggaauu

SEQ ID NO: 1163045 - RNA, 19 nt, Artificial Sequence
  Description of Artificial Sequence: Synthetic oligonucleotide
  Antisense strand to SEQ ID NO: 1163044
aauuccaccucccuuaggc

SEQ ID NO: 1163046 - RNA, 19 nt, Artificial Sequence
  Description of Artificial Sequence: Synthetic oligonucleotide
  Sense strand starting at position 3479 of SEQ ID NO: 916519
guugaaagacuguaguaga

SEQ ID NO: 1163047 - RNA, 19 nt, Artificial Sequence
  Description of Artificial Sequence: Synthetic oligonucleotide
  Antisense strand to SEQ ID NO: 1163046
ucuacuacagucuuucaac

SEQ ID NO: 1163048 - RNA, 19 nt, Artificial Sequence
  Description of Artificial Sequence: Synthetic oligonucleotide
  Sense strand starting at position 3499 of SEQ ID NO: 916519
guggucacuuucucccaaa

SEQ ID NO: 1163049 - RNA, 19 nt, Artificial Sequence
  Description of Artificial Sequence: Synthetic oligonucleotide
  Antisense strand to SEQ ID NO: 1163048
uuugggagaaagugaccac

SEQ ID NO: 1163050 - RNA, 19 nt, Artificial Sequence
  Description of Artificial Sequence: Synthetic oligonucleotide
  Sense strand starting at position 3519 of SEQ ID NO: 916519
cgcucauggaacugauaga

SEQ ID NO: 1163051 - RNA, 19 nt, Artificial Sequence
  Description of Artificial Sequence: Synthetic oligonucleotide
  Antisense strand to SEQ ID NO: 1163050
ucuaucaguuccaugagcg

SEQ ID NO: 1163052 - RNA, 19 nt, Artificial Sequence
  Description of Artificial Sequence: Synthetic oligonucleotide
  Sense strand starting at position 3603 of SEQ ID NO: 916519
ggacuaaccugaguuuaua

SEQ ID NO: 1163053 - RNA, 19 nt, Artificial Sequence
  Description of Artificial Sequence: Synthetic oligonucleotide
  Antisense strand to SEQ ID NO: 1163052
uauaaacucagguuagucc

SEQ ID NO: 1163054 - RNA, 19 nt, Artificial Sequence
  Description of Artificial Sequence: Synthetic oligonucleotide
  Sense strand starting at position 3683 of SEQ ID NO: 916519
uuugauugauugguacuga

SEQ ID NO: 1163055 - RNA, 19 nt, Artificial Sequence
  Description of Artificial Sequence: Synthetic oligonucleotide
  Antisense strand to SEQ ID NO: 1163054
ucaguaccaaucaaucaaa

SEQ ID NO: 1163056 - RNA, 19 nt, Artificial Sequence
  Description of Artificial Sequence: Synthetic oligonucleotide
  Sense strand starting at position 3828 of SEQ ID NO: 916519
agcaucaugcuuuaguuau

SEQ ID NO: 1163057 - RNA, 19 nt, Artificial Sequence
  Description of Artificial Sequence: Synthetic oligonucleotide
  Antisense strand to SEQ ID NO: 1163056
auaacuaaagcaugaugcu

SEQ ID NO: 1163058 - RNA, 19 nt, Artificial Sequence
  Description of Artificial Sequence: Synthetic oligonucleotide
  Sense strand starting at position 54 of SEQ ID NO: 916520
uuaucuguggcauauacua

SEQ ID NO: 1163059 - RNA, 19 nt, Artificial Sequence
  Description of Artificial Sequence: Synthetic oligonucleotide
  Antisense strand to SEQ ID NO: 1163058
uaguauaugccacagauaa

SEQ ID NO: 1163060 - RNA, 19 nt, Artificial Sequence
  Description of Artificial Sequence: Synthetic oligonucleotide
  Sense strand starting at position 148 of SEQ ID NO: 916520
uaggucagcuccucugaca

SEQ ID NO: 1163061 - RNA, 19 nt, Artificial Sequence
  Description of Artificial Sequence: Synthetic oligonucleotide
  Antisense strand to SEQ ID NO: 1163060
ugucagaggagcugaccua

SEQ ID NO: 1163062 - RNA, 19 nt, Artificial Sequence
  Description of Artificial Sequence: Synthetic oligonucleotide
  Sense strand starting at position 429 of SEQ ID NO: 916520
agaaucuuauaggcugaau

SEQ ID NO: 1163063 - RNA, 19 nt, Artificial Sequence
  Description of Artificial Sequence: Synthetic oligonucleotide
  Antisense strand to SEQ ID NO: 1163062
auucagccuauaagauucu

SEQ ID NO: 1163064 - RNA, 19 nt, Artificial Sequence
  Description of Artificial Sequence: Synthetic oligonucleotide
  Sense strand starting at position 432 of SEQ ID NO: 916520
aucuuauaggcugaauugu

SEQ ID NO: 1163065 - RNA, 19 nt, Artificial Sequence
  Description of Artificial Sequence: Synthetic oligonucleotide
  Antisense strand to SEQ ID NO: 1163064
acaauucagccuauaagau

SEQ ID NO: 1163066 - RNA, 19 nt, Artificial Sequence
  Description of Artificial Sequence: Synthetic oligonucleotide
  Sense strand starting at position 442 of SEQ ID NO: 916520
cugaauuguuagguugaac

SEQ ID NO: 1163067 - RNA, 19 nt, Artificial Sequence
  Description of Artificial Sequence: Synthetic oligonucleotide
  Antisense strand to SEQ ID NO: 1163066
guucaaccuaacaauucag

SEQ ID NO: 1163068 - RNA, 19 nt, Artificial Sequence
  Description of Artificial Sequence: Synthetic oligonucleotide
  Sense strand starting at position 455 of SEQ ID NO: 916520
uugaacuggucuuuaaacu

SEQ ID NO: 1163069 - RNA, 19 nt, Artificial Sequence
  Description of Artificial Sequence: Synthetic oligonucleotide
  Antisense strand to SEQ ID NO: 1163068
aguuuaaagaccaguucaa

SEQ ID NO: 1163070 - RNA, 19 nt, Artificial Sequence
  Description of Artificial Sequence: Synthetic oligonucleotide
  Sense strand starting at position 456 of SEQ ID NO: 916520
ugaacuggucuuuaaacuc

SEQ ID NO: 1163071 - RNA, 19 nt, Artificial Sequence
  Description of Artificial Sequence: Synthetic oligonucleotide
  Antisense strand to SEQ ID NO: 1163070
gaguuuaaagaccaguuca

SEQ ID NO: 1163072 - RNA, 19 nt, Artificial Sequence
  Description of Artificial Sequence: Synthetic oligonucleotide
  Sense strand starting at position 466 of SEQ ID NO: 916520
uuuaaacuccugugaaguu

SEQ ID NO: 1163073 - RNA, 19 nt, Artificial Sequence
  Description of Artificial Sequence: Synthetic oligonucleotide
  Antisense strand to SEQ ID NO: 1163072
aacuucacaggaguuuaaa

SEQ ID NO: 1163074 - RNA, 19 nt, Artificial Sequence
  Description of Artificial Sequence: Synthetic oligonucleotide
  Sense strand starting at position 562 of SEQ ID NO: 916520
uuacauucgggcuauaaua

SEQ ID NO: 1163075 - RNA, 19 nt, Artificial Sequence
  Description of Artificial Sequence: Synthetic oligonucleotide
  Antisense strand to SEQ ID NO: 1163074
uauuauagcccgaauguaa

SEQ ID NO: 1163076 - RNA, 19 nt, Artificial Sequence
  Description of Artificial Sequence: Synthetic oligonucleotide
  Sense strand starting at position 564 of SEQ ID NO: 916520
acauucgggcuauaauaca

SEQ ID NO: 1163077 - RNA, 19 nt, Artificial Sequence
  Description of Artificial Sequence: Synthetic oligonucleotide
  Antisense strand to SEQ ID NO: 1163076
uguauuauagcccgaaugu

SEQ ID NO: 1163078 - RNA, 19 nt, Artificial Sequence
  Description of Artificial Sequence: Synthetic oligonucleotide
  Sense strand starting at position 664 of SEQ ID NO: 916520
guaaccgaacacugucaau

SEQ ID NO: 1163079 - RNA, 19 nt, Artificial Sequence
  Description of Artificial Sequence: Synthetic oligonucleotide
  Antisense strand to SEQ ID NO: 1163078
auugacaguguucgguuac

SEQ ID NO: 1163080 - RNA, 19 nt, Artificial Sequence
  Description of Artificial Sequence: Synthetic oligonucleotide
  Sense strand starting at position 744 of SEQ ID NO: 916520
caaucucugugcuugaaga

SEQ ID NO: 1163081 - RNA, 19 nt, Artificial Sequence
  Description of Artificial Sequence: Synthetic oligonucleotide
  Antisense strand to SEQ ID NO: 1163080
ucuucaagcacagagauug

SEQ ID NO: 1163082 - RNA, 19 nt, Artificial Sequence
  Description of Artificial Sequence: Synthetic oligonucleotide
  Sense strand starting at position 746 of SEQ ID NO: 916520
aucucugugcuugaagaag

SEQ ID NO: 1163083 - RNA, 19 nt, Artificial Sequence
  Description of Artificial Sequence: Synthetic oligonucleotide
  Antisense strand to SEQ ID NO: 1163082
cuucuucaagcacagagau

SEQ ID NO: 1163084 - RNA, 19 nt, Artificial Sequence
  Description of Artificial Sequence: Synthetic oligonucleotide
  Sense strand starting at position 810 of SEQ ID NO: 916520
ugugcauuggguuaaccau

SEQ ID NO: 1163085 - RNA, 19 nt, Artificial Sequence
  Description of Artificial Sequence: Synthetic oligonucleotide
  Antisense strand to SEQ ID NO: 1163084
augguuaacccaaugcaca

SEQ ID NO: 1163086 - RNA, 19 nt, Artificial Sequence
  Description of Artificial Sequence: Synthetic oligonucleotide
  Sense strand starting at position 992 of SEQ ID NO: 916520
guggguauuucuuuccauu

SEQ ID NO: 1163087 - RNA, 19 nt, Artificial Sequence
  Description of Artificial Sequence: Synthetic oligonucleotide
  Antisense strand to SEQ ID NO: 1163086
aauggaaagaaauacccac

SEQ ID NO: 1163088 - RNA, 19 nt, Artificial Sequence
  Description of Artificial Sequence: Synthetic oligonucleotide
  Sense strand starting at position 1038 of SEQ ID NO: 916520
uagauauuagcguagggca

SEQ ID NO: 1163089 - RNA, 19 nt, Artificial Sequence
  Description of Artificial Sequence: Synthetic oligonucleotide
  Antisense strand to SEQ ID NO: 1163088
ugcccuacgcuaauaucua

SEQ ID NO: 1163090 - RNA, 19 nt, Artificial Sequence
  Description of Artificial Sequence: Synthetic oligonucleotide
  Sense strand starting at position 1054 of SEQ ID NO: 916520
gcaugauccacagauggca

SEQ ID NO: 1163091 - RNA, 19 nt, Artificial Sequence
  Description of Artificial Sequence: Synthetic oligonucleotide
  Antisense strand to SEQ ID NO: 1163090
ugccaucuguggaucaugc

SEQ ID NO: 1163092 - RNA, 19 nt, Artificial Sequence
  Description of Artificial Sequence: Synthetic oligonucleotide
  Sense strand starting at position 1139 of SEQ ID NO: 916520
augucaacacucgauuaca

SEQ ID NO: 1163093 - RNA, 19 nt, Artificial Sequence
  Description of Artificial Sequence: Synthetic oligonucleotide
  Antisense strand to SEQ ID NO: 1163092
uguaaucgaguguugacau

SEQ ID NO: 1163094 - RNA, 19 nt, Artificial Sequence
  Description of Artificial Sequence: Synthetic oligonucleotide
  Sense strand starting at position 1351 of SEQ ID NO: 916520
agaucuauugcuuaccaug

SEQ ID NO: 1163095 - RNA, 19 nt, Artificial Sequence
  Description of Artificial Sequence: Synthetic oligonucleotide
  Antisense strand to SEQ ID NO: 1163094
caugguaagcaauagaucu

SEQ ID NO: 1163096 - RNA, 19 nt, Artificial Sequence
  Description of Artificial Sequence: Synthetic oligonucleotide
  Sense strand starting at position 2041 of SEQ ID NO: 916520
uuuauauauucuuucggga

SEQ ID NO: 1163097 - RNA, 19 nt, Artificial Sequence
  Description of Artificial Sequence: Synthetic oligonucleotide
  Antisense strand to SEQ ID NO: 1163096
ucccgaaagaauauauaaa

SEQ ID NO: 1163098 - RNA, 19 nt, Artificial Sequence
  Description of Artificial Sequence: Synthetic oligonucleotide
  Sense strand starting at position 2266 of SEQ ID NO: 916520
ggaucacuuaaggaguguu

SEQ ID NO: 1163099 - RNA, 19 nt, Artificial Sequence
  Description of Artificial Sequence: Synthetic oligonucleotide
  Antisense strand to SEQ ID NO: 1163098
aacacuccuuaagugaucc

SEQ ID NO: 1163100 - RNA, 19 nt, Artificial Sequence
  Description of Artificial Sequence: Synthetic oligonucleotide
  Sense strand starting at position 2399 of SEQ ID NO: 916520
aauccugggcgugaggaau

SEQ ID NO: 1163101 - RNA, 19 nt, Artificial Sequence
  Description of Artificial Sequence: Synthetic oligonucleotide
  Antisense strand to SEQ ID NO: 1163100
auuccucacgcccaggauu

SEQ ID NO: 1163102 - RNA, 19 nt, Artificial Sequence
  Description of Artificial Sequence: Synthetic oligonucleotide
  Sense strand starting at position 2528 of SEQ ID NO: 916520
ucaaucuuggagugaauac

SEQ ID NO: 1163103 - RNA, 19 nt, Artificial Sequence
  Description of Artificial Sequence: Synthetic oligonucleotide
  Antisense strand to SEQ ID NO: 1163102
guauucacuccaagauuga

SEQ ID NO: 1163104 - RNA, 19 nt, Artificial Sequence
  Description of Artificial Sequence: Synthetic oligonucleotide
  Sense strand starting at position 2597 of SEQ ID NO: 916520
uugcucagauugucauuua

SEQ ID NO: 1163105 - RNA, 19 nt, Artificial Sequence
  Description of Artificial Sequence: Synthetic oligonucleotide
  Antisense strand to SEQ ID NO: 1163104
uaaaugacaaucugagcaa

SEQ ID NO: 1163106 - RNA, 19 nt, Artificial Sequence
  Description of Artificial Sequence: Synthetic oligonucleotide
  Sense strand starting at position 2621 of SEQ ID NO: 916520
ggcucuaccuuauugagag

SEQ ID NO: 1163107 - RNA, 19 nt, Artificial Sequence
  Description of Artificial Sequence: Synthetic oligonucleotide
  Antisense strand to SEQ ID NO: 1163106
cucucaauaagguagagcc

SEQ ID NO: 1163108 - RNA, 19 nt, Artificial Sequence
  Description of Artificial Sequence: Synthetic oligonucleotide
  Sense strand starting at position 2854 of SEQ ID NO: 916520
cacugaaagugucucuaag

SEQ ID NO: 1163109 - RNA, 19 nt, Artificial Sequence
  Description of Artificial Sequence: Synthetic oligonucleotide
  Antisense strand to SEQ ID NO: 1163108
cuuagagacacuuucagug

SEQ ID NO: 1163110 - RNA, 19 nt, Artificial Sequence
  Description of Artificial Sequence: Synthetic oligonucleotide
  Sense strand starting at position 2856 of SEQ ID NO: 916520
cugaaagugucucuaagau

SEQ ID NO: 1163111 - RNA, 19 nt, Artificial Sequence
  Description of Artificial Sequence: Synthetic oligonucleotide
  Antisense strand to SEQ ID NO: 1163110
aucuuagagacacuuucag

SEQ ID NO: 1163112 - RNA, 19 nt, Artificial Sequence
  Description of Artificial Sequence: Synthetic oligonucleotide
  Sense strand starting at position 3162 of SEQ ID NO: 916520
ucuuuagaacuucgaugga

SEQ ID NO: 1163113 - RNA, 19 nt, Artificial Sequence
  Description of Artificial Sequence: Synthetic oligonucleotide
  Antisense strand to SEQ ID NO: 1163112
uccaucgaaguucuaaaga

SEQ ID NO: 1163114 - RNA, 19 nt, Artificial Sequence
  Description of Artificial Sequence: Synthetic oligonucleotide
  Sense strand starting at position 3165 of SEQ ID NO: 916520
uuagaacuucgauggauag

SEQ ID NO: 1163115 - RNA, 19 nt, Artificial Sequence
  Description of Artificial Sequence: Synthetic oligonucleotide
  Antisense strand to SEQ ID NO: 1163114
cuauccaucgaaguucuaa

SEQ ID NO: 1163116 - RNA, 19 nt, Artificial Sequence
  Description of Artificial Sequence: Synthetic oligonucleotide
  Sense strand starting at position 3204 of SEQ ID NO: 916520
ucauuuaagugggaaugaa

SEQ ID NO: 1163117 - RNA, 19 nt, Artificial Sequence
  Description of Artificial Sequence: Synthetic oligonucleotide
  Antisense strand to SEQ ID NO: 1163116
uucauucccacuuaaauga

SEQ ID NO: 1163118 - RNA, 19 nt, Artificial Sequence
  Description of Artificial Sequence: Synthetic oligonucleotide
  Sense strand starting at position 3423 of SEQ ID NO: 916520
uaaauauaguggcuccgaa

SEQ ID NO: 1163119 - RNA, 19 nt, Artificial Sequence
  Description of Artificial Sequence: Synthetic oligonucleotide
  Antisense strand to SEQ ID NO: 1163118
uucggagccacuauauuua

SEQ ID NO: 1163120 - RNA, 19 nt, Artificial Sequence
  Description of Artificial Sequence: Synthetic oligonucleotide
  Sense strand starting at position 3440 of SEQ ID NO: 916520
aaguuauugcgaggaggag

SEQ ID NO: 1163121 - RNA, 19 nt, Artificial Sequence
  Description of Artificial Sequence: Synthetic oligonucleotide
  Antisense strand to SEQ ID NO: 1163120
cuccuccucgcaauaacuu

SEQ ID NO: 1163122 - RNA, 19 nt, Artificial Sequence
  Description of Artificial Sequence: Synthetic oligonucleotide
  Sense strand starting at position 3495 of SEQ ID NO: 916520
agugaaugguacuuuguac

SEQ ID NO: 1163123 - RNA, 19 nt, Artificial Sequence
  Description of Artificial Sequence: Synthetic oligonucleotide
  Antisense strand to SEQ ID NO: 1163122
guacaaaguaccauucacu

SEQ ID NO: 1163124 - RNA, 19 nt, Artificial Sequence
  Description of Artificial Sequence: Synthetic oligonucleotide
  Sense strand starting at position 3646 of SEQ ID NO: 916520
gugacacugucagucacua

SEQ ID NO: 1163125 - RNA, 19 nt, Artificial Sequence
  Description of Artificial Sequence: Synthetic oligonucleotide
  Antisense strand to SEQ ID NO: 1163124
uagugacugacagugucac

SEQ ID NO: 1163126 - RNA, 19 nt, Artificial Sequence
  Description of Artificial Sequence: Synthetic oligonucleotide
  Sense strand starting at position 3651 of SEQ ID NO: 916520
acugucagucacuaagguu

SEQ ID NO: 1163127 - RNA, 19 nt, Artificial Sequence
  Description of Artificial Sequence: Synthetic oligonucleotide
  Antisense strand to SEQ ID NO: 1163126
aaccuuagugacugacagu

SEQ ID NO: 1163128 - RNA, 19 nt, Artificial Sequence
  Description of Artificial Sequence: Synthetic oligonucleotide
  Sense strand starting at position 3773 of SEQ ID NO: 916520
ucaucugaccagugggaaa

SEQ ID NO: 1163129 - RNA, 19 nt, Artificial Sequence
  Description of Artificial Sequence: Synthetic oligonucleotide
  Antisense strand to SEQ ID NO: 1163128
uuucccacuggucagauga

SEQ ID NO: 1163130 - RNA, 19 nt, Artificial Sequence
  Description of Artificial Sequence: Synthetic oligonucleotide
  Sense strand starting at position 3820 of SEQ ID NO: 916520
acaagucuaugccuuugaa

SEQ ID NO: 1163131 - RNA, 19 nt, Artificial Sequence
  Description of Artificial Sequence: Synthetic oligonucleotide
  Antisense strand to SEQ ID NO: 1163130
uucaaaggcauagacuugu

SEQ ID NO: 1163132 - RNA, 19 nt, Artificial Sequence
  Description of Artificial Sequence: Synthetic oligonucleotide
  Sense strand starting at position 3823 of SEQ ID NO: 916520
agucuaugccuuugaaaug

SEQ ID NO: 1163133 - RNA, 19 nt, Artificial Sequence
  Description of Artificial Sequence: Synthetic oligonucleotide
  Antisense strand to SEQ ID NO: 1163132
cauuucaaaggcauagacu

SEQ ID NO: 1163134 - RNA, 19 nt, Artificial Sequence
  Description of Artificial Sequence: Synthetic oligonucleotide
  Sense strand starting at position 3975 of SEQ ID NO: 916520
aauacaauaguggguagau

SEQ ID NO: 1163135 - RNA, 19 nt, Artificial Sequence
  Description of Artificial Sequence: Synthetic oligonucleotide
  Antisense strand to SEQ ID NO: 1163134
aucuacccacuauuguauu

SEQ ID NO: 1163136 - RNA, 19 nt, Artificial Sequence
  Description of Artificial Sequence: Synthetic oligonucleotide
  Sense strand starting at position 3976 of SEQ ID NO: 916520
auacaauaguggguagaua

SEQ ID NO: 1163137 - RNA, 19 nt, Artificial Sequence
  Description of Artificial Sequence: Synthetic oligonucleotide
  Antisense strand to SEQ ID NO: 1163136
uaucuacccacuauuguau

SEQ ID NO: 1163138 - RNA, 19 nt, Artificial Sequence
  Description of Artificial Sequence: Synthetic oligonucleotide
  Sense strand starting at position 59 of SEQ ID NO: 916521
uuguguggugucuaaauua

SEQ ID NO: 1163139 - RNA, 19 nt, Artificial Sequence
  Description of Artificial Sequence: Synthetic oligonucleotide
  Antisense strand to SEQ ID NO: 1163138
uaauuuagacaccacacaa

SEQ ID NO: 1163140 - RNA, 19 nt, Artificial Sequence
  Description of Artificial Sequence: Synthetic oligonucleotide
  Sense strand starting at position 1334 of SEQ ID NO: 916521
cgcggaaggcguuuaauca

SEQ ID NO: 1163141 - RNA, 19 nt, Artificial Sequence
  Description of Artificial Sequence: Synthetic oligonucleotide
  Antisense strand to SEQ ID NO: 1163140
ugauuaaacgccuuccgcg

SEQ ID NO: 1163142 - RNA, 19 nt, Artificial Sequence
  Description of Artificial Sequence: Synthetic oligonucleotide
  Sense strand starting at position 1343 of SEQ ID NO: 916521
cguuuaaucagccuucgca

SEQ ID NO: 1163143 - RNA, 19 nt, Artificial Sequence
  Description of Artificial Sequence: Synthetic oligonucleotide
  Antisense strand to SEQ ID NO: 1163142
ugcgaaggcugauuaaacg

SEQ ID NO: 1163144 - RNA, 19 nt, Artificial Sequence
  Description of Artificial Sequence: Synthetic oligonucleotide
  Sense strand starting at position 1346 of SEQ ID NO: 916521
uuaaucagccuucgcauuu

SEQ ID NO: 1163145 - RNA, 19 nt, Artificial Sequence
  Description of Artificial Sequence: Synthetic oligonucleotide
  Antisense strand to SEQ ID NO: 1163144
aaaugcgaaggcugauuaa

SEQ ID NO: 1163146 - RNA, 19 nt, Artificial Sequence
  Description of Artificial Sequence: Synthetic oligonucleotide
  Sense strand starting at position 1989 of SEQ ID NO: 916521
uaauuagugcagugacaua

SEQ ID NO: 1163147 - RNA, 19 nt, Artificial Sequence
  Description of Artificial Sequence: Synthetic oligonucleotide
  Antisense strand to SEQ ID NO: 1163146
uaugucacugcacuaauua

SEQ ID NO: 1163148 - RNA, 19 nt, Artificial Sequence
  Description of Artificial Sequence: Synthetic oligonucleotide
  Sense strand starting at position 2010 of SEQ ID NO: 916521
ucgacccagcuuuauauau

SEQ ID NO: 1163149 - RNA, 19 nt, Artificial Sequence
  Description of Artificial Sequence: Synthetic oligonucleotide
  Antisense strand to SEQ ID NO: 1163148
auauauaaagcugggucga

SEQ ID NO: 1163150 - RNA, 19 nt, Artificial Sequence
  Description of Artificial Sequence: Synthetic oligonucleotide
  Sense strand starting at position 2095 of SEQ ID NO: 916521
gcuagugcucucuagaaca

SEQ ID NO: 1163151 - RNA, 19 nt, Artificial Sequence
  Description of Artificial Sequence: Synthetic oligonucleotide
  Antisense strand to SEQ ID NO: 1163150
uguucuagagagcacuagc

SEQ ID NO: 1163152 - RNA, 19 nt, Artificial Sequence
  Description of Artificial Sequence: Synthetic oligonucleotide
  Sense strand starting at position 2158 of SEQ ID NO: 916521
gugacaaucuaugugcaga

SEQ ID NO: 1163153 - RNA, 19 nt, Artificial Sequence
  Description of Artificial Sequence: Synthetic oligonucleotide
  Antisense strand to SEQ ID NO: 1163152
ucugcacauagauugucac

SEQ ID NO: 1163154 - RNA, 19 nt, Artificial Sequence
  Description of Artificial Sequence: Synthetic oligonucleotide
  Sense strand starting at position 2283 of SEQ ID NO: 916521
ggauuaacauugcccuauu

SEQ ID NO: 1163155 - RNA, 19 nt, Artificial Sequence
  Description of Artificial Sequence: Synthetic oligonucleotide
  Antisense strand to SEQ ID NO: 1163154
aauagggcaauguuaaucc

SEQ ID NO: 1163156 - RNA, 19 nt, Artificial Sequence
  Description of Artificial Sequence: Synthetic oligonucleotide
  Sense strand starting at position 2320 of SEQ ID NO: 916521
ucugaauucuaaguauaga

SEQ ID NO: 1163157 - RNA, 19 nt, Artificial Sequence
  Description of Artificial Sequence: Synthetic oligonucleotide
  Antisense strand to SEQ ID NO: 1163156
ucuauacuuagaauucaga

SEQ ID NO: 1163158 - RNA, 19 nt, Artificial Sequence
  Description of Artificial Sequence: Synthetic oligonucleotide
  Sense strand starting at position 2553 of SEQ ID NO: 916521
gcaagaugauuugggaaau

SEQ ID NO: 1163159 - RNA, 19 nt, Artificial Sequence
  Description of Artificial Sequence: Synthetic oligonucleotide
  Antisense strand to SEQ ID NO: 1163158
auuucccaaaucaucuugc

SEQ ID NO: 1163160 - RNA, 19 nt, Artificial Sequence
  Description of Artificial Sequence: Synthetic oligonucleotide
  Sense strand starting at position 2613 of SEQ ID NO: 916521
augaaaugauucucugggu

SEQ ID NO: 1163161 - RNA, 19 nt, Artificial Sequence
  Description of Artificial Sequence: Synthetic oligonucleotide
  Antisense strand to SEQ ID NO: 1163160
acccagagaaucauuucau

SEQ ID NO: 1163162 - RNA, 19 nt, Artificial Sequence
  Description of Artificial Sequence: Synthetic oligonucleotide
  Sense strand starting at position 2639 of SEQ ID NO: 916521
uagagaccguccuugacua

SEQ ID NO: 1163163 - RNA, 19 nt, Artificial Sequence
  Description of Artificial Sequence: Synthetic oligonucleotide
  Antisense strand to SEQ ID NO: 1163162
uagucaaggacggucucua

SEQ ID NO: 1163164 - RNA, 19 nt, Artificial Sequence
  Description of Artificial Sequence: Synthetic oligonucleotide
  Sense strand starting at position 2640 of SEQ ID NO: 916521
agagaccguccuugacuau

SEQ ID NO: 1163165 - RNA, 19 nt, Artificial Sequence
  Description of Artificial Sequence: Synthetic oligonucleotide
  Antisense strand to SEQ ID NO: 1163164
auagucaaggacggucucu

SEQ ID NO: 1163166 - RNA, 19 nt, Artificial Sequence
  Description of Artificial Sequence: Synthetic oligonucleotide
  Sense strand starting at position 2770 of SEQ ID NO: 916521
gguuacaauacauguagua

SEQ ID NO: 1163167 - RNA, 19 nt, Artificial Sequence
  Description of Artificial Sequence: Synthetic oligonucleotide
  Antisense strand to SEQ ID NO: 1163166
uacuacauguauuguaacc

SEQ ID NO: 1163168 - RNA, 19 nt, Artificial Sequence
  Description of Artificial Sequence: Synthetic oligonucleotide
  Sense strand starting at position 2782 of SEQ ID NO: 916521
uguaguaacuccuccuuaa

SEQ ID NO: 1163169 - RNA, 19 nt, Artificial Sequence
  Description of Artificial Sequence: Synthetic oligonucleotide
  Antisense strand to SEQ ID NO: 1163168
uuaaggaggaguuacuaca

SEQ ID NO: 1163170 - RNA, 19 nt, Artificial Sequence
  Description of Artificial Sequence: Synthetic oligonucleotide
  Sense strand starting at position 2953 of SEQ ID NO: 916521
ccaaauaaguuguuugaua

SEQ ID NO: 1163171 - RNA, 19 nt, Artificial Sequence
  Description of Artificial Sequence: Synthetic oligonucleotide
  Antisense strand to SEQ ID NO: 1163170
uaucaaacaacuuauuugg

SEQ ID NO: 1163172 - RNA, 19 nt, Artificial Sequence
  Description of Artificial Sequence: Synthetic oligonucleotide
  Sense strand starting at position 2954 of SEQ ID NO: 916521
caaauaaguuguuugauag

SEQ ID NO: 1163173 - RNA, 19 nt, Artificial Sequence
  Description of Artificial Sequence: Synthetic oligonucleotide
  Antisense strand to SEQ ID NO: 1163172
cuaucaaacaacuuauuug

SEQ ID NO: 1163174 - RNA, 19 nt, Artificial Sequence
  Description of Artificial Sequence: Synthetic oligonucleotide
  Sense strand starting at position 2972 of SEQ ID NO: 916521
ggauuuaagugagaaaggu

SEQ ID NO: 1163175 - RNA, 19 nt, Artificial Sequence
  Description of Artificial Sequence: Synthetic oligonucleotide
  Antisense strand to SEQ ID NO: 1163174
accuuucucacuuaaaucc

SEQ ID NO: 1163176 - RNA, 19 nt, Artificial Sequence
  Description of Artificial Sequence: Synthetic oligonucleotide
  Sense strand starting at position 3040 of SEQ ID NO: 916521
gcccaugguccacaagaua

SEQ ID NO: 1163177 - RNA, 19 nt, Artificial Sequence
  Description of Artificial Sequence: Synthetic oligonucleotide
  Antisense strand to SEQ ID NO: 1163176
uaucuuguggaccaugggc

SEQ ID NO: 1163178 - RNA, 19 nt, Artificial Sequence
  Description of Artificial Sequence: Synthetic oligonucleotide
  Sense strand starting at position 3066 of SEQ ID NO: 916521
uguucuucgggagacagua

SEQ ID NO: 1163179 - RNA, 19 nt, Artificial Sequence
  Description of Artificial Sequence: Synthetic oligonucleotide
  Antisense strand to SEQ ID NO: 1163178
uacugucucccgaagaaca

SEQ ID NO: 1163180 - RNA, 19 nt, Artificial Sequence
  Description of Artificial Sequence: Synthetic oligonucleotide
  Sense strand starting at position 3131 of SEQ ID NO: 916521
aaguccuagcaagguuaau

SEQ ID NO: 1163181 - RNA, 19 nt, Artificial Sequence
  Description of Artificial Sequence: Synthetic oligonucleotide
  Antisense strand to SEQ ID NO: 1163180
auuaaccuugcuaggacuu

SEQ ID NO: 1163182 - RNA, 19 nt, Artificial Sequence
  Description of Artificial Sequence: Synthetic oligonucleotide
  Sense strand starting at position 3155 of SEQ ID NO: 916521
uguauauauccauggguaa

SEQ ID NO: 1163183 - RNA, 19 nt, Artificial Sequence
  Description of Artificial Sequence: Synthetic oligonucleotide
  Antisense strand to SEQ ID NO: 1163182
uuacccauggauauauaca

SEQ ID NO: 1163184 - RNA, 19 nt, Artificial Sequence
  Description of Artificial Sequence: Synthetic oligonucleotide
  Sense strand starting at position 3156 of SEQ ID NO: 916521
guauauauccauggguaag

SEQ ID NO: 1163185 - RNA, 19 nt, Artificial Sequence
  Description of Artificial Sequence: Synthetic oligonucleotide
  Antisense strand to SEQ ID NO: 1163184
cuuacccauggauauauac

SEQ ID NO: 1163186 - RNA, 19 nt, Artificial Sequence
  Description of Artificial Sequence: Synthetic oligonucleotide
  Sense strand starting at position 3158 of SEQ ID NO: 916521
auauauccauggguaagua

SEQ ID NO: 1163187 - RNA, 19 nt, Artificial Sequence
  Description of Artificial Sequence: Synthetic oligonucleotide
  Antisense strand to SEQ ID NO: 1163186
uacuuacccauggauauau

SEQ ID NO: 1163188 - RNA, 19 nt, Artificial Sequence
  Description of Artificial Sequence: Synthetic oligonucleotide
  Sense strand starting at position 3168 of SEQ ID NO: 916521
ggguaaguacuagaucuug

SEQ ID NO: 1163189 - RNA, 19 nt, Artificial Sequence
  Description of Artificial Sequence: Synthetic oligonucleotide
  Antisense strand to SEQ ID NO: 1163188
caagaucuaguacuuaccc

SEQ ID NO: 1163190 - RNA, 19 nt, Artificial Sequence
  Description of Artificial Sequence: Synthetic oligonucleotide
  Sense strand starting at position 3174 of SEQ ID NO: 916521
guacuagaucuugaugucu

SEQ ID NO: 1163191 - RNA, 19 nt, Artificial Sequence
  Description of Artificial Sequence: Synthetic oligonucleotide
  Antisense strand to SEQ ID NO: 1163190
agacaucaagaucuaguac

SEQ ID NO: 1163192 - RNA, 19 nt, Artificial Sequence
  Description of Artificial Sequence: Synthetic oligonucleotide
  Sense strand starting at position 3196 of SEQ ID NO: 916521
agaugauagugguuuccuu

SEQ ID NO: 1163193 - RNA, 19 nt, Artificial Sequence
  Description of Artificial Sequence: Synthetic oligonucleotide
  Antisense strand to SEQ ID NO: 1163192
aaggaaaccacuaucaucu

SEQ ID NO: 1163194 - RNA, 19 nt, Artificial Sequence
  Description of Artificial Sequence: Synthetic oligonucleotide
  Sense strand starting at position 3241 of SEQ ID NO: 916521
ugauaccaugcaugugaaa

SEQ ID NO: 1163195 - RNA, 19 nt, Artificial Sequence
  Description of Artificial Sequence: Synthetic oligonucleotide
  Antisense strand to SEQ ID NO: 1163194
uuucacaugcaugguauca

SEQ ID NO: 1163196 - RNA, 19 nt, Artificial Sequence
  Description of Artificial Sequence: Synthetic oligonucleotide
  Sense strand starting at position 3277 of SEQ ID NO: 916521
cuugaugaacaguaguuau

SEQ ID NO: 1163197 - RNA, 19 nt, Artificial Sequence
  Description of Artificial Sequence: Synthetic oligonucleotide
  Antisense strand to SEQ ID NO: 1163196
auaacuacuguucaucaag

SEQ ID NO: 1163198 - RNA, 19 nt, Artificial Sequence
  Description of Artificial Sequence: Synthetic oligonucleotide
  Sense strand starting at position 3280 of SEQ ID NO: 916521
gaugaacaguaguuaucau

SEQ ID NO: 1163199 - RNA, 19 nt, Artificial Sequence
  Description of Artificial Sequence: Synthetic oligonucleotide
  Antisense strand to SEQ ID NO: 1163198
augauaacuacuguucauc

SEQ ID NO: 1163200 - RNA, 19 nt, Artificial Sequence
  Description of Artificial Sequence: Synthetic oligonucleotide
  Sense strand starting at position 3288 of SEQ ID NO: 916521
guaguuaucauuuguagua

SEQ ID NO: 1163201 - RNA, 19 nt, Artificial Sequence
  Description of Artificial Sequence: Synthetic oligonucleotide
  Antisense strand to SEQ ID NO: 1163200
uacuacaaaugauaacuac

SEQ ID NO: 1163202 - RNA, 19 nt, Artificial Sequence
  Description of Artificial Sequence: Synthetic oligonucleotide
  Sense strand starting at position 3301 of SEQ ID NO: 916521
guaguauaaagccauguua

SEQ ID NO: 1163203 - RNA, 19 nt, Artificial Sequence
  Description of Artificial Sequence: Synthetic oligonucleotide
  Antisense strand to SEQ ID NO: 1163202
uaacauggcuuuauacuac

SEQ ID NO: 1163204 - RNA, 19 nt, Artificial Sequence
  Description of Artificial Sequence: Synthetic oligonucleotide
  Sense strand starting at position 3321 of SEQ ID NO: 916521
ggcaaagacucauuccuau

SEQ ID NO: 1163205 - RNA, 19 nt, Artificial Sequence
  Description of Artificial Sequence: Synthetic oligonucleotide
  Antisense strand to SEQ ID NO: 1163204
auaggaaugagucuuugcc

SEQ ID NO: 1163206 - RNA, 19 nt, Artificial Sequence
  Description of Artificial Sequence: Synthetic oligonucleotide
  Sense strand starting at position 3469 of SEQ ID NO: 916521
ugggaugucaguugaccuu

SEQ ID NO: 1163207 - RNA, 19 nt, Artificial Sequence
  Description of Artificial Sequence: Synthetic oligonucleotide
  Antisense strand to SEQ ID NO: 1163206
aaggucaacugacauccca

SEQ ID NO: 1163208 - RNA, 19 nt, Artificial Sequence
  Description of Artificial Sequence: Synthetic oligonucleotide
  Sense strand starting at position 3667 of SEQ ID NO: 916521
ucgccuauucuagaagaug

SEQ ID NO: 1163209 - RNA, 19 nt, Artificial Sequence
  Description of Artificial Sequence: Synthetic oligonucleotide
  Antisense strand to SEQ ID NO: 1163208
caucuucuagaauaggcga

SEQ ID NO: 1163210 - RNA, 19 nt, Artificial Sequence
  Description of Artificial Sequence: Synthetic oligonucleotide
  Sense strand starting at position 3718 of SEQ ID NO: 916521
gauguuaagcuuugauauu

SEQ ID NO: 1163211 - RNA, 19 nt, Artificial Sequence
  Description of Artificial Sequence: Synthetic oligonucleotide
  Antisense strand to SEQ ID NO: 1163210
aauaucaaagcuuaacauc

SEQ ID NO: 1163212 - RNA, 19 nt, Artificial Sequence
  Description of Artificial Sequence: Synthetic oligonucleotide
  Sense strand starting at position 3825 of SEQ ID NO: 916521
auacuucuucugugacuuu

SEQ ID NO: 1163213 - RNA, 19 nt, Artificial Sequence
  Description of Artificial Sequence: Synthetic oligonucleotide
  Antisense strand to SEQ ID NO: 1163212
aaagucacagaagaaguau

SEQ ID NO: 1163214 - RNA, 19 nt, Artificial Sequence
  Description of Artificial Sequence: Synthetic oligonucleotide
  Sense strand starting at position 3873 of SEQ ID NO: 916521
ugcucaagucagcaauuaa

SEQ ID NO: 1163215 - RNA, 19 nt, Artificial Sequence
  Description of Artificial Sequence: Synthetic oligonucleotide
  Antisense strand to SEQ ID NO: 1163214
uuaauugcugacuugagca

SEQ ID NO: 1163216 - RNA, 19 nt, Artificial Sequence
  Description of Artificial Sequence: Synthetic oligonucleotide
  Sense strand starting at position 3910 of SEQ ID NO: 916521
ucagcaacucaggguauaa

SEQ ID NO: 1163217 - RNA, 19 nt, Artificial Sequence
  Description of Artificial Sequence: Synthetic oligonucleotide
  Antisense strand to SEQ ID NO: 1163216
uuauacccugaguugcuga

SEQ ID NO: 1163218 - RNA, 19 nt, Artificial Sequence
  Description of Artificial Sequence: Synthetic oligonucleotide
  Sense strand starting at position 77 of SEQ ID NO: 916522
ggaaauguuaauggugaau

SEQ ID NO: 1163219 - RNA, 19 nt, Artificial Sequence
  Description of Artificial Sequence: Synthetic oligonucleotide
  Antisense strand to SEQ ID NO: 1163218
auucaccauuaacauuucc

SEQ ID NO: 1163220 - RNA, 19 nt, Artificial Sequence
  Description of Artificial Sequence: Synthetic oligonucleotide
  Sense strand starting at position 118 of SEQ ID NO: 916522
uguaaucagugggcacaga

SEQ ID NO: 1163221 - RNA, 19 nt, Artificial Sequence
  Description of Artificial Sequence: Synthetic oligonucleotide
  Antisense strand to SEQ ID NO: 1163220
ucugugcccacugauuaca

SEQ ID NO: 1163222 - RNA, 19 nt, Artificial Sequence
  Description of Artificial Sequence: Synthetic oligonucleotide
  Sense strand starting at position 119 of SEQ ID NO: 916522
guaaucagugggcacagaa

SEQ ID NO: 1163223 - RNA, 19 nt, Artificial Sequence
  Description of Artificial Sequence: Synthetic oligonucleotide
  Antisense strand to SEQ ID NO: 1163222
uucugugcccacugauuac

SEQ ID NO: 1163224 - RNA, 19 nt, Artificial Sequence
  Description of Artificial Sequence: Synthetic oligonucleotide
  Sense strand starting at position 181 of SEQ ID NO: 916522
ugguuugaaggguauauac

SEQ ID NO: 1163225 - RNA, 19 nt, Artificial Sequence
  Description of Artificial Sequence: Synthetic oligonucleotide
  Antisense strand to SEQ ID NO: 1163224
guauauacccuucaaacca

SEQ ID NO: 1163226 - RNA, 19 nt, Artificial Sequence
  Description of Artificial Sequence: Synthetic oligonucleotide
  Sense strand starting at position 204 of SEQ ID NO: 916522
augugaacugauuaucucu

SEQ ID NO: 1163227 - RNA, 19 nt, Artificial Sequence
  Description of Artificial Sequence: Synthetic oligonucleotide
  Antisense strand to SEQ ID NO: 1163226
agagauaaucaguucacau

SEQ ID NO: 1163228 - RNA, 19 nt, Artificial Sequence
  Description of Artificial Sequence: Synthetic oligonucleotide
  Sense strand starting at position 209 of SEQ ID NO: 916522
aacugauuaucucugggua

SEQ ID NO: 1163229 - RNA, 19 nt, Artificial Sequence
  Description of Artificial Sequence: Synthetic oligonucleotide
  Antisense strand to SEQ ID NO: 1163228
uacccagagauaaucaguu

SEQ ID NO: 1163230 - RNA, 19 nt, Artificial Sequence
  Description of Artificial Sequence: Synthetic oligonucleotide
  Sense strand starting at position 210 of SEQ ID NO: 916522
acugauuaucucuggguaa

SEQ ID NO: 1163231 - RNA, 19 nt, Artificial Sequence
  Description of Artificial Sequence: Synthetic oligonucleotide
  Antisense strand to SEQ ID NO: 1163230
uuacccagagauaaucagu

SEQ ID NO: 1163232 - RNA, 19 nt, Artificial Sequence
  Description of Artificial Sequence: Synthetic oligonucleotide
  Sense strand starting at position 212 of SEQ ID NO: 916522
ugauuaucucuggguaaua

SEQ ID NO: 1163233 - RNA, 19 nt, Artificial Sequence
  Description of Artificial Sequence: Synthetic oligonucleotide
  Antisense strand to SEQ ID NO: 1163232
uauuacccagagauaauca

SEQ ID NO: 1163234 - RNA, 19 nt, Artificial Sequence
  Description of Artificial Sequence: Synthetic oligonucleotide
  Sense strand starting at position 213 of SEQ ID NO: 916522
gauuaucucuggguaauag

SEQ ID NO: 1163235 - RNA, 19 nt, Artificial Sequence
  Description of Artificial Sequence: Synthetic oligonucleotide
  Antisense strand to SEQ ID NO: 1163234
cuauuacccagagauaauc

SEQ ID NO: 1163236 - RNA, 19 nt, Artificial Sequence
  Description of Artificial Sequence: Synthetic oligonucleotide
  Sense strand starting at position 223 of SEQ ID NO: 916522
ggguaauagaauuguaggu

SEQ ID NO: 1163237 - RNA, 19 nt, Artificial Sequence
  Description of Artificial Sequence: Synthetic oligonucleotide
  Antisense strand to SEQ ID NO: 1163236
accuacaauucuauuaccc

SEQ ID NO: 1163238 - RNA, 19 nt, Artificial Sequence
  Description of Artificial Sequence: Synthetic oligonucleotide
  Sense strand starting at position 227 of SEQ ID NO: 916522
aauagaauuguagguaguu

SEQ ID NO: 1163239 - RNA, 19 nt, Artificial Sequence
  Description of Artificial Sequence: Synthetic oligonucleotide
  Antisense strand to SEQ ID NO: 1163238
aacuaccuacaauucuauu

SEQ ID NO: 1163240 - RNA, 19 nt, Artificial Sequence
  Description of Artificial Sequence: Synthetic oligonucleotide
  Sense strand starting at position 228 of SEQ ID NO: 916522
auagaauuguagguaguuu

SEQ ID NO: 1163241 - RNA, 19 nt, Artificial Sequence
  Description of Artificial Sequence: Synthetic oligonucleotide
  Antisense strand to SEQ ID NO: 1163240
aaacuaccuacaauucuau

SEQ ID NO: 1163242 - RNA, 19 nt, Artificial Sequence
  Description of Artificial Sequence: Synthetic oligonucleotide
  Sense strand starting at position 308 of SEQ ID NO: 916522
uuacuuugauaaucaguga

SEQ ID NO: 1163243 - RNA, 19 nt, Artificial Sequence
  Description of Artificial Sequence: Synthetic oligonucleotide
  Antisense strand to SEQ ID NO: 1163242
ucacugauuaucaaaguaa

SEQ ID NO: 1163244 - RNA, 19 nt, Artificial Sequence
  Description of Artificial Sequence: Synthetic oligonucleotide
  Sense strand starting at position 381 of SEQ ID NO: 916522
gggauuguuuggaggauag

SEQ ID NO: 1163245 - RNA, 19 nt, Artificial Sequence
  Description of Artificial Sequence: Synthetic oligonucleotide
  Antisense strand to SEQ ID NO: 1163244
cuauccuccaaacaauccc

SEQ ID NO: 1163246 - RNA, 19 nt, Artificial Sequence
  Description of Artificial Sequence: Synthetic oligonucleotide
  Sense strand starting at position 517 of SEQ ID NO: 916522
uggauuugggucuguucga

SEQ ID NO: 1163247 - RNA, 19 nt, Artificial Sequence
  Description of Artificial Sequence: Synthetic oligonucleotide
  Antisense strand to SEQ ID NO: 1163246
ucgaacagacccaaaucca

SEQ ID NO: 1163248 - RNA, 19 nt, Artificial Sequence
  Description of Artificial Sequence: Synthetic oligonucleotide
  Sense strand starting at position 527 of SEQ ID NO: 916522
ucuguucgaacauggagaa

SEQ ID NO: 1163249 - RNA, 19 nt, Artificial Sequence
  Description of Artificial Sequence: Synthetic oligonucleotide
  Antisense strand to SEQ ID NO: 1163248
uucuccauguucgaacaga

SEQ ID NO: 1163250 - RNA, 19 nt, Artificial Sequence
  Description of Artificial Sequence: Synthetic oligonucleotide
  Sense strand starting at position 539 of SEQ ID NO: 916522
uggagaacacguuggaguu

SEQ ID NO: 1163251 - RNA, 19 nt, Artificial Sequence
  Description of Artificial Sequence: Synthetic oligonucleotide
  Antisense strand to SEQ ID NO: 1163250
aacuccaacguguucucca

SEQ ID NO: 1163252 - RNA, 19 nt, Artificial Sequence
  Description of Artificial Sequence: Synthetic oligonucleotide
  Sense strand starting at position 705 of SEQ ID NO: 916522
gugaaauguggguacagca

SEQ ID NO: 1163253 - RNA, 19 nt, Artificial Sequence
  Description of Artificial Sequence: Synthetic oligonucleotide
  Antisense strand to SEQ ID NO: 1163252
ugcuguacccacauuucac

SEQ ID NO: 1163254 - RNA, 19 nt, Artificial Sequence
  Description of Artificial Sequence: Synthetic oligonucleotide
  Sense strand starting at position 773 of SEQ ID NO: 916522
acaugaaguuucuccagag

SEQ ID NO: 1163255 - RNA, 19 nt, Artificial Sequence
  Description of Artificial Sequence: Synthetic oligonucleotide
  Antisense strand to SEQ ID NO: 1163254
cucuggagaaacuucaugu

SEQ ID NO: 1163256 - RNA, 19 nt, Artificial Sequence
  Description of Artificial Sequence: Synthetic oligonucleotide
  Sense strand starting at position 968 of SEQ ID NO: 916522
gagaauugauuggagggaa

SEQ ID NO: 1163257 - RNA, 19 nt, Artificial Sequence
  Description of Artificial Sequence: Synthetic oligonucleotide
  Antisense strand to SEQ ID NO: 1163256
uucccuccaaucaauucuc

SEQ ID NO: 1163258 - RNA, 19 nt, Artificial Sequence
  Description of Artificial Sequence: Synthetic oligonucleotide
  Sense strand starting at position 1000 of SEQ ID NO: 916522
cucacuaagccaugaugaa

SEQ ID NO: 1163259 - RNA, 19 nt, Artificial Sequence
  Description of Artificial Sequence: Synthetic oligonucleotide
  Antisense strand to SEQ ID NO: 1163258
uucaucauggcuuagugag

SEQ ID NO: 1163260 - RNA, 19 nt, Artificial Sequence
  Description of Artificial Sequence: Synthetic oligonucleotide
  Sense strand starting at position 1214 of SEQ ID NO: 916522
augauucgguacucuacau

SEQ ID NO: 1163261 - RNA, 19 nt, Artificial Sequence
  Description of Artificial Sequence: Synthetic oligonucleotide
  Antisense strand to SEQ ID NO: 1163260
auguagaguaccgaaucau

SEQ ID NO: 1163262 - RNA, 19 nt, Artificial Sequence
  Description of Artificial Sequence: Synthetic oligonucleotide
  Sense strand starting at position 1260 of SEQ ID NO: 916522
cugucaaguggauacuauu

SEQ ID NO: 1163263 - RNA, 19 nt, Artificial Sequence
  Description of Artificial Sequence: Synthetic oligonucleotide
  Antisense strand to SEQ ID NO: 1163262
aauaguauccacuugacag

SEQ ID NO: 1163264 - RNA, 19 nt, Artificial Sequence
  Description of Artificial Sequence: Synthetic oligonucleotide
  Sense strand starting at position 1326 of SEQ ID NO: 916522
ugggucacuugcccaagau

SEQ ID NO: 1163265 - RNA, 19 nt, Artificial Sequence
  Description of Artificial Sequence: Synthetic oligonucleotide
  Antisense strand to SEQ ID NO: 1163264
aucuugggcaagugaccca

SEQ ID NO: 1163266 - RNA, 19 nt, Artificial Sequence
  Description of Artificial Sequence: Synthetic oligonucleotide
  Sense strand starting at position 1327 of SEQ ID NO: 916522
gggucacuugcccaagauc

SEQ ID NO: 1163267 - RNA, 19 nt, Artificial Sequence
  Description of Artificial Sequence: Synthetic oligonucleotide
  Antisense strand to SEQ ID NO: 1163266
gaucuugggcaagugaccc

SEQ ID NO: 1163268 - RNA, 19 nt, Artificial Sequence
  Description of Artificial Sequence: Synthetic oligonucleotide
  Sense strand starting at position 1401 of SEQ ID NO: 916522
gggaguugaacuugggcau

SEQ ID NO: 1163269 - RNA, 19 nt, Artificial Sequence
  Description of Artificial Sequence: Synthetic oligonucleotide
  Antisense strand to SEQ ID NO: 1163268
augcccaaguucaacuccc

SEQ ID NO: 1163270 - RNA, 19 nt, Artificial Sequence
  Description of Artificial Sequence: Synthetic oligonucleotide
  Sense strand starting at position 1402 of SEQ ID NO: 916522
ggaguugaacuugggcauu

SEQ ID NO: 1163271 - RNA, 19 nt, Artificial Sequence
  Description of Artificial Sequence: Synthetic oligonucleotide
  Antisense strand to SEQ ID NO: 1163270
aaugcccaaguucaacucc

SEQ ID NO: 1163272 - RNA, 19 nt, Artificial Sequence
  Description of Artificial Sequence: Synthetic oligonucleotide
  Sense strand starting at position 1644 of SEQ ID NO: 916522
aguccugggaguuauugau

SEQ ID NO: 1163273 - RNA, 19 nt, Artificial Sequence
  Description of Artificial Sequence: Synthetic oligonucleotide
  Antisense strand to SEQ ID NO: 1163272
aucaauaacucccaggacu

SEQ ID NO: 1163274 - RNA, 19 nt, Artificial Sequence
  Description of Artificial Sequence: Synthetic oligonucleotide
  Sense strand starting at position 1653 of SEQ ID NO: 916522
aguuauugauuccucgaga

SEQ ID NO: 1163275 - RNA, 19 nt, Artificial Sequence
  Description of Artificial Sequence: Synthetic oligonucleotide
  Antisense strand to SEQ ID NO: 1163274
ucucgaggaaucaauaacu

SEQ ID NO: 1163276 - RNA, 19 nt, Artificial Sequence
  Description of Artificial Sequence: Synthetic oligonucleotide
  Sense strand starting at position 1654 of SEQ ID NO: 916522
guuauugauuccucgagag

SEQ ID NO: 1163277 - RNA, 19 nt, Artificial Sequence
  Description of Artificial Sequence: Synthetic oligonucleotide
  Antisense strand to SEQ ID NO: 1163276
cucucgaggaaucaauaac

SEQ ID NO: 1163278 - RNA, 19 nt, Artificial Sequence
  Description of Artificial Sequence: Synthetic oligonucleotide
  Sense strand starting at position 1656 of SEQ ID NO: 916522
uauugauuccucgagaggu

SEQ ID NO: 1163279 - RNA, 19 nt, Artificial Sequence
  Description of Artificial Sequence: Synthetic oligonucleotide
  Antisense strand to SEQ ID NO: 1163278
accucucgaggaaucaaua

SEQ ID NO: 1163280 - RNA, 19 nt, Artificial Sequence
  Description of Artificial Sequence: Synthetic oligonucleotide
  Sense strand starting at position 1658 of SEQ ID NO: 916522
uugauuccucgagagguca

SEQ ID NO: 1163281 - RNA, 19 nt, Artificial Sequence
  Description of Artificial Sequence: Synthetic oligonucleotide
  Antisense strand to SEQ ID NO: 1163280
ugaccucucgaggaaucaa

SEQ ID NO: 1163282 - RNA, 19 nt, Artificial Sequence
  Description of Artificial Sequence: Synthetic oligonucleotide
  Sense strand starting at position 1666 of SEQ ID NO: 916522
ucgagaggucaguagacaa

SEQ ID NO: 1163283 - RNA, 19 nt, Artificial Sequence
  Description of Artificial Sequence: Synthetic oligonucleotide
  Antisense strand to SEQ ID NO: 1163282
uugucuacugaccucucga

SEQ ID NO: 1163284 - RNA, 19 nt, Artificial Sequence
  Description of Artificial Sequence: Synthetic oligonucleotide
  Sense strand starting at position 1947 of SEQ ID NO: 916522
acugccucccgagaagaau

SEQ ID NO: 1163285 - RNA, 19 nt, Artificial Sequence
  Description of Artificial Sequence: Synthetic oligonucleotide
  Antisense strand to SEQ ID NO: 1163284
auucuucucgggaggcagu

SEQ ID NO: 1163286 - RNA, 19 nt, Artificial Sequence
  Description of Artificial Sequence: Synthetic oligonucleotide
  Sense strand starting at position 2099 of SEQ ID NO: 916522
guucuucugaaguaagggu

SEQ ID NO: 1163287 - RNA, 19 nt, Artificial Sequence
  Description of Artificial Sequence: Synthetic oligonucleotide
  Antisense strand to SEQ ID NO: 1163286
acccuuacuucagaagaac

SEQ ID NO: 1163288 - RNA, 19 nt, Artificial Sequence
  Description of Artificial Sequence: Synthetic oligonucleotide
  Sense strand starting at position 2424 of SEQ ID NO: 916522
augucaucuccugagugaa

SEQ ID NO: 1163289 - RNA, 19 nt, Artificial Sequence
  Description of Artificial Sequence: Synthetic oligonucleotide
  Antisense strand to SEQ ID NO: 1163288
uucacucaggagaugacau

SEQ ID NO: 1163290 - RNA, 19 nt, Artificial Sequence
  Description of Artificial Sequence: Synthetic oligonucleotide
  Sense strand starting at position 2906 of SEQ ID NO: 916522
cagggaucacuuuaguuuc

SEQ ID NO: 1163291 - RNA, 19 nt, Artificial Sequence
  Description of Artificial Sequence: Synthetic oligonucleotide
  Antisense strand to SEQ ID NO: 1163290
gaaacuaaagugaucccug

SEQ ID NO: 1163292 - RNA, 19 nt, Artificial Sequence
  Description of Artificial Sequence: Synthetic oligonucleotide
  Sense strand starting at position 3333 of SEQ ID NO: 916522
guggcuuauaccugaaaug

SEQ ID NO: 1163293 - RNA, 19 nt, Artificial Sequence
  Description of Artificial Sequence: Synthetic oligonucleotide
  Antisense strand to SEQ ID NO: 1163292
cauuucagguauaagccac

SEQ ID NO: 1163294 - RNA, 19 nt, Artificial Sequence
  Description of Artificial Sequence: Synthetic oligonucleotide
  Sense strand starting at position 3424 of SEQ ID NO: 916522
gaaacuugucgcuacuaaa

SEQ ID NO: 1163295 - RNA, 19 nt, Artificial Sequence
  Description of Artificial Sequence: Synthetic oligonucleotide
  Antisense strand to SEQ ID NO: 1163294
uuuaguagcgacaaguuuc

SEQ ID NO: 1163296 - RNA, 19 nt, Artificial Sequence
  Description of Artificial Sequence: Synthetic oligonucleotide
  Sense strand starting at position 3967 of SEQ ID NO: 916522
uaaagacagccuugggauu

SEQ ID NO: 1163297 - RNA, 19 nt, Artificial Sequence
  Description of Artificial Sequence: Synthetic oligonucleotide
  Antisense strand to SEQ ID NO: 1163296
aaucccaaggcugucuuua

SEQ ID NO: 1163298 - RNA, 19 nt, Artificial Sequence
  Description of Artificial Sequence: Synthetic oligonucleotide
  Sense strand starting at position 42 of SEQ ID NO: 916523
uuuggaauugggugacaag

SEQ ID NO: 1163299 - RNA, 19 nt, Artificial Sequence
  Description of Artificial Sequence: Synthetic oligonucleotide
  Antisense strand to SEQ ID NO: 1163298
cuugucacccaauuccaaa

SEQ ID NO: 1163300 - RNA, 19 nt, Artificial Sequence
  Description of Artificial Sequence: Synthetic oligonucleotide
  Sense strand starting at position 45 of SEQ ID NO: 916523
ggaauugggugacaaguga

SEQ ID NO: 1163301 - RNA, 19 nt, Artificial Sequence
  Description of Artificial Sequence: Synthetic oligonucleotide
  Antisense strand to SEQ ID NO: 1163300
ucacuugucacccaauucc

SEQ ID NO: 1163302 - RNA, 19 nt, Artificial Sequence
  Description of Artificial Sequence: Synthetic oligonucleotide
  Sense strand starting at position 49 of SEQ ID NO: 916523
uugggugacaagugaggua

SEQ ID NO: 1163303 - RNA, 19 nt, Artificial Sequence
  Description of Artificial Sequence: Synthetic oligonucleotide
  Antisense strand to SEQ ID NO: 1163302
uaccucacuugucacccaa

SEQ ID NO: 1163304 - RNA, 19 nt, Artificial Sequence
  Description of Artificial Sequence: Synthetic oligonucleotide
  Sense strand starting at position 282 of SEQ ID NO: 916523
ucaucucugccauaaagga

SEQ ID NO: 1163305 - RNA, 19 nt, Artificial Sequence
  Description of Artificial Sequence: Synthetic oligonucleotide
  Antisense strand to SEQ ID NO: 1163304
uccuuuauggcagagauga

SEQ ID NO: 1163306 - RNA, 19 nt, Artificial Sequence
  Description of Artificial Sequence: Synthetic oligonucleotide
  Sense strand starting at position 427 of SEQ ID NO: 916523
uccagacuugcuugaguuu

SEQ ID NO: 1163307 - RNA, 19 nt, Artificial Sequence
  Description of Artificial Sequence: Synthetic oligonucleotide
  Antisense strand to SEQ ID NO: 1163306
aaacucaagcaagucugga

SEQ ID NO: 1163308 - RNA, 19 nt, Artificial Sequence
  Description of Artificial Sequence: Synthetic oligonucleotide
  Sense strand starting at position 465 of SEQ ID NO: 916523
ggaagcucuuagcugaaga

SEQ ID NO: 1163309 - RNA, 19 nt, Artificial Sequence
  Description of Artificial Sequence: Synthetic oligonucleotide
  Antisense strand to SEQ ID NO: 1163308
ucuucagcuaagagcuucc

SEQ ID NO: 1163310 - RNA, 19 nt, Artificial Sequence
  Description of Artificial Sequence: Synthetic oligonucleotide
  Sense strand starting at position 665 of SEQ ID NO: 916523
cuccuugaacucugaggau

SEQ ID NO: 1163311 - RNA, 19 nt, Artificial Sequence
  Description of Artificial Sequence: Synthetic oligonucleotide
  Antisense strand to SEQ ID NO: 1163310
auccucagaguucaaggag

SEQ ID NO: 1163312 - RNA, 19 nt, Artificial Sequence
  Description of Artificial Sequence: Synthetic oligonucleotide
  Sense strand starting at position 684 of SEQ ID NO: 916523
ucagaugaaugucaacaca

SEQ ID NO: 1163313 - RNA, 19 nt, Artificial Sequence
  Description of Artificial Sequence: Synthetic oligonucleotide
  Antisense strand to SEQ ID NO: 1163312
uguguugacauucaucuga

SEQ ID NO: 1163314 - RNA, 19 nt, Artificial Sequence
  Description of Artificial Sequence: Synthetic oligonucleotide
  Sense strand starting at position 773 of SEQ ID NO: 916523
acgagauaucugcaccaaa

SEQ ID NO: 1163315 - RNA, 19 nt, Artificial Sequence
  Description of Artificial Sequence: Synthetic oligonucleotide
  Antisense strand to SEQ ID NO: 1163314
uuuggugcagauaucucgu

SEQ ID NO: 1163316 - RNA, 19 nt, Artificial Sequence
  Description of Artificial Sequence: Synthetic oligonucleotide
  Sense strand starting at position 839 of SEQ ID NO: 916523
acucaaguguucuauauag

SEQ ID NO: 1163317 - RNA, 19 nt, Artificial Sequence
  Description of Artificial Sequence: Synthetic oligonucleotide
  Antisense strand to SEQ ID NO: 1163316
cuauauagaacacuugagu

SEQ ID NO: 1163318 - RNA, 19 nt, Artificial Sequence
  Description of Artificial Sequence: Synthetic oligonucleotide
  Sense strand starting at position 841 of SEQ ID NO: 916523
ucaaguguucuauauagag

SEQ ID NO: 1163319 - RNA, 19 nt, Artificial Sequence
  Description of Artificial Sequence: Synthetic oligonucleotide
  Antisense strand to SEQ ID NO: 1163318
cucuauauagaacacuuga

SEQ ID NO: 1163320 - RNA, 19 nt, Artificial Sequence
  Description of Artificial Sequence: Synthetic oligonucleotide
  Sense strand starting at position 983 of SEQ ID NO: 916523
ucaguccuguccuuauaag

SEQ ID NO: 1163321 - RNA, 19 nt, Artificial Sequence
  Description of Artificial Sequence: Synthetic oligonucleotide
  Antisense strand to SEQ ID NO: 1163320
cuuauaaggacaggacuga

SEQ ID NO: 1163322 - RNA, 19 nt, Artificial Sequence
  Description of Artificial Sequence: Synthetic oligonucleotide
  Sense strand starting at position 1081 of SEQ ID NO: 916523
aggguauagcuacagucau

SEQ ID NO: 1163323 - RNA, 19 nt, Artificial Sequence
  Description of Artificial Sequence: Synthetic oligonucleotide
  Antisense strand to SEQ ID NO: 1163322
augacuguagcuauacccu

SEQ ID NO: 1163324 - RNA, 19 nt, Artificial Sequence
  Description of Artificial Sequence: Synthetic oligonucleotide
  Sense strand starting at position 1144 of SEQ ID NO: 916523
ucaggucacugcucuacaa

SEQ ID NO: 1163325 - RNA, 19 nt, Artificial Sequence
  Description of Artificial Sequence: Synthetic oligonucleotide
  Antisense strand to SEQ ID NO: 1163324
uuguagagcagugaccuga

SEQ ID NO: 1163326 - RNA, 19 nt, Artificial Sequence
  Description of Artificial Sequence: Synthetic oligonucleotide
  Sense strand starting at position 1146 of SEQ ID NO: 916523
aggucacugcucuacaauc

SEQ ID NO: 1163327 - RNA, 19 nt, Artificial Sequence
  Description of Artificial Sequence: Synthetic oligonucleotide
  Antisense strand to SEQ ID NO: 1163326
gauuguagagcagugaccu

SEQ ID NO: 1163328 - RNA, 19 nt, Artificial Sequence
  Description of Artificial Sequence: Synthetic oligonucleotide
  Sense strand starting at position 1218 of SEQ ID NO: 916523
ggcagaaguagcugauuaa

SEQ ID NO: 1163329 - RNA, 19 nt, Artificial Sequence
  Description of Artificial Sequence: Synthetic oligonucleotide
  Antisense strand to SEQ ID NO: 1163328
uuaaucagcuacuucugcc

SEQ ID NO: 1163330 - RNA, 19 nt, Artificial Sequence
  Description of Artificial Sequence: Synthetic oligonucleotide
  Sense strand starting at position 1219 of SEQ ID NO: 916523
gcagaaguagcugauuaaa

SEQ ID NO: 1163331 - RNA, 19 nt, Artificial Sequence
  Description of Artificial Sequence: Synthetic oligonucleotide
  Antisense strand to SEQ ID NO: 1163330
uuuaaucagcuacuucugc

SEQ ID NO: 1163332 - RNA, 19 nt, Artificial Sequence
  Description of Artificial Sequence: Synthetic oligonucleotide
  Sense strand starting at position 1289 of SEQ ID NO: 916523
gcaggcauuaagugaccaa

SEQ ID NO: 1163333 - RNA, 19 nt, Artificial Sequence
  Description of Artificial Sequence: Synthetic oligonucleotide
  Antisense strand to SEQ ID NO: 1163332
uuggucacuuaaugccugc

SEQ ID NO: 1163334 - RNA, 19 nt, Artificial Sequence
  Description of Artificial Sequence: Synthetic oligonucleotide
  Sense strand starting at position 1292 of SEQ ID NO: 916523
ggcauuaagugaccaaguu

SEQ ID NO: 1163335 - RNA, 19 nt, Artificial Sequence
  Description of Artificial Sequence: Synthetic oligonucleotide
  Antisense strand to SEQ ID NO: 1163334
aacuuggucacuuaaugcc

SEQ ID NO: 1163336 - RNA, 19 nt, Artificial Sequence
  Description of Artificial Sequence: Synthetic oligonucleotide
  Sense strand starting at position 1293 of SEQ ID NO: 916523
gcauuaagugaccaaguuu

SEQ ID NO: 1163337 - RNA, 19 nt, Artificial Sequence
  Description of Artificial Sequence: Synthetic oligonucleotide
  Antisense strand to SEQ ID NO: 1163336
aaacuuggucacuuaaugc

SEQ ID NO: 1163338 - RNA, 19 nt, Artificial Sequence
  Description of Artificial Sequence: Synthetic oligonucleotide
  Sense strand starting at position 1341 of SEQ ID NO: 916523
cccagugcuugggaucaga

SEQ ID NO: 1163339 - RNA, 19 nt, Artificial Sequence
  Description of Artificial Sequence: Synthetic oligonucleotide
  Antisense strand to SEQ ID NO: 1163338
ucugaucccaagcacuggg

SEQ ID NO: 1163340 - RNA, 19 nt, Artificial Sequence
  Description of Artificial Sequence: Synthetic oligonucleotide
  Sense strand starting at position 1452 of SEQ ID NO: 916523
gugcuaaagagaugacaga

SEQ ID NO: 1163341 - RNA, 19 nt, Artificial Sequence
  Description of Artificial Sequence: Synthetic oligonucleotide
  Antisense strand to SEQ ID NO: 1163340
ucugucaucucuuuagcac

SEQ ID NO: 1163342 - RNA, 19 nt, Artificial Sequence
  Description of Artificial Sequence: Synthetic oligonucleotide
  Sense strand starting at position 1463 of SEQ ID NO: 916523
augacagauuaagauuaga

SEQ ID NO: 1163343 - RNA, 19 nt, Artificial Sequence
  Description of Artificial Sequence: Synthetic oligonucleotide
  Antisense strand to SEQ ID NO: 1163342
ucuaaucuuaaucugucau

SEQ ID NO: 1163344 - RNA, 19 nt, Artificial Sequence
  Description of Artificial Sequence: Synthetic oligonucleotide
  Sense strand starting at position 1468 of SEQ ID NO: 916523
agauuaagauuagaggaua

SEQ ID NO: 1163345 - RNA, 19 nt, Artificial Sequence
  Description of Artificial Sequence: Synthetic oligonucleotide
  Antisense strand to SEQ ID NO: 1163344
uauccucuaaucuuaaucu

SEQ ID NO: 1163346 - RNA, 19 nt, Artificial Sequence
  Description of Artificial Sequence: Synthetic oligonucleotide
  Sense strand starting at position 1518 of SEQ ID NO: 916523
gggugaccucgguagggau

SEQ ID NO: 1163347 - RNA, 19 nt, Artificial Sequence
  Description of Artificial Sequence: Synthetic oligonucleotide
  Antisense strand to SEQ ID NO: 1163346
aucccuaccgaggucaccc

SEQ ID NO: 1163348 - RNA, 19 nt, Artificial Sequence
  Description of Artificial Sequence: Synthetic oligonucleotide
  Sense strand starting at position 1571 of SEQ ID NO: 916523
aagucacacugcucagaga

SEQ ID NO: 1163349 - RNA, 19 nt, Artificial Sequence
  Description of Artificial Sequence: Synthetic oligonucleotide
  Antisense strand to SEQ ID NO: 1163348
ucucugagcagugugacuu

SEQ ID NO: 1163350 - RNA, 19 nt, Artificial Sequence
  Description of Artificial Sequence: Synthetic oligonucleotide
  Sense strand starting at position 1572 of SEQ ID NO: 916523
agucacacugcucagagaa

SEQ ID NO: 1163351 - RNA, 19 nt, Artificial Sequence
  Description of Artificial Sequence: Synthetic oligonucleotide
  Antisense strand to SEQ ID NO: 1163350
uucucugagcagugugacu

SEQ ID NO: 1163352 - RNA, 19 nt, Artificial Sequence
  Description of Artificial Sequence: Synthetic oligonucleotide
  Sense strand starting at position 1594 of SEQ ID NO: 916523
ggaaguggucagcaucuga

SEQ ID NO: 1163353 - RNA, 19 nt, Artificial Sequence
  Description of Artificial Sequence: Synthetic oligonucleotide
  Antisense strand to SEQ ID NO: 1163352
ucagaugcugaccacuucc

SEQ ID NO: 1163354 - RNA, 19 nt, Artificial Sequence
  Description of Artificial Sequence: Synthetic oligonucleotide
  Sense strand starting at position 1742 of SEQ ID NO: 916523
ccuuucggguccucagauu

SEQ ID NO: 1163355 - RNA, 19 nt, Artificial Sequence
  Description of Artificial Sequence: Synthetic oligonucleotide
  Antisense strand to SEQ ID NO: 1163354
aaucugaggacccgaaagg

SEQ ID NO: 1163356 - RNA, 19 nt, Artificial Sequence
  Description of Artificial Sequence: Synthetic oligonucleotide
  Sense strand starting at position 1985 of SEQ ID NO: 916523
uggguuuaugcagacgauu

SEQ ID NO: 1163357 - RNA, 19 nt, Artificial Sequence
  Description of Artificial Sequence: Synthetic oligonucleotide
  Antisense strand to SEQ ID NO: 1163356
aaucgucugcauaaaccca

SEQ ID NO: 1163358 - RNA, 19 nt, Artificial Sequence
  Description of Artificial Sequence: Synthetic oligonucleotide
  Sense strand starting at position 1993 of SEQ ID NO: 916523
ugcagacgauugcuacauu

SEQ ID NO: 1163359 - RNA, 19 nt, Artificial Sequence
  Description of Artificial Sequence: Synthetic oligonucleotide
  Antisense strand to SEQ ID NO: 1163358
aauguagcaaucgucugca

SEQ ID NO: 1163360 - RNA, 19 nt, Artificial Sequence
  Description of Artificial Sequence: Synthetic oligonucleotide
  Sense strand starting at position 1996 of SEQ ID NO: 916523
agacgauugcuacauuagu

SEQ ID NO: 1163361 - RNA, 19 nt, Artificial Sequence
  Description of Artificial Sequence: Synthetic oligonucleotide
  Antisense strand to SEQ ID NO: 1163360
acuaauguagcaaucgucu

SEQ ID NO: 1163362 - RNA, 19 nt, Artificial Sequence
  Description of Artificial Sequence: Synthetic oligonucleotide
  Sense strand starting at position 2001 of SEQ ID NO: 916523
auugcuacauuaguaauga

SEQ ID NO: 1163363 - RNA, 19 nt, Artificial Sequence
  Description of Artificial Sequence: Synthetic oligonucleotide
  Antisense strand to SEQ ID NO: 1163362
ucauuacuaauguagcaau

SEQ ID NO: 1163364 - RNA, 19 nt, Artificial Sequence
  Description of Artificial Sequence: Synthetic oligonucleotide
  Sense strand starting at position 2165 of SEQ ID NO: 916523
gcaggaagaucagaggauu

SEQ ID NO: 1163365 - RNA, 19 nt, Artificial Sequence
  Description of Artificial Sequence: Synthetic oligonucleotide
  Antisense strand to SEQ ID NO: 1163364
aauccucugaucuuccugc

SEQ ID NO: 1163366 - RNA, 19 nt, Artificial Sequence
  Description of Artificial Sequence: Synthetic oligonucleotide
  Sense strand starting at position 2371 of SEQ ID NO: 916523
cccacuggaucuguggaaa

SEQ ID NO: 1163367 - RNA, 19 nt, Artificial Sequence
  Description of Artificial Sequence: Synthetic oligonucleotide
  Antisense strand to SEQ ID NO: 1163366
uuuccacagauccaguggg

SEQ ID NO: 1163368 - RNA, 19 nt, Artificial Sequence
  Description of Artificial Sequence: Synthetic oligonucleotide
  Sense strand starting at position 2456 of SEQ ID NO: 916523
uucuauguuggcugagaga

SEQ ID NO: 1163369 - RNA, 19 nt, Artificial Sequence
  Description of Artificial Sequence: Synthetic oligonucleotide
  Antisense strand to SEQ ID NO: 1163368
ucucucagccaacauagaa

SEQ ID NO: 1163370 - RNA, 19 nt, Artificial Sequence
  Description of Artificial Sequence: Synthetic oligonucleotide
  Sense strand starting at position 2478 of SEQ ID NO: 916523
gcgggagacuugccucgua

SEQ ID NO: 1163371 - RNA, 19 nt, Artificial Sequence
  Description of Artificial Sequence: Synthetic oligonucleotide
  Antisense strand to SEQ ID NO: 1163370
uacgaggcaagucucccgc

SEQ ID NO: 1163372 - RNA, 19 nt, Artificial Sequence
  Description of Artificial Sequence: Synthetic oligonucleotide
  Sense strand starting at position 2481 of SEQ ID NO: 916523
ggagacuugccucguaagg

SEQ ID NO: 1163373 - RNA, 19 nt, Artificial Sequence
  Description of Artificial Sequence: Synthetic oligonucleotide
  Antisense strand to SEQ ID NO: 1163372
ccuuacgaggcaagucucc

SEQ ID NO: 1163374 - RNA, 19 nt, Artificial Sequence
  Description of Artificial Sequence: Synthetic oligonucleotide
  Sense strand starting at position 2595 of SEQ ID NO: 916523
gaagcaggccuuuggauaa

SEQ ID NO: 1163375 - RNA, 19 nt, Artificial Sequence
  Description of Artificial Sequence: Synthetic oligonucleotide
  Antisense strand to SEQ ID NO: 1163374
uuauccaaaggccugcuuc

SEQ ID NO: 1163376 - RNA, 19 nt, Artificial Sequence
  Description of Artificial Sequence: Synthetic oligonucleotide
  Sense strand starting at position 3520 of SEQ ID NO: 916523
gauagaaucucacuacguu

SEQ ID NO: 1163377 - RNA, 19 nt, Artificial Sequence
  Description of Artificial Sequence: Synthetic oligonucleotide
  Antisense strand to SEQ ID NO: 1163376
aacguagugagauucuauc

SEQ ID NO: 1163378 - RNA, 19 nt, Artificial Sequence
  Description of Artificial Sequence: Synthetic oligonucleotide
  Sense strand starting at position 32 of SEQ ID NO: 916524
ccuugaaacuguucucaga

SEQ ID NO: 1163379 - RNA, 19 nt, Artificial Sequence
  Description of Artificial Sequence: Synthetic oligonucleotide
  Antisense strand to SEQ ID NO: 1163378
ucugagaacaguuucaagg

SEQ ID NO: 1163380 - RNA, 19 nt, Artificial Sequence
  Description of Artificial Sequence: Synthetic oligonucleotide
  Sense strand starting at position 34 of SEQ ID NO: 916524
uugaaacuguucucagaac

SEQ ID NO: 1163381 - RNA, 19 nt, Artificial Sequence
  Description of Artificial Sequence: Synthetic oligonucleotide
  Antisense strand to SEQ ID NO: 1163380
guucugagaacaguuucaa

SEQ ID NO: 1163382 - RNA, 19 nt, Artificial Sequence
  Description of Artificial Sequence: Synthetic oligonucleotide
  Sense strand starting at position 167 of SEQ ID NO: 916524
gucauaagacuggaugcuu

SEQ ID NO: 1163383 - RNA, 19 nt, Artificial Sequence
  Description of Artificial Sequence: Synthetic oligonucleotide
  Antisense strand to SEQ ID NO: 1163382
aagcauccagucuuaugac

SEQ ID NO: 1163384 - RNA, 19 nt, Artificial Sequence
  Description of Artificial Sequence: Synthetic oligonucleotide
  Sense strand starting at position 775 of SEQ ID NO: 916524
gccagagacugcccagaau

SEQ ID NO: 1163385 - RNA, 19 nt, Artificial Sequence
  Description of Artificial Sequence: Synthetic oligonucleotide
  Antisense strand to SEQ ID NO: 1163384
auucugggcagucucuggc

SEQ ID NO: 1163386 - RNA, 19 nt, Artificial Sequence
  Description of Artificial Sequence: Synthetic oligonucleotide
  Sense strand starting at position 881 of SEQ ID NO: 916524
uuuagucuucuugaagggu

SEQ ID NO: 1163387 - RNA, 19 nt, Artificial Sequence
  Description of Artificial Sequence: Synthetic oligonucleotide
  Antisense strand to SEQ ID NO: 1163386
acccuucaagaagacuaaa

SEQ ID NO: 1163388 - RNA, 19 nt, Artificial Sequence
  Description of Artificial Sequence: Synthetic oligonucleotide
  Sense strand starting at position 925 of SEQ ID NO: 916524
gcuugugugaacuggaaca

SEQ ID NO: 1163389 - RNA, 19 nt, Artificial Sequence
  Description of Artificial Sequence: Synthetic oligonucleotide
  Antisense strand to SEQ ID NO: 1163388
uguuccaguucacacaagc

SEQ ID NO: 1163390 - RNA, 19 nt, Artificial Sequence
  Description of Artificial Sequence: Synthetic oligonucleotide
  Sense strand starting at position 1013 of SEQ ID NO: 916524
ugaccauggcuuuguaaag

SEQ ID NO: 1163391 - RNA, 19 nt, Artificial Sequence
  Description of Artificial Sequence: Synthetic oligonucleotide
  Antisense strand to SEQ ID NO: 1163390
cuuuacaaagccaugguca

SEQ ID NO: 1163392 - RNA, 19 nt, Artificial Sequence
  Description of Artificial Sequence: Synthetic oligonucleotide
  Sense strand starting at position 1014 of SEQ ID NO: 916524
gaccauggcuuuguaaaga

SEQ ID NO: 1163393 - RNA, 19 nt, Artificial Sequence
  Description of Artificial Sequence: Synthetic oligonucleotide
  Antisense strand to SEQ ID NO: 1163392
ucuuuacaaagccaugguc

SEQ ID NO: 1163394 - RNA, 19 nt, Artificial Sequence
  Description of Artificial Sequence: Synthetic oligonucleotide
  Sense strand starting at position 1038 of SEQ ID NO: 916524
gguaguuaaccuuagaguc

SEQ ID NO: 1163395 - RNA, 19 nt, Artificial Sequence
  Description of Artificial Sequence: Synthetic oligonucleotide
  Antisense strand to SEQ ID NO: 1163394
gacucuaagguuaacuacc

SEQ ID NO: 1163396 - RNA, 19 nt, Artificial Sequence
  Description of Artificial Sequence: Synthetic oligonucleotide
  Sense strand starting at position 1051 of SEQ ID NO: 916524
agagucuaaugaucccuaa

SEQ ID NO: 1163397 - RNA, 19 nt, Artificial Sequence
  Description of Artificial Sequence: Synthetic oligonucleotide
  Antisense strand to SEQ ID NO: 1163396
uuagggaucauuagacucu

SEQ ID NO: 1163398 - RNA, 19 nt, Artificial Sequence
  Description of Artificial Sequence: Synthetic oligonucleotide
  Sense strand starting at position 1234 of SEQ ID NO: 916524
cccauucuuccauggaaga

SEQ ID NO: 1163399 - RNA, 19 nt, Artificial Sequence
  Description of Artificial Sequence: Synthetic oligonucleotide
  Antisense strand to SEQ ID NO: 1163398
ucuuccauggaagaauggg

SEQ ID NO: 1163400 - RNA, 19 nt, Artificial Sequence
  Description of Artificial Sequence: Synthetic oligonucleotide
  Sense strand starting at position 1396 of SEQ ID NO: 916524
cuccuauggcuccaugagu

SEQ ID NO: 1163401 - RNA, 19 nt, Artificial Sequence
  Description of Artificial Sequence: Synthetic oligonucleotide
  Antisense strand to SEQ ID NO: 1163400
acucauggagccauaggag

SEQ ID NO: 1163402 - RNA, 19 nt, Artificial Sequence
  Description of Artificial Sequence: Synthetic oligonucleotide
  Sense strand starting at position 1998 of SEQ ID NO: 916524
gcgcuuuaugucccggaac

SEQ ID NO: 1163403 - RNA, 19 nt, Artificial Sequence
  Description of Artificial Sequence: Synthetic oligonucleotide
  Antisense strand to SEQ ID NO: 1163402
guuccgggacauaaagcgc

SEQ ID NO: 1163404 - RNA, 19 nt, Artificial Sequence
  Description of Artificial Sequence: Synthetic oligonucleotide
  Sense strand starting at position 2001 of SEQ ID NO: 916524
cuuuaugucccggaacuga

SEQ ID NO: 1163405 - RNA, 19 nt, Artificial Sequence
  Description of Artificial Sequence: Synthetic oligonucleotide
  Antisense strand to SEQ ID NO: 1163404
ucaguuccgggacauaaag

SEQ ID NO: 1163406 - RNA, 19 nt, Artificial Sequence
  Description of Artificial Sequence: Synthetic oligonucleotide
  Sense strand starting at position 2383 of SEQ ID NO: 916524
ccuucucugaucgagguuu

SEQ ID NO: 1163407 - RNA, 19 nt, Artificial Sequence
  Description of Artificial Sequence: Synthetic oligonucleotide
  Antisense strand to SEQ ID NO: 1163406
aaaccucgaucagagaagg

SEQ ID NO: 1163408 - RNA, 19 nt, Artificial Sequence
  Description of Artificial Sequence: Synthetic oligonucleotide
  Sense strand starting at position 2573 of SEQ ID NO: 916524
cucacuggaucaguaaaua

SEQ ID NO: 1163409 - RNA, 19 nt, Artificial Sequence
  Description of Artificial Sequence: Synthetic oligonucleotide
  Antisense strand to SEQ ID NO: 1163408
uauuuacugauccagugag

SEQ ID NO: 1163410 - RNA, 19 nt, Artificial Sequence
  Description of Artificial Sequence: Synthetic oligonucleotide
  Sense strand starting at position 2633 of SEQ ID NO: 916524
gcgugugaggauuagauca

SEQ ID NO: 1163411 - RNA, 19 nt, Artificial Sequence
  Description of Artificial Sequence: Synthetic oligonucleotide
  Antisense strand to SEQ ID NO: 1163410
ugaucuaauccucacacgc

SEQ ID NO: 1163412 - RNA, 19 nt, Artificial Sequence
  Description of Artificial Sequence: Synthetic oligonucleotide
  Sense strand starting at position 2692 of SEQ ID NO: 916524
gugaacuuuaugggcagua

SEQ ID NO: 1163413 - RNA, 19 nt, Artificial Sequence
  Description of Artificial Sequence: Synthetic oligonucleotide
  Antisense strand to SEQ ID NO: 1163412
uacugcccauaaaguucac

SEQ ID NO: 1163414 - RNA, 19 nt, Artificial Sequence
  Description of Artificial Sequence: Synthetic oligonucleotide
  Sense strand starting at position 2693 of SEQ ID NO: 916524
ugaacuuuaugggcaguaa

SEQ ID NO: 1163415 - RNA, 19 nt, Artificial Sequence
  Description of Artificial Sequence: Synthetic oligonucleotide
  Antisense strand to SEQ ID NO: 1163414
uuacugcccauaaaguuca

SEQ ID NO: 1163416 - RNA, 19 nt, Artificial Sequence
  Description of Artificial Sequence: Synthetic oligonucleotide
  Sense strand starting at position 2735 of SEQ ID NO: 916524
guuuauuggaaagguagaa

SEQ ID NO: 1163417 - RNA, 19 nt, Artificial Sequence
  Description of Artificial Sequence: Synthetic oligonucleotide
  Antisense strand to SEQ ID NO: 1163416
uucuaccuuuccaauaaac

SEQ ID NO: 1163418 - RNA, 19 nt, Artificial Sequence
  Description of Artificial Sequence: Synthetic oligonucleotide
  Sense strand starting at position 2748 of SEQ ID NO: 916524
guagaaaugaauuguacga

SEQ ID NO: 1163419 - RNA, 19 nt, Artificial Sequence
  Description of Artificial Sequence: Synthetic oligonucleotide
  Antisense strand to SEQ ID NO: 1163418
ucguacaauucauuucuac

SEQ ID NO: 1163420 - RNA, 19 nt, Artificial Sequence
  Description of Artificial Sequence: Synthetic oligonucleotide
  Sense strand starting at position 2752 of SEQ ID NO: 916524
aaaugaauuguacgacaga

SEQ ID NO: 1163421 - RNA, 19 nt, Artificial Sequence
  Description of Artificial Sequence: Synthetic oligonucleotide
  Antisense strand to SEQ ID NO: 1163420
ucugucguacaauucauuu

SEQ ID NO: 1163422 - RNA, 19 nt, Artificial Sequence
  Description of Artificial Sequence: Synthetic oligonucleotide
  Sense strand starting at position 2835 of SEQ ID NO: 916524
gggcuaaauuaucucagag

SEQ ID NO: 1163423 - RNA, 19 nt, Artificial Sequence
  Description of Artificial Sequence: Synthetic oligonucleotide
  Antisense strand to SEQ ID NO: 1163422
cucugagauaauuuagccc

SEQ ID NO: 1163424 - RNA, 19 nt, Artificial Sequence
  Description of Artificial Sequence: Synthetic oligonucleotide
  Sense strand starting at position 3005 of SEQ ID NO: 916524
ggcucuucggaggauucga

SEQ ID NO: 1163425 - RNA, 19 nt, Artificial Sequence
  Description of Artificial Sequence: Synthetic oligonucleotide
  Antisense strand to SEQ ID NO: 1163424
ucgaauccuccgaagagcc

SEQ ID NO: 1163426 - RNA, 19 nt, Artificial Sequence
  Description of Artificial Sequence: Synthetic oligonucleotide
  Sense strand starting at position 3014 of SEQ ID NO: 916524
gaggauucgaaguguuauu

SEQ ID NO: 1163427 - RNA, 19 nt, Artificial Sequence
  Description of Artificial Sequence: Synthetic oligonucleotide
  Antisense strand to SEQ ID NO: 1163426
aauaacacuucgaauccuc

SEQ ID NO: 1163428 - RNA, 19 nt, Artificial Sequence
  Description of Artificial Sequence: Synthetic oligonucleotide
  Sense strand starting at position 3364 of SEQ ID NO: 916524
auagaauaggccuggcaca

SEQ ID NO: 1163429 - RNA, 19 nt, Artificial Sequence
  Description of Artificial Sequence: Synthetic oligonucleotide
  Antisense strand to SEQ ID NO: 1163428
ugugccaggccuauucuau

SEQ ID NO: 1163430 - RNA, 19 nt, Artificial Sequence
  Description of Artificial Sequence: Synthetic oligonucleotide
  Sense strand starting at position 3385 of SEQ ID NO: 916524
auaagugcuguauaaguuu

SEQ ID NO: 1163431 - RNA, 19 nt, Artificial Sequence
  Description of Artificial Sequence: Synthetic oligonucleotide
  Antisense strand to SEQ ID NO: 1163430
aaacuuauacagcacuuau

SEQ ID NO: 1163432 - RNA, 19 nt, Artificial Sequence
  Description of Artificial Sequence: Synthetic oligonucleotide
  Sense strand starting at position 3664 of SEQ ID NO: 916524
ccaaguaugagugguuaug

SEQ ID NO: 1163433 - RNA, 19 nt, Artificial Sequence
  Description of Artificial Sequence: Synthetic oligonucleotide
  Antisense strand to SEQ ID NO: 1163432
cauaaccacucauacuugg

SEQ ID NO: 1163434 - RNA, 19 nt, Artificial Sequence
  Description of Artificial Sequence: Synthetic oligonucleotide
  Sense strand starting at position 3675 of SEQ ID NO: 916524
ugguuauggcaucaucuga

SEQ ID NO: 1163435 - RNA, 19 nt, Artificial Sequence
  Description of Artificial Sequence: Synthetic oligonucleotide
  Antisense strand to SEQ ID NO: 1163434
ucagaugaugccauaacca

SEQ ID NO: 1163436 - RNA, 19 nt, Artificial Sequence
  Description of Artificial Sequence: Synthetic oligonucleotide
  Sense strand starting at position 3682 of SEQ ID NO: 916524
ggcaucaucugacuuucua

SEQ ID NO: 1163437 - RNA, 19 nt, Artificial Sequence
  Description of Artificial Sequence: Synthetic oligonucleotide
  Antisense strand to SEQ ID NO: 1163436
uagaaagucagaugaugcc

SEQ ID NO: 1163438 - RNA, 19 nt, Artificial Sequence
  Description of Artificial Sequence: Synthetic oligonucleotide
  Sense strand starting at position 3816 of SEQ ID NO: 916524
gacgaaacauggucuuaac

SEQ ID NO: 1163439 - RNA, 19 nt, Artificial Sequence
  Description of Artificial Sequence: Synthetic oligonucleotide
  Antisense strand to SEQ ID NO: 1163438
guuaagaccauguuucguc

SEQ ID NO: 1163440 - RNA, 19 nt, Artificial Sequence
  Description of Artificial Sequence: Synthetic oligonucleotide
  Sense strand starting at position 3824 of SEQ ID NO: 916524
auggucuuaacugggcaua

SEQ ID NO: 1163441 - RNA, 19 nt, Artificial Sequence
  Description of Artificial Sequence: Synthetic oligonucleotide
  Antisense strand to SEQ ID NO: 1163440
uaugcccaguuaagaccau

SEQ ID NO: 1163442 - RNA, 19 nt, Artificial Sequence
  Description of Artificial Sequence: Synthetic oligonucleotide
  Sense strand starting at position 3835 of SEQ ID NO: 916524
ugggcauagggugauuaua

SEQ ID NO: 1163443 - RNA, 19 nt, Artificial Sequence
  Description of Artificial Sequence: Synthetic oligonucleotide
  Antisense strand to SEQ ID NO: 1163442
uauaaucacccuaugccca

SEQ ID NO: 1163444 - RNA, 19 nt, Artificial Sequence
  Description of Artificial Sequence: Synthetic oligonucleotide
  Sense strand starting at position 3837 of SEQ ID NO: 916524
ggcauagggugauuauaua

SEQ ID NO: 1163445 - RNA, 19 nt, Artificial Sequence
  Description of Artificial Sequence: Synthetic oligonucleotide
  Antisense strand to SEQ ID NO: 1163444
uauauaaucacccuaugcc

SEQ ID NO: 1163446 - RNA, 19 nt, Artificial Sequence
  Description of Artificial Sequence: Synthetic oligonucleotide
  Sense strand starting at position 3844 of SEQ ID NO: 916524
ggugauuauauaugugaau

SEQ ID NO: 1163447 - RNA, 19 nt, Artificial Sequence
  Description of Artificial Sequence: Synthetic oligonucleotide
  Antisense strand to SEQ ID NO: 1163446
auucacauauauaaucacc

SEQ ID NO: 1163448 - RNA, 19 nt, Artificial Sequence
  Description of Artificial Sequence: Synthetic oligonucleotide
  Sense strand starting at position 3853 of SEQ ID NO: 916524
auaugugaauuaucuguga

SEQ ID NO: 1163449 - RNA, 19 nt, Artificial Sequence
  Description of Artificial Sequence: Synthetic oligonucleotide
  Antisense strand to SEQ ID NO: 1163448
ucacagauaauucacauau

SEQ ID NO: 1163450 - RNA, 19 nt, Artificial Sequence
  Description of Artificial Sequence: Synthetic oligonucleotide
  Sense strand starting at position 3855 of SEQ ID NO: 916524
augugaauuaucugugaga

SEQ ID NO: 1163451 - RNA, 19 nt, Artificial Sequence
  Description of Artificial Sequence: Synthetic oligonucleotide
  Antisense strand to SEQ ID NO: 1163450
ucucacagauaauucacau

SEQ ID NO: 1163452 - RNA, 19 nt, Artificial Sequence
  Description of Artificial Sequence: Synthetic oligonucleotide
  Sense strand starting at position 3856 of SEQ ID NO: 916524
ugugaauuaucugugagaa

SEQ ID NO: 1163453 - RNA, 19 nt, Artificial Sequence
  Description of Artificial Sequence: Synthetic oligonucleotide
  Antisense strand to SEQ ID NO: 1163452
uucucacagauaauucaca

SEQ ID NO: 1163454 - RNA, 19 nt, Artificial Sequence
  Description of Artificial Sequence: Synthetic oligonucleotide
  Sense strand starting at position 3857 of SEQ ID NO: 916524
gugaauuaucugugagaaa

SEQ ID NO: 1163455 - RNA, 19 nt, Artificial Sequence
  Description of Artificial Sequence: Synthetic oligonucleotide
  Antisense strand to SEQ ID NO: 1163454
uuucucacagauaauucac

SEQ ID NO: 1163456 - RNA, 19 nt, Artificial Sequence
  Description of Artificial Sequence: Synthetic oligonucleotide
  Sense strand starting at position 3904 of SEQ ID NO: 916524
cuuagcaugugauuuguau

SEQ ID NO: 1163457 - RNA, 19 nt, Artificial Sequence
  Description of Artificial Sequence: Synthetic oligonucleotide
  Antisense strand to SEQ ID NO: 1163456
auacaaaucacaugcuaag

SEQ ID NO: 1163458 - RNA, 19 nt, Artificial Sequence
  Description of Artificial Sequence: Synthetic oligonucleotide
  Sense strand starting at position 187 of SEQ ID NO: 916525
gaggcaggauuccuccaua

SEQ ID NO: 1163459 - RNA, 19 nt, Artificial Sequence
  Description of Artificial Sequence: Synthetic oligonucleotide
  Antisense strand to SEQ ID NO: 1163458
uauggaggaauccugccuc

SEQ ID NO: 1163460 - RNA, 19 nt, Artificial Sequence
  Description of Artificial Sequence: Synthetic oligonucleotide
  Sense strand starting at position 210 of SEQ ID NO: 916525
auuggaauuucccaaagaa

SEQ ID NO: 1163461 - RNA, 19 nt, Artificial Sequence
  Description of Artificial Sequence: Synthetic oligonucleotide
  Antisense strand to SEQ ID NO: 1163460
uucuuugggaaauuccaau

SEQ ID NO: 1163462 - RNA, 19 nt, Artificial Sequence
  Description of Artificial Sequence: Synthetic oligonucleotide
  Sense strand starting at position 463 of SEQ ID NO: 916525
gcagguguucccuaaggag

SEQ ID NO: 1163463 - RNA, 19 nt, Artificial Sequence
  Description of Artificial Sequence: Synthetic oligonucleotide
  Antisense strand to SEQ ID NO: 1163462
cuccuuagggaacaccugc

SEQ ID NO: 1163464 - RNA, 19 nt, Artificial Sequence
  Description of Artificial Sequence: Synthetic oligonucleotide
  Sense strand starting at position 549 of SEQ ID NO: 916525
uuauuaguacaauggucaa

SEQ ID NO: 1163465 - RNA, 19 nt, Artificial Sequence
  Description of Artificial Sequence: Synthetic oligonucleotide
  Antisense strand to SEQ ID NO: 1163464
uugaccauuguacuaauaa

SEQ ID NO: 1163466 - RNA, 19 nt, Artificial Sequence
  Description of Artificial Sequence: Synthetic oligonucleotide
  Sense strand starting at position 782 of SEQ ID NO: 916525
aauagcagucucuaggaau

SEQ ID NO: 1163467 - RNA, 19 nt, Artificial Sequence
  Description of Artificial Sequence: Synthetic oligonucleotide
  Antisense strand to SEQ ID NO: 1163466
auuccuagagacugcuauu

SEQ ID NO: 1163468 - RNA, 19 nt, Artificial Sequence
  Description of Artificial Sequence: Synthetic oligonucleotide
  Sense strand starting at position 1015 of SEQ ID NO: 916525
ugggaaugugacugguuga

SEQ ID NO: 1163469 - RNA, 19 nt, Artificial Sequence
  Description of Artificial Sequence: Synthetic oligonucleotide
  Antisense strand to SEQ ID NO: 1163468
ucaaccagucacauuccca

SEQ ID NO: 1163470 - RNA, 19 nt, Artificial Sequence
  Description of Artificial Sequence: Synthetic oligonucleotide
  Sense strand starting at position 1016 of SEQ ID NO: 916525
gggaaugugacugguugag

SEQ ID NO: 1163471 - RNA, 19 nt, Artificial Sequence
  Description of Artificial Sequence: Synthetic oligonucleotide
  Antisense strand to SEQ ID NO: 1163470
cucaaccagucacauuccc

SEQ ID NO: 1163472 - RNA, 19 nt, Artificial Sequence
  Description of Artificial Sequence: Synthetic oligonucleotide
  Sense strand starting at position 1175 of SEQ ID NO: 916525
aucucaauuugacaggaau

SEQ ID NO: 1163473 - RNA, 19 nt, Artificial Sequence
  Description of Artificial Sequence: Synthetic oligonucleotide
  Antisense strand to SEQ ID NO: 1163472
auuccugucaaauugagau

SEQ ID NO: 1163474 - RNA, 19 nt, Artificial Sequence
  Description of Artificial Sequence: Synthetic oligonucleotide
  Sense strand starting at position 1231 of SEQ ID NO: 916525
cuuaaugggagcuguccau

SEQ ID NO: 1163475 - RNA, 19 nt, Artificial Sequence
  Description of Artificial Sequence: Synthetic oligonucleotide
  Antisense strand to SEQ ID NO: 1163474
auggacagcucccauuaag

SEQ ID NO: 1163476 - RNA, 19 nt, Artificial Sequence
  Description of Artificial Sequence: Synthetic oligonucleotide
  Sense strand starting at position 1371 of SEQ ID NO: 916525
gauggcugaucagcacaaa

SEQ ID NO: 1163477 - RNA, 19 nt, Artificial Sequence
  Description of Artificial Sequence: Synthetic oligonucleotide
  Antisense strand to SEQ ID NO: 1163476
uuugugcugaucagccauc

SEQ ID NO: 1163478 - RNA, 19 nt, Artificial Sequence
  Description of Artificial Sequence: Synthetic oligonucleotide
  Sense strand starting at position 1383 of SEQ ID NO: 916525
gcacaaaguccagacuguu

SEQ ID NO: 1163479 - RNA, 19 nt, Artificial Sequence
  Description of Artificial Sequence: Synthetic oligonucleotide
  Antisense strand to SEQ ID NO: 1163478
aacagucuggacuuugugc

SEQ ID NO: 1163480 - RNA, 19 nt, Artificial Sequence
  Description of Artificial Sequence: Synthetic oligonucleotide
  Sense strand starting at position 1408 of SEQ ID NO: 916525
gaggguguggcucacuuaa

SEQ ID NO: 1163481 - RNA, 19 nt, Artificial Sequence
  Description of Artificial Sequence: Synthetic oligonucleotide
  Antisense strand to SEQ ID NO: 1163480
uuaagugagccacacccuc

SEQ ID NO: 1163482 - RNA, 19 nt, Artificial Sequence
  Description of Artificial Sequence: Synthetic oligonucleotide
  Sense strand starting at position 1465 of SEQ ID NO: 916525
gcucccucuagguaggaaa

SEQ ID NO: 1163483 - RNA, 19 nt, Artificial Sequence
  Description of Artificial Sequence: Synthetic oligonucleotide
  Antisense strand to SEQ ID NO: 1163482
uuuccuaccuagagggagc

SEQ ID NO: 1163484 - RNA, 19 nt, Artificial Sequence
  Description of Artificial Sequence: Synthetic oligonucleotide
  Sense strand starting at position 1497 of SEQ ID NO: 916525
gcguuagcugagaggcuua

SEQ ID NO: 1163485 - RNA, 19 nt, Artificial Sequence
  Description of Artificial Sequence: Synthetic oligonucleotide
  Antisense strand to SEQ ID NO: 1163484
uaagccucucagcuaacgc

SEQ ID NO: 1163486 - RNA, 19 nt, Artificial Sequence
  Description of Artificial Sequence: Synthetic oligonucleotide
  Sense strand starting at position 1502 of SEQ ID NO: 916525
agcugagaggcuuaacuaa

SEQ ID NO: 1163487 - RNA, 19 nt, Artificial Sequence
  Description of Artificial Sequence: Synthetic oligonucleotide
  Antisense strand to SEQ ID NO: 1163486
uuaguuaagccucucagcu

SEQ ID NO: 1163488 - RNA, 19 nt, Artificial Sequence
  Description of Artificial Sequence: Synthetic oligonucleotide
  Sense strand starting at position 1543 of SEQ ID NO: 916525
cucccaaauuuggaaauga

SEQ ID NO: 1163489 - RNA, 19 nt, Artificial Sequence
  Description of Artificial Sequence: Synthetic oligonucleotide
  Antisense strand to SEQ ID NO: 1163488
ucauuuccaaauuugggag

SEQ ID NO: 1163490 - RNA, 19 nt, Artificial Sequence
  Description of Artificial Sequence: Synthetic oligonucleotide
  Sense strand starting at position 1741 of SEQ ID NO: 916525
cgagacacgucuuuacaaa

SEQ ID NO: 1163491 - RNA, 19 nt, Artificial Sequence
  Description of Artificial Sequence: Synthetic oligonucleotide
  Antisense strand to SEQ ID NO: 1163490
uuuguaaagacgugucucg

SEQ ID NO: 1163492 - RNA, 19 nt, Artificial Sequence
  Description of Artificial Sequence: Synthetic oligonucleotide
  Sense strand starting at position 1758 of SEQ ID NO: 916525
aagagugucuuccuagcaa

SEQ ID NO: 1163493 - RNA, 19 nt, Artificial Sequence
  Description of Artificial Sequence: Synthetic oligonucleotide
  Antisense strand to SEQ ID NO: 1163492
uugcuaggaagacacucuu

SEQ ID NO: 1163494 - RNA, 19 nt, Artificial Sequence
  Description of Artificial Sequence: Synthetic oligonucleotide
  Sense strand starting at position 1943 of SEQ ID NO: 916525
guaauaauaccucacaugu

SEQ ID NO: 1163495 - RNA, 19 nt, Artificial Sequence
  Description of Artificial Sequence: Synthetic oligonucleotide
  Antisense strand to SEQ ID NO: 1163494
acaugugagguauuauuac

SEQ ID NO: 1163496 - RNA, 19 nt, Artificial Sequence
  Description of Artificial Sequence: Synthetic oligonucleotide
  Sense strand starting at position 1951 of SEQ ID NO: 916525
accucacauguguauagau

SEQ ID NO: 1163497 - RNA, 19 nt, Artificial Sequence
  Description of Artificial Sequence: Synthetic oligonucleotide
  Antisense strand to SEQ ID NO: 1163496
aucuauacacaugugaggu

SEQ ID NO: 1163498 - RNA, 19 nt, Artificial Sequence
  Description of Artificial Sequence: Synthetic oligonucleotide
  Sense strand starting at position 1993 of SEQ ID NO: 916525
cuugcauugccucacugaa

SEQ ID NO: 1163499 - RNA, 19 nt, Artificial Sequence
  Description of Artificial Sequence: Synthetic oligonucleotide
  Antisense strand to SEQ ID NO: 1163498
uucagugaggcaaugcaag

SEQ ID NO: 1163500 - RNA, 19 nt, Artificial Sequence
  Description of Artificial Sequence: Synthetic oligonucleotide
  Sense strand starting at position 2200 of SEQ ID NO: 916525
auucgucagcacuaggaua

SEQ ID NO: 1163501 - RNA, 19 nt, Artificial Sequence
  Description of Artificial Sequence: Synthetic oligonucleotide
  Antisense strand to SEQ ID NO: 1163500
uauccuagugcugacgaau

SEQ ID NO: 1163502 - RNA, 19 nt, Artificial Sequence
  Description of Artificial Sequence: Synthetic oligonucleotide
  Sense strand starting at position 2220 of SEQ ID NO: 916525
ugaguaagacccugagcua

SEQ ID NO: 1163503 - RNA, 19 nt, Artificial Sequence
  Description of Artificial Sequence: Synthetic oligonucleotide
  Antisense strand to SEQ ID NO: 1163502
uagcucagggucuuacuca

SEQ ID NO: 1163504 - RNA, 19 nt, Artificial Sequence
  Description of Artificial Sequence: Synthetic oligonucleotide
  Sense strand starting at position 2223 of SEQ ID NO: 916525
guaagacccugagcuaaug

SEQ ID NO: 1163505 - RNA, 19 nt, Artificial Sequence
  Description of Artificial Sequence: Synthetic oligonucleotide
  Antisense strand to SEQ ID NO: 1163504
cauuagcucagggucuuac

SEQ ID NO: 1163506 - RNA, 19 nt, Artificial Sequence
  Description of Artificial Sequence: Synthetic oligonucleotide
  Sense strand starting at position 2563 of SEQ ID NO: 916525
gagaaagcugaguggaagu

SEQ ID NO: 1163507 - RNA, 19 nt, Artificial Sequence
  Description of Artificial Sequence: Synthetic oligonucleotide
  Antisense strand to SEQ ID NO: 1163506
acuuccacucagcuuucuc

SEQ ID NO: 1163508 - RNA, 19 nt, Artificial Sequence
  Description of Artificial Sequence: Synthetic oligonucleotide
  Sense strand starting at position 2590 of SEQ ID NO: 916525
aacauaaugcuauguguag

SEQ ID NO: 1163509 - RNA, 19 nt, Artificial Sequence
  Description of Artificial Sequence: Synthetic oligonucleotide
  Antisense strand to SEQ ID NO: 1163508
cuacacauagcauuauguu

SEQ ID NO: 1163510 - RNA, 19 nt, Artificial Sequence
  Description of Artificial Sequence: Synthetic oligonucleotide
  Sense strand starting at position 2755 of SEQ ID NO: 916525
uguucucuaggccaggaau

SEQ ID NO: 1163511 - RNA, 19 nt, Artificial Sequence
  Description of Artificial Sequence: Synthetic oligonucleotide
  Antisense strand to SEQ ID NO: 1163510
auuccuggccuagagaaca

SEQ ID NO: 1163512 - RNA, 19 nt, Artificial Sequence
  Description of Artificial Sequence: Synthetic oligonucleotide
  Sense strand starting at position 2871 of SEQ ID NO: 916525
ggcacucucagguguaaga

SEQ ID NO: 1163513 - RNA, 19 nt, Artificial Sequence
  Description of Artificial Sequence: Synthetic oligonucleotide
  Antisense strand to SEQ ID NO: 1163512
ucuuacaccugagagugcc

SEQ ID NO: 1163514 - RNA, 19 nt, Artificial Sequence
  Description of Artificial Sequence: Synthetic oligonucleotide
  Sense strand starting at position 2882 of SEQ ID NO: 916525
guguaagaacaaugacaug

SEQ ID NO: 1163515 - RNA, 19 nt, Artificial Sequence
  Description of Artificial Sequence: Synthetic oligonucleotide
  Antisense strand to SEQ ID NO: 1163514
caugucauuguucuuacac

SEQ ID NO: 1163516 - RNA, 19 nt, Artificial Sequence
  Description of Artificial Sequence: Synthetic oligonucleotide
  Sense strand starting at position 2955 of SEQ ID NO: 916525
guucucuggacaugggaau

SEQ ID NO: 1163517 - RNA, 19 nt, Artificial Sequence
  Description of Artificial Sequence: Synthetic oligonucleotide
  Antisense strand to SEQ ID NO: 1163516
auucccauguccagagaac

SEQ ID NO: 1163518 - RNA, 19 nt, Artificial Sequence
  Description of Artificial Sequence: Synthetic oligonucleotide
  Sense strand starting at position 3052 of SEQ ID NO: 916525
auccaagucagcugggauu

SEQ ID NO: 1163519 - RNA, 19 nt, Artificial Sequence
  Description of Artificial Sequence: Synthetic oligonucleotide
  Antisense strand to SEQ ID NO: 1163518
aaucccagcugacuuggau

SEQ ID NO: 1163520 - RNA, 19 nt, Artificial Sequence
  Description of Artificial Sequence: Synthetic oligonucleotide
  Sense strand starting at position 3208 of SEQ ID NO: 916525
ggguuacagaaauggucua

SEQ ID NO: 1163521 - RNA, 19 nt, Artificial Sequence
  Description of Artificial Sequence: Synthetic oligonucleotide
  Antisense strand to SEQ ID NO: 1163520
uagaccauuucuguaaccc

SEQ ID NO: 1163522 - RNA, 19 nt, Artificial Sequence
  Description of Artificial Sequence: Synthetic oligonucleotide
  Sense strand starting at position 3209 of SEQ ID NO: 916525
gguuacagaaauggucuau

SEQ ID NO: 1163523 - RNA, 19 nt, Artificial Sequence
  Description of Artificial Sequence: Synthetic oligonucleotide
  Antisense strand to SEQ ID NO: 1163522
auagaccauuucuguaacc

SEQ ID NO: 1163524 - RNA, 19 nt, Artificial Sequence
  Description of Artificial Sequence: Synthetic oligonucleotide
  Sense strand starting at position 3221 of SEQ ID NO: 916525
ggucuauauccugauugug

SEQ ID NO: 1163525 - RNA, 19 nt, Artificial Sequence
  Description of Artificial Sequence: Synthetic oligonucleotide
  Antisense strand to SEQ ID NO: 1163524
cacaaucaggauauagacc

SEQ ID NO: 1163526 - RNA, 19 nt, Artificial Sequence
  Description of Artificial Sequence: Synthetic oligonucleotide
  Sense strand starting at position 3236 of SEQ ID NO: 916525
ugugguagugguuauacaa

SEQ ID NO: 1163527 - RNA, 19 nt, Artificial Sequence
  Description of Artificial Sequence: Synthetic oligonucleotide
  Antisense strand to SEQ ID NO: 1163526
uuguauaaccacuaccaca

SEQ ID NO: 1163528 - RNA, 19 nt, Artificial Sequence
  Description of Artificial Sequence: Synthetic oligonucleotide
  Sense strand starting at position 3686 of SEQ ID NO: 916525
gcugauuucugacaaauug

SEQ ID NO: 1163529 - RNA, 19 nt, Artificial Sequence
  Description of Artificial Sequence: Synthetic oligonucleotide
  Antisense strand to SEQ ID NO: 1163528
caauuugucagaaaucagc

SEQ ID NO: 1163530 - RNA, 19 nt, Artificial Sequence
  Description of Artificial Sequence: Synthetic oligonucleotide
  Sense strand starting at position 3814 of SEQ ID NO: 916525
gaagacauuuggugguaga

SEQ ID NO: 1163531 - RNA, 19 nt, Artificial Sequence
  Description of Artificial Sequence: Synthetic oligonucleotide
  Antisense strand to SEQ ID NO: 1163530
ucuaccaccaaaugucuuc

SEQ ID NO: 1163532 - RNA, 19 nt, Artificial Sequence
  Description of Artificial Sequence: Synthetic oligonucleotide
  Sense strand starting at position 3878 of SEQ ID NO: 916525
ucauacuuagacuggacua

SEQ ID NO: 1163533 - RNA, 19 nt, Artificial Sequence
  Description of Artificial Sequence: Synthetic oligonucleotide
  Antisense strand to SEQ ID NO: 1163532
uaguccagucuaaguauga

SEQ ID NO: 1163534 - RNA, 19 nt, Artificial Sequence
  Description of Artificial Sequence: Synthetic oligonucleotide
  Sense strand starting at position 3895 of SEQ ID NO: 916525
uaagaugugccaggcaaca

SEQ ID NO: 1163535 - RNA, 19 nt, Artificial Sequence
  Description of Artificial Sequence: Synthetic oligonucleotide
  Antisense strand to SEQ ID NO: 1163534
uguugccuggcacaucuua

SEQ ID NO: 1163536 - RNA, 19 nt, Artificial Sequence
  Description of Artificial Sequence: Synthetic oligonucleotide
  Sense strand starting at position 3914 of SEQ ID NO: 916525
agcuaagugcuuuacauca

SEQ ID NO: 1163537 - RNA, 19 nt, Artificial Sequence
  Description of Artificial Sequence: Synthetic oligonucleotide
  Antisense strand to SEQ ID NO: 1163536
ugauguaaagcacuuagcu

SEQ ID NO: 1163538 - RNA, 19 nt, Artificial Sequence
  Description of Artificial Sequence: Synthetic oligonucleotide
  Sense strand starting at position 118 of SEQ ID NO: 916526
agcugaagauucuugagca
